United States Patent Application Publication US 2020/0163878 A1 - sequence listing, part 15

SEQ ID NO: 57053 - RNA, 1410 nt, Artificial Sequence
  derived and/or modified CDS sequence (wt) from neuraminidase__InfluenzaA__AHL99775
augaauccaaaucaaaagauaauaacgauuggcucuguuucucucaccauuuccacaauaugcuucuucaugcaaauugccaucuugauaacuacuguaacauugcauuucaagcaauaugaauucaacucccccccaaacaaccaagugaugcugugugaaccaacaauaauagaaagaaacauaacagagauaguguaucugaccaacaccaccauagagaaggaaauaugccccaaaccagcagaauacagaaauuggucaaaaccgcaauguggcauuacaggauuugcaccuuucucuaaggacaauucgauuaggcuuuccgcugguggggacaucugggugacaagagaaccuuaugugucaugcgauccugacaaguguuaucaauuugcccuuggacagggaacaacacuaaacaacgugcauucaaauaacacaguacgugauaggaccccuuaucggacucuauugaugaaugaguuggguguuccuuuucaucuggggaccaagcaagugugcauagcaugguccagcucaaguugucacgauggaaaagcauggcugcauguuuguauaacgggggaugauaaaaaugcaacugcuagcuucauuuacaaugggaggcuuguagauaguguuguuucaugguccaaagaaauucucaggacccaggagucagaaugcguuuguaucaauggaacuuguacaguaguaaugacugauggaagugcuucaggaaaagcugauacuaaaauacuauucauugaggaggggaaaaucguucauacuagcacauugucaggaagugcucagcaugucgaagagugcucuugcuauccucgauauccuggugucagaugugucugcagagacaacuggaaaggcuccaaucggcccaucguagauauaaacauaaaggaucauagcauuguuuccaguuauguguguucaggacuuguuggagacacacccagaaaaaacgacagcuccagcaguagccauuguuuggauccuaacaaugaagaagguggucauggagugaaaggcugggccuuugaugauggaaaugacguguggaugggaagaacaaucaacgagacgucacgcuuaggguaugaaaccuucaaagucauugaaggcugguccaacccuaaguccaaauugcagauaaauaggcaagucauaguugacaggggugauagguccgguuauucugguauuuucucuguugaaggcaaaagcugcaucaaucggugcuuuuauguggaguugauuaggggaagaaaagaggaaacugaagucuuguggaccucaaacaguauuguuguguuuuguggcaccucagguacauauggaacaggcucauggccugauggggcggaccucaaucucaugccuauauaa

SEQ ID NO: 57054 - RNA, 1410 nt, Artificial Sequence
  derived and/or modified CDS sequence (wt) from neuraminidase__InfluenzaA__AHL99787
augaauccaaaucaaaagauaauaacgauuggcucuguuucucucaccauuuccacaauaugcuucuucaugcaaauugccaucuugauaacuacuguaacauugcauuucaagcaauaugaauucaacucccccccaaacaaccaagugaugcugugugaaccaacaauaauagaaagaaacauaacagagauaguguaucugaccaacaccaccauagagaaggaaauaugccccaaaccagcagaauacagaaauuggucaaaaccgcaauguggcauuacaggauuugcaccuuucucuaaggacaauucgauuaggcuuuccgcugguggggacaucugggugacaagagaaccuuaugugucaugcgauccugacaaguguuaucaauuugcccuuggacagggaacaacacuaaacaacgugcauucaaauaacacaguacgugauaggaccccuuaucggacucuauugaugaaugaguuggguguuccuuuucaucuggggaccaagcaagugugcauagcaugguccagcucaaguugucacgauggaaaagcauggcugcauguuuguauaacgggggaugauaaaaaugcaacugcuagcuucauuuacaaugggaggcuuguagauaguguuguuucaugguccaaagaaauucucaggacccaggagucagaaugcguuuguaucaauggaacuuguacaguaguaaugacugauggaagugcuucaggaaaagcugacacuaaaauacuauucauugaggaggggaaaaucguucauacuagcacauugucaggaagugcucagcaugucgaagagugcucuugcuauccucgauauccuggugucagaugugucugcagagacaacuggaaaggcuccaaucggcccaucguagauauaaacauaaaggaucauagcauuguuuccaguuauguguguucaggacuuguuggagacacacccagaaaaaacgacagcuccagcaguagccauuguuuggauccuaacaaugaagaagguggucauggagugaaaggcugggccuuugaugauggaaaugacguguggaugggaagaacaaucaacgagacgucacgcuuaggguaugaaaccuucaaagucauugaaggcugguccaauccugaguccaaauugcagauaaauaggcaagucauaguugacagaggugauagguccgguuauucugguauuuucucuguugaaggcaaaagcugcaucaaucggugcuuuuauguagaguugauuaggggaagaaaagaggaaacugaagucuuguggaccucaaacaguauuguuguguuuuguggcaccucagguacauauggaacaggcucauggccugauggggcggaccucaaucucaugccuauauaa

SEQ ID NO: 57055 - RNA, 1410 nt, Artificial Sequence
  derived and/or modified CDS sequence (wt) from neuraminidase__InfluenzaA__AHL99799
augaauccaaaucaaaagauaauaacgauuggcucuguuucucucaccauuuccacaauaugcuucuucaugcaaauugccaucuugauaacuacuguaacauugcauuucaagcaauaugaauucaacucccccccaaacaaccaagugaugcugugugaaccaacaauaauagaaagaaacauaacagagauaguguaucugaccaacaccaccauagagaaggaaauaugccccaaaccagcagaauacagaaauuggucaaaaccgcaauguggcauuacaggauuugcaccuuucucuaaggacaauucgauuaggcuuuccgcugguggggacaucugggugacaagagaaccuuaugugucaugcgauccugacaaguguuaucaauuugcccuuggacagggaacaacacuaaacaacgugcauucaaauaacacaguacgugauaggaccccuuaucggacucuauugaugaaugaguuggguguuccuuuucaucuggggacuaagcaagugugcauagcaugguccagcucaaguugucacgauggaaaagcauggcugcauguuuguauaacgggggaugauaaaaaugcaacugcuagcuucauuuacaaugggaggcuuguagauaguguuguuucaugguccaaagaaauucucaggacccaggagucagaaugcguuuguaucaauggaacuuguacaguaguaaugacugauggaagugcuucaggaaaagcugauacuaaaauacuauucauugaggaggggaaaaucguucauacuagcacauugucaggaagugcucagcaugucgaagagugcucuugcuauccucgauauccuggugucagauguaucugcagagacaacuggaaaggcuccaaucggcccaucguagauauaaacauaaaggaucauagcauuguuuccaguuauguguguucaggacuuguuggagacacacccagaaaaaacgacagcuccagcaguagccauuguuuggguccuaacaaugaagaagguggucauggagugaaaggcugggccuuugaugauggaaaugacguguggaugggaagaacaaucaacgagacgucacgcuuaggguaugaaacauucaaagucauugaaggcugguccaauccuaaguccaaauugcagauaaauaggcaagucauaguugacagaggugauagguccgguuauucugguauuuucucuguugaaggcaaaagcugcaucaaucggugcuuuuauguagaguugauuaggggaagaaaagaggaaacugaagucuuguggaccucaaacaguauuguuguguuuuguggcaccucagguacauauggaacaggcucauggccugauggggcggaccucaaucucaugccuauauaa

SEQ ID NO: 57056 - RNA, 1410 nt, Artificial Sequence; identical to SEQ ID NO: 55922
  derived and/or modified CDS sequence (wt) from neuraminidase__InfluenzaA__AHL99811

SEQ ID NO: 57057 - RNA, 1410 nt, Artificial Sequence
  derived and/or modified CDS sequence (wt) from neuraminidase__InfluenzaA__AHL99823
augaauccaaaucaaaagauaauaacgauugguucuguuucucucaccauuuccacaauaugcuucuucaugcaaauugccaucuugauaacuacuguaacauugcacuucaagcaauaugaguucaacucccccccaaacaaccaagugaugcugugugaaccaacaauaauagaaagaaacauaacagagauaguguaucugaccaacaccaccauagagaaggaaauaugccccaaaccagcagaauacagaaauuggucaaaaccgcaauguggcauuacaggauuugcaccuuucucuaaggacaauucgauuaggcuuuccgcugguggggacaucugggugacaagagaaccuuaugugucaugcgauccugacaaguguuaucaauuugcccuuggacagggaacaacacuaaacaacgugcauucaaauaacacaguacgugauaggaccccuuaucggacucuauugaugaaugaguuggguguuccuuuucaucuggggaccaagcaagugugcauagcaugguccagcucaaguugccacgauggaaaagcauggcugcauguuuguauaacgggggaugauaaaaaugcaacugcuagcuucauuuacaaugggaggcuuguagauaguguuguuucaugguccaaagaaauucucaggacccaggagucagaaugcguuuguaucaauggaacuugugcaguaguaaugacugauggaagugcuucaggaaaagcugauacuaaaauacuauucauugaggaggggaaaaucguucauacuagcacauuaucaggaagugcucagcaugucgaagagugcucuugcuauccucgauauccuggugucagaugugucugcagagacaacuggaaaggcuccaaucggcccaucguagauauaaacauaaaggaucauagcauuguuuccaguuauguguguucaggacuuguuggagacacacccagaaaaaacgacagcuccagcaguagccauuguuuggauccuaacaaugaagaagguggucauggagugaaaggcugggccuuugaugauggaaaugacguguggaugggaagaacaaucaacgagacgucacgcuuaggguaugaaaccuucaaagucauugaaggcugguccaacccuaaguccaaauugcagauaaauaggcaagucauaguugacagaggugauagguccgguuauucugguauuuucucuguugaaggcaaaagcugcaucaaucggugcuuuuauguggaguugauuaggggaagaaaagaggaaacugaagucuuguggaccucaaacaguauuguuguguuuuguggcaccucagguacauauggaacaggcucauggccugauggggcggaccucaaucucaugccuauauaa

SEQ ID NO: 57058 - RNA, 1410 nt, Artificial Sequence
  derived and/or modified CDS sequence (wt) from neuraminidase__InfluenzaA__AHL99835
augaauccaaaucaaaagauaauaacgauuggcucuguuucucucaccauuuccacaauaugcuucuucaugcaaauugccaucuugauaacuacuguaacauugcauuucaagcaauaugaauucaacucccccccaaacaaccaagugaugcugugugaaccaacaauaauagaaagaaacauaacagagauaguguauuugaccaacaccaccauagagaaggaaauaugccccaaaccagcagaauacagaaauuggucaaaaccgcaauguggcauuacaggauuugcaccuuucucuaaggacaauucgauuaggcuuuccgcugguggggacaucugggugacaagagaaccuuaugugucaugcgcuccugacaaguguuaucaauuugcccuuggacagggaacaacacuaaacaacgugcauucaaauaacacaguacgugauaggaccccuuaucggacucuauugaugaaugaguuggguguuccuuuucaucuggggaccaagcaagugugcauagcaugguccagcucaaguugucacgauggaaaagcauggcugcauguuuguauaacgggggaugauaaaaaugcaacugcuagcuucauuuacaaugggaggcuuguagauaguguuguuucaugguccaaagaaauucucaggacccaggagucagaaugcguuuguaucaauggaacuuguacaguaguaaugacugauggaagugcuucaggaaaagcugauacuaaaauacuauucauugaggaggggaaaaucguucauacuagcacauugucaggaagugcucagcaugucgaagagugcucuugcuauccucgauauccuggugucagaugugucugcagagacaacuggaaaggcuccaaucggcccaucguagauauaaacauaaaggaucauagcauuguuuccaguuauguguguucaggacuuguuggagacacacccagaaaaaacgacagcuccagcaguagccauuguuuggauccuaacaaugaagaagguggucauggagugaaaggcugggccuuugaugauggaaaugacguauggaugggaagaacaaucaacgagacgucacgcuuaggguaugaaaccuucaaagucauugaaggcugguccaacccuaaguccaaauugcugauaaauaggcaagucauaguugacagaggugauagguccgguuauucugguauuuucucuguugaaggcaaaagcugcaucaaucggugcuuuuauguggaguugauuaggggaagaaaagaggaaacugaagucuuguggaccucaaacaguauuguuguguuuuguggcaccucagguacauauggaacaggcucauggccugauggggcggaccucaaucucaugccuauauaa

SEQ ID NO: 57059 - RNA, 1410 nt, Artificial Sequence
  derived and/or modified CDS sequence (wt) from neuraminidase__InfluenzaA__AHL99847
augaauccaaaucaaaagauaauaacgauuggcucuguuucucucaccauuuccacaauaugcuucuucaugcaaauugccaucuugauaacuacuguaacauugcauuucaagcaauaugaauucaacucccccccaaacaaccaagugaugcugugugaaccaacaauaauagaaagaaacauaacagagauaguguaucugaccaacaccaccauagagaaggaaauaugccccaaaccagcagaauacagaaauuggucaaaaccgcaauguggcauuacaggauuugcaccuuucucuaaggacaauucgauuaggcuuuccgcugguggggacaucugggugacaagagaaccuuaugugucaugcgauccugacaaguguuaucaauuugcccuuggacagggaacaacacuaaacaacgugcauucaaauaacacaguacgugauaggaccccuuaucggacucuauugaugaaugaguuggguguucccuuucaucuggggaccaagcaagugugcauagcaugguccagcucaaguugucacgauggaaaagcauggcugcauguuuguauaacgggggaugauaaaaaugcaacugcuagcuucauuuacaaugggaggcuuguagauaguguuguuucaugguccaaagaaauucucaggacccaggagucagaaugcguuuguaucaauggaacuuguacaguaguaaugacugauggaagugcuucaggaaaagcugauacuaaaauacuauucauugaggaggggaaaauuguucauacuagcacauugucaggaagugcucagcaugucgaagagugcucuugcuauccucgauauccuggugucagaugugucugcagagacaacuggaaaggcuccaaucggcccaucguagauauaaacauaaaggaucauagcauuguuuccaguuauguguguucaggacuuguuggagacacacccagaaaaaacgacagcuccagcaguagccauuguuuggauccuaacaaugaagaagguggucauggggugaaaggcugggccuuugaugauggaaaugacguguggaugggaagaacaaucaacgagacgucacgcuuaggguaugaaaccuucaaagucauugaaggcugguccaauccuaaguccaaauugcagauaaauaggcaagucauaguugacagaggugauagguccgguuauucugguauuuucucuguugaaggcaaaagcugcaucaaucggugcuuuuauguagaguugauuaggggaagaaaagaggaaacugaagucuuguggaccucaaacaguauuguuguguuuuguggcaccucagguacauauggaacaggcucauggccugauggggcggaccucaaucucaugccuauauaa

SEQ ID NO: 57060 - RNA, 1410 nt, Artificial Sequence; identical to SEQ ID NO: 55976
  derived and/or modified CDS sequence (wt) from neuraminidase__InfluenzaA__AHL99859

SEQ ID NO: 57061 - RNA, 1410 nt, Artificial Sequence
  derived and/or modified CDS sequence (wt) from neuraminidase__InfluenzaA__AHL99871
augaauccaaaucaaaagauaauaacgauuggcucuguuucucucaccauuuccacaauaugcuucuucaugcaaauugccaucuugacaacuacuguaacauugcauuucaagcaauaugaauucaauucccccccaaacaaccaagugaugcugugugaaccaacaauaauagaaagaaacauaacagagauaguguaucuaaccaacaccaccauagagaaggaaauaugccccaaaccagcagaauacagaaauuggucaaagccgcagugugacauuacaggauuugcaccuuuuucuaaggacaauucgauuaggcuuuccgcugguggggacaucugggugacaagagaaccuuaugugucaugcgauccugacaaguguuaucaauuugcucuuggacagggaacaacacuaaacaacgugcauucaaauaacacaguacgugauaggaccccuuaucggacccuauugaugaaugaguuagguguuccuuuucaucuggggaccaagcaagugugcauagcaugguccagcucaaguugucacgauggaaaagcauggcugcauguuuguauaacgggggaugauaaaaaugcaacugcuagcuucauuuacaaugggaggcuuguagauaguguuguuucaugguccaaagaaauccucaggacccaggaaucagaaugcguuuguaucaauggaacuuguacaguaguaaugacugaugggagugcuucaggaaaagcugauacuaaaauacuauucauugaggaggggagaaucguucauacuagcacauugucaggaagugcucagcaugucgaggagugcucuugcuauccucgauauccuggugucagaugugucugcagagacaacuggaaaggcuccaauaggccuaucguagauauaaacauaaaggaucauagcauuguuuccagguauguguguucaggacuuguuggagacacacccagaaaaaacgacagcucaagcaguagccauuguuuggauccuaacaaugaagaagguggucauggagugaaaggcugggccuucgaugauggaaaugacguguggaugggaagaacgaucaacgagacgucacguuuaggguaugaaaccuucaaagucauugaaggcugguccaacccuaaguccaaauugcagauaaauaggcaggucauaguugacagaggugauagguccgguuauucugguauuuucucuguugaaggcaaaagcugcaucaaucggugcuuuuauguggaguugauuaggggaagaaaagaggaaacugaagucuuguggaccucaaacaguauuguuguguuuuguggcaccucagguacauauggaacaggcucauggccugauggggcggaccucaaucucaugccuauauaa

SEQ ID NO: 57062 - RNA, 1410 nt, Artificial Sequence
  derived and/or modified CDS sequence (wt) from neuraminidase__InfluenzaA__AHL99883
augaauccaaaucaaaagauaauaacgauuggcucuguuucucucaccauuuccacaauaugcuucuucaugcaaauugccaucuugauaacuacuguaacauugcauuucaagcaauaugaauucaacucccccccaaacaaccaagugaugcugugugaaccaacaauaauagaaagaaacauaacagagauaguguaucuaaccaacaccaccauagagaaggaaauaugccccaaaccagcagaauacagaaauuggucaaaaccgcaauguggcauuacaggauuugcaccuuucucuaaggacaauucgauuaggcuauccgcugguggggacaucugggugacaagagaaccuuaugugucaugcgauccugacaaguguuaucaauuugcccuuggacagggaacaacacuaaacaacgugcauucaaauaacacaguacgugauaggaccccuuaucggacucuauugaugaaugaguuggguguuccuuuucaucuggggaccaagcaagugugcauagcaugguccagcucaaguugucacgauggaaaagcauggcugcauguuuguauaacgggggaugauaaaaaugcaacugcuagcuuuauuuacaaugggaggcuuguagauaguguuguuucaugguccaaagaaauucucaggacccaggagucagaaugcguuuguaucaauggaacuuguacaguaguaaugacugauggaagugcuucagggaaagcugauacuaaaauacuauucauugaggaggggaaaaucguucauacuagcacauugucaggaagugcucagcaugucgaagagugcucuugcuauccucgauauccuggugucagaugugucugcagagacaacuggaaaggcuccaaucggcccaucguagauauaaacauaaaggaucauagcauuguuuccaguuauguguguucaggacuuguuggagacacacccagaaaaaacgacagcuccagcaguagccauuguuuggauccuaacaaugaagaagguggucauggagugaaaggcugggccuuugaugauggaaaugacguguggaugggaagaacaaucaacgagacgucacgcuuaggguaugaaaccuucaaagucauugaaggcugguccaacccuaaguccaaauugcagauaaauaggcaggucauaguugacagaggugauagguccgguuauucugguauuuucucuguugaaggcaaaagcugcaucaaucggugcuuuuauguggaguugauuaggggaagaaaagaggaaacugaagucuuguggaccucuaacaguauuguuguguuuuguggcaccucagguacauauggaacaggcucauggccugauggggcggaccucaaucucaugccuauauaa

SEQ ID NO: 57063 - RNA, 1410 nt, Artificial Sequence
  derived and/or modified CDS sequence (wt) from neuraminidase__InfluenzaA__AHL99895
augaauccaaaucaaaagauaauaacgauuggcucuguuucucucaccauuuccacaauaugcuucuucaugcaaauugccaucuugauaacuacuguaacauugcauuucaagcaauaugaauucaacucccccccaaacaaccaagugaugcugugugaaccaacaauaauagaaagaaacauaacagagauaguguauuugaccaacaccaccauagagaaggaaauaugccccaaaccagcagaauacagaaauuggucaaaaccgcaauguggcauuacaggauuugcaccuuucucuaaggacaauucgauuaggcuuuccgcugguggggacaucugggugacaagagaaccuuaugugucaugcgauccugacaaguguuaucaauuugcccuuggacagggaacaacacuaaacaacgugcauucaaauaacacagcacgugauaggaccccuuaucggacucuauugaugaaugaguuggguguuccuuuucaucuggggaccaagcaagugugcauagcaugguccagcucaaguugucacgauggaaaagcauggcugcauguuuguauaacgggggaugauaaaaaugcaacugcuagcuucauuuacaaugggaggcuuguagauaguguuguuucaugguccaaagaaauucucaggacccaggagucagaaugcguuuguaucaauggaacuuguacaguaguaaugacugauggaagugcuucaggaaaagcugauacuaaaauacuauucauugaggaggggaaaaucguucacacuagcacauugucaggaagugcucagcaugucgaagagugcucuugcuauccucgauauccuggugucagaugugucugcagagacaacuggaaagguuccaaucggcccaucguagauauaaacauaaaggaucauagcauuguuuccaguuauguguguucaggacuuguuggagacacacccagaaaaaacgacagcuccagcaguagccauuguuugaauccuaacaaugaagaagguggucauggagugaaaggcugggccuuugaugauggaaaugacguauggaugggaagaacaaucaacgagacaucacgcuuaggguaugaaaccuucaaagucauugaaggcugguccaacccuaaguccaaauugcagauaaauaggcaagucauaguugacagaggugauagguccgguuauucugguauuuucucuguugaaggcaaaagcugcaucaaucggugcuuuuauguggaguugauuaggggaagaaaagaggaaacugaagucuuguggaccucaaacaguauuguuguguuuuguggcaccucagguacauauggaacaggcucauggccugauggggcggaccucaaccucaugccuauauaa

SEQ ID NO: 57064 - RNA, 1410 nt, Artificial Sequence
  derived and/or modified CDS sequence (wt) from neuraminidase__InfluenzaA__AHL99907
augaauccaaaucaaaagauaauaacgauuggcucuguuucucucaccauuuccacaauaugcuucuucaugcaaauugccaucuugauaacuacuguaacauugcauuucaagcaauaugaauucaacucccccccaaacaaccaagugaugcugugugaaccaacaauaauagaaagaaacauaacagagauaguguaucugaccaacaccaccauagagaaggaaauaugccccaaaccagcagaauacagaaauuggucaaaaccgcaauguggcauuacaggauuugcaccuuucucuaaggacaauucgauuaggcuuuccgcugguggggacaucugggugacaagagaaccuuaugugucaugcgauccugacaaguguuaucaauuugcccuuggacagggaacaacacuaaacaacgugcauucaaauaacacaguacgugauaggaccccuuaucggacucuauugaugaaugaguuagguguuccuuuucaucuggggaccaagcaagugugcauagcaugguccagcucaaguugucacgauggaaaagcauggcugcauguuuguauaacgggggaugauaaaaaugcaacugcuagcuucauuuacaaugggaggcuuguagauaguguuguuucaugguccaaagaaauucucaggacccaggagucagaaugcguuuguaucaauggaacuuguacaguaguaaugacugauggaagugcuucaggaaaagcugauacuaaaauacuauucauugaggaggggaaaaucguucauacuagcacauugucaggaagugcucagcaugucgaagagugcucuugcuauccucgauauccuggugucagaugugucugcagagacaacuggaaaggcuccaaucggcccaucguagauauaaacauaaaggaucauagcauuguuuccaguuauguguguucaggacuuguuggagacacacccagaaaaaacgacagcuccagcaguagccauuguuuggauccuaacaaugaagaagguggucauggagugaaaggcugggccuuugaugauggaaaugacguguggaugggaagaacaaucaacgagacgucacgcuuaggguaugaaaccuucaaagucauugaaggcugguccaacccuaaguccaaauugcagauaaauaggcaagucauaguugacagaggugauagguccgguuauucugguauuuucucuguugaaggcaaaagcugcaucaaucggugcuuuuauguggaguugauuaggggaagaaaagaggaaacugaagucuuguggaccucaaacaguauuguuguguuuuguggcaccucagguacauauggaacaggcucauggccugauggggcggaccucaaucucaugccuauauaa

SEQ ID NO: 57065 - RNA, 1410 nt, Artificial Sequence; identical to SEQ ID NO: 55880
  derived and/or modified CDS sequence (wt) from neuraminidase__InfluenzaA__AHL99919

SEQ ID NO: 57066 - RNA, 1410 nt, Artificial Sequence
  derived and/or modified CDS sequence (wt) from neuraminidase__InfluenzaA__AHL99943
augaauccaaaucaaaagauaauaacgauuggcucuguuucucucaccauuuccacaauaugcuucuucaugcaaauugccaucuugauaacuacuguaacauugcauuucaagcaacaugaauucaacucccccccaaacaaccaagugaugcugugugaaccaacaauaauagaaagaaacauaacagagauaguguaucugaccaacaccaccauagagaaagaaauaugccccaaaccagcagaauacagaaauuggucaaaaccgcaauguggcauuacaggauuugcaccuuucucuaaggacaauucgauuaggcuuuccgcugguggggacaucugggugacaagagaaccuuaugugucaugcgauccugacaaguguuaucaauuugcccuuggacagggaacaacacuaaacaacgugcauucaaauaacacaguacgugauaggaccccuuaucggacucuauugaugaaugaguuggguguuccuuuucaucuggggaccaagcaagugugcauagcaugguccagcucaaguugucacgauggaaaagcauggcugcauguuuguauaacgggggaugauaaaaaugcaacugcuagcuucauuuacaaugggaggcuuguagauaguguuguuucaugguccaaagaaauucucaggacccaggagucagaaugcguuuguaucaauggaacuuguacaguaguaaugacugauggaagugcuucaggaaaagcugauacuaaaauacuauucauugaggaggggaaaaucguucauacuagcacauugucaggaagugcucagcaugucgaagagugcucuugcuauccucgauauccuggugucagaugugucugcagagacaacuggaaaggcuccaaucggcccaucguagauauaaacauaaaggaucauagcauuguuuccaguuauguguguucaggacuuguuggagacacacccagaaaaaacgacagcuccagcaguagccauuguuuggauccuaacaaugaagaagguggucauggagugaaaggcugggccuuugaugauggaaaugacguguggaugggaagaacaaucaacgagacgucacgcuuaggguaugaaaccuucaaagucauugaaggcugguccaauccuaaguccaaauugcagauaaauaggcaagucauaguugacagaggugauagguccgguuauucugguauuuucucuguugaaggcaaaagcugcaucaaucggugcuuuuauguagaguugauuaggggaagaaaagaggaaacugaagucuuguggaccucaaacaguauuguuguguuuuguggcaccucagguacauauggaacaggcucauggccugauggggcggaccucaaucucaugccuauauaa

SEQ ID NO: 57067 - RNA, 1410 nt, Artificial Sequence; identical to SEQ ID NO: 55922
  derived and/or modified CDS sequence (wt) from neuraminidase__InfluenzaA__AHL99955

SEQ ID NO: 57068 - RNA, 1410 nt, Artificial Sequence
  derived and/or modified CDS sequence (wt) from neuraminidase__InfluenzaA__AHL99967
augaauccaaaucaaaagauaauaacgauuggcucuguuucucucaccauuuccacaauaugcuucuucaugcaaauugccaucuugauaacuacuguaacauugcauuucaagcaauaugaauucaacucccccccaaacaaccaagugaugcugugugaaccaacaauaauagaaagaaacauaacagagauaguguaucugaccaacaccaccauagagaaggaaauaugccccaaaccagcagaauacagaaauuggucaaaaccgcaauguggcauuacaggauuugcaccuuucucuaaggacaauucgauuaggcuuuccgcugguggggacaucugggugacaagagaaccuuaugugucaugcgauccugacaaguguuaucaauuugcccuuggacagggaacaacacuaaacaacgugcauucaaauaacacaguacaugauaggaccccuuaucggacucuauugaugaaugaguuggguguuccuuuucaucuggggaccaagcaagugugcauagcaugguccagcucaaguugucacgauggaaaagcauggcugcauguuuguauaacgggggaugauaaaaaugcaacugcuagcuucauuuacaaugggaggcuuguagauaguguuguuucaugguccaaagaaauucucaggacccaggagucagaaugcguuuguaucaauggaacuuguacaguaguaaugacugauggaagugcuucaggaaaagcugauacuaaaauacuauucauugaggaggggaaaaucguucauacuagcacauugucaggaagugcucagcaugucgaagagugcucuugcuauccucgauauccuggugucagaugugucugcagagacaacuggaaaggcuccaaucggcccaucguagauauaaacaugaaggaucauagcauuguuuccaguuauguguguucaggacuuguuggagacacacccagaaaaaacgacagcuccagcaguagccauuguuuggauccuaacaaugaagaagguggucauggagugaaaggcugggccuuugaugauggaaaugacguguggaugggaagaacaaucaacgagacgucacgcuuaggguaugaaaccuucaaagucauugaaggcugguccaauccuaaguccaaauugcagauaaauaggcaagucauaguugacagaggugauagguccgguuauucugguauuuucucuguugaaggcaaaagcugcaucaaucggugcuuuuauguagaguugauuaggggaagaaaagaggaaacugaagucuuguggaccucaaacaguauuguuguguuuuguggcaccucagguacauauggaacaggcucauggccugauggggcggaccucaaucucaugccuauauaa

SEQ ID NO: 57069 - RNA, 1410 nt, Artificial Sequence
  derived and/or modified CDS sequence (wt) from neuraminidase__InfluenzaA__AHL99979
augaauccaaaucaaaagauaauaacgauuggcucuguuucucucaccauuuccacaauaugcuucuucaugcaaauugccaucuugauaacuacuguagcauugcauuucaagcaacaugaauucaacucccccccaaacaaucaagugaugcugugugaaccaacaauaauagaaagaaacauaacagagauaguguaucugaccaacaccaccauagagaaagaaauaugccccaaaccagcagaauacagaaauuggucaaaaccgcaauguggcauuacaggauuugcaccuuucucuaaggacaauucgauuaggcuuuccgcugguggggacaucugggugacaagagaaccuuaugugucaugcgauccugacaaguguuaucaauuugcccuuggacagggaacaacacuaaacaacgugcauucaaauaacacaguacgugauaggaccccuuaucggacucuauugaugaaugaguuggguguuccuuuucaucuggggaccaagcaagugugcauagcaugguccagcucaaguugucacgauggaaaagcauggcugcauguuuguauaacgggggaugauaaaaaugcaacugcuagcuucauuuacaaugggaggcuuguagauaguguuguuucaugguccaaagaaauucucaggacccaggagucagaaugcguuuguaucaauggaacuuguacaguaguaaugacugauggaagugcuucaggaaaagcugauacuaaaauacuauucauugaggaggggaaaaucguucauacuagcacauugucaggaagugcucagcaugucgaagagugcucuugcuauccucgauauccuggugucagaugugucugcagagacaacuggaaaggcuccaaucggcccaucguagauauaaacauaaaggaucauagcauuguuuccaguuauguguguucaggacuuguuggagacacacccagaaaaaacgacagcuccagcaguagccauuguuuggauccuaacaaugaagaagguggucauggagugaaaggcugggccuuugaugauggaaaugacguguggauggggagaacaaucaacgagacgucacgcuuaggguaugaaaccuucaaagucauugaaggcugguccaauccuaaguccaaauugcagauaaauaggcaagucauaguugacagaggugauagguccgguuauucugguauuuucucuguugaaggcaaaagcugcaucaaucggugcuuuuauguagaguugauuaggggaagaaaagaggaaacugaagucuuguggaccucaaacaguauuguuguguuuuguggcaccucagguacauauggaacaggcucauggccugauggggcggaccucaaucucaugccuauauaa

SEQ ID NO: 57070 - RNA, 1410 nt, Artificial Sequence
  derived and/or modified CDS sequence (wt) from neuraminidase__InfluenzaA__AHL99991
augaauccaaaucaaaagauaauaacgauuggcucuguuucucucaccauuuccacaauaugcuucuucaugcaaauugccaucuugauaacuacuguaacauugcauuucaagcaacaugaauucaacucccccccaaacaaucaagugaugcugugugaaccaacaauaauagaaagaaacauaacagagauaguguaucugaccaacaccaccauagagaaagaaauaugccccaaaccagcagaauacagaaauuggucaaaaccgcaauguggcauuacaggauuugcaccuuucucuaaggacaauucgauuaggcuuuccgcugguggggacaucugggugacaagagaaccuuaugugucaugcgauccugacaaguguuaucaauuugcccuuggacagggaacaacacuaaacaacgugcauucaaauaacacaguacgugauaggaccccuuaucggacucuauugaugaaugaguuggguguuccuuuucaucuggggaccaagcaagugugcauagcaugguccagcucaaguugucacgauggaaaagcauggcugcauguuuguauaacgggggaugauaaaaaugcaacugcuagcuucauuuacaaugggaggcuuguagauaguguuguuucaugguccaaagaaauucucaggacccaggagucagaaugcguuuguaucaauggaacuuguacaguaguaaugacugauggaagugcuucaggaaaagcugauacuaaaauacuauucauugaggaggggaaaaucguucauacuagcacauugucaggaagugcucagcaugucgaagagugcucuugcuauccucgauauccuggugucagaugugucugcagagacaacuggaaaggcuccaaucggcccaucguagauauaaacauaaaggaucauagcauuguuuccaguuauguguguucaggacuuguuggagacacacccagaaaaaacgacagcuccagcaguagccauuguuuggauccuaacaaugaagaagguggucauggagugaaaggcugggccuuugaugauggaaaugacguguggauggggagaacaaucaacgagacgucacgcuuaggguaugaaaccuucaaagucauugaaggcugguccaauccuaaguccaaauugcagauaaauaggcaagucauaguugacagaggugauagguccgguuauucugguauuuucucuguugaaggcaaaagcugcaucaaucggugcuuuuauguagaguugauuaggggaagaaaagaggaaacugaagucuuguggaccucaaacaguauuguuguguuuuguggcaccucagguacauauggaacaggcucauggccugauggggcggaccucaaucucaugccuauauaa

SEQ ID NO: 57071 - RNA, 1410 nt, Artificial Sequence; identical to SEQ ID NO: 55957
  derived and/or modified CDS sequence (wt) from neuraminidase__InfluenzaA__AHM00004

SEQ ID NO: 57072 - RNA, 1410 nt, Artificial Sequence; identical to SEQ ID NO: 55922
  derived and/or modified CDS sequence (wt) from neuraminidase__InfluenzaA__AHM00016

SEQ ID NO: 57073 - RNA, 1410 nt, Artificial Sequence; identical to SEQ ID NO: 55880
  derived and/or modified CDS sequence (wt) from neuraminidase__InfluenzaA__AHM00028

SEQ ID NO: 57074 - RNA, 1410 nt, Artificial Sequence
  derived and/or modified CDS sequence (wt) from neuraminidase__InfluenzaA__AHM00040
augaauccaaaucaaaagauaauaacgauuggcucuguuucucucaccauuuccacaauaugcuucuucaugcaaauugccaucuugauaacuacuguaacauugcauuucaagcaacaugaauucaacucccccccaaacaaucaagugaugcugugugaaccaacaauaauagaaagaaacauaacagagauaguguaucugaccaacaccaccauagagaaagaaauaugccccaaaccagcagaauacagaaauuggucaaaaccgcaauguggcauuacaggauuugcaccuuucucuaaggacaauucgauuaggcuuuccgcugguggggacaucugggugacaagagaaccuuaugugucaugcgauccugacaaguguuaucaauuugcccuuggacagggaacaacacuaaacaacgugcauucaaauaacacaguacgugauaggaccccuuaucggacucuauugaugaaugaguuggguguuccuuuucaucuggggaccaagcaagugugcauagcaugguccagcucaaguugucacgauggaaaagcauggcugcauguuuguauaacgggggaugauaaaaaugcaacugcuagcuucauuuacaaugggaggcuuguagauaguguuguuucaugguccaaagaaauucucaggacccaggagucagaaugcguuuguaucaauggaacuuguacaguaguaaugacugauggaagugcuucaggaaaagcugauacuaaaauacuauucauugaggaggggaaaaucguucauacuagcacauugucaggaagugcucagcaugucgaagagugcucuugcuauccucgauauccuggugucagaugugucugcagagacaacuggaaaggcuccaaucggcccaucguagauauaaacauaaaggaucauagcauuguuuccaguuauguguguucaggacuuguuggagacacacccagaaaaaacgacagcuccagcaguagccauuguuuggauccuaacaaugaagaagguggucauggagugaaaggcugggccuuugaugauggaaaugacguguggaugggaagaacaaucaacgagacgucacgcuuaggguaugaaaccuucaaagucauugaaggcugguccaauccuaaguccaaauugcagauaaauaggcaagucauaguugacagaggugauagguccgguuauucugguauuuucucuguugaaggcaaaagcugcaucaaucggugcuuuuauguagaguugauuaggggaagaaaagaggaaacugaagucuuguggaccucaaacaguauuguuguguuuuguggcaccucagguacauauggaacaggcucauggccugauggggcggaccucaaucucaugccuauauaa

SEQ ID NO: 57075 - RNA, 1410 nt, Artificial Sequence; identical to SEQ ID NO: 56923
  derived and/or modified CDS sequence (wt) from neuraminidase__InfluenzaA__AHM00052

SEQ ID NO: 57076 - RNA, 1410 nt, Artificial Sequence
  derived and/or modified CDS sequence (wt) from neuraminidase__InfluenzaA__AHM00064
augaauccaaaucaaaagauaauaacgauuggcucuguuucucucaccauuuccacaauaugcuucuucaugcaaauugccaucuugauaacuacuguaacauugcauuucaagcaauaugaauucaacucccccccaaacaaccaagugaugcugugugaaccaacaauaauagaaagaaacauaacagagauaguguaucugaccaacaccaccauagagaaggaaauaugccccaaaccagcagaauacagaaauuggucaaaaccgcaauguggcauuacaggauuugcaccuuucucuaaggacaauucgauuaggcuuuccgcugguggggacaucugggugacaagagaaccuuaugugucaugcgauccugacaaguguuaucaauuugcccuuggacagggaacaacacuaaacaacgugcauucaaauaacacaguacgugauaggaccccuuaucggacucuauugaugaaugaguuggguguuccuuuucaucuggggaccaagcaagugugcauagcaugguccagcucaaguugucacgauggaaaagcauggcugcauguuuguauaacgggggaugauaaaaaugcaacugcuagcuucauuuacaaugggaggcuuguagauaguguuguuucaugguccaaagaaauucucaggacccaggagucagaaugcguuuguaucaauggaacuuguacaguaguaaugacugauggaagugcuucaggaaaagcugauacuaaaauacuauucauugaggaggggaaaaucguucauacuagcacauugucaggaagugcucagcaugucgaagagugcucuugcuauccucgauauccuggugucagaugugucugcagagacaacuggaaaggcuccaaucggcccaucguagauauaaacauaaaggaucauagcauuguuuccaguuauguguguucaggacuuguuggagacacacccagaaaaaccgacagcuccagcaguagccauuguuuggauccuaacaaugaagaagguggucauggagugaaaggcugggccuuugaugauggaaaugacguguggaugggaagaacaaucaacgagacgucacgcuuaggguaugaaaccuucaaagucauugaaggcugguccaacccuaaguccaaauugcagauaaauaggcaagucauaguugacagaggugauagguccgguuauucugguauuuucucuguugaaggcaaaagcugcaucaaucggugcuuuuauguggaguugauuaggggaagaaaagaggaaacugaagucuuguggaccucaaacaguauuguuguguuuuguggcaccucagguacauauggaacaggcucauggccugauggggcggaccucaaucucaugccuauauaa

SEQ ID NO: 57077 - RNA, 1410 nt, Artificial Sequence; identical to SEQ ID NO: 55922
  derived and/or modified CDS sequence (wt) from neuraminidase__InfluenzaA__AHM00076

SEQ ID NO: 57078 - RNA, 1410 nt, Artificial Sequence; identical to SEQ ID NO: 55922
  derived and/or modified CDS sequence (wt) from neuraminidase__InfluenzaA__AHM00088

SEQ ID NO: 57079 - RNA, 1410 nt, Artificial Sequence
  derived and/or modified CDS sequence (wt) from neuraminidase__InfluenzaA__AHM00100
augaauccaaaccaaaagauaauaaccauugguucgaucuguaugacaauuggaauggcuaacuuaauauuacaaauuggaaacauaaucucaauauggauuagccacucaauucaacuugggaaucaaagucagauugaaacaugcaaucaaagcgucauuacuuaugaaaacaacacuuggguaaaucagacauauguuaacaucagcaacaccaacuuugcagcuggacagucagugguuucugugaaauuagcgggcaauuccucucucugcccuguuagugggugggcuauauacaguaaagacaacaguauaagaaucgguuccaagggggauguguuugucauaagggaaccauucauaucaugcucccccuuggaaugcagaaccuucuucuugacucaaggggccuugcuaaaugacaaacauuccaauggaaccauuaaagacaggagcccauaucgaacccuaaugagcuguccuauuggugaaguucccucuccauacaacucaagauuugagucagucgcuuggucagcaagugcuugucaugauggcaucaauuggcuaacaauuggaauuucuggcccagacaauggggcaguggcuguguuaaaguacaacggcguaauaacagacacuaucaagaguuggagaaacaauauauugagaacacaagagucugaaugugcauguguaaaugguucaugcuuuaccauaaugaccgauggaccaagugauggacaggccucauacaagaucuucagaauagaaaagggaaagauagucaaaucagucgaaaugaaugccccuaauuaucacuaugaggaaugcuccuguuauccugauucuagugaaaucacaugugugugcagggauaacuggcauggcucgaaucgaccgugggugucuuucaaccagaaucuggaauaucagauaggauacauaugcagugggauuuucggagacaauccacgcccuaaugauaagacaggcaguugugguccaguaucgucuaauggagcaaauggaguaaaaggauuuucauucaaauacggcaaugguguuuggauagggagaacuaaaagcauuaguucaagaaaagguuuugagaugauuugggauccaaacggauggacugggacagacaauaacuucucaacaaagcaagauaucguaggaauaaaugaguggucaggauauagcgggaguuuuguucagcauccagaacuaacagggcuggauuguauaagaccuugcuucuggguugaacuaaucagagggagacccaaagagaacacaaucuggacuagcgggagcagcauauccuuuugugguguaaacagugacacuguggguuggucuuggccagacggugcugaguugccauuuaccauugacaauuaa

SEQ ID NO: 57080 - RNA, 1410 nt, Artificial Sequence
  derived and/or modified CDS sequence (wt) from neuraminidase__InfluenzaA__AHM00111
augaauccaaaucaaaagauaauaacgauuggcucuguuucucucaccauuuccacaauaugcuucuucaugcaaauugccaucuugauaacuacuguaacauugcauuucaagcaauaugaauucaacucccccccaaacaaccaagugaugcugugugaaccaacaauaauagaaagaaacauaacagagauaguguaucugaccaacaccaccauagagaaggaaauaugccccaaaccagcagaauacagaaauuggucaaaaccgcaauguggcauuacaggauuugcaccuuucucuaaggacaauucgauuaggcuuuccgcugguggggacaucugggugacaagagaaccuuaugugucaugcgauccugacaaguguuaucaauuugcccuuggacagggaacaacacuaaacaacgugcauucaaauaacacaguacgugauaggaccccuuaucggacucuauugaugaaugaguuggguguuccuuuucaucuggggaccaagcaagugugcauagcaugguccagcucaaguugucacgauggaaaagcauggcugcauguuuguauaacgggggaugauaaaaaugcaacugcuagcuucauuuacaaugggaggcuuguagauaguguuguuucaugguccaaagaaauucucaggacccaggagucagaaugcguuuguaucaauggaacuuguacaguaguaaugacugauggaagugcuucaggaaaagcugauacuaaaauacuauucauugaggaggggaaaaucguucauacuagcacauugucaggaagugcucagcaugucgaagagugcucuugcuauccucgauauccuggugucagaugugucugcagagacaacuggaaaggcuccaaucggcccaucguagauauaaacaugaaggaucauagcauuguuuccaguuauguguguucaggacuuguuggagacacacccagaaaaaacgacagcuccagcaguagccauuguuuggauccuaacaaugaagaagguggucauggagugaaaggcugggccuuugaugauggaaaugacguguggaugggaagaacaaucaacgagacgucacgcuuaggguaugaaaccuucaaagucauugaaggcugguccaauccuaaguccaaauugcagauaaauaggcaagucauaguugacagaggugauagguccgguuauucugguauuuucucuguugaaggcaaaagcugcaucaaucggugcuuuuauguagaguugauuaggggaagaaaagaggaaacugaagucuuguggaccucaaacaguauuguuguguuuuguggcaccucagguacauauggaacaggcucauggccugauggggcggaccucaaucucaugccuauauaa

SEQ ID NO: 57081 - RNA, 1410 nt, Artificial Sequence; identical to SEQ ID NO: 57074
  derived and/or modified CDS sequence (wt) from neuraminidase__InfluenzaA__AHM00123

SEQ ID NO: 57082 - RNA, 1410 nt, Artificial Sequence
  derived and/or modified CDS sequence (wt) from neuraminidase__InfluenzaA__AHM00135
augaauccaaaucaaaagauaauaacgauuggcucuguuucucucaccauuuccacaauaugcuucuucaugcaaauugccaucuugauaacuacuguaacauugcauuucaagcaauaugaauucaacucccccccaaacaaccaagugaugcugugugaaccaacaauaauagaaagaaacauaacagagauaguguaucuaaccaacaccaccauagagaaggaaauaugccccaaaccagcagaauacagaaauuggucaaagccgcaaugugacauuacaggauuugcaccuuuuucuaaggacaauucgauuaggcuuuccgcugguggggacaucugggugacaagagaaccuuaugugucaugcgauccugacaaguguuaucaauuugcucuuggacagggaacaacacuaaacaacgugcauucaaauaacacaguacgugauaggaccccuuaucggacccuauugaugaaugaguuagguguuccuuuucaucuggggaccaagcaagugugcauagcaugguccagcucaaguugucacgauggaaaagcauggcugcauguuuguauaacgggggaugauaaaaaugcaacugcuagcuucauuuacaaugggaggcuuguagauaguguuguuucaugguccaaagaaauccucaggacccaggagucagaaugcguuuguaucaauggaacuuguacaguaguaaugacugaugggagugcuucaggaaaagcugauacuaaaauacuauucauugaggaggggaaaaucguucauacuagcacauugucaggaagugcucagcaugucgaggagugcucuugcuauccucgauauccuggugucagaugugucugcagagacaacuggaaaggcuccaauaggccuaucguagauauaaacauaaaggaucauagcauuguuuccagguauguguguucaggacuuguuggagacacacccagaaaaaacgacagcuccagcaguagccauuguuuggauccuaacaaugaagaagguggucauggagugaaaggcugggccuucgaugauggaaaugacguguggaugggaagaacgaucaacgagacgucacguuuaggguaugaaaccuucaaagucauugaaggcugguccaacccuaaguccaaauugcagauaaauaggcaggucauaguugacagaggugauagguccgguuauucugguauuuucucuguugaaggcaaaagcugcaucaaucggugcuuuuauguggaguugauuaggggaagaaaagaggaaacugaagucuuguggaccucaaacaguauuguuguguuuuguggcaccucagguacauauggaacaggcucauggccugauggggcggaccucaaucucaugccuauauaa

SEQ ID NO: 57083 - RNA, 1410 nt, Artificial Sequence
  derived and/or modified CDS sequence (wt) from neuraminidase__InfluenzaA__AHM00147
augaauccaaaucaaaagauaauaacgauuggcucuguuucucucaccauuuccacaauaugcuucuucaugcaaauugccaucuugauaacuacuguaacauugcauuucaagcaauaugaauucaacucccccccaaacaaccaagugaugcugugugaaccaacaauaauagaaagaaacauaacagagauaguguauuugaccaacaccaccauagagaaggaaauaugccccaaaccagcagaauacagaaauuggucaaaaccgcaauguggcauuacaggauuugcaccuuucucuaaggacaauucgauuaggcuuuccgcugguggggacaucugggugacaagagaaccuuaugugucaugcgauccugacaaguguuaucaauuugcccuuggacagggaacaacacuaaacaacaugcauucaaauaacacaguacgugauaggaccccuuaucggacucuauugaugaaugaguuggguguuccuuuucaucuggggaccaagcaagugugcauagcgugguccagcucaaguugucacgauggaaaagcauggcugcauguuuguauaacgggggaugauaaaaaugcaacugcuagcuucauuuacaaugggaggcuuguagauaguguuguuucaugguccaaagaaauucucaggacccaggagucagaaugcguuuguaucaauggaacuuguacaguaguaaugacugauggaagugcuucaggaaaagcugauacuaaaauauuauucauugaggaggggaaaaucguucauacuagcacauugucaggaagugcucagcaugucgaagagugcucuugcuauccucgauauccuggugucagaugugucugcagagacaacuggaaaggcuccaaucggcccaucguagauauaaacauaaaggaucauagcauugucuccaguuauguguguucaggacuuguuggagacacacccagaaaaaacgacagcuccagcaguagccauuguuuggauccuaacaaugaagaagguggucauggagugaaaggcugggccuuugaugauggaaaugacguguggaugggaagaacaaucaacgagacgucacgcuuaggguaugaaaccuucaaagucauugaaggcugguccaacccuaaguccaaauugcagauaaauaggcaagucauaguugacagaggugauagguccgguuauucugguauuuucucuguugaaggcaaaagcugcaucaaucggugcuuuuauguggaguugauuaggggaagaaaagaggaaacugaagucuuguggaccucaaacaguauuguuguguuuuguggcaccucagguacauauggaacaggcucauggccugauggggcggaccucaaucucaugccuauauaa

SEQ ID NO: 57084 - RNA, 1410 nt, Artificial Sequence; identical to SEQ ID NO: 57074
  derived and/or modified CDS sequence (wt) from neuraminidase__InfluenzaA__AHM00159

SEQ ID NO: 57085 - RNA, 1410 nt, Artificial Sequence; identical to SEQ ID NO: 55922
  derived and/or modified CDS sequence (wt) from neuraminidase__InfluenzaA__AHM00171

SEQ ID NO: 57086 - RNA, 1410 nt, Artificial Sequence; identical to SEQ ID NO: 55957
  derived and/or modified CDS sequence (wt) from neuraminidase__InfluenzaA__AHM00183

SEQ ID NO: 57087 - RNA, 1410 nt, Artificial Sequence
  derived and/or modified CDS sequence (wt) from neuraminidase__InfluenzaA__AHM00195
augaauccaaaucaaaagauaauaacgauuggcucuguuucucucaccauuuccacaauaugcuucuucaugcaaauugccaucuugauaacuacuguaacauugcauuucaagcaauaugaauucaacucccccccaaacaaccaagugaugcugugugaaccaacaauaauagaaagaaacauaacagagauaguguaucuaaccaacaccacuauagagaaggaaauaugccccaaaccagcagaauacagaaauuggucaaagccgcaaugugacauuacaggauuugcaccuuuuucuaaggacaauucgauuaggcuuuccgcugguggggacaucugggugacaagagaaccuuaugugucaugcgauccugacaaguguuaucaauuugcucuuggacagggaacaacacuaaacaacgugcauucaaauaacacaguacgugauaggaccccuuaucggacccuauugaugaaugaguuagguguuccuuuucaucuggggaccaagcaagugugcauagcaugguccagcucaaguugucacgauggaaaagcauggcugcauguuuguauaacaggggaugauaaaaaugcaacugcuagcuucauuuacaaugggaggcuuguagauaguguuguuucaugguccaaagaaauccucaggacccaggagucagaaugcguuuguaucaauggaacuuguacaguaguaaugacugaugggagugcuucaggaaaagcugauacuaaaguacuauucauugaggaggggaaaaucguucauacuagcacauugucaggaagugcucagcaugucgaggagugcucuugcuauccucgauauccuggugucagaugugucugcagagacaacuggaaaggcuccaauaggccuaucguagauauaaacauaaaggaucauagcauuguuuccagguauguguguucaggacuuguuggagacacacccagaaaaaacgacagcuccagcaguagccauuguuuggauccuaacaaugaagaagguggucauggagugaaaggcugggccuucgaugauggaaaugacguguggaugggaagaacgaucaacgagacgucacguuuaggguaugaaaccuucaaagucauugaaggcugguccaacccuaaguccaaauugcagauaaauaggcaggucauaguugacagaggugauagguccgguuauucugguauuuucucuguugaaggcaaaagcugcaucaaucggugcuuuuauguggaguugauuaggggaagaaaagaggaaacugaagucuuguggaccucaaacaguauuguuguguuuuguggcaccucagguacauauggaacaggcucauggccugauggggcggaccucaaucucaugccuauauaa

SEQ ID NO: 57088 - RNA, 1410 nt, Artificial Sequence
  derived and/or modified CDS sequence (wt) from neuraminidase__InfluenzaA__AHM00207
augaauccaaaucaaaagauaauaacgauuggcucuguuucucucaccauuuccacaauaugcuucuucaugcaaauugccaucuugauaacuacuguaacauugcauuucaagcaacaugaauucaacucccccccaaacaaccaagugaugcugugugaaccaacaauaauagaaagaaacauaacagagauaguguaucugaccaacaccaccauagagaaagaaauaugccccaaaccagcagaauacagaaauuggucaaaaccgcaauguggcauuacaggauuugcaccuuucucuaaggacaauucgauuaggcuuuccgcuggugggaacaucugggugacaagagaaccuuaugugucaugcgauccugacaaguguuaucaauuugcccuuggacagggaacaacacuaaacaacgugcauucaaauaacacaguacgugauaggaccccuuaucggacucuauugaugaaugaguuggguguuccuuuucaucuggggaccaagcaagugugcauagcaugguccagcucaaguugucacgauggaaaagcauggcugcauguuuguauaacgggggaugauaaaaaugcaacugcuagcuucauuuacaaugggaggcuuguagauaguguuguuucaugguccaaagaaauucucaggacccaggagucagaaugcguuuguaucaauggaacuuguacaguaguaaugacugauggaagugcuucaggaaaagcugauacuaaaauacuauucauugaggaggggaaaaucguucauacuagcacauugucaggaagugcucagcaugucgaagagugcucuugcuauccucgauauccuggugucagaugugucugcagagacaacuggaaaggcuccaaucggcccaucguagauauaaacauaaaggaucauagcauuguuuccaguuauguguguucaggacuuguuggagacacacccagaaaaaacgacagcuccagcaguagccauuguuuggauccuaacaaugaagaagguggucauggagugaaaggcugggccuuugaugauggaaaugacguguggaugggaagaacaaucaacgagacgucacgcuuaggguaugaaaccuucaaggucauugaaggcugguccaauccuaaguccaaauugcagauaaauaggcaagucauaguugacagaggugauagguccgguuauucugguauuuucucuguugaaggcaaaagcugcaucaaucggugcuuuuauguagaguugauuaggggaagaaaagaggaaacugaagucuuguggaccucaaacaguauuguuguguuuuguggcaccucagguacauauggaacaggcucauggccugauggggcggaccucaaucucaugccuauauaa

SEQ ID NO: 57089 - RNA, 1410 nt, Artificial Sequence
  derived and/or modified CDS sequence (wt) from neuraminidase__InfluenzaA__AHM00219
augaauccaaaucaaaagauaauaacgauuggcucuguuucucucaccauuuccacaauaugcuucuucaugcaaauugccaucuugauaacuacuguaacauugcauuucaagcaacaugaauucaacucccccccaaacaaucaagugaugcugugugaaccaacaauaauagaaagaaacauaacagagauaguguaucugaccaacaccaccauagagaaagaaauaugccccaaaccagcagaauacagaaauuggucaaaaccgcaauguggcauuacaggauuugcaccuuucucuaaggacaauucgauuaggcuuuccgcugguggggacaucugggugacaagagaaccuuaugugucaugcgauccugacaaguguuaucaauuugcccuuggacagggaacaacacuaaacaacgugcauucaaauaacacaguacgugauaggaccccuuaucggacucuauugaugaaugaguuggguguuccuuuucaucuggggaccaagcaagugugcauagcaugguccagcucaaguugucacgauggaaaagcauggcugcauguuuguauaacgggggaugauaaaaaugcaacugcuagcuucauuuacaaugggaggcuuguagauaguguuguuucaugguccaaagaaauucucaggacccaggagucagaaugcguuuguaucaauggaacuuguacaguaguaaugacugauggaagugcuucaggaaaagcugauacuaaaauacuauucauugaggaggggaaaaucguucauacuagcacauugucaggaagugcucagcaugucgaagagugcucuugcuauccucgauauccuggugucagaugugucugcagagacaacuggaaaggcuccaaucggcccaucguagauauaaacauaaaggaucauagcauuguuuccaguuauguguguucaggacuuguuggagacacacccagaaaaaacgacagcuccagcaguagccauuguuuggauccuaacaaugaagaagguggucauggagugaaaggcugggccuuugaugauggaaaugacguguggaugggaagaacaaucaacgagacaucacgcuuaggguaugaaaccuucaaagucauugaaggcugguccaauccuaaguccaaauugcagauaaauaggcaagucauaguugacagaggugauagguccgguuauucugguauuuucucuguugaaggcaaaagcugcaucaaucggugcuuuuauguagaguugauuaggggaagaaaagaggaaacugaagucuuguggaccucaaacaguauuguuguguuuuguggcaccucagguacauauggaacaggcucauggccugauggggcggaccucaaucucaugccuauauaa

SEQ ID NO: 57090 - RNA, 1410 nt, Artificial Sequence; identical to SEQ ID NO: 55922
  derived and/or modified CDS sequence (wt) from neuraminidase__InfluenzaA__AHM00231

SEQ ID NO: 57091 - RNA, 1410 nt, Artificial Sequence; identical to SEQ ID NO: 55922
  derived and/or modified CDS sequence (wt) from neuraminidase__InfluenzaA__AHM00243

SEQ ID NO: 57092 - RNA, 1410 nt, Artificial Sequence; identical to SEQ ID NO: 55957
  derived and/or modified CDS sequence (wt) from neuraminidase__InfluenzaA__AHM00255

SEQ ID NO: 57093 - RNA, 1410 nt, Artificial Sequence
  derived and/or modified CDS sequence (wt) from neuraminidase__InfluenzaA__AHM00267
augaauccaaaucaaaagauaauaacgauuggcucuguuucucucaccauuuccacaauaugcuucuucaugcaaauugccaucuugauaacuacuguaacauugcauuucaagcaauaugaauucaacucccccccaaacaaccaagugaugcugugugaaccaacaauaauagaaagaaacauaacagagauaguguauuugaccaacaccaccauagagaaggaaauaugccccaaaccagcagaauacagaaauuggucaaaaccgcaauguggcauuacaggauuugcaccuuucucuaaggacaauucgauuaggcuuuccgcugguggggacaucugggugacaagagaaccuuaugugucaugcgauccugacaaguguuaucaauuugcccuuggacagggaacaacacuaaacaacgugcauucaaauaacacaguacgugauaggaccccuuaucggacucuauugaugaaugaguuggguguuccuuuucaucuggggaccaagcaagugugcauagcaugguccagcucaaguugucacgauggaaaagcauggcugcauguuuguauaacgggggaugauaaaaaugcaacugcuagcuucauuuacaaugggaggcuuguagauaguguugcuucaugguccaaagaaauucucaggacccaggagucagaaugcguuuguaucaauggaacuuguacaguaguaaugacugauggaagugcuucaggaaaagcugauacuaaaauacuauucauugaggaggggaaaaucguucauacuagcacauugucaggaagugcucagcaugucgaagagugcucuugcuauccucgauauccuggugucagaugugucugcagagacaacuggaaaggcuccaaucggcccaucguagauauaaacauaaaggaucauagcauuguuuccaguuauguguguucaggacuuguuggagacacacccagaaaaaacgacagcuccagcaguagccauuguuuggauccuaacaaugaagaagguggucauggagugaaaggcugggccuuugaugauggaaaugacguauggaugggaagaacaaucaacgagacgucacgcuuaggguaugaaaccuucaaagucauugaaggcugguccaacccuaaguccaaauugcagauaaauaggcaagucauaguugacagaggugauagguccgguuauucugguauuuuuucuguugaaggcaaaagcugcaucaaucggugcuuuuauguggaguugauuaggggaagaaaagaggaaacugaagucuuguggaccucaaacaguauuguuguguuuuguggcaccucagguacauauggaacaggcucauggccugauggggcggaccucaaucucaugccuauauaa

SEQ ID NO: 57094 - RNA, 1410 nt, Artificial Sequence
  derived and/or modified CDS sequence (wt) from neuraminidase__InfluenzaA__AHM00279
augaauccaaaucaaaagauaauaacgauuggcucuguuucucucaccauuuccacaauaugcuucuucaugcaaauugccaucuugauaacuacuguaacauugcauuucaagcaauaugaauucaacucccccccaaacaaccaagugaugcugugugaaccaacaauaauagaaagaaacauaacagagauaguguaucuaaccaacaccaccauagagaaggaaauaugccccaaaccagcagaauacagaaauuggucaaagccgcaaugugacauuacaggauuugcaccuuuuucuaaggacaauucgauuaggcuuuccgcugguggggacaucugggugacaagagaaccuuaugugucaugcgauccugacaaguguuaucaauuugcucuuggacagggaacaacacuaaacaacgugcauucaaauaacacaguacgugauaggaccccuuaucggacccuauugaugaaugaguuagguguuccuuuucaucuggggaccaagcaagugugcauagcaugguccagcucaaguugucacgauggaaaagcauggcugcauguuuguauaacgggggaugauaaaaaugcaacugcuagcuucauuuacaaugggaggcuuguagauaguguuguuucaugguccaaagaaauccucaggacccaggagucagaaugcguuuguaucaauggaacuuguacaguaguaaugacugaugggagugcuucaggaaaagcugauacuaaaauacuauucauugaggaggggaaaaucguucauacuagcacauugucaggaagugcucagcaugucgaggagugcucuugcuauccucgguauccuggugucagaugugucugcagagacaacuggaaaggcuccaauaggccuaucguagauauaaacauaaaggaucauagcauuguuuccagguauguguguucaggacuuguuggagacacacccagaaaaaacgacagcuccagcaguagccauuguuuggauccuaacaaugaagaagguggucauggagugaaaggcugggccuucgaugauggaaaugacguguggaugggaagaacgaucaacgagacgucacguuuaggguaugaaaccuucaaagucauugaaggcugguccaacccuaaguccaaauugcagauaaauaggcaggucauaguugacagaggugauagguccgguuauucugguauuuucucuguugaaggcaaaagcugcaucaaucggugcuuuuauguggaguugauuaggggaagaaaagaggaaacugaagucuuguggaccucaaacaguauuguuguguuuuguggcaccucagguacauauggaacaggcucauggccugauggggcggaccucaaucucaugccuauauaa

SEQ ID NO: 57095 - RNA, 1410 nt, Artificial Sequence; identical to SEQ ID NO: 55957
  derived and/or modified CDS sequence (wt) from neuraminidase__InfluenzaA__AHM00291

SEQ ID NO: 57096 - RNA, 1410 nt, Artificial Sequence; identical to SEQ ID NO: 55922
  derived and/or modified CDS sequence (wt) from neuraminidase__InfluenzaA__AHM00303

SEQ ID NO: 57097 - RNA, 1410 nt, Artificial Sequence
  derived and/or modified CDS sequence (wt) from neuraminidase__InfluenzaA__AHM00315
augaauccaaaucaaaagauaauaacgauuggcucuguuucucucaccauuuccacaauaugcuucuucaugcaaauugccaucuugauaacuacuguaacauugcauuucaagcaauaugaauucaacucccccccaaacaaccaagugaugcugugugaaccaacaauaauagaaagaaacauaacagagauaguguaucugaccaacaccaccauagagaaggaaauaugccccaaaccagcagaauacagaaauuggucaaaaccgcaauguggcauuacaggauuugcaccuuucucuaaggacaauucgauuaggcuuuccgcugguggggacaucugggugacaagagaaccuuaugugucaugcgauccugacaaguguuaucaauuugcccuuggacagggaacaacacuaaacaacgugcauucaaauaacacaguacgugauaggaccccuuaucggacucuauugaugaaugaguuggguguuccuuuucaucuggggaccaagcaagugugcauagcaugguccagcucaaguugucacgauggaaaagcauggcugcauguuuguauaacgggggaugauaaaaaugcaacugcuagcuucauuuacaaugggaggcuuguagauaguguuguuucaugguccaaagaaauucucaggacccaggagucagaaugcguuuguaucaauggaacuuguacaguaguaaugacugauggaagugcuucaggaaaagcugauacuaaaauacuauucauugaggaggggaaaaucguucauacuagcacauugucaggaagugcucagcaugucgaagagugcucuugcuauccucgauauccuggugucagaugugucugcagagacaacuggaaaggcuccaaucggcccaucguagauauaaacauaaaggaucauagcauuguuuccaguuauguguguucaggacuuguuggagacacacccagaaaaaacgacagcuccagcaguagccauuguuuggauccuaacaaugaagaagguggucauggggugaaaggcugggccuuugaugauggaaaugacguguggaugggaagaacaaucaacgagacgucacgcuuaggguaugaaaccuucaaagucauugaaggcugguccaauccuaaguccaaauugcagauaaauaggcaagucauaguugacagaggugauagguccgguuauucugguauuuucucuguugaaggcaaaagcugcaucaaucggugcuuuuauguagaguugauuaggggaagaaaagaggaaacugaagucuuguggaccucaaacaguauuguuguguuuuguggcaccucagguacauauggaacaggcucauggccugauggggcggaccucaaucucaugccuauauaa

SEQ ID NO: 57098 - RNA, 1410 nt, Artificial Sequence; identical to SEQ ID NO: 57082
  derived and/or modified CDS sequence (wt) from neuraminidase__InfluenzaA__AHM00327

SEQ ID NO: 57099 - RNA, 1410 nt, Artificial Sequence; identical to SEQ ID NO: 57082
  derived and/or modified CDS sequence (wt) from neuraminidase__InfluenzaA__AHM00339

SEQ ID NO: 57100 - RNA, 1410 nt, Artificial Sequence; identical to SEQ ID NO: 57074
  derived and/or modified CDS sequence (wt) from neuraminidase__InfluenzaA__AHM00351

SEQ ID NO: 57101 - RNA, 1410 nt, Artificial Sequence; identical to SEQ ID NO: 57080
  derived and/or modified CDS sequence (wt) from neuraminidase__InfluenzaA__AHM00363

SEQ ID NO: 57102 - RNA, 1410 nt, Artificial Sequence
  derived and/or modified CDS sequence (wt) from neuraminidase__InfluenzaA__AHM00375
augaauccaaaucaaaagauaauaacgauuggcucuguuucucucaccauuuccacaauaugcuucuucaugcaaauugccaucuugauaacuacuguaacauugcauuucaagcaacaugaauucaacucccccccaaacaaucaagugaugcugugugaaccaacaauaauagaaagaaacauaacagagauaguguaucugaccaacaccaccauagagaaagaaguaugccccaaaccagcagaauacagaaauuggucaaaaccgcaauguggcauuacaggauuugcaccuuucucuaaggacaauucgauuaggcuuuccgcugguggggacaucugggugacaagagaaccuuaugugucaugcgauccugacaaguguuaucaauuugcccuuggacagggaacaacacuaaacaacgugcauucaaauaacacaguacgugauaggaccccuuaucggacucuauugaugaaugaguuggguguuccuuuucaucuggggaccaagcaagugugcauagcaugguccagcucaaguugucacgauggaaaagcauggcugcauguuuguauaacgggggaugauaaaaaugcaacugcuagcuucauuuacaaugggaggcuuguagauaguguuguuucaugguccaaagaaauucucaggacccaggagucagaaugcguuuguaucaauggaacuuguacaguaguaaugacugauggaagugcuucaggaaaagcugauacuaaaauacuauucauugaggaggggaaaaucguucauacuagcacauugucaggaagugcucagcaugucgaagagugcucuugcuauccucgauauccuggugucagaugugucugcagagacaacuggaaaggcuccaaucggcccaucguagauauaaacauaaaggaucauagcauuguuuccaguuauguguguucaggacuuguuggagacacacccagaaaaaacgacagcuccagcaguagccauuguuuggauccuaacaaugaagaagguggucauggagugaaaggcugggccuuugaugauggaaaugacguguggaugggaagaacaaucaacgagacgucacgcuuaggguaugaaaccuucaaagucauugaaggcugguccaauccuaaguccaaauugcagauaaauaggcaagucauaguugacagaggugauagguccgguuauucugguauuuucucuguugaaggcaaaagcugcaucaaucggugcuuuuauguagaguugauuaggggaagaaaagaggaaacugaagucuuguggaccucaaacaguauuguuguguuuuguggcaccucagguacauauggaacaggcucauggccugauggggcggaccucaaucucaugccuauauaa

SEQ ID NO: 57103 - RNA, 1410 nt, Artificial Sequence
  derived and/or modified CDS sequence (wt) from neuraminidase__InfluenzaA__AHM00398
augaauccaaaucaaaagauaauaacgauuggcucuguuucucucaccauuuccacaauaugcuucuucaugcaaauugccaucuugauaacuacuguaacauugcauuucaagcaacaugaauucaacucccccccaaacaaucaagugaugcugugugaaccaacaauaauagaaagaaacauaacagagauaguguaucugaccaacaccaccauagagaaagaaauaugccccaaaccagcagaauacagaaauuggucaaaaccgcaauguggcauuacaggauuugcaccuuucucuaaggaaaauucgauuaggcuuuccgcugguggggacaucugggugacaagagaaccuuaugugucaugcgauccugacaaguguuaucaauuugcccuuggacagggaacaacacuaaacaacgugcauucaaauaacacaguacgugauaggaccccuuaucggacucuauugaugaaugaguuggguguuccuuuucaucuggggaccaagcaagugugcauagcaugguccagcucaaguugucacgauggaaaagcauggcugcauguuuguauaacgggggaugauaaaaaugcaacugcuagcuucauuuacaaugggaggcuuguagauaguguuguuucaugguccaaagaaauucucaggacccaggagucagaaugcguuuguaucaauggaacuuguacaguaguaaugacugauggaagugcuucaggaaaagcugauacuaaaauacuauucauugaggaggggaaaaucguucauacuagcacauugucaggaagugcucagcaugucgaagagugcucuugcuauccucgauauccuggugucagaugugucugcagagacaacuggaaaggcuccaaucggcccaucguagauauaaacauaaaggaucauagcauuguuuccaguuauguguguucaggacuuguuggagacacacccagaaaaaacgacagcuccagcaguagccauuguuuggauccuaacaaugaagaagguggucauggagugaaaggcugggccuuugaugauggaaaugacguguggaugggaagaacaaucaacgagacgucacgcuuaggguaugaaaccuucaaagucauugaaggcugguccaauccuaaguccaaauugcagauaaauaggcaagucauaguugacagaggugauagguccgguuauucugguauuuucucuguugaaggcaaaagcugcaucaaucggugcuuuuauguagaguugauuaggggaagaaaagaggaaacugaagucuuguggaccucaagcaguauuguuguguuuuguggcaccucagguacauauggaacaggcucauggccugauggggcggaccucaaucucaugccuauauaa

SEQ ID NO: 57104 - RNA, 1410 nt, Artificial Sequence; identical to SEQ ID NO: 55957
  derived and/or modified CDS sequence (wt) from neuraminidase__InfluenzaA__AHM00410

SEQ ID NO: 57105 - RNA, 1410 nt, Artificial Sequence
  derived and/or modified CDS sequence (wt) from neuraminidase__InfluenzaA__AHM00422
augaauccaaaucaaaagauaauaacgauuggcucuguuucucucaccauuuccacaauaugcuucuucaugcaaauugccaucuugguaacuacuguaacauugcauuucaagcaauaugaauucaacucccccccaaacaaccaagugaugcugugugaaccaacaauaauagaaagaaacauaacagagauaguguauuugaccaacaccaccauagagaaggaaauaugccccaaaccagcagaauacagaaauuggucaaaaccgcaauguggcauuacaggauuugcaccuuucucuaaggacaauucgauuaggcuuuccgcugguggggacaucugggugacaagagaaccuuaugugucaugcgauccugacaaguguuaucaauuugcccuuggacagggaacaacacuaaacaacgugcauucaaauaacacaguacgugauaggaccccuuaucggacucuauugaugaaugaguuggguguuccuuuucaucuggggaccaagcaagugugcauagcaugguccagcucaaguugucacgauggaaaagcauggcugcauguuuguauaacgggggaugauaaaaaugcaacugcuagcuucauuuacaaugggaggcuuguagauaguguuguuucaugguccaaagaaauucucaggacccaggagucagaaugcguuuguaucaauggaacuuguacaguaguaaugacugauggaagugcuucaggaaaagcugauacuaaaauauuauucauugaggaggggaaaaucguucauacuagcacauugucaggaagugcucaacaugucgaagagugcucuugcuauccucgauauccuggugucagaugugucugcagagacaacuggaaaggcuccaaucggcccaucguagauauaaacauaaaggaucauagcauuguuuccaguuauguguguucaggacuuguuggagacacacccagaaaaaacgacagcuccagcaguagccauuguuuggauccuaacaaugaagaagguggucauggagugaaaggcugggccuuugaugaugggaaugacguguggaugggaagaacaaucaacgaaacgucacgcuuaggguaugaaaccuucaaagucauugaaggcugguccaacccuaaguccaaauugcagauaaauaggcaagucauaguugacagaggugauagguccgguuauuccgguauuuucucuguugaaggcaaaagcugcaucaaucggugcuuuuauguggaguugauuaggggaagaaaagaggaaacugaagucuuguggaccucaaacaguauuguuguguuuuguggcaccucagguacauauggaacaggcucauggccugauggggcggaccucaaucucaugccuauauaa

SEQ ID NO: 57106 - RNA, 1410 nt, Artificial Sequence
  derived and/or modified CDS sequence (wt) from neuraminidase__InfluenzaA__AHM00434
augaauccaaaucaaaagauaauaacgauuggcucuguuucucucaccauuuccacaauaugcuucuucaugcaaauugccaucuugauaacuacuguaacauugcauuucaagcaauaugaauucaacccccccccaaacaaccaagugaugcugugugaaccaacaauaauagaaagaaacauaacagagauaguguauuugaccaacaccaccauagagaaggaaauaugccccaaaccagcagaauacagaaauuggucaaaaccgcaauguggcauuacaggauuugcaccuuucucuaaggacaauucgauuaggcuuuccgcugguggggacaucugggugacaagagaaccuuaugugucaugcgauccugacaaguguuaucaauuugcccuuggacagggaacaacacuaaacaacgugcauucaaauaacacaguacgugauaggaccccuuaucggacucuauugaugaaugaguuggguguuccuuuucaucuggggaccaagcaagugugcauagcaugguccagcucaaguugucacgauggaaaagcauggcugcauguuuguauaacgggggaugauaaaaaugcaacugcuagcuucauuuacaaugggaggcuuguagauaguguuguuucaugguccaaagaaauucucaggacccaggagucagaaugcguuuguaucaauggaacuuguacaguaguaaugacugauggaagugcuucaggaaaagcugauacuaaaauacuauucauugaggaggggaaaaucguucauacuagcacauugucaggaagugcucagcaugucgaagagugcucuugcuauccucgauauccuggugucagaugugucugcagagacaacuggaaaggcuccaaucggcccaucguagauauaaacauaaaggaucauagcauuguuuccaguuauguguguucaggacuuguuggagacacacccagaaaaaacgacagcuccagcaguagccauuguuuggauccuaacaaugaagaagguggucauggagugaaaggcugggccuuugaugauggaaaugacguauggaugggaagaacaaucaacgagacgucacgcuuaggguaugaaaccuucaaagucauugaaggcugguccaacccuaaguccaaauugcagauaaauaggcaagucauaguugacagaggugauagguccgguuauucugguauuuuuucuguugaaggcaaaagcugcaucaaucggugcuuuuauguggaguugauuaggggaagaaaagaggaaacugaagucuuguggaccucaaacaguauuguuguguuuuguggcaccucagguacauauggaacaggcucauggccugauggggcggaccucaaucucaugccuauauaa

SEQ ID NO: 57107 - RNA, 1410 nt, Artificial Sequence; identical to SEQ ID NO: 55957
  derived and/or modified CDS sequence (wt) from neuraminidase__InfluenzaA__AHM00446

SEQ ID NO: 57108 - RNA, 1410 nt, Artificial Sequence; identical to SEQ ID NO: 57066
  derived and/or modified CDS sequence (wt) from neuraminidase__InfluenzaA__AHM00458

SEQ ID NO: 57109 - RNA, 1410 nt, Artificial Sequence
  derived and/or modified CDS sequence (wt) from neuraminidase__InfluenzaA__AHM00470
augaauccaaaucaaaagauaauaacgauuggcucuguuucucucaccauuuccacaauaugcuucuucaugcaaauugccauccugauaacuacuguaacauugcauuucaagcaacaugaauucaacucccccccaaacaaucaagugaugcugugugaaccaacaauaauagaaagaaacauaacagagauaguguaucugaccaacaccaccauagagaaagaaauaugccccaaaccagcagaauacagaaauuggucaaaaccgcaauguggcauuacaggauuugcaccuuucucuaaggacaauucgauuaggcuuuccgcugguggggacaucugggugacaagagaaccuuaugugucaugcgauccugacaaguguuaucaauuugcccuuggacagggaacaacacuaaacaacgugcauucaaauaacacaguacgugauaggaccccuuaucggacucuauugaugaaugaguuggguguuccuuuucaucuggggaccaagcaagugugcauagcaugguccagcucaaguugucacgauggaaaagcauggcugcauguuuguauaacgggggaugauaaaaaugcaacugcuagcuucauuuacaaugggaggcuuguagauaguguuguuucaugguccaaagaaauucucaggacccaggagucagaaugcguuuguaucaauggaacuuguacaguaguaaugacugauggaagugcuucaggaaaagcugauacuaaaauacuauucauugaggaggggaaaaucguucauacuagcacauugucaggaagugcucagcaugucgaagagugcucuugcuauccucgauauccuggugucagaugugucugcagagacaacuggaaaggcuccaaucggcccaucguagauauaaacauaaaggaucauagcauuguuuccaguuauguguguucaggacuuguuggagacacacccagaaaaaacgacagcuccagcaguagccauuguuuggauccuaacaaugaagaagguggucauggagugaaaggcugggccuuugaugauggaaaugacguguggaugggaagaacaaucaacgagacgucacgcuuaggguaugaaaccuucaaagucauugaaggcugguccaauccuaaguccaaauugcagauaaauaggcaagucauaguugacagaggugauagguccgguuauucugguauuuucucuguugaaggcaaaagcugcaucaaucggugcuuuuauguagaguugauuaggggaagaaaagaggaaacugaagucuuguggaccucaaacaguauuguuguguuuuguggcaccucagguacauauggaacaggcucauggccugauggggcggaccucaaucucaugccuauauaa

SEQ ID NO: 57110 - RNA, 1410 nt, Artificial Sequence; identical to SEQ ID NO: 57074
  derived and/or modified CDS sequence (wt) from neuraminidase__InfluenzaA__AHM00482

SEQ ID NO: 57111 - RNA, 1410 nt, Artificial Sequence; identical to SEQ ID NO: 57074
  derived and/or modified CDS sequence (wt) from neuraminidase__InfluenzaA__AHM00494

SEQ ID NO: 57112 - RNA, 1410 nt, Artificial Sequence
  derived and/or modified CDS sequence (wt) from neuraminidase__InfluenzaA__AHM00506
augaauccaaaucaaaagauaauaacgauuggcucuguuucucucaccauuuccacaauaugcuucuucaugcaaauugccaucuugauaacuacuguaacauugcauuucaagcaauaugaauucaacucccccccaaacaaccaagugaugcugugugaaccaacaauaauagaaagaaacauaacagagauaguguauuugaccaacaccaccauagagaaggaaauaugccccaaaccagcagaauacagaaauuggucaaaaccgcaauguggcauuacaggauuugcaccuuucucuaaggacaauucgauuaggcuuuccgcugguggggacaucugggugacaagagaaccuuaugugucaugcgauccugacaaguguuaucaauuugcccuuggacagggaacaacacuaaacaacgugcauucaaauaacacaguacgugauaggaccccuuaucggacucuauugaugaaugaguuggguguuccuuuucaucuggggaccaagcaagugugcauagcaugguccagcucaaguugucacgauggaaaagcauggcugcauguuuguauaacgggggaugauaaaaaugcaacugcuagcuucauuuacaaugggaggcuuguagauaguguuguuucaugguccaaagaaauucucaggacccaggagucagaaugcguuuguaucaauggaacuuguacaguaguaaugacugauggaagugcuucaggaaaagcugauacuaaaauacuauucauugaggaggggaaaaucguucauacuagcacauugucaggaagugcucagcaugucgaagagugcucuugcuauccucgauauccuggugucagaugugucugcagagacaacuggaaaggcuccaaucggcccaucguagauauaaacauaaaggaucauagcauuguuuccaguuauguguguucaggacuuguuggagacacacccagaaaaaacgacagcuccagcaguagccauuguuuggauccuaacaaugaagaagguggucauggagugaaaggcugggccuuugaugauggaaaugacguauggaugggaagaacaaucaacgagacgucacgcuuaggguaugaaaccuucaaagucauugaaggcugguccaacccuaaguccaaauugcagauaaauaggcaagucauaguuaacagaggugauagguccgguuauucugguauuuuuucuguugaaggcaaaagcugcaucaaucggugcuuuuauguggaguugauuaggggaagaaaagaggaaacugaagucuuguggaccucaaacaguauuguuguguuuuguggcaccucagguacauauggaacaggcucauggccugauggggcggaccucaaucucaugccuauauaa

SEQ ID NO: 57113 - RNA, 1410 nt, Artificial Sequence
  derived and/or modified CDS sequence (wt) from neuraminidase__InfluenzaA__AHM00518
augaauccaaaucaaaagauaauaacgauuggcucuguuucucucaccauuuccacaauaugcuucuucaugcaaauugccaucuugauaacuacuguaacauugcauuucaagcaauaugaauucaacucccccccaaacaaccaagugaugcugugugaaccaacaauaauagaaagaaacauaacagagauaguguauuugaccaacaccaccauagagaaggaaauaugccccaaaccagcagaauacagaaauuggucaaaaccgcaauguggcauuacaggauuugcaccuuucucuaaggacaauucgauuaggcuuuccgcugguggggacaucugggugacaagagaaccuuaugugucaugcgauccugacaaguguuaucaauuugcccuuggacagggaacaacacuaaacaacgugcauucaaauaacacaguacgugauaggaccccuuaucggacucuauugaugaaugaguuggguguuccuuuucaucuggggaccaagcaagugugcauagcaugguccagcucaaguugucacgauggaaaagcauggcugcauguuuguauaacgggggaugauaaaaaugcaacugcuagcuucauuuacaaugggaggcuuguagauaguguuguuucaugguccaaagaaauucucaggacccaggagucagaaugcguuuguaucaauggaacuuguacaguaguaaugacugauggaagugcuucaggaaaagcugauacuaaaauacuauucauugaggaggggaaaauuguucauacuagcacauugucaggaagugcucagcaugucgaagagugcucuugcuauccucgauauccuggugucagaugugucugcagagacaacuggaaaggcuccaaucggcccaucguagauauaaacauaaaggaucauagcauuguuuccaguuauguguguucaggacuuguuggagacacacccagaaaaaacgacagcuccagcaguagccauuguuuggauccuaacaaugaagaagguggucauggagugaaaggcugggccuuugaugauggaaaugacguauggaugggaagaacaaucaacgagacgucacgcuuaggguaugaaaccuucaaagucauugaaggcugguccaacccuaaguccaaauugcagauaaauaggcaagucauaguugacagaggugauagguccgguuauucugguauuuuuucuguugaaggcaaaagcugcaucaaucggugcuuuuauguggaguugauuaggggaagaaaagaggaaacugaagucuuguggaccucaaacaguauuguuguguuuuguggcaccucagguacauauggaacaggcucauggccugauggggcggaccucaaucucaugccuauauaa

SEQ ID NO: 57114 - RNA, 1410 nt, Artificial Sequence
  derived and/or modified CDS sequence (wt) from neuraminidase__InfluenzaA__AHM00530
augaauccaaaucaaaagauaauaacgauuggcucuguuucucucaccauuuccacaauaugcuucuccaugcaaauugccaucuugauaacuacuguaacauugcauuucaagcaauaugaauucaacccccccccaaacaaccaagugaugcugugugaaccaacaauaauagaaagaaacauaacagagauaguguauuugaccaacaccaccauagagaaggaaauaugccccaaaccagcagaauacagaaauuggucaaaaccgcaauguggcauuacaggauuugcaccuuucucuaaggacaauucgauuaggcuuuccgcugguggggacaucugggugacaagagaaccuuaugugucaugcgauccugacaaguguuaucaauuugcccuuggacagggaacaacacuaaacaacgugcauucaaauaacacaguacgugauaggaccccuuaucggacucuauugaugaaugaguuggguguuccuuuucaucuggggaccaagcaagugugcauagcaugguccagcucaaguugucacgauggaaaagcauggcugcauguuuguauaacgggggaugauaaaaaugcaacugcuagcuucauuuacaaugggaggcuuguagauaguguuguuucaugguccaaagaaauucucaggacccaggagucagaaugcguuuguaucaauggaacuuguacaguaguaaugacugauggaagugcuucaggaaaagcugauacuaaaauacuauucauugaggaggggaaaaucguucauacuagcacauugucaggaagugcucagcaugucgaagagugcucuugcuauccucgauauccuggugucagaugugucugcagagacaacuggaaaggcuccaaucggcccaucguagauauaaacauaaaggaucauagcauuguuuccaguuauguauguucaggacuuguuggagacacacccagaaaaaacgacagcuccagcaguagccauuguuuggauccuaacaaugaagaagguggucauggagugaaaggcugggccuuugaugauggaaaugacguauggaugggaagaacaaucaacgagacgucacgcuuaggguaugaaaccuucaaagucauugaaggcugguccaacccuaaguccaaauugcagauaaauaggcaagucauaguugacagaggugauagguccgguuauucugguauuuuuucuguugaaggcaaaagcugcaucaaucggugcuuuuauguggaguugauuaggggaagaaaagaggaaacugaagucuuguggaccucaaacaguauuguuguguuuuguggcaccucagguacauauggaacaggcucauggccugauggggcggaccucaaucucaugccuauauaa

SEQ ID NO: 57115 - RNA, 1410 nt, Artificial Sequence; identical to SEQ ID NO: 57082
  derived and/or modified CDS sequence (wt) from neuraminidase__InfluenzaA__AHM00542

SEQ ID NO: 57116 - RNA, 1410 nt, Artificial Sequence
  derived and/or modified CDS sequence (wt) from neuraminidase__InfluenzaA__AHM00546
augaauccaaaucaaaagauaauaacgauuggcucuguuucucucaccauuuccacaauaugcuucuucaugcaaauugccaucuugauaacuacuguaacauugcauuucaagcaauaugaauucaauucccccccaaacaaccaagugaugcugugugaaccaacaauaauagaaagaaacauaacagagauaguguaucuaaccaacaccaccauagagaaggaaauaugccccaaaccagcagaauacagaaauuggucaaagccgcagugugacauuacaggauuugcaccuuuuucuaaggacaauucgauuaggcuuuccgcugguggggacaucugggugacaagagaaccuuaugugucaugcgauccugacaaguguuaucaauuugcucuuggacagggaacaacacuaaacaacgugcauucaaauaacacaguacgugauaggaccccuuaucggacccuauugaugaaugaguuagguguuccuuuucaucuggggaccaagcaagugugcauagcaugguccagcucaaguugucacgauggaaaagcauggcugcauguuuguauaacgggggaugauaaaaaugcaacugcuagcuucauuuacaaugggaggcuuguagauaguguuguuucaugguccaaagaaauccucaggacccaggaaucagaaugcguuuguaucaauggaacuuguacaguaguaaugacugaugggagugcuucaggaaaagcugauacuaaaauacuauucauugaggaggggaaaaucguucauacuagcacauugucaggaagugcucagcaugucgaggagugcucuugcuauccucgauauccuggugucagaugugucugcagagacaacuggaaaggcuccaauaggccuaucguagauauaaacauaaaggaucauagcauuguuuccaaguauguguguucaggacuuguuggagacacacccagaaaaaacgacagcucaagcaguagccauuguuuggauccuaacaaugaagaagguggucauggagugaaaggcugggccuucgaugauggaaaugacguguggaugggaagaacgaucaacgagacgucacguuuaggguaugaaaccuucaaagucauugaaggcugguccaacccuaaguccaaauugcagauaaauaggcaggucauaguugacagaggugauagguccgguuauucugguauuuucucuguugaaggcaaaagcugcaucaaucggugcuuuuauguggaguugauuaggggaagaaaagaggaaacugaagucuuguggaccucaaacaguauuguuguguuuuguggcaccucagguacauauggaacaggcucauggccugauggggcggaccucaaucucaugccuauauaa

SEQ ID NO: 57117 - RNA, 1410 nt, Artificial Sequence
  derived and/or modified CDS sequence (wt) from neuraminidase__InfluenzaA__AHM00558
augaauccaaaucaaaagauaauaacgauuggcucuguuucucucaccauuuccacaauaugcuucuucaugcaaauugccaucuugauaacuacuguaacauugcauuucaagcaauaugaauucaacucccccccaaacaaccaagugaugcugugugaaccaacaauaauagaaagaaacauaacagagauaguguauuugaccaacaccaccauagagaaggaaguaugccccaaaccagcagaauacagaaauuggucaaaaccgcaauguggcauuacaggauuugcaccuuucucuaaggacaauucgauuaggcuuuccgcugguggggacaucugggugacaagagaaccuuaugugucaugcgauccugacaaguguuaucaauuugcccuuggacagggaacaacacuaaacaacgugcauucaaauaacacaguacgugauaggaccccuuaucggacucuauugaugaaugaguuggguguuccuuuucaucuggggaccaagcaagugugcauagcaugguccagcucaaguugucacgauggaaaagcauggcugcauguuuguauaacgggggaugauaaaaaugcaacugcuagcuucauuuacaaugggaggcuuguagauaguguuguuucaugguccaaagaaauucucaggacccaggagucagaaugcguuuguaucaauggaacuuguacaguaguaaugacugauggaagugcuucaggaaaagcugauacuaaaauacuauucauugaggaggggaaaaucguucauacuagcacauugucaggaagugcucagcaugucgaagagugcucuugcuauccucgauauccuggugucagaugugucugcagagacaacuggaaaggcuccaaucggcccaucguagauauaaacauaaaggaucauagcauuguuuccaguuauguguguucaggacuuguuggagacacacccagaaaaaacgacagcuccagcaguagccauuguuuggauccuaacaaugaagaagguggucauggagugaaaggcugggccuuugaugauggaaaugacguauggaugggaagaacaaucaacgagacgucacgcuuaggguaugaaaccuucaaagucauugaaggcugguccaacccuaaguccaaauugcagauaaauaggcaagucauaguugacagaggugauagguccgguuauucugguauuuucucuguugaaggcaaaagcugcaucaaucggugcuuuuauguggaguugauuaggggaagaaaagaggaaacugaagucuuguggaccucaaacaguauuguuguguuuuguggcaccucagguacauauggaacaggcucauggccugauggggcggaccucaaucucaugccuauauaa

SEQ ID NO: 57118 - RNA, 1410 nt, Artificial Sequence; identical to SEQ ID NO: 56923
  derived and/or modified CDS sequence (wt) from neuraminidase__InfluenzaA__AHM00570

SEQ ID NO: 57119 - RNA, 1410 nt, Artificial Sequence; identical to SEQ ID NO: 55922
  derived and/or modified CDS sequence (wt) from neuraminidase__InfluenzaA__AHM00582

SEQ ID NO: 57120 - RNA, 1410 nt, Artificial Sequence
  derived and/or modified CDS sequence (wt) from neuraminidase__InfluenzaA__AHM00594
augaauccaaaucaaaagauaauaacgauuggcucuguuucucucaccauuuccacaauaugcuucuucaugcaaauugccauccugauaacuacuguaacauugcauuucaagcaacaugaauucaacucccccccaaacaaucaagugaugcugugugaaccaacaauaauagaaagaaacauaacagagauagugcaucugaccaacaccaccauagagaaagaaauaugccccaaaccagcagaauacagaaauuggucaaaaccgcaauguggcauuacaggauuugcaccuuucucuaaggacaauucgauuaggcuuuccgcugguggggacaucugggugacaagagaaccuuaugugucaugcgauccugacaaguguuaucaauuugcccuuggacagggaacaacacuaaacaacgugcauucaaauaacacaguacgugauaggaccccuuaucggacucuauugaugaaugaguuggguguuccuuuucaucuggggaccaagcaagugugcauagcaugguccagcucaaguugucacgauggaaaagcauggcugcauguuuguauaacgggggaugauaaaaaugcaacugcuagcuucauuuacaaugggaggcuuguagauaguguuguuucaugguccaaagaaauucucaggacccaggagucagaaugcguuuguaucaauggaacuuguacaguaguaaugacugauggaagugcuucaggaaaagcugauacuaaaauacuauucauugaggaggggaaaaucguucauacuagcacauugucaggaagugcucagcaugucgaagagugcucuugcuauccucgauauccuggugucagaugugucugcagagacaacuggaaaggcuccaaucggcccaucguagauauaaacauaaaggaucauagcauuguuuccaguuauguguguucaggacuuguuggagacacacccagaaaaaacgacagcuccagcaguagccauuguuuggauccuaacaaugaagaagguggucauggagugaaaggcugggccuuugaugauggaaaugacguguggaugggaagaacaaucaacgagacgucacgcuuaggguaugaaaccuucaaagucauugaaggcugguccaauccuaaguccaaauugcagauaaauaggcaagucauaguugacagaggugauagguccgguuauucugguauuuucucuguugaaggcaaaagcugcaucaaucggugcuuuuauguagaguugauuaggggaagaaaagaggaaacugaagucuuguggaccucaaacaguauuguuguguuuuguggcaccucagguacauauggaacaggcucauggccugauggggcggaccucaaucucaugccuauauaa

SEQ ID NO: 57121 - RNA, 1410 nt, Artificial Sequence; identical to SEQ ID NO: 55922
  derived and/or modified CDS sequence (wt) from neuraminidase__InfluenzaA__AHM00606

SEQ ID NO: 57122 - RNA, 1410 nt, Artificial Sequence; identical to SEQ ID NO: 57113
  derived and/or modified CDS sequence (wt) from neuraminidase__InfluenzaA__AHM00618

SEQ ID NO: 57123 - RNA, 1410 nt, Artificial Sequence; identical to SEQ ID NO: 55922
  derived and/or modified CDS sequence (wt) from neuraminidase__InfluenzaA__AHM00630

SEQ ID NO: 57124 - RNA, 1410 nt, Artificial Sequence; identical to SEQ ID NO: 55922
  derived and/or modified CDS sequence (wt) from neuraminidase__InfluenzaA__AHM00642

SEQ ID NO: 57125 - RNA, 1410 nt, Artificial Sequence; identical to SEQ ID NO: 57082
  derived and/or modified CDS sequence (wt) from neuraminidase__InfluenzaA__AHM00654

SEQ ID NO: 57126 - RNA, 1410 nt, Artificial Sequence; identical to SEQ ID NO: 55869
  derived and/or modified CDS sequence (wt) from neuraminidase__InfluenzaA__AHM00666

SEQ ID NO: 57127 - RNA, 1410 nt, Artificial Sequence; identical to SEQ ID NO: 57109
  derived and/or modified CDS sequence (wt) from neuraminidase__InfluenzaA__AHM00678

SEQ ID NO: 57128 - RNA, 1410 nt, Artificial Sequence; identical to SEQ ID NO: 55813
  derived and/or modified CDS sequence (wt) from neuraminidase__InfluenzaA__AHM00690

SEQ ID NO: 57129 - RNA, 1410 nt, Artificial Sequence; identical to SEQ ID NO: 57094
  derived and/or modified CDS sequence (wt) from neuraminidase__InfluenzaA__AHM00701

SEQ ID NO: 57130 - RNA, 1410 nt, Artificial Sequence
  derived and/or modified CDS sequence (wt) from neuraminidase__InfluenzaA__AHM00713
augaauccaaaucaaaagauaauaacgauuggcucuguuucucucaccauuuccacaauaugcuucuucaugcaaauugccaucuugauaacuacuguaacauugcauuucaagcaauaugaauucaacucccccccaaacaaccaagugaugcugugugaaccaacaauaauagaaagaaacauaacagagauaguguauuugaccaacaccaccauagagaaggaaauaugccccaaaucagcagaauacagaaauuggucaaaaccgcaauguggcauuacaggauuugcaccuuucucuaaggacaauucgauuaggcuuuccgcugguggggacaucugggugacaagagaaccuuaugugucaugcgauccugacaaguguuaucaauuugcccuuggacagggaacaacacuaaacaacgugcauucaaauaacacaguacgugauaggaccccuuaucggacucuauugaugaaugaguuggguguuccuuuucaucuggggaccaagcaagugugcauagcaugguccagcucaaguugucacgauggaaaagcauggcugcauguuuguauaacgggggaugauaaaaaugcaacugcuagcuucauuuacaaugggaggcuuguagauaguguuguuucaugguccaaagaaauucucaggacccaggagucagaaugcguuuguaucaauggaacuuguacaguaguaaugacugauggaagugcuucaggaaaagcugauacuaaaauacuauucauugaggaggggaaaaucguucauacuagcacauugucaggaagugcucagcaugucgaagagugcucuugcuauccucgauauccuggugucagaugugucugcagagacaacuggaaaggcuccaaucggcccaucguagauauaaacauaaaggaucauagcauuguuuccaguuauguguguucaggacuuguuggagacacacccagaaaaaacgacagcuccagcaguagccauuguuuggauccuaacaaugaagaagguggucauggagugaaaggcugggccuuugaugauggaaaugacguauggaugggaagaacaaucaacgagacgucacgcuuaggguaugaaaccuucaaagucauugaaggcugguccaacccuaaguccaaauugcagauaaauaggcaagucauaguugacagaggugauagguccgguuauucugguauuuuuucuguugaaggcaaaagcugcaucaaucggugcuuuuauguggaguugauuaggggaagaaaagaggaaacugaagucuuguggaccucaaacaguauuguuguguuuuguggcaccucagguacauauggaacaggcucauggccugauggggcggaccucaaucucaugccuauauaa

SEQ ID NO: 57131 - RNA, 1410 nt, Artificial Sequence; identical to SEQ ID NO: 55922
  derived and/or modified CDS sequence (wt) from neuraminidase__InfluenzaA__AHM00725

SEQ ID NO: 57132 - RNA, 1410 nt, Artificial Sequence; identical to SEQ ID NO: 55922
  derived and/or modified CDS sequence (wt) from neuraminidase__InfluenzaA__AHM00737

SEQ ID NO: 57133 - RNA, 1410 nt, Artificial Sequence; identical to SEQ ID NO: 57066
  derived and/or modified CDS sequence (wt) from neuraminidase__InfluenzaA__AHM00749

SEQ ID NO: 57134 - RNA, 1410 nt, Artificial Sequence
  derived and/or modified CDS sequence (wt) from neuraminidase__InfluenzaA__AHM00761
augaauccaaaucaaaagauaauaacgauuggcucuguuucucucaccauuuccacaauaugcuucuucaugcaaauugccaucuugauaacuacuguaacauugcauuucaagcaauaugaauucaacucccccccaaacaaccaagugaugcugugugaaccaacaauaauagaaagaaacauaacagagauaguguauuugaccaacaccaccauagagaaggaaauaugccccaaaccagcagaauacagaaauugguccaaaccgcaauguggcauuacaggauuugcaccuuucucuaaggacaauucgauuaggcuuuccgcugguggggacaucugggugacaagagaaccuuaugugucaugcgauccugacaaguguuaucaauuugcccuuggacagggaacaacacuaaacaacgugcauucaaauaacacaguacgugauaggaccccuuaucggacucuauugaugaaugaguuggguguuccuuuucaucuggggaccaagcaagugugcauagcaugguccagcucaaguugucacgauggaaaagcauggcugcauguuuguauaacgggggaugauaaaaaugcaacugcuagcuucauuuacaaugggaggcuuguagauaguguuguuucaugguccaaagaaauucucaggacccaggagucagaaugcguuuguaucaauggaacuuguacaguaguaaugacugauggaagugcuucaggaaaagcugauacuaaaauacuauucauugaggaggggaaaaucguucauacuagcacauugucaggaagugcucagcaugucgaagagugcucuugcuauccucgauauccuggugucagaugugucugcagagacaacuggaaaggcuccaaucggcccaucguagauauaaacauaaaggaucauagcauuguuuccaguuauguguguucaggacuuguuggagacacacccagaaaaaacgacagcuccagcaguagccauuguuuggauccuaacaaugaagaagguggucauggagugaaaggcugggccuuugaugauggaaaugacguauggaugggaagaacaaucaacgagacgucacgcuuaggguaugaaaccuucaaagucauugaaggcugguccaacccuaaguccaaauugcagauaaauaggcaagucauaguugacagaggugauagguccgguuauucugguauuuuuucuguugaaggcaaaagcugcaucaaucggugcuuuuauguggaguugauuaggggaagaaaagaggaaacugaagucuuguggaccucaaacaguauuguuguguuuuguggcaccucagguacauauggaacaggcucauggccugauggggcggaccucaaucucaugccuauauaa

SEQ ID NO: 57135 - RNA, 1410 nt, Artificial Sequence
  derived and/or modified CDS sequence (wt) from neuraminidase__InfluenzaA__AHM00785
augaauccaaaucaaaagauaauaacgauuggcucuguuucucucaccauuuccacaauaugcuucuucaugcaaauugccauccugauaaccacuguaacauugcauuucaagcaauaugaauucaacucccccccaaacaaccaagugaugcugugugaaccaacaauaauagaaagaaacauaacagagauaguguaucuaaccaacaccaccauagagaaggaaauaugccccaaaccagcagaauacagaaauuggucaaagccgcaaugugacauuacaggauuugcaccuuuuucuaaggacaauucgauuaggcuuuccgcugguggggacaucugggugacaagagaaccuuaugugucaugcgauccugacaaguguuaucaauuugcucuuggacagggaacaacacuaaacaacgugcauucaaauaacacaguacgugauaggaccccuuaucggacccuauugaugaaugaguuagguguuccuuuucaucuggggaccaagcaagugugcauagcaugguccagcucaaguugucacgauggaaaagcauggcugcauguuuguauaacgggggaugauaaaaaugcaacugcuagcuucauuuacaaugggaggcuuguagauaguguuguuucaugguccaaagaaauccucaggacccaggagucagaaugcguuuguaucaauggaacuuguacaguaguaaugacugaugggagugcuucaggaaaagcugauacuaaaauacuauucauugaggaggggaaaaucguucauacuagcacauugucaggaagugcucagcaugucgaggagugcucuugcuauccucgguauccuggugucagaugugucugcagagacaacuggaaaggcuccaauaggccuaucguagauauaaacauaaaggaucauagcauuguuuccagguauguguguucaggacuuguuggagacacacccagaaaaaacgacagcuccagcaguagccauuguuuggauccuaacaaugaagaagguggucauggagugaaaggcugggccuucgaugauggaaaugacguguggaugggaagaacgaucaacgagacgucacguuuaggguaugaaaccuucaaagucauugaaggcugguccaacccuaaguccaaauugcagauaaauaggcaggucauaguugacagaggugauagguccgguuauucugguauuuucucuguugaaggcaaaagcugcaucaaucggugcuuuuauguagaguugauuaggggaagaaaagaggaaacugaagucuuguggaccucaaacaguauuguuguguuuuguggcaccucagguacauauggaacaggcucauggccugauggggcggaccucaaucucaugccuauauaa

SEQ ID NO: 57136 - RNA, 1410 nt, Artificial Sequence; identical to SEQ ID NO: 57076
  derived and/or modified CDS sequence (wt) from neuraminidase__InfluenzaA__AHM00797

SEQ ID NO: 57137 - RNA, 1410 nt, Artificial Sequence
  derived and/or modified CDS sequence (wt) from neuraminidase__InfluenzaA__AHM00809
augaauccaaaucaaaagauaauaacgauuggcucuguuucucucaccauuuccacaauaugcuucuucauacaaauugccaucuugauaacuacuguaacauugcauuucaagcaauaugaauucaacucccccccaaacaaccaaguaaugcugugugaaccaacaauaauagaaagaaacauaacagagauaguguaucugaccaacaccaccauagagaaggaaauaugucccaaaccagcagaauacagaaauuggucaaagccgcaaugugacauuacaggauuugcaccuuuuucuaaggacaauucgauuaggcuuuccgcugguggggacaucugggugacaagagaaccuuaugugucaugugauccugacaaguguuaucaauuugcccuuggacagggaacaacacuaaacaacaugcauucaaauaacacaguacgugauaggaccccuuaucggacccuauugaugaaugaguuggguguuccuuuucaucuggggaccaagcaagugugcauagcaugguccagcucaagcugucacgauggaaaagcauggcugcauguuuguauaacgggggaugauaaaaaugcaacugcuagcuucauuuacaauggaaggcuuguagauaguguuguuucaugguccaaagaaauccucaggacccaggagucagaaugcguuugcaucaauggaacuuguacaguaguaaugacugaugggagugcuucgggaaaagcugauacuaaaauacuauucauugaggaggggaaaaucguucauacuagcacauugucaggaagugcucagcaugucgaggagugcucuugcuauccucgauacccuggugucagaugugucugcagagacaacuggaaaggcuccaauaggcccaucguagauauaaacauaaaggaucauagcauuguuuccaguuauguguguucagggcuuguuggagacacacccagaaaaaacgacagcuccagcaguagccauuguuuggauccuaacaaugaagaagguggucauggagugaaaggcugggccuuugaugauggaaaugacguguggaugggaagaacgaucaacgagacgucacguuuaggguaugaaaccuucaaagucauugaaggcugguccaacccuaaguccaaauugcagauaaauaggcaagucauaguugacagaggcgauagguccgguuauucugguauuuucucuguugaaggcaaaagcugcaucaaucggugcuuuuauguggaguugaucaggggaagaaaagaggaaacugaagucuuguggaccucaaacaguauuguuguguuuuguggcaccucagguacauauggaacaggcucauggccugauggggcggaccucaaucucaugccuauauaa

SEQ ID NO: 57138 - RNA, 1410 nt, Artificial Sequence; identical to SEQ ID NO: 57109
  derived and/or modified CDS sequence (wt) from neuraminidase__InfluenzaA__AHM00821

SEQ ID NO: 57139 - RNA, 1410 nt, Artificial Sequence; identical to SEQ ID NO: 57066
  derived and/or modified CDS sequence (wt) from neuraminidase__InfluenzaA__AHM00833

SEQ ID NO: 57140 - RNA, 1410 nt, Artificial Sequence; identical to SEQ ID NO: 57076
  derived and/or modified CDS sequence (wt) from neuraminidase__InfluenzaA__AHM00845

SEQ ID NO: 57141 - RNA, 1410 nt, Artificial Sequence; identical to SEQ ID NO: 56923
  derived and/or modified CDS sequence (wt) from neuraminidase__InfluenzaA__AHM00857

SEQ ID NO: 57142 - RNA, 1410 nt, Artificial Sequence; identical to SEQ ID NO: 56923
  derived and/or modified CDS sequence (wt) from neuraminidase__InfluenzaA__AHM00869

SEQ ID NO: 57143 - RNA, 1410 nt, Artificial Sequence; identical to SEQ ID NO: 55922
  derived and/or modified CDS sequence (wt) from neuraminidase__InfluenzaA__AHM00881

SEQ ID NO: 57144 - RNA, 1410 nt, Artificial Sequence; identical to SEQ ID NO: 55976
  derived and/or modified CDS sequence (wt) from neuraminidase__InfluenzaA__AHM00893

SEQ ID NO: 57145 - RNA, 1410 nt, Artificial Sequence
  derived and/or modified CDS sequence (wt) from neuraminidase__InfluenzaA__AHM00905
augaauccaaaucaaaagauaauaacgauuggcucuguuucucucaccauuuccacaauaugcuucuucaugcaaauugccaucuugauaacuacuguaacauugcauuucaagcaauaugaauucaacucccccccaaacaaccaagugaugcugugugaaccaacaauaauagaaagaaacauaacagagauaguguaucugaccaacaccaccauagagaaggaaauaugccccaaaccagcagaauacagaaauuggucaaaaccgcaauguggcauuacaggauuugcaccuuucucuaaggacaauucgauuaggcuuuccgcugguggggacaucugggugacaagagaaccuuaugugucaugcgaucccgacaaguguuaucaauuugcccuuggacagggaacaacacuaaacaacgugcauucaaauaacacaguacgugauaggaccccuuaucggacucuauugaugaaugaguuggguguuccuuuucaucuggggaccaagcaagugugcauagcaugguccagcucaaguugucacgauggaaaagcauggcugcauguuuguauaacgggggaugauaaaaaugcaacugcuagcuucauuuacaaugggaggcuuguagauaguguuguuucaugguccaaagaaauucucaggacccaggagucagaaugcguuuguaucaauggaacuuguacaguaguaaugacugauggaagugcuucaggaaaagcugauacuaaaauacuauucauugaggaggggaaaaucguucauacuagcacauugucaggaagugcucagcaugucgaagagugcucuugcuauccucgauauccuggugucagaugugucugcagagacaacuggaaaggcuccaaucggcccaucguagauauaaacauaaaggaucauagcauuguuuccaguuauguguguucaggacuuguuggagacacacccagaaaaaccgacagcuccagcaguggccauuguuuggauccuaacaaugaagaagguggucauggagugaaaggcugggccuuugaugauggaaaugacguguggaugggaagaacaaucaacgagacgucacgcuuaggguaugaaaccuucaaagucauugaaggcugguccaacccuaaguccaaauugcagauaaauaggcaagucauaguugacagaggugauagguccgguuauucugguauuuucucuguugaaggcaaaagcugcaucaaucggugcuuuuauguggaguugauuaggggaagaaaagaggaaacugaagucuuguggaccucaaacaguauuguuguguuuuguggcaccucagguacauauggaacaggcucauggccugauggggcggaccucaaucucaugccuauauaa

SEQ ID NO: 57146 - RNA, 1410 nt, Artificial Sequence
  derived and/or modified CDS sequence (wt) from neuraminidase__InfluenzaA__AHM00917
augaauccaaaucaaaagauaauaacgauuggcucuguuucucucaccauuuccacaauaugcuucuucaugcaaauugccaucuugauaacuacuguaacauugcauuucaagcaauaugaauucaacucccccccaaacaaccaagugaugcugugugaaccaacaauaauagaaagaaacauaacagagauaguguauuugaccaacaccaccauagagaaggaaauaugccccaaaccagcagaauacagaaauuggucaaaaccgcaauguggcauuacaggauuugcaccuuucucuaaggacaauucgauuaggcuuuccgcugguggggacaucugggugacaagagaaccuuaugugucaugcgauccugacaaguguuaucaauuugcccuuggacagggaacaacacuaaacaacgugcauucaaauaacacaguacgugauaggaccccuuaucggacucuauugaugaaugaguuggguguuccuuuucaucuggggaccaagcaagugugcauagcaugguccagcucaaguugucacgauggaaaagcauggcugcauguuuguauaacgggggaugauaaaaaugcaacugcuagcuucauuuacaaugggaggcuuguagauaguguuguuucaugguccaaagaaauucucaggacccaggagucagaaugcguuuguaucaauggaacuuguacaguaguaaugacugauggaagugcuucaggaaaagcugauacuaaaauacuauucauugaggaggggaaaaucguucauacuagcacauugucaggaagugcucagcaugucgaagagugcucuugcuauccucgauauccuggugucagaugugucugcagagacaacuggaaaggcuccaaucggcccaucguagauauaaacauaaaggaucauagcauuguuuccaguuauguguguucaggacuuguuggagacacacccagaaaaaacgacagcuccagcaguagccauuguuuggauccuaacaaugaagaagguggucauggagugaaaggcugggccuuugaugauggaaaugacauauggaugggaagaacaaucaacgagacgucacgcuuaggguaugaaaccuucaaagucauugaaggcugguccaacccuaaguccaaauugcagauaaauaggcaagucauaguugacagaggugauagguccgguuauucugguauuuuuucuguugaaggcaaaagcugcaucaaucggugcuuuuauguggaguugauuaggggaagaaaagaggaaacugaagucuuguggaccucaaacaguauuguuguguuuuguggcaccucagguacauauggaacaggcucauggccugauggggcggaccucaaucucaugccuauauaa

SEQ ID NO: 57147 - RNA, 1410 nt, Artificial Sequence
  derived and/or modified CDS sequence (wt) from neuraminidase__InfluenzaA__AHM00929
augaauccaaaucaaaagauaauaacgauuggcucuguuucucucaccauuuccacaauaugcuucuucaugcaaauugccaucuugauaacuacuguaacauugcauuucaagcaauaugaauucaacucccccccaaacaaccaagugaugcugugugaaccaacaauaauagaaagaaacauaacagagauaguguauuugaccaacaccaccauagagaaggaaauaugccccaaaccagcagaauacagaaauuggucaaaaccgcaauguggcauuacaggauuugcaccuuucucuaaggacaauucgauuaggcuuuccgcugguggggacaucugggugacaagagaaccuuaugugucaugcgauccugacaaguguuaucaauuugcccuuggacagggaacaacacuaaacaacgugcauucaaauaacacaguacgugauaggaccccuuaucggacucuauugaugaaugaauuggguguuccuuuucaucuggggaccaagcaagugugcauagcaugguccagcucaaguugucacgauggaaaagcauggcugcauguuuguauaacgggggaugauaaaaaugcaacugcuagcuucauuuacaaugggaggcuuguagauaguguuguuucaugguccaaagaaauucucaggacccaggagucagaaugcguuuguaucaauggaacuuguacaguaguaaugacugauggaagugcuucaggaaaagcugauacuaaaauacuauucauugaggaggggaaaaucguucauacuagcacauugucaggaagugcucagcaugucgaagagugcucuugcuauccucgauauccuggugucagaugugucugcagagacaacuggaaaggcuccaaucggcccaucguagauauaaacauaaaggaucauagcauuguuuccaguuauguguguucaggacuuguuggagacacacccagaaaaaacgacagcuccagcaguagccauuguuuggauccuaacaaugaagaagguggucauggagugaaaggcugggcauuugaugauggaaaugacguauggaugggaagaacaaucaacgagacgucacgcuuaggguaugaaaccuucaaagucauugaaggcugguccaacccuaaguccaaauugcagauaaauaggcaagucauaguugacagaggugauagguccgguuauucugguauuuuuucuguugaaggcaaaagcugcaucaaucggugcuuuuauguggaguugauuaggggaagaaaagaggaaacugaagucuuguggaccucaaacaguauuguuguguuuuguggcaccucagguacauauggaacaggcucauggccugauggggcggaccucaaucucaugccuauauaa

SEQ ID NO: 57148 - RNA, 1410 nt, Artificial Sequence
  derived and/or modified CDS sequence (wt) from neuraminidase__InfluenzaA__AHM00941
augaauccaaaucaaaagauaauaacgauuggcucuguuucucucaccauuuccacaauaugcuucuucaugcaaauugccaucuugauaacuacuguaacauugcauuucaagcaauaugaauucaacucccccccaaacaaccaagugaugcugugugaaccaacaauaauagaaagaaacauaacagagauaguguaucuaaccaacaccaccauagagaaggaaauaugccccaaaccagcagaauacagaaauuggucaaagccgcaaugugacauuacaggauuugcaccuuuuucuaaggacaauucgauuaggcuuuccgcugguggggacaucugggugacaagagaaccuuaugugucaugcgauccugauaaguguuaucaauuugcucuuggacagggaacaacacuaaacaacgugcauucaaauaacacaauacgugauaggaccccuuaucggacccuauugaugaaugaguuagguguuccuuuucaucuggggaccaagcaagugugcauagcaugguccagcucaaguugucacgauggaaaagcauggcugcauguuuguauaacgggggaugauaaaaaugcaacugcuagcuucauuuacaaugggaggcuuguagauaguguuguuucaugguccaaagaaauccucaggacccaggagucagaaugcguuuguaucaauggaacuuguacaguaguaaugacugaugggagugcuucaggaaaagcugauacuaaaauacuauucauugaggaggggaaaaucguucauacuagcacauugucaggaagugcucagcaugucgaggagugcucuugcuauccucgauauccuggugucagaugugucugcagagacaacuggaaaggcuccaauaggccuaucguagauauaaacauaaaggaucauagcauuguuuccagguauguguguucaggacuuguuggagacacacccagaaaaaacgacagcuccagcaguagccauuguuuggauccuaacaaugaagaagguggucauggagugaaaggcugggccuucgaugauggaaaugacguguggaugggaagaacgaucaacgagacgucacguuuaggguaugaaaccuucaaagucauugaaggcugguccaacccuaaguccaaauugcagauaaauaggcaggucauaguugacagaggugauagguccgguuauucugguauuuucucuguugaaggcaaaagcugcaucaaucggugcuuuuauguggaguugauuaggggaagaaaagaggaaacugaagucuuguggaccucaaacaguauuguuguguuuuguggcaccucagguacauauggaacaggcucauggccugauggggcggaccucaaucucaugccuauauaa

SEQ ID NO: 57149 - RNA, 1410 nt, Artificial Sequence
  derived and/or modified CDS sequence (wt) from neuraminidase__InfluenzaA__AHM00953
augaauccaaaucaaaagauaauaacgauuggcucuguuucucucaccauuuccacaauaugcuucuucaugcaaauugccaucuugauaacuacuguaacauugcauuucaagcaauaugcauucaacucccccccaaacaaccaagugaugcugugugaaccaacaauaauagaaagaaacauaacagagauaguguauuugaccaacaccaccauagagaaggaaauaugccccaaaccagcagaauacagaaauuggucaaaaccgcaauguggcauuacaggauuugcaccuuucucuaaggacaauucgauuaggcuuuccgcugguggggacaucugggugacaagagaaccuuaugugucaugcgauccugacaaguguuaucaauuugcccuuggacagggaacaacacuaaacaacgugcauucaaauaacacaguacgugauaggaccccuuaucggacucuauugaugaaugaguuggguguuccuuuucaucuggggaccaagcaagugugcauagcaugguccagcucaaguugucacgauggaaaagcauggcugcauguuuguauaacgggggaugauaaaaaugcaacugcuagcuucauuuacaaugggaggcuuguagauaguguuguuucaugguccaaagaaauucucaggacccaggagucagaaugcguuuguaucaauggaacuuguacaguaguaaugacugauggaagugcuucaggaaaagcugauacuaaaauacuauucauugaggaggggaaaaucguucauacuagcacauugucaggaagugcucagcaugucgaagagugcucuugcuauccucgauauccuggugucagaugugucugcagagacaacuggaaaggcuccaaucggcccaucguagauauaaacauaaaggaucauagcauuguuuccaguuauguguguucaggacuuguuggagacacacccagaaaaaacgacagcuccagcaguagccauuguuuggauccuaacaaugaagaagguggucauggagugaaaggcugggccuuugaugauggaaaugacguauggaugggaagaacaaucaacgagacgucacgcuuaggguaugaaaccuucaaagucauugaaggcugguccaacccuaaguccaaauugcagauaaauaggcaagucauaguugacagaggugauagguccgguuauucugguauuuuuucuguugaaggcaaaagcugcaucaaucggugcuuuuauguggaguugauuaggggaagaaaagaggaaacugaagucuuguggaccucaaacaguauuguuguguuuuguggcaccucagguacauauggaacaggcucauggccugauggggcggaccucaaucucaugccuauauaa

SEQ ID NO: 57150 - RNA, 1410 nt, Artificial Sequence; identical to SEQ ID NO: 57082
  derived and/or modified CDS sequence (wt) from neuraminidase__InfluenzaA__AHM00965

SEQ ID NO: 57151 - RNA, 1410 nt, Artificial Sequence
  derived and/or modified CDS sequence (wt) from neuraminidase__InfluenzaA__AHM00977
augaauccaaaucaaaagauaauaacgauuggcucuguuucucucaccauuuccacaauaugcuucuucaugcaaauugccauccugauaaccacuguaacauugcauuucaagcaauaugaauucaacucccccccaaacaaccaagugaugcugugugaaccaacaauaauagaaagaaacauaacagagauaguguaucuaaccaacaccaccauagagaaggaaauaugccccaaaccagcagaauacagaaauuggucaaagccgcaaugugacauuacaggauuugcaccuuuuucuaaggacaauucgauuaggcuuuccgcugguggggacaucugggugacaagagaaccuuaugugucaugcgauccugacaaguguuaucaauuugcucuuggacagggaacaacacuaaacaacgugcauucaaauaacacaguacgugauaggaccccuuaucggacccuauugaugaaugaguuagguguuccuuuucaucuggggaccaagcaagugugcauagcaugguccagcucaaguugucacgauggaaaagcauggcugcauguuuguauaacgggggaugauaaaaaugcaacugcuagcuucauuuacaaugggaggcuuguagauaguguuguuucaugguccaaagaaauccucaggacccaggagucagaaugcguuuguaucaauggaacuuguacaguaguaaugacugaugggagugcuucaggaaaagcugauacuaaaauacuauucauugaggaggggaaaaucguucauacuagcacauugucaggaagugcucagcaugucgaggagugcucuugcuauccucgguauccuggugucagaugugucugcagagacaacuggaaaggcuccaauaggccuaucguagauauaaacauaaaggaucauagcauuguuuccagguauguguguucaggacuuguuggagacacacccagaaaaaacgacagcuccagcaguagccauuguuuggauccuaacaaugaagaagguggucauggagugaaaggcugggccuucgaugauggaaaugacguguggaugggaagaacgaucaacgagacgucacguuuaggguaugaaaccuucaaagucauugaaggcugguccaacccuaaguccaaauugcagauaaauaggcaggucauaguugacagaggugauagguccgguuauucugguauuuucucuguugaaggcaaaagcugcaucaaucggugcuuuuauguggaguugauuaggggaagaaaagaggaaacugaagucuuguggaccucaaacaguauuguuguguuuuguggcaccucagguacauauggaacaggcucauggccugauggggcggaccucaaucucaugccuauauaa

SEQ ID NO: 57152 - RNA, 1398 nt, Artificial Sequence
  derived and/or modified CDS sequence (wt) from neuraminidase__InfluenzaA__AHM24226
augaauccaaaucagaagauucuaugcacuucagccacugcuaucauaauaggcgcaaucgcaguacucauuggaauagcaaaccuaggauugaacauaggacugcaucuaaaaccgggcugcaauugcucacacucacaaccugaaacaaccaacacaagccaaacaauaauaaacaacuauuauaaugaaacaaacaucaccaacauccaaauggaagagagaacaagcaggaauuucaauaacuuaacuaaagggcucuguacuauaaauucauggcacauauaugggaaagacaaugcaguaagaauuggagagagcucggauguuuuagucacaagagaacccuauguuucaugcgacccagaugaaugcagguucuaugcucucagccaaggaacaacaaucagagggaaacacucaaacggaacaauacacgauaggucccaguaucgcgcccugauaagcuggccacuaucaucaccgcccacaguguacaacagcaggguggaaugcauuggguggucaaguacuaguugccaugauggcaaauccaggaugucaauauguauaucaggaccaaacaacaaugcaucugcaguaguaugguacaacagaaggccuguugcagaaauuaacacaugggcccgaaacauacuaagaacacaggaaucugaauguguaugccacaacggcguaugcccaguaguguucaccgaugggucugccacuggaccugcagacacaagaauauacuauuuuaaagaggggaaaauguugaaaugggagucucugacuggaacugcuaagcauaaugaagaaugcucauguuacggggaacgaacaggaauuaccugcacaugcagggacaauuggcagggcucaaauagaccagugauucagauagacccaguagcaaugacacacacuagucaauauauaugcaguccuguucuuacagacaauccccgaccgaaugacccaaauauagguaaguguaaugacccuuauccagguaauaauaacaauggagucaagggauucucauaccuggauggggcuaacacuuggcuagggaggacaauaagcacagccucgaggucuggauacgagauguuaaaagugccaaaugcauugacagaugauagaucaaagcccauucaaggucagacaauuguauuaaacgcugacuggagugguuacaguggaucuuucauggacuauugggcugaaggggacugcuaucgagcguguuuuuauguggaguugauacguggaagacccaaggaggauaaagugugguggaccagcaauaguauaguaucgauguguuccaguacagaauuccugggacaauggaacuggccugauggggcuaaaauagaguacuuccucuaa

SEQ ID NO: 57153 - RNA, 1398 nt, Artificial Sequence
  derived and/or modified CDS sequence (wt) from neuraminidase__InfluenzaA__AHM24238
augaauccaaaucagaagauucuaugcacuucagccacugcuaucauaauaggcgcaaucgcaguacucauuggaauagcaaaccuaggauugaacauaggacugcaucuaaaaccgggcugcaauugcucacacucacaaccugaaacaaccaacacaagccaaacaauaauaaacaacuauuauaaugaaacaaacaucaccaacauccaaauggaagagagaacaagcaggaauuucaauaacuuaacuaaagggcucuguacuauaaauucauggcacauauaugggaaagacaaugcaguaagaauuggagagagcucggauguuuuagucacaagagaacccuauguuucaugcgacccagaugaaugcagauucuaugcucucagccaaggaacaacaaucagagggaaacacucaaacggaacaauacacgauaggucccaguaucgcgcccugauaagcuggccacuaucaucaccgcccacaguguacaacagcaggguggaaugcauuggguggucaaguacuaguugccaugauggcaaauccaggaugucaauauguauaucaggaccaaacaacaaugcaucugcaguaguaugguacaacagaaggccuguugcagaaauuaacacaugggcccgaaacauacuaagaacacaggaaucugaauguguaugccacaacggcguaugcccaguaguguucaccgaugggucugccacuggaccugcagacacaagaauauacuauuuuaaagaggggaaaauauugaaaugggagucucugacuggaacugcuaagcauauugaagaaugcucauguuacggggaacgaacaggaauuaccugcacaugcagggacaauuggcagggcucaaauagaccagugauucagauagacccaguagcaaugacacacacuagucaauauauaugcaguccuguucuuacagacaauccccgaccgaaugacccaaauauagguaaguguaaugacccuuauccagguaauaauaacaauggagucaagggauucucauaccuggauggggcuaacacuuggcuagggaggacaauaagcacagccucgaggucuggauacgagauguuaaaagugccaaaugcauugacagaugauagaucaaagcccauucaaggucagacaauuguauuaaacgcugacuggagugguuacaguggaucuuucauggacuauugggcugaaggggacugcuaucgagcguguuuuuauguggaguugauacguggaagacccaaggaggauaaagugugguggaccagcaauaguauaguaucgauguguuccaguacagaauuccugggacaauggaacuggccugauggggcuaaaauagaguacuuccucuaa

SEQ ID NO: 57154 - RNA, 1398 nt, Artificial Sequence
  derived and/or modified CDS sequence (wt) from neuraminidase__InfluenzaA__AHM24250
augaauccaaaucagaagauucuaugcacuucagccacugcuaucauaauaggcgcaaucgcaguacucauuggaauagcaaaccuaggauugaacauaggacugcaucuaaaaccgagcugcaauugcucacacucacaaccugaaacaaccaacacaagccaaacaauaauaaacaacuauuauaaugaaacaaacaucaccaacauccaaauggaagagagaacaagcaggaauuucaauaacuuaacuaaagggcucuguacuauaaauucauggcacauauaugggaaagacaaugcaguaagaauuggagagaacucggauguuuuagucacaagagaacccuauguuucaugcgacccagaugaaugcagguucuaugcucucagccaaggaacaacaaucagagggaaacacucaaacggaacaauacacgauaggucccaguaucgcgcccugauaagcuggccacuaucaucaccgcccacaguguacaacagcaggguggaaugcauuggguggucaaguacuaguugccaugauggcaaauccaggaugucaauauguauaucaggaccaaacaacaaugcaucugcaguaguaugguacaacagaaggccuguugcagaaauuaacacaugggcccgaaacauacuaagaacacaggaaucugaauguguaugccacaacgguguaugcccaguaguguucaccgaugggucugccacuggaccugcagacacaagaauauacuauuuuaaagaggggaaaauauugaaaugggagucucugacuggaacugcuaagcauauugaagaaugcucguguuacggggaacgaacaggaauuaccugcacaugcagggacaauuggcagggcucaaauagaccagugauucagauagacccaguagcaaugacacacacuagucaauauauaugcaguccuguucuuacagacaauccccgaccgaaugacccaaauauagguaaguguaaugacccuuauccagguaauaauaacaauggagucaagggauucucauaccuggauggggcuaacacuuggcuagggaggacaauaagcacagccucgaggucuggauacgagauguuaaaagugccaaaugcauugacagaugauagaucaaagcccauucaaggucagacaauuguauuaaacgcugacuggagugguuacaguggaucuuucauggacuauugggcugaaggggacugcuaucgagcguguuuuuauguggaguugauacguggaagacccaaggaggauaaagugugguggaccagcaauaguauaguaucgauguguuccaguacagaauuccugggacaauggaacuggccugauggggcuaaaauagaguacuuccucuaa

SEQ ID NO: 57155 - RNA, 1410 nt, Artificial Sequence
  derived and/or modified CDS sequence (wt) from neuraminidase__InfluenzaA__AHM98312
augaauccaaaccaaaagauaauaaccauugguucggucuguaugacaauuggaauggcuaacuuaauauuacaaauuggaaacauaaucucaauauggauuagccacucaauucaacuugggaaucaaaaucagauugaaacaugcaaucaaagcgucauuacuuaugaaaacaacacuuggguaaaucagacauauguuaacaucagcaacaccaacuuugcugcuggacagucaguggucuccgugaaauuagcgggcaauuccucucucugcccuguuaguggaugggcuauauacaguaaagacaacaguauaagaaucgguuccaagggggauguguuugucauaagggaaccauucauaucaugcucccccuuggaaugcagaaccuucuucuugacucaaggggccuugcuaaaugacaaacauuccaauggaaccauuaaagacaggagcccauaucgaacccuaaugagcuguccuauuggugaaguucccucuccauacaacucaagauuugagucagucgcuuggucagcaagugcuugucaugauggcaucaauuggcuaacaauuggaauuucuggcccagacaauggggcaguggcuguguuaaaguacaacggcauaauaacagacacuaucaagaguuggagaaacaauauauugagaacacaagagucugaaugugcauguguaaaugguucuugcuuuaccauaaugaccgauggaccaagugauggacaggccucauacaagaucuucagaauagaaaagggaaagauagucaaaucagucgaaaugaaugccccuaauuaucacuaugaggaaugcuccuguuauccugauucuagugaaaucacaugugugugcagggauaacuggcauggcucgaaucgaccgugggugucuuucaaccagaaucuggaguaucagauaggauacauaugcagugggauuuucggagacaauccacgcccuaaugauaagacaggcaguugugguccaguaucgucuaauggagcaaauggaguaaaaggauuuucauucaaauacggcaaugguguuuggauagggagaacuaaaagcauuaguucaagaaaagguuuugagaugauuugggauccaaacggauggacugggacagacaauaacuucucaauaaagcaagauaucguaggaauaaaugaguggucaggauauagcgggaguuuuguucagcauccagaacuaacagggcuggacuguauaagaccuugcuucuggguugaacuaaucagagggcgacccaaagagaacacaaucuggacuagcgggagcagcauauccuuuugugguguaaacagugacacuguggguuggucuuggccagacggugcugaguugccauuuaccauugacaaguaa

SEQ ID NO: 57156 - RNA, 1410 nt, Artificial Sequence
  derived and/or modified CDS sequence (wt) from neuraminidase__InfluenzaA__AHM98331
augaauccaaaccaaaagauaauaaccauugguucggucuguaugacaauuggaauggcuaacuuaauauuacaaauuggaaacauaaucucaauauggauuagccacucaauucaacuugggaaucaaagucagauugaaacaugcaaucaaagcgucauuacuuaugaaaacaacacuuggguaaaucagacauauguuaacaucagcaacaccaacuuugcugcuggacagucagugguuuccgugaaauuagcgggcaauuccucucucugcccuguuaguggaugggcuauauacaguaaagacaacaguauaagaaucgguuccaagggggauguguuugucauaagggaaccauucauaucaugcucccccuuggaaugcagaaccuucuucuugacucaaggggccuugcuaaaugacaaacauuccaauggaaccauuaaagacaggagcccauaucgaacccuaaugagcuguccuauuggugaaguucccucuccauacaacucaagauuugagucagucgcuuggucagcaagugcuugucaugauggcaucaauuggcuaacaauuggaauuucuggcccagacaauggggcaguggcuguguuaaaguacaacggcauaauaacagacacuaucaagaguuggagaaacaauauauugagaacacaagagucugaaugugcauguguaaaugguucuugcuuuaccauaaugaccgauggaccaagugauggacaggccucauacaagaucuucagaauagaaaagggaaagauagucaaaucagucgaaaugaaugccccuaauuaucacuaugaggaaugcuccuguuauccugauucuagugaaaucacaugugugugcagggauaacuggcauggcucgaaucgaccgugggugucuuucaaccagaaucuggaauaucagauaggauacauaugcagugggauuuucggagacaauccacgcccuaaugauaagacaggcaguugugguccaguaucgucuaauggagcaaauggaguaaaaggauuuucauucaaauacggcaaugguguuuggauagggagaacuaaaagcauuaguucaagaaaagguuuugagaugauuugggauccaaauggauggacugggacagacaauaacuucucaauaaagcaagauaucguaggaauaaaugaguggucaggauauagcgggaguuuuguucagcauccagaacuaacagggcuggauuguauaagaccuugcuucuggguugaacuaaucagagggcgacccaaagagaacacaaucuggacuagcgggagcagcauauccuuuugugguguacacagugacacuguggguuggucuuggccagacggugcugaguugccauuuaccauugacaaguaa

SEQ ID NO: 57157 - RNA, 1410 nt, Artificial Sequence
  derived and/or modified CDS sequence (wt) from neuraminidase__InfluenzaA__AHM98342
augaauccaaaccaaaagauaauaaccauugguucggucuguaugacaauuggaauggcuaacuuaauauuacaaauuggaaacauaaucucaauauggauuagccacucaauucaaauugggaaucaaaaucagauugaaacaugcaaucaaagcgucauuacuuaugaaaacaacacuuggguaaaucagacauauguuaacaucagcaacaccaacuuugcugcuggacagucagugguuuccgugaaauuagcgggcaauuccucucucugcccugucaguggaugggcuauauacaguaaagacaacaguauaagaaucgguuccaagggggauguguuugucauaagggaaccauucauaucaugcucccccuuggaaugcagaaccuucuucuugacucaaggggccuugcuaaaugacaaacauuccaauggaaccauuaaagacaggagcccauaucgaacccuaaugagcuguccuauuggugaaguucccucuccauacaacucaagauuugagucagucgcuuggucagcaagugcuugucaugauggcaucaauuggcuaacaauuggaauuucuggcccagacaauggggcaguggcuguguuaaaguacaacggcauaauaacagacacuaucaagaguuggagaaacaauauauugagaacacaagaguccgaaugugcauguguaaaugguucuugcuuuaccauaaugaccgauggaccaagugauggacaggccucauacaagaucuucagaauagaaaagggaaagauagucaaaucagucgaaaugaaugccccuaauuaucacuaugaggaaugcuccuguuauccugauucuagugaaaucacaugugugugcagggauaacuggcauggcucgaaucgaccgugggugucuuucaaucagaaucuggaauaucagauaggauacauaugcagugggauuuucggagacaauccacgcccuaaugauaagacaggcaguugugguccaguaucgucuaauggagcaaauggaguaaaaggauuuucauucaaauacggcaaugguguuuggauagggagaacuaaaagcauuaguucaagaaaagguuuugagaugauuugggauccaaacggauggacugggacagacaauaacuucucaauaaagcaagauaucguaggaauaaaugaguggucaggauauagcgggaguuuuguucagcauccagaacuaacagggcuggauuguauaagaccuugcuucuggguugaacuaaucagagggcgacccaaagagaacacaaucuggacuagcgggagcagcauauccuuuugugguguaaacagugacacuguggguuggucuuggccagacggugcugaguugccauuuaccauugacaaguaa

SEQ ID NO: 57158 - RNA, 1410 nt, Artificial Sequence
  derived and/or modified CDS sequence (wt) from neuraminidase__InfluenzaA__AHM98353
augaauccaaaccaaaagauaauaaccauugguucggucuguaugacaauuggaauggcuaacuuaauauuacaaauuggaaacauaaucucaauauggauuagccacucaauucaacuugggaaucaaagucagauugaaacaugcaaucaaagcgucauuacuuaugaaaacaacacuuggguaaaucagacauauguuaacaucagcaacaccaacuuugcugcuggacagucagugguuuccgugaaauuagcgggcaauuccucucucugcccuguuaguggaugggcuauauacaguaaagacaacaguauaagaaucgguuccaagggggauguguuugucauaagggaaccauucauaucaugcucccccuuggaaugcagaaccuucuucuugacucaaggggccuugcuaaaugacaaacauuccaauggaaccauuaaagacaggagcccauaucgaacccuaaugagcuguccuauuggugaaguucccucuccauacaacucaagauuugagucagucgcuuggucagcaagugcuugucaugauggcaucaauuggcuaacaauuggaauuucuggcccagacaauggggcaguggcuguguuaaaguacaacggcauaauaacagacacuaucaagaguuggagaaacaauauauugagaacacaagagucugaaugugcauguguagaugguucuugcuuuaccauaaugaccgauggaccaagugauggacaggccucauacaagaucuucagaauagaaaagggaaagauagucaaaucagucgaaaugaaugccccuaauuaucacuaugaggaaugcuccuguuauccugauucuagugaaaucacaugugugugcagggauaacuggcauggcucgaaucgaccgugggugucuuucaaccagaaucuggaauaucagauaggauacauaugcagugggauuuucggagacaauccacgcccuaaugauaagacaggcaguugugguccaguaucgucuaauggagcaaauggaguaaaaggauuuucauucaaauacggcaaugguguuuggauagggagaacuaaaagcauuaguucaagaaaagguuuugagaugauuugggauccaaauggauggacugggacagacaauaacuucucaauaaagcaagauaucguaggaauaaaugaguggucaggauauagcgggaguuuuguucagcauccagaacuaacagggcuggauuguauaagaccuugcuucuggguugaacuaaucagagggcgacccaaagagaacacaaucuggacuagcgggagcagcauauccuuuugugguguaaacagugacacuguggguuggucuuggccagacggugcugaguugccauuuaccauugacaaguaa

SEQ ID NO: 57159 - RNA, 1410 nt, Artificial Sequence
  derived and/or modified CDS sequence (wt) from neuraminidase__InfluenzaA__AHM98364
augaauccaaaccaaaagauaauaaccauugguucggucuguaugacaauuggaauggcuaacuuaauauuacaaauuggaaacauaaucucaauauggauuagccacucaauucaacuugggaaucaaagucagauugaaacaugcaaucaaagcgucauuacuuaugaaaacaacacuuggguaaaucagacauauguuaacaucagcaacaccaacuuugcugcuggacagucagugguuuccgugaauuuagcgggcaauuccucucucugcccuguuaguggaugggcuauauacaguaaagacaacaguauaagaaucgguuccaagggggauguguuugucauaagggaaccauucauaucaugcucccccuuggaaugcagaaccuucuucuugacucaaggggccuugcuaaaugacaaacauuccaauggaaccauuaaagacaggagcccauaucgaacccuaaugagcuguccuauuggugaaguucccucuccauacaacucaagauuugagucagucgcuuggucagcaagugcuugucaugauggcaucaauuggcuaacaauuggaauuucuggcccagacaauggggcaguggcuguguuaaaguacaacggcauaauaacagacacuaucaagaguuggagaaacaauauauugagaacacaagagucugaaugugcauguguaaaugguucuugcuuuaccauaaugaccgauggaccaagugauggacaggccucauacaagauuuucagaauagaaaagggaaagauagucaaaucagucgaaaugaaugccccuaauuaucacuaugaggaaugcuccuguuauccugauucuagugaaaucacaugugugugcagggauaacuggcauggcucgaaucgaccgugggugucuuucaaccagaaucuggaauaucagauaggauacauaugcagugggauuuucggagacaauccacgcccuaaugauaagacaggcaguugugguccaguaucgucuaauggagcaaauggaguaaaaggauuuucauucaaauacggcaaugguguuuggauagggagaacuaaaagcauuagcucaagaaaagguuuugagaugauuugggauccaaacggauggacugggacagacaauaacuucucaauaaagcaagauaucguaggaauaaaugaguggucaggauauagcgggaguuuuguucagcauccagaacuaacagggcuggauuguauaagaccuugcuucuggguugaacuaaucagagggcgacccaaagagaacacaaucuggacuagcgggagcagcauauccuuuugugguguaaacagugacacuguggguuggucuuggccagacggugcugaguugccauuuaccauugacaaguaa

SEQ ID NO: 57160 - RNA, 1410 nt, Artificial Sequence
  derived and/or modified CDS sequence (wt) from neuraminidase__InfluenzaA__AHM98375
augaauccaaaccaaaagauaauaaccauugguucggucuguaugacaauuggaauggcuaacuuaauauuacaaauuggaaacauaaucucaauauggauuagccacucaauucaacuugggaaucaaaaucagauugaaacaugcaaucaaagcgucauuacuuaugaaaacaacacuuggguaaaucagacauauguuaacaucagcaacaccaacuuugcugcuggacagucagugguuuccgugaaauuagcgggcaauuccucucucugcccuguuaguggaugggcuauauacaguaaagacaacaguauaagaaucgguuccaagggggauguguuugucauaagggaaccauucauaucaugcucccccuuggaaugcagaaccuucuucuugacucaaggggccuugcuaaaugacaaacauuccaauggaaccauuaaagacaggagcccauuucgaacccuaaugagcuguccuauuggugaaguucccucuccauacaacucaagauuugagucagucgcuuggucagcaagugcuugucaugauggcaucaauuggcuaacaauuggaauuucuggcccagacaauggggcaguggcuguguuaaaguacaacggcauaauaacagacacuaucaagaguuggagaaacaauauauugagaacacaagagucugaaugugcauguguaaaugguucuugcuuuaccauaaugaccgauggaccaagugauggacaggccucauacaagaucuucagaauagaaaagggaaagauagucaaaucagucgaaaugaaugccccuaauuaucacuaugaggaaugcuccuguuauccugauucuagugaaaucacaugugugugcagggauaacuggcauggcucgaaucgaccgugggugucuuucaaccagaaucuggaauaucagauaggauacauaugcagugggauuuucggagacaauccacgcccuaaugauaagacaggcaguugugguccaguaucgucuaauggagcaaauggaguaaaaggauuuucauucaaauacggcaaugguguuuggauagggagaacuaaaagcauuaguucaagaaaagguuuugagaugauuugggauccaaacggauggacugggacagacaauaacuucucaauaaagcaagauaucguaggaauaaaugaguggucaggauauagcgggaguuuuguucagcauccagaacuaacagggcuggacuguauaagaccuugcuucuggguugaacuaaucagagggcgacccaaagagaacacaaucuggacuagcgggagcagcauauccuuuugugguguaaacagugacacuguggguuggucuuggccagacggugcugaguugccauuuaccauugacaaguaa

SEQ ID NO: 57161 - RNA, 1410 nt, Artificial Sequence
  derived and/or modified CDS sequence (wt) from neuraminidase__InfluenzaA__AHM98386
augaauccaaaccaaaagauaauaaccauugguucggucuguaugacaauuggaauggcuaacuuaauauuacaaauuggaaacauaaucucaauauggauuagccacucaauucaacuugggaaucaaaaucagauugaaacaugcaaucaaagcgucauuacuuaugaaaacaacacuuggguaaaucagacauauguuaacaucagcaacaccaacuuugcugcuggacagucagugguuuccgugaaauuagcgggcaauuccucucucugcccuguuaguggaugggcuauauacaguaaagacaacaguauaagaaucgguuccaagggggauguguuugucauaagggaaccauucauaucaugcucccccuuggaaugcagaaccuucuucuugacucaaggggccuugcuaaaugacaaacauuccaauggaaccauuaaagacaggagcccauaucgaacccuaaugagcugucccauuggugaaguucccucuccauacaacucaagauuugagucagucgcuuggucagcaagugcuugucaugauggcaucaauuggcuaacaauuggaauuucuggcccagacaauggggcaguggcuguguuaaaguacaacggcauaauaacagacacuaucaagaguuggagaaacaauauauugagaacacaagagucugaaugugcauguguaaaugguucuugcuuuaccauaaugaccgauggaccaagugauggacaggccucauacaagaucuucagaauagaaaagggaaagauagucaaaucugucgaaaugaaugccccuaauuaucacuaugaggaaugcuccuguuauccugauucuagugaaaucacaugugugugcagggauaacuggcauggcucgaaucgaccgugggugucuuucaaccagaaucuggaauaucagauaggauacauaugcagugggauuuucggagacaauccacgcccuaaugauaagacaggcaguugugguccaguaucgucuaauggagcaaauggaguaaaaggauuuucauucaaauacggcaaugguguuuggauagggagaacuaaaagcauuaguucaagaaaagguuuugagaugauuugggauccaaacggauggacugggacagacaauaacuucucaauaaagcaagauaucguaggaauaaaugaguggucaggauauagcgggaguuuuguucagcauccagaacuaacagggcuggacuguauaagaccuugcuucuggguugaacuaaucagagggcgacccaaagagaacacaaucuggacuagcgggagcagcauauccuuuugugguguaaacagugacacuguggguuggucuuggccagacggugcugaguugccauuuaccauugacaaguaa

SEQ ID NO: 57162 - RNA, 1410 nt, Artificial Sequence
  derived and/or modified CDS sequence (wt) from neuraminidase__InfluenzaA__AHM98408
augaauccaaaccaaaagauaauaaccauugguucggucuguaugacaauuggaauggcuaacuuaauauuacaaauuggaaacauaaucucaauauggauuagccacucaauucaacuugggaaucaaagucagauugaaacaugcaaucaaagcgucauuacuuaugaaaacaacacuuggauaaaucagacauauguuaacaucagcaacaccaacuuugcugcuggacagucagugguuuccgugaaauuagcgggcaauuccucucucugcccuguuaguggaugggcuauauacaguaaagacaacaguauaagaaucgguuccaagggggauguguuugucauaagggaaccauucauaucaugcucccccuuggaaugcagaaccuucuucuugacucaaggggccuugcuaaaugacaaacauuccaauggaaccauuaaagacaggagcccauaucgaacccuaaugagcuguccuauuggugaaguucccucuccauacaacucaagauuugagucagucgcuuggucagcaagugcuugucaugauggcaucaauuggcuaacaauuggaauuucuggcccagacaauggggcaguggcuguguuaaaguacaacggcauaauaacagacacuaucaagaguuggagaaacaauauauugagaacacaagagucugaaugugcauguguaaaugguucaugcuuuaccauaaugaccgauggaccaagugauggacaggccucauacaagaucuucagaauagaaaagggaaagauagucaaaucagucgaaaugaaugccccuaauuaucacuaugaggaaugcuccuguuauccugauucuagugaaaucacaugugugugcagggauaacuggcauggcucgaaucgaccgugggugucuuucaaccagaaucuggaauaucagauaggauacauaugcagugggauuuucggagacaauccacgcccuaaugauaagacaggcaguugugguccaguaucgucuaauggagcaaauggaguaaaaggauuuucauucaaauacggcaaugguguuuggauagggagaacuaaaagcauuaguucaagaaaagguuuugagaugauuugggauccaaacggauggacugggacagacaauagcuucucaauaaagcaagauaucguaggaauaaaugaguggucaggauauagcgggaguuuuguucagcauccagaacuaacagggcuggauuguauaagaccuugcuucuggguugaacuaaucagagggcgacccaaagagaacacaaucuggacuagcgggagcagcauauccuuuugugguguaaacagugacacuguggguuggucuuggccagacggugcugaguugccauuuaccauugacaaguaa

SEQ ID NO: 57163 - RNA, 1410 nt, Artificial Sequence; identical to SEQ ID NO: 57162
  derived and/or modified CDS sequence (wt) from neuraminidase__InfluenzaA__AHM98419

SEQ ID NO: 57164 - RNA, 1410 nt, Artificial Sequence
  derived and/or modified CDS sequence (wt) from neuraminidase__InfluenzaA__AHM98430
augaauccaaaccaaaagauaauaaccauugguucggucuguaugacaauuggaauggcuaacuuaauauuacaaauuggaaacauaaucucaauauggauuagccacucaauucaacuugggaaucaaagucagauugaaacaugcaaucaaaacgucauuacuuaugaaaacaacacuuggguaaaucagacauauguuaacaucagcaacaccaacuuugcugcuggacagucagugguucccgugaaauuagcgggcaauuccucucucugcccuguuaguggaugggcuauauacaguaaagacaacaguauaagaaucgguuccaagggggauguguuugucauaagggaaccauucauaucaugcucccccuuggaaugcagaaccuucuucuugacucaaggggccuugcuaaaugacaaacauuccaauggaaccauuaaagacaggagcccauaucgaacccuaaugagcuguccuauuggugaaguucccucuccauacaacucaagauuugagucagucgcuuggucagcaagugcuugucaugauggcaucaauuggcuaacaauuggaauuucuggcccagacaauggggcaguggcuguguuaaaguacaacggcauaauaacagacacuaucaagaguuggagaaacaauauauugagaacacaagagucugaaugugcauguguaaaugguucuugcuuuaccauaaugaccgauggaccaagugauggacaggccucauacaagaucuucagaauagaaaagggaaagauagucaaaucagucgaaaugaaugccccuaauuaucacuaugaggaaugcuccuguuauccugauucuagugaaaucacaugugugugcagggauaacuggcauggcucgaaucgaccgugggugucuuucaaccagaaucuggaauaucagauaggauacauaugcagcgggauuuucggagacaauccacgcccuaaugauaagacaggcaguugugguccaguaucgucuaauggagcaaauggaguaaaaggauuuucauucaaauacggcaaugguguuuggauagggagaacuaaaagcauuaguucaagaaaagguuuugagaugauuugggauccaaauggauggacugggacagacaauaacuucucaauaaagcaagauaucguaggaauaaaugaguggucaggauauagcgggaguuuuguucagcauccagaacuaacagggcuggauuguauaagaccuugcuucuggguugaacuaaucagagggcgacccaaagagaacacaaucuggacuagcgggagcagcauauccuuuugugguguaaacagugacacuguggguuggucuuggccagacggugcugaguugccauuuaccauugacaaguaa

SEQ ID NO: 57165 - RNA, 1410 nt, Artificial Sequence; identical to SEQ ID NO: 52969
  derived and/or modified CDS sequence (wt) from neuraminidase__InfluenzaA__AHM98441

SEQ ID NO: 57166 - RNA, 1410 nt, Artificial Sequence
  derived and/or modified CDS sequence (wt) from neuraminidase__InfluenzaA__AHM98452
augaauccaaaccaaaagauaauaaccauugguucggucuguaugacaauuggaauggcuaacuuaauauuacaaauuggaaacauaaucucaauauggauuagccacucaauucaacuuaggaaccaaagucagauugaaacaugcaaucaaagcgucauuacuuacgaaaacaacacuuggguaaaucagacauauguuaacaucagcaacaccaacuuugcugcuggacagucagugguuuccgugaaauuagcgggcaauuccucucucugcccuguuaguggaugggcuauauacaguaaagacaacaguauaagaaucgguuccaagggggauguguuugucauaagggaaccauucauaucaugcucccccuuggaaugcagaaccuucuucuugacccaaggggccuugcuaaaugacaaacauuccaauggaaccauuaaagacaggagcccauaucgaacccuaaugagcuguccuauuggugaaguucccucuccauacaacucaagauuugagucagucgcuuggucagcaagugcuugucaugauggcaucaauuggcuaacaauuggaauuucuggcccagacaauggggcaguggcuguguuaaaguacaacggcauaauaacagacacuaucaagaguuggagaaauaauauauugagaacacaagaaucugaaugugcauguguaaaugguucuugcuuuaccauaaugaccgauggaccaagugauggacaggccucauacaagaucuucagaauagaaaagggaaagauagucaaaucagucgaaaugaaugccccuaauuaucacuaugaggaaugcuccuguuauccugauucuagugaaaucacaugugugugcagggauaacuggcauggcucgaaucgaccgugggugucuuucaaccagaaucuggaauaucagauaggauacauaugcagugggauuuucggagacaauccacgcccuaaugauaagacaggcaguugugguccaguaucgucuaauggagcaaauggaguaaaaggauuuucauucaaauacggcaaugguguuuggauagggagaacuaaaagcauuaguucaagaaaagguuuugagaugauuugggauccaaacggauggacugggacagacaauaacuucucaauaaagcaagauaucguaggaguaaaugaguggucaggauacagcgggaguuuuguucagcauccagaacuaacagggcuggauuguauaagaccuugcuucuggguugaacuaaucagaggacgacccaaagagaacacaaucuggacuagcgggagcagcauauccuuuugugguguaaacagugacacuguggguuggucuuggccagacggugcugaguugccauuuaccauugacaaguaa

SEQ ID NO: 57167 - RNA, 1410 nt, Artificial Sequence
  derived and/or modified CDS sequence (wt) from neuraminidase__InfluenzaA__AHM98474
augaauccaaaccaaaagauaauaaccauugguucggucuguaugacaauuggaauggcuaacuuaauauuacaaauuggaaacauaaucucaauauggauuagccacucaauucaacuugggaaucaaaaucagauugaaacaugcaaucaaagcgucauuacuuaugaaaacaacacuuggguaaaucagacauauguuaacaucagcaacaccaacuuugcugcuggacagucagugguuuccgugaaauuagcgggcaauuccucucucugcccuguuaguggaugggcuauauacaguaaagacaacaguauaagaaucgguuccaagggggauguguuugucauaagggaaccauucauaucaugcucccccuuggaaugcagaaccuucuucuugacucaaggggccuugcuaaaugacaaacauuccaauggaaccauuaaagacaggagcccauaucgaacccuaaugagcuguccuauuggugaaguucccucuccauacaacucaagauuugagucagucgcuuggucagcaagugcuugucaugauggcaucaauuggcuaacaauuggaauuucuggcccagacaauggggcaguggcuguguuaaaguacaacggcauaauaacagacacuaucaagaguuggagaaacaauauauuaagaacacaagagucugaaugugcauguguaaaugguucuugcuuuaccauaaugaccgauggaccaagugauggacaggccucauacaagaucuucagaauagaaaagggaaagauagucaaaucagucgaaaugaaugccccuaauuaucacuaugaggaaugcuccuguuauccugauucuagugaaaucacaugugugugcagggauaacuggcauggcucgaaucgaccgugggugucuuucaaccagaaucuggaauaucagauaggauacauaugcagugggauuuucggagacaauccacgcccuaaugauaagacaggcaguugugguccaguaucgucuaauggagcaaauggaguaaaaggauuuucauucaaauacggcaaugguguuuggauagggagaacuaaaagcauuaguucaagaaaagguuuugagaugauuugggauccaaacggauggacugggacagacaauaacuucucaauaaagcaagauaucguaggaauaaaugaguggucaggauauagcgggaguuuuguucagcauccagaacuaacagggcuggacuguauaagaccuugcuucuggguugaacuaaucagagggcgacccaaagagaacacaaucuggacuagcgggagcagcauauccuuuugugguguaaacagugacacuguggguuggucuuggccagacggugcugaguugccauuuacuauugacaaguaa

SEQ ID NO: 57168 - RNA, 1410 nt, Artificial Sequence
  derived and/or modified CDS sequence (wt) from neuraminidase__InfluenzaA__AHM98485
augaauccaaaccaaaagauaauaaccauugguucggucuguaugacaauuggaauggcuaacuuaauauuacaaauuggaaacauaaucucaauauggauuagccacucaauucaacuugggaaucaaagucagauugaaacaugcaaucaaagcgucauuacuuaugaaaacaacacuuggguaaaucagacauauguuaacaucagcaacaccaacuuugcugcuggacagucagugguuuccgugaaauuagugggcaauuccucucucugcccuguuaguggaugggcuauauacaguaaagacaacaguauaagaaucgguuccaagggggauguguuugucauaagggaaccauucauaucaugcucccccuuggaaugcagaaccuucuucuugacucaaggggccuugcuaaaugacaaacauuccaauggaaccauuaaagacaggagcccauaucgaacccuaaugagcuguccuauuggugaaguucccucuccauacaacucaagauuugagucagucgcuuggucagcaagugcuugucaugauggcaucaauuggcuaacaauuggaauuucuggcccagacaauggggcaguggcuguguuaaaguacaacggcauaauaacagacacuaucaagaguuggagaaacaauauauugagaacacaagagucugaaugugcauguguaaaugguucuugcuuuaccauaaugaccgauggaccaagugauggacaggccucauacaagaucuucagaauagaaaagggaaagauagucaaaucagucgaaaugaaugccccuaauuaucacuaugaggaaugcuccuguuauccugauucuagugaaaucacaugugugugcagggauaacuggcauggcucgaaucgaccgugggugucuuucaaccagaaucuggaauaucagauaggauacauaugcagugggauuuucggagacaauccacgcccuaaugauaagacaggcaguugugguccaguaucgucuaauggagcaaauggaguaaaaggauuuucauucaaauacggcaaugguguuuggauagggagaacuaaaagcauuaguucaagaaaagguuuugagaugauuugggauccaaacggauggacugggacagacaauaacuucucaauaaagcaagauaucguaggaauaaaugaguggucaggauauagcgggaguuuuguucagcauccagaacuaacagggcuggauuguauaagaccuugcuucuggguugaacuaaucagagggcgacccaaagagaacacaaucuggacuagcgggagcagcauauccuuuugugguguaaacagugacacuguggguuggucuuggccagacggugcugaguugccauuuaccauugacaaguaa

SEQ ID NO: 57169 - RNA, 1410 nt, Artificial Sequence
  derived and/or modified CDS sequence (wt) from neuraminidase__InfluenzaA__AHM98496
augaauccaaaccaaaagauaauaaccauugguucggucuguaugacaauuggaauggcuaacuuaauauuacaaauuggaaacauaaucucaauauggauuagccacucaauucaacuugggaaucaaaaucagauugaaacaugcaaucaaagcgucauuacuuaugaaaacaacacuuggguaaaucagacauauguuaacaucagcaacaccaacuuugcugcuggacagucagugguuuccgugaaauuagcgggcaauuccucucucugcccuguuaguggaugggcuauauacaguaaagacaacaguaucagaaucgguuccaagggggauguguuugucauaagggaaccauucauaucaugcucccccuuggaaugcagaaccuucuucuugacucaaggggcuuugcuaaaugacaaacauuccaauggaaccauuaaaaacaggagcccauaucgaacccuaaugagcuguccuauuggugaaguucccucuccauacaacucaagauuugagucagucgcuuggucagcaagugcuugucaugauggcaucaauuggcuaacaauuggaauuucuggcccagacaauggggcaguggcuguguuaaaguacaacggcauaauaacagacacuaucaagaguuggagaaacaauauauugagaacacaagagucugaaugugcauguguaaaugguucuugcuuuaccauaaugaccgauggaccaagugauggacaggccucauacaagaucuucagaauagaaaagggaaagauagucaaaucagucgaaaugaaugccccuaauuaucacuaugaggaaugcuccuguuauccugauucuagugaaaucaaaugugugugcagggauaacuggcauggcucgaaucgaccgugggugucuuucaaccagaaucuggaauaucagauaggauacauaugcaguggaauuuucggagacaauccacgcccuaaugauaagacaggcaguugugguccaguaucgucuaauggagcaaauggaguaaaaggauuuucauucaaauacggcaaugguguuuggauagggaggacuaaaagcauuaguucaagaaaagguuuugagaugauuugggauccaaacggauggacugggacagacaauaacuucucaauaaagcaagauaucguaggaauaaaugaguggucaggauauagcgggaguuuuguucagcauccagaacuaacagggcuggauuguauaagaccuugcuucuggguugaacuaaucagagggcgacccaaagagaacacaaucuggacuagcgggagcagcauauccuuuugugguguaaacagugacacuguggguuggucuuggccagacggugcugaguugccauuuaccauugacaaguaa

SEQ ID NO: 57170 - RNA, 1410 nt, Artificial Sequence; identical to SEQ ID NO: 52837
  derived and/or modified CDS sequence (wt) from neuraminidase__InfluenzaA__AHM98507

SEQ ID NO: 57171 - RNA, 1410 nt, Artificial Sequence
  derived and/or modified CDS sequence (wt) from neuraminidase__InfluenzaA__AHM98518
augaauccaaaccaaaagauaauaaccauugguucggucuguaugacaauuggaauggcuaacuuaauauuacaaauuggaaacauaaucucaauauggauuagccacucaauucaacuugggaaucaaagucagauugaaacaugcaaucaaagcgucauuacuuaugaaaacaacacuuggauaaaucagacauauguuaacaucagcaacaccaacuuugcugcuggacagucagugguuuccgugaaauuagcgggcaauuccucucucugcccuguuaguggaugggcuauauacaguaaagacaacaguauaagaaucgguuccaagggggauguguuugucauaagggaaccauucauaucaugcucccccuuggaaugcagaaccuucuucuugacucaaggggccuugcuaaaugacaaacauuccaauggaaccauuaaagacaggagcccauaucgaacccuaaugagcuguccuauuggugaaguucccucuccauacaacucaagauuugagucagucgcuuggucagcaagugcuugucaugauggcaucaauuggcuaacaauuggaauuucuggcccagacaauggggcaguggcuguguuaaaguacaacggcauaauaacagacacuaucaagaguuggagaaacaauauauugagaacacaagagucugaaugugcauguguaaaugguucaugcuuuaccauaaugaccgauggaccaagugauggacaggccucauacaagaucuucagaauagaaaagggaaagauagucaaaucagucgaaaugaaugccccuaauuaucacuaugaggaaugcuccuguuauccugauucuagugaaaucacaugugugugcagggauaacuggcauggcucgaaucgaccgugggugucuuucaaccagaaucuggaauaucagauaggauacauaugcagugggauuuucggagacaauccacgcccuaaugauaagacaggcaguugugguccaguaucgucuaauggagcaaauggaguaaaaggauuuucauucaaauacggcaaugguguuuggauagggagaacuaaaagcauuaguucaagaaaagguuuugagaugauuugggauccaaacggauggacugggacagacaauaacuucucaauaaagcaagauaucguaggaauaaaugaguggucaggauauagcgggaguuuuguucagcauccagaacuaacagggcuggauuguauaagaccuugcuucuggguugaacuaaucagagggcgacccaaagagaacacaaucuggacuagcgggagcagcauguccuuuugugguguaaacagugacacuguggguuggucuuggccagacggugcugaguugccauuuaccauugacaaguaa

SEQ ID NO: 57172 - RNA, 1410 nt, Artificial Sequence; identical to SEQ ID NO: 55414
  derived and/or modified CDS sequence (wt) from neuraminidase__InfluenzaA__AHM98529

SEQ ID NO: 57173 - RNA, 1410 nt, Artificial Sequence
  derived and/or modified CDS sequence (wt) from neuraminidase__InfluenzaA__AHM98540
augaauccaaaccaaaagauaauaaccauugguucggucuguauaacaauuggaauggcuaacuuaauauuacaaauuggaaacauaaucucaauauggauuagccacucaauucaacuugggaaucaaagucagauugaaacaugcaaucaaagcgucauuacuuaugaaaacaacacuuggguaaaucagacauauguuaacaucagcaacaccaacuuugcugcuggacagucagugguuuccgugaaauuagcgggcaauuccucucucugcccuguuaguggaugggcuauauacaguaaagacaacaguauaagaaucgguuccaagggggauguguuugucauaagggaaccauucauaucaugcucccccuuggaaugcagaaccuucuucuugacucaaggggccuugcuaaaugacaaacauuccaauggaaccauuaaagacaggagcccauaucggacccuaaugagcuguccuauuggugaaguucccucuccauacaacucaagauuugagucagucgcuuggucagcaagugcuugucaugauggcaucaauuggcuaacaauuggaauuucuggcccagacaauggggcaguggcuguguuaaaguacaacggcauaauaacagacacaaucaagaguuggagaaacaauauauugagaacacaagagucugaaugugcauguguaaaugguucuugcuuuaccauaaugaccgauggaccaagugauggacaggccucauacaagaucuucagaauagaaaagggaaagauagucaaaucagucgaaaugauugccccuaauuaucacuaugaggaaugcuccuguuauccugauucuagugaaaucacaugugugugcagggauaacuggcauggcucgaaucgaccgugggugucuuucaaccagaaucuggaauaucagauaggauacauaugcagugggauuuucggagacaauccacgcccuaaugauaagacaggcaguugugguccaguaucgucuaauggagcaaauggaguaaaaggauuuucauucaaguacggcaaugguguuuggauagggagaacuaaaagcauuaguucaagaaaagguuuugagaugauuugggauccaaacggauggacugggacagacaauaacuucucaauaaagcaagauauuguaggaauaaaugaguggucaggauauagcgggaguuuuguucagcauccagaacuaacagggcuggauuguauaagaccuugcuucuggguugaacuaaucagagggcgacccaaagagaacacaaucuggacuagcgggagcagcauauccuuuugugguguaaacagugacacuguggguuggucuuggccagacggugcugaguugccauuuaccauugacaaguaa

SEQ ID NO: 57174 - RNA, 1410 nt, Artificial Sequence
  derived and/or modified CDS sequence (wt) from neuraminidase__InfluenzaA__AHM98562
augaauccaaaccaaaagauaauaaccauugguucggucuguaugacaauuggaauggcuaacuuaauauuacaaauuggaaacauaaucucaauauggauuagccacucaauucaacuugggaaucaaaaucagauugaaacaugcaaucaaagcgucauuacuuaugaaaacaacacuuggguaaaucagacauauguuaacaucagcaacaccaacuuugcugcuggacagucaguggucuccgugaaauuagcgggcaauuccucucucugcccuguuaguggaugggcuauauacaguaaagacaacaguauaagaaucgguuccaagggggauguguuugucauaagggaaccauucauaucaugcucccccuuggaaugcagaaccuucuucuugacucaaggggccuugcuaaaugacaaacauuccaauggaaccauuaaagacaggagcccauaucgaacccuaaugagcuguccuauuggugaaguucccucuccauacaacucaagauuugagucagucgcuuggucagcaagugcuugucaugauggcaucaauuggcuaacaauuggaauuucuggcccagacaauggggcaguggcuguguuaaaguacaacggcauaauaacagacacuaucaagaguuggagaaacaauauauugagaacacaagagucugaaugugcauguguaaaugguucuugcuuuaccauaaugaccgauggaccaagugauggacaggccucauacaagaucuucagaauagaaaagggaaagauagucaaaucagucgaaaugaaugccccuaauuaucacuaugaggaaugcuccuguuauccugauucuagugaaaucacaugugugugcagggauaacuggcauggcucgaaucgaccgugggugucuuucaaccagaaucuggaauaucagauaggauacauaugcagugggauuuucggagacaauccacgcccuaaugauaaggcaggcaguugugguccaguaucgucuaauggagcaaauggaguaaaaggauuuucauucaaauacggcaaugguguuuggauagggagaacuaaaagcauuaguucaagaaaagguuuugagaugauuugggauccaaacggauggacugggacagacaauaacuucucaauaaagcaagauaucguaggaauaaaugaguggucaggauauagcgggaguuuuguucagcauccagaacuaacagggcuggacuguauaagaccuugcuucuggguugaacuaaucagagggcgacccaaagagaacacaaucuggacuagcgggagcagcauauccuuuugugguguaaacaguuacacuguggguuggucuuggccagacggugcugaguugccauuuaccauugacaaguaa

SEQ ID NO: 57175 - RNA, 1410 nt, Artificial Sequence
  derived and/or modified CDS sequence (wt) from neuraminidase__InfluenzaA__AHM98573
augaauccaaaccaaaagauaauaaccauugguucggucuguaugacaauuggaauggcuaacuuaauauuacaaauuggaaacauaaucucaauauggauuagccacucaauucaacuugggaaucaaagucagauugaaacaugcaaucaaaacgucauuacuuaugaaaacaacacuuggguaaaucagacauauguuaacaucagcaacaccaacuuugcugcuggacagucagugguucccgugaaauuagcgggcaauuccucucucugcccuguuaguggaugggcuauauacaguaaagacaacaguauaagaauugguuccaagggggauguguuugucauaagggaaccauucauaucaugcucccccuuggaaugcagaaccuucuucuugacucaaggggccuugcuaaaugacaaacauuccaauggaaccauuaaagacaggagcccauaucgaacccuaaugagcuguccuauuggugaaguucccucuccauacaacucaagauuugagucagucgcuuggucagcaagugcuugucaugauggcaucaauuggcuaacaauuggaauuucuggcccagacaauggggcaguggcuguguuaaaguacaacggcauaauaacagacacuaucaagaguuggagaaacaauauauugagaacacaagagucugaaugugcauguguaaaugguucuugcuuuaccauaaugaccgauggaccaagugauggacaggccucauacaagaucuucagaauagaaaagggaaagauagucaaaucagucgaaaugaaugccccuaauuaucacuaugaggaaugcuccuguuauccugauucuagugaaaucacaugugugugcagggauaacuggcauggcucgaaucgaccgugggugucuuucaaccagaaucuggaauaucagauaggauacauaugcagcgggauuuucggagacaauccacgcccuaaugauaagacaggcaguugugguccaguaucgucuaauggagcaaauggaguaaaaggauuuucauucaaauacggcaaugguguuuggauagggagaacuaaaagcauuaguucaagaaaagguuuugagaugauuugggauccaaauggauggacugggacagacaauaacuucucaauaaagcaagauaucguaggaauaaaugaguggucaggauauagcgggaguuuuguucagcauccagaacuaacagggcuggauuguauaagaccuugcuucuggguugaacuaaucagagggcgacccaaagagaacacaaucuggacuagcgggagcagcauauccuuuugugguguaaacagugacacuguggguuggucuuggccagacggugcugaguugccauuuaccauugacaaguaa

SEQ ID NO: 57176 - RNA, 1410 nt, Artificial Sequence
  derived and/or modified CDS sequence (wt) from neuraminidase__InfluenzaA__AHM98584
augaauccaaaccaaaagauaauaaccauugguucggucuguaugacaauuggaauggcuaacuuaauauuacaaauuggaaacauaaucucaauauggauuagccacucaauucaacuugggaaucaaagucagauugaaacaugcaaucaaagcgucauuacuuaugaaaacaacacuuggauaaaucagacauauguuaacaucagcaacaccaacuuugcugcuggacagucagugguuuccgugaaauuagcgggcaauuccucucucugcccuguuaguggaugggcuauauacaguaaagacaacaguauaagaaucgguuccaagggggauguguuugucauaagggaaccauucauaucaugcucccccuuggaaugcagaaccuucuucuugacucaaggggccuugcuaaaugacaaacauuccaauggaaccauuaaagacaggagcccauaucgaacccuaaugagcuguccuauuggagaaguucccucuccauacaacucaagauuugagucagucgcuuggucagcaagugcuugucaugauggcaucaauuggcuaacaauuggaauuucuggcccagacaauggggcaguggcuguguuaagguacaacggcauaauaacagacacuaucaagaguuggagaaacaauauauugagaacacaagagucugaaugugcauguguaaaugguucaugcuuuaccauaaugaccgauggaccaagugauggacaggccucauacaagaucuucagaauagaaaagggaaagauagucaaaucagucgaaaugaaugccccuaauuaucacuaugaggaaugcuccuguuauccugauucuagugaaaucacaugugugugcagggauaacuggcauggcucgaaucgaccgugggugucuuucaaccagaaucuggaauaucagauaggauacauaugcagugggauuuucggagacaauccacgcccuaaugauaagacaggcaguugugguccaguaucgucuaauggagcaaauggaguaaaaggauuuucauucaaauacggcaaugguguuuggauagggagaacuaaaagcauuaguucaagaaaagguuuugagaugauuugggauccaaacggauggacugggacagacaauagcuucucaauaaagcaagauaucguaggaauaaaugaguggucaggauauagcgggaguuuuguucagcauccagaacuaacagggcuggauuguauaagaccuugcuucuggguugaacuaaucagagggcgacccaaagagaacacaaucuggacuagcgggagcagcauauccuuuugugguguaaacagugacacuguggguuggucuuggccagacggugcugaguugccauuuaccauugacaaguaa

SEQ ID NO: 57177 - RNA, 1410 nt, Artificial Sequence
  derived and/or modified CDS sequence (wt) from neuraminidase__InfluenzaA__AHM98595
augaauccaaaccaaaagauaauaaccauugguucggucuguaugacaauuggaauggcuaacuuaauauuacaaauuggaaacauaaucucaauauggauuagccacucaauucaacuugggaaucaaagucagauugaaacaugcaaucaaaacgucauuacuuaugaaaacaacacuuggguaaaucagacauauguuaacaucaguaacaccaacuuugcugcuggacagucagugguucccgugaaauuagcgggcaauuccucucucugcccuguuaguggaugggcuauauacaguaaagacaacaguauaagaaucgguuccaagggggauguguuugucauaagggaaccauucauaucaugcucccccuuggaaugcagaaccuucuucuugacucaaggggccuugcuaaaugacaaacauuccaauggaaccauuaaagacaggagcccauaucgaacccuaaugagcuguccuauuggugaaguucccucuccauacaacucaagauuugagucagucgcuuggucagcaagugcuugucaugauggcaucaauuggcuaacaauuggaauuucuggcccagacaauggggcaguggcuguguuaaaguacaacggcauaauaacagacacuaucaagaguuggagaaacaauauauugagaacacaagagucugaaugugcauguguaaaugguucuugcuuuaccauaaugaccgauggaccaagugauggacaggccucauacaagaucuucagaauagaaaagggaaagauagucaaaucagucgaaaugaaugccccuaauuaucacuaugaggaaugcuccuguuauccugauucuagugaaaucacaugugugugcagggauaacuggcauggcucgaaucgaccgugggugucuuucaaccagaaucuggaauaucagauaggauacauaugcagcgggauuuucggagacaauccacgcccuaaugauaagacaggcaguugugguccaguaucgucuaauggagcaaauggaguaaaaggauuuucauucaaauacggcaaugguguuuggauagggagaacuaaaagcauuaguucaagaaaagguuuugagaugauuugggauccaaauggauggacugggacagacaauaacuucucaauaaagcaagauaucguaggaauaaaugaguggucaggauauagcgggaguuuuguucagcauccagaacuaacagggcuggauuguauaagaccuugcuucuggguugaacuaaucagagggcgacccaaagagaacacaaucuggacuagcgggagcagcauauccuuuugugguguaaacagugacacuguggguuggucuuggccagacggugcugaguugccauuuaccauugacaaguaa

SEQ ID NO: 57178 - RNA, 1410 nt, Artificial Sequence
  derived and/or modified CDS sequence (wt) from neuraminidase__InfluenzaA__AHM98606
augaauccaaaccaaaagauaauaaccauugguucggucuguaugacaauuggaauggcuaacuuaauauuacaaauuggaaacauaaucucaauauggauuagccacucaauucaacuugggaaucaaaaucagauugaaacaugcaaucaaagcgucauuacuuaugaaaacaacacuuggguaaaucagacauauguuaacaucagcaacaccaacuuugcugcuggacagucagugguuuccgugaaauuagcgggcaauuccucucucugcccuguuaguggaugggcuauauacaguaaagacaacaguauaagaaucgguuccaagggggauguguuugucauaagggaaccauucauaucaugcucccccuuggaaugcagaaccuucuucuugacucaaggggccuugcuaaaugacaaacauuccaauggaaccauuaaagacaggagcccauaucgaacccuaaugagcugucccauuggugaaguucccucuccauacaacucaagauuugagucagucgcuuggucagcaagugcuugucaugauggcaucaauuggcuaacaauuggaauuucuggcccagacaauggggcaguggcuguguuaaaguacaacggcauaauaacagacacuaucaagaguuggagaaacaauauauugagaacacaagagucugaaugugcauguguaaaugguucuugcuuuaccauaaugaccgauggaccaagugauggacaggccucauacaagaucuucagaauagaaaagggaaagauagucaaaucagucgaaaugaaugccccuaauuaucacuaugaggaaugcuccuguuauccugauucuagugaaaucacaugugugugcagggauaacuggcauggcucgaaucgaccgugggugucuuucaaccagaaucuggaauaucagauaggauacauaugcagugggauuuucggagacaauccacgcccuaaugauaagacgggcaguugugguccaguaucgucuaauggagcaaauggaguaaaaggauuuucauucaaauacggcaaugguguuuggauagggagaacuaaaagcauuaguucaagaaaagguuuugagaugauuugggauccaaacggauggacugggacagacaauaacuucucaauaaagcaagauaucguaggaauaaaugaguggucaggauauagcgggaguuuuguucagcauccagaacuaacagggcuggacuguauaagaccuugcuucuggguugaacuaaucagagggcgacccaaagagaacacaaucuggacuagcgggagcagcauauccuuuugugguguaaacagugacacuguggguuggucuuggccagacggugcugaguugccauuuaccauugacaaguaa

SEQ ID NO: 57179 - RNA, 1410 nt, Artificial Sequence
  derived and/or modified CDS sequence (wt) from neuraminidase__InfluenzaA__AHM98617
augaauccaaaccaaaagauaauaaccauugguucagucuguaugacaauuggaauggcuaacuuaauauuacaaauuggaaacauaaucucaauauggauuagccacucaauucaacuugggaaucaaagucagauugaaacaugcaaucaaagcgucauuacuuaugaaaacaacacuuggauaaaucagacauauguuaacaucagcaacaccaacuuugcugcuggacagucagugguuuccgugaaauuagcgggcaauuccucucucugcccuguuaguggaugggcuauauacaguaaagacaacaguauaagaaucgguuccaagggggauguguuugucauaagggaaccauucauaucaugcucccccuugggaugcagaaccuucuucuugacucaaggggccuugcuaaaugacaaacauuccaauggaaccauuaaagacaggagcccauaucgaacccuaaugagcuguccuauuggugaaguucccucuccauacaacucaagauuugagucagucgcuuggucagcaagugcuugucaugauggcaucaauuggcuaacaauuggaauuucuggcccagacaauggggcaguggcuguguuaaaguacaacggcauaauaacagacacuaucaagaguuggagaaacaauauauugagaacacaagagucugaaugugcauguguaaaugguucaugcuuuaccauaaugaccgauggaccaagugauggacaggccucauacaagaucuucagaauagaaaagggaaagauagucaaaucagucgaaaugaaugccccuaauuaucacuaugaggaaugcuccuguuauccugauucuagugaaaucacaugugugugcagggauaacuggcauggcucgaaucgaccgugggugucuuucaaccagaaucuggaauaucagauaggauacauaugcagugggauuuucggagacaauccacgcccuaaugauaagacaggcaguugugguccaguaucgucuaauggagcaaauggaguaaaaggauuuucauucaaauacggcaaugguguuuggauagggagaacuaaaagcauuaguucaagaaaagguuuugagaugauuugggauccaaacggauggacugggacagacaauagcuucucaauaaagcaagauaucguaggaauaaaugaguggucaggauauagcgggaguuuuguucagcauccagaacuaacagggcuggauuguauaagaccuugcuucuggguugaacuaaucagagggcgacccaaagagaacacaaucuggacuagcgggagcagcauauccuuuuguggugugaacagugacacuguggguuggucuuggccagacggugcugaguugccauuuaccauugacaaguaa

SEQ ID NO: 57180 - RNA, 1410 nt, Artificial Sequence; identical to SEQ ID NO: 57162
  derived and/or modified CDS sequence (wt) from neuraminidase__InfluenzaA__AHM98628

SEQ ID NO: 57181 - RNA, 1410 nt, Artificial Sequence
  derived and/or modified CDS sequence (wt) from neuraminidase__InfluenzaA__AHM98639
augaauccaaaccaaaagauaauaaccauugguucggucuguaugacaauuggaauggcuaacuuaauauuacaaauuggaaacauaaucucaauauggauuagccacucaauucaacuugggaaucaaagucagauugaaacaugcaaucaaagcgucauuauuuaugaaaacaacacuuggauaaaucagacauauguuaacaucagcaacaccaacuuugcugcugaacagucagugguuuccgugaaauuagcgggcaauuccucucucugcccuguuaguggaugggcuauauacaguaaagacaacaguauaagaaucgguuccaagggggauguguuugucauaagggaaccauucauaucaugcucccccuuggaaugcagaaccuucuucuugacucaaggggccuugcuaaaugacaaacauuccaauggaaccauuaaagacaggagcccauaucgaacccuaaugagcuguccuauuggugaaguucccucuccauacaacucaagauuugagucagucgcuuggucagcaagugcuugucaugauggcaucaauuggcuaacaauuggaauuucuggcccagacaauggggcaguggcuguguuaaaguacaacggcauaauaacagacacuaucaagaguuggagaaacaauauauugagaacacaagagucugaaugugcauguguaaaugguucaugcuuuaccauaaugaccgauggaccaagugauggacaggccucauacaagaucuucagaauagaaaagggaaagauagucaaaucagucgaaaugaaugccccuaauuaucacuaugaggaaugcuccuguuauccugauucuagugaaaucacaugugugugcagggauaacuggcauggcucgaaucgaccgugggugucuuucaaccagaaucuggaauaucagauaggauacauaugcagugggauuuucggagacaauccacgcccuaaugauaagacaggcaguugugguccaguaucgucuaauggagcaaauggaguaaaaggauuuucauucaaauacggcaaugguguuuggauagggagaacuaaaagcauuaguucaagaaaagguuuugagaugauuugggauccaaacggauggacugggacagacaauagcuucucaauaaagcaagauaucguaggaauaaaugaguggucaggauauagcgggaguuuuguucagcauccagaacuaacagggcuggauuguauaagaccuugcuucuggguugaacuaaucagagggcgacccaaagagaacacaaucuggacuagcgggagcagcauauccuuuugugguguaaacagugacacuguggguuggucuuggccagacggugcugaguugccauuuaccauugacaaguaa

SEQ ID NO: 57182 - RNA, 1410 nt, Artificial Sequence
  derived and/or modified CDS sequence (wt) from neuraminidase__InfluenzaA__AHM98650
augaauccaaaccaaaagauaauaaccauugguucggucuguaugacaauuggaauggcuaacuuaauauuacaaauuggaaacauaaucucaauauggauuagccacucaauucaacuugggaaucaaaaucagauugaaacaugcaaucaaagcgucauuacuuaugaaaacaacacuuggguaaaucagacauauguuaacaucagcaacaccaacuuugcugcuggacagucaguggucuccgugaaauuagcgggcaauuccucucucugcccuguuaguggaugggcuauauacaguaaagacaacaguauaagaaucgguuccaagggggauguguuugucauaagggaaccauucauaucaugcucccccuuggaaugcagaaccuucuucuugacucaaggggccuugcuaaaugacaaacauuccaauggaaccauuaaagacaggagcccauaucgaacucuaaugagcuguccuauuggugaaguucccucuccauacaacucaagauuugagucagucgcuuggucagcaagugcuugucaugauggcaucaauuggcuaacaauuggaauuucuggcccagacaauggggcaguggcuguguuaaaguacaacggcauaauaacagacacuaucaagaguuggagaaacaauauauugagaacacaagagucugaaugugcauguguaaaugguucuugcuuuaccauaaugaccgauggaccaagugauggacaggccucauacaagaucuucagaauagaaaagggaaagauagucaaaucagucgaaaugaaugccccuaauuaucacuaugaggaaugcuccuguuauccugauucuagugaaaucacaugugugugcagggauaacuggcauggcucgaaucgaccgugggugucuuucaaccagaaucuggaauaucagauaggauacauaugcagugggauuuucggagacaauccacgcccuaaugauaaaacaggcaguugugguccaguaucgucuaauggagcaaauggaguaaaaggauuuucauucaaauacggcaaugguguuuggauagggagaacuaaaagcauuaguucaagaaaagguuuugagaugauuugggauccaaacggauggacugggacagacaauaacuucucaauaaagcaagauaucguaggaauaaaugaguggucaggauauagcgggaguuuuguucagcauccagaacuaacagggcuggacuguauaagaccuugcuucuggguugaacuaaucagagggcgacccaaagagaacacaaucuggacuagcgggagcagcauauccuuuugugguguaaacagugacacuguggguuggucuuggccagacggugcugaguugccauuuaccauugacaaguaa

SEQ ID NO: 57183 - RNA, 1410 nt, Artificial Sequence; identical to SEQ ID NO: 53021
  derived and/or modified CDS sequence (wt) from neuraminidase__InfluenzaA__AHM98661

SEQ ID NO: 57184 - RNA, 1410 nt, Artificial Sequence
  derived and/or modified CDS sequence (wt) from neuraminidase__InfluenzaA__AHM98672
augaauccaaaccaaaagauaauaaccauugguucggucuguaugacaauuggaauggcuaacuuaauauuacaaauuggaaacauaaucucaauauggauuagccacucaauucaacuugggaaucaaagucagauugaaacaugcaaucaaaacgucauuacuuaugaaaacaacacuuggguaaaucagacauauguuaacaucagcaacaccaacuuugcugcugaacagucagugguucccgugaaauuagcgggcaauuccucucucugcccuguuaguggaugggcuauauacaguaaggacaacaguauaagaaucgguuccaagggggauguguuugucauaagggaaccauucauaucaugcucccccuuggaaugcagaaccuucuucuugacucaaggggccuugcuaaaugacaaacauuccaauggaaccauuaaagacaggagcccauaucgaacccuaaugagcuguccuauuggugaaguucccucuccauacaacucaagauuugagucagucgcuuggucagcaagugcuugucaugauggcaucaauuggcuaacaauuggaauuucuggcccagacaauggggcaguggcuguguuaaaguacaacggcauaauaacagacacuaucaagaguuggagaaacaauauauugagaacacaagagucugaaugugcauguguaaaugguucuugcuuuaccauaaugaccgauggaccaagugauggacaggccucauacaagaucuucagaauagaaaagggaaagauagucaaaucagucgaaaugaaugccccuaauuaucacuaugaggaaugcuccuguuauccugauucuagugaaaucacaugugugugcagggauaacuggcauggcucgaaucgaccgugggugucuuucaaccagaaucuggaauaucagauaggauacauaugcagcgggauuuucggagacaauccacgcccuaaugauaagacaggcaguugugguccaguaucgucuaauggagcaaauggaguaaaaggauuuucauucaaauacggcaaugguguuuggauagggagaacuaaaagcauuaguucaagaaaagguuuugagaugauuugggauccaaauggauggacugggacagacaauaacuucucaauaaagcaagauaucguaggaauaaaugaguggucaggauauagcgggaguuuuguucagcauccagaacuaacagggcuggauuguauaagaccuugcuucuggguugaacuaaucagagggcgacccaaagagaacacaaucuggacuagcgggagcagcauauccuuuugugguguaaacagugacacuguggguuggucuuggccagacggugcugaguugccauuuaccauugacaaguaa

SEQ ID NO: 57185 - RNA, 1410 nt, Artificial Sequence
  derived and/or modified CDS sequence (wt) from neuraminidase__InfluenzaA__AHM98683
augaauccaaaccaaaagauaauaaccauugguucggucuguaugacaauuggaauggcuaacuuaauauuacaaauuggaaacauaaucucaauauggauuagccacucaauucaacuugggaaucaaaaucaaauugaaacaugcaaucaaagcgucauuacuuaugaaaacaacacuuggguaaaucagacauauguuaacaucagcaacaccaacuuugaugccggacagucagugguuuccgugagauuagcgggcaauuccucucucugcccuguuaguggaugggcuauauacaguaaagacaacaguauaagaaucgguuccaagggggauguguuugucauaagggaaccauucauaucaugcucccccuuggaaugcagaaccuucuucuugacucaaggggccuugcuaaaugacaaacauuccaauggaaccauuaaagacaggagcccauaucgaacccuaaugagcugucccauuggugaaguucccucuccauacaacucaagauuugagucagucgcuuggucagcaagugcuugucaugauggcuucaauuggcuaacaauuggaauuucuggcccagacaauggggcaguggcuguguuaaaguauaacggcauaauaacagacacuaucaggaguuggagaaacaauauauugagaacacaagagucugaaugugcauguguaaaugguucuugcuuuaccauaaugaccgauggaccaagugauggacaggccucauacaagaucuucagaauagaaaagggaaagauagucaaaucagucgaaaugaaugccccuaauuaucacuaugaggaaugcuccuguuauccugauucuagugaaaucacaugugugugcagggauaacuggcauggcucgaaucgaccgugggugucuuucaaccagaaucuggaauaucagauaggauauauaugcagugggauuuucggagacaauccacgcccuaaugauaagacaggcaguugugguccaguaucgucuaauggagcaaauggaguaaaaggauuuucauucaaauacggcaaugguguuuggauagggagaacuaaaagcauuaguucaagaaaagguuuugagaugauuugggauccaaacggauggacugggacagacaauaacuucucaauaaagcaagauaucguaggaauaaaugaguggucaggauauagcgggaguuuuguucagcauccagaacuaacagggcuggacuguauaagaccuugcuucuggguugaacuaaucagagggcgacccaaagagaacacaaucuggacuagcgggagcagcauauccuuuugugguguaaacagugacacuguggguuggucuuggccagacggugcugaguugccauuuaccauugacaaguaa

SEQ ID NO: 57186 - RNA, 1410 nt, Artificial Sequence
  derived and/or modified CDS sequence (wt) from neuraminidase__InfluenzaA__AHM98693
augaauccaaaccaaaagauaauaaccauugguucggucuguaugacaauuggaauggcuaacuuaauauuacaaauuggaaacauaaucucaauauggauuagccacucaauucaacuugggaaucaaaaucagauugaaacaugcaaucaaagcgucaucacuuaugaaaacaacacuuggguaaaucagacauauguuaacaucagcaacaccaacuuugcugcuggacagucagugguuuccgugaaauuagcgggcaauuccucucucugcccuguuaguggaugggcuauauacaguaaagacaacaguauaagaaucgguuccaagggggauguguuugucauaagggaaccauucauaucaugcucccccuuggaaugcagaaccuucuucuugacucaaggggccuugcuaaaugacaaacauuccaauggaaccauuaaagacaggagcccauaucgaacccuaaugagcugucccauuggugaaguucccucuccauacaacucaagauuugagucagucgcuuggucagcaagugcuugucaugauggcaucaauuggcuaacaauuggaauuucuggcccagacaauggggcaguggcuguguuaaaguacaacggcauaauaacagacacuaucaagaguuggagaaacaauauauugagaacacaagagucugaaugugcauguguaaaugguucuugcuuuaccauaaugacugauggaccaagugauggacaagccucauacaagaucuucagaauagaaaagggaaagauagucaaaucagucgaaaugaaugccccuaauuaucacuaugaggaaugcuccuguuauccugauucuagugaaaucacaugugugugcagggauaacuggcauggcucgaaucgaccgugggugucuuucaaccagaaucuggaauaucagauaggauacauaugcagugggauuuucggagacaauccacgcccuaaugauaagacaggcaguugugguccaguaucgucuaauggagcaaauggaguaaaaggauuuucauucaaauacggcaaugguguuuggauagggagaaccaaaagcauuaguucaagaaaagguuuugagaugauuugggauccaaacggauggacugggacagacaauaacuucucaauaaagcaagauaucguaggaauaaaugaguggucaggauauagcgggaguuuuguucagcauccagaacuaacagggcuggacuguauaagaccuugcuucuggguugaacuaaucagagggcgacccaaagagaacacaaucuggacuagcgggagcagcauauccuuuugugguguaaacagugacacuguggguuggucuuggccagacggugcugaguugccauuuaccauugacaaguaa

SEQ ID NO: 57187 - RNA, 1410 nt, Artificial Sequence; identical to SEQ ID NO: 55171
  derived and/or modified CDS sequence (wt) from neuraminidase__InfluenzaA__AHM98704

SEQ ID NO: 57188 - RNA, 1410 nt, Artificial Sequence; identical to SEQ ID NO: 55171
  derived and/or modified CDS sequence (wt) from neuraminidase__InfluenzaA__AHM98715

SEQ ID NO: 57189 - RNA, 1410 nt, Artificial Sequence
  derived and/or modified CDS sequence (wt) from neuraminidase__InfluenzaA__AHM98726
augaauccaaaccaaaagauaauaaccauugguucggucuguaugacaauuggaauggcuaacuuaauauuacaaauuggaaacauaaucucaauauggauuagccacucaauucaacuugggaaucaaaaucagauugaaacaugcaaucaaagcgucaucacuuaugaaaacaacacuuggguaaaucaaacauauguuaacaucagcaacaccaacuuugcugcuggacagucagugguuuccgugaaauuagcgggcaauuccucucucugcccuguuaguggaugggcuauauacaguaaagacaacaguauaagaaucgguuccaagggggauguguuugucauaagggaaccauucauaucaugcucccccuuggaaugcagaaccuucuucuugacucaaggggccuugcuaaaugacaaacauuccaauggaaccauuaaagacaggagcccauaucgaacccuaaugagcugucccauuggugaaguucccucuccauacaacucaagauuugagucagucgcuuggucagcaagugcuugucaugauggcaucaauuggcuaacaauuggaauuucuggcccagacaauggggcaguggcuguguuaaaguacaacggcauaauaacagacacuaucaagaguuggagaaacaauauuuugagaacacaagagucugaaugugcauguguaaaugguucuugcuuuaccauaaugacugauggaccaagugauggacaagccucauacaagaucuucagaauagaaaagggaaagauagucaaaucagucgaaaugaaugccccuaauuaucacuaugaggaaugcuccuguuauccugauucuagugaaaucacaugugugugcagggauaacuggcauggcucgaaucgaccgugggugucuuucaaccagaaucuggaauaucagauaggauacauaugcagugggauuuucggagacaauccacgcccuaaugauaagacaggcaguugugguccaguaucgucuaauggagcaaauggaguaaaaggauuuucauucaaauacggcaaugguguuuggauagggagaaccaaaagcauuaguucaagaaaagguuuugagaugauuugggauccaaacggauggacugggacagacaauaacuucucaauaaagcaagauaucguaggaauaaaugaguggucaggauauagcgggaguuuuguucagcauccagaacuaacagggcuggacuguauaagaccuugcuucuggguugaacuaaucagagggcgacccaaagagaacacaaucuggacuagcgggagcagcauauccuuuugugguguaaacagugacacuguggguuggucuuggccagacggugcugaguugccauuuaccauugacaaguaa

SEQ ID NO: 57190 - RNA, 1410 nt, Artificial Sequence
  derived and/or modified CDS sequence (wt) from neuraminidase__InfluenzaA__AHM98737
augaauccaaaccaaaagauaauaaccauugguucggucuguaugacaauuggaauggcuaacuuaauauuacaaauuggaaacauaaucucaauauggauuagccacucaauucaacuuaggaaucaaagucagauugaaacaugcaaucaaagcgucauuaauuaugaaaacaacacuuggguaaaucagacauauguuaacaucagcaacaccaacuuugcugcuggacagucagugguuuccgugaaauuagcgggcaauuccucucucugcccuguuaguggaugggcuauauacaguaaagacaacaguauaagaaucgguuccaagggggauguguuugucauaagggaaccauucguaucaugcucccccuuggaaugcagaaccuucuucuugacccaaggggccuugcuaaaugacaaacauuccaauggaaccauuaaagacaggagcccauaucgaacccuaaugagcuguccuauuggugaaguucccucuccauacaacucaagauuugagucagucgcuuggucagcaagugcuugucaugauggcaucaauuggcuaacaauuggaauuucuggcccagacaauggggcaguggcuguguuaaaguacaacggcauaauaacagacacuaucaagaguuggagaaaugauauauugagaacacaagaaucugaaugugcauguguaaaugguucuugcuuuaccauaaugaccgauggaccaagugauggacaggccucauacaagaucuucagaauagaaaagggaaagauagucaaaucagucgaaaugaaugccccuaauuaucacuaugaggaaugcuccuguuauccugauucuagugaaaucacaugugugugcagggauaacuggcauggcucaaaucgaccgugggugucuuucaaccagaaccuggaauaucagauaggauacauaugcagugggauuuucggagacaauccacgcccuaaugauaagacaggcaguugugguccaguaucgucuaauggagcaaauggaguaaaaggauuuucauucaaauacggcaaugguguuuggauagggagaacuaaaagcauuaguucaagaaaagguuuugagaugauuugggauccaaacggauggacugggacagacaauaacuucucaauaaagcaagauaucguaggaauaaaugaguggucaggauacagcgggaguuuuguucagcauccagaacuaacagggcuggauuguauaagaccuugcuucuggguugaacuaaucagaggacgacccaaagagaacacaaucuggacuagcgggagcagcauauccuuuugugguguaaacagugacacuguggguuggucuuggccagacggugcugaguugccauuuaccauugacaaguaa

SEQ ID NO: 57191 - RNA, 1410 nt, Artificial Sequence
  derived and/or modified CDS sequence (wt) from neuraminidase__InfluenzaA__AHM98748
augaauccaaaccaaaagauaauaaccauugguucggucuguaugacaauuggaauggcuaacuuaauauuacaaauuggaaacauaaucucaauauggauuagccacucaauucaacuuaggaaucaaagucagauugaaacaugcaaucaaagcgucaucacuuaugaaaacaacacuuggguaaaucagacauauguuaacaucagcaacaccaacuuugcugcuggacagucagugguuuccgugaaauuagcgggcaauuccucucucugcccuguuaguggaugggcuauauacaguaaagacaacaguauaagaaucgguuccaagggggauguguuugucauaagggaaccauucauaucaugcucccccuuggaaugcagaaccuucuucuugacccaaggggccuugcuaaaugacaaacauuccaauggaaccauuaaagacaggagcccauaucgaacccuaaugagcuguccuauuggugaaguucccucuccauacaacucaagauuugagucagucgcuuggucagcaagugcuugucaugauggcaucaauuggcuaacaauuggaauuucuggcccagacaauggggcaguggcuguguuaaaguacaacggcauaauaacagacacuaucaagaguuggaggaauaauauauugagaacacaagaaucugaaugugcauguguaaaugguucuugcuuuaccauaaugaccgauggaccaagugauggacaggccucauacaagaucuucagaauagaaaagggaaagauagucaaaucagucgaaaugaaugccccuaauuaucacuaugaggaaugcuccuguuauccugauucuagugaaaucacaugugugugcagggauaacuggcauggcucgaaucgaccgugggugucuuucaaccagaaucuggaauaucagauaggauacauaugcagugggauuuucggagacaauccacgcccuaaugauaagacaggcaguugugguccaguaucgucuaauggagcaaauggaguaaaaggauuuucauucaaauacggcaaugguguuuggauagggagaacuaaaagcauuaguucaagaaaagguuuugagaugauuugggauccaaacggauggacugggacagacaauaacuucucaauaaagcaagauaucguaggaauaaaugaguggucaggauacagcgggaguuuuguucagcauccagaacuaacagggcuggauuguauaagaccuugcuucuggguugaacuaaucagaggacgacccaaagagaacacaaucuggacuagcgggagcagcauauccuuuugugguguaaacagugacacuguggguuggucuuggccagacggugcugaguugccauuuaccauugacaaguaa

SEQ ID NO: 57192 - RNA, 1410 nt, Artificial Sequence
  derived and/or modified CDS sequence (wt) from neuraminidase__InfluenzaA__AHM98759
augaauccaaaccaaaagauaauaaccauugguucggucuguaugacaauuggaauggcuaacuuaauauuacaaauuggaaacauaaucucaauauggauuagccacucaauucaacuuaggaaucaaagucagauugaaacaugcaaucaaagcgucauuacuuaugaaaacaacacuuggguaaaucagacauauguuaacaucagcaacaccaauuuugcugcuggacagucagugguuuccgugaaauuagcgggcaauuccucucucugcccuguuaguggaugggcuauauacaguaaagacaacaguauaagaaucgguuccaagggggauguguuugucauaagggaaccauucauaucaugcucccccuuggaaugcagaaccuucuucuugacccaaggggccuugcuaaaugacaaacauuccaauggaaccauuaaagacaggagcccauaucgaacccuaaugagcuguccuauuggugaaguucccucuccauacaacucaagauuugagucagucgcuuggucagcaagugcuugucaugauggcaucaauuggcuaacaauuggaauuucuggcccagacaauggggcaguggcuguguuaaaguacaacggcauaauaacagacacuaucaagaguuggagaaauaauauauugagaacacaagaaucugaaugugcauguguaaaugguucuugcuuuaccauaaugaccgauggaccaagugauggacaggccucauacaagaucuucagaauagaaaagggaaagauagucaaaucagucgaaaugaaugccccuaauuaucacuaugaggaaugcuccuguuauccugauucuagugaaaucacaugugugugcagggauaacuggcauggcucgaaucgaccgugggugucuuucaaccagaaucuggaauaucagauaggauacauaugcagugggauuuucggagacaauccacgcccuaaugauaagacaggcaguugugguccaguaucgucuaauggagcaaauggaguaaaaggauuuucauucaaauacggcaaugguguuuggauagggagaacuaaaagcauuaguucaagaaaagguuuugagaugauuugggauccaaacggauggacugggacagacaauaacuucucaauaaagcaagauaucguaggaauaaaugaguggucaggauacagcgggaguuuuguucagcauccagaacuaacagggcuggauuguauaagaccuugcuucuggguugaacuaaucagaggacgacccaaagagaacacaaucuggacuagcgggagcagcauauccuuuugugguguaaacagugacacuguggguuggucuuggccagacggugcugaguugccauuuaccauugacaaguaa

SEQ ID NO: 57193 - RNA, 1410 nt, Artificial Sequence
  derived and/or modified CDS sequence (wt) from neuraminidase__InfluenzaA__AHM98770
augaauccaaaccaaaagauaauaaccauugguucggucuguaugacaauuggaauggcuaacuuaauauuacaaauuggaaacauaaucucaauauggauuagccacucaauucaacuuaggaaucaaagucagauugaaacaugcaaucaaagcgccauuacuuaugaaaacaacacuuggguaaaucagacauauguuaacaucagcaacaccaacuuugcugcuggacagucagugguuuccgugaaauuagcgggcaauuccucucucugcccuguuaguggaugggcuauauacaguaaagacaacaguauaagaaucgguuccaagggggauguguuugucauaagggaaccauucauaucaugcucccccuuggaaugcagaaccuucuucuugacccaaggggccuugcuaaaugacaaacauuccaauggaaccauuaaagacaggagcccauaucgaacccuaaugagcuguccuauuggugaaguucccucuccauacaacucaagauuugagucagucgcuuggucagcaagugcuugucaugauggcaucaauuggcuaacaauuggaauuucuggcccagacaauggggcaguggcuguguuaaaguacaacggcauaauaacagacacuaucaagaguuggagaaauaauauauugagaacacaagaaucugaaugugcauguguaaaugguucuugcuuuaccauaaugaccgauggaccaagugauggacaggccucauacaagaucuucagaauagaaaagggaaagauagucaaaucagucgaaaugaaugccccuaauuaucacuaugaggaaugcuccuguuauccugauucuagugaaaucacaugugugugcagggauaacuggcauggcucgaaucgaccgugggugucuuucaaccagaaucuggaauaucagauaggauacauaugcagugggauuuucggagacaauccacgcccuaaugauaagacaggcaguugugguccaguaucgucuaauggagcaaauggaguaaaaggauuuucauucaaauacggcaaugguguuuggauagggagaacuaaaagcauuaguucaagaaaagguuuugagaugauuugggauccaaacggauggacugggacagacaauaacuucucaauaaagcaagauaucguaggaauaaaugaguggucaggauacagcgggaguuuuguucagcauccagaacuaacagggcuggauuguauaagaccuugcuucuggguugaacuaaucagaggacgacccaaagagaacacaaucuggacuagcgggagcagcauauccuuuugugguguaaacagugacacuguggguuggucuuggccagacggugcugaguugccauuuaccauugacaaguaa

SEQ ID NO: 57194 - RNA, 1410 nt, Artificial Sequence
  derived and/or modified CDS sequence (wt) from neuraminidase__InfluenzaA__AHM98781
augaauccaaaccaaaagauaauaaccauugguucggucuguaugacaauuggaauggcuaacuuaauauuacaaauuggaaacauaaucucaauauggauuagccacucaauucaacuugggaaucaaaaucagauugaaacaugcaaucaaagcgucauuacuuaugaaaacaacacuuggguaaaccagacauauguuaacaucagcaacaccaacuuugcugcuggacagucagugguuuccgugaaauuagcgggcaauuccucucucugcccuguuaguggaugggcuauauacaguaaagacaacaguauaagaaucgguuccaagggggauguguuugucauaagggaaccauucauaucaugcucccccuuggaaugcagaaccuucuucuugacucaaggggccuugcuaaaugacaaacauuccaauggaaccauuaaagacaggagcccauaucgaaccuuaaugagcuguccuauuggugaaguucccucuccauacaacucaagauuugagucagucgcuuggucagcaagugcuugucaugauggcaucaauuggcuaacaauuggaauuucuggcccagacaauggggcaguggcuguguuaaaguacaacggcauaauaacagacacuaucaagaguuggagaaacaauauauugagaacacaagagucugaaugugcauguguaaaugguucuugcuuuaccauaaugaccgauggaccaagugauggacaggccucauacaagaucuucagaauagaaaagggaaagauagucaaaucagucgaaaugaaugccccuaauuaucacuaugaggaaugcuccuguuauccugauucaagugaaaucacaugugugugcagggauaacuggcauggcucgaaucgaccgugggugucuuucaaccagaaucuggaauaucagauaggauacauaugcagugggauuuucggagacaauccacgcccuagugauaagacaggcaguugugguccaguaucgucuaauggagcaaauggaguaaaaggauuuucauucaaauacggcaaugguguuuggauagggagaacuaaaagcauuaguucaagaaaagguuuugagaugauuugggauccaaacggauggacugggacagacaauagcuucucaauaaagcaagauaucguaggaauaaaugaguggucaggauauagcgggaguuuuguucagcauccagaacuaacagggcuggacuguauaagaccuugcuucuggguugaacuaaucagagggcgacccaaagagaacacaaucuggacuagcgggagcagcauauccuuuugugguguaaacaguggcacuguggguuggucuuggccagacggugcugaguugccauuuaccauugacaaguaa

SEQ ID NO: 57195 - RNA, 1410 nt, Artificial Sequence; identical to SEQ ID NO: 55320
  derived and/or modified CDS sequence (wt) from neuraminidase__InfluenzaA__AHM98801

SEQ ID NO: 57196 - RNA, 1410 nt, Artificial Sequence; identical to SEQ ID NO: 52606
  derived and/or modified CDS sequence (wt) from neuraminidase__InfluenzaA__AHM98812

SEQ ID NO: 57197 - RNA, 1410 nt, Artificial Sequence
  derived and/or modified CDS sequence (wt) from neuraminidase__InfluenzaA__AHM98823
augaauccaaaccaaaagauaauaaccauugguucggucuguaugacaauuggaauggcuaacuuaauauuacaaauuggaaacauaaucucaauauggauuagccacucaauucaacuugggaaucaaagucagauugaaacaugcaaucaaagcgucauuacuuaugaaaacaacacuuggguaaaucagacauauauuaacaucagcaacaccaacuuugcugcuggacagucagugguuuccgugaaauuagcgggcaauuccucucucugcccuguuaguggaugggcuauauacaguaaagacaacaguauaagaaucgguuccaagggggauguguuugucauaagggaaccauucauaucaugcucccccucggaaugcagaaccuucuucuugacucaaggggccuugcuaaaugacaaacauuccaauggaaccauuaaagacaggagcccauaucgaacccuaaugagcuguccuauuggugaaguucccucuccauacaacucaagauuugagucagucgcuuggucagcaagugcuugucaugauggcaucaauuggcuaacaauuggaauuucuggcccagacaauggggcaguggcuguguuaaaguacaacggcauaauaacagacacuaucaagaguuggagaaacaauauauugagaacacaagagucugaaugugcauguguaaaugguucuugcuuuaccauaaugaccgauggaccaagugauggacaggccucauacaagaucuucagaauagaaaagggaaagauagucaaaucagucgaaaugaaugccccuaauuaucacuaugaggaaugcuccuguuauccugauucuagugaaaucacaugugugugcagggauaacuggcauggcucgaaucgaccgugggugucuuucaaccagaaucuggaauaucagauaggauacauaugcagugggauuuucggagacaauccacgcccuaaugauaagacaggcaguugugguccaguaucgucuaauggagcaaauggaguaaaaggauuuucauucaaauacggcaaugguguuuggauagggagaacuaaaagcauuaguucaagaaaagguuuugagaugauuugggauccaaauggauggacugggacagacaauaacuucucaauaaagcaagauaucguaggaauaaaugaguggucaggauauagcgggaguuuuguucagcauccagaacuaacagggcuggauuguauaagaccuugcuucuggguugaacuaaucagagggcgacccaaagagaacacaaucuggacuagcgggagcagcauauccuuuugugguguaaacagugacacuguggguuggucuuggccagacggugcugaguugccauuuaccauugacaaguaa

SEQ ID NO: 57198 - RNA, 1410 nt, Artificial Sequence
  derived and/or modified CDS sequence (wt) from neuraminidase__InfluenzaA__AHM98839
augaauccaaaccaaaagauaauaaccauugguucggucuguaugacaguuggaauggcuaacuuaauauuacaaauuggaaacauaaucucaauauggauuagccacucaauucaacuugggaaucaaagucagauugaaacaugcaaucaaagcgucauuacuuaugaaaacaacacuuggguaaaucagacauauguuaacaucagcaacaccaacuuugcugcuggacagucagugguuuccgugaaauuagcgggcaauuccucucucugcccuguuaguggaugggcuauauacaguaaagacaacaguauaagaaucgguuccaagggggauguguuugucauaagggaaccauucauaucaugcucccccuuggaaugcagaaccuucuucuugacucaaggggccuugcuaaaugacaaacauuccaauggaaccauuaaagacaggagcccauaucgaacccuaaugagcuguccuauuggugaaguucccucuccauacaacucaagauuugagucagucgcuuggucagcaagugcuugucaugauggcaucaauuggcuaacaauuggaauuucuggcccagacaauggggcaguggcuguguuaaaguacaacggcauaauaacagacacuaucaagaguuggagaaacaauauauugagaacacaagagucugaaugugcauguguaaaugguucuugcuuuaccauaaugaccgauggaccaagugauggacaggccucauacaagaucuucagaauagaaaagggaaagauagucaaaucagucgaaaugaaugccccuaauuaucacuaugaggaaugcuccuguuauccugauucuagugaaaucacaugugugugcagggauaacuggcauggcucgaaucgaccgugggugucuuucaaccagaaucuggaauaucagauaggauacauaugcagugggauuuucggagacaauccacgcccuaaugauaagacaggcaguugugguccaguaucgucuaauggagcaaauggaguaaaaggauuuucauucaaauacggcaaugguguuuggauagggagaacuaaaagcauuaguucaagaaaagguuuugagaugauuugggauccaaauggauggacugggacagacaauaacuucucaauaaagcaagauaucguaggaauaaaugaguggucaggauauagcgggaguuuuguucagcauccagaacuaacagggcuggauuguauaagaccuugcuucuggguugaacuaaucagagggcgacccaaagagaacacaaucuggacuagcgggagcagcauauccuuuugugguguaaacagugacacuguggguuggucuuggccagacggugcugaguugccauuuaccauugacaaguaa

SEQ ID NO: 57199 - RNA, 1410 nt, Artificial Sequence; identical to SEQ ID NO: 55281
  derived and/or modified CDS sequence (wt) from neuraminidase__InfluenzaA__AHM98850

SEQ ID NO: 57200 - RNA, 1410 nt, Artificial Sequence; identical to SEQ ID NO: 52606
  derived and/or modified CDS sequence (wt) from neuraminidase__InfluenzaA__AHM98861

SEQ ID NO: 57201 - RNA, 1410 nt, Artificial Sequence
  derived and/or modified CDS sequence (wt) from neuraminidase__InfluenzaA__AHM98901
augaauccaaaccaaaagauaauaaccauugguucggucuguaugacaauuggaauggcuaacuuaauauuacaaauuggaaacauaaucucaauauggauuagccacucaauucaacuugggaaucaaaaucagauugaaacaugcaaucaaagcgucauuacuuaugaaaacaacacuuggguaaaucagacauauguuaacaucagcaacaccaacuuugcugcuggacagucagugguuuccgugaaauuagcgggcaauuccucucucugcccuguuaguggaugggcuauauacaguaaagacaacaguauaagaaucgguuccaagggggauguguuugucauaagggaaccauucauaucaugcucccccuuggaaugcagaaccuucuucuugacucaaggggccuugcuaaaugacaaacauuccaauggaaccauuaaagacaggagcccacaucgaacccuuaugagcuguccuauuggugaaguucccucuccauacaacucaagauuugagucagucgcuuggucagcaagugcuugucaugauggcaucaauuggcuaacaauuggaauuucgggcccagacaauggggcaguggcuguguuaaaguacaacggcauaauaacagacacuaucaagaguuggagaaacaauauauugagaacacaagagucugaaugugcauguguaaaugguucuugcuuuaccauaaugaccgauggaccaagugauggacaggccucauacaagaucuucagaauagaaaagggaaagauagucaaaucagucgaaaugaaugccccuaauuaucacuaugaggaaugcuccuguuauccugauucuagugaaaucacaugugugugcagggauaacuggcauggcucgaaucgaccgugggugucuuucaaccagaaucuggaauaucagauaggauacauaugcagugggauuuucggagacaauccacgcccuaaugauaagacaggcaguugugguccaguaucgucuaauggagcaaauggaguaaaaggauuuucauucaaauacggcaaugguguuuggauagggagaacuaaaagcauuaguucaagaaaagguuuugagaugauuugggauccaaacggauggacugggacagacaauaacuucucaauaaagcaagauaucguaggaauaaaugaguggucaggauauagcgggaguuuuguucagcauccagaacuaacagggcuggacuguauaagaccuugcuucuggguugaacuaaucagagggcgacccaaagagaacacaaucuggacuagcgggagcagcauauccuuuugugguguaaacagugacacuguggguuggucuuggccagacggugcugaguugccauuuaccauugacaaguaa

SEQ ID NO: 57202 - RNA, 1410 nt, Artificial Sequence; identical to SEQ ID NO: 55858
  derived and/or modified CDS sequence (wt) from neuraminidase__InfluenzaA__AHM98912

SEQ ID NO: 57203 - RNA, 1410 nt, Artificial Sequence; identical to SEQ ID NO: 55858
  derived and/or modified CDS sequence (wt) from neuraminidase__InfluenzaA__AHM98923

SEQ ID NO: 57204 - RNA, 1410 nt, Artificial Sequence; identical to SEQ ID NO: 55858
  derived and/or modified CDS sequence (wt) from neuraminidase__InfluenzaA__AHM98935

SEQ ID NO: 57205 - RNA, 1410 nt, Artificial Sequence; identical to SEQ ID NO: 55858
  derived and/or modified CDS sequence (wt) from neuraminidase__InfluenzaA__AHM98943

SEQ ID NO: 57206 - RNA, 1410 nt, Artificial Sequence; identical to SEQ ID NO: 55858
  derived and/or modified CDS sequence (wt) from neuraminidase__InfluenzaA__AHM98954

SEQ ID NO: 57207 - RNA, 1410 nt, Artificial Sequence
  derived and/or modified CDS sequence (wt) from neuraminidase__InfluenzaA__AHM98972
augaauccaaaccaaaagauaauaaccauugguucggucuguaugacaauuggaauggcuaacuuaauauuacaaauuggaaacauaaucucaauauggauuagccacucaauucaacuugggaaucaaaaucagauugaaacaugcaaucaaagcgucauuacuuaugaaaacaacacuuggguaaaucagacauauguuaacaucagcaacaccaacuuugcugcuggacagucagugguuuccgugaaauuagcgggcaauuccucucucugcccuguuaguggaugggcuauauacaguaaagacaacaguguaagagucgguuccaagggggauguguuugucauaagggaaccauucauaucaugcucccccuuggaaugcagaaccuucuucuugacucagggggccuugcuaaaugacaaacauuccaauggaaccauuaaagacaggagcccauaucgaacccuaaugagcuguccuauuggugaaguucccucuccauacaacucaagauuugagucagucgcuuggucagcaagugcuugucaugauggcaucaauuggcuaacaauuggaauuucuggcccagacaauggggcaguggcuguguuaaaguacaacggcauaauaacagacacuaucaagaguuggagaaacaauauauugagaacacaagagucugaaugugcauguguaaaugguucuugcuuuacuguaaugaccgauggaccaaguaauggacaggccucauacaagaucuucagaauagaaaagggaaagauagucaaaucagucgaaaugaaugccccuaauuaucacuaugaggaaugcuccuguuauccugauucuagugaaaucacaugugugugcagggauaacuggcauggcucgaaucgaccgugggugucuuucaaccagaaucuggaauaucagauaggcuacauaugcagugggauuuucggagacaauccacgcccuaaugauaagacaggcaguugugguccaguaucgucuaauggagcaaauggaguaaaaggauuuucauucaaauacggcaaugguguuuggauagggagaacuaaaagcauuaguucaagaaacgguuuugagaugauuugggauccgaacggauggacugggacagacaauaacuucucaauaaagcaagauaucguaggaauaaaugaguggucaggauauagcgggaguuuuguucagcauccagaacuaacagggcuggauuguauaagaccuugcuucuggguugaacuaaucagggggcgacccaaagagaacacaaucuggacuagcgggagcagcauauccuuuugugguguaaacagugacacuguggguuggucuuggccagacggugcugaguugccauuuaccauugacaaguaa

SEQ ID NO: 57208 - RNA, 1410 nt, Artificial Sequence; identical to SEQ ID NO: 57207
  derived and/or modified CDS sequence (wt) from neuraminidase__InfluenzaA__AHM98978

SEQ ID NO: 57209 - RNA, 1410 nt, Artificial Sequence; identical to SEQ ID NO: 55858
  derived and/or modified CDS sequence (wt) from neuraminidase__InfluenzaA__AHM98990

SEQ ID NO: 57210 - RNA, 1410 nt, Artificial Sequence; identical to SEQ ID NO: 55858
  derived and/or modified CDS sequence (wt) from neuraminidase__InfluenzaA__AHM99000

SEQ ID NO: 57211 - RNA, 1410 nt, Artificial Sequence; identical to SEQ ID NO: 55858
  derived and/or modified CDS sequence (wt) from neuraminidase__InfluenzaA__AHM99011

SEQ ID NO: 57212 - RNA, 1410 nt, Artificial Sequence; identical to SEQ ID NO: 55834
  derived and/or modified CDS sequence (wt) from neuraminidase__InfluenzaA__AHM99022

SEQ ID NO: 57213 - RNA, 1410 nt, Artificial Sequence; identical to SEQ ID NO: 55834
  derived and/or modified CDS sequence (wt) from neuraminidase__InfluenzaA__AHM99034

SEQ ID NO: 57214 - RNA, 1410 nt, Artificial Sequence; identical to SEQ ID NO: 55834
  derived and/or modified CDS sequence (wt) from neuraminidase__InfluenzaA__AHM99046

SEQ ID NO: 57215 - RNA, 1410 nt, Artificial Sequence; identical to SEQ ID NO: 55834
  derived and/or modified CDS sequence (wt) from neuraminidase__InfluenzaA__AHM99057

SEQ ID NO: 57216 - RNA, 1410 nt, Artificial Sequence; identical to SEQ ID NO: 55834
  derived and/or modified CDS sequence (wt) from neuraminidase__InfluenzaA__AHM99068

SEQ ID NO: 57217 - RNA, 1410 nt, Artificial Sequence; identical to SEQ ID NO: 55858
  derived and/or modified CDS sequence (wt) from neuraminidase__InfluenzaA__AHM99078

SEQ ID NO: 57218 - RNA, 1410 nt, Artificial Sequence
  derived and/or modified CDS sequence (wt) from neuraminidase__InfluenzaA__AHN00720
augaauacaaaucaaagaauaauaaccauugggacaaucugucuaauaguuggaauaauuagucuauuauugcagauaggaaauauagucucguuauggauaagccauucaauucagacugaagaaaaaagccacccugagguaugcaaccaaagugucauuacauaugaaaacaacacaugggugaaccaaacuuauauaaacauuagcaauaccaauauugcugcuggacagggugugacuccaauaauacuagccggcaauuccucucuuugcccaaucagugggugggcuauauacagcaaagacaauagcauaaggauugguuccaaaggagacauuuuugucaugagagagccauucauuucaugcucucacuuggagugcagaaccuuuuuucugacccaaggcgcuuugcugaaugacaggcauucuaauggaaccgucaaggacaggaguccuuauagaaccuuaaugagcugcccgaucggugaagcuccaucuccguacaauucaagguucgaaucaguugcuuggucagcaagugcaugccaugauggaaugggauggcuaacaaucgggauuuccgguccagauaauggagcaguggcuguuuuaaaauacaaugguauaauaacagauacaaugaaaaguuggagaaacaaaauauuaagaacacaagagucugaauguguuuguauaaacgguucguguuuuacuauaaugacugacggcccaagcaaugggcaagccucguacaaaauauucaaaauggagaaagggaagauuauuaagucaauugagcuggaugcaccuaauuaccacuaugaggaaugcuccuguuacccugauacaggcaaaguggugugugugugcagagauaauuggcaugcuucgaaucgaccaugggucucuuucgaucagaaucuugauuaucaaauaggguacauaugcagugggguuuucggugauaacccgcguucuaaugaugggaaaggcaauuguggcccaguacuuucuaauggagcaaauggagugaagggguuuucauuuagauauggcaaugguguuuggauaggaagaacuaaaaguaucagcucuagaaguggauuugagaugauuugggauccuaauggauggacagaaacugauaguaguuucucuaugaagcaagauauuauagcauuaacugauuggucgggauacaguggaaguuuuguccaacauccugaauuaacaggaaugaacugcauaaggccuuguuucuggguagaguuaaucagagggcaacccaaggagagcacaaucuggacuaguggaagcagcauuucuuucuguggcgugaacagugaaacugcaagcuggucauggccagacggagcugaucugccauucaccauugacaaguag

SEQ ID NO: 57219 - RNA, 1410 nt, Artificial Sequence
  derived and/or modified CDS sequence (wt) from neuraminidase__InfluenzaA__AHN00767
augaauacaaaucaaagaauaauaaccauugggacaaucugucuaauaguuggaauaauuagucuauuauugcagauaggaaauauagucucauuauggauaagccauucaauucagacuggagaaaaaagccacccugagguaugcaaccaaagugucauuacauaugaaaacaacacaugggugaaccaaacuuauguaaacauuagcaauaccaauauugcugcuggacagggugugacuccaauaauacuagccggcaauuccucucuuugcccaaucagugggugggcuauauacagcaaagacaauagcauaaggauugguuccaaaggagacauuuuugucaugagagagccauucauuucaugcucucacuuggagugcagaaccuuuuuucugacccaaggcgcuuugcugaaugacaggcauucuaauggaaccgucaaggacaggaguccuuauagaacuuuaaugagcugcccgaucggugaagcuccaucuccguacaauucaagguucgaaucaguugcuuggucagcaagugcaugccaugauggaaugggauggcuaacaaucgggauuuccgguccagauaauggggcaguggcuguuuuaaaauacaaugguauaauaacagauacaauaaaaaguuggagaaacaaaauauuaagaacacaggagucugaauguguuuguauaaacgguucguguuuuacuauaaugacugacggcccaagcaaugggcaagccucguacaaaauauucaaaauggagaaagggaagauuauuaagucaauugagcuggaugcaccuaauuaccacuaugaggaaugcuccuguuacccugauacaggcaaaguggugugugugugcagagauaauuggcaugcuucgaaucgaccaugggucucuuucgaucagaaucuugauuaucaaauaggguacauaugcagugggguuuucggugauaacccgcguucuaaugaugggaaaggcaauuguggcccaguacuuucuaauggagcaaauggagugaagggguuuucauuuagauauggcaaugguguuuggauaggaagaacuaaaaguaucagcucuagaaguggauuugagaugauuugggauccuaauggauggacagaaacugauaguaguuucucuaugaagcaagauauuauagcauuaacugauuggucgggauacaguggaaguuuuguccaacauccugaauuaacaggaaugaacugcauaaggccuuguuucuggguagaguuaaucagagggcaacccaaggagagcacaaucuggacuaguggaagcagcauuucuuucuguggcgugaacagugaaacugcaagcuggucauggccagacggagcugaucugccauucaccauugacaaguag

SEQ ID NO: 57220 - RNA, 1398 nt, Artificial Sequence
  derived and/or modified CDS sequence (wt) from neuraminidase__InfluenzaA__AHN96324
augaauccaaaucagaagauucuaugcacuucagccacugcuaucauaauaggcgcaauagcaguacucauuggaauagcaaaccuaggauugaacauaggacugcaucuaaaaccgagcugcaauugcucacacucacaaccugaaacaaccaacacaagccaaacaauaauaaacaacuauuauaaugaaacaaacaucaccaacauccaaauggaagagagaacaagcaggaauuucaauaacuuaacuaaagggcucuguacuauaaauucauggcacauauaugggaaagacaaugcaguaagaauuggagagagcucggauguuuuagucacaagagaacccuauguuucaugcgacccagaugaaugcagguucuaugcucucagccaaggaacaacaaucagagggaaacacucaaacggaacaauacacgauaggucccaguaucgcgcccugauaagcuggccacuaucaucaccgcccacaguguacaacagcaggguggaaugcauuggguggucaaguacuaguugccaugauggcaaauccaggaugucaauauguauaucaggaccaaacaacaaugcaucugcaguaguaugguacaacagaaggccuguugcagaaauuaacacaugggcccgaaacauacuaagaacacaggaaucugaauguguaugccacaacggcguaugcccaguaguguucaccgaugggucugccacuggaccugcagacacaagaauauacuauuuuaaagaggggaaaauauugaaaugggagucucugacuggaacugcuaagcauauugaagaaugcucauguuacggggaacgaacaggaauuaccugcacaugcagggacaauuggcagggcucaaauagaccagugguucagauagauccaguagcaaugacacacacuagucaguauauaugcaguccuguucuuacagacaauccccgaccgaaugacccaaauauagguaaguguaaugacccuuauccagguaauaauaacaauggagucaagggauucucauaccuggauggggcuaacacuuggcuagggaggacaauaagcacagccucgaggucuggauaugagauguuaaaagugccaaaugcauugacagaugauagaucaaagcccauucaaggucagacaauuguauuaaacgcugacuggagugguuacaguggaucuuucauggacuauugggcugaaggggacugcuaucgagcguguuuuuauguggaguugauacguggaagacccaaggaggauaaagugugguggaccagcaauaguauaguaucgauguguuccaguacagaauuccugggacaauggaacuggccugauggggcuaaaauagaguacuuccucuaa

SEQ ID NO: 57221 - RNA, 1410 nt, Artificial Sequence
  derived and/or modified CDS sequence (wt) from neuraminidase__InfluenzaA__AHN96448
augaauccaaaucaaaagauaauaacgauuggcucuguuucucucaccauuuccacaauaugcuucuucaugcaaauugccaucuugauaacuacuguaacauugcauuucaagcaauaugaauucaacucccccccaaacaaccaagugaugcugugugaaccaacaauaauagaaagaaacauaacagagauaguguaucugaccaacaccaccauagagaaggaaauaugccccaaacuagcagaauacagaaauuggucaaagccgcaaugugacauuacaggauuugcaccuuuuucuaaggacaauucgauuaggcuuuccgcugguggggacaucugggugacaagagaaccuuaugugucaugcgauccugacaaguguuaucaauuugcccuuggacagggaacaacacuaaacaacgugcauucaaauaacacaguacgugauaggaccccuuaucggacccuauugaugaaugaguuagguguuccuuuucaucuggggaccaagcaagugugcauagcaugguccagcucaaguugucacgauggaaaagcauggcugcauguuuguauaacgggggaugauaaaaaugcaacugcuagcuucauuuacaaugggaagcuuguagauaguguugucucaugguccaaagaaauccucaggacccaggagucagaaugcguuuguaucaaugggacuuguacaguaguaaugacugaugggagugcuucaggaaaagcugauacuaaaauacuauucauugaggaggggaaaaucguucauacuagcacauugucaggaagugcucagcaugucgaggagugcucuugcuauccucgauauccuggugucagaugugucugcagagacaacuggaaaggcuccaauaggcccaucguagauauaaacauaaaggaucauagcauuguuuccaguuauguguguucaggacuuguuggagacacacccagaaaaaacgacagcuccagcaguagccauuguuuggauccuaacaaugaagaagguggucauggagugaaaggcugggccuuugaugauggaaaugacguguggaugggaagaacgaucaacgagacgucacguuuaggguaugaaaccuucaaagucauugaaggcugguccaacccuaaguccaaauugcagauaaauaggcaagucauaguugacagagguaauagguccgguuauucugguauuuucucuguugaaggcaaaagcugcaucaaucggugcuuuuauguggaguugauuaggggaagaaaagaggaaacugaagucuuguggaccucaaacaguauuguuguguuuuguggcaccucagguacauauggaacaggcucauggccugauggggcggaccucaaucucaugccuauauaa

SEQ ID NO: 57222 - RNA, 1410 nt, Artificial Sequence
  derived and/or modified CDS sequence (wt) from neuraminidase__InfluenzaA__AHN96450
augaauccaaaucaaaagauaauaacgauuggcucuguuucucucaccauuuccacaauaugcuucuucaugcaaauugccaucuugauaacuacuguaacauugcauuucaagcaauaugaauucaacucccccccaaacaaccaagugaugcugugugaaccaacaauaauagaaagaaacauaacagagauaguguaucugaccaacaccaccauagagaaggaaauaugccccaaaccagcagaauacagaaauuggucaaaaccgcaauguggcauuacaggauuugcaccuuucucuaaggacaauucgauuaggcuuuccgcugguggggacaucugggugacaagagaaccuuaugugucaugcgauccugacaaguguuaucaauuugcccuuggacagggaacaacacuaaacaacgugcauucaaauaacacaguacgugauaggaccccuuaucggacucuauugaugaaugaguuggguguuccuuuucaucuggggaccaagcaagugugcauagcaugguccagcucaaguugucacgauggaaaagcauggcugcauguuuguauaacgggggaugauaaaaaugcaacugcuagcuucauuuacaaugggaggcuuguagauaguguuguuucaugguccaaagaaauucucaggacccaggagucagaaugcguuuguaucaauggaacuuguacaguaguaaugacugauggaagugcuucaggaaaagcugauacuaaaauacuauucauugaggaggggaaaaucguucauacuagcacauugucaggaagugcucagcaugucgaagagugcucuugcuauccucgauauccuggugucagaugugucugcagagacaacuggaaaggcuccaauaggcccaucguagauauaaacauaaaggaucauagcauuguuuccaguuauguguguucaggacuuguuggagacacacccagaaaaaacgacagcuccagcaguagccauuguuuggauccuaacaaugaagaagguggucauggagugaaaggcugggccuuugaugauggaaaugacguguggaugggaagaacaaucaaugagacgucacgcuuaggguaugaaaccuucaaagucauugaaggcugguccaacccuaaguccaaauugcagauaaauaggcaagucauaguugacagaggugauagguccgguuauucugguauuuucucuguugaaggcaaaagcugcaucaaucggugcuuuuauguggaguugauuaggggaagaaaagaggaaacugaagucuuguggaccucaaacaguauuguuguguuuuguggcaccucagguacauauggaacaggcucauggccugauggggcggaccucaaucucaugccuauauaa

SEQ ID NO: 57223 - RNA, 1410 nt, Artificial Sequence
  derived and/or modified CDS sequence (wt) from neuraminidase__InfluenzaA__AHN96451
augaauccaaaucaaaagauaauaacgauuggcucuguuucucucaccauuuccacaauaugcuucuucaugcaaauugccaucuugauaacuacuguaacauugcauuucaagcaauaugaauucaacucccccccaaacaaccaagugaugcugugugaaccaacaauaauagaaagaaacauaacagagauaauguaucugaccaacaccaccauagagaaggaaauaugccccaaaccagcagaauacagaaauuggucaaaaccgcaauguggcauuacaggauuugcaccuuucucuaaggacaauucgauuaggcuuuccgcugguggggacaucugggugacaagagaaccuuaugugucaugcgauccugacaaguguuaucaauuugcucuuggacagggaacaacacuaaacaacgugcauucaaauaacacaguacgugauaggaccccuuaucggacucuauugaugaaugaguuggguguuccuuuucaucuggggaccaagcaagugugcauagcaugguccagcucaaguugucacgauggaaaagcauggcugcauguuuguauaacgggggaugauaaaaaugcaacugcuagcuucauuuacaaugggaggcuuguagauaguguuguuucaugguccaaagaaauucucaggacccaggagucagaaugcguuuguaucaauggaacuuguacaguaguaaugacugauggaagugcuucaggaaaagcugauacuaaaauacuauucauugaggaggggaaaauuguucauacuagcacauugucaggaagugcucagcaugucgaagagugcucuugcuauccucgauauccuggugucagaugugucugcagagacaacuggaaaggcuccaauaggcccaucguagauauaaacauaaaggaucauagcauuguuuccaguuauguguguucaggacuuguuggagacacacccagaaaaaacgacagcuccagcaguagccauuguuuggauccuaacaaugaagaagguggucauggagugaaaggcugggccuuugaugauggaaaugacguguggaugggaagaacaaucaacgagacgucacgcuuaggguaugaaaccuucaaagucauugaaggcugguccaacccuaaguccaaauugcagauaaauaggcaagucauaguugacagaggugauagguccgguuauucugguauuuucucuguugaaggcaaaagcugcaucaaucggugcuuuuauguggaguugauuaggggaagaaaggaggaaacugaagucuuguggaccucaaacaguauuguuguguuuuguggcaccucagguacauauggaacaggcucauggccugauggggcggaccucaaucucaugccuauauaa

SEQ ID NO: 57224 - RNA, 1410 nt, Artificial Sequence
  derived and/or modified CDS sequence (wt) from neuraminidase__InfluenzaA__AHN96453
augaauccaaaucaaaagauaauaacgauuggcucuguuucucucaccauuuccacaauaugcuucuucaugcaaauugccaucuugauaacuacuguaacauugcauuucaagcaauaugaauucaacucccccccaaacaaccaagugaugcugugugaaccaacaauaauagaaagaaacauaacagagauaguguaucugaccaacaccaccauagagaaggaaauaugccccaaaccagcagaauacagaaauuggucaaaaccgcaauguggcauuacaggauuugcaccuuucucuaaggacaauucgauuaggcuuuccgcugguggggacaucuggguuacaagagaaccuuaugugucaugcgauccugacaagugcuaucaauuugcccuuggacagggaacaacacuagacaacguacauucaaauaacacaguacguaauaggaccccuuaucggacucuacugaugaaugaguuggguguuccuuuucaucuggggaccaagcaagugugcauagcaugguccagcucaaguugucacgauggaaaagcauggcugcauguuuguauaacgggggaugauaaaaaugcaacugcuagcuucauuuacaaugggaggcuuguagauaguguuguuucaugguccaaagacauucucaggacccaggagucagaaugcguuuguaucaauggaacuuguacaguaguaaugacugauggaagugcuucaggaaaagcugauacuaaaauacuauucauugaggaggggaagaucguucauacuagcacauugucaggaagugcucagcaugucgaagagugcucuugcuauccucgauauccuggugucagaugugucugcagagacaacuggaaaggcuccaaucggcccaucguagauauaaacauaaaggaucauagcauuguuuccaguuauguguguucaggacuuguuggagacacacccagaaaaaacgacagcuccagcaguagccauuguuuggauccuaacaaugaagaagguggucauggagugaaaggcugggccuuugacgauggaaaugacguguggaugggaagaacaaucaacgagacgucacgcuuaggguaugaaaccuucaaagucauugaaggcugguccaacccuaaguccaaauugcagauaaauaggcaagucauaguugacagaggugauagguccgguuauucugguauuuucucuauugaaggcaaaagcugcaucaaucggugcuuuuauguggaguugauuaggggaagaaaagaggaaacugaagucuuguggaccucaaacaguauuguuguguuuuguggcaccucagguacauauggaacaggcucauggccugauggggcggaccucaaucucaugccuauauaa

SEQ ID NO: 57225 - RNA, 1410 nt, Artificial Sequence
  derived and/or modified CDS sequence (wt) from neuraminidase__InfluenzaA__AHZ13526
augaauccaaaucaaaagauaauaacaauuggcucuguuucucucaccauugcaacaauaugcuuccuuaugcaaauugccauccuaguaacuacuguaacauugcauuucaagcaauaugagugcagcucccccccaaacaaccaaguaaugccgugugaaccaauaauaauagaaagaaacaugacagagauaguguauuugacuaacaccaccauagagaaagagauaugccccaaacuaguggaauacagaaauuggucaaagccgcaauguaaaauuacaggauuugcaccuuuuucuaaggacaauucaauucggcuuuccgcugguggggacauuugggugacgagagaaccuuaugugucaugcgauccuggcaaguguuaucaauuugcacucgggcagggaaccacacuaaacaacaagcauucaaaugacacaauacaugauaggaccccuuaucgaacccuauugaugaaugaguuggguguuccauuucauuugggaaccaagcaagugugcauagcaugguccagcucaaguugucacgauggaaaagcauggcugcauguuugugucacugggcaugauaaaaaugcaacugcuagcuucauuuacgaugggaggcuuguagacaguauugguucaugguccaaaaauauccucaggacccaggagucggaaugcguuuguaucaaugggacuuguacaguaguaaugacugauggaagugcuucagauagagcugauacuaaaauacuauucauugaagaggggaaaaucguucauauuagcccauugucaggaagugcucagcauguagaggaguguuccuguuauccucgauauccuggugucagaugugucugcagagacaacuggaaaggcuccaauaggcccaucguagauauaaaugugaaagauuauagcauuguuuccaguuaugugugcucagggcuuguuggcgacacacccagaaaaaacgacggauccagcaguagcuauugccggaauccuaacaaugagaaagggaaucauggagugaaaggcugggccuuugacgauggaaaugacguguggaugggaagaacgauuggcgaggaguuacgcucagguuaugaaaccuucaaagucauuggugguugguccacaccuaacuccaaauugcagauaaauaggcaagucauaguugacagcaauaauagguccgguuauucugguauuuucucuguugagggcaaaagcugcaucaauaggugcuuuuauguggaguugauaaggggaagggaacaggaaacuagagucugguggaccucaaacaguauuguuguguuuuguggcaccucagguacauauggaacaggcucauggccugauggagcggacaucaaucuaaugccuauauaa

SEQ ID NO: 57226 - RNA, 1413 nt, Artificial Sequence
  derived and/or modified CDS sequence (wt) from neuraminidase__InfluenzaA__AHZ13584
augaacccaaaucaaaagauaauaaccauuggaucaaucaguauagcaaucggaauaauuagucuaauguugcaaauaggaaauauuauuucaauaugggcuagucacucaauccaaacuggaagucaaaacaacacuggaauaugcaaccaaagaaucaucacauaugaaaacagcaccugggugaaucacacauauguuaauauuaacaacacuaauguuguugcuggagaggacaaaacgucagugacauuggccggcaauucaucucuuuguucuaucaguggaugggcuauauacacaaaagacaacagcauaagaauuggcuccaaaggagauguuuuugucauaagagaaccuuucauaucauguucucacuuggaaugcagaaccuuuuuucugacccaaggcgcucuauuaaaugacaaacauucaaaugggaccguaaaggacagaaguccuuauagggccuuaaugagcuguccucuaggugaagcuccguccccauacaauucaaaguucgaaucaguugcauggucagcaagcgcaugccaugauggcaugggcugguugacaaucggaauuucugguccagacaauggagcuguggcuguacuaaaauacaacggaauaauaacuggaaccauaaaaaguuggaaaaagcaaauauuaagaacacaagagucugaaugugucuguaugaacgggucauguuucaccauaaugaccgauggcccgaguaauaaagccgccucguacaaaauuuucaagaucgaaaaggggaagguuacuaaaucaauagaguugaaugcacccaauuuuuauuacgaggaaugcuccuguuacccagacacuggcauagugauguguguaugcagggacaacuggcaugguucaaaucgaccuugggugucuuuuaaucaaaauuuggauuaucaaauaggauacaucugcaguggaguguuuggugacaauccgcgucccgaagauggagagggcagcugcaauccagugacuguuaauggagcagacggaguaaaaggguuuucauacaaauaugguaaugguguuuggauaggaaggaccaaaaguaacagacuuaggaagggguuugagaugauuugggauccuaauggauggacaaauaccgacagugauuucucagugaaacaggauguuguagcaauaacugauuggucaggguacagcggaaguuucguccaacauccugaguugacaggauuggacuguauaagaccuugcuucuggguugaguuagucagagggcugccuagagaaaauacaacaaucuggacuagugggagcagcauuucuuuuuguggcguuaauagugauacugcaaacuggucuuggccagacggugcugaguugccguucaccauugacaaguag

SEQ ID NO: 57227 - RNA, 1410 nt, Artificial Sequence
  derived and/or modified CDS sequence (wt) from neuraminidase__InfluenzaA__AHZ35575
augaauccaaaucaaaagauaauaacgauuggcucuguuucucucaccauuuccacaauaugcuucuucaugcaaauugccaucuugauaacuacuguaacauugcauuucaagcaauaugaauucaacucccccccaaacaaccaagugaugcugugugaaccaacaauaauagaaagaaacauaacagagauaguguaucugaccaacaccaccauagagaaggaaauaugccccaaaccagcagaauacagaaauuggucaaagccgcaaugugacauuacaggauuugcaccuuucucuaaggacaauucgauuaggcuuuccgcugguggggacaucugggugacaagagaaccuuaugugucaugcgauccugacaaguguuaucaauuugcccuuggacagggaacaacacuaaacaacgugcauucaaauaacacaguacgugauaggaccccuuaucggacccuauugaugaaugaauuagguguuccuuuucaucuggggaccaagcaagugugcauagcaugguccagcucaaguugucacgauggaaaagcauggcugcauguuuguauaacgggggaugauaaaaaugcaacugcuagcuucauuuacaaugggaggcuuguagauaguguuguuucaugguccaaagaaauccucaggacccaggagucagaaugcguuuguaucaauggaacuuguacaguaguaaugacugaugggagugcuucaggaaaagcugauacuaaaauacuauucauugaggaggggaaaaucguucauacuagcacauugucaggaagugcucagcaugucgaggagugcucuugcuauccucgauauccuggugucagaugugucugcagagacaacuggaaaggcuccaauaggcccaucguagauauaaacauaaaggaucauagcauuguuuccaguuauguguguucaggacuuguuggagacacacccagaaaaaacgacagcuccagcaguagccauuguuuggauccuaacaaugaagaagguggucauggagugaaaggcugggccuuugaugauggaaaugacguguggaugggaagaacgaucaacgagacgucacguuuaggguaugaaaccuucaaagucauugaaggcugguccaacccuaaguccaaauugcagauaaauaggcaggucauaguugacagaggugauagguccgguuauucugguauuuuuucugucgaaggcaaaagcugcaucaaucggugcuuuuauguggaguugauuaggggaagaaaagaggaaacugaagucuuguggaccucaaacaguauuguuguguuuuguggcaccucagguacauauggaacaggcucauggccugauggggcggaccucaaucucaugccuauauaa

SEQ ID NO: 57228 - RNA, 1410 nt, Artificial Sequence; identical to SEQ ID NO: 57227
  derived and/or modified CDS sequence (wt) from neuraminidase__InfluenzaA__AHZ35587

SEQ ID NO: 57229 - RNA, 1410 nt, Artificial Sequence
  derived and/or modified CDS sequence (wt) from neuraminidase__InfluenzaA__AHZ35611
augaauccaaaucaaaagauaauaacgauuggcucuguuucucucaccauuuccacaauaugcuucuucaugcaaauugccaucuugauaacuacuguaacauugcauuucaagcaauaugaauucaacucccccccaaacaaccaagugaugcugugugaaccaacaauaauagaaagaaacauaacagagauaguguaucugaccaacaccaccauagagaaggaaauaugccccaaaccagcagaauacagaaauuggucaaagccgcaaugugacauuacaggauuugcaccuuucucuaaggacaauucgauuaggcuuuccgcugguggggacaucugggugacaagagaaccuuaugugucaugcgauccugacaaguguuaucaauuugcccuuggacagggaacaacacuaaacaacgugcauucaaauaacacaguacgugauaggaccccuuaucggacccuauugaugaaugaguuagguguuccuuuucaucuggggaccaagcaagugugcauagcaugguccagcucaaguugucacgauggaaaagcauggcugcauguuuguauaacgggggaugauaaaaaugcaacugcuagcuucauuuacaaugggaggcuuguagauaguguuguuucaugguccaaagaaauccucaggacccaggagucagaaugcguuuguaucaauggaacuuguacaguaguaaugacugaugggagugcuucaggaaaagcugauacuaaaauacuauucauugaggaggggaaaaucguucauacuagcacauugucaggaagugcucagcaugucgaggagugcucuugcuauccucgauauccuggugucagaugugucugcagagacaacuggaaaggcuccaauaggcccaucguagauauaaacauaaaggaucauagcauuguuuccaguuauguguguucaggacuuguuggagacacacccagaaaaaacgacagcuccagcaguagccauuguuuggauccuaacaaugaagaagguggucauggagugaaaggcugggccuuugaugauggaaaugacguguggaugggaagaacgaucaacgagacgucacguuuaggguaugaaaccuucaaagucauugaaggcugguccaacccuaaguccaaauugcagauaaauaggcaggucauaguugacagaggugauagguccgguuauucugguauuuuuucugucgaaggcagaagcugcaucaaucggugcuuuuauguggaguugauuaggggaagaaaagaggaaacugaagucuuguggaccucaaacaguauuguuguguuuuguggcaccucagguacauauggaacaggcucauggccugauggggcggaccucaaucucaugccuauauaa

SEQ ID NO: 57230 - RNA, 1410 nt, Artificial Sequence
  derived and/or modified CDS sequence (wt) from neuraminidase__InfluenzaA__AHZ35623
augaauccaaaucaaaagauaauaacgauuggcucuguuucucucaccauuuccacaauaugcuucuucaugcaaauugccaucuugauaacuacuguaacauugcauuucaagcaauaugaauucaacucccccccaaacaaccaagugaugcugugugaaccaacaauaauagaaagaaacauaacagagauaguguaucugaccaacaccaccauagagaaggaaauaugccccaaaccagcagaauacagaaauuggucaaagccgcaaugugacauuacaggauuugcaccuuucucuaaggacaauucgauuaggcuuuccgcugguggggacaucugggugacaagagaaccuuaugugucaugcgauccugacaaguguuaucaauuugcccuuggacagggaacaacacuaaacaacgugcauucaaauaacacaguacgugauaggaccccuuaucggacccuauugaugaaugaguuagguguuccuuuucaucuggggaccaagcaagugugcauagcaugguccagcucaaguugucacgauggaaaagcauggcugcauguuuguauaacgggggaugauaaaaaugcaacugcuagcuucauuuacaaugggaggcuuguagauaguguuguuucaugguccaaagaaauccucaggacccaggagucagaaugcguuuguaucaauggaacuuguacaguaguaaugacugaugggagugcuucaggaaaagcugauacuaaaauacuauucauugaggaggggaaaaucguucauacuagcacauugucaggaagugcucagcaugucgaggagugcucuugcuauccucgauauccuggugucagaugugucugcagagacaacuggaaaggcuccaauaggcccaucguagauauaaacauaaaggaucauagcauuguuuccaguuauguguguucaggacuuguuggagacacacccagaaaaaacgacagcuccagcaguagccauuguuuggauccuaacaaugaagaagguggucauggagugaaaggcugggccuuugaugauggaaaugacguguggaugggaagaacgaucaacgagacgucacguuuaggguaugaaaccuucaaagucauugaaggcugguccaacccuaaguccaaauugcagauaaauaggcaggucauaguugacagaggugauagguccgguuauucugguauuuuuucugucgaaggcaaaagcugcaucaaucggugcuuuuauguggaguugauuaggggaagaaaagaggaaacugaagucuuguggaccucaaacaguauuguuguguuuuguggcaccucagguacauauggaacaggcucauggccugauggggcggaccucaaucucaugccuauauaa

SEQ ID NO: 57231 - RNA, 1410 nt, Artificial Sequence
  derived and/or modified CDS sequence (wt) from neuraminidase__InfluenzaA__AHZ35635
augaauccaaaucaaaagauaauaacgauuggcucuguuucucucaccauuuccacaauaugcuucuucaugcaaauugccaucuugauaacuacuguaacauugcauuucaagcaauaugaauucaacucccccccaaacaaccaagugaugcugugugaaccaacaauaauagaaagaaacauaacagagauaguguaucugaccaacaccaccauagagaaggaaauaugccccaaaccagcagaauacagaaauuggucaaagccgcaaugugacauuacaggauuugcaccuuucucuaaggacaacucgauuaggcuuuccgcugguggggacaucugggugacaagagaaccuuaugugucaugcgauccugacaaguguuaucaauuugcccuuggacagggaacaacacuaaacaacgugcauucaaauaacacaguacgugauaggaccccuuaucggacccuauugaugaaugaauuagguguuccuuuucaucuggggaccaagcaagugugcauagcaugguccagcucaaguugucacgauggaaaagcauggcugcauguuuguauaacgggggaugauaaaaaugcaacugcuagcuucauuuacaaugggaggcuuguagauaguguuguuucaugguccaaagaaauccucaggacccaggagucagaaugcguuuguaucaauggaacuuguacaguaguaaugacugaugggagugcuucaggaaaagcugauacuaaaauacuauucauugaggaggggaaaaucguucauacuagcacauugucaggaagugcucagcaugucgaggagugcucuugcuauccucgauauccuggugucagaugugucugcagagacaacuggaaaggcuccaauaggcccaucguagauauaaacauaaaggaucauagcauuguuuccaguuauguguguucaggacuuguuggagacacacccagaaaaaacgacagcuccagcaguagccauuguuuggauccuaacaaugaagaagguggucauggagugaaaggcugggccuuugaugauggaaaugacguguggaugggaagaacgaucaacgagacgucacguuuaggguaugaaaccuucaaagucauugaaggcugguccaacccuaaguccaaauugcagauaaauaggcaggucauaguugacagaggugauagguccgguuauucugguauuuuuucugucgaaggcaaaagcugcaucaaucggugcuuuuauguggaguugauuaggggaagaaaagaggaaacugaagucuuguggaccucaaacaguauuguuguguuuuguggcaccucagguacauauggaacaggcucauggccugauggggcggaccucaaucucaugccuauauaa

SEQ ID NO: 57232 - RNA, 1410 nt, Artificial Sequence
  derived and/or modified CDS sequence (wt) from neuraminidase__InfluenzaA__AHZ35647
augaauccaaaucaaaagauaauaacgauuggcucuguuucucucaccauuuccacaauaugcuucuucaugcaaauugccaucuugauaacuacuguaacauugcauuucaagcaauaugaauucaacucccccccaaacaaccaagugaugcugugugaaccaacaauaauagaaagaaacauaacagagauaguguaucugaccaacaccaccauagagaaggaaauaugccccaaaccagcagaauacagaaauuggucaaagccgcaaugugacauuacaggauuugcaccuuucucuaaggacaauucgauuaggcuuuccgcugguggggacaucugggugacaagagaaccuuaugugucaugcgauccugacaaguguuaucaauuugcccuuggacagggaacaacacuaaacaacgugcauucaaauaacacaguacgugauaggaccccuuaucggacccuauugaugaaugaauuagguguuccuuuucaucuggggaccaagcaagugugcauagcaugguccagcucaaguugucacgauggaaaagcauggcugcauguuuguauaacgggggaugauaaaaaugcaacugcuagcuucauuuacaaugggaggcuuguagauaguguuguuucaugguccaaagaaauccucaggacccaggagucagaaugcguuuguaucaauggaacuuguacaguaguaaugacugaugggagugcuucaggaaaagcugauacuaaaauacuauucauugaggaggggaaaaucguucauacuagcacauugucaggaagugcucagcaugucgaggagugcucuugcuauccucgauauccugaugucagaugugucugcagagacaacuggaaaggcuccaauaggcccaucguagauauaaacauaaaggaucauagcauuguuuccaguuauguguguucaggacuuguuggagacacacccagaaaaaacgacagcuccagcaguagccauuguuuggauccuaacaaugaagaagguggucauggagugaaaggcugggccuuugaugauggaaaugacguguggaugggaagaacgaucaacgagacgucacguuuaggguaugaaaccuucaaagucauugaaggcugguccaacccuaaguccaaauugcagauaaauaggcaggucauaguugacagaggugauagguccgguuauucugguauuuuuucugucgaaggcaaaagcugcaucaaucggugcuuuuauguggaguugauuaggggaagaaaagaggaaacugaagucuuguggaccucaaacaguauuguuguguuuuguggcaccucagguacauauggaacaggcucauggccugauggggcggaccucaaucucaugccuauauaa

SEQ ID NO: 57233 - RNA, 1410 nt, Artificial Sequence; identical to SEQ ID NO: 57230
  derived and/or modified CDS sequence (wt) from neuraminidase__InfluenzaA__AHZ35659

SEQ ID NO: 57234 - RNA, 1410 nt, Artificial Sequence; identical to SEQ ID NO: 57227
  derived and/or modified CDS sequence (wt) from neuraminidase__InfluenzaA__AHZ35671

SEQ ID NO: 57235 - RNA, 1410 nt, Artificial Sequence; identical to SEQ ID NO: 57230
  derived and/or modified CDS sequence (wt) from neuraminidase__InfluenzaA__AHZ35683

SEQ ID NO: 57236 - RNA, 1410 nt, Artificial Sequence
  derived and/or modified CDS sequence (wt) from neuraminidase__InfluenzaA__AHZ35695
augaauccaaaucaaaagauaauaacgauuggcucuguuucucucaccauuuccacaauaugcuucuucaugcaaauugccaucuugauaacuacuguaacauugcauuucaagcaauaugaauucaacccccccccaaacaaccaagugaugcugugugaaccaacaauaauagaaagaaacauaacagagauaguguaucugaccaacaccaccauagagaaggaaauaugccccaaaccagcagaauacagaaauuggucaaagccgcaaugugacauuacaggauuugcaccuuucucuaaggacaauucgauuaggcuuuccgcugguggggacaucugggugacaagagaaccuuaugugucaugcgauccugacaaguguuaucaauuugcccuuggacagggaacaacacuaaacaacgugcauucaaauaacacaguacgugauaggaccccuuaucggacccuauugaugaaugaguuagguguuccuuuucaucuggggaccaagcaagugugcauagcaugguccagcucaaguugucacgauggaaaagcauggcugcauguuuguauaacgggggaugauaaaaaugcaacugcuagcuucauuuacaaugagaggcuuguagauaguguuguuucaugguccaaagaaauccucaggacccaggagucagaaugcguuuguaucaauggaacuuguacaguaguaaugacugaugggagugcuucaggaaaagcugauacuaaaauacuauucauugaggaggggaaaaucguucauacuagcacauugucaggaagugcucagcaugucgaggagugcucuugcuauccucgauauccuggugucagaugugucugcagagacaacuggaaaggcuccaauaggcccaucguagauauaaacauaaaggaucauagcauuguuuccaguuauguguguucaggacuuguuggagacacacccagaaaaaacgacagcuccagcaguagccauuguuuggauccuaacaaugaagaagguggucauggagugaaaggcugggccuuugaugauggaaaugacguguggaugggaagaacgaucaacgagacgucacguuuaggguaugaaaccuucaaagucauugaaggcugguccaacccuaaguccaaauugcagauaaauaggcaggucauaguugacagaggugauagguccgguuauucugguauuuuuucugucgaaggcaacagcugcaucaaucggugcuuuuauguggaguugauuaggggaagaaaagaggaaacugaagucuuguggaccucaaacaguauuguuguguuuuguggcaccucagguacauauggaacaggcucauggccugauggggcggaccucaaucucaugccuauauaa

SEQ ID NO: 57237 - RNA, 1410 nt, Artificial Sequence
  derived and/or modified CDS sequence (wt) from neuraminidase__InfluenzaA__AHZ35719
augaauccaaaucaaaagauaauaacgauuggcucuguuucucucaccauuuccacaauaugcuucuucaugcaaauugccaucuugauaacuacuguaacauugcauuucaagcaauaugaauucaacucccccccaaacaaccaagugaugcugugugaaccaacaauaauagaaagaaacauaacagagauaguguaucugaccaacaccaccauagagaaggaaauaugccccaaaccagcagaauacagaaauuggucaaagccgcaaugugacauuacaggauuugcaccuuucucuaaggacaauucgauuaggcuuuccgcugguggggacaucugggugacaagagaaccuuaugugucaugcgauccugacaaguguuaucaauuugcccuuggacagggaacaacacuaaacaacgugcauucaaauaacacaguacgugauaggaccccuuaucggacccuauugaugaaugaauuagguguuccuuuucaucuggggaccaagcaagugugcauagcaugguccagcucaaguugucacgauggaaaagcauggcugcauguuuguauaacgggggaugauaaaaaugcaacugcuagcuucauuuacaaugggaggcuuguagauaguguuguuucaugguccaaagaaauccucaggacccaggagucagaaugcguuuguaucaauggaacuuguacaguaguaaugacugaugggagugcuucaggaaaagcugauacuaaaauacuauucauugaggaggggaaaaucguucauacuagcacauugucaggaagugcucagcaugucgaggagugcucuugcuauccucgauauccuggugucagaugugucugcagagacaacuggaaaggcuccaauaggcccaucguagauauaaacauaaaggaucauagcauuguuuccaguuauguguguucaggacuuguuggagacacacccagaaaaaacgacagcuccagcaguagccauuguuuggauccuaacaaugaagaagguggucauggagugaaaggcugggccuuugaugauggaaaugacguguggaugggaagaacgaucaacgagacgucacguuuaggguaugaaaccuucaaagucauugaaggcugguccaacccuaaguccaaauugcagauaaauaggcaggucauaguugacagaggugauagguccgguuauucugguauuuuuucugucgaaggcaaaagcugcaucaaucggugcuuuuauguggaguugauuaggggaagaaaagaggaaacugaagucuuguggaccucaaacaguauuguuguguuuuguggcaccucagguacauauggaacaggcucauggccugauggggcggaccucaaucucacgccuauauaa

SEQ ID NO: 57238 - RNA, 1410 nt, Artificial Sequence; identical to SEQ ID NO: 57230
  derived and/or modified CDS sequence (wt) from neuraminidase__InfluenzaA__AHZ35731

SEQ ID NO: 57239 - RNA, 1410 nt, Artificial Sequence; identical to SEQ ID NO: 57227
  derived and/or modified CDS sequence (wt) from neuraminidase__InfluenzaA__AHZ35743

SEQ ID NO: 57240 - RNA, 1410 nt, Artificial Sequence; identical to SEQ ID NO: 57230
  derived and/or modified CDS sequence (wt) from neuraminidase__InfluenzaA__AHZ35755

SEQ ID NO: 57241 - RNA, 1410 nt, Artificial Sequence; identical to SEQ ID NO: 57227
  derived and/or modified CDS sequence (wt) from neuraminidase__InfluenzaA__AHZ35767

SEQ ID NO: 57242 - RNA, 1410 nt, Artificial Sequence
  derived and/or modified CDS sequence (wt) from neuraminidase__InfluenzaA__AHZ35779
augaauccaaaucaaaagauaauaacgauuggcucuguuucucucaccauuuccacaauaugcuucuucaugcaaauugccaucuugauaacuacuguaacauugcauuucaagcaauaugaauucaacucccccccaaacaaccaagugaugcugugugaaccaacaauaauagaaagaaacauaacagagauaguguaucugaccaacaccaccauagagaaggaaauaugccccaaaccagcagaauacagaaauuggucaaagccgcaaugugacauuacaggauuugcaccuuucucuaaggacaauucgauuaggcuuuccgcugguggggacaucugggugacaagagaaccuuaugugucaugcgauccugacaaguguuaucaauuugcccuuggacagggaacaacacuaaacaacgugcauucaaauaacacaguacgugauaggaccccuuaucggacccuauugaugaaugaauuagguguuccuuuucaucuggggaccaagcaagugugcauagcaugguccagcucaaguugucacgauggaaaagcauggcugcauguuuguauaacgggggaugauaaaaaugcaacugcuagcuucauuuacaaugggaggcuuguagauaguguuguuucaugguccaaagaaauccucaggacccaggagucagaaugcguuuguaucaauggaacuuguacaguaguaaugacugaugggagugcuucaggaaaagcugauacuaaaauacuauucauugaggaggggaaaaucguucauacuagcacauugucaggaagugcucagcaugucgaggagugcucuugcuauccucgauauccuggugucaggugugucugcagagacaacuggaaaggcuccaauaggcccaucguagauauaaacauaaaggaucauagcauuguuuccaguuauguguguucaggacuuguuggagacacacccagaaaaaacgacagcuccagcaguagccauuguuuggauccuaacaaugaagaagguggucauggagugaaaggcugggccuuugaugauggaaaugacguguggaugggaagaacgaucaacgagacgucacguuuaggguaugaaaccuucaaagucauugaaggcugguccaacccuaaguccaaauugcagauaaauaggcaggucauaguugacagaggugauagguccgguuauucugguauuuuuucugucgaaggcaaaagcugcaucaaucggugcuuuuauguggaguugauuaggggaagaaaagaggaaacugaagucuuguggaccucaaacaguauuguuguguuuuguggcaccucagguacauauggaacaggcucauggccugauggggcggaccucaaucucaugccuauauaa

SEQ ID NO: 57243 - RNA, 1410 nt, Artificial Sequence
  derived and/or modified CDS sequence (wt) from neuraminidase__InfluenzaA__AHZ35803
augaauccaaaccaaaagauaauaaccauugguucggucuguaugacaauuggaauggcuaacuuaauguuacaaauuggaaacauaaucucaauauggauuagccacucaauucaacuugggaauaaaaaucagauugaaacaugcaaucaaagcgucauuacuuaugaaaacaacacuuggguaaaucagacauauguuaacaucagcaacaccaacuuugcugcuggacagucaguggucuccgugaaaauagcgggcaauuccucucucugcccuguuaguggaugggcuauauacaguaaagacaacaguauaagaaucgguuccaagggggauguguuugucauaagggaaccauucauaucaugcucccccuuggaaugcagaaccuucuucuugacucaaggggccuugcuaaaugacaaacauuccaauggaaccauuaaagacaggagcccauaucgaacccuaaugagcuguccuauuggugaaguucccucuccauacaacucaagauuugagucagucgcuuggucagcaagugcuugucaugauggcaucaauuggcuaacaauuggaauuucuggcccagacaauggggcaguggcuguguuaaaguacaacgguauaauaacagacacuaucaagaguuggagaaacaauauauugagaacacaagagucugaaugugcauguguaaaugguucuugcuuuaccauaaugaccgauggaccaagugauggacaggccucauacaagaucuucagaauagaaaagggaaagauagucaaaucagucgaaaugaaugccccuaauuaccacuaugaggaaugcuccuguuauccugauucuagugaaaucacaugugugugcagggauaacuggcauggcucgaaucgaccgugggugucuuucaaccagaaucuggaauaucagauaggauacauaugcagugggauuuucggagacaauccacgcccucaugauaagacaggcaguugugguccaguaucgucuaauggagcaaauggaguaaaaggauuuucauucaaauacggcaaugguguuuggauagggagaacuaaaagcauuaguucaagaaaagguuuugagaugauuugggauccaaacggauggacugggacagacaauaacuucucaauaaagcaagauaucguaggaaugaaugaguggucaggauauagcgggaguuuuguucagcauccagaacuaacagggcuggacuguauaagaccuugcuucuggguugaacuaaucagagggcgacccaaagagaacacaaucuggacuagcgggagcagcauauccuuuugugguguaaacagugacacuguggguuggucuuggccagacggugcugaguugccauuuaccauugacaaguaa

SEQ ID NO: 57244 - RNA, 1410 nt, Artificial Sequence
  derived and/or modified CDS sequence (wt) from neuraminidase__InfluenzaA__AHZ35814
augaauccaaaucaaaagauaauaacgauuggcucuguuucucucaccauuuccacaauaugcuucuucaugcaaauugccauauugauaacuacuguaacauugcauuucaagcaauaugaauucaacucccccccaaacaaccaagugaugcugugugaaccaacaauaauagaaagaaacauaacagagauaguguaucugaccaacaccaccauagagaaggaaauaugccccaaacuagcagaauacagaaauuggucaaagccgcaaugugacauuacaggauuugcaccuuuuucuaaggacaauucgauuaggcuuuccgcugguggggaccucugggugacaagagaaccuuaugugucaugcgauccugacaaauguuaucaauuugcccuuggacagggaacaacacuaaacaacgugcauucaaauaacacaguacgugauaggaccccuuaucggacccuauugaugaaugaguuagguguuccuuuucaucuggggaccaagcaggugugcauagcaugguccagcucaaguugucacgauggaaaagcauggcugcauguuuguauaacgggggaugauaaaaaugcaacugcuagcuucauuuacaaugggaggcuuguagauaguguuguuucaugguccaaagaaauccucaggacccaggagucagaaugcguuuguaucaauggaacuuguacaguaguaaugacugaugggagugcuucaggaaaagcugauacuaaaauacuauucauugaggaggggaaaaucguucauacuagcacauugucaggaagugcucagcaugucgaggagugcucuugcuauccucgauauccuggugucagaugugucugcagagacaacuggaaaggcuccaauaggcccaucguagauauaaacauaaaggaucauagcauuguuuccaguuauguguguucaggacuuguuggagacacacccagaaaaaacgacagcuccagcaguagccauuguuuggauccuaacaaugaagaagguggucauggaguaaaaggcugggccuuugaugauggaaaugacguguggaugggaagaacgaucaacgagacgucacguuuaggguaugaaaccuucaaagucauugaaggcugguccaacccuaaguccaaauugcagauaaauaggcaagucauaguugacagagguaauagguccgguuauucugguauuuucucuguugaaggcaaaagcugcaucaaucggugcuuuuauguugaguugauuaggggaagaaaagaggaaacugaaguccuguggaccucaaacaguauuguuguguuuuguggcaccucagguacauauggaacaggcucauggccugauggggcggaccucaaucucaugccuauauaa

SEQ ID NO: 57245 - RNA, 1410 nt, Artificial Sequence
  derived and/or modified CDS sequence (wt) from neuraminidase__InfluenzaA__AHZ35837
augaauccaaaccaaaagauaauaaccauugguucggucuguaugacaauuggaauggcuaacuuaauguuacaaauuggaaacauaaucucaauauggauuagccacucaauucaacuugggaauaaaaaucagauugaaacaugcaaucaaagcgucauuacuuaugaaaacaacacuuggguaaaucagacauauguuaacaucagcaacaccaacuuugcugcuggacagucaguggucuccgugaaaauagcgggcaauuccucucucugcccuguuaguggaugggcuauauacaguaaagacaacaguauaagaaucgguuccaagggggauguguuugucauaagggaaccauucauaucaugcucccccuuggaaugcagaaccuucuucuugacucaaggggccuugcuaaaugacaaacauuccaauggaaccauuaaagacaggagcccauaucgaacccuaaugagcuguccuauuggugaaguucccucuccauacaacucaagauuugagucagucgcuuggucagcaagugcuugucaugauggcaucaauuggcuaacaauuggaauuucuggcccagacaauggggcaguggcuguguuaaaguacaacggcauaauaacagacacuaucaagaguuggagaaacaauauauugagaacacaagagucugaaugugcauguguaaaugguucuugcuuuaccauaaugaccgauggaccaagugauggacaggccucauacaagaucuucagaauagaaaagggaaagauagucaaaucagucgaaaugaaugccccuaauuaccacuaugaggaaugcuccuguuauccugauucuagugaaaucacaugugugugcagggauaacuggcauggcucgaaucgaccgugggugucuuucaaccagaaucuggaauaucagauaggauacauaugcagugggauuuucggagacaauccacgcccucaugauaagacaggcaguugugguccaguaucgucuaauggagcaaauggaguaaaaggauuuucauucaaauacggcaaugguguuuggauagggagaacuaaaagcauuaguucaagaaaagguuuugagaugauuugggauccaaacggauggacugggacagacaauaacuucucaauaaagcaagauaucguaggaauaaaugaguggucaggauauagcgggaguuuuguucagcauccagaacuaacagggcuggacuguauaagaccuugcuucuggguugaacuaaucagagggcgacccaaagagaacacaaucuggacuagcgggagcagcauauccuuuugugguguaaacagugacacuguggguuggucuuggccagacggugcugaguugccauuuaccauugacaaguaa

SEQ ID NO: 57246 - RNA, 1410 nt, Artificial Sequence; identical to SEQ ID NO: 57245
  derived and/or modified CDS sequence (wt) from neuraminidase__InfluenzaA__AHZ35848

SEQ ID NO: 57247 - RNA, 1410 nt, Artificial Sequence; identical to SEQ ID NO: 57245
  derived and/or modified CDS sequence (wt) from neuraminidase__InfluenzaA__AHZ35859

SEQ ID NO: 57248 - RNA, 1410 nt, Artificial Sequence; identical to SEQ ID NO: 57244
  derived and/or modified CDS sequence (wt) from neuraminidase__InfluenzaA__AHZ35870

SEQ ID NO: 57249 - RNA, 1410 nt, Artificial Sequence
  derived and/or modified CDS sequence (wt) from neuraminidase__InfluenzaA__AHZ35882
augaauccaaaucaaaagauaauaacgauuggcucuguuucucucaccauuuccacaauaugcuucuucaugcaaauugccauauugauaacuacuguaacauugcauuucaagcaauaugaauucaacucccccccaaacaaccaagugaugcugugugaaccaacaauaauagaaagaaacauaacagagauaguguaucugaccaacaccaccauagagaaggaaauaugccccaaacuagcagaauacagaaauuggucaaagccgcaaugugacauuacaggauuugcaccuuuuucuaaggacaauucgauuaggcuuuccgcugguggggaccucugggugacaagagaaccuuaugugucaugcgauccugacaaauguuaucaauuugcccuuggacagggaacaacacuaaacaacgugcauucaaauaacacaguacgugauaggaccccuuaucggacccuauugaugaaugaguuagguguuccuuuucaucuggggaccaagcaggugugcauagcaugguccagcucaaguugucacgauggaaaagcauggcugcauguuuguauaacgggggaugauaaaaaugcaacugcuagcuucauuuacaaugggaggcuuguagauaguguuguuucaugguccaaagaaauccucaggacccaggagucagaaugcguuuguaucaauggaacuuguacaguaguaaugacugaugggagugcuucaggaaaagcugauacuaaaauacuauucauugaggaggggaaaaucguucauacuagcacauugucaggaagugcucagcaugucgaggagugcucuugcuauccucgauauccuggugucagaugugucugcagagacaacuggaaaggcuccaauaggcccaucguagauauaaacauaaaggaucauagcauuguuuccaguuauguguguucaggacuuguuggagacacacccagaaaaaacgacagcuccagcaguagccauuguuuggauccuaacaaugaagaagguggucauggaguaaaaggcugggccuuugaugauggaaaugacguguggaugggaagaacgaucaacgagacgucacguuuaggguaugaaaccuucaaagucauugaaggcugguccaacccuaaguccaaauugcagauaaauaggcaagucauaguugacagagguaauagguccgguuauucugguauuuucucuguugaaggcaaaagcugcaucaaucggugcuuuuauguugaguugauuaggggaagaaaagaagaaacugaaguccuguggaccucaaacaguauuguuguguuuuguggcaccucagguacauauggaacaggcucauggccugauggggcggaccucaaucucaugccuauauaa

SEQ ID NO: 57250 - RNA, 1410 nt, Artificial Sequence
  derived and/or modified CDS sequence (wt) from neuraminidase__InfluenzaA__AHZ35894
augaauccaaaccaaaagauaauaaccauugguucggucuguaugacaauuggaauggcuaacuuaauguuacaaauuggaaacauaaucucaauauggauuagccacucaauucaacuugggaauaaaaaucagauugaaacaugcaaucaaagcgucauuacuuaugaaaacaacacuuggguaaaucagacauauguuaacaucagcaacaccaacuuugcugcuggacagucaguggucuccgugaaaauagcgggcaauuccucucucugcccuguuaguggaugggcuauauacaguaaagacaacaguauaagaaucgguuccaagggggauguguuugucauaagggaaccauucauaucaugcucccccuuggaaugcagaaccuucuucuugacucaaggggccuugcuaaaugacaaacauuccaauggaaccauuaaagacaggagcccauaucgaacccuaaugagcuguccuauuggugaaguucccucuccauacaacucaagauuugagucagucgcuuggucagcaagugcuugucaugauggcaucaauuggcuaacaauuggaauuucuggcccagacaauggggcaguggcuguguuaaaguacaacggcauaauaacagacacuaucaagaguuggagaaacaauauauugagaacacaagagucugaaugugcauguguaaaugguucuugcuuuaccauaaugaccgauggaccaagugauggacaggccucauacaagaucuucagaauagaaaagggaaagauagucaaaucagucgaaaugaaugccccuaauuaccacuaugaggaaugcuccuguuauccugauucuagugaaaucacaugugugugcagggauaacuggcauggcucgaaucgaccgugggugucuuucaaccagaaucuggaauaucagauaggauacauaugcagugggauuuucggagacaauccacgcccucaugauaagacaggcaguugugguccaguaucgucuaauggagcaaauggaguaaaaggauuuucauucaaauacggcagugguguuuggauagggagaacuaaaagcauuaguucaagaaaagguuuugagaugauuugggauccaaacggauggacugggacagacaauaacuucucaauaaagcaagauaucguaggaauaaaugaguggucaggauauagcgggaguuuuguucagcauccagaacuaacagggcuggacuguauaagaccuugcuucuggguugaacuaaucagagggcgacccaaagagaacacaaucuggacuagcgggagcagcauauccuuuugugguguaaacagugacacuguggguuggucuuggccagacggugcugaguugccauuuaccauugacaaguaa

SEQ ID NO: 57251 - RNA, 1410 nt, Artificial Sequence; identical to SEQ ID NO: 57245
  derived and/or modified CDS sequence (wt) from neuraminidase__InfluenzaA__AHZ35905

SEQ ID NO: 57252 - RNA, 1410 nt, Artificial Sequence; identical to SEQ ID NO: 57245
  derived and/or modified CDS sequence (wt) from neuraminidase__InfluenzaA__AHZ35916

SEQ ID NO: 57253 - RNA, 1410 nt, Artificial Sequence
  derived and/or modified CDS sequence (wt) from neuraminidase__InfluenzaA__AHZ35927
augaauccaaaccaaaagauaauaaccauugguucggucuguaugacaauuggaauggcuaacuuaauauuacaaauuggaaacauaaucucaauauggauuagccacucaauucaacuugggaaucaaaaucagauugaaacaugcaaucaaagcgucauuacuuaugaaaacaacacuuggguaaaucagacauauguuaacaucagcaacaccaacuuugcugcuggacagucagugguuuccgugaaauuagcgggcaauucuucucucugcccuguuaguggaugggcuauauacaguaaagacaacaguauaagaaucgguuccaagggggauguguuugucauaagggaaccauucauaucaugcuccccuuuggaaugcagaaccuucuucuugacucaaggggccuugcuaaaugacaaacauuccaauggaaccauuaaagacaggagcccauaucgaacccuaaugagcuguccuauuggugaaguucccucuccauacaacucaagauuugagucagucgcuuggucagcaagugcuugucaugauggcaucaauuggcuaacaauuggaauuucuggcccagacaauggggcaguggcuguguugaaguacaacggcauaauaacagacaccaucaagaguuggagaaacaauauauugagaacacaagaguccgaaugugcauguguaaauggcuccugcuuuacugugaugaccgauggaccaagugauggacaggccucauacaagaucuucagaauagaaaagggaaagauagucaaaucagucgaaaugaaugccccuaauuaucacuaugaggaaugcuccuguuauccugauucuagugaaaucacaugugugugcagggauaacuggcauggcgcgaaucgaccguggguaucuuucaaccagaaucuggaauaucagauaggauacauaugcagugggauuuucggagacaauccacgcccuaaugauaagacaggcaguugugguccaguaucgucuaauggagcaaauggaguaaaaggauuuucauucaaauacggcaaugguguuuggauagggagaacuaaaagcauuaguucaagaaacgguuuugagaugauuugggauccgaacggauggacugggacagacaauaacuucucaauaaagcaagauaucguaggaauaaaugaguggucaggauauagcgggaguuuuguucagcauccagaacuaacagggcuggauuguauaagaccuugcuucuggguugaacuaaucagagggcgacccaaagagaacacaaucuggacuagcgggagcagcauauccuuuugugguguaaacagugacacuguggguuggucuuggccagacggugcugaguugccauuuaccauugacaaguaa

SEQ ID NO: 57254 - RNA, 1410 nt, Artificial Sequence
  derived and/or modified CDS sequence (wt) from neuraminidase__InfluenzaA__AHZ35938
augaauccaaaccaaaagauaauaaccauugguucggucuguaugauaauuggaauggcuaacuuaauauuacaaauuggaaacauaaucucaauauggauuagccacucaauucaacuugggaaucaaaaucagauugaaacaugcaaucaaagcgucauuacuuaugaaaacaacacuuggguaaaucagacauauguuaacaucagcaacaccaacuuugcugcuggacagucaguggucuccgugaaauuagcgggcaauuccucucucugcccuguuaguggaugggcuauauacaguaaagacaacaguauaagaaucgguuccaagggggauguguuugucauaagggaaccauucauaucaugcucccccuuggaaugcagaaccuucuucuugacucaaggggccuugcuaaaugacaaacauuccaauggaaccauuaaagacaggagcccauaucgaacccuaaugagcuguccuauuggugaaguucccucuccauacaacucaagauuugagucagucgcuuggucagcaagugcuugucaugauggcaucaauuggcuaacaauuggaauuucuggcccagacaauggggcaguggcuguguuaaaauacaacggcauaauaacagacacuaucaagaguuggagaaacaauauauugagaacacaagagucugaaugugcauguguaaaugguucuuguuuuaccauaaugaccgauggaccaagugauggacaggccucauacaagaucuucagaauagaaaagggaaagauagucaaaucagucgaaaugaaugccccuaauuaucacuaugaggaaugcuccuguuauccugauucuagugaaaucacaugugugugcagggauaacuggcauggcucgaaucgaccgugggugucuuucaaccagaaucuggaauaucagauaggauacauaugcagugggauuuucggagacaauccacgcccucaugauaagacaggcaguugugguccaguaucgucuaauggagcaaauggaguaaaaggauuuucauucaaauacggcaaugguguuuggauagggagaacuaaaagcauuaguucaagaaaagguuuugagaugauuugggauccaaacggauggacugggacagacaauaacuucucaauaaagcaagauaucguaggaauaaaugaguggucaggauauagcgggaguuuuguucagcauccagaacuaacagggcuggacuguauaagaccuugcuucuggguugaacuaaucagagggcgacccaaagagaacacaaucuggacuagcgggagcagcauauccuuuugugguguaaacagugacacuguggguuggucuuggccagacggugcugaguugccauuuaccauugacaaguaa

SEQ ID NO: 57255 - RNA, 1410 nt, Artificial Sequence; identical to SEQ ID NO: 57249
  derived and/or modified CDS sequence (wt) from neuraminidase__InfluenzaA__AHZ35949

SEQ ID NO: 57256 - RNA, 1410 nt, Artificial Sequence
  derived and/or modified CDS sequence (wt) from neuraminidase__InfluenzaA__AHZ35961
augaauccaaaccaaaagauaauaaccauugguucggucuguaugacaauuggaauggcuaacuuaauguuacaaauuggaaacauaaucucaauauggauuagccacucaauucaacuugggaauaaaaaucagauugaaacaugcaaucaaagcgucauuacuuaugaaaacaacacuuggguaaaucagacauauguuaacaucagcaacaccaacuuugcugcuggacagucaguggucuccgugaaaauagcgggcaauuccucucucugcccuguuaguggaugggcuauauacaguaaagacaacaguauaagaaucgguuccaagggggauguguuugucauaagggaaccauucauaucaugcucccccuuggaaugcagaaccuucuucuugacucaaggggccuugcuaaaugacaaacauuccaauggaaccauuaaagacaggagcccauaucgaacccuaaugagcuguccuauuggugaaguucccucuccauacaacucaagauuugagucagucgcuuggucagcaagugcuugucaugauggcaucaauuggcuaacaauuggaauuucuggcccagacaauggggcaguggcuguguuaaaguacaacggcauaauaacagacacuaucaagaguuggagaaacaauauauugagaacacaagagucugaaugugcauguguaaaugguucuugcuuuaccauaaugaccgauggaccaagugauggacaggccucauacaagaucuucagaauagaaaagggaaagauagucaaaucagucgaaaugaaugccccuaauuaccacuaugaggaaugcuccuguuauccugauucuagugaaaucacaugugugugcagggauaacuggcauggcucgaaucgaccgugggugucuuucaaccagaaucuggaauaucagauaggauacauaugcagugggauuuucggagacaauccacgcccucaugauaagacaggcaguugugguccaguaucgucuaauggagcaaauggaguaaaaggauuuucauucaaauacggcaaugguguuuggauagggagaacuaaaagcauuaguucaagaaaagguuuugagaugauuugggauccaaacggauggacugggacagacaauaacuucucaauaaagcaagauaucguaggaauaaaugaguggucaggauauagcgggaguuuuguucagcauccagaacuaacagggcuggacuguauaagaccuugcuucuggguugaacuaaucagagggcgacccaaagagagcacaaucuggacuagcgggagcagcauauccuuuugugguguaaacagugacacuguggguuggucuuggccagacggugcugaguugccauuuaccauugacaaguaa

SEQ ID NO: 57257 - RNA, 1410 nt, Artificial Sequence
  derived and/or modified CDS sequence (wt) from neuraminidase__InfluenzaA__AHZ35972
augaauccaaaccaaaagauaauaaccauugguucggucuguaugacaauuggaauggcuaacuuaauguuacaaauuggaaacauaaucucaauauggauuagccacucaauucaacuugggaauaaaaaucagauugaaacaugcaaucaaagcgucauuacuuaugaaaacaacacuuggguaaaucagacauauguuaacaucagcaacaccaacuuugcugcuggacagucaguggucuccgugaaaauagcgggcaauuccucucucugcccuguuaguggaugggcuauauacaguaaagacaacaguauaagaaucgguuccaagggggauguguuugucauaagggaaccauucauaucaugcucccccuuggaaugcagaaccuucuucuugacucaaggggccuugcuaaaugacaaacauuccaauggaaccauuaaagacaggagcccauaucgaacccuaaugagcuguccuauuggugaaguucccucuccauacaacucaagauuugagucagucgcuuggucagcaagugcuugucaugauggcaucaauuggcuaacaauuggaauuucuggcccagacaauggggcaguggcuguguuaaaguacaacggcauaauaacagacacuaucaagaguuggagaaacaauauauugagaacacaagagucugaaugugcauguguaaaugguucuugcuuuaccauaaugaccgauggaccaagugauggacaggccucauacaagaucuucagaauagaaaagggaaagauagucaaaucagucgaaaugaaugccccuaauuaucacuaugaggaaugcuccuguuauccugauucuagugaaaucacaugugugugcagggauaacuggcauggcucgaaucgaccgugggugucuuucaaccagaaucuggaauaucagauaggauacauaugcagugggauuuucggagacaauccacgcccucaugauaagacaggcaguugugguccaguaucgucuaauggagcaaauggaguaaaaggauuuucauucaaauacggcaaugguguuuggauagggagaacuaaaagcauuaguucaagaaaagguuuugagaugauuugggauccaaacggauggacugggacagacaauaacuucucaauaaagcaagauaucguaggaauaaaugaguggucaggauauagcgggaguuuuguucagcauccagaacuaacagggcuggacuguauaagaccuugcuucuggguugaacuaaucagagggcgacccaaagagaacacaaucuggacuagcgggagcagcauauccuuuugugguguaaacagugacacuguggguuggucuuggccagacggugcugaguugccauuuaccauugacaaguaa

SEQ ID NO: 57258 - RNA, 1410 nt, Artificial Sequence
  derived and/or modified CDS sequence (wt) from neuraminidase__InfluenzaA__AHZ35983
augaauccaaaccaaaagauaacaaccauugguucggucuguaugacaauuggaauggcuaacuuaauguuacaaauuggaaacauaaucucaauauggauuagccacucaauucaacuugggaauaaaaaucagauugaaacaugcaaucaaagcgucauuacuuaugaaaacaacacuuggguaaaucagacauauguuaacaucagcaacaccaacuuugcugcuggacagucaguggucuccgugaaaauagcgggcaauuccucucucugcccuguuaguggaugggcuauauacaguaaagacaacaguauaagaaucgguuccaagggggauguguuugucauaagggaaccauucauaucaugcucccccuuggaaugcagaaccuucuucuugacucaaggggccuugcuaaaugacaaacauuccaauggaaccauuaaagacaggagcccauaucgaacccuaaugagcuguccuauuggugaaguucccucuccauacaacucaagauuugagucagucgcuuggucagcaagugcuugucaugauggcaucaauuggcuaacaauuggaauuucuggcccagacaauggggcaguggcuguguuaaaguacaacggcauaauaacagacacuaucaagaguuggagaaacaauauauugagaacacaagagucugaaugugcauguguaaaugguucuugcuuuaccauaaugaccgauggaccaagugauggacaggccucauacaagaucuucagaauagaaaagggaaagauagucaaaucagucgaaaugaaugccccuaauuaccacuaugaggaaugcuccuguuauccugauucuagugaaaucacaugugugugcagggauaacuggcauggcucgaaucgaccgugggugucuuucaaccagaaucuggaauaucagauaggauacauaugcagugggauuuucggagacaauccacgcccucaugauaagacaggcaguugugguccaguaucgucuaauggagcaaauggaguaaaaggauuuucauucaaauacggcaaugguguuuggauagggagaacuaaaagcauuaguucaagaaaagguuuugagaugauuugggauccaaacggauggacugggacagacaauaacuucucaauaaagcaagauaucguaggaauaaaugaguggucaggauauagcgggaguuuuguucagcauccagaacuaacagggcuggacuguauaagaccuugcuucuggguugaacuaaucagagggcgacccaaagagaacacaaucuggacuagcgggagcagcauauccuuuugugguguaaacagugacacuguggguuggucuuggccagacggugcugaguugccauuuaccauugacaaguaa

SEQ ID NO: 57259 - RNA, 1410 nt, Artificial Sequence
  derived and/or modified CDS sequence (wt) from neuraminidase__InfluenzaA__AHZ35994
augaauccaaaccaaaagauaauaaccauugguucggucuguaugacaauuggaauggcuaacuuaauguuacaaauuggaaacauaaucucaauauggauuagccacucaauucaacuugggaauaaaaaucagauugaaacaugcaaucaaagcgucauuacuuaugaaaacaacacuuggguaaaucagacauauguuaacaucagcaacaccaacuuugcugcuggacagucaguggucuccgugaaaauagcgggcaauuccucucucugcccuguuaguggaugggcuauauacaguaaagacaacaguauaagaaucgguuccaagggggauguguuugucauaagggaaccauucauaucaugcucccccuuggaaugcagaaccuucuucuugacucaaggggccuugcuaaaugacaaacauuccaauggaaccauuaaagacaggagcccauaucgaacccuaaugagcuguccuauuggugaaguucccucuccauacaacucaagauuugagucagucgcuuggucagcaagugcuugucaugauggcaucaauuggcuaacaauuggaauuucuggcccagacaauggggcaguggcuguguuaaaguacaacggcauaauaacagacacuaucaagaguuggagaaacaauauauugagaacacaagagucugaaugugcauguguaaaugguucuugcuuuaccauaaugaccgauggaccaagugauggacaggccucauacaagaucuucagaauagaaaagggaaagauagucaaaucagucgaaaugaaugccccuaauuaccacuaugaggaaugcuccuguuauccugauucuagugaaaucacaugugugugcagggauaacuggcauggcucgaaucgaccgugggugucuuucaaccagaaucuggaauaucagauaggauacauaugcagugggauuuucggagacaauccacgcccucaugacaagacaggcaguugugguccaguaucgucuaauggagcaaauggaguaaaaggauuuucauucaaauacggcaaugguguuuggauagggagaacuaaaagcauuaguucaagaaaagguuuugagaugauuugggauccaaacggauggacugggacagacaauaacuucucaauaaagcaagauaucguaggaauaaaugaguggucaggauauagcgggaguuuuguucagcauccagaacuaacagggcuggacuguauaagaccuugcuucuggguugaacuaaucagagggcgacccaaagagaacacaaucuggacuagcgggagcagcauauccuuuugugguguaaacagugacacuguggguuggucuuggccagacggugcugaguugccauuuaccauugacaaguaa

SEQ ID NO: 57260 - RNA, 1410 nt, Artificial Sequence; identical to SEQ ID NO: 57245
  derived and/or modified CDS sequence (wt) from neuraminidase__InfluenzaA__AHZ36005

SEQ ID NO: 57261 - RNA, 1410 nt, Artificial Sequence; identical to SEQ ID NO: 57257
  derived and/or modified CDS sequence (wt) from neuraminidase__InfluenzaA__AHZ36016

SEQ ID NO: 57262 - RNA, 1410 nt, Artificial Sequence
  derived and/or modified CDS sequence (wt) from neuraminidase__InfluenzaA__AHZ36027
augaauccaaaccaaaagauaauaaccauugguucggucuguaugacaauuggaauggcuaacuuaauauuacaaauuggaaacauaaucucaauauggauuagccacucaauucaacuugggaaucaaaaucagauugaaacaugcaaucaaagcgucauuauuuaugaaaacaacacuuggguaaaucagacauauguuaacaucagcaacaccaacuuugcugcuggacagucagugguuuccgugaaauuagcgggcaauuccucucucugcccuguuaguggaugggcuauauacaguaaagacaacaguauaagaaucgguuccaagggggauguguuugucauaagggaaccauucauaucaugcucccccuuggaaugcagaaccuucuucuugacucaaggggccuugcuaaaugacaaacauuccaauggaaccauuaaagacaggagcccauaucgaacccuaaugagcugucccauuggugaaguucccucuccauacaacucaagauuugaaucagucgcuuggucagcaagugcuugucaugauggcuucaauuggcuaacaauuggaauuucuggcccagacaauggggcaguggcuguguuaaaguacaacggcauaauaacagacacuaucaagaguuggagaaacaauauauugagaacacaagagucugaaugugcauguguaaaugguucuugcuuuaccauaaugaccgauggaccaagugauggacaggccucauacaagaucuucagaauagaaaagggaaagauagucaaaucagucgaaaugaaugccccuaauuaucacuaugaggaaugcuccuguuauccugauucuagugaaaucacaugugugugcagggauaacuggcauggcucgaaucgaccgugggugucuuucaaccagaaucuggaauaucagauaggauacauaugcagugggauuuucggagacaauccacgcccuaaugauaagacaggcaguugugguccaguaucgucuaauggagcaaauggaguaaaaggauuuucauucaaauacggcaaugguguuuggauagggagaacuaaaagcaucaguucaagaaaagguuuugagaugauuugggauccaaacggauggacugggacagacaauaacuucucaauaaagcaagauaucauaggaauaaaugaguggucaggauauagcgggaguuuuguucagcauccagaacuaacagggcuggacuguauaagaccuugcuucuggguugaacuaaucagagggcgacccaaagagaacacaaucuggacuagcgggagcagcauauccuuuugugguguaaacagugacacuguggguuggucuuggccagacggugcugaguugccauuuaccauugacaaguaa

SEQ ID NO: 57263 - RNA, 1410 nt, Artificial Sequence
  derived and/or modified CDS sequence (wt) from neuraminidase__InfluenzaA__AHZ36050
augaauccaaaucaaaagauaauaacgauuggcucuguuucucucaccauuuccacaauaugcuucuucaugcaaauugccaucuugauaacuacuguaacauugcauuucaagcaauaugaauucaacucccccccaaacaaccaagugaugcugugugaaccaacaauaauagaaagaaacauaacagagauaguguaucugaccaacaccaccauagagaaggaaauaugccccaaacuagcagaauacagaaauuggucaaagccgcaaugugacauuacaggauuugcaccuuuuucuaaggacaauucgauuaggcuuuccgcugguggggacaucugggugacaagagaaccuuaugugucaugcgauccugacaaguguuaucaauuugcccuuggacagggaacaacacuaaacaacgugcauucaaauaacacaguacgugauaggaccccuuaucggacccuauugaugaaugaguuagguguuccuuuucaucuggggaccaagcaggugugcauagcaugguccagcucaaguugucacgauggaaaagcauggcugcauguuuguauaacgggggaugauaaaaaugcaacugcuagcuucauuuacaaugggaggcuuguagauaguguuguuucaugguccaaagaaauccucaggacccaggagucagaaugcguuuguaucaauggaacuugcacaguaguaaugacugaugggagugcuucaggaaaagcugauaccaaaauacuauucauugaggaggggaaaaucguucauacuagcacauugucaggaagugcucagcaugucgaggagugcucuugcuauccucgauauccuggugucagaugugucugcagagacaacuggaaaggcuccaauaggcccaucguagauauaaacauaaaggaucauagcauuguuuccaguuauguguguucaggacuuguuggagacacacccagaagaaacgacagcuccagcaguagccauuguuuggauccuaacaaugaagaagguggucauggaguaaaaggcugggccuuugaugauggaaaugacguguggaugggaagaacgaucaacgagacgucacguuuaggguaugaaaccuucaaagucauugaaggcugguccaacccuaaguccaaauugcagauaaauaggcaagucauaguugacagagguaauagguccgguuauucugguauuuucucuguugaaggcaaaagcugcaucaaucggugcuuuuauguggaguugauuaggggaagaaaagaggaaacugaagucuuguggaccucaaacaguauuguuguguuuuguggcaccucagguacauauggaacaggcucauggccugauggggcggaccucaaucucaugccuauauaa

SEQ ID NO: 57264 - RNA, 1410 nt, Artificial Sequence
  derived and/or modified CDS sequence (wt) from neuraminidase__InfluenzaA__AHZ36062
augaauccaaaccaaaagauaauaaccauugguucggucuguaugacaauuggaauggcuaacuuaauguuacaaauuggaaacauaaucucaauauggauuagccacucaauucaacuugggaauaaaaaucagauugaaacaugcaaucaaagcgucauuacuuaugaaaacaacacuuggguaaaucagacauauguuaacaucagcaacaccaacuuugcugcuggacagucaguggucuccgugaaaauagcgggcaauuccucucucugcccuguuaguggaugggcuauauacaguaaagacaacaguauaagaaucgguuccaagggggauguguuugucauaagggaaccauucauaucaugcucccccuugggaugcagaaccuucuucuugacucaaggggccuugcuaaaugacaaacauuccaauggaaccauuaaagacaggagcccauaucgaacccuaaugagcuguccuauuggugaaguucccucuccauacaacucaagauuugagucagucgcuuggucagcaagugcuugucaugauggcaucaauuggcuaacaauuggaauuucuggcccagacaauggggcaguggcuguguuaaaguacaacggcauaauaacagacacuaucaagaguuggagaaacaauauauugagaacacaagagucugaaugugcauguguaaaugguucuugcuuuaccauaaugaccgauggaccaagugauggacaggccucauacaagaucuucagaauagaaaagggaaagauagucaaaucagucgaaaugaaugccccuaauuaccacuaugaggaaugcuccuguuauccugauucuagugaaaucacaugugugugcagggauaacuggcauggcucgaaucgaccgugggugucuuucaaccagaaucuggaauaucagauaggauacauaugcagugggauuuucggagacaauccacgcccucaugauaagacaggcaguugugguccaguaucgucuaauggagcaaauggaguaaaaggauuuucauucaaauacggcaaugguguuuggauagggagaacuaaaagcauuaguucaagaaaagguuuugagaugauuugggauccaaacggauggacugggacagacaauaacuucucaauaaagcaagauaucguaggaauaaaugaguggucaggauauagcgggaguuuuguucagcauccagaacuaacagggcuggacuguauaagaccuugcuucuggguugaacuaaucagagggcgacccaaagagaacacaaucuggacuagcgggagcagcauauccuuuugugguguaaacagugacacuguggguuggucuuggccagacggugcugaguugccauuuaccauugacaaguaa

SEQ ID NO: 57265 - RNA, 1410 nt, Artificial Sequence; identical to SEQ ID NO: 57257
  derived and/or modified CDS sequence (wt) from neuraminidase__InfluenzaA__AHZ36084

SEQ ID NO: 57266 - RNA, 1410 nt, Artificial Sequence
  derived and/or modified CDS sequence (wt) from neuraminidase__InfluenzaA__AHZ36095
augaauccaaaccaaaagauaauaaccauugguucggucuguaugacaauuggaauggcuaacuuaauauuacaaauuggaaacauaaucucaauauggauuagccacucaauucaacuugggaaucaaaaucagauugaaacaugcaaucaaagcgucauuauuuaugaaaacaacacuuggguaaaucagacauauguuaacaucagcaacaccaacuuugcugcuggacagucagugguuuccgugaaauuagcgggcaauuccucucucugcccuguuaguggaugggcuauauacaguaaagacaacaguauaagaaucgguuccaagggggauguguuugucauaagggaaccauucauaucaugcucccccuuggaaugcagaaccuucuucuugacucaaggggccuugcuaaaugacaaacauuccaauggaaccauuaaagacaggagcccauaucgaacccuaaugagcugucccauuggugaaguucccucuccauacaacucaagauuugaaucagucgcuuggucagcaagugcuugucaugauggcuucaauuggcuaacaauuggaauuucuggcccagacaauggggcaguggcuguguuaaaguacaacggcauaauaacagacacuaucaagaguuggagaaacaauauauugagaacacaagagucugaaugugcauguguaaaugguucuugcuuuaccauaaugaccgauggaccaagugauggacaggccucauacaagaucuucagaauagaaaagggaaagauagucaaaucagucgaaaugaaugccccuaauuaucacuaugaggaaugcuccuguuauccugauucuagugaaaucacaugugugugcagggauaacuggcauggcucgaaucgaccgugggugucuuucaaccagaaucuggaauaucagauaggauacauaugcagugggauuuucggagacaauccacgcccuaaugauaagacaggcgguugugguccaguaucgucuaauggagcaaauggaguaaaaggauuuucauucaaauacggcaaugguguuuggauagggagaacuaaaagcaucaguucaagaaaagguuuugagaugauuugggauccaaacggauggacugggacagacaauaacuucucaauaaagcaagauaucauaggaauaaaugaguggucaggauauagcgggaguuuuguucagcauccagaacuaacagggcuggacuguauaagaccuugcuucuggguugaacuaaucagagggcgacccaaagagaacacaaucuggacuagcgggagcagcauauccuuuugugguguaaacagugacacuguggguuggucuuggccagacggugcugaguugccauuuaccauugacaaguaa

SEQ ID NO: 57267 - RNA, 1410 nt, Artificial Sequence; identical to SEQ ID NO: 57245
  derived and/or modified CDS sequence (wt) from neuraminidase__InfluenzaA__AHZ36106

SEQ ID NO: 57268 - RNA, 1410 nt, Artificial Sequence
  derived and/or modified CDS sequence (wt) from neuraminidase__InfluenzaA__AHZ36117
augaauccaaaccaaaagauaauaaccauugguucggucuguaugacaauuggaauggcuaacuuaauauuacaaauuggaaacauaaucucaauauggauuagccacucaauucaacuugggaaucaaaaucagauugaaacaugcaaucaaagcgucauuauuuaugaaaacaacacuuggguaaaucagacauauguuaacaucagcaacaccaacuuugcugcuggacagucagugguuuccgugaaauuagcgggcaauuccucucucugcccuguuaguggaugggcuauauacaguaaagacaacaguauaagaaucgguuccaagggggauguguuugucauaagggaaccauucauaucaugcucccccuuggaaugcagaaccuucuucuugacucaaggggccuugcuaaaugacaaacauuccaauggaaccauuaaagacaggagcccauaucgaacccuaaugagcuguuccauuggugaaguucccucuccauacaacucaagauuugaaucagucgcuuggucagcaagugcuugucaugauggcuucaauuggcuaacaauuggaauuucuggcccagacaauggggcaguggcuguguuaaaguacaacggcauaauaacagacacuaucaagaguuggagaaacaauauauugagaacacaagagucugaaugugcauguguaaaugguucuugcuuuaccauaaugaccgauggaccaagugauggacaggccucauacaagaucuucagaauagaaaagggaaagauagucaaaucagucgaaaugaaugccccuaauuaucacuaugaggaaugcuccuguuauccugauucuagugaaaucacaugugugugcagggauaacuggcauggcucgaaucgaccgugggugucuuucaaccagaaucuggaauaucagauaggauacauaugcagugggauuuucggagacaauccacgcccuaaugauaagacaggcaguugugguccaguaucgucuaauggagcaaauggaguaaaaggauuuucauucaaauacggcaaugguguuuggauagggagaacuaaaagcaucaguucaagaaaagguuuugagaugauuugggauccaaacggauggacugggacagacaauaacuucucaauaaagcaagauaucauaggaauaaaugaguggucaggauauagcgggaguuuuguucagcauccagaacuaacagggcuggacuguauaagaccuugcuucuggguugaacuaaucagagggcgacccaaagagaacacaaucuggacuagcgggagcagcauauccuuuugugguguaaacagugacacuguggguuggucuuggccagacggugcugaguugccauuuaccauugacaaguaa

SEQ ID NO: 57269 - RNA, 1410 nt, Artificial Sequence
  derived and/or modified CDS sequence (wt) from neuraminidase__InfluenzaA__AHZ36128
augaauccaaaccaaaagauaauaaccauugguucggucuguaugacaauuggaauggcuaacuuaauguuacaaauuggaaacauaaucucaauauggauuagccacucaauucaacuugggaauaaaaaucagauugaaacaugcaaucaaagcgucauuacuuaugaaaacaacacuuggguaaaucagacauauguuaacaucagcaacaccaacuuugcugcuggacagucaguggucuccgugaaaauagcgggcaauuccucucucugcccuguuaguggaugggcuauauacaguaaagacaacaguauaagaaucgguuccaagggggauguguuugucauaagggaaccauucauaucaugcucccccuuggaaugcagaaccuucuucuugacucaaggggccuugcuaaaugacaaacauuccaauggaaccauuaaagacaggagcccauaucgaacccuaaugagcuguccuauuggugaaguucccucuccauacaacucaagauuugagucagucgcuuggucagcaagugcuugucaugauggcaucaauuggcuaacaauuggaauuucuggcccagacaauggggcaguggcuguguuaaaguacaacggcauaauaacagacacuaucaagaguuggagaaacaauauauugagaacacaagagucugaaugugcauguguaaaugguucuugcuuuaccauaaugaccgauggaccaagugauggacaggccucauacaagaucuucagaauagaaaagggaaagauagucaaaucagucgaaaugaaugccccuaauuaccacuaugaggaaugcuccuguuauccugauucuagugaaaucacaugugugugcagggauaacuggcauggcucgaaucgaccgugggugucuuucaaccagaaucuggaauaucagauaggauacauaugcagugggauuuucggagacaauccacgcccucaugauaagacgggcaguugugguccaguaucgucuaauggagcaaauggaguaaaaggauuuucauucaaauacggcaaugguguuuggauagggagaacuaaaagcauuaguucaagaaaagguuuugagaugauuugggauccaaacggauggacugggacagacaauaacuucucaauaaagcaagauaucguaggaauaaaugaguggucaggauauagcgggaguuuuguucagcauccagaacuaacagggcuggacuguauaagaccuugcuucuggguugaacuaaucagagggcgacccaaagagaacacaaucuggacuagcgggagcagcauauccuuuugugguguaaacagugacacuguggguuggucuuggccagacggugcugaguugccauuuaccauugacaaguaa

SEQ ID NO: 57270 - RNA, 1410 nt, Artificial Sequence
  derived and/or modified CDS sequence (wt) from neuraminidase__InfluenzaA__AHZ36139
augaauccaaaccaaaagauaauaaccauugguucggucuguaugacaauuggaauggcuaacuuaauguuacaaauuggaaacauaaucucaauauggauuagccacucaauucaacuuggaaauaaaaaucagauugaaacaugcaaucaaagcgucauuacuuaugaaaacaacacuuggguaaaucagacauauguuaacaucagcaacaccaacuuugcugcuggacagucaguggucuccgugaaaauagcgggcaauuccucucucugcccuguuaguggaugggcuauauacaguaaagacaacaguauaagaaucgguuccaagggggauguguuugucauaagggaaccauucauaucaugcucccccuuggaaugcagaaccuucuucuugacucaaggggccuugcuaaaugacaaacauuccaauggaaccauuaaagacaggagcccauaucgaacccuaaugagcuguccuauuggugaaguucccucuccauacaacucaagauuugagucagucgcuuggucagcaagugcuugucaugauggcaucaauuggcuaacaauuggaauuucuggcccagacaauggggcaguggcuguguuaaaguacaacggcauaauaacagacacuaucaagaguuggagaaacaauauauugagaacacaagagucugaaugugcauguguaaaugguucuugcuuuaccauaaugaccgauggaccaagugauggacaggccucauacaagaucuucagaauagaaaagggaaagauagucaaaucagucgaaaugaaugccccuaauuaucacuaugaggaaugcuccuguuauccugauucuagugaaaucacaugugugugcagggauaacuggcauggcucgaaucgaccgugggugucuuucaaccagaaucuggaauaucagauaggauacauaugcagugggauuuucggagacaauccacgcccucaugauaagacaggcaguugugguccaguaucgucuaauggagcaaauggaguaaaaggauuuucauucaaauacggcaaugguguuuggauagggagaacuaaaagcauuaguucaagaaaagguuuugagaugauuugggauccaaacggauggacugggacagacaauaacuucucaauaaagcaagauaucguaggaauaaaugaguggucaggauauagcgggaguuuuguucagcauccagaacuaacagggcuggacuguauaagaccuugcuucuggguugaacuaaucagagggcgacccaaagagaacacaaucuggacuagcgggagcagcauauccuuuugugguguaaacagugacacuguggguuggucuuggccagacggugcugaguugccauuuaccauugacaaguaa

SEQ ID NO: 57271 - RNA, 1410 nt, Artificial Sequence; identical to SEQ ID NO: 57263
  derived and/or modified CDS sequence (wt) from neuraminidase__InfluenzaA__AHZ36150

SEQ ID NO: 57272 - RNA, 1410 nt, Artificial Sequence; identical to SEQ ID NO: 57245
  derived and/or modified CDS sequence (wt) from neuraminidase__InfluenzaA__AHZ36161

SEQ ID NO: 57273 - RNA, 1410 nt, Artificial Sequence; identical to SEQ ID NO: 57269
  derived and/or modified CDS sequence (wt) from neuraminidase__InfluenzaA__AHZ36172

SEQ ID NO: 57274 - RNA, 1410 nt, Artificial Sequence
  derived and/or modified CDS sequence (wt) from neuraminidase__InfluenzaA__AHZ36183
augaauccaaaccaaaagauaauaaccauugguucggucuguaugacaauuggaauggcuaacuuaauguuacaaauuggaaacauaaucucaauauggauuagccacucaauucaacuugggaauaaaaaucagauugaaacaugcaaucaaagcgucauuacuuaugaaaacaacacuuggguaaaucagacauauguuaacaucagcaacaccaacuuugcugcuggacagucaguggucuccgugaaaauagcgggcaauuccucucucugcccuguuaguggaugggcuauauacaguaaagacaacaguauaagaaucgguuccaagggggauguguuugucauaagggaaccauucauaucaugcucccccuuggaaugcagaaccuucuucuugacucaaggggccuugcuaaaugacaaacauuccaauggaaccauuaaagacaggagcccauaucgaacccuaaugagcuguccuauuggugaaguucccucuccauacaacucaagauuugagucagucgcuuggucagcaagugcuugucaugauggcaucaauuggcuaacaauuggaauuucuggcccagacaauggggcaguggcuguguuaaaguacaacggcauaauaacagacacuaucaagaguuggagaaacaauauauugagaacacaagagucugaaugugcauguguaaaugguucuugcuuuaccauaaugaccgauggaccaagugauggacaggccucauacaagaucuucagaauagaaaagggaaagauagucaaaucagucgaaaugaaugccccuaauuaccacuaugaggaaugcuccuguuauccugauucuagugaaaucacaugugugugcagggauaacuggcauggcucgaaucgaccgugggugucuuucaaccagaaucuggaauaucagauaggauacauaugcagugggauuuuaggagacaauccacgcccucaugauaagacaggcaguugugguccaguaucgucuaauggagcaaauggaguaaaaggauuuucauucaaauacggcaaugguguuuggauagggagaacuaaaagcauuaguucaagaaaagguuuugagaugauuugggauccaaacggauggacugggacagacaauaacuucucaauaaagcaagauaucguaggaauaaaugaguggucaggauauagcgggaguuuuguucagcauccagaacuaacagggcuggacuguauaagaccuugcuucuggguugaacuaaucagagggcgacccaaagagaacacaaucuggacuagcgggagcagcauauccuuuugugguguaaacagugacacuguggguuggucuuggccagacggugcugaguugccauuuaccauugacaaguaa

SEQ ID NO: 57275 - RNA, 1410 nt, Artificial Sequence; identical to SEQ ID NO: 57244
  derived and/or modified CDS sequence (wt) from neuraminidase__InfluenzaA__AHZ36194

SEQ ID NO: 57276 - RNA, 1410 nt, Artificial Sequence; identical to SEQ ID NO: 57263
  derived and/or modified CDS sequence (wt) from neuraminidase__InfluenzaA__AHZ36206

SEQ ID NO: 57277 - RNA, 1410 nt, Artificial Sequence; identical to SEQ ID NO: 57245
  derived and/or modified CDS sequence (wt) from neuraminidase__InfluenzaA__AHZ36218

SEQ ID NO: 57278 - RNA, 1410 nt, Artificial Sequence
  derived and/or modified CDS sequence (wt) from neuraminidase__InfluenzaA__AHZ36229
augaauccaaaucaaaagauaauaacgauuggcucuguuucucucaccauuuccacaauaugcuucuucaugcaaauugccaucuugauaacuacuguaacauugcauuucaagcaauaugaauucaacucccccccaaacaaccaagugaugcugugugaaccaacaauaauagaaagaaacauaacagagauaguguaucugaccaacaccaccauagagaaggaaauaugccccaaacuagcagaauacagaaauuggucaaagccgcaaugugacauuacaggauuugcaccuuuuucuaaggacaauucgauuaggcuuuccgcugguggggacaucugggugacaagagaaccuuaugugucaugcgauccugacaaguguuaucaauuugcccuuggacagggaacaacacuaaacaacgugcauucaaauaacacaguacgugauaggaccccuuaucggacccuauugaugaaugaguuagguguuccuuuucaucuggggaccaagcaggugugcauagcaugguccagcucaaguugucacgauggaaaagcauggcugcauguuuguauaacgggggaugauaaaaaugcaacugcuagcuucauuuacaaugggaggcuuguagauaguguuguuucaugguccaaagaaauccucaggacccaggagucagaaugcguuuguaucaauggaacuugcacaguaguaaugacugaugggagugcuucaggaaaagcugauaccaaaauacuauucauugaggaagggaaaaucguucauacuagcacauugucaggaagugcucagcaugucgaggagugcucuugcuauccucgauauccuggugucagaugugucugcagagacaacuggaaaggcuccaauaggcccaucguagauauaaacauaaaggaucauagcauuguuuccaguuauguguguucaggacuuguuggagacacacccagaagaaacgacagcuccagcaguagccauuguuuggauccuaacaaugaagaagguggucauggaguaaaaggcugggccuuugaugauggaaaugacguguggaugggaagaacgaucaacgagacgucacguuuaggguaugaaaccuucaaagucauugaaggcugguccaacccuaaguccaaauugcagauaaauaggcaagucauaguugacagagguaauagguccgguuauucugguauuuucucuguugaaggcaaaagcugcaucaaucggugcuuuuauguggaguugauuaggggaagaaaagaggaaacugaagucuuguggaccucaaacaguauuguuguguuuuguggcaccucagguacauauggaacaggcucauggccugauggggcggaccucaaucucaugccuauauaa

SEQ ID NO: 57279 - RNA, 1410 nt, Artificial Sequence; identical to SEQ ID NO: 57245
  derived and/or modified CDS sequence (wt) from neuraminidase__InfluenzaA__AHZ36241

SEQ ID NO: 57280 - RNA, 1410 nt, Artificial Sequence; identical to SEQ ID NO: 57245
  derived and/or modified CDS sequence (wt) from neuraminidase__InfluenzaA__AHZ36252

SEQ ID NO: 57281 - RNA, 1410 nt, Artificial Sequence; identical to SEQ ID NO: 57245
  derived and/or modified CDS sequence (wt) from neuraminidase__InfluenzaA__AHZ36263

SEQ ID NO: 57282 - RNA, 1410 nt, Artificial Sequence; identical to SEQ ID NO: 57230
  derived and/or modified CDS sequence (wt) from neuraminidase__InfluenzaA__AHZ36274

SEQ ID NO: 57283 - RNA, 1410 nt, Artificial Sequence; identical to SEQ ID NO: 57245
  derived and/or modified CDS sequence (wt) from neuraminidase__InfluenzaA__AHZ36286

SEQ ID NO: 57284 - RNA, 1410 nt, Artificial Sequence
  derived and/or modified CDS sequence (wt) from neuraminidase__InfluenzaA__AHZ36297
augaauccaaaucaaaagauaauaacgauuggcucuguuucucucaccauuuccacaauaugcuucuucaugcaaauugccaucuugauaacuacuguaacauugcauuucaagcaauaugaauucaacucccccccaaacaaccaagugaugcugugugaaccaacaauaauagaaagaaacauaacagagauaguguaucugaccaacaccaccauagagaaggaaauaugccccagaccagcagaauacagaaauuggucaaagccgcaaugugacauuacaggauuugcaccuuucucuaaggacaauucgauuaggcuuuccgcugguggggacaucugggugacaagagaaccuuaugugucaugcgauccugacaaguguuaucaauuugcccuuggacagggaacaacacuaaacaacgugcauucaaauaacacaguacgugauaggaccccuuaucggacccuauugaugaaugaguuagguguuccuuuucaucuggggaccaagcaagugugcauagcaugguccagcucaaguugucacgauggaaaagcauggcugcauguuuguauaacgggggaugauaaaaaugcaacugcuagcuucauuuacaaugggaggcuuguagauaguguuguuucaugguccaaagaaauccucaggacccaggagucagaaugcguuuguaucaauggaacuuguacaguaguaaugacugaugggagugcuucaggaaaagcugauacuaaaauacuauucauugaggaggggaaaaucguucauacuagcacauugucaggaggugcucagcaugucgaggagugcucuugcuauccucgauauccuggugucagaugugucugcagagacaacuggaaaggcuccaauaggcccaucguagauauaaacauaaaggaucauagcauuguuuccaguuauguguguucaggacuuguuggagacacacccagaaaaaacgacagcuccagcaguagccauuguuuggauccuaacaaugaagaagguggucauggagugaaaggcugggccuuugaugauggaaaugacguguggaugggaagaacgaucaacgagacgucacguuuaggguaugaaaccuucaaagucauugaaggcugguccaacccuaaguccaaauugcagauaaauaggcaggucauaguugacagaggugauagguccgguuauucugguauuuuuucugucgaaggcaaaagcugcaucaaucggugcuuuuauguggaguugauuaggggaagaaaagaggaaacugaagucuuguggaccucaaacaguauuguuguguuuuguggcaccucagguacauauggaacaggcucauggccugauggggcggaccucaaucucaugccuauauaa

SEQ ID NO: 57285 - RNA, 1410 nt, Artificial Sequence
  derived and/or modified CDS sequence (wt) from neuraminidase__InfluenzaA__AHZ36309
augaauccaaaccaaaagauaauaaccauugguucggucuguaugacaauuggaauggcuaacuuaauguuacaaauuggaaacauaaucucaauauggauuagccacucaauucaacuuggggauaaaaaucagauugaaacaugcaaucaaagcgucauuacuuaugaaaacaacacuuggguaaaucagacauauguuaacaucagcaacaccaacuuugcugcuggacagucaguggucuccgugaaaauagcgggcaauuccucucucugcccuguuaguggaugggcuauauacaguaaagacaacaguauaagaaucgguuccaagggggauguguuugucauaagggaaccauucauaucaugcucccccuuggaaugcagaaccuucuucuugacucaaggggccuugcuaaaugacaaacauuccaauggaaccauuaaagacaggagcccauaucgaacccuaaugagcuguccuauuggugaaguucccucuccauacaacucaagauuugagucagucgcuuggucagcaagugcuugucaugauggcaucaauuggcuaacaauuggaauuucuggcccagacaauggggcaguggcuguguuaaaguacaacggcauaauaacagacacuaucaagaguuggagaaacaauauauugagaacacaagagucugaaugugcauguguaaaugguucuugcuuuaccauaaugaccgauggaccaagugauggacaggccucauacaagaucuucagaauagaaaagggaaagauagucaaaucagucgaaaugaaugccccuaauuaccacuaugaggaaugcuccuguuauccugauucuagugaaaucacaugugugugcagggauaacuggcauggcucgaaucgaccgugggugucuuucaaccagaaucuggaauaucagauaggauacauaugcagugggauuuucggagacaauccacgcccucaugauaagacaggcaguugugguccaguaucgucuaauggagcaaauggaguaaaaggauuuucauucaaauacggcaaugguguuuggauagggagaacuaaaagcauuaguucaagaaaagguuuugagaugauuugggauccaaacggauggacugggacagacaauaacuucucaauaaagcaagauaucguaggaauaaaugaguggucaggauauagcgggaguuuuguucagcauccagaacuaacagggcuggacuguauaagaccuugcuucuggguugaacuaaucagagggcgacccaaagagaacacaaucuggacuagcgggagcagcauauccuuuugugguguaaacagugacacuguggguuggucuuggccagacggugcugaguugccauuuaccauugacaaguaa

SEQ ID NO: 57286 - RNA, 1410 nt, Artificial Sequence; identical to SEQ ID NO: 57245
  derived and/or modified CDS sequence (wt) from neuraminidase__InfluenzaA__AHZ36320

SEQ ID NO: 57287 - RNA, 1410 nt, Artificial Sequence; identical to SEQ ID NO: 57245
  derived and/or modified CDS sequence (wt) from neuraminidase__InfluenzaA__AHZ36331

SEQ ID NO: 57288 - RNA, 1410 nt, Artificial Sequence
  derived and/or modified CDS sequence (wt) from neuraminidase__InfluenzaA__AHZ36353
augaauccaaaucaaaagauaauaacgauuggcucuguuucucucaccauuuccacaauaugcuucuucaugcaaauugccaucuugauaacuacuguaacauugcauuucaagcaauaugaauucaacucccccccaaacaaccaagugaugcugugugaaccaacaauaauagaaagaaacauaacagagauaguguaucugaccaacaccaccauagagaaggaaauaugccccaaaccagcagaauacagaaauuggucaaagccgcaaugugacauuacaggauuugcaccuuucucuaaggacaauucgauuaggcuuuccgcugguggggacaucugggugacaagagaaccuuaugugucaugcgauccugacaaguguuaucaauuugcccuuggacagggaacaacacuaaacaacgugcauucaaauaacacaguacgugauaggaccccuuaucggacccuauugaugaaugaguuagguguuccuuuucaucuggggaccaagcaagugugcauagcaugguccagcucaaguugucacgauggaaaagcauggcugcauguuuguauaacgggggaugauaaaaaugcaacugcuagcuucauuuacaaugggaggcuuguagauaguguuguuucaugguccaaagaaauccucaggacccaggagucagaaugcguuuguaucaauggaacuuguacaguaguaaugacugaugggagugcuucaggaaaagcugauacuaaaauacuauucauugaggaggggaaaaucguucauacuagcacauugucaggaagugcucagcaugucgaggagugcucuugcuauccucgauauccuggugucagaugugucugcagagacaacuggaaaggcuccaauaggcccaucguagauauaaacauaaaggaucauagcauuguuuccaguuauguguguucaggacuuguuggagacacacccagaaaaaacgacagcuccagcaguagccauuguuuggauccuaacaaugaagaagguggucauggagugaaaggcugggccuuugaugauggaaaugacguguggaugggaagaacgaucaacgagacgucacguuuaggauaugaaaccuucaaagucauugaaggcugguccaacccuaaguccaaauugcagauaaauaggcaggucauaguugacagaggugauagguccgguuauucugguauuuuuucugucgaaggcaaaagcugcaucaaucggugcuuuuauguggaguugauuaggggaaggaaagaggaaacugaagucuuguggaccucaaacaguauuguuguguuuuguggcaccucagguacauauggaacaggcucauggccugauggggcggaccucaaucucaugccuauauaa

SEQ ID NO: 57289 - RNA, 1410 nt, Artificial Sequence
  derived and/or modified CDS sequence (wt) from neuraminidase__InfluenzaA__AHZ36365
augaauccaaaccaaaagauaauaaccauugguucggucuguaugacaauuggaauggcuaacuuaauguuacaaauuggaaacauaaucucaauauggauuagccacccaauucaacuugggaauaaaaaucagauugaaacaugcaaucaaagcgucauuacuuaugaaaacaacacuuggguaaaucagacauauguuaacaucagcaacaccaacuuugcugcuggacagucaguggucuccgugaaaauagcgggcaauuccucucucugcccuguuaguggaugggcuauauacaguaaagacaacaguauaagaaucgguuccaagggggauguguuugucauaagggaaccauucauaucaugcucccccuuggaaugcagaaccuucuucuugacucaaggggccuugcuaaaugacaaacauuccaauggaaccauuaaagacaggagcccauaucgaacccuaaugagcuguccuauuggugaaguucccucuccauacaacucaagauuugagucagucgcuuggucagcaagugcuugucaugauggcaucaauuggcuaacaauuggaauuucuggcccagacaauggggcaguggcuguguuaaaguacaacggcauaauaacagacacuaucaagaguuggagaaacaauauauugagaacacaagagucugaaugugcauguguaaaugguucuugcuuuaccauaaugaccgauggaccaagugauggacaggccucauacaagaucuucagaauagaaaagggaaagauagucaaaucagucgaaaugaaugccccuaauuaccacuaugaggaaugcuccuguuauccugauucuagugaaaucacaugugugugcagggauaacuggcauggcucgaaucgaccgugggugucuuucaaccagaaucuggaauaucagauaggauacauaugcagugggauuuucggagacaauccacgcccucaugauaagacaggcaguugugguccaguaucgucuaauggagcaaauggaguaaaaggauuuucauucaaauacggcaaugguguuuggauagggagaacuaaaagcauuaguucaagaaaagguuuugagaugauuugggauccaaacggauggacugggacagacaauaacuucucaauaaagcaagauaucguaggaauaaaugaguggucaggauauagcgggaguuuuguucagcauccagaacuaacagggcuggacuguauaagaccuugcuucuggguugaacuaaucagagggcgacccaaagagaacacaaucuggacuagcgggagcagcauauccuuuugugguguaaacagugacacuguggguuggucuuggccagacggugcugaguugccauuuaccauugacaaguaa

SEQ ID NO: 57290 - RNA, 1410 nt, Artificial Sequence; identical to SEQ ID NO: 57288
  derived and/or modified CDS sequence (wt) from neuraminidase__InfluenzaA__AHZ36376

SEQ ID NO: 57291 - RNA, 1410 nt, Artificial Sequence; identical to SEQ ID NO: 57288
  derived and/or modified CDS sequence (wt) from neuraminidase__InfluenzaA__AHZ36388

SEQ ID NO: 57292 - RNA, 1410 nt, Artificial Sequence
  derived and/or modified CDS sequence (wt) from neuraminidase__InfluenzaA__AHZ36400
augaauccaaaucaaaagauaauaacgauuggcucuguuucucucaccauuuccacaauaugcuucuucaugcaaauugccaucuugauaacuacuguaacauugcauuucaagcaauaugaauucaacucccccccaaacaaccaagugaugcugugugaaccaacaauaauagaaagaaacauaacagagauaguguaucugaccaacaccaccauagagaaggaaauaugccccaaaccagcagaauacagaaauuggucaaagccgcaaugugacaucacaggauuugcaccuuucucuaaggacaauucgauuaggcuuuccgcugguggggacaucugggugacaagagaaccuuaugugucaugcgauccugacaaguguuaucaauuugcccuuggacagggaacaacacuaaacaacgugcauucaaauaacacaguacgugauaggaccccuuaucggacccuauugaugaaugaguuagguguuccuuuucaucuggggaccaagcaagugugcauagcaugguccagcucaaguugucacgauggaaaagcauggcugcauguuuguauaacgggggaugauaaaaaugcaacugcuagcuucauuuacaaugggaggcuuguagauaguguuguuucaugguccaaagaaauccucaggacccaggagucagaaugcguuuguaucaauggaacuuguacaguaguaaugacugaugggagugcuucaggaaaagcugauacuaaaauacuauucauugaggaggggaaaaucguucauacuagcacauugucaggaagugcucagcaugucgaggagugcucuugcuauccucgauauccuggugucagaugugucugcagagacaacuggaaaggcuccaauaggcccaucguagauauaaacauaaaggaucauagcauuguuuccaguuauguguguucaggacuuguuggagacacacccagaaaaaacgacagcuccagcaguagccauuguuuggauccuaacaaugaagaagguggucauggagugaaaggcugggccuuugaugauggaaaugacguguggaugggaagaacgaucaacgagacgucacguuuaggauaugaaaccuucaaagucauugaaggcugguccaacccuaaguccaaauugcagauaaauaggcaggucauaguugacagaggugauagguccgguuauucugguauuuuuucugucgaaggcaaaagcugcaucaaucggugcuuuuauguggaguugauuaggggaaggaaagaggaaacugaagucuuguggaccucaaacaguauuguuguguuuuguggcaccucagguacauauggaacaggcucauggccugauggggcggaccucaaucucaugccuauauaa

SEQ ID NO: 57293 - RNA, 1410 nt, Artificial Sequence; identical to SEQ ID NO: 57230
  derived and/or modified CDS sequence (wt) from neuraminidase__InfluenzaA__AHZ36412

SEQ ID NO: 57294 - RNA, 1410 nt, Artificial Sequence
  derived and/or modified CDS sequence (wt) from neuraminidase__InfluenzaA__AHZ36424
augaauccaaaucaaaagauaauaacgauuggcucuguuucucucaccauuuccacaauaugcuucuucaugcaaauugccaucuugauaacuacuguaacauugcauuucaagcaauaugaauucaacucccccccaaacaaccaagugaugcugugugaaccaacaauaauagaaagaaacauaacagagauaguguaucugaccaacaccaccauagagaaggaaauaugccccaaaccagcagaauacagaaauuggucaaagccgcaaugugacauuacaggauuugcaccuuucucuaaggacaauucgauuaggcuuuccgcugguggggacaucugggugacaagagaaccuuaugugucaugcgauccugacaaguguuaucaauuugcccuuggacagggaacaacacuaaacaacgugcauucaaauaacacaguacgugauaggaccccuuaucggacccuauugaugaaugaguuagguguuccuuuucaucuggggaccaagcaagugugcauagcaugguccagcucaaguugucacgauggaaaagcauggcugcauguuuguauaacgggggaugauaaaaaugcaacugcuagcuucauuuacaaugggaggcuuguagauaguguuguuucaugguccaaagaaauccucaggacccaggagucagaaugcguuuguaucaauggaacuuguacaguaguaaugacugaugggagugcuucaggaaaagcugauacuaaaauacuauucauugaggaggggaaaaucguucauacuagcacauugucaggaagugcucagcaugucgaggagugcucuugcuauccucgauauccuggugucagaugugucugcagagacaacuggaaaggcuccaauaggcccaucguagacauaaacauaaaggaucauagcauuguuuccaguuauguguguucaggacuuguuggagacacacccagaaaaaacgacagcuccagcaguagccauuguuuggauccuaacaaugaagaagguggucauggagugaaaggcugggccuuugaugauggaaaugacguguggaugggaagaacgaucaacgagacgucacguuuaggguaugaaaccuucaaagucauugaaggcugguccaacccuaaguccaaauugcagauaaauaggcaggucauaguugacagaggugauagguccgguuauucugguauuuuuucugucgaaggcaaaagcugcaucaaucggugcuuuuauguggaguugauuaggggaagaaaagaggaaacugaagucuuguggaccucaaacaguauuguuguguuuuguggcaccucagguacauauggaacaggcucauggccugauggggcggaccucaaucucaugccuauauaa

SEQ ID NO: 57295 - RNA, 1410 nt, Artificial Sequence; identical to SEQ ID NO: 57230
  derived and/or modified CDS sequence (wt) from neuraminidase__InfluenzaA__AHZ36436

SEQ ID NO: 57296 - RNA, 1410 nt, Artificial Sequence
  derived and/or modified CDS sequence (wt) from neuraminidase__InfluenzaA__AHZ36448
augaauccaaaucaaaagauaauaacgauuggcucuguuucucucaccauuuccacaauaugcuucuucaugcaaauugccaucuugauaacuacuguaacauugcauuucaagcaauaugaauucaacucccccccaaacaaccaagugaugcugugugaaccaacaauaauagaaaaaaacauaacagagauaguguaucugaccaacaccaccauagagaaggaaauaugccccaaaccagcagaauacagaaauuggucaaagccgcaaugugacauuacaggauuugcaccuuucucuaaggacaauucgauuaggcuuuccgcugguggggacaucugggugacaagagaaccuuaugugucaugcgauccugacaaguguuaucaauuugcccuuggacagggaacaacacuaaacaacgugcauucaaauaacacaguacgugauaggaccccuuaucggacccuauugaugaaugaauuagguguuccuuuucaucuggggaccaagcaagugugcauagcaugguccagcucaaguugucacgauggaaaagcauggcugcauguuuguauaacgggggaugauaaaaaugcaacugcuagcuucauuuacaaugggaggcuuguagauaguguuguuucaugguccaaagaaauccucaggacccaggagucagaaugcguuuguaucaauggaacuuguacaguaguaaugacugaugggagugcuucaggaaaagcugauacuaaaauacuauucauugaggaggggaaaaucguucauacuagcacauugucaggaagugcucagcaugucgaggagugcucuugcuauccucgauauccuggugucagaugugucugcagagacaacuggaaaggcuccaauaggcccaucguagauauaaacauaaaggaucauagcauuguuuccaguuauguguguucaggacuuguuggagacacacccagaaaaaacgacagcuccagcaguagccauuguuuggauccuaacaaugaagaagguggucauggagugaaaggcugggccuuugaugauggaaaugacguguggaugggaagaacgaucaacgagacgucacguuuaggguaugaaaccuucaaagucauugaaggcugguccaacccuaaguccaaauugcagauaaauaggcaggucauaguugacagaggugauagguccgguuauucugguauuuuuucugucgaaggcaaaagcugcaucaaucggugcuuuuauguggaguugauuaggggaagaaaagaggaaacugaagucuuguggaccucaaacaguauuguuguguuuuguggcaccucagguacauauggaacaggcucauggccugauggggcggaccucaaucucaugccuauauaa

SEQ ID NO: 57297 - RNA, 1410 nt, Artificial Sequence; identical to SEQ ID NO: 57227
  derived and/or modified CDS sequence (wt) from neuraminidase__InfluenzaA__AHZ36460

SEQ ID NO: 57298 - RNA, 1410 nt, Artificial Sequence; identical to SEQ ID NO: 57230
  derived and/or modified CDS sequence (wt) from neuraminidase__InfluenzaA__AHZ36472

SEQ ID NO: 57299 - RNA, 1410 nt, Artificial Sequence
  derived and/or modified CDS sequence (wt) from neuraminidase__InfluenzaA__AHZ36484
augaauccaaaucaaaagauaauaacgauuggcucuguuucucucaccauuuccacaauaugcuucuucaugcaaauugccaucuugauaacuacuguaacauugcauuucaagcaauaugaauucaacucccccccaaacaaccaagugaugcugugugaaccaacaauaauagaaagaaacauaacagagauaguguaucuaaccaacaccaccauagagaaggaaauaugccccaaaccagcagaauacagaaauuggucaaagccgcaaugugacauuacaggauuugcaccuuucucuaaggacaauucgauuaggcuuuccgcugguggggacaucugggugacaagagaaccuuaugugucaugcgauccugacaaguguuaucaauuugcccuuggacagggaacaacacuaaacaacgugcauucaaauaacacaguacgugauaggaccccuuaucggacccuauugaugaaugaguuagguguuccuuuucaucuggggaccaagcaagugugcauagcaugguccagcucaaguugucacgauggaaaagcauggcugcauguuuguauaacgggggaugauaaaaaugcaacugcuagcuucauuuacaaugggaggcuuguagauaguguuguuucaugguccaaagaaauccucaggacccaggagucagaaugcguuuguaucaauggaacuuguacaguaguaaugacugaugggagugcuucaggaaaagcugauacuaaaauacuauucauugaggaggggaaaaucguucauacuagcacauugucaggaagugcucagcaugucgaggagugcucuugcuauccucgauauccuggugucagaugugucugcagagacaacuggaaaggcuccaauaggcccaucguagauauaaacauaaaggaucauagcauuguuuccaguuauguguguucaggacuuguuggagacacacccagaaaaaacgacagcuccagcaguagccauuguuuggauccuaacaaugaagaagguggucauggagugaaaggcugggccuuugaugauggaaaugacguguggaugggaagaacgaucaacgagacgucacguuuaggguaugaaaccuucaaagucauugaaggcugguccaacccuaaguccaaauugcagauaaauaggcaggucauaguugacagaggugauagguccgguuauucugguauuuuuucugucgaaggcaaaagcugcaucaaucggugcuuuuauguggaguugauuaggggaagaaaagaggaaacugaagucuuguggaccucaaacaguauuguuguguuuuguggcaccucagguacauauggaacaggcucauggccugauggggcggaccucaaucucaugccuauauaa

SEQ ID NO: 57300 - RNA, 1410 nt, Artificial Sequence; identical to SEQ ID NO: 57230
  derived and/or modified CDS sequence (wt) from neuraminidase__InfluenzaA__AHZ36496

SEQ ID NO: 57301 - RNA, 1410 nt, Artificial Sequence; identical to SEQ ID NO: 57230
  derived and/or modified CDS sequence (wt) from neuraminidase__InfluenzaA__AHZ36508

SEQ ID NO: 57302 - RNA, 1410 nt, Artificial Sequence; identical to SEQ ID NO: 57230
  derived and/or modified CDS sequence (wt) from neuraminidase__InfluenzaA__AHZ36520

SEQ ID NO: 57303 - RNA, 1410 nt, Artificial Sequence
  derived and/or modified CDS sequence (wt) from neuraminidase__InfluenzaA__AHZ36532
augaauccaaaucaaaagauaauaacgauuggcucuguuucucucaccauuuccacaauaugcuucuucaugcaaauugccaucuugauaacuacuguaacauugcauuucaagcaauaugaauucaacucccccccaaacaaccaagugaugcugugugaaccaacaauaauagaaagaaacauaacagagauaguguaucugaccaacaccaccauagagaaggaaauaugccccaaaccagcagaauacagaacuuggucaaagccgcaaugugacauuacaggauuugcaccuuucucuaaggacaauucgauuaggcuuuccgcugguggggacaucugggugacaagagaaccuuaugugucaugcgauccugacaaguguuaucaauuugcccuuggacagggaacaacacuaaacaacgugcauucaaauaacacaguacgugauaggaccccuuaucggacccuauugaugaaugaauuagguguuccuuuucaucuggggaccaagcaagugugcauagcaugguccagcucaaguugucacgauggaaaagcauggcugcauguuuguauaacgggggaugauaaaaaugcaacugcuagcuucauuuacaaugggaggcuuguagauaguguuguuucaugguccaaagaaauccucaggacccaggagucagaaugcguuuguaucaauggaacuuguacaguaguaaugacugaugggagugcuucaggaaaagcugauacuaaaauacuauucauugaggaggggaaaaucguucauacuagcacauugucaggaagugcucagcaugucgaggagugcucuugcuauccucgauauccuggugucagaugugucugcagagacaacuggaaaggcuccaauaggcccaucguagauauaaacauaaaggaucauagcauuguuuccaguuauguguguucaggacuuguuggagacacacccagaaaaaacgacagcuccagcaguagccauuguuuggauccuaacaaugaagaagguggucauggagugaaaggcugggccuuugaugauggaaaugacguguggaugggaagaacgaucaacgagacgucacguuuaggguaugaaaccuucaaagucauugaaggcugguccaacccuaaguccaaauugcagauaaauaggcaggucauaguugacagaggugauagguccgguuauucugguauuuuuucugucgaaggcaaaagcugcaucaaucggugcuuuuauguggaguugauuaggggaagaaaagaggaaacugaagucuuguggaccucaaacaguauuguuguguuuuguggcaccucagguacauauggaacaggcucauggccugauggggcggaccucaaucucaugccuauauaa

SEQ ID NO: 57304 - RNA, 1410 nt, Artificial Sequence
  derived and/or modified CDS sequence (wt) from neuraminidase__InfluenzaA__AHZ36544
augaauccaaaucaaaagauaauaacgauuggcucuguuucucucaccauuuccacaauaugcuucuucaugcaaauugccaucuugauaacuacuguaacauugcauuucaagcaauaugaauucaacucccccccaaacaaccaagugaugcugugugaaccaacaauaauagaaagaaacauaacagagauaguguaucugaccaacaccaccauagagaaggaaauaugccccaaaccagcagaauacagaaauuggucaaaaccgcaaugugacauuacaggauuugcaccuuucucuaaggacaauucgauuaggcuuuccgcugguggggacaucugggugacaagagaaccuuaugugucaugcgauccugacaaguguuaucaauuugcccuuggacagggaacaacacuaaacaacgugcauucaaauaacacaguacgugauaggaccccuuaucggacccuauugaugaaugaauuagguguuccuuuucaucuggggaccaagcaagugugcauagcaugguccagcucaaguugucacgauggaaaagcauggcugcauguuuguauaacgggggaugauaaaaaugcaacugcuagcuucauuuacaaugggaggcuuguagauaguguuguuucaugguccaaagaaauccucaggacccaggagucagaaugcguuuguaucaauggaacuuguacaguaguaaugacugaugggagugcuucaggaaaagcugauacuaaaauacuauucauugaggaggggaaaaucguucauacuagcacauugucaggaagugcucagcaugucgaggagugcucuugcuauccucgauauccuggugucagaugugucugcagagacaacuggaaaggcuccaauaggcccaucguagauauaaacauaaaggaucauagcauuguuuccaguuauguguguucaggacuuguuggagacacacccagaaaaaacgacagcuccagcaguagccauuguuuggauccuaacaaugaagaagguggucauggagugaaaggcugggccuuugaugauggaaaugacguguggaugggaagaacgaucaacgagacgucacguuuaggguaugaaaccuucaaagucauugaaggcugguccaacccuaaguccaaauugcagauaaauaggcaggucauaguugacagaggugauagguccgguuauucugguauuuuuucugucgaaggcaaaagcugcaucaaucggugcuuuuauguggaguugauuaggggaagaaaagaggaaacugaagucuuguggaccucaaacaguauuguuguguuuuguggcaccucagguacauauggaacaggcucauggccugauggggcggaccucaaucucaugccuauauaa

SEQ ID NO: 57305 - RNA, 1410 nt, Artificial Sequence; identical to SEQ ID NO: 57294
  derived and/or modified CDS sequence (wt) from neuraminidase__InfluenzaA__AHZ36556

SEQ ID NO: 57306 - RNA, 1410 nt, Artificial Sequence
  derived and/or modified CDS sequence (wt) from neuraminidase__InfluenzaA__AHZ36568
augaauccaaaucaaaagauaauaacgauuggcucuguuucucucaccauuuccacaauaugcuucuucaugcaaauugccaucuugauaacuacuguaacauugcauuucaagcaauaugaauucaacucccccccaaacaaccaagugaugcugugugaaccaacaauaauagaaagaaacauaacagagauaguguaucugaccaacaccaccauagagaaggaaauaugccccaaaccagcagaauacagaaauuggucaaagccgcaaugugacauuacaggauuugcaccuuucucuaaggacaacucgauuaggcuuuccgcugguggggacaucugggugacaagagaaccuuaugugucaugcgauccugacaaguguuaucaauuugcccuuggacagggaacaacacuaaacaacgugcauucaaauaacacaguacgugauaggaccccuuaucggacccuauugaugaaugaauuagguguuccuuuucaucuggggaccaagcaagugugcauagcaugguccagcucaaguugucacgauggaaaagcauggcugcauguuuguauaacgggggaugauaaaaaugcaacugcuagcuucauuuacaaugggaggcuuguagauaguguuguuucaugguccaaagaaauccucaggacccaggagucagaaugcguuuguaucaauggaacuuguacaguaguaaugacugaugggagugcuucaggaaaagcugauacuaaaauacuauucauugaggagggaaaaaucguucauacuagcacauugucaggaagugcucagcaugucgaggagugcucuugcuauccucgauauccuggugucagaugugucugcagagacaacuggaaaggcuccaauaggcccaucguagauauaaacauaaaggaucauagcauuguuuccaguuauguguguucaggacuuguuggagacacacccagaaaaaacgacagcuccagcaguagccauuguuuggauccuaacaaugaagaagguggucauggagugaaaggcugggccuuugaugauggaaaugacguguggaugggaagaacgaucaacgagacgucacguuuaggguaugaaaccuucaaagucauugaaggcugguccaacccuaaguccaaauugcagauaaauaggcaggucauaguugacagaggugauagguccgguuauucugguauuuuuucugucgaaggcaaaagcugcaucaaucggugcuuuuauguggaguugauuaggggaagaaaagaggaaacugaagucuuguggaccucaaacaguauuguuguguuuuguggcaccucagguacauauggaacaggcucauggccugauggggcggaccucaaucucaugccuauauaa

SEQ ID NO: 57307 - RNA, 1410 nt, Artificial Sequence
  derived and/or modified CDS sequence (wt) from neuraminidase__InfluenzaA__AHZ36580
augaauccaaaucaaaagauaauaacgauuggcucuguuucucucacuauuuccacaauaugcuucuucaugcaaauugccaucuugauaacuacuguaacauugcauuucaagcaauaugaauucaacucccccccaaacaaccaagugaugcugugugaaccaacaauaauagaaagaaacauaacagagauaguguaucugaccaacaccaccauagagaaggaaauaugccccaaaccagcagaauacagaaauuggucaaagccgcaaugugacauuacaggauuugcaccuuucucuaaggacaauucgauuaggcuuuccgcugguggggacaucugggugacaagagaaccuuaugugucaugcgauccugacaaguguuaucaauuugcccuuggacagggaacaacacuaaacaacgugcauucaaauaacacaguacgugauaggaccccuuaucggacccuauugaugaaugaauuagguguuccuuuucaucuggggaccaagcaagugugcauagcaugguccagcucaaguugucacgauggaaaagcauggcugcauguuuguauaacgggggaugauaaaaaugcaacugcuagcuucauuuacaaugggaggcuuguagauaguguuguuucaugguccaaagaaauccucaggacccaggagucagaaugcguuuguaucaauggaacuuguacaguaguaaugacugaugggagugcuucaggaaaagcugauacuaaaauacuauucauugaggaggggaaaaucguucauacuagcacauugucaggaagugcucagcaugucgaggagugcucuugcuauccucgauauccuggugucagaugugucugcagagacaacuggaaaggcuccaauaggcccaucguagauauaaacauaaaggaucauagcauuguuuccaguuauguguguucaggacuuguuggagacacacccagaaaaaacgacagcuccagcaguagccauuguuuggauccuaacaaugaagaagguggucauggagugaaaggcugggccuuugaugauggaaaugacguguggaugggaagaacgaucaacgagacgucacguuuaggguaugaaaccuucaaagucauugaaggcugguccaacccuaaguccaaauugcagauaaauaggcaggucauaguugacagaggugauagguccgguuauucugguauuuuuucugucgaaggcaaaagcugcaucaaucggugcuuuuauguggaguugauuaggggaagaaaagaggaaacugaagucuuguggaccucaaacaguauuguuguguuuuguggcaccucagguacauauggaacaggcucauggccugauggggcggaccucaaucucaugccuauauaa

SEQ ID NO: 57308 - RNA, 1410 nt, Artificial Sequence; identical to SEQ ID NO: 57242
  derived and/or modified CDS sequence (wt) from neuraminidase__InfluenzaA__AHZ36592

SEQ ID NO: 57309 - RNA, 1410 nt, Artificial Sequence; identical to SEQ ID NO: 57230
  derived and/or modified CDS sequence (wt) from neuraminidase__InfluenzaA__AHZ36604

SEQ ID NO: 57310 - RNA, 1410 nt, Artificial Sequence; identical to SEQ ID NO: 57230
  derived and/or modified CDS sequence (wt) from neuraminidase__InfluenzaA__AHZ36616

SEQ ID NO: 57311 - RNA, 1410 nt, Artificial Sequence
  derived and/or modified CDS sequence (wt) from neuraminidase__InfluenzaA__AHZ36628
augaauccaaaucaaaagauaauaacgauuggcucuguuucucucaccauuuccacaauaugcuucuucaugcaaauugccaucuugauaacuacuguaacauugcauuucaagcaaugugaauucaacucccccccaaacaaccaagugaugcugugugaaccaacaauaauagaaagaaacauaacagagauaguguaucugaccaacaccaccauagagaaggaaauaugccccaaaccagcagaauacagaaauuggucaaagccgcaaugugacauuacaggauuugcaccuuucucuaaggacaauucgauuaggcuuuccgcugguggggacaucugggugacaagagaaccuuaugugucaugcgauccugacaaguguuaucaauuugcccuuggacagggaacaacacuaaacaacgugcauucaaauaacacaguacgugauaggaccccuuaucggacccuauugaugaaugaauuagguguuccuuuucaucuggggaccaagcaagugugcauagcaugguccagcucaaguugucacgauggaaaagcauggcugcauguuuguauaacgggggaugauaaaaaugcaacugcuagcuucauuuacaaugggaggcuuguagauaguguuguuucaugguccaaagaaauccucaggacccaggagucagaaugcguuuguaucaauggaacuuguacaguaguaaugacugaugggagugcuucaggaaaagcugauacuaaaauacuauucauugaggaggggaaaaucguucauacuagcacauugucaggaagugcucagcaugucgaggagugcucuugcuauccucgauauccuggugucagaugugucugcagagacaacuggaaaggcuccaauaggcccaucguagauauaaacauaaaggaucauagcauuguuuccaguuauguguguucaggacuuguuggagacacacccagaaaaaacgacagcuccagcaguagccauuguuuggauccuaacaaugaagaagguggucauggagugaaaggcugggccuuugaugauggaaaugacguguggaugggaagaacgaucaacgagacgucacguuuaggguaugaaaccuuuaaagucauugaaggcugguccaacccuaaguccaaauugcagauaaauaggcaggucauaguugacagaggugauagguccgguuauucugguauuuuuucugucgaaggcaaaagcugcaucaaucggugcuuuuauguggaguugauuaggggaagaaaagaggaaacugaagucuuguggaccucaaacaguauuguuguguuuuguggcaccucagguacauauggaacaggcucauggccugauggggcggaccucaaucucaugccuauauaa

SEQ ID NO: 57312 - RNA, 1410 nt, Artificial Sequence
  derived and/or modified CDS sequence (wt) from neuraminidase__InfluenzaA__AHZ36640
augaauccaaaucaaaagauaauaacgauuggcucuguuucucucaccauuuccacaauaugcuucuucaugcaaauugccaucuugauaacuacuguaacauugcauuucaagcaauaugaauucaacucccccccaaacaaccaagugaugcugugugaaccaacaauaauagaaagaaacauaacagagauaguguaucugaccaacaccaccauagagaaggaaauaugccccaaaccagcagaauacagaaauuggucaaagccgcaaugugacauuacaggauuugcaccuuucucuaaggacaauucgauuaggcuuuccgcugguggggacaucugggugacaagagaaccuuaugugucaugcgauccugacaaguguuaucaauuugcccuuggacagggaacaacacuaaacaacgugcauucaaauaacacaguacaugauaggaccccuuaucggacccuauugaugaaugaguuagguguuccuuuucaucuggggaccaagcaagugugcauagcaugguccagcucaaguugucacgauggaaaagcauggcugcauguuuguauaacgggggaugauaaaaaugcaacugcuagcuucauuuacaaugggaggcuuguagauaguguuguuucaugguccaaagaaauccucaggacccaggagucagaaugcguuuguaucaauggaacuuguacaguaguaaugacugaugggagugcuucaggaaaagcugauacuaaaauacuauucauugaggaggggaaaaucguucauacuagcacauugucaggaagugcucagcaugucgaggagugcucuugcuauccucgauauccuggugucagaugugucugcagagacaacuggaaaggcuccaauaggcccaucguagauauaaacauaaaggaucauagcauuguuuccaguuauguguguucaggacuuguuggagacacacccagaaaaaacgacagcuccagcaguagccauuguuuggauccuaacaaugaagaagguggucauggagugaaaggcugggccuuugaugauggaaaugacguguggaugggaagaacgaucaacgagacgucacguuuaggguaugaaaccuucaaagucauugaaggcugguccaacccuaaguccaaauugcagauaaauaggcaggucauaguugacagaggugauagguccgguuauucugguauuuuuucugucgaaggcaaaagcugcaucaaucggugcuuuuauguggaguugauuaggggaagaaaagaggaaacugaagucuuguggaccucaaacaguauuguuguguuuuguggcaccucagguacauauggaacaggcucauggccugauggggcggaccucaaucucaugccuauauaa

SEQ ID NO: 57313 - RNA, 1410 nt, Artificial Sequence; identical to SEQ ID NO: 57230
  derived and/or modified CDS sequence (wt) from neuraminidase__InfluenzaA__AHZ36652

SEQ ID NO: 57314 - RNA, 1410 nt, Artificial Sequence
  derived and/or modified CDS sequence (wt) from neuraminidase__InfluenzaA__AHZ36664
augaauccaaaucaaaagauaauaacgauuggcucuguuucucucaccauuuccacaauaugcuucuucaugcaaauugccaucuugauaacuacuguaacauugcauuucaagcaauaugaauucaacucccccccaaacaaccaagugaugcugugugaaccaacaauaauagaaagaaacauaacagagauaguguaucugaccaacaccaccauagagaaggaaauaugccccaaaccagcagaauacagaaauuggucaaaaccgcaauguggcauuacaggauuugcaccuuucucuaaggacaauucgauuaggcuuuccgcugguggggacaucugggugacaagagaaccuuaugugucaugcgauccugacaaguguuaucaauuugcccuuggacagggaacaacacuaaacaacgugcauucaaauaacacaguacgugauaggaccccuuaucggacucuauugaugaaugaguuggguguuccuuuucaucuggggaccaagcaagugugcauagcaugguccagcucaaguugucacgauggaaaagcauggcugcauguuuguauaacgggggaugauaaaaaugcaacugcuagcuucauuuacaaugggaggcuuguagauaguguuguuucaugguccaaagaaauucucaggacccaggagucagaaugcguuuguaucaauggaacuuguacaguaguaaugacugauggaagugcuucaggaaaagcugauacuaaaauacuauucauugaggaggggaaaaucguucauacuagcacauugucaggaagugcucagcaugucgaagagugcucuugcuauccucgauauccuggugucagaugugucugcagagacaacuggaaaggcuccaaucggcccaucguagauauaaacauaaaggaucauagcauuguuuccaguuauguuuguucaggacuuguuggagacacacccagaaaaaacgacagcuccagcaguagccauuguuuggauccuaacaaugaagaagguggucauggagugaaaggcugggccuuugaugauggaaaugacguguggaugggaagaacaaucaacgagacgucacgcuuaggguaugaaaccuucaaagucauugaaggcugguccaacccuaaguccaaauugcagauaaauaggcaagucauaguugacagaggugauagguccgguuauucugguauuuucucugucgaaggcaaaagcugcaucaaucggugcuuuuauguggaguugauuaggggaagaaaagaggaaacugaagucuuguggaccucaaacaguauuguuguguuuuguggcaccucagguacauauggaacaggcucauggccugauggggcggaccucaaucucaugccuauauaa

SEQ ID NO: 57315 - RNA, 1410 nt, Artificial Sequence; identical to SEQ ID NO: 57314
  derived and/or modified CDS sequence (wt) from neuraminidase__InfluenzaA__AHZ36676

SEQ ID NO: 57316 - RNA, 1410 nt, Artificial Sequence; identical to SEQ ID NO: 57314
  derived and/or modified CDS sequence (wt) from neuraminidase__InfluenzaA__AHZ36688

SEQ ID NO: 57317 - RNA, 1398 nt, Artificial Sequence
  derived and/or modified CDS sequence (wt) from neuraminidase__InfluenzaA__AHZ39689
augaauccaaaucagaagauucuaugcacuucagccacugcuaucauaauaggcgcaaucgcaguacucauuggaauagcaaaccuaggauugaacauaggacugcaucuaaaaccgggcugcaauugcucacacucacaaccugaaacaaccaacacaagccaaacaauaauaaacaacuauuauaaugaaacaaacaucaccaacauccaaauggaagagagaacaagcaggaauuucaauaacuuaacuaaagggcucuguacuauaaauucauggcacauauaugggaaagacaaugcaguaagaauuggagagagcucggauguuuuagucacaagagaacccuauguuucaugcgacccagaugaaugcagguucuaugcucucagccaaggaacaacaaucagagggaaacacucaaacggaacaauacacgauaggucccaguaucgcgcccugauaagcuggccacuaucaucaccgcccacaguguacaacagcaggguggaaugcauuggguggucaaguacuaguugccaugauggcaaauccaggaugucaauauguauaucaggaccaaacaacaaugcaucugcaguaguaugguacaacagaaggccuguugcagaaauuaacacaugggcccgaaacauacuaagaacacaggaaucugaauguguaugccacaacggcguaugcccaguaguguucaccgaugggucugccacuggaccugcagacacaagaauauacuauuuuaaagaggggaaaauauugaaaugggagucucugacuggaacugcuaagcauauugaagaaugcucauguuacggggaacgaacaggaauuaccugcacaugcagggacaauuggcagggcucaaauagaccagugauucagauagacccaguagcaaugacacacacuagucaauauauaugcaguccuguucuuacagacaauccccgaccgaaugacccaaauauagguaaguguaaugacccuuauccagguaauaauaacaauggagucaagggauucucauaccuggauggggcuaacacuuggcuagggaggacaauaagcacagccucgaggucuggauacgagauguuaaaagugccaaaugcauugacagaugauagaucaaagcccauucaaggucagacaauuguauuaaacgcugacuggagugguuacaguggaucuuucauggacuauugggcugaaggggacugcuaucgagcguguuuuuauguggaguugauacguggaagacccaaggaagauaaagugugguggaccagcaauaguauaguaucgauguguuccaguacagaauuccugggacaauggaacuggccugauggggcuaaaauagaguacuuccucuaa

SEQ ID NO: 57318 - RNA, 1398 nt, Artificial Sequence; identical to SEQ ID NO: 57317
  derived and/or modified CDS sequence (wt) from neuraminidase__InfluenzaA__AHZ39713

SEQ ID NO: 57319 - RNA, 1398 nt, Artificial Sequence; identical to SEQ ID NO: 57317
  derived and/or modified CDS sequence (wt) from neuraminidase__InfluenzaA__AHZ39725

SEQ ID NO: 57320 - RNA, 1398 nt, Artificial Sequence; identical to SEQ ID NO: 57317
  derived and/or modified CDS sequence (wt) from neuraminidase__InfluenzaA__AHZ39737

SEQ ID NO: 57321 - RNA, 1398 nt, Artificial Sequence
  derived and/or modified CDS sequence (wt) from neuraminidase__InfluenzaA__AHZ39749
augaauccaaaucagaagauucuaugcauuucagccacugcuaucauaauaggcgcaaucgcaguacucauuggaauagcaaaccuaggauugaacauaggacugcaucuaaaaccgggcugcaauugcucacacucacaaccugaaacaaccaacacaagccaaacaauaauaaacaacuauuauaaugaaacaaacaucaccaacauccaaauggaagagagaacaagcaggaauuucaauaacuuaacuaaagggcucuguacuauaaauucauggcacauauaugggaaagacaaugcaguaagaauuggagagagcucggauguuuuagucacaagagaacccuauguuucaugcgacccagaugaaugcagguucuaugcucucagccaaggaacaacaaucagagggaaacacucaaacggaacaauacacgauaggucccaguaucgcgcccugauaagcuggccacuaucaucaccgcccacaguguacaacagcaggguggaaugcauuggguggucaaguacuaguugccaugauggcaaauccaggaugucaauauguauaucaggaccaaacaacaaugcaucugcaguaguaugguacaacagaaggccuguugcagaaauuaacacaugggcccgaaacauacuaagaacacaggaaucugaauguguaugccacaacggcguaugcccaguaguguucaccgaugggucugccacuggaccugcagacacaagaauauacuauuuuaaagaggggaaaauauugaaaugggagucucugacuggaacugcuaagcauauugaagaaugcucauguuacggggaacgaacaggaauuaccugcacaugcagggacaauuggcagggcucaaauagaccagugauucagauagacccaguagcaaugacacacacuagucaauauauaugcaguccuguucuuacagacaauccccgaccgaaugacccaaauauagguaaguguaaugacccuuauccagguaauaauaacaauggagucaagggauucucauaccuggauggggcuaacacuuggcuagggaggacaauaagcacagccucgaggucuggauacgagauguuaaaagugccaaaugcauugacagaugauagaucaaagcccauucaaggucagacaauuguauuaaacgcugacuggagugguuacaguggaucuuucauggacuauugggcugaaggggacugcuaucgagcguguuuuuauguggaguugauacguggaagacccaaggaagauaaagugugguggaccagcaauaguauaguaucgauguguuccaguacagaauuccugggacaauggaacuggccugauggggcuaaaauagaguacuuccucuaa

SEQ ID NO: 57322 - RNA, 1398 nt, Artificial Sequence; identical to SEQ ID NO: 57321
  derived and/or modified CDS sequence (wt) from neuraminidase__InfluenzaA__AHZ39761

SEQ ID NO: 57323 - RNA, 1398 nt, Artificial Sequence; identical to SEQ ID NO: 57317
  derived and/or modified CDS sequence (wt) from neuraminidase__InfluenzaA__AHZ39773

SEQ ID NO: 57324 - RNA, 1398 nt, Artificial Sequence; identical to SEQ ID NO: 57317
  derived and/or modified CDS sequence (wt) from neuraminidase__InfluenzaA__AHZ39785

SEQ ID NO: 57325 - RNA, 1410 nt, Artificial Sequence
  derived and/or modified CDS sequence (wt) from neuraminidase__InfluenzaA__AHZ39797
augaauccaaaucaaaagauaauaacaauuggcucuguuucucucaccauuuccacaguaugcuucuucaugcaaauugccaucuugauaacuacuguaacauugcauuucaagcaauaugaauucaacccccccccaaacaaccaagugaugcugugugaaccaacaauaauagaaagaaacauaacagagauaguguaucugaccaacaccaccauagagaaggaaauaugccccaaaccagcagaauacagaaauuggucaaaaccgcaauguggcauuacaggauuugcaccuuucucuaaggacaauucgauuaggcuuuccgcugguggggacaucugggugacaagagaaccuuaugugucaugcgauccugacaaguguuaucaauuugcccuuggacagggaacaacacuaaacaacgugcauucaaauaacacaguacgugauaggaccccuuaucggacucuauugaugaaugaguuggguguuccuuuucaucuggggaccaagcaagugugcauagcaugguccagcucaaguugucacgauggaaaagcauggcugcauguuuguauaacgggggaugauaaaaaugcaacugcuagcuucauuuacaaugggaggcuuguagauaguguuguuucaugguccaaagaaauucucaggacccaggagucagaaugcguuuguaucaauggaacuuguacaguaguaaugacugauggaagugcuucaggaaaaucugauacuaaaauacuauucauugaggaggggaaaaucguucauacuagcacauugucaggaagugcucagcaugucgaagagugcucuugcuauccucgauauccuggugucagaugugucugcagagacaacuggaaaggcuccaaucggcccaucguagauauaaacauaaaggaucauagcauuguuuccaguuauguguguucaggacuuguuggagacacacccagaaaaaacgacagcuccagcaguagccauuguuuggauccuaacaaugaagaagguggucauggagugaaaggcugggccuuugaugauggaaaugacguguggaugggaagaacaaucaacgagacgucacgcuuaggguaugaaaccuucaaagucauugaaggcugguccaauccuaaguccaaauugcagauaaauaggcaagucauaguugacagaggugauagguccgguuauucugguauuuucucuguugaaggcaaaagcugcaucaaucggugcuuuuauguagaguugauuaggggaagaaaagaggaaacugaagucuuguggaccucaaacaguauuguuguguuuuguggcaccucagguacauauggaacaggcucauggccugauggggcggaccucaaucucaugccuauauaa

SEQ ID NO: 57326 - RNA, 1410 nt, Artificial Sequence
  derived and/or modified CDS sequence (wt) from neuraminidase__InfluenzaA__AHZ39821
augaauccaaaucaaaagauaauaacgauuggcucuguuucucucaccauuuccacaauaugcuucuucaugcaaacugccaucuugauaaccacuguaacauugcauuucaagcaauaugaauucaacucccccccaaacaaccaagugaugcugugugaaccaacaauaauagaaagaaacauaacagagauaguguaucugaccaacaccaccauagagaaggaaauaugccccaaacuagcagaauacagaaauuggucaaagccgcaaugugacauuacaggauuugcaccuuuuucuaaggacaauucgauuaggcuuuccgcugguggggacaucugggugacaagagaaccuuaugugucaugcgauccugacaaguguuaucaauuugcccuuggacagggaacaacacuaaacaacgugcauucaaauaacacaguacgugauaggaccccuuaccggacccuauugaugaaugaguuagguguuccuuuucaucuggggaccaagcaggugugcauagcaugguccagcucaaguugucacgauggaaaagcauggcugcauguuuguauaacgggggaugauaaaaaugcaacugcuagcuucauuuacaaugggaggcuuguagauaguguuguuucaugguccaaagaaauccucaggacccaggagucagaaugcguuuguaucaauggaacuugcacaguaguaaugacugaugggagugcuucaggaaaagcugauaccaaaauacuauucauugaggaggggaaaaucguucauacuagcacauugucaggaagugcucagcaugucgaggagugcucuugcuauccucgauauccuggugucagaugugucugcagagacaacuggaaaggcuccaauaggcccaucguagauauaaacauaaaggaucauagcauuguuuccaguuauguguguucaggacuuguuggagacacacccagaagaaacgacagcuccagcaguagccauuguuuggauccuaacaaugaagaagguggucauggaguaaaaggcugggccuuugaugauggaaaugacguguggaugggaagaacgaucaacgagacgucacguuuaggguaugaaaccuucaaagucauugaaggcugguccaacccuaaguccaaauugcagauaaauaggcaagucauaguugacagagguaauagguccgguuauucugguauuuucucuguugaaggcaaaagcugcaucaaucggugcuuuuauguggaguugauuaggggaagaaaagaggaaacugaagucuuguggaccucaaacaguauuguuguguuuuguggcaccucagguacauauggaacaggcucauggccugauggggcggaccucaaucucaugccuacauaa

SEQ ID NO: 57327 - RNA, 1410 nt, Artificial Sequence
  derived and/or modified CDS sequence (wt) from neuraminidase__InfluenzaA__AHZ39833
augaauccaaaccaaaagauaauaaccauugguucggucuguaugacaauuggaauggcuaacuuaauauuacaaauuggaaacauaaucucaauauggauuagccacucaauucaacuugggaaucaaagucagauugaaacaugcaaucaaagcgucauuacuuaugaaaacaacacuuggguaaaucagacauauguuaacaucaguaacaccaacuuugcugcuggacagucagugguuuccgugaaauuagcgggcaauuccucucucugcccuguuaguggaugggcuauauacaguaaagacaacaguguaagaaucgguuccaagggagauguguuugucauaagggaaccauucauaucaugcucccccuuggaaugcagaaccuucuucuugacucaaggggccuugcuaaaugacaaacauuccaauggaaccauuaaagacaggagcccauaucgaacccuaaugagcuguccuauuggugaaguucccucuccauacaacucaagauuugagucggucgcuuggucagcaagugcuugucaugauggcaucaauuggcuaacaauuggaauuucuggcccagacaguggggcaguggcuguauuaaaguacaauggcauaauaacagacacuaucaagaguuggagaaacaauauauugagaacacaagagucugaaugugcauguguaaaugguucuugcuuuaccauaaugaccgauggaccaagugauggacaggccucauacaagaucuucagaauagaaaagggaaagauagucaaaucagucgaaaugaaugccccuaauuaucacuaugaggaaugcuccuguuauccugauucuagugaaaucacaugugugugcagggauaacuggcauggcucgaaucgaccgugggugucuuucaaccagaaucuggaauaucagauaggauacauaugcagugggauuuucggagacaauccacgcccuaaugauaagacaggcaguugugguccaguaucgucuaauggagcaaauggaguaaaaggauuuucauucaaauacggcaaugguguuuggauagggagaacuaaaagcauuaguucaagaaaagguuuugagaugauuugggauccaaauggauggacugggacagacaauaacuucucaauaaagcaagauaucguaggaauaaaugaguggucaggauauagcgggaguuuuguucagcauccagaacuaacagggcuggauuguauaagaccuugcuucuggguugaacuaaucagagggcgacccaaagagaacacaaucuggacuagcgggagcagcauauccuuuugugguguaaacagugacacuguggguuggucuuggccagacggugcugaguugccauuuaccauugacaaguaa

SEQ ID NO: 57328 - RNA, 1410 nt, Artificial Sequence; identical to SEQ ID NO: 55337
  derived and/or modified CDS sequence (wt) from neuraminidase__InfluenzaA__AHZ39844

SEQ ID NO: 57329 - RNA, 1410 nt, Artificial Sequence
  derived and/or modified CDS sequence (wt) from neuraminidase__InfluenzaA__AHZ39856
augaauccaaaucaaaagauaauaacgauuggcucuguuucucucaccauuuccacaauaugcuucuucaugcaaauugccaucuugauaacuacuguaacauugcauuucaagcaauaugaauucaacucccccccaaacaaccaagugaugcugugugaaccaacaauaauagaaagaaacauaacagagauaguguaucuaaccaacaccaccauagagaaggaaauaugccccaaaccagcagaauacagaaauuggucaaagccgcagugugacauuacaggauuugcaccuuuuucuaaggacaauucgauuaggcuuuccgcugguggggacaucugggugacaagagaaccuuaugugucaugcgauccugacaaguguuaucaauuugcucuuggacagggaacaacacuaaacaacgugcauucaaauaacacaguacgugauaggaccccuuaucggacccuauugaugaaugaguuagguguuccuuuucaucuggggaccaagcaagugugcauagcaugguccagcucaaguugucacgauggaaaagcauggcugcauguuuguauaacgggggaugauaaaaaugcaacugcuagcuucauuuacaaugggaggcuuguagauaguguuguuucaugguccaaagaaauccucaggacccaggagucagaaugcguuuguaucaauggaacuuguacaguaguaaugacugaugggagugcuucaggaaaagcugauacuaaaauacuauucauugaggaggggaaaaucguucauacuagcacauugucaggaagugcucagcaugucgaggagugcucuugcuauccucgauauccuggugucagaugugucugcagagacaacuggaaaggcuccaauaggccuaucguagauauaaacauaaaggaucauagcauuguuuccagguauguguguucaggacuuguuggagacacacccagaaaaaacgacagcuccagcaguagccauuguuuggauccuaacaaugaagaagguggucauggagugaaaggcugggccuucgaugauggaaaugacguguggaugggaagaacgaucaacgagacgucacguuuaggguaugaaaccuucaaagucauugaaggcugguccaacccuaaguccaaauugccgauaaauaggcaggucauaguugacagaggugauagguccgguuauucugguauuuucucuguugaaggcaaaagcugcaucaaucggugcuuuuauguggaguugauuaggggaagaaaagaggaaacugaagucuuguggaccucaaacaguauuguuguguuuuguggcaccucagguacauauggaacaggcucauggccugauggggcggaccucaaucucaugccuauauaa

SEQ ID NO: 57330 - RNA, 1410 nt, Artificial Sequence
  derived and/or modified CDS sequence (wt) from neuraminidase__InfluenzaA__AHZ39868
augaauccaaaucaaaagauaauaacgauuggcucuguuucucucaccauuuccacaauaugcuucuucaugcaaauugccaucuugauaacuacuguaacauugcauuucaagcaauaugaauucaacucccccccaaacaaccaagugaugcugugugaaccaacaauaauagaaagaaacauaacagagauaguguaucugaccaacaccaccauagagaaggaaauaugccccaaaccagcagaauacagaaauuggucaaaaccgcaauguggcauuacaggauuugcaccuuucucuaaggacaauucgauuaggcuuuccgcugguggggacaucugggugacaagagaaccuuaugugucaugcgauccugacaaguguuaucaauuugcccuuggacagggaacaacacuaaacaacgugcauucgaauaacacaguacgugauaggaccccuuaucggacucuauugaugaaugaguuggguguuccuuuucaucuggggaccaagcaagugugcauagcaugguccagcucaaguugucacgauggaaaagcauggcugcauguuuguauaacgggggaugauaaaaaugcaacugcuagcuucauuuacaaugggaggcuuguagauaguguuguuucaugguccaaagaaauucucaggacccaggagucagaaugcguuuguaucaauggaacuuguacaguaguaaugacugauggaagugcuucaggaaaagcugauacuaaaauacuauucauugaggaggggaaaaucguucauacuagcacauugucaggaagugcucagcaugucgaagagugcucuugcuauccucgauauccuggugucagaugugucugcagagacaacuggaaaggcuccaaucggcccaucguagauauaaacauaaaggaucauagcauuguuuccaguuauguguguucaggacuuguuggagacacacccagaaaaaacgacagcuccagcaguagccauuguuuggauccuaacaaugaagaagguggucauggagugaaaggcugggccuuugaugauggaaaugacguguggaugggaagaacaaucaacgagacgucacgcuuaggguaugaaaccuucaaagucauugaaggcugguccaauccuaaguccaaauugcagauaaauaggcaagucauaguugacagaggugauagguccgguuauucugguauuuucucuguugaaggcaaaagcugcaucaaucggugcuuuuauguagaguugauuaggggaagaaaagaggaaacugaagucuuguggaccucaaacaguauuguuguguuuuguggcaccucagguacauauggaacaggcucauggccugauggggcggaccucaaucucaugccuauauaa

SEQ ID NO: 57331 - RNA, 1410 nt, Artificial Sequence
  derived and/or modified CDS sequence (wt) from neuraminidase__InfluenzaA__AHZ39892
augaauccaaaucaaaagauaauaacgauuggcucuguuucucucaccauuuccacaauaugcuucuucaugcaaauugccaucuugauaacuacuguaacauugcauuucaagcaauaugaauucaacucccccccaaacaaccaaguggugcugugugaaccaacaauaauagaaagaaacauaacagagauaguguaucuaaccaacaccaccauagagaaggaaauaugccccaaaccagcagaauacagaaauuggucaaagccgcagugugacauuacaggauuugcaccuuuuucuaaggacaauucgauuaggcuuuccgcugguggggacaucugggugacaagagaaccuuaugugucaugcgauccugacaaguguuaucaauuugcucuuggacagggaacaacacuaaacaacgugcauucaaauaacacaguacgugauaggaccccuuaucggacccuauugaugaaugaguuagguguuccuuuucaucuggggaccaagcaagugugcauagcaugguccagcucaaguugucacgauggaaaagcauggcugcauguuuguauaacgggggaugauaaaaaugcaacugcuagcuucauuuacaaugggaggcuuguagauaguguuguuucaugguccaaagaaauccucaggacccaggagucagaaugcguuuguaucaauggaacuuguacaguaguaaugacugaugggagugcuucaggaaaagcugauacuaaaauacuauucauugaggaggggaaaaucguucauacuagcacauugucaggaagugcucagcaugucgaggagugcucuugcuauccucgauauccuggugucagaugugucugcagagacaacuggaaaggcuccaauaggccuaucguagauauaaacauaaaggaucauagcauuguuuccagguauguguguucaggacuuguuggagacacacccagaaaaaacgacagcuccagcaguagccauuguuuggauccuaacaaugaagaagguggucauggagugaaaggcugggccuucgaugauggaaaugacguguggaugggaagaacgaucaacgagacgucacguuuaggguaugaaaccuucaaagucauugaaggcugguccaacccuaaguccaaauugcagauaaauaggcaggucauaguugacagaggugauagguccgguuauucugguauuuucucuguugaaggcaaaagcugcaucaaucggugcuuuuauguggaguugauuaggggaagaaaagaggaaacugaagucuuguggaccucaaacaguauuguuguguuuuguggcaccucagguacauauggaacaggcucauggccugauggggcggaccucaaucucaugccuauauaa

SEQ ID NO: 57332 - RNA, 1410 nt, Artificial Sequence; identical to SEQ ID NO: 55368
  derived and/or modified CDS sequence (wt) from neuraminidase__InfluenzaA__AHZ39904

SEQ ID NO: 57333 - RNA, 1410 nt, Artificial Sequence; identical to SEQ ID NO: 55368
  derived and/or modified CDS sequence (wt) from neuraminidase__InfluenzaA__AHZ39916

SEQ ID NO: 57334 - RNA, 1410 nt, Artificial Sequence; identical to SEQ ID NO: 55386
  derived and/or modified CDS sequence (wt) from neuraminidase__InfluenzaA__AHZ39928

SEQ ID NO: 57335 - RNA, 1410 nt, Artificial Sequence
  derived and/or modified CDS sequence (wt) from neuraminidase__InfluenzaA__AHZ39940
augaauccaaaucaaaagauaauaacgauuggcucuguuucucucaccauuuccacaauaugcuucuucaugcaaauugccaucuugauaacuacuguaacauugcauuucaagcaauaugaauucaacucccccccaaacaaccaagugaugcugugugaaccgacaauaauagaaagaaacaugacagagauaguguaucugaccaacaccaccauagagaaggaaauaugccccaaaccagcagaauacagaaauuggucaaaaccgcaauguggcauuacaggauuugcaccuuucucuaaggacaauucgauuaggcuuuccgcugguggggacaucugggugacaagagaaccuuaugugucaugcgauccugacaaguguuaucaauuugcccuuggacagggaacaacacuaaacaacgugcauucaaauaacacaguacgugauaggaccccuuaucggacucuauugaugaaugaguuggguguuccuuuucaucuggggaccaagcaagugugcauagcaugguccagcucaaguugucacgauggaaaagcauggcugcauguuuguauaacgggggaugauaaaaaugcaacugcuagcuucauuuacaaugggaggcuuguagauaguguuguuucaugguccaaagaaauucucaggacccaggagucagaaugcguuuguaucaauggaacuuguacaguaguaaugacugauggaagugcuucaggaaaagcugauacuaaaauacuauucauugaggaggggaaaaucguucauacuagcacauugucaggaagugcucagcaugucgaagagugcucuugcuauccucgauauccuggugucagaugugucugcagagacaacuggaaaggcuccaaucggcccaucguagauauaaacauaaaggaucauagcauuguuuccaguuauguguguucaggacuuguuggagacacacccagaaaaaccgacagcuccagcaguagccauuguuuggauccuaacaaugaagaagguggucauggagugaaaggcugggccuuugaugauggaaaugacguguggaugggaagaacaaucaacgagacgucacgcuuaggguaugaaaccuucaaagucauugaaggcugguccaauccuaaguccaaauugcagauaaauaggcaagucauaguugacagaggugauagguccgguuauucugguauuuucucuguugaaggcaaaagcugcaucaaucggugcuuuuauguagaguugauuaggggaagaaaagaggaaacugaagucuuguggaccucaaacaguauuguuguguuuuguggcaccucagguacauauggaacaggcucauggccugauggggcggaccucaaucucaugccuauauaa

SEQ ID NO: 57336 - RNA, 1410 nt, Artificial Sequence; identical to SEQ ID NO: 55364
  derived and/or modified CDS sequence (wt) from neuraminidase__InfluenzaA__AHZ39952

SEQ ID NO: 57337 - RNA, 1410 nt, Artificial Sequence; identical to SEQ ID NO: 55337
  derived and/or modified CDS sequence (wt) from neuraminidase__InfluenzaA__AHZ39976

SEQ ID NO: 57338 - RNA, 1410 nt, Artificial Sequence
  derived and/or modified CDS sequence (wt) from neuraminidase__InfluenzaA__AHZ39988
augaauccaaaucaaaagauaauaacgauuggcucuguuucucucaccauuuccacaauaugcuucuucaugcaaauugccaucuugauaacuacuguaacauugcauuucaagcaauaugaauucaacucccccccaaacaaccaagugaugcugugugaaccaacaauaauagaaagaaacauaacagagauaguguauuugaccaacaccaccauagagaaggaaauaugccccaaaccagcagaauacaggaauuggucaaaaccgcaauguggcauuacaggauuugcaccuuucucuaaggacaauucgauuaggcuuuccgcugguggggacaucugggugacaagagaaccuuaugugucaugcgauccugacaaguguuaucaauuugcccuuggacagggaacaacacuaaacaacaugcauucaaauaacacaguacgugauaggaccccuuaucggacucuauugaugaaugaguuggguguuccuuuucaucuggggaccaagcaagugugcauagcaugguccagcucaaguugucacgauggaaaagcauggcugcauguuuguauaacgggggaugauaaaaaugcaacugcuagcuucauuuacaaugggaggcuuguagauaguguuguuucaugguccaaagaaauucucaggacccaggagucagaaugcguuuguaucaauggaacuuguacaguaguaaugacugauggaagugcuucaggaaaagcugauacuaaaauauuauucauugaggaggggaaaaucguucauacuagcacauugucaggaaguacucagcaugucgaagagugcucuugcuauccucgauauccuggugucagaugugucugcagagacaacuggaaaggcuccaaucggcccaucguagauauaaacauaaaggaucauagcauugucuccaguuauguguguucaggacuuguuggagacacacccagaaaaaacgacagcuccagcaguagccauuguuuggauccuaacaaugaagaagguggucauggagugaaaggcugggccuuugaugauggaaaugacguguggaugggaagaacaaucaacgagacgucacgcuuaggguaugaaaccuucaaagucauugaaggcugguccaacccuaaguccaaauugcagauaaauaggcaagucauaguugacagaggugauagguccgguuauucugguauuuucucuguugaaggcaaaagcugcaucaaucggugcuuuuauguugaguugauuaggggaagaaaagaggaaacugaagucuuguggaccucaaacaguauuguuguguuuuguggcaccucagguacauauggaacaggcucauggccugauggggcggaccucaaucucaugccuauauaa

SEQ ID NO: 57339 - RNA, 1410 nt, Artificial Sequence; identical to SEQ ID NO: 55386
  derived and/or modified CDS sequence (wt) from neuraminidase__InfluenzaA__AHZ40000

SEQ ID NO: 57340 - RNA, 1410 nt, Artificial Sequence; identical to SEQ ID NO: 56923
  derived and/or modified CDS sequence (wt) from neuraminidase__InfluenzaA__AHZ40012

SEQ ID NO: 57341 - RNA, 1410 nt, Artificial Sequence
  derived and/or modified CDS sequence (wt) from neuraminidase__InfluenzaA__AHZ40024
augaauccaaaucaaaagauaauaacgauuggcucuguuucucucaccauuuccacaauaugcuucuucaugcaaauugccaucuugauaacuacuguaacauugcauuucaagcaauaugaauucaacucccccccaaacaaccaagugaugcugugugaaccaacaauaauagaaagaaacauaacagagauaguguaucugaccaacaccaccauagagaaggaaauaugccccaaaccagcagaauacagaaauuggucaaaaccgcaauguggcauuacaggauuugcaccuuucucuaaggacaauucgauuaggcuuuccgcugguggggacaucugggugacaagagaaccuuaugugucaugcgauccugacaaguguuaucaauuugcccuuggacagggaacaacacuaaacaacgugcauucaaauaacacaguacgugauaggaccccuuaucggacucuauugaugaaugaguuggguguuccuuuucaucuggggaccaagcaagugugcauagcaugguccagcucaaguugucacgauggaaaagcauggcugcauguuuguauaacgggggaugauaaaaaugcaacugcuagcuucauuuacaaugggaggcuuguagauaguguuguuucaugguccaaagaaauucucaggacccaggagucagaaugcguuuguaucaauggaacuuguacaguaguaaugacugauggaagugcuucaggaaaagcugauacuaaaauacuauucauugaggaggggaaaaucguucauacuagcacauugucaggaagugcucagcaugucgaagagugcucuugcuauccucgauauccuggugucagaugugucugcagagacaacuggaaaggcuccaaucggcccaucguagauauaaacauaaaggaucauagcauuguuuccaguuauguguguucaggacuuguuggagacacacccagaaaaaacgacagcuccagcaguagccauuguuuggauccuaacaaugaagaagguggucauggagugaaaggcugggccuuugaugauggaaaugacguguggaugggaagaacaaucaacgagacgucacgcuuaggguuugaaaccuucaaagucauugaaggcugguccaauccuaaguccaaauugcagauaaauaggcaagucauaguugacagaggugauagguccgguuauucugguauuuucucuguugaaggcaaaagcugcaucaaucggugcuuuuauguagaguugauuaggggaagaaaagaggaaacugaagucuuguggaccucaaacaguauuguuguguuuuguggcaccucagguacauauggaacaggcucauggccugauggggcagaccucaaucucaugccuauauaa

SEQ ID NO: 57342 - RNA, 1410 nt, Artificial Sequence; identical to SEQ ID NO: 55957
  derived and/or modified CDS sequence (wt) from neuraminidase__InfluenzaA__AHZ40036

SEQ ID NO: 57343 - RNA, 1410 nt, Artificial Sequence; identical to SEQ ID NO: 55379
  derived and/or modified CDS sequence (wt) from neuraminidase__InfluenzaA__AHZ40048

SEQ ID NO: 57344 - RNA, 1410 nt, Artificial Sequence; identical to SEQ ID NO: 55364
  derived and/or modified CDS sequence (wt) from neuraminidase__InfluenzaA__AHZ40063

SEQ ID NO: 57345 - RNA, 1410 nt, Artificial Sequence
  derived and/or modified CDS sequence (wt) from neuraminidase__InfluenzaA__AHZ40075
augaauccaaaucaaaagauaauaacgauuggcucuguuucucucaccauuuccacaguaugcuucuucaugcaaauugccaucuugauaacuacuguaacauugcauuucaagcaauaugaauucaacucccccccaaacaaccaagugaugcugugugaaccaacaauaauagaaagaaacauaacagagauaguguaucugaccaacaccaccauagagaaggaaauaugccccaaaccagcagaauacagaaauuggucaaaaccgcaauguggcauuacaggauuugcaccuuucucuaaggacaauucgauuaggcuuuccgcugguggggacaucugggugacaagagaaccuuaugugucaugcgauccugacaaguguuaucaauuugcccuuggacagggaacaacacuaaacaacgugcauucaaauaacacaguacgugauaggaccccuuaucggacucuauugaugaaugaguuggguguuccuuuucaucuggggaccaagcaagugugcauagcaugguccagcucaaguugucacgauggaaaagcauggcugcauguuuguauaacgggggaugauaaaaaugcaacugcuagcuucauuuacaaugggaggcuuguagauaguguuguuucaugguccaaagaaauucucaggacccaggagucagaaugcguuuguaucaauggaacuuguacaguaguaaugacugauggaagugcuucaggaaaagcugauacuaaaauacuauucauugaggaggggaaaaucguucauacuagcacauugucaggaagugcucagcaugucgaagagugcucuugcuauccucgauauccuggugucagaugugucugcagagacaacuggaaaggcuccaaucggcccaucguagauauaaacauaaaggaucauagcauuguuuccaguuauguguguucaggacuuguuggagacacacccagaaaaaacgacagcuccagcaguagccauuguuuggauccuaacaaugaagaagguggucauggagugaaaggcugggccuuugaugauggaaaugacguguggaugggaagaacaaucaacgagacgucacgcuuaggguaugaaaccuucaaagucauugaaggcugguccaauucuaaguccaaauugcagauaaauaggcaagucauaguugacagaggugauagguccgguuauucugguauuuucucuguugaaggcaaaagcugcaucaaucggugcuuuuauguagaguugauuaggggaagaaaagaggaaacugaagucuuguggaccucaaacaguauuguuguguuuuguggcaccucagguacauauggaacaggcucauggccugauggggcggaccucaaucucaugccuauauaa

SEQ ID NO: 57346 - RNA, 1410 nt, Artificial Sequence; identical to SEQ ID NO: 55337
  derived and/or modified CDS sequence (wt) from neuraminidase__InfluenzaA__AHZ40087

SEQ ID NO: 57347 - RNA, 1410 nt, Artificial Sequence; identical to SEQ ID NO: 55404
  derived and/or modified CDS sequence (wt) from neuraminidase__InfluenzaA__AHZ40099

SEQ ID NO: 57348 - RNA, 1410 nt, Artificial Sequence
  derived and/or modified CDS sequence (wt) from neuraminidase__InfluenzaA__AHZ40111
augaacccaaaucaaaagauaauaacgauuggcucuguuucucucaccauuuccacaauaugcuucuucaugcaaauugccaucuugauaacuacuguaacauugcauuucaagcaauaugaauucaacccccccccaaacaaccaagugaugcugugugaaccaacaauaauagaaagaaacauaacagagauaguguaucuaaccaacaccaccauagagaaggaaauaugccccaaacuagcagaauacagaaauuggucaaagccgcaaugugacauuacaggauuugcaccuuuuucuaaggacaauucgauuaggcuuuccgcugguggggacaucugggugacaagagaaccuuaugugucaugcgauccugacaaguguuaucaauuugcccuuggacagggaacaacacuaaacaacgugcauucaaauaacacaguacgugauaggacuccuuaucggacccuauugaugaaugaguuagguguuccuuuucaucuggggaccaagcaggugugcauagcaugguccagcucaaguugucacgauggaaaagcauggcugcauguuuguauaacgggggaugauaaaaaugcaacugcuagcuucauuuacaaugggaggcuuguagauaguguuguuucaugguccaaagacauccucaggacccaggagucagaaugcguuuguaucaauggaacuugugcgguaguaaugacugaugggagugcuucaggaaaagcugauacuaaaauacuauucauugaggaggggaaaaucguucauacuagcacauugucaggaagugcucagcaugucgaggagugcucuugcuauccucgauauccuggugucagaugugucugcagagacaacuggaaaggcuccaauaggcccaucguagauauaaacauaaaggaucauagcauuguuuccaguuauguguguucaggacuuguuggagacacacccagaaaaaacgacagcuccagcaguggccauuguuuggauccuaacaaugaagaagguggucauggaguaaaaggcugggccuuugaugauggaaaugacguguggaugggaagaacgaucaacgagacgucacgcuuaggguaugaaaccuucaaagucauugaaggcugguccaacccgaaguccaaauugcagauaaauaggcaagucauaguugacagagguaauagguccgguuauucugguauuuucucuguugaaggcaaaaacugcaucaaucggugcuuuuauguggaguugauuaggggaaggaaagaggaaacugaagucuuguggaccucaaacaguauuguuguguuuuguggcaccucagguacauauggaacaggcucauggccugauggggcggaccucaaucucaugccuauauaa

SEQ ID NO: 57349 - RNA, 1410 nt, Artificial Sequence
  derived and/or modified CDS sequence (wt) from neuraminidase__InfluenzaA__AHZ40123
augaauccaaaucaaaagauaauaacgauuggcucuguuucucucaccauuuccacaauaugcuucuucaugcaaauugccaucuugauaacuacuguaacauugcauuucaagcaauaugaauucaacucccccccaaacaaccaagugaugcugugugaaccaacaauaacagaaagaaacauaacagagauaguguaucuaaccaacaccaccauagagaaggaaauaugccccaaaccagcagaauacagaaauuggucaaaaccgcaauguggcauuacaggauuugcaccuuucucuaaggacaauucgauuaggcuauccgcugguggggacaucugggugacaagagaaccuuaugugucaugcgauccugacaaguguuaucaauuugcccuuggacagggaacaacacuaaacaacgugcauucaaauaacacaguacgugauaggaccccuuaucggacucuauugaugaaugaguuggguguuccuuuucaucuggggaccaagcaagugugcauagcaugguccagcucaaguugucacgauggaaaagcauggcugcauguuuguauaacgggggaugauaaaaaugcaacugcuagcuuuauuuacaaugggaggcuuguagauaguguuguuucaugguccaaagaaauucucaggacccaggagucagaaugcguuuguaucaauggaacuuguacaguaguaaugacugauggaagugcuucagggaaagcugauacuaaaauacuauucauugaggaggggaaaaucguucauacuagaacauugucaggaagugcucagcaugucgaagagugcucuugcuauccucgauauccuggugucagaugugucugcagagacaacuggaaaggcuccaaucggcccaucguagauauaaacauaaaggaucauagcauuguuuccaguuauguguguucaggacuuguuggagacacacccagaaaaaacgacagcuccagcaguagccauuguuuggauccuaacaaugaagaagguggucauggagugaaaggcugggccuuugaugauggaaaugacguguggaugggaagaacaaucaacgagacgucacgcuuaggguaugaaaccuucaaagucauugaaggcugguccaacccuaaguccaaauugcagauaaauaggcaggucauaguugacagaggugauagguccgguuauucugguauuuucucuguugaaggcaaaagcugcaucaaucggugcuuuuauguggaguugauuaggggaagaaaagaggaaacugaagucuuguggaccucaaacaguauuguuguguuuuguggcaccucagguacauauggaacaggcucauggccugauggggcggaccucaaucucaugccuauauaa

SEQ ID NO: 57350 - RNA, 1410 nt, Artificial Sequence; identical to SEQ ID NO: 56966
  derived and/or modified CDS sequence (wt) from neuraminidase__InfluenzaA__AHZ40133

SEQ ID NO: 57351 - RNA, 1410 nt, Artificial Sequence
  derived and/or modified CDS sequence (wt) from neuraminidase__InfluenzaA__AHZ40145
augaauccaaaucaaaagauaauaacgauuggcucuguuucucucaccauuuccacaauaugcuucuucaugcaaauugccaucuugauaacuacuguaacauugcauuucaagcaauaugaauucaacucccccccaaacaaccaagugaugcugugugaaccaacaauaauagaaagaaacauaacagagauaguguaucugaccaacaccaccauagagaaggaaauaugccccaaaccagcagaauacagaaauuggucaaaaccgcaauguggcauuacaggcuuugcaccuuucucuaaggacaauucgauuaggcuuuccgcugguggggacaucugggugacaagagaaccuuaugugucaugcgauccugacaaguguuaucaauuugcccuuggacagggaacaacacuaaacaacgugcauucaaauaacacaguacgugauaggaccccuuaucggacucuauugaugaaugaguuggguguuccuuuucaucuggggaccaagcaagugugcauagcaugguccagcucaaguugucacgauggaaaagcauggcugcauguuuguauaacgggggaggauaaaaaugcaacugcuagcuucauuuacaaugggaggcuuguagauaguguuguuucaugguccaaagaaauucucaggacccaggagucagaaugcguuuguaucaauggaacuuguacaguaguaaugacugauggaagugcuucaggaaaagcugauacuaaaauacuauucauugaggaggggaaaaucguucauacuagcacauugucaggaagugcucagcaugucgaagagugcucuugcuauccucgauauccuggugucagaugugucugcagagacaacuggaaaggcuccaaucggcccaucguagauauaaacauaaaggaucauagcauuguuuccaguuauguguguucaggacuuguuggagacacacccagaaaaaacgacagcuccagcaguagccauuguuuggauccuaacaaugaagaagguggucauggagugaaaggcugggccuuugaugauggaaaugacguguggaugggaagaacaaucaacgagacgucacgcuuaggguaugaaaccuucaaagucauugaaggcugguccaacccuaaguccaaauugcagauaaauaggcaagucauaguugacagaggugauagguccgguuauucugguauuuucucuguugaaggcaaaagcugcaucaaucggugcuuuuauguggaguugauuaggggaagaaaagaggaaacugaagucuuguggaccucaaacaguauuguuguguuuuguggcaccucagguacauauggaacaggcucauggccugauggggcggaccucaaucucaugccuauauaa

SEQ ID NO: 57352 - RNA, 1410 nt, Artificial Sequence
  derived and/or modified CDS sequence (wt) from neuraminidase__InfluenzaA__AHZ40157
augaauccaaaucaaaagauaauaacgauuggcucuguuucucucaccauuuccacaauaugcuucuucaugcaaauugccaucuugauaacuacuguaacauugcauuucaagcaauaugaauucaacucccccccaaacaaccaagugaugcugugugaaccaacaauaauagaaagaaacauaacagagauaguguaucugaccaacaccaccauagagaaggaacuaugccccaaacuagcagaauacagaaauuggucaaagccgcagugugacauuacaggauuugcgccuuuuucuaaggacaauucgauuaggcuuuccgcugguggggacaucugggugacaagagaaccuuaugugucaugcgauccugacaaguguuaucaauuugcccuuggacagggaacaacacuaaacaacgugcauucaaauaacacaguacgugauaggaccccuuaucggacccuauugaugaaugaguuagguguuccuuuucaucuggggaccaagcaagugugcauggcaugguccagcucaaguugucacgauggaaaagcauggcugcauguuuguauaacgggggaugauaaaaaugcaacugcuagcuucauuuacaaugggaagcuuguagauaguguugucucaugguccaaagaaauccucaggacccaggagucagaaugcguuuguaucaaugggacuuguacaguaguaaugacugaugggagugcuucaggaaaagcugauacuaaaauacuauucauugaggaggggaaaaucguucauacuagcacauugucaggaagugcucagcaugucgaggagugcucuugcuauccucgauauccuggugucagaugugucugcagagacaacuggaaaggcuccaauaggcccauuguagauauaaacauaaaggaucauagcauuguuuccaguuauguguguucuggacuuguuggagacacacccagaaaaaccgacagcuccagcaguagccauuguuuggauccuaacaaugaagaagguggucauggagugaaaggcugggccuuugaugauggaaaugacguguggaugggaagaacgaucaacgagacgucacguuuaggguaugaaaccuucaaagucauugaaggcugguccaacccuaaguccaaauugcagauaaauaggcaagucauaguugacagaggugauagguccgguuauucugguauuuucucuguugaaggcaaaagcugcaucaaucggugcuuuuauguggaguugauuaggggaagaaaagaggaaacugcagucuuguggaccucaaacaguauuguuguguuuuguggcaccucagguacauauggaacaggcucauggccugauggggcggaccucaaucucaugccuauauaa

SEQ ID NO: 57353 - RNA, 1410 nt, Artificial Sequence
  derived and/or modified CDS sequence (wt) from neuraminidase__InfluenzaA__AHZ40169
augaauccaaaccaaaagauaauaaccauugguucggucuguaugacaauuggaauggcuaacuuaauauuacaaauuggaaacauaaucucaauauggauuagccacucaauucaacuugagaaucaaagucagauugaaacaugcaaucaaagcgucauuacuuaugaaaacaacacuuggguaaaucagacauauguuaacaucagcaacaccaacuuugcugcuggacagucagugguuuccgugaaauuagcgggcaauuccucucucugcccuguuaguggaugggcuauauacaguaaagacaacaguguaagaaucgguuccaagggggauguguuugucauaagggaaccauucauaucaugcucccccuuggaaugcagaaccuucuucuugacucaaggggccuugcuaaaugacaaacauuccaauggaaccauuaaagacaggagcccauaucgaacccuaaugagcuguccuauuggugaaguucccucuccauacaacucaagauuugagucggucgcuuggucagcaagugcuugucaugauggcaucaauuggcuaacaauuggaauuucuggcccagacaguggggcaguggcuguauuaaaguacaauggcauaauaacagacacuaucaagaguuggagaaacaauauauugagaacacaagagucugaaugugcauguguaaaugguucuugcuuuaccauaaugaccgauggaccaagugauggacaggccucauacaagaucuucagaauagaaaagggaaagauagucaaaucagucgaaaugaaugccccuaauuaucacuaugaggaaugcuccuguuauccugauucuagugaaaucacaugugugugcagggauaacuggcauggcucgaaucgaccgugggugucuuucaaccagaaucuggaauaucagauaggauacauaugcagugggauuuucggagacaauccacgcccuaaugauaagacaggcaguugugguccaguaucgucuaauggagcaaauggaguaaaaggauuuucauucaaauacggcaaugguguuuggauagggagaacuaaaagcauuaguucaagaaaagguuuugagaugauuugggauccaaauggauggacugggacagacaauaacuucucaauaaagcaagauaucguaggaauaaaugaguggucaggauauagcgggaguuuuguucagcauccagaacuaacagggcuggauuguauaagaccuugcuucuggguugaacuaaucagagggcgacccaaagagaacacaaucuggacuagcgggagcagcauauccuuuugugguguaaacagugacacuguggguuggucuuggccagacggugcugaguugccauucaccauugacaaguaa

SEQ ID NO: 57354 - RNA, 1410 nt, Artificial Sequence
  derived and/or modified CDS sequence (wt) from neuraminidase__InfluenzaA__AHZ40180
augaauccaaaucaaaagauaauaacgauuggcucuguuucucucaccauuuccacaauaugcuucuucaugcaaauuaccaucuugauaacuacuguaacauugcauuucaagcaauaugaauucaacucccccccaaacaaccaagugaugcugugugaaccaacaauaauagaaagaaacauaacagagauaguguaucugaccaacaccaccauagagaaggaaauaugccccaaaccagcagaauacagaaauuggucaaaaccgcaauguggcauuacaggauuugcaccuuucucuaaggacaauucgauuaggcuuuccgcugguggggacaucugggugacaagagaaccuuaugugucaugcgauccugacaaguguuaucaauuugcccuuggacagggaacaacacuaaacaacgugcauucaaauaacacaguacgugauaggaccccuuaucggacucuauugaugaaugaguuggguguuccuuuucaucuggggaccaagcaagugugcauagcaugguccagcucaaguugucacgauggaaaagcauggcugcauguuuguauaacgggggaugauaaaaaugcaacugcuagcuucauuuacaaugggaggcuuguagauaguguuguuucaugguccaaagaaauucucaggacccaggagucagaaugcguuuguaucaauggaacuuguacaguaguaaugacugauggaagugcuucaggaaaagcugauacuaaaauacuauucauugaggaggggaaaaucguucauacuagcacauugucaggaagugcucagcaugucgaagagugcucuugcuauccucgauauccuggugucagaugugucugcagagacaacuggaaaggcuccaaucggcccaucguagauauaaacauaaaggaucauagcauuguuuccaguuauguguguucaggacuuguuggagacacacccagaaaaaacgacagcuccagcaguagccauuguuuggauccuaacaaugaagaagguggucauggagugaaaggcugggccuuugaugauggaaaugacguguggaugggaagaacaaucaacgagacgucacgcuuaggguaugaaaccuucaaagucauugaaggcugguccaauccuaaguccaaauugcagauaaauaggcaagucauaguugacagaggugauagguccgguuauucugguauuuucucuguugaaggcaaaagcugcaucaaucggugcuuuuauguagaguugauuaggggaagaaaagaggaaacugaagucuuguggaccucaaacaguauuguuguguuuuguggcaccucagguacauauggaacaggcucauggccugauggggcggaccucaaucucaugccuauauaa

SEQ ID NO: 57355 - RNA, 1410 nt, Artificial Sequence
  derived and/or modified CDS sequence (wt) from neuraminidase__InfluenzaA__AHZ40192
augaauccaaaucaaaagauaauaacgauuggcucuguuucucucaccauuuccacaauaugcuucuucaugcaaauugccaucuugauaacuacuguaacauugcauuucaagcaauaugaauucaacucccccccaaacaaccaagugaugcugugugaaccaacaauaauagaaagaaacauaacagagauaguguaucugaccaacaccaccauagagaaggaaauaugccccaaaccagcagaauacagaaauuggucaaaaccgcaauguggcauuacaggauuugcaccuuucucuaaggacaauucgauuaggcuuuccgcugguggggacaucugggugacaagagaaccuuaugugucaugcgauccugacaaguguuaucaauuugcccuuggacagggaacaacacuaaacaacgugcauucaaauaacacaguacgugauaggaccccuuaucggacucuauugaugaaugaguuggguguuccuuuucaucuggggaccaagcaagugugcauagcaugguccagcucaaguugucacgauggaaaagcauggcugcauguuuguauaacgggggaugauaaaaaugcaacugcuagcuucauuuacaaugggaggcuuguagauaguguuguuucaugguccaaagaaauucucaggacccaggagucagaaugcguuuguaucaauggaacuuguacaguaguaaugacugauggaagugcuucaggaaaagcugauacuaaaauacuauucauugaggaggggaaaaucguucauacuagcacauugucaggaagugcucagcaugucgaagagugcucuugcuauccucgauauccuggugucagaugugucugcagagacaacuggaaaggcuccaaucggcccaucguagauauaaacauaaaggaucauagcauuguuuccaguuauguguguucaggacuuguuggagacacacccagaaaaaccgacagcuccagcaguagccauuguuuggauccuaacaaugaagaagguggucauggagugaaaggcugggccuuugaugauggaaaugacguguggaugggaagaacaaucaacgagacgucacgcuuaggguaugaaaccuucaaagucauugaaggcugguccaauccuaaguccaaauugcagauaaauaggcaagucauaguugacagaggugauagguccgguuauucugguauuuucucuguugaaggcaaaagcugcaucaaucggugcuuuuauguagaguugauuaggggaagaaaagaggaaacugaagucuuguggaccucaaacaguauuguuguguuuuguggcaccucagguacauauggaacaggcucauggccugauggggcggaccucaaucucaugccuauauaa

SEQ ID NO: 57356 - RNA, 1410 nt, Artificial Sequence; identical to SEQ ID NO: 55364
  derived and/or modified CDS sequence (wt) from neuraminidase__InfluenzaA__AHZ40204

SEQ ID NO: 57357 - RNA, 1410 nt, Artificial Sequence; identical to SEQ ID NO: 55880
  derived and/or modified CDS sequence (wt) from neuraminidase__InfluenzaA__AHZ40216

SEQ ID NO: 57358 - RNA, 1410 nt, Artificial Sequence
  derived and/or modified CDS sequence (wt) from neuraminidase__InfluenzaA__AHZ40228
augaauccaaaucaaaagauaauaacgauuggcucuguuucucucaccauuuccacaauaugcuucuucaugcaaauugccaucuugauaacuacuguaacauugcauuucaagcaauaugaauucaauucccccccaaacaaccaagugaugcugugugaaccaacaauaauagaaagaaacauaacagagauaguguaucuaaccaacaccaccauagagaaggaaauaugccccaaaccagcagaauacagaaauuggucaaagccgcagugugacauuacaggauuugcaccuuuuucuaaggacaauucgauuaggcuuuccgcugguggggacaucugggugacaagagaaccuuaugugucaugcgauccugacaaguguuaucaauuugcucuuggacagggaacaacacuaaacaacgugcauucaaauaacacaguacgugauaggaccccuuaucggacccuauugaugaaugaguuagguguuccuuuucaucuggggaccaagcaagugugcauagcaugguccagcucaaguugucacgauggaaaagcauggcugcauguuuguauaacgggggaugauaaaaaugcaacugcuagcuucauuuacaaugggaggcuuguagauaguguuguuucaugguccaaagaaauccucaggacccaggaaucagaaugcguuuguaucaauggaacuuguacaguaguaaugacugaugggagugcuucaggaaaagcugauacuaaaauacuauucauugaggaggggaaaaucguucauacuagcacauuaucaggaagugcucagcaugucgaggagugcucuugcuauccucgauauccuggugucagaugugucugcagagacaacuggaaaggcuccaauaggccuaucguagauauaaacauaaaggaucauagcauuguuuccagguauguguguucaggacuuguuggagacacacccagaaaaaacgacagcucaagcaguagccauuguuuggauccuaacaaugaagaagguggucauggagugaaaggcugggccuucgaugauggaaaugacguguggaugggaagaacgaucaacgagacgucacguuuaggguaugaaaccuucaaagucauugaaggcugguccaacccuaaguccaaauugcagauaaauaggcaggucauaguugacagaggugauagguccgguuauucugguauuuucucuguugaaggcaaaagcugcaucaaucggugcuuuuauguggaguugauuaggggaagaaaagaggaaacugaagucuuguggaccucaaacaguauuguuguguuuuguggcaccucagguacauauggaacaggcucauggccugauggggcggaccucaaucucaugccuauauaa

SEQ ID NO: 57359 - RNA, 1410 nt, Artificial Sequence
  derived and/or modified CDS sequence (wt) from neuraminidase__InfluenzaA__AHZ40240
augaauccaaaucaaaagauaauaacgauuggcucuguuucucucaccauuuccacaauaugcuuccucaugcaaauugccaucuugauaacuacugcaacauugcauuucaagcaauaugaauucaacucccccccaaacaaccaagugaugcugugugaaccaacaauaauagaaagaaacauaacagagauaguguaucuaaccaacaccaccauagagaaggaaauaugccccaaaccagcagaauacagaaauuggucaaaaccgcaauguggcauuacaggauuugcaccuuucucuaaggacaauucgauuaggcuauccgcugguggggacaucugggugacaagagaaccuuaugugucaugcgauccugacaaguguuaucaauuugcccuuggacagggaacaacacuaaacaacgugcauucaaauaacacaguacgugauaggaccccuuaucggacucuauugaugaaugaguuggguguuccuuuucaucuggggaccaagcaagugugcauagcaugguccagcucaaguugucacgauggaaaagcauggcugcauguuuguauaacgggggaugauaaaaaugcaacugcuagcuuuauuuacaaugggaggcuuguagauaguguuguuucaugguccaaagaaauucucaggacccaggagucagaaugcguuuguaucaauggaacuuguacaguaguaaugacugauggaagugcuucaggaaaagcugauacuaaaauacuauucauugaggaggggaaaaucguucauacuagcacauugucaggaagugcucagcaugucgaagagugcucuugcuauccucgauauccuggugucagaugugucugcagagacaacuggaaaggcuccaaucggcccaucguagauauaaacauaaaggaucguagcauuguuuccaguuauguguguucaggacuuguuggagacacacccagaaaaaacgacagcuccagcaguagccauuguuuggauccuaacaaugaagaagguggucauggagugaaaggcugggccuuugaugauggaaaugacguguggaugggaagaacaaucaacgagacgucacgcuuaggguaugaaacuuucaaagucauugaaggcugguccaacccuaaguccaaauugcagauaaauaggcaggucauaguugacagaggugauagguccgguuauucugguauuuucucuguugaaggcaaaagcugcaucaaucggugcuuuuauguggaguugauuaggggaagaaaagaggaaacugaagucuuguggaccucaaacaguauuguuguguuuuguggcaccucagguacauauggaacaggcucauggccugauggggcggaccucaaucucaugccuauauaa

SEQ ID NO: 57360 - RNA, 1410 nt, Artificial Sequence
  derived and/or modified CDS sequence (wt) from neuraminidase__InfluenzaA__AHZ40252
augaauccaaaucaaaagauaauaacgauuggcucuguuucucucaccauuuccacaauaugcuucuucaugcaaauugccaucuugauaacuacuguaacauugcauuucaagcaauaugaauucaacucccccccaaacaaccaagugaugcugugugaaccaacaauaauagaaagaaacauaacagagauaguguaucugaccaacaccaccauagagaaggaaauaugccccaaaccagcagaauacagaaauuggucaaaaccgcaauguggcauuacaggauuugcaccuuucucuaaggacaauucgauuaggcuuuccgcugguggggacaucugggugacaagagaaccuuaugugucaugcgauccugacaaguguuaucaauuugcccuuggacagggaacaacacuaaacaacgugcauucaaauaacacaguacgugauaggaccccuuaucggacucuauugaugaaugaguuggguguuccuuuucaucuggggaccaagcaagugugcauagcaugguccagcucaaguugucacgauggaaaagcauggcugcauguuuguauaacgggggaggauaaaaaugcaacugcuagcuucauuuacaaugggaggcuuguagauaguauuguuucaugguccaaagaaauucucaggacccaggagucagaaugcguuuguaucaauggaacuuguacaguaguaaugacugauggaagugcuucaggaaaagcugauacuaaaauacuauucauugaggaggggaaaaucguucauacuagcacauugucaggaagugcucagcaugucgaagagugcucuugcuauccucgauauccuggugucagaugugucugcagagacaacuggaaaggcuccaaucggcccaucguagauauaaacauaaaggaucauagcauuguuuccaguuauguguguucaggacuuguuggagacacacccagaaaaaacgacagcuccagcaguagccauuguuuggauccuaacaaugaagaagguggucauggagugaaaggcugggccuuugaugauggaaaugacguguggaugggaagaacaaucaacgagacgucacgcuuaggguaugaaaccuucaaagucauugaaggcugguccaacccuaaguccaaauugcagauaaauaggcaagucauaguugacagaggugauagguccgguuauucugguauuuucucuguugaaggcaaaagcugcaucaaucggugcuuuuauguggaguugauuaggggaagaaaagaggaaacugaagucuuguggaccucaaacaguauuguuguguuuuguggcaccucagguacauauggaacaggcucauggccugauggggcggaccucaaucucaugccuauauaa

SEQ ID NO: 57361 - RNA, 1410 nt, Artificial Sequence
  derived and/or modified CDS sequence (wt) from neuraminidase__InfluenzaA__AHZ40264
augaauccaaaucaaaagauaauaacgauuggcucuguuucucucaccauuuccacaauaugcuucuucaugcaaauugccaucuugauaacuacuguaacauugcauuucaagcaauaugaauucaacccccccccaaacaaccaagugaugcugugugaaccaacaauaauagaaagaaacauaacagagauaguguauuugaccaacaccaccauagagaaggaaauaugccccaaaccagcagaauacagaaauuggucaaaaccgcaauguggcauuacaggauuugcaccuuucucuaaggacaauucgauuaggcuuuccgcugguggggacaucugggugacaagggaaccuuaugugucaugcgauccugacaaguguuaucaauuugcccuuggacagggaacaacacuaaacaacgugcauucaaauaacacaguacgugauaggaccccuuaucggacucuauugaugaaugaguuggguguuccuuuucaucuggggaccaagcaagugugcauagcaugguccagcucaaguugucacgauggaaaagcauggcugcauguuuguauaacgggggaugauaaaaaugcaacugcuagcuucauuuacaaugggaggcuuguagauaguguuguuucaugguccaaagaaauucucaggacccaggagucagaaugcguuuguaucaauggaacuuguacaguaguaaugacugauggaagugcuucaggaaaagcugauacuaaaauacuauucauugaggaggggaaaaucguucauacuaguacauugucaggaagugcucagcaugucgaagagugcucuugcuauccucgauauccuggugucagaugugucugcagagacaacuggaaaggcuccaaucggcccaucguagauauaaacauaaaggaucauagcauuguuuccaguuauguguguucaggacuuguuggagacacacccagaaagaacgacagcuccagcaguagccauuguuuggauccuaacaaugaagaagguggucauggagugaaaggcugggccuuugaugauggaaaugacguauggaugggaagaacaaucaacgagacgucacgcuuaggguaugaaaccuucaaagucauugaaggcugguccaacccuaaguccaaauugcagauaaauaggcaagucauaguugacagaggugauagguccgguuauucugguauuuucucuguugaaggcaaaagcugcaucaaucggugcuuuuauguggaguugauuaggggaagaaaagaggaaacugaagucuuguggaccucaaacaguauuguuguguuuuguggcaccucagguacauauggaacaggcucauggccugauggggcggaccucaaucucaugccuauauaa

SEQ ID NO: 57362 - RNA, 1410 nt, Artificial Sequence
  derived and/or modified CDS sequence (wt) from neuraminidase__InfluenzaA__AHZ40276
augaauccaaaucaaaagauaauaacgauuggcucuguuucucucaccauuuccacaauaugcuucuucaugcaaauugccaucuugauaacuacuguaacauugcauuucaagcaauaugaauucaacucccccccaaacaaccaagugaugcugugugaaccaacaauaauagaaagaaacauaacagagauaguguaucuaaccaacaccaccauagagaaggaaauaugccccaaaccagcagaauacagaaauuggucaaaaccgcaauguggcauuacaggauuugcaccuuucucuaaggacaauucgauuaggcuauccgcugguggggacaucugggugacaagagaaccuuaugugucaugcgauccugacaaguguuaucaauuugcccuuggacagggaacaacacuaaacaacgugcauucaaauaacacaguacgugauaggaccccuuaucggacucuauugaugaaugaguuggguguuccuuuucaucuggggaccaagcaagugugcauagcaugguccagcucaaguugucacgauggaaaagcauggcugcauguuuguauaacgggggaugauaaaaaugcaacugcuagcuuuauuuacaaugggaggcuuguagauaguguuguuucaugguccaaagaaauucucagaacccaggagucagaauguguuuguaucaauggaacuuguacaguaguaaugacugauggaagugcuucagggaaagcugauacuaaaauacuauucauugaggaggggaaaaucguucauacuagcacauugucaggaagugcucagcaugucgaagagugcucuugcuauccucgauauccuggugucagaugugucugcagagacaacuggaaaggcuccaaucggcccaucguagauauaaacauaaaggaucauagcauuguuuccaguuauguguguucaggacuuguuggagacacacccagaaaaaacgacagcuccagcaguagccauuguuuggauccuaacaaugaagaagguggucauggagugaaaggcugggccuuugaugauggaaaugacguguggaugggaagaacaaucaacgagacgucacgcuuaggguaugaaaccuucaaagucauugaaggcugguccaacccuaaguccaaauugcagauaaauaggcaggucauaguugacagaggugauagguccgguuauucugguauuuucucuguugaaggcaaaagcugcaucaaucggugcuuuuauguggaguugauuaggggaagaaaagaggaaacugaagucuuguggaccucaaacaguauuguuguguuuuguggcaccucagguacauauggaacaggcucauggccugauggggcggaccucaaucucaugccuauauaa

SEQ ID NO: 57363 - RNA, 1410 nt, Artificial Sequence
  derived and/or modified CDS sequence (wt) from neuraminidase__InfluenzaA__AHZ40288
augaacccaaaucaaaagauaauaacgauuggcucuguuucucucaccauuuccacaauaugcuucuucaugcaaauugccaucuugauaacuacuguaacauugcauuucaagcaauaugaauucaacucccccccaaacaaccaagugaugcugugugaaccaacaauaauagaaagaaacauaacagagauaguguaucuaaccaacaccaccauagagaaggaaauaugccccaaacuagcagaauacagaaauuggucaaagccgcaaugugacauuacaggauuugcaccuuuuucuaaggacaauucgauuaggcuuuccgcugguggggacaucugggugacaagagaaccuuaugugucaugcgauccugacaaguguuaucaauuugcccuuggacagggaacaacacuaaacaacgugcauucaaauaacacaguacgugauaggacuccuuaucggacccuauugaugaaugaguuagguguuccuuuucaucuggggaccaagcaggugugcauagcaugguccagcucaaguugucacgauggaaaagcauggcugcauguuuguauaacgggggaugauaaaaaugcaacugcuagcuucauuuacaaugggaggcuuguagauaguguuauuucaugguccaaagacauccucaggacccaggagucagaaugcguuuguaucaauggaacuugugcgguaguaaugacugaugggagugcuucaggaaaagcugauacuaaaauacuauucauugaggaggggaaaaucguucauacuagcacauugucaggaagugcucagcaugucgaggagugcucuugcuauccucgauauccuggugucagaugugucugcagagacaacuggaaaggcuccaauaggcccaucguagauauaaacauaaaggaucauagcauuguuuccaguuauguguguucaggacuuguuggagacacacccagaaaaaacgacagcuccagcaguggccauuguuuggauccuaacaaugaagaagguggucauggaguaaaaggcugggccuuugaugauggaaaugacguguggaugggaagaacgaucaacgagacgucacgcuuaggguaugaaaccuucaaagucauugaaggcugguccaacccgaaguccaaauugcagauaaauaggcaagucauaguugacagagguaauagguccgguuauucugguauuuucucuguugaaggcaaaaacugcaucaaucggugcuuuuauguggaguugauuaggggaaggaaagaggaaacugaagucuuguggaccucaaacaguauuguuguguuuuguggcaccucagguacauauggaacaggcucauggccugauggggcggaccucaaucucaugccuauauaa

SEQ ID NO: 57364 - RNA, 1410 nt, Artificial Sequence
  derived and/or modified CDS sequence (wt) from neuraminidase__InfluenzaA__AHZ40312
augaauccaaaucaaaagauaauaacgauuggcucuguuucucucaccauuuccacaauaugcuucuucaugcaaauugccaucuugauaacuacuguaacauugcauuucaagcaauaugaauucaacuacccuccaaacaaccaagugaugcugugugaaccaacaauaauagaaagaaacauaacagagauaguguaucugaccaacaccaccauagagaaggaaauaugccccaaaccagcagaauacagaaauuggucaaaaccgcaauguggcauuacaggauuugcaccuuucucuaaggacaauucgauuaggcuuuccgcugguggggacaucugggugacaagagaaccuuaugugucaugcgauccugacaaguguuaucaauuugcccuuggacagggaacaacccuaaacaacgugcauucaaauaacacaguacgugauaggaccccuuaucggacucuauugaugaaugaguuggguguuccuuuucaucuggggaccaagcaagugugcauagcaugguccagcucaaguugucacgauggaaaagcauggcugcauguuuguauaacgggggaugauaaaaaugcaacugcuagcuucauuuacaaugggaggcuuguagauaguguuguuucaugguccaaagaaauucucaggacccaggagucagaaugcguuuguaucaauggaacuuguacaguaguaaugacugauggaagugcuucaggaaaagcugauaccaaaauacuauucauugaggaggggaaaaucguucauacuagcacauugucaggaagugcucagcaugucgaagagugcucuugcuauccucgauauccuggugucagaugugucugcagagacaacuggaaaggcuccaauaggcccaucguagauauaaacauaaaggaucauagcguuguuuccaguuauguguguucaggacuuguuggagacacacccagaaaaaacgacagcuccagcaguagccauuguuuggauccuaacaaugaagaagguggucauggagugaaaggcugggccuuugaugauggaaaugacguguggaugggaagaacaaucaaugagacgucacgcuuaggguaugaaaccuucaaagucauugaaggcugguccaacccuaaguccaaauugcagauaaauaggcaagucauaguugacagaggugauagguccgguuauucugguauuuucucuguugaaggcaaaagcugcaucaaucggugcuuuuauguggaguugauuaggggaagaaaagaggaaacugaagucuuguggaccucaaacaguauuguuguguuuuguggcaccucagguacauauggaacaggcucauggccugauggggcggaccucaaucucaugccuauauaa

SEQ ID NO: 57365 - RNA, 1410 nt, Artificial Sequence
  derived and/or modified CDS sequence (wt) from neuraminidase__InfluenzaA__AHZ40324
augaauccaaaucaaaagauaauaacgauuggcucuguuucucucaccauuuccacaauaugcuucuucaugcaaauugccaucuugauaacuacuguaacauugcauuucaagcaauaugaauucaacucccccccaaacaaccaagugaugcugugugaaccaacaauaauagaaagaaacauaacagagauaguguaucugaccaacaccaccauagagaaggaaauaugccccaaaccagcagaauacagaaauuggucaaaaccgcaauguggcauuacaggauuugcaccuuucucuaaggacaauucgauuaggcuuuccgcugguggggacaucugggugacaagagaaccuuaugugucaugcgauccugacaaguguuaucaauuugcccuuggacagggaacaacacuaaacaacgugcauucaaauaacacaguacgugauaggaccccuuaucggacucuauugaugaaugaguuggguguuccuuuucaucuggggaccaagcaagugugcauagcaugguccagcucaaguugucacgauggaaaagcauggcugcauguuuguauaacgggggaugauaaaaaugcaacugcuagcuucauuuacaaugggaggcuuguagauaguguuguuucaugguccaaagaaauucucaggacccaggagucagaaugcguuuguaucaauggaacuuguacaguaguaaugacugauggaagugcuucaggaaaagcugauacuaaaauacuauucauugaggaggggaaaaucguucauacuagcacauugucaggaagugcucagcaugucgaagagugcucuugcuauccucgauauccuggugucagaugugucugcagagacaacuggaaaggcuccaaucggcccaucguagauauaaacauaaaggaucauagcauuguuuccaguuauguguguucaggacuuguuggagacacacccagaaaaaacgacagcuccagcaguagccauuguuuggauccuaacaaugaagaagguggucauggagugaaaggcugggccuuugaugauggaaaugacguguggaugggaagaacaaucaacgagacgucacgcuuaggguaugaaaccuucaaagucauugaaggcugguccaauccuaaauccaaauugcagauaaauaggcaagucauaguugacagaggugauagguccgguuauucugguauuuucucuguugaaggcaaaagcugcaucaaucggugcuuuuauguagaguugauuaggggaagaaaagaggaaacugaagucuuguggaccucaaacaguauuguuguguuuuguggcaccucagguacauauggaacaggcucauggccugauggggcggaccucaaucucaugccuauauaa

SEQ ID NO: 57366 - RNA, 1410 nt, Artificial Sequence
  derived and/or modified CDS sequence (wt) from neuraminidase__InfluenzaA__AHZ40336
augaauccaaaucaaaagauaauaacgauuggcucuguuucucucaccauuuccacaauaugcuucuucaugcaaauugccaucuugauaacuacuguaacauugcauuucaagcaauaugaauucaacucccccccaaacaaccaagugaugcugugugaaccaacaauaauagaaagaaacauaacagagauaguguaucugaccaacaccaccauagagaaggaaauaugccccaaaccagcagaauacagaaauuggucaaaaccgcaauguggcauuacaggauuugcaccuuucucuaaggacaauucgauuaggcuuuccgcugguggggacaucugggugacaagagaaccuuaugugucaugcgauccugacaaguguuaucaauuugcccuuggacagggaacaacacuaaacaacgugcauucaaauaacacaguacgugauaggaccccuuaucggacucuauugaugaaugaguuggguguuccuuuucaucuggggaccaagcaagugugcauagcauggucuagcucaaguugucacgauggaaaagcauggcugcauguuuguauaacgggggaugauaaaaaugcaacugcuagcuucauuuacaaugggaggcuuguagauaguguuguuucaugguccaaagaaauucucaggacccaggagucagaaugcguuuguaucaauggaacuuguacaguaguaaugacugauggaagugcuucaggaaaagcugauacuaaaauacuauucauugaggaggggaaaaucguucauacuagcacauugucaggaagugcucagcaugucgaagagugcucuugcuauccucgauauccuggugucagaugugucugcagagacaacuggaaaggcuccaaucggcccaucguagauauaaacauaaaggaucauagcauuguuuccaguuauguguguucaggacuuguuggagacacacccagaaaaaacgacagcuccagcaguagccauuguuuggauccuaacaaugaagaagguggucauggagugaaaggcugggccuuugaugauggaaaugacguguggaugggaagaacaaucaacgagacgucacgcuuaggguaugaaaccuucaaagucauugaaggcugguccaauccuaaguccaaauugcagauaaauaggcaagucauaguugacagaggugauagguccgguuauucugguauuuucucuguugaaggcaaaagcugcaucaaucggugcuuuuauguagaguugauuaggggaagaaaagaggaaacugaagucuuguggaccucaaacaguauuguuguguuuuguggcaccucagguacauauggaacaggcucauggccugauggggcggaccucaaucucaugccuauauaa

SEQ ID NO: 57367 - RNA, 1410 nt, Artificial Sequence
  derived and/or modified CDS sequence (wt) from neuraminidase__InfluenzaA__AHZ40348
augaauccaaaucaaaagauaauaacgauuggcucuguuucucucaccauuuccacaauaugcuucuucaugcaaauugccaucuugauaacuacuguaacauugcauuucaagcaauaugaauucaacucccccccaaacaaccaagugaugcugugugaaccaacaauaauagaaagaaacauaacagagauaguguaucugaccaacaccaccauagagaaggaaauaugccccaaaccagcagaauacagaaauuggucaaaaccgcaauguggcauuacaggauuugcaccuuucucuaaggacaauucgauuaggcuuuccgcugguggggacaucugggugacaagagaaccuuaugugucaugcgauccugacaaguguuaucaauuugcccuuggacagggaacaacacuaaacaacgugcauucaaauaacacaguacgugauaggaccccuuaucggacucuauugaugaaugaguuggguguuccuuuucaucuggggaccaagcaagugugcauagcaugguccagcucaaguugucacgauggaaaagcauggcugcauguuuguauaacgggggaugauaaaaaugcaacugcuagcuucauuuacaaugggaggcuuguggauaguguuguuucaugguccaaagaaauucucaggacccaggagucagaaugcguuuguaucaauggaacuuguacaguaguaaugacugauggaagugcuucaggaaaagcugauacuaaaauacuauucauugaggaggggaaaaucguucauacuagcacauugucaggaagugcucagcaugucgaagagugcucuugcuauccucgauauccuggugucagaugugucugcagagacaacuggaaaggcuccaaucggcccaucguagauauaaacauaaaggaucauagcauuguuuccaguuauguguguucaggacuuguuggagacacacccagaaaaaacgacagcuccagcaguagccauuguuuggauccuaacaaugaagaagguggucauggagugaaaggcugggccuuugaugauggaaaugacguguggaugggaagaacaaucaacgagacgucacgcuuaggguuugaaaccuucaaagucauugaaggcugguccaauccuaaguccaaauugcagauaaauaggcaagucauaguugacagaggugauagguccgguuauucugguauuuucucuguugaaggcaaaagcugcaucaaucggugcuuuuauguagaguugauuaggggaagaaaagaggaaacugaagucuuguggaccucaaacaguauuguuguguuuuguggcaccucagguacauauggaacaggcucauggccugauggggcggaccucaaucucaugccuauauaa

SEQ ID NO: 57368 - RNA, 1410 nt, Artificial Sequence; identical to SEQ ID NO: 55368
  derived and/or modified CDS sequence (wt) from neuraminidase__InfluenzaA__AHZ40360

SEQ ID NO: 57369 - RNA, 1410 nt, Artificial Sequence
  derived and/or modified CDS sequence (wt) from neuraminidase__InfluenzaA__AHZ40372
augaauccaaaucaaaagauaauaacgauuggcucuguuucucucaccauuuccacaauaugcuucuuuaugcaaauugccaucuugauaacuacuguaacauugcauuucaagcaauaugaauucaacucucccccaaacaaccaagugaugcugugugaaccaacaauaauagaaagaaacauaacagagauaguguaucugaccaacaccaccauagagaaggaaauaugccccaaaccagcagaauacagaaauuggucaaaaccgcaauguggcauuacaggauuugcaccuuucucuaaggacaauucgauuaggcuuuccgcugguggggacaucugggugacaagagaaccuuaugugucaugcgauccugacaaguguuaucaauuugcccuuggacagggaacaacacuaaacaacgugcauucaaauaacacaguacgugauaggaccccuuaucggacucuauugaugaaugaguuggguguuccuuuucaucuggggaccaagcaagugugcauagcaugguccagcucaaguugucacgauggaaaagcauggcugcauguuuguauaacgggggaugauaaaaaugcaacugcuagcuucauuuacaaugggaggcuuguagauaguguuguuucaugguccaaagaaauucucaggacccaggagucagaaugcguuuguaucaauggaacuuguacaguaguaaugacugauggaagugcuucaggaaaagcugauacuaaaauacuauucauugaggaggggaaaaucguucauacuagcacauugucaggaagugcucagcaugucgaagagugcucuugcuauccucgauauccuggugucagaugugucugcagagacaacuggaaaggcuccaaucggcccaucguagauauaaacauaaaggaucauagcauuguuuccaguuauguguguucaggacuuguuggagacacacccagaaaaaacgacagcuccagcaguagccauuguuuggauccuaacaacgaagaaggugaucauggagugaaaggcugggccuuugaugauggaaaugacguguggaugggaagaacaaucaacgagacgucacgcuuaggguaugaaaccuucaaagucauugaaggcugguccaacccuaaguccaaauugcagauaaauaggcaagucauaguugacagaggugauagguccgguuauucugguauuuucucuguugaaggcaaaagcugcaucaaucggugcuuuuauguggaguugauuaggggaagaaaagaggaaacugaagucuuguggaccucaaacaguauuguuguguuuuguggcaccuccgguacauauggaacaggcucauggccugauggggcggaccucaaucucaugccuauauaa

SEQ ID NO: 57370 - RNA, 1410 nt, Artificial Sequence
  derived and/or modified CDS sequence (wt) from neuraminidase__InfluenzaA__AHZ40384
augaauccaaaucaaaagauaauaacgauuggcucuguuucucucaccauuuccacaauaugcuucuucaugcaaauugccaucuugauaacuacuguaacauugcauuucaaacaauaugaauucaacucccccccaaacaaccaagugaugcugugugaaccaacaauaauagaaagaaacauaacagagauaguguaucugaccaacaccaccauagagaaggaaauaugccccaaaccagcagaauacagaaauuggucaaaaccgcaauguggcauuacaggauuugcaccuuuuucuaaggacaauucgauuaggcuuuccgcugguggggacaucugggugacaagagaaccuuaugugucaugcgauccugacaaguguuaucaauuugcccuuggacagggaacaacacuaaacaacgugcauucaaauaacacaguacgcgauaggaccccuuaucggacucuauugaugaaugaguuggguguuccuuuucaucuggggaccaagcaagugugcauagcaugguccagcucaaguugucacgauggaaaagcauggcugcauguuuguauaacgggggaugauaaaaaugcaacugcuagcuucauuuacaaugggaggcuuguagauaguguuguuucaugguccaaagaaauucucaggacccaggagucagaaugcguuuguaucaauggaacuuguacaguaguaaugacugauggaagugcuucaggaaaagcugauacuaaaauacuauucauugaggaggggaaaaucguucauacuagcacauugucaggaagugcucagcaugucgaagagugcucuugcuauccucgauauccuggugucagaugugucugcagagacaacuggaaaggcuccaaucggcccaucguagauauaaacauaaaggaucauagcauuguuuccaguuauguguguucaggacuuguuggagacacacccagaaaaaccgacagcuccagcaguagccauuguuuggauccuaacaaugaagaagguggucauggagugaaaggcugggccuuugaugauggaaaugacguguggaugggaagaacaaucaacgagacgucacgcuuaggguaugaaaccuucaaagucauugaaggcugguccaacccuaaguccaaauugcagauaaauaggcaagucauaguugacagaggugauagguccgguuauucugguauuuucucuguugaaggcaaaagcugcaucaaucggugcuuuuauguggaguugauuaggggaagaaaagaggaaacugaagucuuguggaccucaaacaguauuguuguguuuuguggcaccucagguacauauggaacaggcucauggccugauggggcggaccucaaucucaugccuauauaa

SEQ ID NO: 57371 - RNA, 1410 nt, Artificial Sequence
  derived and/or modified CDS sequence (wt) from neuraminidase__InfluenzaA__AHZ40396
augaauccaaaucaaaagauaauaacgauuggcucuguuucucucaccauuuccacaauaugcuucuucaugcaaauugccaucuugauaacuacuguaacauugcauuucaagcaauaugaauucaacucccccccaaacaaccaagugaugcugugugaaccgacaauaauagaaagaaacauaacagagauaguguaucugaccaacaccaccauagagaaggaaauaugccccaaaccagcagaauacagaaauuggucaaaaccgcaauguggcauuacaggauuugcaccuuucucuaaggacaauucgauuaggcuuuccgcugguggggacaucugggugacaagagaaccuuaugugucaugcgauccugacaaguguuaucaauuugcccuuggacagggaacaacacuaaacaacgugcauucaaauaacacaguacgugauaggaccccuuaucggacucuguugaugaaugaguuggguguuccuuuucaucuggggaccaagcaagugugcauagcaugguccagcucaaguugucacgauggaaaagcauggcugcauguuuguauaacgggggaugauaaaaaugcaacugcuagcuucauuuacaaugggaggcuuguagauaguguuguuucaugguccaaagaaauucucaggacccaggagucagaaugcguuuguaucaauggaacuuguacaguaguaaugacugauggaagugcuucaggaaaagcugauacuaaaauacuauucauugaggaggggaaaaucguucauacuagcacauugucaggaagugcucagcaugucgaagagugcucuugcuauccucgauauccuggugucagaugugucugcagagacaacuggaaaggcuccaaucggcccaucguagauauaaacauaaaggaucauagcauuguuuccaguuauguguguucaggacuuguuggagacacacccagaaaaaacgacagcuccagcaguagccauuguuuggauccuaacaaugaagaagguggucauggagugaaaggcugggccuuugaugauggaaaugacguguggaugggaagaacaaucaacgagacgucacgcuuaggguaugaaaccuucaaagucauugaaggcugguccaauccuaaguccaaauugcagauaaauaggcaagucauaguugacagaggugauagguccgguuauucugguauuuucucuguugaaggcaaaagcugcaucaaucggugcuuuuauguagaguugauuaggggaagaaaagaggaaacugaagucuuguggaccucaaacaguauuguuguguuuuguggcaccucagguacauauggaacaggcucauggccugauggggcggaccucaaucucaugccuauauaa

SEQ ID NO: 57372 - RNA, 1410 nt, Artificial Sequence; identical to SEQ ID NO: 55364
  derived and/or modified CDS sequence (wt) from neuraminidase__InfluenzaA__AHZ40408

SEQ ID NO: 57373 - RNA, 1410 nt, Artificial Sequence; identical to SEQ ID NO: 55386
  derived and/or modified CDS sequence (wt) from neuraminidase__InfluenzaA__AHZ40420

SEQ ID NO: 57374 - RNA, 1410 nt, Artificial Sequence
  derived and/or modified CDS sequence (wt) from neuraminidase__InfluenzaA__AHZ40432
augaauccaaaucaaaagauaauaacgauuggcucuguuucucucaccauuuccacaauaugcuucuucaugcaaauugccaucuugauaacuacuguaacauugcauuucaagcaauaugaauucaacucccccccaaacaaccaagugaugcugugugaaccaacaauaauagaaagaaacauaacagagauaguguaucuaaccaacaccaccauagagaaggaaauaugccccaaaccagcagaauacagaaauuggucaaagccgcagugugacauuacaggauuugcaccuuuuucuaaggacaauucgauuaggcuuuccgcugguggggacaucugggugacaagagaaccuuaugugucaugcgauccugacaaguguuaucaauuugcucuuggacagggaacaacacuaaacaacgugcauucaaauaacacaguacgugauaggaccccuuaucggacccuauugaugaaugaguuagguguuccuuuucaucuggggaccaagcaagugugcauagcaugguccagcucaaguugucacgauggaaaagcauggcugcauguuuguauaacgggggaugauaaaaaugcaacugcuaguuucauuuacaaugggaggcuuguagauaguguuguuucaugguccaaagaaauccucaggacccaggagucagaaugcguuuguaucaauggaacuuguacaguaguaaugacugaugggagugcuucaggaaaagcugauacuaaaauacuauucauugaggaggggaaaaucguucauacuagcacauugucaggaagugcucagcaugucgaggagugcucuugcuauccucgauauccuggugucagaugugucugcagagacaacuggaaaggcuccaauaggccuaucauagauauaaacauaaaggaucauagcauuguuuccagguauguguguucaggacuuguuggagacacacccagaaaaaacgacagcuccagcaguagccauuguuuggauccuaacaaugaagaagguggucauggggugaaaggcugggccuucgaugauggaaaugacguguggaugggaagaacgaucaacgagacgucacguuuaggguaugaaaccuucaaagucauugaaggcugguccaacccuaaguccaaauugcagauaaauaggcaggucauaguugacagaggugauagguccgguuauucugguauuuucucuguugaaggcaaaagcugcaucaaucggugcuuuuauguggaguugauuaggggaagaaaagaggaaacugaagucuuguggaccucaaacaguauuguuguguuuuguggcaccucagguacauauggaacaggcucauggccugauggggcggaccucaaucucaugccuauauaa

SEQ ID NO: 57375 - RNA, 1410 nt, Artificial Sequence; identical to SEQ ID NO: 55364
  derived and/or modified CDS sequence (wt) from neuraminidase__InfluenzaA__AHZ40444

SEQ ID NO: 57376 - RNA, 1410 nt, Artificial Sequence
  derived and/or modified CDS sequence (wt) from neuraminidase__InfluenzaA__AHZ40456
augaauccaaaucaaaagauaauaacgauuggcucuguuucucucaccauuuccacaauaugcuucuucaugcaaauugccaucuugauaacuacuguaacauugcauuucaagcaauaugaauucaacucccccccaaacaaccaagugaugcugugugaaccaacaauaauagaaagaaacauaacagagauaguguaucugaccaacaccaccauagagaaggaaauaugucccaaaccagcagaauacagaaauuggucaaagccgcaaugugacauuacaggauuugcaccuuuuucuaaggacaauucgauuaggcuuuccgcugguggggacaucugggugacaagagaaccuuaugugucaugugauccugacaaguguuaucaauuugcccuuggacagggaacaacacuaaacaacaugcauucaaauaacacaguacgugauaggaccccuuaucggacccuauugaugaaugaguuggguguuccuuuucaucuggggaccaagcaagugugcauagcaugguccagcucaagcugucacgauggaaaagcauggcugcauguuuguauaacgggggaugauaaaaaugcaacugcuagcuucauuuacaauggaaggcuuguagauaguguuguuucaugguccaaagaaauccucaggacccaggagucagaaugcguuugcaucaauggaacuuguacaguaguaaugacugaugggagugcuucgggaaaagcugauacuaaaauacuauucauugaggaggggaaaaucguccauacuagcacauugucaggaagugcucagcaugucgaggagugcucuugcuauccucgauacccuggugucagaugugucugcagagacaacuggaaaggcuccaauaggcccaucguagauauaaacauaaaggaucauagcauuguuuccaguuauguguguucagggcuuguuggagacacacccagaaaaaacgacagcuccagcaguagccauuguuuggauccuaacaaugaagaagguggucauggagugaaaggcugggccuuugaugauggaaaugacguguggaugggaagaacgaucaacgagacgucacguuuaggguaugaaaccuucaaagucauugaaggaugguccaacccuaaguccaaauugcagauaaauaggcaagucauaguugacagaggcgauagguccgguuauucugguauuuucucuguugaaggcaaaagcugcaucaaucggugcuuuuauguggaguugaucaggggaagaaaagaggaaacugaagucuuguggaccucaaacaguauuguuguguuuuguggcaccucagguacauauggaacaggcucauggccugauggggcggaccucaaucucaugccuauauaa

SEQ ID NO: 57377 - RNA, 1410 nt, Artificial Sequence
  derived and/or modified CDS sequence (wt) from neuraminidase__InfluenzaA__AHZ40468
augaauccaaaucaaaagauaauaacgauuggcucuguuucucucaccauuuccacaauaugcuucuucaugcaaauugccaucuugauaacuacuguaacauugcauuucaagcaauaugaauucaacucccccccaaacaaccaagugaugcugugugaaccaacaauaauugaaagaaacauaacagagauaguguauuugaccaacaccaccauagagaaggaaauaugccccaaaccagcagaauacagaaauuggucaaaaccgcaauguggcauuacaggauuugcaccuuucucuaaggacaauucgauuaggcuuuccgcugguggggacaucugggugacaagagaaccuuaugugucaugcgauccugacaaguguuaucaauuugcccuuggacagggaacaacacuaaacaacgugcauucaaauaacacaguacgugauaggaccccuuaucggacucuauugaugaaugaguuggguguuccuuuucaucuggggaccaagcaagugugcauagcaugguccagcucaaguugucacgauggaaaagcauggcugcauguuuguauaacggggaaugauaaaaaugcaacugcuagcuucauuuacaauggaaggcuuguagauaguguuguuucaugguccaaagaaauucucaggacccaggagucagaaugcguuuguaucaauggaacuuguacaguaguaaugacugauggaagugcuucaggaaaagcugauacuaaaauacuauucauugaggaggggaaaaucguucauacuagcacauugucaggaagugcucagcaugucgaagagugcucuugcuauccucgauauccuggugucagaugugucugcagagacaacuggaaaggcuccaaucggcccaucguagauauaaacauaaaggaucauagcauuguuuccaguuauguguguucaggacuuguuggagacacacccagaaaaaacgacagcuccagcaguagccauuguuuggauccuaacaaugaagaagguggucauggagugaaaggcugggccuuugaugauggaaaugacguguggaugggaagaacaaucaacgagacgucacgcuuaggguaugaaaccuucaaggucauugaaggcugguccaacccuaaguccaaauugcagauaaauaggcaagucauaguugacagaggugauagguccgguuauucugguauuuucucuguugaaggcaaaagcugcaucaaucggugcuuuuauguggaguugauuaggggaagaaaagaggaaacugaagucuuguggaccucaaacaguauuguuguguuuuguggcaccucagguacauauggaacaggcucauggccugauggggcggaccucaaucucaugccuauauaa

SEQ ID NO: 57378 - RNA, 1410 nt, Artificial Sequence
  derived and/or modified CDS sequence (wt) from neuraminidase__InfluenzaA__AHZ40480
augaacccaaaucaaaagauaauaacgauuggcucuguuucucucaccauuuccacaauaugcuucuucaugcaaauugccaucuugauaacuacuguaacauugcauuucaagcaauaugaauucaacucccccccaaacaaccaagugaugcugugugaaccaacaauaauagaaagaaacauaacagagauaguguaucuaaccaacaccaccauagagaaggaaauaugccccaaacuagcagaauacagaaauuggucaaagccgcaaugugacauuacaggauuugcaccuuuuucuaaggacaauucgauuaggcuuuccgcugguggggacaucugggugacaagagaaccuuaugugucaugcgauccugacaaguguuaucaauuugcccuuggacagggaacaacauuaaacaacgugcauucaaauaacacaguacgugauaggacuccuuaucggacccuauugaugaaugaguuagguguuccuuuucaucuggggaccaagcaggugugcauagcaugguccagcucaaguugucacgauggaaaagcauggcugcauguuuguauaacgggggaugauaaaaaugcaacugcuagcuucauuuacaaugggaggcuuguagauaguguuguuucaugguccaaagacauccucaggacccaggagucagaaugcguuuguaucaauggaacuugugcgguaguaaugacugaugggagugcuucaggaaaagcugauacuaaaauacuauucauugaggaggggaaaaucguucauacuagcacauugucaggaagugcucagcaugucgaggagugcucuugcuauccucgauauccuggugucagaugugucugcagagacaacuggaaaggcuccaauaggcccaucguagauauaaacauaaaggaucauagcauuguuuccaguuauguguguucaggacuuguuggagacacacccagaaaaaacgacagcuccagcaguggccauuguuuggauccuaacaaugaagaagguggucauggaguaaaaggcugggccuuugaugauggaaaugacguguggaugggaagaacgaucaacgagacgucacgcuuaggguaugaaaccuucaaagucauugaaggcugguccaacccgaaguccaaauugcagauaaauaggcaagucauaguugacagagguaauagguccgguuauuccgguauuuucucuguugaaggcaaaaacugcaucaaucggugcuuuuauguggaguugauuaggggaaggaaagaggaaacugaagucuuguggaccucaaacaguauuguuguguuuuguggcaccucagguacauauggaacaggcucauggccugauggggcggaccucaaucucaugccuauauaa

SEQ ID NO: 57379 - RNA, 1410 nt, Artificial Sequence
  derived and/or modified CDS sequence (wt) from neuraminidase__InfluenzaA__AHZ40492
augaauccaaaccaaaagauaauaaccauugguucggucuguaugacaauuggaauggcuaacuuaauauuacaaauuggaaacauaaucucaauauggauuagccacucaauucaaguugggaaucaaagucagauugaaacaugcaaucaaagcgucauuacuuaugaaaacaacacuuggguaaaucagacauauguuaacaucagcaacaccaacuuugcugcugggcagucagugguuuccgugaaauuagcgggcaauuccucucucugcccuguuaguggaugggcuauauacaguaaagacaacaguguaagaaucgguuccaagggggauguguuugucauaagggaaccauucauaucaugcucccccuuggaaugcagaaccuucuucuugacucaaggggccuugcuaaaugacaaacauuccaauggaaccauuaaagacaggagcccauaucgaacccuaaugagcuguccuauuggugaaguucccucuccauacaacucaagauuugagucagucgcuuggucagcaagugcuugucaugauggcaucaauuggcuaacaauuggaauuucuggcccagacaguggggcaguggcuguguuaaaguacaacggcauaauaacagacacuaucaagaguuggagaaacaauauauugagaacacaagagucugaaugugcauguguaaaugguucuugcuuuaccauaaugaccgauggaccaagugauggacaggccucauacaagaucuucagaauagaaaagggaaagauagucaaaucagucgaaaugaaugccccuaauuaucacuaugaggaaugcuccuguuauccugauucuagugaaaucacaugugugugcagggauaacuggcauggcucgaaucgaccgugggugucuuucaaccagaaucuggaauaucagauaggauacauaugcagugggauuuucggagacaauccacgcccuaaugauaagacaggcaguugugguccaguaucgucuaauggagcaaauggaguaaaaggauuuucauucaaauacggcaaugguguuuggauagggagaacuaaaagcauuaguucaagaaaagguuuugagaugauuugggauccaaauggauggacugggacagacaauaacuucucaauaaagcaagauaucguaggaauaaaugaguggucaggauauagcgggaguuuuguucagcauccagaacuaacagggcuggauuguauaagaccuugcuucuggguugaauuaaucagagggcgacccaaagagaacacaaucuggacuagugggagcagcauauccuuuugugguguaaacagugacacuguggguuggucuuggccagacggugcugaguugccauuuaccauugacaaguaa

SEQ ID NO: 57380 - RNA, 1410 nt, Artificial Sequence
  derived and/or modified CDS sequence (wt) from neuraminidase__InfluenzaA__AHZ40503
augaauccaaaucaaaagauaauaacaauuggcucuguuucucucaccauuuccacaauaugcuucuucaugcaaauugccaucuugauaacuacuguaacauugcauuucaagcaauaugaauucaacucccccccaaacaaccaagugaugcugugugaaccaacaauaauagaaagaaacauaacagagauaguguaucugaccaacaccaccauagagaaggaaauaugccccaaaccagcagaauacagaaauuggucaaaaccgcaauguggcauuacaggauuugcaccuuucucuaaggacaauucgauuaggcuuuccgcugguggggacaucugggugacaagagaaccuuaugugucaugcgauccugacaaguguuaucaauuugcccuuggacagggaacaacacuaaacaacgugcauucaaauaacacaguacgugauaggaccccuuaucggacucuauugaugaaugaguuggguguuccuuuucaucuggggaccaagcaagugugcauagcaugguccagcucaaguugucacgauggaaaagcauggcugcauguuuguauaacgggggaugauaaaaaugcaacugcuagcuucauuuacaaugggaggcuuguagauaguguuguuucaugguccaaagaaauucucaggacccaggagucagaaugcguuuguaucaauggaacuuguacaguaguaaugacugauggaagugcuucaggaaaagcugauacuaaaauacuauucauugaggaggggaaaaucguucauacuagcacauugucaggaagugcucagcaugucgaagagugcucuugcuauccucgauauccuggugucagaugugucugcagagacaacuggaaaggcuccaaucggcccaucguagauauaaacauaaaggaucauagcauuguuuccaguuauguguguucaggacuuguuggagacacacccagaaaaaacgacagcuccagcaguagccauuguuuggauccuaacaaugaagaagguggucauggagugaaaggcugggccuuugaugauggaaaugacguguggaugggaagaacaaucaacgagacgucacgcuuaggguaugaaaccuucaaagucauugaaggcugguccaauccuaaguccaaauugcagauaaauaggcaagucauaguugacagaggugauagguccgguuauucugguauuuucucuguugaaggcaaaagcugcaucaaucggugcuuuuauguagaguugauuaggggaagaaaagaggaaacugaagucuuguggaccucaaacaguauuguuguguuuuguggcaccucagguacauauggaacaggcucauggccugauggggcggaccucaaucucaugccuauauaa

SEQ ID NO: 57381 - RNA, 1410 nt, Artificial Sequence; identical to SEQ ID NO: 55364
  derived and/or modified CDS sequence (wt) from neuraminidase__InfluenzaA__AHZ40515

SEQ ID NO: 57382 - RNA, 1410 nt, Artificial Sequence
  derived and/or modified CDS sequence (wt) from neuraminidase__InfluenzaA__AHZ40527
augaauccaaaucaaaagauaauaacgauuggcucuguuucucucaccauuuccacaaugugcuucuucaugcaaauugccaucuugauaacuacuguaacauugcauuucaagcaauaugaauucgacucccccccaaacaaccaagugaugcugugugaaccaacaauaauagaaagaaacauaacagagauaguguaucugaccaacaccaccauagagaaggaaauaugccccaaaccagcagaauacagaaauuggucaaaaccgcaauguggcauuacaggauuugcaccuuucucuaaggacaauucgauuaggcuuuccgcugguggggacaucugggugacaagagaaccuuaugugucaugcgauccugacaaguguuaucaauuugcccuuggacagggaacaacacuaaacaacgugcauucaaauaacacaguacgugauaggaccccuuaucggacucuauugaugaaugaguuggguguuccuuuucaucuggggaccaagcaagugugcauagcaugguccagcucaaguugucacgauggaaaagcauggcugcauguuuguauaacgggggaugauaaaaaugcaacugcuagcuucauuuacaaugggaggcuuguagauaguguuguuucaugguccaaagaaauucucaggacccaggagucagaaugcguuuguaucaauggaacuuguacaguaguaaugacugauggaagugcuucaggaaaagcugauacuaaaauacuauucauugaggaggggaaaaucguucauacuagcacauugucaggaagugcucagcauguugaagagugcucuugcuauccucgauauccuggugucagaugugucugcagagacaacuggaaaggcuccaaucggcccaucguagauauaaacauaaaggaucauagcauuguuuccaguuauguguguucaggacuuguuggagacacacccagaaaaaacgacagcuccagcaguagccauuguuuggauccuaacaaugaagaagguggucauggagugaaaggcugggccuuugaugauggaaaugacguguggaugggaagaacaaucaacgagacgucacgcuuaggguaugaaaccuucaaagucauugaaggcugguccaacccuaaguccaaauugcagauaaauaggcaagucauaguugacagaggugauagguccgguuauucugguauuuucucuguugaaggcaaaagcugcaucaaucggugcuuuuauguggaguugauuaggggaagaaaagaggaaacugaagucuuguggaccucaaacaguauuguuguguuuuguggcaccucagguacauauggaacaggcucauggccugauggggcggaccucaaccucaugccuauauaa

SEQ ID NO: 57383 - RNA, 1410 nt, Artificial Sequence
  derived and/or modified CDS sequence (wt) from neuraminidase__InfluenzaA__AHZ40539
augaauccaaaucaaaagauaauaacgauuggcucuguuucucucaccauuuccacaauaugcuucuucaugcaaauugccaucuugauaacuacuguaacauugcauuucaagcaauaugaauucaacucccccccaaacaaccaagugaugcugugugaaccaacaauaauagaaagaaacauaacagagauaguguaucugaccaacaccaccauagagaaggaaauaugccccaaaccagcagaauacagaaauuggucaaaaccgcaauguggcauuacaggauuugcaccuuucucuaaggacaauucgauuaggcuuuccgcugguggggacaucugggugacaagagaaccuuaugugucaugcgauccugacaaguguuaucaauuugcccuuggacagggaacaacacuaaacaacgugcauucaaauaacacaguacgugauagaaccccuuaucggacucuauugaugaaugaguuggguguuccuuuucaucuggggaccaagcaagugugcauagcaugguccagcucaaguugucacgauggaaaagcauggcugcauguuuguauaacgggggaugauaaaaaugcaacugcuagcuucauuuacaaugggaggcuuguagauaguguuguuucaugguccaaagaaauucucaggacccaggagucagaaugcguuuguaucaauggaacuuguacaguaguaaugacugauggaagugcuucaggaaaagcugauacuaaaauacuauucauugaggaggggaaaaucguuaauacuagcacauugucaggaagugcucagcaugucgaagagugcucuugcuauccucgauauccuggugucagaugugucugcagagacaacuggaaaggcuccaaucggcccaucguagauauaaacauaaaggaucauagcauuguuuccaguuauguguguucaggacuuguuggagacacacccagaaaaaacgacagcuccagcaguagccauuguuuggauccuaacaaugaagaagguggucauggagugaaaggcugggccuuugaugauggaaaugacguguggaugggaagaacaaucaacgagacgucacgcuuaggguaugaaaccuucaaagucauugaaggcugguccaauccuaaguccaaauugcagauaaauaggcaagucauaguugacagaggugauagguccgguuauucugguauuuucucuguugaaggcaaaagcugcaucaaucggugcuuuuauguagaguugauuaggggaagaaaagaggaaacugaagucuuguggaccucaaacaguauuguuguguuuuguggcaccucagguacauauggaacaggcucauggccugauggggcggaccucaaucucaugccuauauaa

SEQ ID NO: 57384 - RNA, 1410 nt, Artificial Sequence; identical to SEQ ID NO: 55337
  derived and/or modified CDS sequence (wt) from neuraminidase__InfluenzaA__AHZ40551

SEQ ID NO: 57385 - RNA, 1410 nt, Artificial Sequence
  derived and/or modified CDS sequence (wt) from neuraminidase__InfluenzaA__AHZ40563
augaauccaaaucaaaagauaauaacgauuggcucuguuucucucaccauuuccacaguaugcuucuucaugcaaauugccaucuugauaacuacuguaacauugcauuucaagcaauaugaauucaacuccuccccaaacaaccaagugaugcugugugaaccaacaauaauagaaagaaacauaacagagauaguguaucugaccaacaccaccauagagaaggaaauaugccccaaaccagcagaauacagaaauuggucaaaaccgcaauguggcauuacaggauuugcaccuuucucuaaggacaauucgauuaggcuuuccgcugguggggacaucugggugacaagagaaccuuaugugucaugcgauccugacaaguguuaucaauuugcccuuggacagggaacaacacuaaacaacgugcauucaaauaacacaguacgugauaggaccccuuaucggacucuauugaugaaugaguuggguguuccuuuucaucuggggaccaagcaagugugcauagcaugguccagcucaaguugucacgauggaaaagcauggcugcauguuuguauaacgggggaugauaaaaaugcaacugcuagcuucauuuacaaugggaggcuuguagauaguguuguuucaugguccaaagaaauucucaggacccaggagucagaaugcguuuguaucaauggaacuuguacaguaguaaugacugauggaagugcuucaggaaaagcugauacuaaaauacuauucauugaggaggggaaaaucguucauacuagcacauugucaggaagugcucagcaugucgaagagugcucuugcuauccucgauauccuggugucagaugugucugcagagacaacuggaaaggcuccaaucggcccaucguagauauaaacauaaaggaucauagcauuguuuccaguuauguguguucaggacuuguuggagacacacccagaaaaaacgacagcuccagcaguagccauuguuuggauccuaacaaugaagaagguggucauggagugaaaggcugggccuuugaugauggaaaugacguguggaugggaagaacaaucaacgagacgucacgcuuaggguaugaaaccuucaaagucauugaaggcugguccaauucuaaguccaaauugcagauaaauaggcaagucauaguugacagaggugauagguccgguuauucugguauuuucucuguugaaggcaaaagcugcaucaaucggugcuuuuauguagaguugauuaggggaagaaaagaggaaacugaagucuuguggaccucaaacaguauuguuguguuuuguggcaccucagguacauauggaacaggcucauggccugauggggcggaccucaaucucaugccuauauaa

SEQ ID NO: 57386 - RNA, 1410 nt, Artificial Sequence
  derived and/or modified CDS sequence (wt) from neuraminidase__InfluenzaA__AHZ40575
augaauccaaaucaaaagauaauaacgauuggcucuguuucucucaccauuuccacaauaugcuucuucaugcaaauugccaucuugauaacuacuguaacauugcauuucaagcaauaugaauucaacucccccccaaacaaccaagugaugcugugugaaccaacaauaauagaaagaaacauaacagagauaguguauuugaccaacaccaccauagagaaggaaauaugccccaaaccagcagaauacagaaauuggucaaaaccgcaauguggcauuacaggauuugcaccuuucucuaaggacaauucgauuaggcuuuccgcugguggggacaucugggugacaagagaaccuuaugugucaugcgauccugacaaguguuaucaauuugcccuuggacagggaacaacacuaaacaacgugcauucaaauaacacaguacgugauaggaccccuuaucggacucuauugaugaaugaguuggguguuccuuuucaucuagggaccaagcaagugugcauagcaugguccagcucaaguugucacgauggaaaagcauggcugcauguuuguauaacgggggaugauaaaaaugcaacugcuagcuucauuuacaaugggaggcuuguagauaguguuguuucaugguccaaagaaauucucaggacccaggagucagaaugcguuuguaucaauggaacuuguacaguaguaaugacugauggaagugcuucaggaaaagcugauacuaaaauauuauucauugaggaggggaaaaucguucauacuagcacauugucaggaagugcucagcaugucgaagagugcucuugcuauccucgauauccuggugucagaugugucugcagagacaacuggaaaggcuccaaucggcccaucguagauauaaacauaaaggaucauagcauuguuuccaguuauguguguucaggacuuguuggagacacacccagaaaaaacgacagcuccagcaguagccauuguuuggauccuaacaaugaagaagguggucauggagugaaaggcugggccuuugaugauggaaaugacguauggaugggaagaacaaucaacgagacgucacgcuuaggguaugaaaccuucaaagucauugaaggcugguccaacccuaaguccaaauugcagauaaguaggcaagucauaguugacagaggugauagguccgguuauucugguauuuuuucuguugaaggcaaaagcugcaucaaucggugcuuuuauguggaguugauuaggggaagaaaagaggaaacugaagucuuguggaccucaaacaguauuguuguguuuuguggcaccucagguacauauggaacaggcucauggccugauggggcggaucucaaucucaugccuauauaa

SEQ ID NO: 57387 - RNA, 1410 nt, Artificial Sequence
  derived and/or modified CDS sequence (wt) from neuraminidase__InfluenzaA__AHZ40586
augaauccaaaucaaaagauaauaacgauuggcucuguuucucucaccauuuccacaauaugcuucuucaugcaaauugccaucuugguaacuacuguaacauugcauuucaagcaauaugaauucaacucccccccaaacaaccaagugaugcugugugaaccaacaauaauagaaagaaacauaacagagauaguguauuugaccaacaccaccauagagaaggaaauaugccccaaaccagcagaauacagaaauuggucaaaaccgcaauguggcauuacaggauuugcaccuuucucuaaggacaauucgauuaggcuuuccgcugguggggacaucugggugacaagagaaccuuaugugucaugcgauccugacaaguguuaucaauuugcccuuggacagggaacaacacuaaacaacgugcauucaaauaacacaguacgugauaggaccccuuaucggacucuauugaugaaugaguuggguguuccuuuucaucuggggaccaagcaagugugcauagcaugguccagcucaaguugucacgauggaaaagcauggcugcauguuuguauaacgggggaugauaaaaaugcaacugcuagcuucauuuacaaugggaggcuuguagauaguguuguuucaugguccaaagaaauucucaggacccaggagucagaaugcguuuguaucaauggaacuuguacaguaguaaugacugauggaagugcuucaggaaaagcugauacuaaaauauuauucauugaggaggggaaaaucguucauacuagcacauugucaggaagugcucagcaugucgaagagugcucuugcuauccucgauauccuggugucagaugugucugcagagacaacuggaaaggcuccaaucggcccaucguagauauaaacauaaaggaucauagcauuguuuccaguuauguguguucaggacuuguuggagacacacccagaaaaaacgacagcuccagcaguagccauuguuuggauccuaacaaugaagaagguggucauggagugaaaggcugggccuuugaugaugggaaugacguguggaugggaagaacaaucaacgaaacgucacgcuuaggguaugaaaccuucaaagucauugaaggcugguccaacccuaaguccaaauugcagauaaauaggcaagucauaguugacagaggugauagguccgguuauucugguauuuucucuguugaaggcaaaagcugcaucaaucggugcuuuuauguggaguugauuaggggaagaaaagaggaaacugaagucuuguggaccucaaacaguauuguuguguuuuguggcaccucagguacauauggaacaggcucauggccugauggggcggaccucaaucucaugccuauauaa

SEQ ID NO: 57388 - RNA, 1410 nt, Artificial Sequence
  derived and/or modified CDS sequence (wt) from neuraminidase__InfluenzaA__AHZ40598
augaauccaaaccaaaagauaauaaccauugguucggucuguaugacaauuggaauggcuaacuuaauauuacaaauuggaaacauaaucucaauauggauuagccacucaauucaaguugggaaucaaagucagauugaaacaugcaaucaaagcgucauuacuuaugaaaacaacacuuggguaaaucagacauauguuaacaucagcaacaccaacuuugcugcugggcagccagugguuuccgugaaauuagcgggcaauuccucucucugcccuguuaguggaugggcuauauacaguaaagacaacaguguaagaaucgguuccaagggggauguguuugucauaagggaaccauucauaucaugcucccccuuggaaugcagaaccuuuuucuugacucaaggggccuugcuaaaugacaaacauuccaauggaaccauuaaagacaggagcccauaucgaacccuaaugagcuguccuauuggugaaguucccucuccauacaacucaagauuugagucagucgcuuggucagcaagugcuugucaugauggcaucaauuggcuaacaauuggaauuucuggcccagacaguggggcaguggcuguguuaaaguacaacggcauaauaacagacacuaucaagaguuggagaaacgauauauugagaacacaagagucugaaugugcauguguaaaugguucuugcuuuaccauaaugacugauggaccaagugauggacaggccucauacaagaucuucagaauagaaaagggaaagauagucaaaucagucgaaaugaaugccccuaauuaucacuaugaggaaugcuccuguuauccugauucuagugaaaucacaugugugugcagggauaacuggcauggcucgaaucgaccgugggugucuuucaaccagaaucuggaauaucagauaggauacauaugcagugggauuuucggagacaauccacgcccuaaugauaagacaggcaguugugguccaguaucgucuaauggagcaaauggaguaaaaggauuuucauucaaauacggcaaugguguuuggauagggagaacuaaaagcauuaguucaagaaaagguuuugagaugauuugggauccaaauggauggacugggacagacaauaacuucucaauaaagcaagauaucguaggaauaaaugaguggucaggauauagcgggaguuuuguucagcauccagaacuaacagggcuggauuguauaagaccuugcuucuggguugaacuaaucagagggcgacccaaagagaacacaaucuggacuagugggagcagcauauccuuuugugguguaaacagugacacuguggguuggucuuggccagacggugcugaguugccauuuaccauugacaaguaa

SEQ ID NO: 57389 - RNA, 1410 nt, Artificial Sequence
  derived and/or modified CDS sequence (wt) from neuraminidase__InfluenzaA__AHZ40609
augaauccaaaucaaaagauaauaacgauuggcucuguuucucucaccauuuccacaauaugcuucuucaugcaaauugccaucuugauaacuacuguaacauugcauuucaagcaauaugaauucaacucccccccaaacaaccaagugaugcugugugaaccaacaauaauagaaagaaacauaacagagauaguguaucugaccaacaccaccauagagaaggaaauaugccccaaaccagcagaauacagaaauuggucaaaaccgcaauguggcauuacaggauuugcaccuuucucuaaggacaauucgauuaggcuuuccgcugguggggacaucugggugacaagagaaccuuaugugucaugcgauccugacaaguguuaucaauuugcccuuggacagggaacaacacuaaacaacgugcauucaaauaacacaguacgugauaggaccccuuaucggacucuauugaugaaugaguuggguguuccuuuucaucuggggaccaagcaagugugcauagcaugguccagcucaaguugucacgauggaaaagcauggcugcauguuuguauaacgggggaugauaaaaaugcaacugcuagcuucauuuacaaugggaggcuuguagauaguguuguuucaugguccaaagaaauucucaggacucaggagucagaaugcguuuguaucaauggaacuuguacaguaguaaugacugauggaagugcuucaggaaaagcugauacuaaaauacuauucauugaggaggggaaaaucguucauacuagcacauugucaggaagugcucagcaugucgaagagugcucuugcuauccucgauauccuggugucagaugugucugcagagacaacuggaaaggcuccaaucggcccaucguagauauaaacauaaaggaucauagcauuguuuccaguuauguguguucaggacuuguuggagacacacccagaaaaaacgacagcuccagcaguagccauuguuuggauccuaacaaugaagaagguggucauggagugaaaggcugggccuuugaugauggaaaugacguguggaugggaagaacaaucaacgagacgucacgcuuaggguaugaaaccuucaaagucauugaaggcugguccaauccuaaguccaaauugcagauaaauaggcaagucauaguugacagaggugauagguccgguuauucugguauuuucucuguugaaggcaaaagcugcaucaaucggugcuuuuauguagaguugauuaggggaagaaaagaggaaacugaagucuuguggaccucaaacaguauuguuguguuuuguggcaccucagguacauauggaacaggcucauggccugauggggcggaccucaaucucaugccuauauaa

SEQ ID NO: 57390 - RNA, 1410 nt, Artificial Sequence
  derived and/or modified CDS sequence (wt) from neuraminidase__InfluenzaA__AHZ40629
augaauccaaaucaaaagauaauaacgauuggcucuguuucucucaccauuuccacaauaugcuucuucaugcaaauugccaucuugauaacuacuguaacauugcauuucaagcaauaugaauucaacucccccccaaacaaccaagugaugcugugugaaccaacaauaauagaaagaaacauaacagagauaguguaucuaaccaacaccaccauagagaaggaaauaugccccaaaccagcagaauacagaaauuggucaaagccgcagugugacauuacaggauuugcaccuuuuucuaaggacaauucgauuaggcuuuccgcugguggggacaucugggugacaagagaaccuuaugugucaugcgauccugacaaguguuaucaauuugcucuuggacagggaacaacacuaaacaacgugcauucaaauaacacagugcgugauaggaccccuuaucggacccuauugaugaaugaguuagguguuccuuuucaucuggggaccaagcaagugugcauagcaugguccagcucaaguugucacgauggaaaagcauggcuacaugucuguauaacgggggaugauaaaaaugcaacugcuagcuucauuuacaaugggaggcuuguagauaguguuguuucaugguccaaagaaauccucaggacccaggagucagaaugcguuuguaucaauggaacuuguacaguaguaaugacugaugggagugcuucaggaaaagcugauacuaaaauacuauucauugaggaggggaaaaucguucauacuagcacauugucaggaagugcucagcaugucgaggagugcucuugcuauccucgauauccuggugucagaugugucugcagagacaacuggaaaggcuccaauaggccuaucguagauauaaacauaaaggaucauagcauuguuuccagguauguguguucaggacuuguuggagacacacccagaaaaaacgacagcuccagcaguagccauuguuuggauccuaacaaugaagaagguggucauggagugaaaggcugggccuucgaugauggaaaugacguguggaugggaagaacgaucaacgagacgucacguuuaggguaugaaaccuucaaagucauugaaggcugguccaacccuaaguccaaauugcagauaaauaggcaggucauaguugacagaggugauagguccgguuauucugguauuuucucuguugaaggcaaaagcugcaucaaucggugcuuuuauguggaguugauuaggggaagaaaagaggaaacugaagucuuguggaccucaaacaguauuguuguguuuuguggcaccucagguacauauggaacaggcucauggccugauggggcggaccucaaucucaugccuauauaa

SEQ ID NO: 57391 - RNA, 1410 nt, Artificial Sequence; identical to SEQ ID NO: 55379
  derived and/or modified CDS sequence (wt) from neuraminidase__InfluenzaA__AHZ40641

SEQ ID NO: 57392 - RNA, 1410 nt, Artificial Sequence
  derived and/or modified CDS sequence (wt) from neuraminidase__InfluenzaA__AHZ40653
augaauccaaaucaaaagauaauaacgauuggcucuguuucucucaccauuuccacaauaugcuucuucaugcaaauugccaucuugauaacuacuguaacauugcauuucaagcaauaugaauucaacucccccccaaacaaccaagugaugcugugugaaccaacaauaauagaaagaaacauaacagagauaguguauuugaccaacaccaccauagagaaggaaauaugccccaaaccagcaggauacagaaauuggucaaaaccgcaauguggcauuacaggauuugcaccuuucucuaaggacaauucgauuaggcuuuccgcugguggggacaucugggugacaagagaaccuuaugugucaugcgauccugacaaguguuaucaauuugcccuuggacagggaacaacacuaaacaacgugcauucaaauaacacaguacgugauaggaccccuuaucggacucuauugaugaaugaguuggguguuccuuuucaucuggggaccaagcaagugugcauagcaugguccagcucaaguugucacgauggaaaagcauggcugcauguuuguauaacgggggaugauaaaaaugcaacugcuagcuucauuuacaaugggaggcuuguagauaguguuguuucaugguccaaagaaauucucaggacccaggagucagaaugcguuuguaucaauggaacuuguacaguaguaaugacugauggaagugcuucaggaaaagcugauacuaaaauacuauucauugaggaggggaaaaucguucauacuagcacauugucaggaagugcucagcaugucgaagagugcucuugcuauccucgauauccuggugucagaugugucugcagagacaacuggaaaggcuccaaucggcccaucguagauauaaacauaaaggaucauagcauuguuuccaguuauguguguucaggacuuguuggagacacacccagaaaaaacgacagcuccagcaguagccauuguuuggauccuaacaaugaagaagguggucauggagugaaaggcugggccuuugaugauggaaaugacguauggaugggaagaacgaucaacgagacgucacgcuuaggguaugaaaccuucaaagucauugaaggcugguccaacccuaaguccaaauugcagauaaauaggcaagucauaguugacagaggugauagguccgguuauucugguauuuucucuguugaaggcaaaagcugcaucaaucggugcuuuuauguggaguugauuaggggaagaaaagaggaaacugaagucuuguggaccucaaacaguauuguuguguuuuguggcaccucagguacauauggaacaggcucauggccugauggggcggaccucaaucucaugccuauauaa

SEQ ID NO: 57393 - RNA, 1410 nt, Artificial Sequence; identical to SEQ ID NO: 55387
  derived and/or modified CDS sequence (wt) from neuraminidase__InfluenzaA__AHZ40665

SEQ ID NO: 57394 - RNA, 1410 nt, Artificial Sequence; identical to SEQ ID NO: 55387
  derived and/or modified CDS sequence (wt) from neuraminidase__InfluenzaA__AHZ40677

SEQ ID NO: 57395 - RNA, 1410 nt, Artificial Sequence; identical to SEQ ID NO: 55364
  derived and/or modified CDS sequence (wt) from neuraminidase__InfluenzaA__AHZ40689

SEQ ID NO: 57396 - RNA, 1410 nt, Artificial Sequence
  derived and/or modified CDS sequence (wt) from neuraminidase__InfluenzaA__AHZ40713
augaauccaaaucaaaagauaauaacgauuggcucuguuucucucaccauuuccacaauaugcuucuucaugcaaauugccaucuugauaacuacuguaacauugcauuucaagcaauaugaauucaacucccccccaaacaaccaagugaugcugugugaaccaacaauaauagaaagaaacauaacagagauaguguaucugaccaacaccaccauagagaaggaaauaugccccaaaccagcagaauacagaaauuggucaaaaccgcaauguggcauuacaggauuugcaccuuucucuaaggacaauucgauuaggcuuuccgcugguggggacaucugggugacaagagaaccuuaugugucaugcgaucccgacaaguguuaucaauuugcccuuggacagggaacaacacuaaacaacgugcauucaaauaacacaguacgugauaggaccccuuaucggacucuauugaugaaugaguuggguguuccuuuucaucuggggaccaagcaagugugcauagcaugguccagcucaaguugucacgauggaaaagcauggcugcauguuuguauaacgggggaugauaaaaaugcaacugcuagcuucauuuacaaugggaggcuuguagauaguguuguuucaugguccaaagaaauucuuaggacccaggagucagaaugcguuuguaucaauggaacuuguacaguaguaaugacugauggaagugcuucaggaaaagcugauacuaaaauacuauucauugaggaggggaaaaucguucauacuagcacauugucaggaagugcucagcaugucgaagagugcucuugcuauccucgauauccuggugucagaugugucugcagagacaacuggaaaggcuccaaucggcccaucguagauauaaacauaaaggaucauagcauuguuuccaguuauguguguucaggacuuguuggagacacacccagaaaaaacgacagcuccagcaguagccauuguuuggauccuaacaaugaagaagguggucauggagugaaaggcugggccuuugaugauggaaaugacguguggaugggaagaacaaucaacgagacgucacgcuuaggguaugaaaccuucaaagucauugaaggcugguccaacccuaaguccaaauugcagauaaauaggcaagucauaguugacagaggugauaaguccgguuauucugguauuuucucuguugaaggcaaaagcugcaucaaucggugcuuuuauguggaguugauuaggggaagaaaagaggaaacugaagucuuguggaccucaaacaguauuguuguguuuuguggcaccucagguacauauggaacaggcucauggccugauggggcggaccucaaucucaugccuauauaa

SEQ ID NO: 57397 - RNA, 1410 nt, Artificial Sequence
  derived and/or modified CDS sequence (wt) from neuraminidase__InfluenzaA__AHZ40725
augaauccaaaucaaaagauaauaacgauuggcucuguuucucucaccauuuccacaauaugcuucuucaugcaaauugccaucuugauaacuacuguaacauugcauuucaagcaauaugaauucaacucccccccaaacaaccaagugaugcugugugaaccaacaauaauagaaagaaacauaacagagauaguguaucugaccaacaccaccauagagaaggaaauaugccccaaaccagcagaauacagaaauuggucaaaaccgcaauguggcauuacaggauuugcaccuuucucuaaggacaauucgauuaggcuuuccgcugguggggacaucugggugacaagagaaccuuaugugucaugcgauccugacaaguguuaucaauuugcccuuggacagggaacaacacuaaacaacgugcauucaaauaacacaguacgugauaggaccccuuaucggacucuauugaugaaugaguuggguguuccuuuucaucuggggaccaagcaagugugcauagcaugguccagcucaaguugucacgauggaaaagcauggcugcauguuuguauaacgggggaugauaaaaaugcaacugcuagcuucauuuacaaugggaggcuuguagauaguguuguuucaugguccaaagaaauucucaggacccaggagucagaaugcguuuguaucaauggaacuuguacaguaguaaugacugauggaagugcuucaggaaaagcugauacuaaaauacuauucauugaggaggggaaaaucguucauacuagcacauugucaggaagugcucagcaugucgaagagugcucuugcuauccucgauauccuggugucagaugugucugcagagacaacuggaaaggcuccaaucggcccaucguagauauaaacauaaaggaucauagcauuguuuccgguuauguguguucaggacuuguuggagacacacccagaaaaaacgacagcuccagcaguagccauuguuuggauccuaacaaugaagaagguggucauggagugaaaggcugggccuuugaugauggaaaugacguguggaugggaagaacaaucaacgagacgucacgcuuaggguaugaaaccuucaaagucauugaaggcugguccaacccuaaguccaaauugcagauaaauaggcaagucauaguugacagaggugauagguccgguuauucugguauuuucucuguugaaggcaaaagcugcaucaaucggugcuuuuauguggaguugauuaggggaagaaaagaggaaacugaagucuuguggaccucaaacaguauuguuguguuuuguggcaccucagguacauauggaacaggcucauggccugauggggcggaccucaaucucaugccuauauaa

SEQ ID NO: 57398 - RNA, 1410 nt, Artificial Sequence; identical to SEQ ID NO: 55376
  derived and/or modified CDS sequence (wt) from neuraminidase__InfluenzaA__AHZ40737

SEQ ID NO: 57399 - RNA, 1410 nt, Artificial Sequence
  derived and/or modified CDS sequence (wt) from neuraminidase__InfluenzaA__AHZ40749
augaauccaaaucaaaagauaauaacgauuggcucuguuucucucaccauuuccacaauaugccucuucaugcaaauugccaucuugauaacuacuguaacauugcauuucaagcaauaugaauucaacucccccccaaacaaccaagugaugcugugugaaccaacaauaauagaaagaaacauaacagagauaguguaucugaccaacaccaccauagagaaggaaauaugccccaaaccagcagaauacagaaauuggucaaaaccgcaauguggcauuacaggauuugcaccuuucucuaaggacaauucgauuaggcuuuccgcugguggggacaucugggugacaagagaaccuuaugugucaugcgauccugacaaguguuaucaauuugcccuuggacagggaacaacacuaaacaacgugcauucaaauaacacaguacgugauaggaccccuuaucggacucuauugaugaaugaguuggguguuccuuuucaucugggaaccaagcaagugugcauagcaugguccagcucaaguugucacgauggaaaagcauggcugcauguuuguauaacgggggaugauaaaaaugcaacugcuagcuucauuuacaaugggaggcuuguagauaguguuguuucaugguccaaagaaauucucaggacccaggagucagaaugcguuuguaucaauggaacuuguacaguaguaaugacugauggaagugcuucaggaaaagcugauacuaaaauacuauucauugaggaggggaaaaucguucauacuagcacauugucaggaagugcucagcaugucgaagagugcucuugcuauccucgauauccuggugucagaugugucugcagagacaacuggaaaggcuccaaucggcccaucguagauauaaacauaaaggaucauagcauuguuuccaguuauguguguucaggacuuguuggagacacacccagaaaaaacgacagcuccagcaguagccauuguuuggauccuaacaaugaagaagguggucauggagugaaaggcugggccuuugaugauggaaaugacguguggaugggaagaacaaucaacgagacgucacgcuuaggguaugaaaccuucaaagucauugaaggcugguccaacccuaaguccaaauugcagauaaauaggcaagucauaguugacagaggugauagguccgguuauucugguauuuucucuguugaaggcaaaagcugcaucaaucggugcuuuuauguggaguugauuaggggaagaaaagaggaaacugaagucuuguggaccucaaacaguauuguuguguuuuguggcaccucagguacauauggaacaggcccauggccugauggggcggaccucaaucucaugccuauauaa

SEQ ID NO: 57400 - RNA, 1410 nt, Artificial Sequence
  derived and/or modified CDS sequence (wt) from neuraminidase__InfluenzaA__AHZ40761
augaauccaaaucaaaagauaauaacgauuggcucuguuucucucaccauuuccacaauaugcuucuucaugcaaauugccaucuugauaacuacuguaacauugcauuucaagcaauaugaauucaacucccccccaaacaaccaagugaugcugugugaaccaacaauaauagaaagaaacauaacagagauaguguaucugaccaacaccaccauagagaaggaacuaugccccaaacuagcagaauacagaaauuggucaaagccgcagugugacauuacaggauuugcgccuuuuucuaaggacaauucgauuaggcuuuccgcugguggggacaucugggugacaagagaaccuuaugugucaugcgauccugacaaguguuaucaauuugcccuuggacagggaacaacacuaaacaacguacauucaaauaacacaguacgugauaggaccccuuaucggacccuauugaugaaugaguuagguguuccuuuucaucuggggaccaagcaagugugcauggcaugguccagcucaaguugucacgauggaaaagcauggcugcauguuuguauaacgggggaugauaaaaaugcaacugcuagcuucauuuacaaugggaagcuuguagauaguguugucucaugguccaaagaaauccucaggacccaggagucagaaugcguuuguaucaaugggacuuguacaguaguaaugacugaugggagugcuucaggaaaagcugauacuaaaauacuauucauugaggaggggaaaaucguucauacuagcacauugucaggaagugcucagcaugucgaggagugcucuugcuauccucgauauccuggugucagaugugucugcagagacaacuggaaaggcuccaauaggcccauuguagauauaaacauaaaggaucauagcauuguuuccaguuauguguguucaggacuuguuggagacacacccagaaaaaccgacagcuccagcaguagccauuguuuggauccuaacaaugaagaagguggucauggagugaaaggcugggccuuugaugauggaaaugacguguggaugggaagaacgaucaacgagacgucacguuuaggguaugaaaccuucaaagucauugaaggcugguccaacccuaaguccaaauugcagauaaauaggcaagucauaguugacagaggugauagguccgguuauucugguauuuucucuguugaaggcaaaagcugcaucaaucggugcuuuuauguggaguugauuaggggaagaaaaaaggaaacugcagucuuguggaccucaaacaguauuguuguguuuuguggcaccucagguacauauggaacaggcucauggccugauggggcggaccucaaucucaugccuauauaa

SEQ ID NO: 57401 - RNA, 1410 nt, Artificial Sequence; identical to SEQ ID NO: 55337
  derived and/or modified CDS sequence (wt) from neuraminidase__InfluenzaA__AHZ40773

SEQ ID NO: 57402 - RNA, 1410 nt, Artificial Sequence; identical to SEQ ID NO: 48740
  derived and/or modified CDS sequence (wt) from neuraminidase__InfluenzaA__AHZ40785

SEQ ID NO: 57403 - RNA, 1410 nt, Artificial Sequence; identical to SEQ ID NO: 48740
  derived and/or modified CDS sequence (wt) from neuraminidase__InfluenzaA__AHZ40796

SEQ ID NO: 57404 - RNA, 1410 nt, Artificial Sequence; identical to SEQ ID NO: 48740
  derived and/or modified CDS sequence (wt) from neuraminidase__InfluenzaA__AHZ40807

SEQ ID NO: 57405 - RNA, 1410 nt, Artificial Sequence; identical to SEQ ID NO: 48740
  derived and/or modified CDS sequence (wt) from neuraminidase__InfluenzaA__AHZ40818

SEQ ID NO: 57406 - RNA, 1410 nt, Artificial Sequence; identical to SEQ ID NO: 48740
  derived and/or modified CDS sequence (wt) from neuraminidase__InfluenzaA__AHZ40829

SEQ ID NO: 57407 - RNA, 1410 nt, Artificial Sequence; identical to SEQ ID NO: 48740
  derived and/or modified CDS sequence (wt) from neuraminidase__InfluenzaA__AHZ40840

SEQ ID NO: 57408 - RNA, 1410 nt, Artificial Sequence; identical to SEQ ID NO: 48740
  derived and/or modified CDS sequence (wt) from neuraminidase__InfluenzaA__AHZ40851

SEQ ID NO: 57409 - RNA, 1410 nt, Artificial Sequence; identical to SEQ ID NO: 48740
  derived and/or modified CDS sequence (wt) from neuraminidase__InfluenzaA__AHZ40862

SEQ ID NO: 57410 - RNA, 1410 nt, Artificial Sequence; identical to SEQ ID NO: 48740
  derived and/or modified CDS sequence (wt) from neuraminidase__InfluenzaA__AHZ40873

SEQ ID NO: 57411 - RNA, 1410 nt, Artificial Sequence; identical to SEQ ID NO: 48740
  derived and/or modified CDS sequence (wt) from neuraminidase__InfluenzaA__AHZ40884

SEQ ID NO: 57412 - RNA, 1410 nt, Artificial Sequence; identical to SEQ ID NO: 48740
  derived and/or modified CDS sequence (wt) from neuraminidase__InfluenzaA__AHZ40895

SEQ ID NO: 57413 - RNA, 1410 nt, Artificial Sequence; identical to SEQ ID NO: 48740
  derived and/or modified CDS sequence (wt) from neuraminidase__InfluenzaA__AHZ40906

SEQ ID NO: 57414 - RNA, 1410 nt, Artificial Sequence; identical to SEQ ID NO: 48740
  derived and/or modified CDS sequence (wt) from neuraminidase__InfluenzaA__AHZ40917

SEQ ID NO: 57415 - RNA, 1410 nt, Artificial Sequence; identical to SEQ ID NO: 48740
  derived and/or modified CDS sequence (wt) from neuraminidase__InfluenzaA__AHZ40928

SEQ ID NO: 57416 - RNA, 1410 nt, Artificial Sequence; identical to SEQ ID NO: 48740
  derived and/or modified CDS sequence (wt) from neuraminidase__InfluenzaA__AHZ40939

SEQ ID NO: 57417 - RNA, 1410 nt, Artificial Sequence; identical to SEQ ID NO: 48740
  derived and/or modified CDS sequence (wt) from neuraminidase__InfluenzaA__AHZ40950

SEQ ID NO: 57418 - RNA, 1410 nt, Artificial Sequence; identical to SEQ ID NO: 48740
  derived and/or modified CDS sequence (wt) from neuraminidase__InfluenzaA__AHZ40961

SEQ ID NO: 57419 - RNA, 1410 nt, Artificial Sequence; identical to SEQ ID NO: 48740
  derived and/or modified CDS sequence (wt) from neuraminidase__InfluenzaA__AHZ40972

SEQ ID NO: 57420 - RNA, 1410 nt, Artificial Sequence; identical to SEQ ID NO: 48740
  derived and/or modified CDS sequence (wt) from neuraminidase__InfluenzaA__AHZ40983

SEQ ID NO: 57421 - RNA, 1410 nt, Artificial Sequence
  derived and/or modified CDS sequence (wt) from neuraminidase__InfluenzaA__AHZ40994
augaauccaaaccaaaagauaauaaccauugguucggucuguaugacaauuggaauggcuaacuuaauauuacaaauuggaaacauaaucucaauauggauuagccacucaauucaacuugggaaucaaaaucagauugaaacaugcaaucaaagcgucauuacuuaugaaaacaacacuuggguaaaucagacauauguuaacaucagcaacaccaacuuugcugcuggacagucagugguuuccgugaaauuagcgggcaauuccucucucugcccuguuaguggaugggcuauauacaguaaagacaacaguguaagaaucgguuccaagggggauguguuugucauaagggaaccauucauaucaugcucccccuuggaaugcagaaccuucuucuugacucaaggggccuugcuaaaugacaaacauuccaauggaaccauuaaagacaggagcccauaucgaacccuaaugagcuguccuauuggugaaguucccucuccauacaacucaagauuugagucagucgcuuggucagcaagugcuugucaugauggcaucaauuggcuaacaauuggaauuucuggcccagacaauggggcaguggcuguguuaaaguacaacggcauaauaacagacacuaucaagaguuggagaaacaauauauugagaacacaagagucugaaugugcauguguaaaugguucuugcuuuacuguaaugaccgauggaccaaguaauggacaggccucauacaagaucuucagaauagaaaagggaaagauagucaaaucagucgaaaugaaugccccuaacuaucacuaugaggaaugcuccuguuauccugauucuagugaaaucacaugugugugcagggauaacuggcauggcucgaaucgaccgugggugucuuucaaccagaaucuggaauaucagauaggauacauaugcagugggauuuucggagacaauccacgcccuaaugauaagacaggcaguugugguccaguaucgucuaauggagcaaauggaguaaaaggguuuucauucaaauacggcaaugguguuuggauagggagaacuaaaagcauuaguucaagaaacgguuuugagaugauuugggauccgaacggauggacugggacagacaauaacuucucaauaaagcaagauaucguaggaauaaaugaguggucaggauauagcgggaguuuuguucagcauccagaacuaacagggcuggauuguauaagaccuugcuucuggguugaacuaaucagagggcgacccaaagagaacacaaucuggacuagcgggagcagcauauccuuuugugguguaaacagugacacuguggguuggucuuggccagacggugcugaguugccauuuaccauugacaaguaa

SEQ ID NO: 57422 - RNA, 1410 nt, Artificial Sequence; identical to SEQ ID NO: 48740
  derived and/or modified CDS sequence (wt) from neuraminidase__InfluenzaA__AHZ41005

SEQ ID NO: 57423 - RNA, 1410 nt, Artificial Sequence; identical to SEQ ID NO: 48740
  derived and/or modified CDS sequence (wt) from neuraminidase__InfluenzaA__AHZ41016

SEQ ID NO: 57424 - RNA, 1410 nt, Artificial Sequence; identical to SEQ ID NO: 48740
  derived and/or modified CDS sequence (wt) from neuraminidase__InfluenzaA__AHZ41027

SEQ ID NO: 57425 - RNA, 1410 nt, Artificial Sequence; identical to SEQ ID NO: 48740
  derived and/or modified CDS sequence (wt) from neuraminidase__InfluenzaA__AHZ41049

SEQ ID NO: 57426 - RNA, 1410 nt, Artificial Sequence; identical to SEQ ID NO: 48740
  derived and/or modified CDS sequence (wt) from neuraminidase__InfluenzaA__AHZ41060

SEQ ID NO: 57427 - RNA, 1410 nt, Artificial Sequence; identical to SEQ ID NO: 48740
  derived and/or modified CDS sequence (wt) from neuraminidase__InfluenzaA__AHZ41071

SEQ ID NO: 57428 - RNA, 1410 nt, Artificial Sequence; identical to SEQ ID NO: 48740
  derived and/or modified CDS sequence (wt) from neuraminidase__InfluenzaA__AHZ41082

SEQ ID NO: 57429 - RNA, 1410 nt, Artificial Sequence; identical to SEQ ID NO: 48740
  derived and/or modified CDS sequence (wt) from neuraminidase__InfluenzaA__AHZ41093

SEQ ID NO: 57430 - RNA, 1410 nt, Artificial Sequence; identical to SEQ ID NO: 48740
  derived and/or modified CDS sequence (wt) from neuraminidase__InfluenzaA__AHZ41104

SEQ ID NO: 57431 - RNA, 1410 nt, Artificial Sequence; identical to SEQ ID NO: 48740
  derived and/or modified CDS sequence (wt) from neuraminidase__InfluenzaA__AHZ41115

SEQ ID NO: 57432 - RNA, 1410 nt, Artificial Sequence; identical to SEQ ID NO: 48740
  derived and/or modified CDS sequence (wt) from neuraminidase__InfluenzaA__AHZ41126

SEQ ID NO: 57433 - RNA, 1410 nt, Artificial Sequence; identical to SEQ ID NO: 48740
  derived and/or modified CDS sequence (wt) from neuraminidase__InfluenzaA__AHZ41137

SEQ ID NO: 57434 - RNA, 1410 nt, Artificial Sequence; identical to SEQ ID NO: 48740
  derived and/or modified CDS sequence (wt) from neuraminidase__InfluenzaA__AHZ41148

SEQ ID NO: 57435 - RNA, 1410 nt, Artificial Sequence; identical to SEQ ID NO: 48740
  derived and/or modified CDS sequence (wt) from neuraminidase__InfluenzaA__AHZ41159

SEQ ID NO: 57436 - RNA, 1410 nt, Artificial Sequence; identical to SEQ ID NO: 48740
  derived and/or modified CDS sequence (wt) from neuraminidase__InfluenzaA__AHZ41170

SEQ ID NO: 57437 - RNA, 1410 nt, Artificial Sequence; identical to SEQ ID NO: 48740
  derived and/or modified CDS sequence (wt) from neuraminidase__InfluenzaA__AHZ41181

SEQ ID NO: 57438 - RNA, 1410 nt, Artificial Sequence; identical to SEQ ID NO: 48740
  derived and/or modified CDS sequence (wt) from neuraminidase__InfluenzaA__AHZ41205

SEQ ID NO: 57439 - RNA, 1410 nt, Artificial Sequence; identical to SEQ ID NO: 48740
  derived and/or modified CDS sequence (wt) from neuraminidase__InfluenzaA__AHZ41251

SEQ ID NO: 57440 - RNA, 1410 nt, Artificial Sequence; identical to SEQ ID NO: 48740
  derived and/or modified CDS sequence (wt) from neuraminidase__InfluenzaA__AHZ41266

SEQ ID NO: 57441 - RNA, 1410 nt, Artificial Sequence; identical to SEQ ID NO: 48740
  derived and/or modified CDS sequence (wt) from neuraminidase__InfluenzaA__AHZ41284

SEQ ID NO: 57442 - RNA, 1410 nt, Artificial Sequence; identical to SEQ ID NO: 48740
  derived and/or modified CDS sequence (wt) from neuraminidase__InfluenzaA__AHZ41295

SEQ ID NO: 57443 - RNA, 1410 nt, Artificial Sequence; identical to SEQ ID NO: 48740
  derived and/or modified CDS sequence (wt) from neuraminidase__InfluenzaA__AHZ41306

SEQ ID NO: 57444 - RNA, 1410 nt, Artificial Sequence; identical to SEQ ID NO: 48740
  derived and/or modified CDS sequence (wt) from neuraminidase__InfluenzaA__AHZ41317

SEQ ID NO: 57445 - RNA, 1410 nt, Artificial Sequence; identical to SEQ ID NO: 48740
  derived and/or modified CDS sequence (wt) from neuraminidase__InfluenzaA__AHZ41328

SEQ ID NO: 57446 - RNA, 1410 nt, Artificial Sequence; identical to SEQ ID NO: 48740
  derived and/or modified CDS sequence (wt) from neuraminidase__InfluenzaA__AHZ41339

SEQ ID NO: 57447 - RNA, 1410 nt, Artificial Sequence; identical to SEQ ID NO: 48740
  derived and/or modified CDS sequence (wt) from neuraminidase__InfluenzaA__AHZ41350

SEQ ID NO: 57448 - RNA, 1410 nt, Artificial Sequence; identical to SEQ ID NO: 48740
  derived and/or modified CDS sequence (wt) from neuraminidase__InfluenzaA__AHZ41369

SEQ ID NO: 57449 - RNA, 1410 nt, Artificial Sequence; identical to SEQ ID NO: 48740
  derived and/or modified CDS sequence (wt) from neuraminidase__InfluenzaA__AHZ41380

SEQ ID NO: 57450 - RNA, 1410 nt, Artificial Sequence; identical to SEQ ID NO: 48740
  derived and/or modified CDS sequence (wt) from neuraminidase__InfluenzaA__AHZ41391

SEQ ID NO: 57451 - RNA, 1410 nt, Artificial Sequence; identical to SEQ ID NO: 48740
  derived and/or modified CDS sequence (wt) from neuraminidase__InfluenzaA__AHZ41402

SEQ ID NO: 57452 - RNA, 1410 nt, Artificial Sequence; identical to SEQ ID NO: 48740
  derived and/or modified CDS sequence (wt) from neuraminidase__InfluenzaA__AHZ41413

SEQ ID NO: 57453 - RNA, 1410 nt, Artificial Sequence; identical to SEQ ID NO: 48740
  derived and/or modified CDS sequence (wt) from neuraminidase__InfluenzaA__AHZ41444

SEQ ID NO: 57454 - RNA, 1410 nt, Artificial Sequence; identical to SEQ ID NO: 48740
  derived and/or modified CDS sequence (wt) from neuraminidase__InfluenzaA__AHZ41455

SEQ ID NO: 57455 - RNA, 1410 nt, Artificial Sequence; identical to SEQ ID NO: 48740
  derived and/or modified CDS sequence (wt) from neuraminidase__InfluenzaA__AHZ41476

SEQ ID NO: 57456 - RNA, 1410 nt, Artificial Sequence; identical to SEQ ID NO: 48740
  derived and/or modified CDS sequence (wt) from neuraminidase__InfluenzaA__AHZ41487

SEQ ID NO: 57457 - RNA, 1410 nt, Artificial Sequence; identical to SEQ ID NO: 48740
  derived and/or modified CDS sequence (wt) from neuraminidase__InfluenzaA__AHZ41498

SEQ ID NO: 57458 - RNA, 1410 nt, Artificial Sequence; identical to SEQ ID NO: 48740
  derived and/or modified CDS sequence (wt) from neuraminidase__InfluenzaA__AHZ41509

SEQ ID NO: 57459 - RNA, 1410 nt, Artificial Sequence; identical to SEQ ID NO: 48740
  derived and/or modified CDS sequence (wt) from neuraminidase__InfluenzaA__AHZ41520

SEQ ID NO: 57460 - RNA, 1410 nt, Artificial Sequence; identical to SEQ ID NO: 48740
  derived and/or modified CDS sequence (wt) from neuraminidase__InfluenzaA__AHZ41531

SEQ ID NO: 57461 - RNA, 1410 nt, Artificial Sequence; identical to SEQ ID NO: 48740
  derived and/or modified CDS sequence (wt) from neuraminidase__InfluenzaA__AHZ41542

SEQ ID NO: 57462 - RNA, 1410 nt, Artificial Sequence; identical to SEQ ID NO: 48740
  derived and/or modified CDS sequence (wt) from neuraminidase__InfluenzaA__AHZ41553

SEQ ID NO: 57463 - RNA, 1410 nt, Artificial Sequence; identical to SEQ ID NO: 48740
  derived and/or modified CDS sequence (wt) from neuraminidase__InfluenzaA__AHZ41564

SEQ ID NO: 57464 - RNA, 1410 nt, Artificial Sequence; identical to SEQ ID NO: 48740
  derived and/or modified CDS sequence (wt) from neuraminidase__InfluenzaA__AHZ41586

SEQ ID NO: 57465 - RNA, 1410 nt, Artificial Sequence; identical to SEQ ID NO: 48740
  derived and/or modified CDS sequence (wt) from neuraminidase__InfluenzaA__AHZ41597

SEQ ID NO: 57466 - RNA, 1410 nt, Artificial Sequence; identical to SEQ ID NO: 48740
  derived and/or modified CDS sequence (wt) from neuraminidase__InfluenzaA__AHZ41608

SEQ ID NO: 57467 - RNA, 1410 nt, Artificial Sequence; identical to SEQ ID NO: 48740
  derived and/or modified CDS sequence (wt) from neuraminidase__InfluenzaA__AHZ41619

SEQ ID NO: 57468 - RNA, 1410 nt, Artificial Sequence; identical to SEQ ID NO: 48740
  derived and/or modified CDS sequence (wt) from neuraminidase__InfluenzaA__AHZ41630

SEQ ID NO: 57469 - RNA, 1410 nt, Artificial Sequence; identical to SEQ ID NO: 48740
  derived and/or modified CDS sequence (wt) from neuraminidase__InfluenzaA__AHZ41641

SEQ ID NO: 57470 - RNA, 1410 nt, Artificial Sequence; identical to SEQ ID NO: 48740
  derived and/or modified CDS sequence (wt) from neuraminidase__InfluenzaA__AHZ41652

SEQ ID NO: 57471 - RNA, 1410 nt, Artificial Sequence; identical to SEQ ID NO: 48740
  derived and/or modified CDS sequence (wt) from neuraminidase__InfluenzaA__AHZ41663

SEQ ID NO: 57472 - RNA, 1410 nt, Artificial Sequence; identical to SEQ ID NO: 48740
  derived and/or modified CDS sequence (wt) from neuraminidase__InfluenzaA__AHZ41674

SEQ ID NO: 57473 - RNA, 1410 nt, Artificial Sequence; identical to SEQ ID NO: 48740
  derived and/or modified CDS sequence (wt) from neuraminidase__InfluenzaA__AHZ41685

SEQ ID NO: 57474 - RNA, 1410 nt, Artificial Sequence; identical to SEQ ID NO: 48740
  derived and/or modified CDS sequence (wt) from neuraminidase__InfluenzaA__AHZ41696

SEQ ID NO: 57475 - RNA, 1410 nt, Artificial Sequence; identical to SEQ ID NO: 48740
  derived and/or modified CDS sequence (wt) from neuraminidase__InfluenzaA__AHZ41707

SEQ ID NO: 57476 - RNA, 1410 nt, Artificial Sequence; identical to SEQ ID NO: 48740
  derived and/or modified CDS sequence (wt) from neuraminidase__InfluenzaA__AHZ41718

SEQ ID NO: 57477 - RNA, 1410 nt, Artificial Sequence; identical to SEQ ID NO: 48740
  derived and/or modified CDS sequence (wt) from neuraminidase__InfluenzaA__AHZ41729

SEQ ID NO: 57478 - RNA, 1410 nt, Artificial Sequence; identical to SEQ ID NO: 48740
  derived and/or modified CDS sequence (wt) from neuraminidase__InfluenzaA__AHZ41740

SEQ ID NO: 57479 - RNA, 1410 nt, Artificial Sequence; identical to SEQ ID NO: 48740
  derived and/or modified CDS sequence (wt) from neuraminidase__InfluenzaA__AHZ41751

SEQ ID NO: 57480 - RNA, 1410 nt, Artificial Sequence; identical to SEQ ID NO: 48740
  derived and/or modified CDS sequence (wt) from neuraminidase__InfluenzaA__AHZ41762

SEQ ID NO: 57481 - RNA, 1410 nt, Artificial Sequence
  derived and/or modified CDS sequence (wt) from neuraminidase__InfluenzaA__AHZ42564
augaauccaaaccaaaagauaauaaccauugguucggucuguaugacaauuggaauggcuaacuuaauauuacaaauuggaaacauaaucucaauauggauuagccacucaauucaacuugggaaucaaagucagauugaaacaugcaaucaaagcgucauuacuuaugaaaacaacacuuggguaaaucagacauauguuaacaucagcaacaccaacuuugcugcuggacagucagugguuuccgugaaauuagcgggcaauuccucucucugcccuguuaguggaugggcuauauacaguaaagacaacaguguaagaaucgguuccaagggggauguguuugucauaagggaaccauucauaucaugcucccccuuggaaugcagaaccuucuucuugacucaaggggccuugcuaaaugacaaacauuccaauggaaccauuaaagacaggagcccauaucgaacccuaaugagcuguccuauuggugaaguucccucuccauacaacucaagauuugagucggucgcuuggucagcaagugcuugucaugauggcaucaauuggcuaacaauuggaauuucuggcccagacaguggggcaguggcuguauuaaaguacaauggaauaauaacagacacuaucaagaguuggagaaacaauauauugagaacacaagagucugaaugugcauguguaaaugguucuugcuuuaccauaaugaccgauggaccaagugauggacaggccucauacaagaucuucagaauagaaaagggaaagauagucaaaucagucgaaaugaaugccccuaauuaucacuaugaggaaugcuccuguuauccugauucuagugaaaucacaugugugugcagggauaacuggcauggcucgaaucgaccgugggugucuuucaaccagaaucuggaauaucagauaggauacauaugcagugggauuuucggagacaauccacgcccuaaugauaagacaggcaguugugguccaguaucgucuaauggagcaaauggaguaaaaggauuuucauucaaauacggcaaugguguuuggauagggagaacuaaaagcauuaguucaagaaaagguuuugagaugauuugggauccaaauggauggacugggacagacaauaacuucucaauaaagcaagauaucguaggaauaaaugaguggucaggauauagcgggaguuuuguucagcauccagaacuaacaggacuggauuguauaagaccuugcuucuggguugaacuaaucagagggcgacccaaagagaacacaaucuggacuagcgggagcagcauauccuuuugugguguaaacagugacacuguggguuggucuuggccagacggugcugaguugccauuuaccauugacaaguaa

SEQ ID NO: 57482 - RNA, 1410 nt, Artificial Sequence
  derived and/or modified CDS sequence (wt) from neuraminidase__InfluenzaA__AHZ42575
augaauccaaaucaaaagauaauaacgauuggcucuguuucucucaccauuuccacaauaugcuucuucaugcaaauugccaucuugauaacuacuguaacauugcauuucaagcaauaugaauucaacucccccccaaacaaccaagugaugcugugugaaccaacaauaauagaaagaaacauaacagagauaguguaucugaccaacaccaccauagagaaggaaauaugccccaaaccagcagaauacagaaauuggucaaaaccgcaauguggcauuacaggauuugcaccuuucucuaaggacaauucgauuaggcuuuccgcugguggggacaucugggugacaagagaaccuuaugugucaugcgauccugacaaguguuaucaauuugcccuuggacagggaacaacacuaaacaacgugcauucaaauaacacaguacgugauaggaccccuuaucggacucuauugaugaaugaguuggguguuccuuuucaucuggggaccaagcaagugugcauagcaugguccagcucaaguugucacgauggaaaagcauggcugcauguuuguauaacgggggaugauaaaaaugcaacugcuagcuucauuuacaaugggaggcuuguagauaguguuguuucaugguccaaagaaauucucaggacccaggagucagaaugcguuuguaucaauggaacuuguacaguaguaaugacugauggaagugcuucaggaaaagcugauacuaaaauacuauucauugaggaggggaaaaucguucauacuagcacauugucaggaagugcucagcaugucgaagagugcucuugcuauccucgauauccuggugucagaugugucugcagagacaacuggaaaggcuccaaucggcccaucguagauauaaacauaaaggaucauagcauuguuuccaguuauguguguucaggacuuguuggagacacacccagaaaaaacgacagcuccagcaguagccauuguuuggauccuaacaaugaagaagguggucauggagugaaaggcugggccuuugaugauggaaaugacguguggaugggaagaacaaucaacgagacgucacgccuaggguaugaaaccuucaaagucauugaaggcugguccaauccuaaguccaaauugcagauaaauaggcaagucauaguugacagaggugauagguccgguuauucugguauuuucucuguugaaggcaaaagcugcaucaaucggugcuuuuauguagaguugauuaggggaagaaaagaggaaacugaagucuuguggaccucaaacaguauuguuguguuuuguggcaccucagguacauauggaacaggcucauggccugauggggcggaccucaaucucaugccuauauaa

SEQ ID NO: 57483 - RNA, 1410 nt, Artificial Sequence
  derived and/or modified CDS sequence (wt) from neuraminidase__InfluenzaA__AHZ42587
augaauccaaaucaaaagauaauaacgauuggcucuguuucucucaccauuuccacaauaugcuucuucaugcaaauugccaucuugauaacuacuguaacauugcauuucaagcaauaugaauucaacucccccccaaacaaccaagugaugcugugugaaccgacaauaauagaaagaaacauaacagagauaguguaucugaccaacaccaccauagagaaggaaaugugccccaaaccagcagaauacagaaauuggucaaaaccgcaauguggcauuacaggauuugcaccuuucucuaaggacaauucgauuaggcuuuccgcugguggggacaucugggugacaagagaaccuuaugugucaugcgauccugacaaguguuaucaauuugcccuuggacagggaacaacacuaaacaacgugcauucaaauaacacaguacgugauaggaccccuuaucggacucuauugaugaaugaguuggguguuccuuuucaucuggggaccaagcaagugugcauagcaugguccagcucaaguugucacgauggaaaagcauggcugcauguuuguauaacgggggaugauaaaaaugcaacugcuagcuucauuuacaaugggaggcuuguagauaguguuguuucaugguccaaagaaauucucaggacccaggagucagaaugcguuuguaucaauggaacuuguacaguaguaaugacugauggaagugcuucaggaaaagcugauacuaaaauacuauucauugaggaggggaaaaucguucauacuagcacauugucaggaagugcucagcaugucgaagagugcucuugcuauccucgauauccuggugucagaugugucugcagagacaacuggaaaggcuccaaucggcccaucguagauauaaacauaaaggaucauagcauuguuuccaguuauguguguucaggacuuguuggagacacacccagaaaaaacgacagcuccagcaguagccauuguuuggauccuaacaaugaagaagguggucauggagugaaaggcugggccuuugaugauggaaaugacguguggaugggaagaacaaucaacgagacgucacgcuuaggguaugaaaccuucaaagucauugaaggcugguccaauccuaaguccaaauugcagauaaauaggcaagucauaguugacagaggugauagguccgguuauucugguauuuucucuguugaaggcaaaagcugcaucaaucggugcuuuuauguagaguugauuaggggaagaaaagaggaaacugaagucuuguggaccucaaacaguauuguuguguuuuguggcaccucagguacauauggaacaggcucauggccugauggggcggaccucaaucucaugccuauauaa

SEQ ID NO: 57484 - RNA, 1413 nt, Artificial Sequence
  derived and/or modified CDS sequence (wt) from neuraminidase__InfluenzaA__AHZ42599
augaauccaaaucaaaagauaauaacgauuggcucuguuucucucaccauuuccacaauaugcuucuucaugcaaauugccaucuugauaacuacuguaacauugcauuucaagcaauaugaauucaacucccccccaaaaaacaaccaagugaugcugugugaaccgacaauaauagaaagaaacauaacagagauaguguaucugaccaacaccaccauagagaaggaaauaugccccaaaccagcagaauacagaaauuggucaaaaccgcaauguggcauuacaggauuugcaccuuucucuaaggacaauucgauuaggcuuuccgcugguggggacaucugggugacaagagaaccuuaugugucaugcgauccugacaaguguuaucaauuugcccuuggacagggaacaacacuaaacaacgugcauucaaauaacacaguacgugauaggaccccuuaucggacucuauugaugaaugaguuggguguuccuuuucaucuggggaccaagcaagugugcauagcaugguccagcucaaguugucacgauggaaaagcauggcugcauguuuguauaacgggggaugauaaaaaugcaacugcuagcuucauuuacaaugggaggcuuguagauaguguuguuucaugguccaaagaaauucucaggacccaggagucagaaugcguuuguaucaauggaacuuguacaguaguaaugacugauggaagugcuucagaaaaagcugauacuaaaauacuauucauugaggaggggaaaaucguucauacuagcacauugucaggaagugcucagcaugucgaagagugcucuugcuauccucgauauccuggugucagaugugucugcagagacaacuggaaaggcuccaaucggcccaucguagauauaaacauaaaggaucauagcauuguuuccaguuauguguguucaggacuuguuggagacacacccagaaaaaacgacagcuccagcaguagccauuguuuggauccuaacaaugaagaagguggucauggagugaaaggcugggccuuugaugauggaaaugacguguggaugggaagaacaaucaacgagacgucacgcuuaggguaugaaaccuucaaagucauugaaggcugguccaauccuaaguccaaauugcagauaaauaggcaagucauaguugacagaggugauagguccgguuauucugguauuuucucuguugaaggcaaaagcugcaucaaucggugcuuuuauguagaguugauuaggggaagaaaagaggaaacugaagucuuguggaccucaaacaguauuguuguguuuuguggcaccucagguacauauggaacaggcucauggccugauggggcggaccucaaucucaugccuauauaa

SEQ ID NO: 57485 - RNA, 1410 nt, Artificial Sequence; identical to SEQ ID NO: 57379
  derived and/or modified CDS sequence (wt) from neuraminidase__InfluenzaA__AHZ42611

SEQ ID NO: 57486 - RNA, 1410 nt, Artificial Sequence; identical to SEQ ID NO: 55337
  derived and/or modified CDS sequence (wt) from neuraminidase__InfluenzaA__AHZ42622

SEQ ID NO: 57487 - RNA, 1410 nt, Artificial Sequence
  derived and/or modified CDS sequence (wt) from neuraminidase__InfluenzaA__AHZ42634
augaauccaaaucaaaagauaauaacgauuggcucuguuucucucaccauuuccacaguaugcuucuucaugcaaauugccaucuugauaacuacuguaacauugcauuucaagcaauaugaauucaacucccccccaaacaaccaagugaugcugugugaaccaacaauaauagaaagaaacauaacagagauaguguaucugaccaacaccaccauagagaaggaaauaugccccaaaccagcagaauacagaaauuggucaaaaccgcaauguggcauuacaggauuugcaccuuucucuaaggacaauucgauuaggcuuuccgcugguggggacaucugggugacaagagaaccuuaugugucaugcgauccugacaaguguuaucaauuugcccuuggacagggaacaacacuaaacaacgugcauucaaauaacacaguacgugauaggaccccuuaucggacucuauugaugaaugaguuggguguuccuuuucaucuggggaccaagcaagugugcauagcaugguccagcucaaguugucacgauggaaaagcauggcugcauguuuguauaacgggggaugauaaaaaugcaacugcuagcuucauuuacaaugggaggcuuguagauaguguuguuucaugguccaaagaaauucucaggacccaggagucagaaugcguuuguaucaauggaacuuguacaguaguaaugacugauggaagugcuucaggaaaagcugauacuaaaauacuauucauugaggaggggaaaaucguucauacuagcacauugucaggaagugcucagcacgucgaagagugcucuugcuauccucgauauccuggugucagaugugucugcagagacaacuggaaaggcuccaaucggcccaucguagauauaaacauaaaggaucauagcauuguuuccaguuauguguguucaggacuuguuggagacacacccagaaaaaacgacagcuccagcaguagccauuguuuggauccuaacaaugaagaagguggucauggagugaaaggcugggccuuugaugauggaaaugacguguggaugggaagaacaaucaacgagacgucacgcuuaggguaugaaaccuucaaagucauugaaggcugguccaauucuaaguccaaauugcagauaaauaggcaagucauaguugacagaggugauagguccgguuauucugguauuuucucuguugaaggcaaaagcugcaucaaucggugcuuuuauguagaguugauuaggggaagaaaagaggaaacugaagucuuguggaccucaaacaguauuguuguguuuuguggcaccucagguacauauggaacaggcucauggccugauggggcggaccucaaucucaugccuauauaa

SEQ ID NO: 57488 - RNA, 1410 nt, Artificial Sequence
  derived and/or modified CDS sequence (wt) from neuraminidase__InfluenzaA__AHZ42646
augaauccaaaccaaaagauaauaaccauugguucggucuguaugacaauuggaauggcuaacuuaauauuacaaauuggaaacauaaucucaauauggauuagccacucaauucaaguugggaaucaaagucagauugaaacaugcaaucaaagcgucauuacuuaugaaaacaacacuuggguaaaucagacauauguuaacaucagcaacaccaacuuugcugcugggcagccagugguuuccgugaaauuagcgggcaauuccucucucugcccuguuaguggaugggcuauauacaguaaagacaacaguguaagaaucgguuccaagggggauguguuugucauaagggaaccauucauaucaugcucccccuuggaaugcagaaccuucuucuugacucaaggggccuugcuaaaugacaaacauuccaauggaaccauuaaagacaggagcccauaucgaacccuaaugagcuguccuauuggugaaguucccucuccauacaacucaagauuugagucagucgcuuggucagcaagugcuugucaugauggcaucaauuggcuaacaauuggaauuucuggcccagacaguggggcaguggcuguguuaaaguacaacggcauaauaacagacacuaucaagaguuggagaaacgauauauugagaacacaagagucugaaugugcauguguaaaugguucuugcuuuaccauaaugaccgauggaccaagugauggacaggccucauacaagaucuucagaauagaaaagggaaagauagucaaaucagucgaaaugaaugccccuaauuaucacuaugaggaaugcuccuguuauccugauucuagugaaaucacaugugugugcagggauaacuggcauggcucgaaucgaccgugggugucuuucaaccagaaucuggaauaucagauaggauacauaugcagugggauuuucggagacaauccacgcccuaaugauaagacaggcaguugugguccaguaucgucuaauggagcaaauggaguaaaaggauuuucauucaaauacggcaaugguguuuggauagggagaacuaaaagcauuaguucaagaaaagguuuugagaugauuugggauccaaauggauggacugggacagacaauaacuucucaauaaagcaagauaucguaggaauaaaugaguggucaggauauagcgggaguuuuguucagcauccagaacuaacagggcuggauuguauaagaccuugcuucuggguugaacuaaucagagggcgacccaaagagaacacaaucuggacuagugggagcagcauauccuuuugugguguaaacagugacacuguggguuggucuuggccagacggugcugaguugccauuuaccauugacaaguaa

SEQ ID NO: 57489 - RNA, 1410 nt, Artificial Sequence
  derived and/or modified CDS sequence (wt) from neuraminidase__InfluenzaA__AHZ42657
augaauccaaaucaaaagauaauaacgauuggcucuguuucucucaccauuuccacaauaugcuucuucaugcaaauugccaucuugauaacuacuguaacauugcauuucaagcaauaugaauucaacucccccccaaacaaccaagugaugcugugugaaccaacaauaauagaaagaaacauaacagagauaguguaucugaccaacaccaccauagagaaggaaauaugccccaaaccagcagaauacagaaauuggucaaaaccgcaauguggcauuacaggauuugcaccuuucucuaaggacaauucgauuaggcuuuccgcugguggggacaucugggugacaagagaaccuuaugugucaugcgauccugacaaguguuaucaauuugcccuuggacagggaacaacacuaaacaacgugcauucaaauaacacaguacgugauaggaccccuuaucggacucuauugaugaaugaguuggguguuccuuuucaucuggggaccaagcaagugugcauagcaugguccagcucaaguugucacgauggaaaagcauggcugcauguuuguauaacgggggaugauaaaaaugcaacugcuagcuucauuuacaaugggaggcuuguagauaguguuguuucaugguccaaagaaauucucaggacccaggagucagaaugcguuuguaucaauggaacuuguacaguaguaaugacugauggaagugcuucaggaaaagcugauacuaaaauacuauucauugaggaggggaaaaucguucauacuagcacauugucaggaagugcucagcaugucgaagagugcucuugcuauccucgauauccuggugucagaugugucugcagagacaacuggaaaggcuccaaucggcccaucguagauauaaacauaaaggaucauagcauuguuuccaguuauguguguucaggacuuguuggagacacacccagaaaaaacgacagcuccagcaguagccauuguuuggauccuaacaaugaagaagguggucauggagugaaaggcugggccuuugaugauggaaaugacguguggaugggaagaacaaucaaugagacgucacgcuuaggguaugaaaccuucaaagucauugaaggcugguccaauccuaaguccaaauugcagauaaauaggcaagucauaguugacagaggugauagguccgguuauucugguauuuucucuguugaaggcaaaagcugcaucaaucggugcuuuuauguagaguugauuaggggaagaaaagaggaaacugaagucuuguggaccucaaacaguauuguuguguuuuguggcaccucagguacauauggaacaggcucauggccugauggggcggaccucaaucucaugccuauauaa

SEQ ID NO: 57490 - RNA, 1410 nt, Artificial Sequence
  derived and/or modified CDS sequence (wt) from neuraminidase__InfluenzaA__AHZ42669
augaauccaaaucaaaagauaauaacgauuggcucuguuucucucaccauuuccacaauaugcuucuucaugcaaauugccaucuugguaacuacuguaacauugcauuucaagcaauaugaauucaacucccccccaaacaaccaagugaugcugugugaaccaacaauaauagaaagaaacauaacagagauaguguauuugaccaacaccaccauagagaaggaaauaugccccaaaccagcagaauacagaaauuggucaaaaccgcaauguggcauuacaggauuugcaccuuucucuaaggacaauucgauuaggcuuuccgcugguggggacaucugggugacaagagaaccuuaugugucaugcgauccugacaaguguuaucaauuugcccuuggacagggaacaacacuaaacaacgugcauucaaauaacacaguacgugauaggaccccuuaucggacucuauugaugaaugaguuggguguuccuuuucaucuggggaccaagcaagugugcauagcaugguccagcucaaguugucacgauggaaaagcauggcugcauguuuguauaacgggggaugauaaaaaugcaacugcuagcuucauuuacaaugggaggcuuguagauaguguuguuucaugguccaaagaaauucucaggacccaggagucagaaugcguuuguaucaauggaacuuguacaguaguaaugacugauggaagugcuucaggaaaagcugauacuaaaauauuauucauugaggaggggaaaaucguucauacuagcacauugucaggaagugcucagcaugucgaagagugcucuugcuauccucgauauccuggugucagaugugucugcagagacaacuggaaaggcuccaaucggcccaucguagauauaaacauaaaggaucauagcauuguuuccaguuauguguguucaggacuuguuggagacacacccagaaaaaacgacagcuccagcaguagccauuguuuggauccuaacaaugaagaagguggucauggagugaaaggcugggccuuugaugaugggaaugacguguggaugggaagaacaaucaacgaaacgucacgcuuaggguaugaaaccuucaaagucauugaaggcugguccaacccuaaguccaaauugcagauaaauaggcaagucauaguugacagaggugauagguccgguuauucugguauuuucucuguugaaggcaaaagcugcaucaaucggugcuuuuauguugaguugauuaggggaagaaaagaggaaacugaagucuuguggaccucaaacaguauuguuguguuuuguggcaccucagguacauauggaacaggcucauggccugauggggcggaccucaaucucaugccuauauaa

SEQ ID NO: 57491 - RNA, 1410 nt, Artificial Sequence; identical to SEQ ID NO: 55922
  derived and/or modified CDS sequence (wt) from neuraminidase__InfluenzaA__AHZ42681

SEQ ID NO: 57492 - RNA, 1410 nt, Artificial Sequence
  derived and/or modified CDS sequence (wt) from neuraminidase__InfluenzaA__AHZ42693
augaauccaaaccaaaagauaauaaccauugguucggucuguaugacaauuggaauggcuaacuuaauauuacaaauuggaaacauaaucucaauauggauuagccacucaauucaacuugggaaucaaagucagauugaaacaugcaaucaaagcgucauuacuuaugaaaacaacacuuggguaaaucagacauauguuaacaucagcaacaccaacuuugcugcuggacagucagugguuuccgugaaauuagcgggcaauuccucucucugcccuguuaguggaugggcuauauacaguaaagacaacaguguaagaaucgguuccaagggggauguguuugucauaagggaaccauucauaucaugcucccccuuggaaugcagaaccuucuucuugacucaaggggccuugcuaaaugacaaacauuccaauggaaccauuaaagacaggagcccauaucgaacccuaaugagcuguccuauuggugaaguucccucuccauacaacucaagauuugagucggucgcuuggucagcaagugcuugucaugauggcaucaauuggcuaacaauuggaauuucuggcccagacaguggggcaguggcuguauuaaaguacaauggcauaauaacagacacuaucaagaguuggagaaacaauauauugagaacacaagagucugaaugugcauguguaaaugguucuugcuuuaccauaaugaccgauggaccaagugauggacaggccucauacaagaucuucagaauagaaaagggaaagauagucaaaucagucgaaaugaaugccccuaauuaucacuaugaggaaugcuccuguuauccugauucuagugaaaucacaugugugugcagggauaacuggcauggcucgaaucgaccgugggugucuuucaaccagaaucuggaauaucagauaggauacauaugcagugggauuuucggagacaauccacgcccuaaugauaagacaggcaguugugguccaguaucgucuaauggagcaaauggaguaaaaggauuuucauucaaauacggcaaugguguuuggauagggagaacuaaaagcauuaguucaagaaaagguuuugagaugauuugggauccaaauggauggacugggacagacaauaacuucucaauaaagcaagauaucguaggaauaaaugaguggucaggauauagcgggaguuuuguucagcauccagaacuaacagggauggauuguauaagaccuugcuucuggguugaacuaaucagagggcgacccaaagagaacacaaucuggacuagcgggagcaucauauccuucugugguguaaacagugacacuguggguuggucuuggccagacggugcugaguugccauuuaccauugacaaguaa

SEQ ID NO: 57493 - RNA, 1410 nt, Artificial Sequence; identical to SEQ ID NO: 55337
  derived and/or modified CDS sequence (wt) from neuraminidase__InfluenzaA__AHZ42704

SEQ ID NO: 57494 - RNA, 1410 nt, Artificial Sequence
  derived and/or modified CDS sequence (wt) from neuraminidase__InfluenzaA__AHZ42716
augaauccaaaucaaaagauaauaacgauuggcucuguuucucucaccauuuccacaauaugcuucuucaugcaaauugccaucuugauaacuacuguaacauugcauuucaagcaauaugaauucaacucccccccaaacaaccaagugaugcugugugaaccaacaauaauagaaagaaacauaacagagauaguguauuugaccaacaccaccauagagaaggaaauaugccccaaaccagcagaauacagaaauuggucaaaaccgcaauguggcauuacaggauuugcaccuuucucuaaggacaauucgauuaggcuuuccgcugguggggacaucugggugacaagagaaccuuaugugucaugcgauccugacaaguguuaucaauuugcccuuggacagggaacaacacuaaacaacgugcauucaaauaacacaguacgugauaggaccccuuaucggacucuauugaugaaugaguuggguguuccuuuucaucuggggaccaagcaagugugcauagcaugguccagcucaaguugucacgauggaaaagcauggcugcauguuuguauaacgggggaugauaaaaaugcaacugcuagcuucauuuacaaugggaggcuuguagauaguguuguuucaugguccaaagaaauucucaggacccaggagucagaaugcguuuguaucaauggaacuuguacaguaguaaugacugauggaagugcuucaggaaaagcugauacuaaaauacuauucauugaggaggggaaaaucguucauacuagcacauugucaggaagugcucagcaugucgaagagugcucuugcuauccucgauauccuggugucagaugugucugcagagacaacuggaaaggcuccaaucggcccaucguagauauaaacauaaaggaucauagcauuguuuccaguuauguguguucaggacuuguuggagacacacccagaaaaaacgacagcuccagcaguagccauuguuuggauccuaacaaugaagaagguggucauggagugaaaggcugggccuuugaugauggaaaugacguauggaugggaagaacaaucaacgagacgucacgcuuaggguaugaaaccuucaaagucauugaaggcugguccaacccuaaguccaaauuucagauaaauaggcaagucauaguugacagaggugauagguccgguuauucugguauuuucucuguugaaggcaaaagcugcaucaaucggugcuuuuauguggaguugauuaggggaagaaaagaggaaacugaagucuuguggaccucaaacaguauuguuguguuuuguggcaccucagguacauauggaacaggcucauggccugauggggcggaccucaaucucaugccuauauaa

SEQ ID NO: 57495 - RNA, 1410 nt, Artificial Sequence; identical to SEQ ID NO: 55337
  derived and/or modified CDS sequence (wt) from neuraminidase__InfluenzaA__AHZ42728

SEQ ID NO: 57496 - RNA, 1410 nt, Artificial Sequence
  derived and/or modified CDS sequence (wt) from neuraminidase__InfluenzaA__AHZ42740
augaauccaaaccaaaagauaauaaccauugguucggucuguaugacaauuggaauggcuaacuuaauauuacaaauuggaaacauaaucucaauauggauuagccacucaauucaacuugggaaucaaagucagauugaaacaugcaaucaaagcgucauuacuuaugaaaacaacacuuggguaaaucagacauauguuaacaucaguaacaccaacuuugcugcuggacagucagugguuuccgugaaauuagcgggcaauuccucucucugcccuguuaguggaugggcuauauacaguaaagacaacaguguaagaaucgguuccaagggggauguguuugucauaagggaaccauucauaucaugcucccccuuggaaugcagaaccuucuucuugacucaaggggccuugcuaaaugacaaacauuccaauggaaccauuaaagacaggagcccauaucgaacccuaaugagcuguccuauuggugaaguucccucuccauacaacucaagauuugagucggucgcuuggucagcaagugcuugucaugauggcaucaauuggcuaacaauuggaauuucuggcccagacaguggggcaguggcuguauuaaaguacaauggcauaauaacagacacuaucaagaguuggagaaacaauauauugagaacacaagagucugaaugugcauguguaaaugguucuugcuuuaccauaaugaccgauggaccaagugauggacaggccucauacaagaucuucagaauagaaaagggaaagauagucaaaucagucgaaaugaaugccccuaauuaucacuaugaggaaugcuccuguuauccugauucuagugaaaucacaugugugugcagggauaacuggcauggcucgaaucgaccgugggugucuuucaaccagaaucuggaauaucagauaggauacauaugcagugggauuuucggagacaauccacgcccuaaugauaagacaggcaguugugguccaguaucgucuaauggagcaaauggaguaaaaggauuuucauucaaauacggcaaugguguuuggauagggagaacuaaaagcauuaguucaagaaaagguuuugagaugauuugggauccaaauggauggacugggacagacaauaacuucucaauaaagcaagauaucguaggaauaaaugaguggucaggguauagcgggaguuuuguucagcauccagaacuaacagggcuggauuguauaagaccuugcuucuggguugaacuaaucagagggcgacccaaagagaacacaaucuggacuagcgggagcagcauauccuuuugugguguaaacagugacacuguggguuggucuuggccagacggugcugaguugccauuuaccauugacaaguaa

SEQ ID NO: 57497 - RNA, 1410 nt, Artificial Sequence; identical to SEQ ID NO: 55379
  derived and/or modified CDS sequence (wt) from neuraminidase__InfluenzaA__AHZ42751

SEQ ID NO: 57498 - RNA, 1410 nt, Artificial Sequence
  derived and/or modified CDS sequence (wt) from neuraminidase__InfluenzaA__AHZ42763
augaauccaaaucaaaagauaauaacgauuggcucuguuucucucaccauuuccacaauaugcuucuucaugcaaauugccaucuugauaacuacuguaacauugcauuucaagcaauaugaauucaacucccccccaaacaaccaagugaugcugugugaaccaacaauaauagaaagaaacauaacagagauaguguaucuaaccaacaccaccauagagaaggaaauaugccccaaaccagcagaauacagaaauuggucaaagccgcagugugacauuacaggauuugcaccuuuuucuaaggacaauucgauuaggcuuuccgcugguggggacaucugggugacaagagaaccuuaugugucaugcgauccugacaaguguuaucaauuugcucuuggacagggaacaacacuaaacaacgugcauucaaauaacacaguacgugauaggaccccuuaucggacccuauugaugaaugaguuagguguuccuuuucaucuggggaccaagcaagugugcauagcaugguccagcucaaguugucacgauggaaaagcauggcugcauguuuguauaacgggggaugauaaaaaugcaacugcuagcuucauuuacaaugggaggcuuguagauaguguuguuucaugguccaaagaaauccucaggacccaggagucagaaugcguuuguaucaauggaacuuguacaguaguaaugacugaugggagugcuucaggaaaagcugauacuaaaauacuauucauugaggaggggaaaaucguauauacuagcacauugucaggaagugcucagcaugucgaggagugcucuugcuauccucgauauccuggugucagaugugucugcagagacaacuggaaaggcuccaauaggccuaucguagauauaaacauaaaggaucauagcauuguuuccagguauguguguucaggacuuguuggagacacacccagaaaaaacgacagcuccagcaguagccauuguuuggauccuaacaaugaagaagguggucauggagugaaaggcugggccuucgaugauggaaaugacguguggaugggaagaacgaucaacgagacgucacguuuaggguaugaaaccuucaaagucauugaaggcugguccaacccuaaguccaaauuacagauaaauaggcaggucauaguugacagaggugauagguccgguuauucugguauuuucucuguugaaggcaaaagcugcaucaaucggugcuuuuauguggaguugauuaggggaagaaaagaggaaacugaagucuuguggaccucaaacaguauuguuguguuuuguggcaccucagguacauauggaacaggcucauggccugauggggcggaccucaaucucaugccuauauaa

SEQ ID NO: 57499 - RNA, 1410 nt, Artificial Sequence; identical to SEQ ID NO: 55387
  derived and/or modified CDS sequence (wt) from neuraminidase__InfluenzaA__AHZ42775

SEQ ID NO: 57500 - RNA, 1410 nt, Artificial Sequence; identical to SEQ ID NO: 55364
  derived and/or modified CDS sequence (wt) from neuraminidase__InfluenzaA__AHZ42787

SEQ ID NO: 57501 - RNA, 1410 nt, Artificial Sequence
  derived and/or modified CDS sequence (wt) from neuraminidase__InfluenzaA__AHZ42799
augaauccaaaucaaaagauaauaacgauuggcucuguuucucucaccauuuccacaauaugcuucuucaugcaaauugccaucuugauaacuacuguaacauugcauuucaagcaauaugaauucaacucccccccaaacaaccaagugaugcugugugaaccaacaauaauagaaagaaacauaacagagauaguguauuugaccaacaccaccauagagaaggaaauaugccccaaaccagcagaauacagaaauuggucaaaaccgcaauguggcauuacaggauuugcaccuuucucuaaggacaauucgauuaggcuuuccgcugguggggacaucugggugacaagagaaccuuaugugucaugcgauccugacaaguguuaucaauuugcccuuggacagggaacaacacuaaacaacgugcauucaaauaacacaguacgugauaggaccccuuaucggacucuauugaugaaugaguuggguguuccuuuucaucuggggaccaagcaagugugcauagcaugguccagcucaaguugucacgauggaaaagcauggcugcauguuuguauaacgggggaugauaaaaaugcaacugcuagcuucauuuacaaugggaggcuuguagauaguguuguuucaugguccaaagaaauucucaggacccaggagucagaaugcguuuguaucaauggaacuuguacaguaguaaugacugauggaagugcuucaggaaaagcugauacuaaaauacuauucauugaggaggggaaaaucguucauacuagcacauugucaggaagugcucagcaugucgaagagugcucuugcuauccucgauauccuggugucagaugugucugcagagacaacuggaaaggcuccaaucggcccaucauagauauaaacauaaaggaucauagcauuguuuccaguuauguguguucaggacuuguuggagacacacccagaaaaaacgacagcuccagcaguagccauuguuuggauccuaacaaugaagaagguggucauggagugaaaggcugggccuuugaugauggaaaugacguauggaugggaagaacaaucaacgagacgucacgcuuaggguaugaaaccuucaaagucauugaaggcugguccaacccuaaguccaaauugcagauaaauaggcaagucauaguugacagaggugauagguccgguuauucugguauuuuuucuguugaaggcaaaagcugcaucaaucggugcuuuuauguggaguugauuaggggaagaaaagaggaaacugaagucuuguggaccucaaacaguauuguuguguuuuguggcaccucagguacauauggaacaggcucauggccugauggggcggaccucaaucucaugccuauauaa

SEQ ID NO: 57502 - RNA, 1410 nt, Artificial Sequence
  derived and/or modified CDS sequence (wt) from neuraminidase__InfluenzaA__AHZ42811
augaauccaaaucaaaagauaauaacgauuggcucuguuucucucaccauuuccacaauaugcuucuucaugcaaauugccaucuugauaacuacuguaacauugcauuucaagcaauaugaauucaacucccccccaaacaaccaagugaugcugugugaaccaacaauaauagaaagaaacauaacagagauaguguauuugaccaacaccaccauagagaaggaaauaugccccaaaccagcagaauacagaaauuggucaaaaccgcaauguggcauuacaggauuugcaccuuucucuaaggacaauucgauuaggcuuuccgcugguggggacaucugggugacaagagaaccuuaugugucaugcgauccugacaaguguuaucaauuugcccuuggacagggaacaacacuaaacaacgugcauucaaauaacacaguacgugauaggaccccuuaucggacucuauugaugaaugaguuggguguuccuuuucaucuggggaccaagcaagugugcauagcaugguccagcucaaguugucacgauggaaaagcauggcugcauguuuguauaacgggggaugauaaaaaugcaacugcuagcuucauuuacaaugggaggcuuguagauaguguuguuucaugguccaaagaaauucucaggacccaggagucagaaugcguuuguaucaauggaacuuguacaguaguaaugacugauggaagugcuucaggaaaagcugauacuaaaauacuauucauugaggaggggaaaaucguucauacuagcacauugucaggaagugcucagcaugucgaagagugcucuugcuauccucgauauccuggugucagaugugucugcagagacaacuggaaaggcuccaaucggcccaucguagauauaaacauaaaggaucauagcauuguuuccaguuauguguguucaggacuuguuggagacacacccagaaaaaacgacagcuccagcaguagccauuguuuggauccuaacaaugaagaagguggucauggagugaaaggcugggccuuugaugauggaaaugacguauggaugggaagaacaaucaacgagacgucacgcuuaggguaugaaaccuucaaagucauugaaggcugguccaacccuaaguccaaauugcagauaaauaggcaagucauaguuggcagaggugauagguccgguuauucugguauuuucucuguugaaggcaaaagcugcaucaaucggugcuuuuauguggaguugauuaggggaagaaaagaggaaacugaagucuuguggaccucaaacaguauuguuguguuuuguggcaccucagguacauauggaacaggcucauggccugauggggcggaccucaaucucaugccuauauaa

SEQ ID NO: 57503 - RNA, 1410 nt, Artificial Sequence
  derived and/or modified CDS sequence (wt) from neuraminidase__InfluenzaA__AHZ42823
augaauccaaaccaaaagauaauaaccauugguucggucuguaugacaauuggaauggcuaacuuaauauuacaaauuggaaacauaaucucaauauggauuagccacucaauucaacuugggaaucaaagucagauugaaacaugcaaucaaagcgucauuacuuaugaaaacaacacuuggguaaaucagacauauguuaacaucaguaacaccaacuuugcugcugaacagucagugguuuccgugaaauuagcgggcaauuccucucucugcccuguuaguggaugggcuauauacaguaaagacaacaguguaagaaucgguuccaagggggauguguuugucauaagggaaccauucauaucaugcucccccuuggaaugcagaaccuucuucuugacucaaggggccuugcuaaaugacaaacauuccaauggaaccauuaaagacaggagcccauaucgaacccuaaugagcuguccuauuggugaaguucccucuccauacaacucaagauuugagucggucgcuuggucagcaagugcuugucaugauggcaucaauuggcuaacaauuggaauuucuggcccagacaguggggcaguggcuguauuaaaguacaauggcauaauaacagacacuaucaagaguuggagaaacaauauauugagaacacaagagucugaaugugcauguguaaaugguucuugcuuuaccauaaugaccgauggaccaagugauggacaggccucauacaagaucuucagaauagaaaagggaaagauagucaaaucagucgaaaugaaugccccuaauuaucacuaugaggaaugcuccuguuauccugauucuagugaaaucacaugugugugcagggauaacuggcauggcucgaaucgaccgugggugucuuucaaccagaaucuggaauaucagauaggauacauaugcagugggauuuucggagacaauccacgcccuaaugauaagacaggcaguugugguccaguaucgucuaauggagcaaauggaguaaaaggauuuucauucaaauacggcaaugguguuuggauagggagaacuaaaagcauuaguucaagaaaagguuuugagaugauuugggauccaaauggauggacugggacagacaauaacuucucaauaaagcaagauaucguaggaauaaaugaguggucaggauauagcgggaguuuuguucagcauccagaacuaacagggcuggauuguauaagaccuugcuucuggguugaacuaaucagagggcgacccaaagagaacacaaucuggacuagcgggagcagcauauccuuuugugguguaaacagugacacuguggguuggucuuggccagacggugcugaguugccauuuaccauugacaaguaa

SEQ ID NO: 57504 - RNA, 1410 nt, Artificial Sequence
  derived and/or modified CDS sequence (wt) from neuraminidase__InfluenzaA__AHZ42834
augaauccaaaucaaaagauaauaacgauuggcucuguuucucucaccauuuccacaauaugcuucuucaugcaaacugccaucuugauaacuacuguaacauugcauuucaagcaauaugaauucaacucccccccaaacaaccaagugaugcugugugaaccaacaauaauagaaagaaacauaacagagauaguguaucugaccaacaccaccauagagaaggaaauaugccccaaaccagcagaauacagaaauuggucaaagccgcaauguggcauuacaggauuugcaccuuucucuaaggacaauucgauuaggcuuuccgcugguggggacaucugggugacaagagaaccuuaugugucaugcgauccugacaaguguuaucaauuugcccuuggacagggaacaacacuaaacaacgugcauucaaauaacacaguacgugauaggaccccuuaucggacucuauugaugaaugaguuggguguuccuuuucaucuggggaccaagcaagugugcauagcaugguccagcucaaguugucacgauggaaaagcauggcugcauguuuguauaacgggggaugauaaaaaugcaacugcuagcuucauuuacaaugggaggcuuguagauaguguuguuucaugguccaaagaaauucucaggacccaggagucagaaugcguuuguaucaauggaacuuguacaguaguaaugacugauggaagugcuucaggaaaagcugauacuaaaauacuauucauugaggaggggaaaaucguucauacuagcacauugucaggaagugcucagcaugucgaagagugcucuugcuauccucgauauccuggugucagaugugucugcagagacaacuggaaaggcuccaaucggcccaucguagauauaaacauaaaggaucauagcauuguuuccaguuauguguguucaggacuuguuggagacacacccagaaaaaacgacagcuccagcaguagccauuguuuggauccuaacaaugaagaagguggucauggagugaaaggcugggccuuugaugauggaaaugacguguggaugggaagaacaaucaacgagacgucacgcuuaggguaugaaaccuucaaagucauugaaggcugguccaacccuaaguccaaauugcagauaaauaggcaagucauaguugacagaggugauagguccgguuauucugguauuuucucuguugaaggcaaaagcugcaucaaucggugcuuuuauguggaguugauuaggggaagaaaagaggaaacugaagucuuguggaccucaaacaguauuguuguguuuuguggcaccucagguacauauggaacaggcucauggccugauggggcggaccucaaucucaugccuauauaa

SEQ ID NO: 57505 - RNA, 1410 nt, Artificial Sequence; identical to SEQ ID NO: 55957
  derived and/or modified CDS sequence (wt) from neuraminidase__InfluenzaA__AHZ42846

SEQ ID NO: 57506 - RNA, 1410 nt, Artificial Sequence
  derived and/or modified CDS sequence (wt) from neuraminidase__InfluenzaA__AHZ42858
augaauccaaaucaaaagauaauaacgauuggcucuguuucucucaccauuuccacaauaugcuucuucaugcaaauugccaucuugauaacuacuguaacauugcauuucaagcaauaugaauucaacucccccccaaacaaccaagugaugcugugugaaccaacaauaauagaaagaaacauaacagagauaguguauuugaccaacaccaccauagagaaggaaauaugccccaaaccagcagaauacagaaauuggucaaaaccgcaauguggcauuacaggauuugcaccuuucucuaaggacaauucgauuaggcuuuccgcugguggggacaucugggugacaagagaaccuuaugugucaugcgauccugacaaguguuaucaauuugcccuuggacagggaacaacacuaaacaacgugcauucaaauaacacaguacgugauaggaccccuuaucggacucuauugaugaaugaguuggguguuccuuuucaucuggggaccaagcaagugugcauagcaugguccagcucaaguugucacgauggaaaagcauggcugcauguuuguauaacgggggaugauaaaaaugcaacugcuagcuucauuuacaaugggaggcuuguagauaguguuguuucaugguccaaagaaauucucaggacccaggagucagaaugcguuuguaucaauggaacuuguacaguaguaaugacugauggaagugcuucaggaaaagcugauacuaaaauacuauucauugaggaggggaaaaucguucauacuagcacauugucaggaagugcucagcaugucgaagagugcucuugcuauccucgauauccuggugucagaugugucugcagagacaacuggaaaggcuccaaucggcccaucguagauauaaacauaaaggaucauagcauuguuuccaguuauguguguucaggacuuguuggagacacacccagaaaaaacgacagcuccagcaguagccauuguuuggauccuaacaaugaagaagguggucauggagugaaaggcugggccuuugaugauggaaaugacguauggaugggaagaacgaucaacgagacgucacgcuuaggguaugaaaccuucaaagucauugaaggcugguccaacccuaaguccaaauugcagauaaauaggcaagucauaguugacagaggugauagguccgguuauucugguauuuucucuguugaaggcaaaagcugcaucaaucggugcuuuuauguggaguugauuaggggaagaaaagaggaaacugaagucuuguggaccucaaacaguauuguuguguuuuguggcaccucagguacauauggaacaggcucauggccugauggggcggaccucaaucucaugccuauauaa

SEQ ID NO: 57507 - RNA, 1410 nt, Artificial Sequence; identical to SEQ ID NO: 56700
  derived and/or modified CDS sequence (wt) from neuraminidase__InfluenzaA__AHZ42870

SEQ ID NO: 57508 - RNA, 1410 nt, Artificial Sequence; identical to SEQ ID NO: 55957
  derived and/or modified CDS sequence (wt) from neuraminidase__InfluenzaA__AHZ42882

SEQ ID NO: 57509 - RNA, 1410 nt, Artificial Sequence
  derived and/or modified CDS sequence (wt) from neuraminidase__InfluenzaA__AHZ42894
augaauccaaaucaaaagauaauaacgauuggcucuguuucucucaccauuuccacaauaugcuucuucaugcaaauugccaucuugauaacuacuguaacauugcauuuuaagcaauaugaauucaacucccccccaaacaaccaagugaugcugugugaaccaacaauaauagaaagaaacauaacagagauaguguaucugaccaacaccaccauagagaaggaaauaugccccaaaccagcagaauacagaaauuggucaaaaccgcaauguggcauuacaggauuugcaccuuucucuaaggacaauucgauuaggcuuuccgcugguggggacaucugggugacaagagaaccuuaugugucaugcgauccugacaaguguuaucaauuugcccuuggacagggaacaacacuaaacaacgugcauucaaauaacacaguacgugauaggaccccuuaucggacucuauugaugaaugaguuggguguuccuuuucaucuggggaccaagcaagugugcauagcaugguccagcucaaguugucacgauggaaaagcauggcugcauguuuguauaacgggggaugauaaaaaugcaacugcuagcuucauuuacaaugggaggcuuguagauaguguuguuucaugguccaaggaaauucucaggacccaggagucagaaugcguuuguaucaauggaacuuguacaguaguaaugacugauggaagugcuucaggaaaagcugauacuaaaauacuauucauugaggaggggaaaaucguucauacuagcacauugucaggaagugcucagcaugucgaagagugcucuugcuauccucgauauccuggugucagaugugucugcagagacaacuggaaaggcuccaaucggcccaucguagauauaaacauaaaggaucauagcauuguuuccaguuauguguguucaggacuuguuggagacacacccagaaaaaacgacagcuccagcaguagccauuguuuggauccuaacaaugaagaagguggucauggagugaaaggcugggccuuugaugauggaaaugacguguggaugggaagaacaaucaacgagacgucacgcuuaggguaugaaaccuucaaagucauugaaggcugguccaauccuaaguccaaauugcagauaaauaggcaagucauaguugacaaaggugauagguccgguuauucugguauuuucucuguugaaggcaaaagcugcaucaaucggugcuuuuauguagaguugauuaggggaagaaaagaggaaacugaagucuuguggaccucaaacaguauuguuguguuuuguggcaccucagguacauauggaacaggcucauggccugauggggcggaccucaaucucaugccuauauaa

SEQ ID NO: 57510 - RNA, 1410 nt, Artificial Sequence
  derived and/or modified CDS sequence (wt) from neuraminidase__InfluenzaA__AHZ42906
augaauccaaaucaaaagauaauaacgauuggcucuguuucucucaccauuuccacaauaugcuucuucaugcaaauugccaucuugauaacuacuguaacauugcauuucaagcaauaugaauucaacucccccccaaacaaccaagugaugcugugugaaccaacaauaauagaaagaaacauaacagagauaguguauuugaccaacaccaccauagagaaggaaauaugccccaaaccagcagaauacagaaauuggucaaaaccgcaauguggcauuacaggauuugcaccuuucucuaaggacaauucgauuaggcuuuccgcugguggggacaucugggugacaagagaaccuuaugugucaugcgauccugacaaguguuaucaauuugcccuuggacaggggacaacacuaaacaacgugcauucaaauaacacaguacgugauaggaccccuuaucggacucuauugaugaaugaguuggguguuccuuuucaucuggggaccaagcaagugugcauagcaugguccagcucaaguugucacgauggaaaagcauggcugcauguuuguauaacgggggaugauaaaaaugcaacugccagcuucauuuacaaugggaggcuuguagauaguguuguuucaugguccaaagaaauucucaggacccaggagucagaaugcguuuguaucaauggaacuuguacaguaguaaugacugauggaagugcuucaggaaaagcugauacuaaaauacuauucauugaggaggggaaaaucguucauacuagcacauugucaggaagugcucagcaugucgaagagugcucuugcuauccucgauauccuggugucagaugugucugcagagacaacuggaaaggcuccaaucggcccaucguagauauaaacauaaaggaucauagcauuguuuccaguuauguguguucaggacuuguuggagacacacccagaaaaaacgacagcuccagcaguagccauuguuuggauccuaacaaugaagaagguggucauggagugaaaggcugggccuuugaugauggaaaugacguauggaugggaagaacaaucaacgagacgucacgcuuaggguaugaaaccuucaaagucauugaaggcugguccaacccuaaguccaaauugcagauaaauaggcaagucauaguugacagaggugauagguccgguuauucugguauuuucucuguugaaggcaaaagcugcaucaaucggugcuuuuauguggaguugauuaggggaagaaaagaggaaacugaagucuuguggaccucaaacaguauuguuguguuuuguggcaccucagguacauauggaacaggcucauggccugauggggcggaccucaaucucaugccuauauaa

SEQ ID NO: 57511 - RNA, 1410 nt, Artificial Sequence
  derived and/or modified CDS sequence (wt) from neuraminidase__InfluenzaA__AHZ42918
augaauccaaaucaaaagauaauaacgauuggcucuguuucucucaccauuuccacaauaugcuucuucaugcaaauugccaucuugauaacuacuguaacauugcauuucaagcaauaugaauucaauucccccccaaacaaccaagugaugcugugugaaccaacaauaauagaaagaaacauaacagagauaguguaucuaaccaacaccaccauagagaaggaaauaugccccaaaccagcagaauacagaaauuggucaaagccgcagugugacauuacaggauuugcaccuuuuucuaaggacaauucgauuaggcuuuccgcugguggggacaucugggugacaagagaaccuuaugugucaugcgauccugacaaguguuaucaauuugcucuuggacagggaacaacacuaaacaacgugcauucaaauaacacaguacgugauaggaccccuuaucggacccuauugaugaaugaguuagguguuccuuuucaucuggggaccaagcaaguaugcauagcaugguccagcucaaguugucacgauggaaaagcauggcugcauguuuguauaacgggggaugauaaaaaugcaacugcuagcuucauuuacaaugggaggcuuguagauaguguuguuucaugguccaaagaaauccucaggacccaggaaucagaaugcguuuguaucaauggaacuuguacaguaguaaugacugaugggagugcuucaggaaaagcugauacuaaaauacuauucauugaggaggggaaaauuguucauacuagcacauugucaggaagugcucagcaugucgaggagugcucuugcuauccucgauauccuggugucagaugugucugcagagacaacuggaaaggcuccaauaggccuaucguagauauaaacauaaaggaucauagcauuguuuccagguauguguguucaggacuuguuggagacacacccagaaaaaacgacagcucaagcaguagccauuguuuggauccuaacaaugaagaagguggucauggagugaaaggcugggccuucgaugauggaaaugacguguggaugggaagaacgaucaacgagacgucacguuuaggguaugaaaccuucaaagucauugaaggcugguccaacccuaaguccaaacugcagauaaauaggcaggucauaguugacagaggugauagguccgguuauucugguauuuucucuguugaaggcaaaagcugcaucaaucggugcuuuuauguggaguugauuaggggaagaaaagaggaaacugaagucuuguggaccucaaacaguauuguuguguuuuguggcaccucagguacauauggaacaggcucauggccugauggggcggaccucaaucucaugccuauauaa

SEQ ID NO: 57512 - RNA, 1398 nt, Artificial Sequence; identical to SEQ ID NO: 57317
  derived and/or modified CDS sequence (wt) from neuraminidase__InfluenzaA__AHZ59750

SEQ ID NO: 57513 - RNA, 1398 nt, Artificial Sequence; identical to SEQ ID NO: 57317
  derived and/or modified CDS sequence (wt) from neuraminidase__InfluenzaA__AHZ59762

SEQ ID NO: 57514 - RNA, 1398 nt, Artificial Sequence; identical to SEQ ID NO: 57317
  derived and/or modified CDS sequence (wt) from neuraminidase__InfluenzaA__AHZ59774

SEQ ID NO: 57515 - RNA, 1398 nt, Artificial Sequence; identical to SEQ ID NO: 57317
  derived and/or modified CDS sequence (wt) from neuraminidase__InfluenzaA__AHZ59786

SEQ ID NO: 57516 - RNA, 1398 nt, Artificial Sequence; identical to SEQ ID NO: 57317
  derived and/or modified CDS sequence (wt) from neuraminidase__InfluenzaA__AHZ59798

SEQ ID NO: 57517 - RNA, 1398 nt, Artificial Sequence; identical to SEQ ID NO: 57317
  derived and/or modified CDS sequence (wt) from neuraminidase__InfluenzaA__AHZ59810

SEQ ID NO: 57518 - RNA, 1398 nt, Artificial Sequence; identical to SEQ ID NO: 57317
  derived and/or modified CDS sequence (wt) from neuraminidase__InfluenzaA__AHZ59822

SEQ ID NO: 57519 - RNA, 1398 nt, Artificial Sequence; identical to SEQ ID NO: 57317
  derived and/or modified CDS sequence (wt) from neuraminidase__InfluenzaA__AHZ59834

SEQ ID NO: 57520 - RNA, 1398 nt, Artificial Sequence; identical to SEQ ID NO: 57317
  derived and/or modified CDS sequence (wt) from neuraminidase__InfluenzaA__AHZ59846

SEQ ID NO: 57521 - RNA, 1398 nt, Artificial Sequence; identical to SEQ ID NO: 57317
  derived and/or modified CDS sequence (wt) from neuraminidase__InfluenzaA__AHZ59858

SEQ ID NO: 57522 - RNA, 1398 nt, Artificial Sequence; identical to SEQ ID NO: 57317
  derived and/or modified CDS sequence (wt) from neuraminidase__InfluenzaA__AHZ59870

SEQ ID NO: 57523 - RNA, 1398 nt, Artificial Sequence; identical to SEQ ID NO: 57317
  derived and/or modified CDS sequence (wt) from neuraminidase__InfluenzaA__AHZ59882

SEQ ID NO: 57524 - RNA, 1398 nt, Artificial Sequence; identical to SEQ ID NO: 57317
  derived and/or modified CDS sequence (wt) from neuraminidase__InfluenzaA__AHZ59918

SEQ ID NO: 57525 - RNA, 1398 nt, Artificial Sequence; identical to SEQ ID NO: 57317
  derived and/or modified CDS sequence (wt) from neuraminidase__InfluenzaA__AHZ59930

SEQ ID NO: 57526 - RNA, 1398 nt, Artificial Sequence; identical to SEQ ID NO: 57317
  derived and/or modified CDS sequence (wt) from neuraminidase__InfluenzaA__AHZ59942

SEQ ID NO: 57527 - RNA, 1398 nt, Artificial Sequence; identical to SEQ ID NO: 57317
  derived and/or modified CDS sequence (wt) from neuraminidase__InfluenzaA__AHZ59954

SEQ ID NO: 57528 - RNA, 1398 nt, Artificial Sequence; identical to SEQ ID NO: 57317
  derived and/or modified CDS sequence (wt) from neuraminidase__InfluenzaA__AHZ59966

SEQ ID NO: 57529 - RNA, 1398 nt, Artificial Sequence; identical to SEQ ID NO: 57317
  derived and/or modified CDS sequence (wt) from neuraminidase__InfluenzaA__AHZ59991

SEQ ID NO: 57530 - RNA, 1398 nt, Artificial Sequence; identical to SEQ ID NO: 57317
  derived and/or modified CDS sequence (wt) from neuraminidase__InfluenzaA__AHZ60003

SEQ ID NO: 57531 - RNA, 1398 nt, Artificial Sequence; identical to SEQ ID NO: 57317
  derived and/or modified CDS sequence (wt) from neuraminidase__InfluenzaA__AHZ60015

SEQ ID NO: 57532 - RNA, 1398 nt, Artificial Sequence; identical to SEQ ID NO: 57317
  derived and/or modified CDS sequence (wt) from neuraminidase__InfluenzaA__AHZ60027

SEQ ID NO: 57533 - RNA, 1398 nt, Artificial Sequence; identical to SEQ ID NO: 57317
  derived and/or modified CDS sequence (wt) from neuraminidase__InfluenzaA__AHZ60039

SEQ ID NO: 57534 - RNA, 1398 nt, Artificial Sequence; identical to SEQ ID NO: 57317
  derived and/or modified CDS sequence (wt) from neuraminidase__InfluenzaA__AHZ60051

SEQ ID NO: 57535 - RNA, 1398 nt, Artificial Sequence; identical to SEQ ID NO: 57317
  derived and/or modified CDS sequence (wt) from neuraminidase__InfluenzaA__AHZ60063

SEQ ID NO: 57536 - RNA, 1398 nt, Artificial Sequence; identical to SEQ ID NO: 57317
  derived and/or modified CDS sequence (wt) from neuraminidase__InfluenzaA__AHZ60075

SEQ ID NO: 57537 - RNA, 1398 nt, Artificial Sequence; identical to SEQ ID NO: 57317
  derived and/or modified CDS sequence (wt) from neuraminidase__InfluenzaA__AHZ60087

SEQ ID NO: 57538 - RNA, 1398 nt, Artificial Sequence; identical to SEQ ID NO: 57317
  derived and/or modified CDS sequence (wt) from neuraminidase__InfluenzaA__AHZ60099

SEQ ID NO: 57539 - RNA, 1410 nt, Artificial Sequence; identical to SEQ ID NO: 55364
  derived and/or modified CDS sequence (wt) from neuraminidase__InfluenzaA__AHZ60111

SEQ ID NO: 57540 - RNA, 1410 nt, Artificial Sequence
  derived and/or modified CDS sequence (wt) from neuraminidase__InfluenzaA__AIA26299
augaauccaaaucaaaagauaauaacgauuggcucuguuucucucaccauuuccacaauaugcuucuucaugcaaauugccaucuugauaacuacuguaacauugcauuucaagcaauaugaauucagcucccccccaaacaaccaagugaugcugugugaaccaacaauaauagaaagaaacauaacagagauaguguaucugaccaacaccaccauagagaaggaaauaugccccaaacuagcagaauacagaaauuggucaaagccgcaaugugacauuacaggauuugcaccuuuuucuaaggacaauucgauuaggcuuuccgcugguggggacaucugggugacaagagaaccuuaugugucaugcgauccugacaaguguuaucaauuugcccuuggacagggaacaacacuaaacaacgugcauucaaaugacacaguacaugauaggaccccuuaucggacccuauugaugaaugagcuagguguuccauuucaucuggggaccaagcaagugugcauagcaugguccagcucaaguugucacgauggaaaagcauggcugcauguuuguguaacgggggaugacaaaaaugcaacugcuagcuucauuuacaaugggaggcuuguagauaguauuguuucaugguccaaagaaauccucaggacccaggagucagaaugcguuuguaucaauggaacuuguacaguaguaaugacugaugggagugcuucaggaaaagcugauacuaaaauacuauucauugaggaggggaaaaucguucauacuagcacauugucaggaagugcucagcaugucgaggagugcuccugcuauccucgauauccuggugucagaugugucugcagagacaauuggaaaggcuccaauaggcccaucguagauauaaacauaaaggauuauagcauuguuuccagauaugugugcucaggacuuguuggagacacacccagaaaaaacgacagcuccagcaguagccauugcuuggauccuaacaaugaagaagguggucauggagugaaaggcugggccuuugaugauggaaaugacguguggaugggaagaacgaucagcgagaagucacgcucaggauaugaaaccuucaaagucauugaaggcugguccaacccuaauuccaaauugcagauaaauaggcaagucauaguugacagagguaauagguccgguuauucugguauuuucucuguugaaggcaaaagcugcaucaaucgguguuuuuauguggaguugauaaggggaagaaaagaggaaacugaaguuuuguggaccucaaacaguauuguuguguuuuguggcaccuccgguacauauggaacaggcucauggccugauggggcggacaucaaucucaugccuauauaa

SEQ ID NO: 57541 - RNA, 1374 nt, Artificial Sequence
  derived and/or modified CDS sequence (wt) from neuraminidase__InfluenzaA__AIC64891
augaauccaaaccaaaagauaauaaccauugguucggucuguaugacaauuggaauggcuaacuuaauauuacaaauuggaaacauaaucucaauauggauuagccacucaauucaacuugggaaucaaaaucagauugaaacaugcaaucaaagcgucauuacuuaugaaaacaacaccaacuuugcugcuggacagucagugguuuccgugaaauuagcgggcaauuccucucucugcccuguuaguggaugggcuauauacaguaaagacaacaguguaagaaucgguuccaagggggauguguuugucauaagggaaccauucauaucaugcucccccuuggaaugcagaaccuucuucuugacucaaggggccuugcuaaaugacaaacauuccaauggaaccauuaaagacaggagcccauaucgaacccuaaugagcuguccuauuggugaaguucccucuccauacaacucaagauuugagucagucgcuuggucagcaagugcuugucaugauggcaucaauuggcuaacaauuggaauuucuggcccagacaauggggcaguggcuguguuaaaguacaacggcauaauaacagacacuaucaagaguuggagaaacaauauauugagaacacaagagucugaaugugcauguguaaaugguucuugcuuuacuguaaugaccgauggaccaaguaauggacaggccucauacaagaucuucagaauagaaaagggaaagauagucaaaucagucgaaaugaaugccccuaauuaucacuaugaggaaugcuccuguuauccugauucuagugaaaucacaugugugugcagggauaacuggcauggcucgaaucgaccgugggugucuuucaaccagaaucuggaauaucagauaggauacauaugcagugggauuuucggagacaauccacgcccuaaugauaagacaggcaguugugguccaguaucgucuaauggagcaaauggaguaaaaggauuuucauucaaauacggcaaugguguuuggauagggagaacuaaaagcauuaguucaagaaacgguuuugagaugauuugggauccgaacggauggacugggacagacaauaacuucucaauaaagcaagauaucguaggaauaaaugaguggucaggauauagcgggaguuuuguucagcauccagaacuaacagggcuggauuguauaagaccuugcuucuggguugaacuaaucagagggcgacccaaagagaacacaaucuggacuagcgggagcagcauauccuuuugugguguaaacagugacacuguggguuggucuuggccagacggugcugaguugccauuuaccauugacaaguaa

SEQ ID NO: 57542 - RNA, 1350 nt, Artificial Sequence
  derived and/or modified CDS sequence (wt) from neuraminidase__InfluenzaA__AID48084
augaauccaaauaagaagauaauaaccaucggaucaaucuguaugguaacuggaaugguuagcuuaauguuacaaauugggaacuugaucucaauaugggucagucauucaauucacacagggaaucaacacaaagcugaaccaaucagcaauacuaaucuucuuacugagaaaacuguggcuucaguaaaauuagcgggcaauucaucucuuugccccauuaauggaugggcuguauacaguaaggacaacaguauaaggaucgguuccaagggggauguguuuguuauaagagagccauucaucucaugcucccacuuggaaugcagaacuuucuuuuugacucagggagccuugcugaaugacaagcacuccaaugggacugucaaagacagaaguccucacagaacauuaaugaguuguccugugggugaggcucccuccccauacaacucaagguuugagucuguugcuuggucagcaagugcuugccaugauggcaccaguugguugacaauuggaauuucuggcccagacaauggggcuguggcuguauugaaauacaauggcauaauaacagacacuaucaagaguuggaggaauaacauacugagaacucaagagucugaaugugcauguguaaauggcucuugcuuuacuguaaugacugacggaccaaguaauggucaggcaucacauaagaucuucaaaauggaaaaaggaaaagugguuaaaucagucgaauuggaugcucccaauuaucacuaugaggaaugcuccuguuauccugaugccggcgaaaucacaugugugugcagggauaauuggcauggcucaaaucggccauggguaucuuucaaucaaaauuuggaguaucaaauaggauauauaugcaguggaguuuucggagacaauccacgccccaaugauggagcagguaguugugguccgguguccucuaacggggcauaugggguaaaaggguuuucauuuaaauacggcaauggugucuggaucgggagaacaaaaagcacuaauuccaggagcggcuuugaaaugauuugggauccaaauggguggacugaaacggacaguagcuuuucagugaaacaagauaucguagcaauaacugauuggucaggauauagcgggaguuuuguccagcauccagaacugacaggacuagauugcauaagaccuuguuucuggguugaguugaucagagggcggcccaaagagagcacaauuuggacuagugggagcagcauaucuuuuugugguguaaauagugacacuguggguuggucuuggccagacggugcugaguugccauucaccauugacaaguag

SEQ ID NO: 57543 - RNA, 1410 nt, Artificial Sequence
  derived and/or modified CDS sequence (wt) from neuraminidase__InfluenzaA__AID70507
augaauccaaaccaaaagauaauaaccauugguucggucuguacgacaauuggaauggcuaacuuaauauuacaaauuggaaacauaaucucaauauggauuagccacucaauucaacuugggaaucaaaaucagauugaaacaugcaaucaaagcgucauuacuuaugaaaacaaaacuuggguaaaucagacauauguuaacaucagcaacaccaacuuugcugcuggacagucagugguuuccgugaaauuagcgggcaauuccucucucugcccuguuaguggaugggcuauauacaguaaagacaacaguauaagaaucgguuccaagggggauguguuugucauaagggaaccauucauaucaugcucccccuuggaaugcagaaccuucuucuugacucaaggggccuugcuaaaugacaaacauuccaauggaaccauuaaagacaggagcccauaucgaacccuaaugagcuguccuauuggugaaguucccucuccauacaacucaagauuugagucagucgcuuggucagcaagugcuugucaugauggcaucaauuggcuaacaauuggaauuucuggcccagacaauggggcaguggcuguguuaaaguacaacggcauaauaacagacacuaucaagaguuggagaaacaauauauugagaacacaagagucugaaugugcauguguaaaugguucuugcuuuacuguaaugaccgauggaccaagugauggacaggccucauacaagaucuucagaauagaaaagggaaagauagucaaaucagucgaaaugaaugccccuaauuaucacuaugaggaaugcuccuguuauccugauucuagugaaaucacaugugugugcagggauaacuggcauggcucgaaucgaccgugggugucuuucaaccagaaccuggaauaucagauaggauacauaugcagugggauuuucggagacaauccacgcccuaaugauaagacaggcaguugugauccaguaucguuuaauggagcaaauggaguaaaaggguuuucauucaaauacggcaaugguguuuggauagggagaacuaaaagcauuaguucaagaaacgguuuugagaugauuugggauccgaacggauggaccgggacagacaauaaauucucaauaaagcaagauauuguaggaauaaaugaguggucaggauauagcgggaguuuuguucagcauccagaacuaacagggcuggauuguauaagaccuugcuucuggguugaacuaaucagagggcgacccaaagagaacacaauuuggacuagcgggagcagcauauccuuuugugguguaaacagugacacuguggguugguuuuggccagacggugcugaguugccauuuaccauugacaaguaa

SEQ ID NO: 57544 - RNA, 1410 nt, Artificial Sequence
  derived and/or modified CDS sequence (wt) from neuraminidase__InfluenzaA__AID70508
augaauccaaaccaaaagauaauaaccauugguucggucuguaugacaauuggaauggcuaacuuaauauuacaaauuggaaacauaaucucaauauggauuagccacucaauucaacuugggaaucaaagucagauugaaacaugcaaucaaagcgucauuacuuaugaaaacaacacuuggguaaaucagacauauguuaacaucagcaacaccaacuuugcugcuggacagucagugguuuccgugaaauuagcgggcaauuccucucucugcccuguuaguggaugggcuauauacaguaaagacaacaguauaagaaucgguuccaagggggauguguuugucauaagggaaccauucauaucaugcucccccuuggaaugcagaaccuucuucuugacucaaggggccuugcuaaaugacaaacauuccaauggaaccauuaaagacaggagcccauaucgaacccuaaugagcuguccuauuggugaaguucccucuccauacaacucaagauuugagucagucgcuuggucagcaagugcuugucaugauggcaucaauuggcuaacaauuggaauuucuggcccaaacaauggggcaguggcuguguuaaaguacaacggcauaauaacagacacuaucaagaguuggagaaacaauauauugagaacacaagagucugaaugugcauguguaaaugguucuugcuuuaccauaaugaccgauggaccaagugauggacaggccucauacaagaucuucagaauagaaaagggaaagauagucaaaucagucgaaaugaaugccccuaauuaucacuaugaggaaugcuccuguuauccugauucuagugaaaucacaugugugugcagggauaacuggcauggcucgaaucgaccgugggugucuuucaaccagaaucuggaauaucagauaggauacauaugcagugggauuuucggagacaauccacgcccuaaugauaagacaggcaguugugguccaguaucgucuaauggagcaaauggaguaaaaggauuuucauucaaauacggcaaugguguuuggauagggagaacuaaaagcauuaguucaagaaaagguuuugagaugauuugggauccaaacggauggacugggacagacaauaacuucucaauaaagcaagauaucguaggaauaaaugaguggucaggauauagcgggaguuuuguucagcauccagaacuaacagggcuggauugcauaagaccuugcuucuggguugaacuaaucagagggcgacccaaagagaacacaaucuggacuagcgggagcagcauauccuuuugugguguaaacagugacacuguggguuggucuuggccagacggugcugaauugccauuuaccauugacaaguaa

SEQ ID NO: 57545 - RNA, 1410 nt, Artificial Sequence
  derived and/or modified CDS sequence (wt) from neuraminidase__InfluenzaA__AID70509
augaauccaaaccaaaagauaauaaccauugguucggucuguaugacaauuggaauggcuaacuuaauauuacaaauuggaaacauaaucucaauauggauuagccacucaauucaacuugggaaucaaagucagauugaaacaugcaaucaaagcgucauuacuuaugaaaacaacacuuggguaaaucagacauauguuaacaucagcaacaccaauuuugcugcuggacagucagugguuuccgugaaauuagcgggcaauuccucucucugcccuguuaguggaugggcuauauacaguaaagacaacaguauaagaaucgguuccaagggggauguguuugucauaagggaaccauucauaucaugcucccccuuggaaugcagaaccuucuucuugacccaaggggccuugcuaaaugacaaacauuccaauggaaccauuaaagacaggagcccauaucgaacccuaaugagcuguccuauuggugaaguucccucuccauacaacucaagauuugagucagucgcuuggucagcaagugcuugucaugauggcaucaauuggcuaacaauuggaauuucuggcccagacaauggggcaguggcuguguuaaaguacaacggcauaauaacagacacuaucaagaguuggagaaacaauauauugagaacacaagagucugaaugugcauguguaaaugguucuugcuuuaccauaaugaccgauggaccaagugauggacaggccucauacaagaucuucagaauagaaaagggaaagauagucaaaucaguugaaaugaaugccccuaauuaucacuaugaggaaugcuccuguuauccugauucuagugaaaucacaugugugugcagggauaacuggcauggcucgaaucgaccgugggugucuuucaaccagaaucuggaauaucagauaggauacauaugcagugggauuuucggagacaauccacgcccuaaugauaagacaggcaguugugguccaguaucgucuaauggagcaaauggaguaaaaggauuuucauucaaauacggcaaugguguuuggauagggagaacuaaaagcauuaauucaagaaaagguuuugagaugauuugggauccaaacggauggacugggacagacaauaacuucucaauaaagcaagauaucguaggaauaaaugaguggucaggauauagcgggaguuuuguucagcauccagaacuaacagggcuggauuguauaagaccuugcuucuggguugaacuaaucagagggcgacccaaagagaacacaaucuggacuagcgggagcagcauauccuuuugugguguaaacagugacacuguggguuggucuuggccagacggugcugaguugccauuuaccauugacaaguaa

SEQ ID NO: 57546 - RNA, 1410 nt, Artificial Sequence
  derived and/or modified CDS sequence (wt) from neuraminidase__InfluenzaA__AID70510
augaauccaaaccaaaagauaauaaccauugguucggucuguauaacaauuggaauggcuaacuuaauauuacaaauuggaaacauaaucucaauauggauuagccacucaauucaacuugggaaucaaagucagauugaaacaugcaaucaaagcgucauuacuuaugaaaacaacacuuggguaaaucagacauauguuaacaucagcaacaccaacuuugcugcuggacagucagugguuuccgugaaauuagcgggcaauuccucucucugcccuguuaguggaugggcuauauacaguaaagacaacaguauaagaaucgguuccaagggggauguguuugucauaagggaaccauucauaucaugcucccccuuggaaugcagaaccuucuucuugacucaaggggccuugcuaaaugacaaacauuccaauggaaccauuaaagacaggagcccauaucgaacccuaaugagcuguccuauuggugaaguucccucuccauacaacucaagauuugagucaguugcuuggucagcaagugcuugucaugauggcaucaauuggcuaacaauuggaauuucuggcccagacaauggggcaguggcuguguuaaaguacaacggcauaauaacagacacuaucaagaguuggagaaacaauauauugagaacacaagagucugaaugugcauguguaaaugguucuugcuuuaccauaaugaccgauggaccaagugauggacaggccucauacaagaucuucagaauagaaaagggaaagauagucaaaucagucgaaaugaaugccccuaauuaucacuaugaggaaugcuccuguuauccugauucuagugaaauuacaugugugugcagggauaacuggcauggcucgaaucgaccgugggugucuuucaaccagaaucuggaauaucagauaggauacauaugcagugggauuuucggagacaauccacgcccuaaugauaagacaggcaguugugguccaguaucgucuaauggagcaaauggaguaaaaggauuuucauucaaauacggcaaugguguuuggauagggagaacuaaaagcauuaguucaagaaaagguuuugagaugauuugggauccaaacggauggacugggacagacaauaacuucucaauaaagcaagauaucguaggaauaaaugaguggucaggauauagcgggaguuuuguucagcauccagaacuaacagggcuggauuguauaagaccuugcuucuggguugaacuaaucagagggcgacccaaagagaacacaaucuggacuagcgggagcagcauauccuuuugugguguaaacagugacacuguggguuggucuuggccagacggugcugaguugccauuuaccauugacaaguaa

SEQ ID NO: 57547 - RNA, 1410 nt, Artificial Sequence
  derived and/or modified CDS sequence (wt) from neuraminidase__InfluenzaA__AID70511
augaauccaaaccaaaagauaauaaccauggguucggucuggaugacaauuggaauggcuaacuugauauuacaaaguggaaacauaaucucaauauggauuagccacucaauucaacuuaggaaucaaagucagauugaaacaugcaaucaaagcgucauuacuuaugaaaacaacacuuggguaaaucagacauauguuaacaucagcaacaccaacuuugcugcuggacagucagugguuuccgugaaauuagcgggcaauuccucucucugcccuguuaguggaugggcuauauacaguaaagacaacaguauaagaaucgguuccaagggggauguguuugucauaagggaaccauucauaucaugcucccccuuggaaugcagaaccuucuucuugacccaaggggccuugcuaaaugacaaacauuccaauggaaccauuaaagacaggagcccauaucgaacccuaaugagcuguccuauuggugaaguucccucuccauacaacucaagauuugagucagucgcuuggucagcaagugcuugucaugauggcaucaauuggcuaacaauuggaauuucuggcccagacaauggggcaguggcuguguuaaaguacaacggcauaauaacagacacuaucaagaguuggagaaacaauauauugagaacacaagagucugaaugugcauguguaaaugguucuugcuuuaccauaaugaccgauggaccaagugauggacaggccucauacaagaucuucagaauagaaaagggaaagauagucaaaucagucgaaaugaaugccccuaauuaucacuaugaggaaugcuccuguuauccugauucuagugaaaucacaugugugugcagggauaacuggcauggcucgaaucgaccgugggugucuuucaaccagaaucuggaauaucagauaggauacauaugcagugggauuuucggagacaauccacgcccuaaugauaagacaggcaguugugguccaguaucgucuaauggagcaaauggaguaaaaggauuuucauucaaauacggcaaugguguuuggauagggagaacuaaaagcauuaguucaagaaaagguuuugagaugauuugggauccaaacggauggacugggacagacaauaacuucucaauaaagcaagauaucguaggaauaaaugaguggucaggauauagcgggaguuuuguucagcauccagaacuaacagggcuggauuguauaagaccuugcuucuggguugaacuaaucagagggcgacccaaagagaacacaaucuggacuagcgggagcagcauauccuuuugugguguaaacagugacacuguggguuggucuuggccagacggugcugaguugccauuuaccauugacaaguaa

SEQ ID NO: 57548 - RNA, 1410 nt, Artificial Sequence
  derived and/or modified CDS sequence (wt) from neuraminidase__InfluenzaA__AID70512
augaauccaaaccaaaagauaauaaccauugguucggucuggaugacaauuggaauggcuaaccuaauauuacaaauuggaaacauaaucucaauauggauuagccacucaauucaacuugggaaucaaagucagauugaaacaugcaaucaaagcgucauuacuuaugaaaacaacacuuggguaaaucagacauauguuaacaucagcaacaccaacuuugcugcuggacagucagugguuucugugaaauuagcgggcaauuccucucucugcccuguuaguggaugggcuauauacaguaaagacaacaguauaagaaucgguuccaagggggauguguuugucauaagggaaccauucauaucaugcucccccuuggaaugcagaaccuucuucuugacucaaggggccuugcuaaaugacaaacauuccaauggaaccauuaaagacaggagcccauaucgaacccuaaugagcuguccuauuggugaaguucccucuccauacaacucaagauuugagucagucgcuuggucagcaagugcuugucaugauggcaucaauuggcuaacaauuggaauuucuggcccagacaauggggcaguggcuguguuaaaguacaacggcauaauaacagacacuaucaagaguuggagaaacaauauauugagaacacaagagucugaaugugcauguguaaaugguucuugcuuuaccauaaugaccgauggaccaagugauggacaggccucauacaagaucuucagaauagaaaagggaaagauagucaaaucagucgaaaugaaggccccuaauuaucacuaugaggaaugcuccuguuauccugauucuagugaaaucacaugugugugcagggauaacuggcauggcucgaaucgaccgugggugucuuucaaccagaaucuggaauaucagauaggauacauaugcagugggauuuucggagacaauccacgcccuaaugauaagacaggcaguugugguccaguaucgucuaauggagcaaauggaguaaaaggauuuucauucaaauacggcaaugguguuuggauagggagaacuaaaagcauuaguucaagaaaagguuuugagaugauuugggauccaaacggauggacugggacagacaauaacuucucaauaaagcaagauaucauaggaauaaaugaguggucaggauauagcgggaguuuuguucagcauccagaacuaacagggcuggauuguauaagaccuugcuucuggguugaacuaaucagagggcgacccaaagagaacacaaucuggacuagcgggagcaguauauccuuuugugguguaaacagugacacuguggguuggucuuggccagacggugcugaguugccauuuaccauugacaaguaa

SEQ ID NO: 57549 - RNA, 1410 nt, Artificial Sequence; identical to SEQ ID NO: 52606
  derived and/or modified CDS sequence (wt) from neuraminidase__InfluenzaA__AID70514

SEQ ID NO: 57550 - RNA, 1410 nt, Artificial Sequence
  derived and/or modified CDS sequence (wt) from neuraminidase__InfluenzaA__AID70515
augaauccaaaccaaaagauaauaaccauugguucggucuguaugacaauuggaauggcuaacuuaauauuacaaauuggaaacauaaucucaauauggauuagccacucaauucaacuuaggaaucaaagucagauugaaacaugcaaucaaagcgucauuacuuaugaaaacaacacuuggguaaaucagacauauguuaacaucagcaacaccaauuuugcugcuggacagucagugguuuccgugaaauuagcgggcaauuccucucucugcccuguuaguggaugggcuauauacaguaaagacaacaguauaagaaucgguuccaagggggauguguuugucauaagggaaccauucauaucaugcucccccuuggaaugcagaaccuucuucuugacccaaggggccuugcuaaaugacaaacauuccaauggaaccauuaaagacaggagcccauaucgaacccuaaugagcuguccuauuggugaaguucccucuccauacaacucaagauuugagucagucgcuuggucagcaagugcuugucaugauggcaucaauuggcuaacaauuggaauuucuggcccagacaauggggcaguggcuguguuaaaguacaacggcauaauaacagacacuaucaagaguuggagaaacaauauauugagaacacaagagucugaaugugcauguguaaaugguucuugcuuuaccauaaugaccgauggaccaagugauggacaggccucauacaagaucuucagaauagaaaagggaaagauagucaaaucagucgaaaugaaugccccuaauuaucacuaugaggaaugcuccuguuauccugauucuagugaaaucacaugugugugcagggauaacuggcauggcucgaaucgaccgugggugucuuucaaccagaaucuggaauaucagauaggauacauaugcagugggauuuucggagacaauccacgcccuaaugauaagacaggcaguugugguccaguaucgucuaauggagcaaaugggguaaaaggauuuucauucaaauacagcaaugguguuuggauagggagaacuaaaagcauuaguucaagaaaagguuuugagaugauuugggauccaaacggauggacugggacagacaauaacuucucaauaaagcaagauaucguaggaauaaaugaguggucaggauauagcgggaguuuuguucagcauccagaacuaacagggcuggauuguauaagaccuugcuucuggguugaacuaaucagagggcgacccaaagagaacacaaucuggacuagcgggagcagcauauccuuuugugguguaaacagugacacuguggguuggucuuggccagacggugcugaguugccauuuaccauugacaaguaa

SEQ ID NO: 57551 - RNA, 1410 nt, Artificial Sequence
  derived and/or modified CDS sequence (wt) from neuraminidase__InfluenzaA__AID70516
augaauccaaaccaaaagauaauaaccauugguucggucuguaugacaauuggaauggcuaacuuaauauuacaaauuggaaacauaaucucaauauggauuagccacucaauucaacuuaggaaucaaagucagauugaaacaugcaaucaaagcgucauuacuuaugaaaacaacacuuggguaaaucagacauauguuaacaucagcaacaccaacuuugcugcuggacagucagugguuuccgugaaauuagcgggcaauuccucucucugcccuguuaguggaugggcuauauacaguaaagacaacaguauaagaaucgguuccaagggggauguguuugucauaagggaaccauucauaucaugcucccccuuggaaugcagaaccuucuucuugacccaaggggccuugcuaaaugacaaacauuccaauggaaccauuaaagacaggagcccauaucgaacccuaaugagcuguccuauuggugaaguucccucuccauacaacucaagauuugagucagucgcuuggucagcaagugcuugucaugauggcaucaauuggcuaacaauuggaauuucuggcccagacaauggggcaguggcuguguuaaaguacaacggcauaauaacagacacuaucaagaguuggagaaacaauauauugagaacacaagagucugaaugugcauguguaaaugguucuugcuuuaccauaaugaccgauggaccaagugauggacaggccucauacaagaucuucagaauagaaaagggaaagauagucaaaucagucgaaaugaaugccccuaauuaucacuaugaggaaugcuccuguuauccugauucuagugaaaucacaugugugugcagggauaacuggcauggcucgaaucgaccgugggugucuuucaaccagaaucuggaauaucagauaggauacauaugcagugggauuuucggagacaauccacgcccuaaugauaagacaggcaguugugguccaguaucgucuaauggagcaaauggaguaaaaggauuuucauucaaauacggcaaugguguuuggauagggagaacuaaaagcauuaguucaagaaaagguuuugagaugauuugggauccaaacggauggacugggacagacaauaacuucucaauaaagcaagauaucguaggaauaaaugaguggucaggauauagcgggaguuuuguucagcauccagaacuaacagggcuggauuguauaagaccuugcuucuggguugaacuaaucagagggcgacccaaagagaacacaaucuggacuagcgggagcagcauauccuuuugugguguaaacagugacacuguggguuggucuuggccagacggugcugaguugccauuuaccauugacaaguaa

SEQ ID NO: 57552 - RNA, 1410 nt, Artificial Sequence
  derived and/or modified CDS sequence (wt) from neuraminidase__InfluenzaA__AID70517
augaauccaaaccaaaagauaauaaccauugguucggucuguaugacaauuggaauggcuaacuuaacauuacaaauuggaaacauaaucucaauauggauuagccacucaauucaacuugggaaucaaaaucagauugaaacaugcaaucaaagcgucauuacuuaugaaaacaacacuuggguaaaucagacauauguuaacaucagcaacaccaacuuugcugcuggacagucagugguuuccgugaaauuagcgggcaauuccucucucugcccuguuaguggaugggcuauauacaguaaagacaacaguauaagaaucgguuccaagggggauguguuugucauaagggaaccauucauaucaugcucccccuuggaaugcagaaccuucuucuugacucaaggggccuugcuaaaugacaaacauuccaauggaaccauuaaagacaggagcccauaucgaacccuaaugagcugucccauuggugaaguucccucuccauacaacucaagauuugagucagucgcuuggucagcaagugcuugucaugauggcaucaauuggcuaacaauuggaauuucuggcccagacaauggggcaguggcuguguuaaaguacaacggcauaauaacagacacuaucaagaguuggagaaacaauauauugagaacacaagagucugaaugugcauguguaaaugguucuugcuuuaccauaaugaccgauggaccaaaugauggacaggccucauacaagaucuucagaauagaaaagggaaagauagucaaaucagucgaaaugaaugccccuaauuaucacuaugaggaaugcuccuguuauccugauucuagugaaaucacaugugugugcagggauaacuggcauggcucgaaucgaccgugggugucuuucaaccagaaucuggaauaucagauaggauacauaugcagugggauuuucggagacaauccacgcccuaaugauaagacaggcaguugugguccaguaucgucuaauggagcaaauggaguaaaaggauuuucauucaaauacggcaaugguguuuggauagggagaacuaaaagcauuaguucaagaaaagguuuugagaugauuugggauccaaacggauggacugggacagacaauaacuucucaauaaagcaagauaucguaggaauaaaugaguggucaggauauagcgggaguuuuguucagcauccagaacuaacagggcuggacuguauaagaccuugcuucuggguugaacuaaucagagggcgacccaaagagaacacaaucuggacuagcgggagcagcauauccuuuugugguguaaacagugacacuguggguuggucuuggccagacggugcugaguugccauuuaccauugacaaguaa

SEQ ID NO: 57553 - RNA, 1410 nt, Artificial Sequence
  derived and/or modified CDS sequence (wt) from neuraminidase__InfluenzaA__AID70518
augaauccaaaccaaaagauaauaaccauugguucggucuguaugacaauuggaauggcuaacuuaauauuacaaauuggaaacauaaucucaauauggauuagccacucaauucaacuuaggaaucaaagucagauugaaacaugcaaucaaagcgucauuacuuaugaaaacaacacuuggguaaaucagacauauguuaacaucagcaacaccaacuuugcugcuggacagucagugguuuccgugaaauuagcgggcaauuccucucucugcccuguuaguggaugggcuauauacaguaaagacaacaguauaagaaucgguuccaagggggauguguuugucauaagggaaccauucauaucaugcucccccuuggaaugcagaaccuucuucuugacccaaggggccuugcuaaaugacaaacauuccaauggaaccauuaaagacaggagcccauaucgaacccuaaugagcuguccuauuggugaaauucccucuccauacaacucaagauuugagucagucgcuuggucagcaagugcuugucaugauggcaucaauuggcuaacaauuggaauuucuggcccagacaauggggcaguggcuguguuaaaguacaacggcauaauaacagacacuaucaagaguuggagaaacaauauauugagaacacaagagucugaaugugcauguguaaaugguucuugcuuuaccauaaugaccgauggaccaagugauggacaggccucauacaagaucuucagaauagaaaagggaaagauagucaaaucagucgaaaugaaugccccuaauuaucacuaugaggaaugcuccuguuauccugauucuagugaaaucacaugugugugcagggauaacuggcauggcucgaaucgaccgugggugucuuucaaccagaaucuggaauaucagauaggauacauaugcagugggauuuucggagacaauccacgcccuaaugauaagacaggcaguugugguccaguaucgucuaauggagcaaauggaguaaaaggauuuucauucaaauacggcaaugguguuuggauagggagaacuaaaagcauuaguucaagaaaagguuuugagaugauuugggauccaaacggauggacugggacagacaauaacuucucaauaaagcaagauaucguaggaauaaaugaguggucaggauauagcgggaguuuuguucagcauccagaacuaacagggcuggauuguauaagaccuugcuucuggguugaacuaaucagagggcgacccaaagagaacacaaucuggacuagcgggagcagcauauccuuuugugguguaaacagugacacuguggguuggucuuggccagacggugcugaguugccauuuaccauugacaaguaa

SEQ ID NO: 57554 - RNA, 1410 nt, Artificial Sequence
  derived and/or modified CDS sequence (wt) from neuraminidase__InfluenzaA__AID70519
augaauccaaaccaaaagauaauaaccauugguucggucuguaugacaauuggaauggcuaacuuaauauuacaaauuggaaacauaaucucaauauggauuagccacucaauucaacuugggaaucaaagucagauugaaacaugcaaucaaagcgucauuacuuaugaaaacaacacuuggguaaaucagacauauguuaacaucagcaacaccaacuuugcugcuggacagucagugguuucugugaaauuagcgggcaauuccucucucugcccuguuaguggaugggcuauauacaguaaagacaacaguauaagaaucgguuccaagggggauguguuugucauaagggaaccauucauaucaugcucccccuuggaaugcagaaccuucuucuugacucaaggggccuugcuaaaugacaaacauuccaauggaaccauuaaagacaggagcccauaucgaacccuaaugagcuguccuauuggugaaguuccuucuccauacaacucaagauuugagucagucgcuuggucagcaagugcuugucaugauggcaucaauuggcuaacaauuggaauuucuggcccagacaauggggcaguggcuguguuaaaguacaacggcauaauaacagacacuaucaagaguuggagaaacaauauauugagaacacaagagucugaaugugcauguguaaaugguucuugcuuuaccauaaugaccgauggaccaagugauggacaggccucauacaagaucuucagaauagaaaagggaaagauagucaaaucagucgaaaugaaggccccuaauuaucacuaugaggaaugcuccuguuauccugauucuagugaaaucacaugugugugcagggauaacuggcauggcucgaaucgaccgugggugucuuucaaccagaaucuggaauaucagauaggauacauaugcagugggauuuucggagacaauccacgcccuaaugauaagacaggcaguugugguccaguaucgucuaauggagcaaauggaguaaaaggauuuucauucaaauacggcaaugguguuuggauagggagaacuaaaagcauuaguucaagaaaagguuuugagaugauuugggauccaaacggauggacugggacagacaauaacuucucaauaaagcaagauaucguaggaauaaaugaguggucaggauauagcgggaguuuuguucagcauccagaacuaacagggcuggauuguauaagaccuugcuucuggguugaacuaaucagagggcgacccaaagagaacacaaucuggacuagcgggagcagcauauccuuuugugguguaaacagugacacuguggguuggucuuggccagacggugcugaguugccauuuaccauugacaaguaa

SEQ ID NO: 57555 - RNA, 1410 nt, Artificial Sequence
  derived and/or modified CDS sequence (wt) from neuraminidase__InfluenzaA__AID70520
augaauccaaaccaaaagauaauaaccauugguucggucuguaugacaauuggaauggcuaacuuaauauuacaaauuggaaacauaaucucaauauggauuagccacucaauucaacuuaggaaucaaagucagauugaaacaugcaaucaaagcgucauuacuuaugaaaacaacacuuggguaaaucagacauauguuaacaucagcaacaccaacuuugcugcuggacagucagugguuuccgugaaauuagcgggcaauuccucucucugcccuguuaguggaugggcuauauacaguaaagacaacaguauaagaaucgguuccaagggggauguguuugucauaagggaaccauucauaucaugcucccccuuggaaugcagaaccuucuucuugacccaaggggccuugcuaaaugacaaacauuccaauggaaccauuaaagacaggagcccauaucgaacccuaaugagcuguccuauuggugaaguucccucuccauacaacucaagauuugagucagucgcuuggucagcaagugcuugucaugauggcaucaauuggcuaacaauuggaauuucuggcccagacaauggggcaguggcuguguuaaaguacaacggcauaauaacagacacuaucaagaguuggagaaacaauauauugagaacacaagagucugaaugugcauguguaaaugguucuugcuuuaccauaaugaccgauggaccaagugauggacaggccucauacaagaucuucagaauagaaaagggaaagauagucaaaucagucgaaaugaaugccccuaauuaucacuaugaggaaugcuccuguuauccugauucuagugaaaucacaugugugugcagggauaacuggcauggcucgaaucgaccgugggugucuuucaaccagaaucuggaauaucagauaggauacauaugcagugggauuuucggagacaauccacgcccuaaugauaagacaggcaguugugguccaguaucgucuaauggagcaaauggaguaaaaggauuuucauucaaauacggcaaugguguuuggauagggagaacuaaaagcauuaguucaagaaaagguuuugagaugauuugggauccaaacggauggacugggacagacaauaacuucucaauaaagcaagauaucguaggaauaaaugaguggucaggauauagcgggaguuuuguucagcauccagaacuaacagggcuggauuguauaagaccuugcuucuggguugaacuaaucagagggcgacccaaagagaacacaaucuggacuagcgggagcagcauauccuuuugugguguaaacaguggcacuguggguuggucuuggccagacggugcugaguugccauuuaccauugacaaguaa

SEQ ID NO: 57556 - RNA, 1410 nt, Artificial Sequence
  derived and/or modified CDS sequence (wt) from neuraminidase__InfluenzaA__AID70521
augaauccaaaucaaaagauaauaacgauuggcucuguuucucucacuauuuccaggauaugcuucuucaugcaaauugccaucuuaauaaauacuguaacauugcauuucaagcaauaugaauucaacucccccccaaacaaccaagugaugcugugugaaccaacaauaauagaaagaaacauaacaaagauaguguaucugacaaacacuaccauagagaaggaaauaugccccaaacuagcagaauacagaaguuggucgaagccgcaaugugacauuacaggauuugcaccuuuuucuaaggacaauucgauuaggcuuuccgcugguggggacaucugggugacaagagaaccuuaugugucaugcgaucccgacaaguguuuucaauuugcccuuggacagggaacaacacuaaacaacgugcauucaaaugacacaguacaugauaggaccccuuaucggacccuauugaugaaugaguuagguguuccauuucaucuggggaccaagcaagugugcauagcaugguccagcucaaguugucacgaugggaaagcauggcugcauguuuguauaacgggagaugauaaaaaugcaacugcuagcaucauuuacaaugggaggcuaguagauaguauuguuucaugguccaaaaaaauacucaggacccaggagucagaaugcguuuguaucaauggaacuuguacaguaguaaugacugaugggagugcuucagggaaagcugauacuaaaauacuauucauugaggaggggaaaaucguucauaccagcacauugucaggaagugcucagcaugucgaggagugcuccugcuauccucgauauccuggugucagaugugucuguagagacaacuggaaaggcuccaauaggcccaucguagauauaaacauaaaggauuauagcauuguuuccaguuaugugugcucgggauucguuggagacacacccagaaaacccgacagauccagcaguagccauugcuuggauccuaacaaugaagaagguggucauggagugaaaggcugggccuuugacgaugggaaugacguguggaugggaagaacaaucagcgagaagucacgauuaggauaugaaaccuucaaagucauuggaggcugguccaacccuaauuccaaaucacagauaaauagacaagucauaguugacagagguaauagguccgguuauucugguauuuucucuguugaaggcaaaagcugcaucaaucggugcuuuuauguggaguugauaaggggaagaaaagaugaaacugaagucuuguggaccucaaacaguauuguuguguuuuguggcaccucagguacauauggaacaggcucauggccugauggggcggacaucaaucucaugccuauauaa

SEQ ID NO: 57557 - RNA, 1410 nt, Artificial Sequence
  derived and/or modified CDS sequence (wt) from neuraminidase__InfluenzaA__AID70522
augaauccaaaucaaaagauaauaacgauuggcucuguuucucucaccauuuccacaauaugcuucuucaugcaaauugccaucuugauaacuacuguaacauugcauuucaggcaauaugaauucaacucccccccaaacaaccaagugaugcuaugugaaccaacaauaauagaaagaaacauaacagagauaguguaucugaccaacaccaccauagagaaggaaauaugccccaaacuagcagaauacagaaauuggucaaagccgcaaugugacauuacaggauuugcaccuuuuucuaaggacaauucgauuaggcuuuccgcugguggggacaucugggugacaagagaaccuuaugugucaugcgauccugacaaguguuaucaauuugcccuuggacagggaacaacacuaaacaacgugcauucaaauaacacaguacgugauaggaccccuuaucggacccuauugaugaaugaguuagguguuccuuuucaucuggggaccaagcaagugugcauagcaugguccagcucaaguugucacgauggaaaagcauggcugcauguuuguauaacgggggaugauaaaaaugcaacugcuagcuucauuuacaaugggaggcuuguagauaguguuguuucaugguccaaagaaauccucaggacccaggagucagaaugcguuuguaucaauggaacuuguacaguaguaaugacugaugggagugcuucaggaaaagcugauacuaaaauacuauucauugaggaggggaaaaucguucauacuagcacauugucaggaagugcucagcaugucgaggagugcucuugcuauccucgauauccuggugucagaugugucugcagagacaacuggaaaggcuccaauaggcccaucguagauauaaacauaaaggaucauagcauuguuuccaguuauguguguucaggacuuguuggagacacacccagaaaaaacgacagcuccagcaguagccauuguuuggauccuaacaaugaagaagguggucauggagugaaaggcugggccuuugaugauggaaaugacguguggaugggaagaacgaucaacgagacgucacguuuaggguaugaaaccuucaaagucauugaaggcugguccaacccuaaguccaaauugcagauaaauaggcaagucauaguugacagagguaauagguccgguuauucugguauuuucucuguugaaggcaaaagcugcaucaaucggugcuuuuauguggaguugauuaggggaagaaaagaggaaacugaagucuuguggaccucaaacaguauuguuguguuuuguggcaccucagguacauauggaacaggcucauggccugauggggcggaccucaaucucaugccuauauaa

SEQ ID NO: 57558 - RNA, 1410 nt, Artificial Sequence
  derived and/or modified CDS sequence (wt) from neuraminidase__InfluenzaA__AID70523
augaauccaaaucaaaagauaaaaacgauuggcucuguuucucucaccaauuccacaauaugcaucuucaugcaaauugccaucuugauaacuacuguaacauugcauuucaagcaauaugaauucaacucccccccaaacaaccaagugaugcuaugugaaccaacaauaauagaaagaaacauaacagagauaguguaucugaccaacaccaccauagagaaggaaauaugccccaaacuagcagaauacagaaauuggucaaagccgcaaugugacauuacaggauuugcaccuuuuucuaaggacaauucgauuaggcuuuccgcugguggggacaucugggugacaagagaaccuuaugugucaugcgauccugacaaguguuaucaauuugcccuuggacagggaacaacacuaaacaacgugcauucaaauaacacaguacgugauaggaccccuuaucggacccuauugaugaaugaguuagguguuccuuuucaucuggggaccaagcaagugugcauagcaugguccagcucaaguugucacgauggaaaagcauggcugcauguuuguauaacgggggaugauaaaaaugcaacugcuagcuucauuuacaaugggaggcuuguagauaguguuguuucaugguccaaagaaauccucaggacccaggagucagaaugcguuuguaucaauggaacuuguacaguaguaaugacugaugggagugcuucaggaaaagcugauacuaaaauacuauucauugaggaggggaaaaucguucauacuagcacauugucaggaagugcucagcaugucgaggagugcucuugcuauccucgauauccuggugucagaugugucugcagagacaacuggaaaggcuccaauaggcccaucguagauauaaacauaaaggaucauagcauuguuuccaguuauguguguucaggacuuguuggagacacacccagaaaaaacgacagcuccagcaguagccauuguuuggauccuaacaaugaagaagguggucauggagugaaaggcugggccuuugaugauggaaaugacguguggaugggaagaacgaucaacgagacgucacguuugggguaugaaaccuucaaagucauugaaggcugguccaacccuaaguccaaauugcagauaaauaggcaauucauaguugacagagguaauagguccgguuauucugguauuuucucuguugaaggcaaaagcugcaucaaucggugcuuuuauguggaguugauuaggggaagaaaagaggaaacugaagucuuguggaccucaaacaguauuguuguguuuuguggcaccucagguacauauggaacaggcucauggccugauggggcggaccucaaucucaugccuauauaa

SEQ ID NO: 57559 - RNA, 1410 nt, Artificial Sequence
  derived and/or modified CDS sequence (wt) from neuraminidase__InfluenzaA__AID70524
augaauccaaaucaaaagauaauaacgauuggcgcuguuuggcgcaccauuucgacaauaugcuucuucaugcaaauugccuucuugauaacuacuguaacauugcauuucaagcaauaugaauucaacucccccccaaacaaccaagugaugccaugugaaccaacaauaauagaaagaaacauaacagagauaguguaucugaccaacaccaccauagagaaggaaauaugccccaaacuagcagaauacagaaauuggucaaagccgcaaugugacauuacaggauuugcaccuuuuucuaaggacaauucgauuaggcuuuccgcugguggggacaucugggugacaagagaaccuuaugugucaugcgauccugacaaguguuaucaauuugcccuuggacagggaacaacacuaaacaacgugcauucaaauaacacaguacgugauaggaccccuuaucggacccuauugaugaaugaguuagguguuccuuuucaucuggggaccaagcaagugugcauagcaugguccagcucaaguugucacgauggaaaagcauggcugcauguuuguauaacgggggaugauaaaaaugcaacugcuagcuucauuuacaaugggaggcuuguagauaguguuguuucaugguccaaagaaauccucaggacccaggagucagaaugcguuuguaucaauggaacuuguacaguaguaaugacugaugggagugcuucaggaaaagcugauacuaaaauacuauucauugaggaggggaaaaucguucauacuagcacauugucaggaagugcucagcaugucgaggagugcucuugcuauccucgauauccuggugucagaugugucugcagagacaacuggaaaggcuccaauaggcccaucguagauauaaacauaaaggaucauagcauuguuuccaguuauguguguucaggacuuguuggagacacacccagaaaaaacgacagcuccagcaguagccauuguuuggauccuaacaaugaagaagguggucauggagugaaaggcugggccuuugaugauggaaaugacguguggaugggaagaacgaucaacgagacgucacguuuaggguaugaaaccuucaaagucauugaaggcugguccaacccuaaguccaaauugcagauaaauaggcaagucauaguugacagagguaauagguccgguuauucugguauuuucucuguugaaggcaaaagcugcaucaaucggugcuuuuauguggaguugauuaggggaagaaaagaggaaacugaagucuuguggaccucaaacaguauuguuguguuuuguggcaccucagguacauauggaacaggcucauggccugauggggcggaccucaaucucaugccuauauaa

SEQ ID NO: 57560 - RNA, 1410 nt, Artificial Sequence
  derived and/or modified CDS sequence (wt) from neuraminidase__InfluenzaA__AID70525
augaauccaaaucaaaagauaauaacgauuggcucuguuucucugaccauuuggauaauaugcuucuucaugcaaauugccaucuugauaacuacuguaacauugcauuucaagcaauaugaauucaacucccccccaaacaaccaagugaugcuaugugaaccaacaauaauagaaagaaacauaacagagauaguguaucugaccaacaccaccauagagaaggaaauaugccccaaacuagcagaauacagaaauuggucaaagccgcaaugugacauuacaggauuugcaccuuuuucuaaggacaauucgauuaggcuuuccgcugguggggacaucugggugacaagagaaccuuaugugucaugcgauccugacaaguguuaucaauuugcccuuggacagggaacaacacuaaacaacgugcauucaaauaacacaguacgugauaggaccccuuaucggacccuauugaugaaugaguuagguguuccuuuucaucuggggaccaagcaagugugcauagcaugguccagcucaaguugucacgauggaaaagcauggcugcauguuuguauaacgggggaugauaaaaaugcaacugcuagcuucauuuacaaugggaggcuuguagauaguguuguuucaugguccaaagaaauccucaggacccaggagucagaaugcguuuguaucaauggaacuuguacaguaguaaugacugaugggagugcuucaggaaaagcugauacuaaaauacuauucauugaggaggggaaaaucguucauacuagcacauugucaggaagugcucagcaugucgaggagugcucuugcuauccucgauauccuggugucagaugugucugcagagacaacuggaaaggcuccaauaggcccaucguagauauaaacauaaaggaucauagcauuguuuccaguuauguguguucaggacuuguuggagacacacccagaaaaaacgacagcuccagcaguagccauuguuuggauccuaacaaugaagaagguggucauggagugaaaggcugggccuuugaugauggaaaugacguguggaugggaagaacgaucaaugagacgucacguuuaggguaugaaaccuucaaagucauugaaggcugguccaacccuaaguccaaauugcagauaaauaggcaagucauaguugacagagguaauagguccgguuauucugguauuuucucuguugaaggcaaaagcugcaucaaucggugcuuuuauguggaguugauuaggggaagaaaagaggaaacugaagucuuguggaccucaaacaguauuguuguguuuuguggcaccucagguacauauggaacaggcucauggccugauggggcggaccucaauaucaugccuauauaa

SEQ ID NO: 57561 - RNA, 1410 nt, Artificial Sequence
  derived and/or modified CDS sequence (wt) from neuraminidase__InfluenzaA__AID70526
augaauccaaaucaaaagauaauaacgauuggcucuguuucucucaccauuuccacaauaugcuucuucaugcaaauugccaucuugauaacuacuguaacauugcauuucaagcaauaugaauucaacucccccccaaacaaccaagugaugcuaugugaaccaacaauaauagaaagaaacauaacagagauaguguaucugaccaacaccaccauagagaaggaaauaugccccaaacuagcagaauacagaaauuggucaaagccgcaaugugacauuacaggauuugcaccuuuuucuaaggacaauucgauuaggcuuuccgcugguggggacaucugggugacaagagaaccuuaugugucaugcgauccugacaaguguuaucaauuugcccuuggacagggaacaacacuaaacaacgugcauucaaauaacacaguacgugauaggaccccuuaucggacccuauugaugaaugaguuagguguuccuuuucaucuggggaccaagcaagugugcauagcaugguccagcucaaguugucacgauggaaaagcauggcugcauguuuguauaacgggggaugauaaaaaugcaacugcuagcuucauuuacaaugggaggcuuguagauaguguuguuucaugguccaaagaaauccucaggacccaggagucagaaugcguuuguaucaauggaacuuguacaguaguaaugacugaugggagugcuucaggaaaagcugauacuaaaauacuauucauugaggaggggaaaaucguucauacuagcacauugucaggaagugcucagcaugucgaggagugcucuugcuauccucgauauccuggugucagaugugucugcagagacaacuggaaaggcuccaauaggcccaucguagauauaaacauaaaggaucauagcauuguuuccaguuauguguguucaggacuuguuggagacacacccagaaaaaacgacagcuccagcaguagccauuguuuggauccuaacaaugaagaagguggucauggagugaaaggcugggccuuugaugauggaaaugacguguggaugggaagaacgaucaacgagacgucacguuuaggguaugaaaccuucaaagucauugaaggcugguccaacccuaaguccaaauugcagauaaauaggcaagucauaguugacagagguaauagguccgguuauucugguauuuucucuguugaaggcaaaagcugcaucaaucggugcuuuuauguggaguugauuaggggaagaaaagaggaaacugaagucuuguggaccucaaacaguauuguuguguuuuguggcaccucagguacauauggaacaggcucauggccugauggggcggaccucaaucucaugccuauauaa

SEQ ID NO: 57562 - RNA, 1410 nt, Artificial Sequence
  derived and/or modified CDS sequence (wt) from neuraminidase__InfluenzaA__AID70527
augaauccaaaucaaaagauaauaacgauuggcucuguuucucugaccauguggauaauaugcuucuucaugcaaauugccaucuugauaacuacuguaacauugcauuucaagcaauaugaauucaacucccccccaaacaaccaagugaugcuaugugaaccaacaauaauagaaagaaacauaacagagauaguguaucugaccaacaccaccauagagaaggaaauaugccccaaacuagcagaauacagaaauuggucaaagccgcaaugugacauuacaggauuugcaccuuuuucuaaggacaauucgauuaggcuuuccgcugguggggacaucugggugacaagagaaccuuaugugucaugcgauccugacaaguguuaucaauuugcccuuggacagggaacaacacuaaacaacgugcauucaaauaacacaguacgugauaggaccccuuaucggacccuauugaugaaugaguuagguguuccuuuucaucuggggaccaagcaagugugcauagcaugguccagcucaaguugucacgauggaaaagcauggcugcauguuuguauaacgggggaugauaaaaaugcaacugcuagcuucauuuacaaugggaggcuuguagauaguguuguuucaugguccaaagaaauccucaggacccaggagucagaaugcguuuguaucaauggaacuuguacaguaguaaugacugaugggagugcuucaggaaaagcugauacuaaaauacuauucauugaggaggggaaaaucguucauacuagcacauugucaggaagugcucagcaugucgaggagugcucuugcuauccucgauauccuggugucagaugugucugcagagacaacuggaaaggcuccaauaggcccaucguagauauaaacauaaaggaucauagcauuguuuccaguuauguguguucaggacuuguuggagacacacccagaaaaaacgacagcuccagcaguagccauuguuuggauccuaacaaugaagaagguggucauggagugaaaggcugggccuuugaugauggaaaugacguguggaugggaagaacgaucaacgagacaucacguuuaggguaugaaaccuucaaagucauugaaggcugguccaacccuaaguccaaauugcagauaaauaggcaagucauaguugacagagguaauagguccgguuauucugguauuuucucuguugaaggcaaaagcugcaucaaucggugcuuuuauguggaguugauuaggggaagaaaagaggaaacugaagucuuguggaccucaaacaguauuguuguguuuuguggcaccucagguacauauggaacaggcucauggccugauggggcggaccucaaucucaugccuauauaa

SEQ ID NO: 57563 - RNA, 1410 nt, Artificial Sequence
  derived and/or modified CDS sequence (wt) from neuraminidase__InfluenzaA__AID70528
augaauccaaaucaaaagauaauaacgauuggcucuguuucucucagcauuuccacaauaugcuucuucaugcaaauugccaucuugauaacuacuguaacauugcauuucaagcaauaugaauucaacucccccccaaacaaccaagugaugcuaugugaaccaacaauaauagaaagaaacauaacagagauaguguaucugaccaacaccaccauagagaaggaaauaugccccaaacuagcagaauacagaaauuggucaaagccgcaaugugacauuacaggauuugcaccuuuuucuaaggacaauucgauuaggcuuuccgcugguggggacaucugggugacaagagaaccuuaugugucaugcgauccugacaaguguuaucaauuugcccuuggacagggaacaacacuaaacaacgugcauucaaauaacacaguacgugauaggaccccuuaucggacccuauugaugaaugaguuagguguuccuuuucaucuggggaccaagcaagugugcauagcaugguccagcucaaguugucacgauggaaaagcauggcugcauguuuguauaacgggggaugauaaaaaugcaacugcuagcuucauuuacaaugggaggcuuguagauaguguuguuucaugguccaaagaaauccucaggacccaggagucagaaugcguuuguaucaauggaacuuguacaguaguaaugacugaugggagugcuucaggaaaagcugauacuaaaauacuauucauugaggaggggaaaaucguucauacuagcacauugucaggaagugcucagcaugucgaggagugcucuugcuauccucgauauccuggugucagaugugucugcagagacaacuggaaaggcuccaauaggcccaucguagauauaaacauaaaggaucauagcauuguuuccaguuauguguguucaggacuuguuggagacacacccagaaaaaacgacagcuccagcaguagccauuguuuggauccuaacaaugaagaagguggucauggagugaaaggcugggccuuugaugauggaaaugacguguggaugggaagaacgaucaacgagacgucacguuuaggguaugaaaccuucaaagucauugaaggcugguccaacccuaaguccaaauugcagauaaauaggcaagucauaguugacagagguaauagguccgguuauucugguauuuucucuguugaaggcaaaagcugcaucaaucggugcuuuuauguggaguugauuaggggaagaaaagaggaaacugaagucuuguggaccucaaacaguauuguuguguuuuguggcaccucagguacauauggaacaggcucauggccugauggggcggaccucaaucuaaugccuauauaa

SEQ ID NO: 57564 - RNA, 1410 nt, Artificial Sequence
  derived and/or modified CDS sequence (wt) from neuraminidase__InfluenzaA__AID70529
augaauccaaaucaaaagauaauaacgauuggaucuguuucucucaccauuuccacaauaugcuucuucaugcaaauugccaucuugauaacuacuguaacauugcauuucaagcaauaugaauucaacucccccccaaacaaccaagugaugcuaugugaaccaacaauaauagaaagaaacauaacagagauaguguaucugaccaacaccaccauagagaaggaaauaugccccaaacuagcagaauacagaaauuggucaaagccgcaaugugacauuacaggauuugcaccuuuuucuaaggacaauucgauuaggcuuuccgcugguggggacaucugggugacaagagaaccuuaugugucaugcgauccugacaaguguuaucaauuugcccuuggacagggaacaacacuaaacaacgugcauucaaauaacacaguacgugauaggaccccuuaucggacccuauugaugaaugaguuagguguuccuuuucaucuggggaccaagcaagugugcauagcaugguccagcucaaguugucacgauggaaaagcauggcugcauguuuguauaacgggggaugauaaaaaugcaacugcuagcuucauuuacaaugggaggcuuguagauaguguuguuucaugguccaaagaaauccucaggacccaggagucagaaugcguuuguaucaauggaacuuguacaguaguaaugacugaugggagugcuucaggaaaagcugauacuaaaauacuauucauugaggaggggaaaaucguucauacuagcacauugucaggaagugcucagcaugucgaggagugcucuugcuauccucgauauccuggugucagaugugucugcagagacaacuggaaaggcuccaauaggcccaucguagauauaaacauaaaggaucauagcauuguuuccaguuauguguguucaggacuuguuggagacacacccagaaaaaacgacagcuccagcaguagccauuguuuggauccuaacaaugaagaagguggucauggagugaaaggcugggccuuugaugauggaaaugacguguggaugggaagaacgaucaacgagacgucacguuuaggguaugaaaccuucaaagucauugaaggcugguccaacccuaaguccaaauugcagauaaauaggcaagucauaguugacagagguaauagguccgguuauucugguauuuucucuguugaaggcaaaagcugcaucaaucggugcuuuuauguggaguugauuaggggaagaaaagaggaaacugaagucuuguggaccucaaacaguauuguuguguuuuguggcaccucagguacauauggaacaggcucauggccugauggggcggaccucaaucucaugccuauauaa

SEQ ID NO: 57565 - RNA, 1410 nt, Artificial Sequence
  derived and/or modified CDS sequence (wt) from neuraminidase__InfluenzaA__AID70530
augaauccaaaucaaaagauaauaacgauuggcucuguuucucucaccauuuccacaauaugcuucuucaugcaaauugccaucuugauaacuacuguaacauugcauuucaagcaauaugaauucaacucccccccaaacaaccaagugaugcuaugugaaccaacaauaauagaaagaaacauaacagagauaguguaucugaccaacaccaccauagagaaggaaauaugccccaaacuagcagaauacagaaauuggucaaagccgcaaugugacauuacaggauuugcaccuuuuucuaaggacaauucgauuaggcuuuccgcugguggggacaucugggugacaagagaaccuuaugugucaugcgauccugacaaguguuaucaauuugcccuuggacagggaacaacacuaaacaacgugcauucaaauaacacaguacgugauaggaccccuuaucggacccuauugaugaaugaguuagguguuccuuuucaucuggggaccaagcaagugugcauagcaugguccagcucaaguugucacgauggaaaagcauggcugcauguuuguauaacgggggaugauaaaaaugcaacugcuagcuucauuuacaaugggaggcuuguagauaguguuguuucaugguccaaagaaauccucaggacccaggagucagaaugcguuuguaucaauggaacuuguacaguaguaaugacugaugggagugcuucaggaaaagcugauacuaaaauacuauucauugaggaggggaaaaucguucauacuagcacauugucaggaagugcucagcaugucgaggagugcucuugcuauccucgauauccuggugucagaugugucugcagagacaacuggaaaggcuccaauaggcccaucguagauauaaacauaaaggaucauagcauuguuuccaguuauguguguucaggacuuguuggagacacacccagaaaaaacgacagcuccagcaguagccauuguuuggauccuaacaaugaagaagguggucauggagugaaaggcugggccuuugaugauggaaaugacguguggaugggaagaacgaucaacgagacgucacguuuaggguaugaaaccuucaaagucauugaaggcugguccaacccuaaguccaaauugcagauaaauaggcaagucauaguugacagagguaauagguccgguuauucugguauuuucucuguugaaggcaaaagcugcaucaaucggugcuuuuauguggaguugauuaggggaagaaaagaggaaacugaagucuuguggaccucaaacaguauuguuguguuuuguggcaccucagguacauauggaacaggcucauggccugauggggcggaccucaauaucaugccuauauaa

SEQ ID NO: 57566 - RNA, 1410 nt, Artificial Sequence
  derived and/or modified CDS sequence (wt) from neuraminidase__InfluenzaA__AID70531
augaauccaaaucaaaagauaauaacgauuggcucuguuucucucaccauuuccacaauaugcuucuucaugcaaauugccaucuugauaacuacuguaacauugcauuucaagcaauaugaauucaacucccccccaaacaaccaagugaugcuaugugaaccaacaauaauagaaagaaacauaacagagauaguguaucugaccaacaccaccauagagaaggaaauaugccccaaacuagcagaauacagaaauuggucaaagccgcaaugugacauuacaggauuugcaccuuuuucuaaggacaauucgauuaggcuuuccgcugguggggacaucugggugacaagagaaccuuaugugucaugcgauccugacaaguguuaucaauuugcccuuggacagggaacaacacuaaacaacgugcauucaaauaacacaguacgugauaggaccccuuaucggacccuauugaugaaugaguuagguguuccuuuucaucuggggaccaagcaagugugcauagcaugguccagcucaaguugucacgauggaaaagcauggcugcauguuuguauaacgggggaugauaaaaaugcaacugcuagcuucauuuacaaugggaggcuuguagauaguguuguuucaugguccaaagaaauucucaggacccaggagucagaaugcguuuguaucaauggaacuuguacaguaguaaugacugaugggagugcuucaggaaaagcugauacuaaaauacuauucauugaggaggggaaaaucguucauacuagcacauugucaggaagugcucagcaugucgaggagugcucuugcuauccucgauauccuggugucagaugugucugcagagacaacuggaaaggcuccaauaggcccaucguagauauaaacauaaaggaucauagcauuguuuccaguuauguguguucaggacuuguuggagacacacccagaaaaaacgacagcuccagcaguagccauuguuuggauccuaacaaugaagaagguggucauggagugaaaggcugggccuuugaugauggaaaugacguguggaugggaagaacgaucaacgagacgucacguuuaggguaugaaaccuucaaagucauugaaggcugguccaacccuaaguccaaauugcagauaaauaggcaagucauaguugacagagguaauagguccgguuauucugguauuuucucuguugaaggcaaaagcugcaucaaucggugcuuuuauguggaguugauuaggggaagaaaagaggaaacugaagucuuguggaccucaaacaguauuguuguguuuuguggcaccucagguacauauggaacaggcucauggccugauggggcggaccucaaucucaugccuauauaa

SEQ ID NO: 57567 - RNA, 1410 nt, Artificial Sequence
  derived and/or modified CDS sequence (wt) from neuraminidase__InfluenzaA__AID70532
augaauccaaaucaaaagauaauaacgauuggcucuguuucucucaccauuuccacaauaugcuucuucaugcaaauugccaucuugauaacuacuguaacauugcauuucaagcaauaugaauucaacucccccccaaacaaccaagugaugcuaugugaaccaacaauaauagaaagaaacauaacagagauaguguaucugaccaacaccaccauagagaaggaaauaugccccaaacuagcagaauacagaaauuggucaaagccgcaaugugacauuacaggauuugcaccuuuuucuaaggacaauucgauuaggcuuuccgcugguggggacaucugggugacaagagaaccuuaugugucaugcgauccugacaaguguuaucaauuugcccuuggacagggaacaacacuaaacaacgugcauucaaauaacacaguacgugauaggaccccuuaucggacccuauugaugaaugaguuagguguuccuuuucaucuggggaccaagcaagugugcauagcaugguccagcucaaguugucacgauggaaaagcauggcugcauguuuguauaacgggggaugauaaaaaugcaacugcuagcuucauuuacaaugggaggcuuguagauaguguuguuucaugguccaaagaaauucucaggacccaggagucagaaugcguuuguaucaauggaacuuguacaguaguaaugacugaugggagugcuucaggaaaagcugauacuaaaauacuauucauugaggaggggaaaaucguucauacuagcacauugucaggaagugcucagcaugucgaggagugcucuugcuauccucgauauccuggugucagaugugucugcagagacaacuggaaaggcuccaauaggcccaucguagauauaaacauaaaggaucauagcauuguuuccaguuauguguguucaggacuuguuggagacacacccagaaaaaacgacagcuccagcaguagccauuguuuggauccuaacaaugaagaagguggucauggagugaaaggcugggccuuugaugauggaaaugacguguggaugggaagaacgaucaaugagacgucacguuuaggguaugaaacccucaaagucauugaaggcugguccaaccccaaguccaaauugcagauaaauaggcaagucauaguugacagagguaauagguccgguuauuaugguauuuucucuguugaaggcaaaagcugcaucaaucggugcuuuuauguggaguugauuuggggaagaaaagaggaaauugaagucuuguggaccucaaacaguaaaguuguguuuuguggcaccucagguacauauggaacaggcucaucgccugauggggcggaccucaauuucaugccuauauaa

SEQ ID NO: 57568 - RNA, 1410 nt, Artificial Sequence
  derived and/or modified CDS sequence (wt) from neuraminidase__InfluenzaA__AID70533
augaauccaaaucaaaagauaauaacgauuggcucuguuucucucgccauuucgacaauaugcuucuucaugcaaauugccaucuugauaacuacuguaacauugcauuucaagcaauaugaauucaacucccccccaaacaaccaagugaugcuaugugaaccaacaauaauagaaagaaacauaacagagauaguguaucugaccaacaccaccauagagaaggaaauaugccccaaacuagcagaauacagaaauuggucaaagccgcaaugugacauuacaggauuugcaccuuuuucuaaggacaauucgauuaggcuuuccgcugguggggacaucugggugacaagagaaccuuaugugucaugcgauccugacaaguguuaucaauuugcccuuggacagggaacaacacuaaacaacgugcauucaaauaacacaguacgugauaggaccccuuaucggacccuauugaugaaugaguuagguguuccuuuucaucuggggaccaagcaagugugcauagcaugguccagcucaaguugucacgauggaaaagcauggcugcauguuuguauaacgggggaugauaaaaaugcaacugcuagcuucauuuacaaugggaggcuuguagauaguguuguuucaugguccaaagaaauucucaggacccaggagucagaaugcguuuguaucaauggaacuuguacaguaguaaugacugaugggagugcuucaggaaaagcugauacuaaaauacuauucauugaggaggggaaaaucguucauacuagcacauugucaggaagugcucagcaugucgaggagugcucuugcuauccucgauauccuggugucagaugugucugcagagacaacuggaaaggcuccaauaggcccaucguagauauaaacauaaaggaucauagcauuguuuccaguuauguguguucaggacuuguuggagacacacccagaaaaaacgacagcuccagcaguagccauuguuuggauccuaacaaugaagaagguggucauggagugaaaggcugggccuuugaugauggaaaugacguguggaugggaagaacgaucaaugagacgucacguuuaggguaugaaaccuucaaagucauugaaggcugguccaacccuaaguccaaauugcagauaaauaggcaagucauaguugacagagguaauagguccgguuauucugguauuuucucuguugaaggcaaaagcugcaucaaucggugcuuuuauguggaguugauuaggggaagaaaagaggaaacugaagucuuguggaccucaaacaguauuguuguguuuuguggcaccucagguacauauggaacaggcucauggccugauggggcggaccucaaucucaugccuauauaa

SEQ ID NO: 57569 - RNA, 1410 nt, Artificial Sequence
  derived and/or modified CDS sequence (wt) from neuraminidase__InfluenzaA__AID70534
augaauccaaaucaaaagauaauaacgauuggcucuguuucucucagcauuuacauaauaugcuucuucaugcaaauugccaucuugauaacuacuguaacauugcauuucaagcaauaugaauucaacucccccccaaacaaccaagcgaugccaugugaaccaacaauaauagaaagaaacauaacagagauaguguaucugaccaacaccaccauagagaaggaaauaugccccaaacuagcagaauacagaaauuggucaaagccgcaaugugacauuacaggauuugcaccuuuuucuaaggacaauucgauuagacuuuccgcugguggggacaucugggugacaagagaaccuuaugugucaugcgauccugacaaguguuaucaauuugcccuuggacagggaacaacacuaaacaacgugcauucaaauaacacaguacgugauaggaccccuuaucggacccuauugaugaaugaguuagguguuccuuuucaucuggggaccaagcaagugugcauagcaugguccagcucaaguugucacgauggaaaagcauggcugcauguuuguauaacgggggaugauaaaaaugcaacugcuagcuucauuuacaaugggaggcuuguagauaguguuguuucaugguccaaagaaauccucagaacccaggagucagaaugcguuuguaucaauggaacuuguacaguaguaaugacugaugggagugcuucaggaaaagcugauacuaaaauacuauucauugaggaggggaaaaucguucauacuagcacauugucaggaagugcucagcaugucgaggagugcucuugcuauccucgauauccuggugucagaugugucugcagagacaacuggaaaggcuccaauaggcccaucguagauauaaacauaaaggaucauagcauuguuuccaguuauguguguucaggacuuguuggagacacacccagaaaaaacgacagcuccagcaguagccauuguuuggauccuaacaaugaagaagguggucauggagugaaaggcugggccuuugaugauggaaaugacguguggaugggaagaacgaucaacgagacgucacguuuaggguaugaaaccuucaaagucauugaaggcugguccaacccuaaguccaaauugcagauaaauaggcaagucauaguugacagagguaauagguccgguuauucugguauuuucucuguugaaggcaaaagcugcaucaaucggugcuuuuauguggaguugauuaggggaagaaaagaggaaacugaagucuuguggaccucaaacaguauuguuguguuuuguggcaccucagguacauauggaacaggcucauggccugauggggcggaccucaaucucaugccuauauaa

SEQ ID NO: 57570 - RNA, 1410 nt, Artificial Sequence
  derived and/or modified CDS sequence (wt) from neuraminidase__InfluenzaA__AID70535
augaauccaaaucaaaagauaauaacgauuggcucuguuucucucgccaugugcacuauaugcuucuucaugcaaauugccaucuugauaacuacuguaacauugcauuucaagcaauaugaauucaacucccccccaaacaaccaagcgaugccaugugaaccaacaauaauagaaagaaacauaacagagauaguguaucugaccaacaccaccauagagaaggaaauaugccccaaacuagcagaauacagaaauuggucaaagccgcaaugugacauuacaggauuugcaccuuuuucuaaggacaauucgauuagacuuuccgcugguggggacaucugggugacaagagaaccuuaugugucaugcgauccugacaaguguuaucaauuugcccuuggacagggaacaacacuaaacaacgugcauucaaauaacacaguacgugauaggaccccuuaucggacccuauugaugaaugaguuagguguuccuuuucaucuggggaccaagcaagugugcauagcaugguccagcucaaguugucacgauggaaaagcauggcugcauguuuguauaacgggggaugauaaaaaugcaacugcuagcuucauuuacaaugggaggcuuguagauaguguuguuucaugguccaaagaaauccucagaacccaggagucagaaugcguuuguaucaauggaacuuguacaguaguaaugacugaugggagugcuucaggaaaagcugauacuaaaauacuauucauugaggaggggaaaaucguucauacuagcacauugucaggaagugcucagcaugucgaggagugcucuugcuauccucgauauccuggugucagaugugucugcagagacaacuggaaaggcuccaauaggcccaucguagauauaaacauaaaggaucauagcauuguuuccaguuauguguguucaggacuuguuggagacacacccagaaaaaacgacagcuccagcaguagccauuguuuggauccuaacaaugaagaagguggucauggagugaaaggcugggccuuugaugauggaaaugacguguggaugggaagaacgaucaacgagacgucacguuuaggguaugaaaccuucaaagucauugaaggcugguccaacccuaaguccaaauugcagauaaauaggcaagucauaguugacagagguaauagguccgguuauucugguauuuucucuguugaaggcaaaagcugcaucaaucggugcuuuuauguggaguugauuaggggaagaaaagaggaaacugaagucuuguggaccucaaacaguauuguuguguuuuguggcaccucagguacauauggaacaggcucauggccugauggggcggaccucaaucucaugccuauauaa

SEQ ID NO: 57571 - RNA, 1410 nt, Artificial Sequence
  derived and/or modified CDS sequence (wt) from neuraminidase__InfluenzaA__AID70536
augaauccaaaucaaaagauaauaacgauuggcucuguuucucucaccauuuccacaguaugcuucuucaugcaaauugccaucuugauaacuacuguaacauugcauuucaagcaauaugaauucaacucccccccaaacaaccaagugaugcuaugugaaccaacaauaauagacagaaacauaacagagauaguguaucugaccaacaccaccauagagaaggaaauaugccccaaacuagcagaauacagaaauuggucaaagccgcaaugugacauuacaggauuugcaccuuuuucuaaggacaauucgauuaggcuuuccgcugguggggacaucugggugacaagagaaccuuaugugucaugcgauccugacaaguguuaucaauuugcccuuggacagggaacaacacuaaacaacgugcauucaaauaacacaguacgugauaggaccccuuaucggacccuauugaugaaugaguuagguguuccuuuucaucuggggaccaagcaagugugcauagcaugguccagcucaaguugucacgauggaaaagcauggcugcauguuuguauaacgggggaugauaaaaaugcaacugcuagcuucauuuacaaugggaggcuuguagauaguguuguuucaugguccaaagaaauccucaggacccaggagucagaaugcguuuguaucaauggaacuuguacaguaguaaugacugaugggagugcuucaggaaaagcugauacuaaaauacuauucauugaggaggggaaaaucguucauacuagcacauugucaggaagugcucagcaugucgaggagugcucuugcuauccucgauauccuggugucagaugugucugcagagacaacuggaaaggcuccaauaggcccaucguagauauaaacauaaaggaucauagcauuguuuccaguuauguguguucaggacuuguuggagacacacccagaaaaaacgacagcuccagcaguagccauuguuuggauccuaacaaugaagaagguggucauggagugaaaggcugggccuuugaugauggaaaugacguguggaugggaagaacgaucaaugagacgucacguuuaggguaugaaaccuucaaagucauugaaggcugguccaacccuaaguccaaauugcagauaaauaggcaagucauaguugacagagguaauagguccgguuauucugguauuuucucuguugaaggcaaaagcugcaucaaucggugcuuuuauguggaguugauuaggggaagaaaagaggaaacugaagucuuguggaccucaaacaguauuguuguguuuuguggcaccucagguacauauggaacaggcucauggccugauggggcggaccucaaucucaugccuauauaa

SEQ ID NO: 57572 - RNA, 1410 nt, Artificial Sequence; identical to SEQ ID NO: 57561
  derived and/or modified CDS sequence (wt) from neuraminidase__InfluenzaA__AID70537

SEQ ID NO: 57573 - RNA, 1410 nt, Artificial Sequence
  derived and/or modified CDS sequence (wt) from neuraminidase__InfluenzaA__AID70538
augaauccaaaucaaaagaaaauaacgauuggcgcuguuucucucaccaugugcacagugugcaucuucaugcaaauugccaucuugauaacuacuguaacauugcauuucaggcaauaugaauucaacucccccccaaacaaccaagugaugcuaugugaaccaacaauaauagaaagaaacauaacagagauaguguaucugaccaacaccaccauagagaaggaaauaugccccaaacuagcagaauacagaaauuggucaaagccgcaaugugacauuacaggauuugcaccuuuuucuaaggacaauucgauuaggcuuuccgcugguggggacaucugggugacaagagaaccuuaugugucaugcgauccugacaaguguuaucaauuugcccuuggacagggaacaacacuaaacaacgugcauucaaauaacacaguacgugauaggaccccuuaucggacccuauugaugaaugaguuagguguuccuuuucaucuggggaccaagcaagugugcauagcaugguccagcucaaguugucacgauggaaaagcauggcugcauguuuguauaacgggggaugauaaaaaugcaacugcuagcuucauuuacaaugggaggcuuguagauaguguuguuucaugguccaaagaaauccucaggacccaggagucagaaugcguuuguaucaauggaacuuguacaguaguaaugacugaugggagugcuucaggaaaagcugauacuaaaauacuauucauugaggaggggaaaaucguucauacuagcacauugucaggaagugcucagcaugucgaggagugcucuugcuauccucgauauccuggugucagaugugucugcagagacaacuggaaaggcuccaauaggcccaucguagauauaaacauaaaggaucauagcauuguuuccaguuauguguguucaggacuuguuggagacacacccagaaaaaacgacagcuccagcaguagccauuguuuggauccuaacaaugaagaagguggucauggagugaaaggcugggccuuugaugauggaaaugacguguggaugggaagaacgaucaacgagacgucacguuuaggguaugaaaccuucaaagucauugaaggcugguccaacccuaaguccaaauugcagauaaauaggcaagucauaguugacagagguaauagguccgguuauucugguauuuucucuguugaaggcaaaagcugcaucaaucggugcuuuuauguggaguugauuaggggaagaaaagaggaaacugaagucuuguggaccucaaacaguauuguuguguuuuguggcaccucagguacauauggaacaggcucauggccugauggggcggaccucaaucucaugccuauauaa

SEQ ID NO: 57574 - RNA, 1410 nt, Artificial Sequence
  derived and/or modified CDS sequence (wt) from neuraminidase__InfluenzaA__AID70539
augaauccaaaucaaaagauaauaacgauuggcucuguuucucucaccauuuccacgauaugcuucuucaugcaaauugccaucuugauaacuacuguaacauugcauuucaagcaauaugaauucaacucccccccaaacaaccaagugaugcuaugugaaccaacaauaauagaaagaaacauaacagagauaguguaucugaccaacaccaccauagagaaggaaauaugccccaaacuagcagaauacagaaauuggucaaagccgcaaugugacauuacaggauuugcaccuuuuucuaaggacaauucgauuaggcuuuccgcugguggggacaucugggugacaagagaaccuuaugugucaugcgauccugacaaguguuaucaauuugcccuuggacagggaacaacacuaaacaacgugcauucaaauaacacaguacgugauaggaccccuuaucggacccuauugaugaaugaguuagguguuccuuuucaucuggggaccaagcaagugugcauagcaugguccagcucaaguugucacgauggaaaagcauggcugcauguuuguauaacgggggaugauaaaaaugcaacugcuagcuucauuuacaaugggaggcuuguagauaguguuguuucaugguccaaagaaauccucaggacccaggagucagaaugcguuuguaucaauggaacuuguacaguaguaaugacugaugggagugcuucaggaaaagcugauacuaaaauacuauucauugaggaggggaaaaucguucauacuagcacauugucaggaagugcucagcaugucgaggagugcucuugcuauccucgauauccuggugucagaugugucugcagagacaacuggaaaggcuccaauaggcccaucguagauauaaacauaaaggaucauagcauuguuuccaguuauguguguucaggacuuguuggagacacacccagaaaaaacgacagcuccagcaguagccauuguuugaauccuaacaaugaagaagguggucauggagugaaaggcugggccuuugaugauggaaaugacguguggaugggaagaacgaucaacgagacgucacguuuaggguaugaaaccuucaaagucauugaaggcugguccaacccuaaguccaaauugcagauaaauaggcaagucauaguugacagagguaauagguccgguuauucugguauuuucucuguugaaggcaaaagcugcaucaaucggugcuuuuauguggaguugauuaggggaagaaaagaggaaacugaagucuuguggaccucaaacaguauuguuguguuuuguggcaccucagguacauauggaacaggcucauggccugauggggcggaccucaaucucaugccuauauaa

SEQ ID NO: 57575 - RNA, 1410 nt, Artificial Sequence; identical to SEQ ID NO: 57561
  derived and/or modified CDS sequence (wt) from neuraminidase__InfluenzaA__AID70540

SEQ ID NO: 57576 - RNA, 1410 nt, Artificial Sequence; identical to SEQ ID NO: 57561
  derived and/or modified CDS sequence (wt) from neuraminidase__InfluenzaA__AID70541

SEQ ID NO: 57577 - RNA, 1410 nt, Artificial Sequence
  derived and/or modified CDS sequence (wt) from neuraminidase__InfluenzaA__AID70633
augaauccaaaccaaaagauaauaaccauugguucggucuguaugacaauuggaauggcuaacuuaauauuacaaauuggaaacauaaucucaauauggguuagccacucaauucaacuugggaaucaaagucagauugaagcaugcaaucaaagcgucauuacuuaugaaaacaacacuuggguaaaucagacauauguuaacaucagcaacaccaacuuugcugccggacagucagugguuuccgugaaauuagcgggcaauuccucucucugcccuguuaguggaugggcuauauacaguaaagacaacaguguaagaaucgguuccaagggggauguguuugucauaagggaaccauucauaucaugcucccccuuggaaugcagaaccuucuucuugacucaaggggccuugcuaaaugacaaacauuccaauggaaccauuaaagacaggagcccauaucgaacccuaaugagcugucccauuggugaaguucccucuccauacaacucaagauuugagucagucgcuuggucagcaagugcuugucaugauggcaucaauuggcuaacaauuggaauuucuggcccagacaguggggcaguggcuguguuaaaguacaauggcauaauaacagacacuaucaagaguuggagaaacaauauauugaggacacaagagucugaaugugcauguguaaaugguucuugcuuuaccauaaugaccgauggaccaagugauggacaggccucauacaagaucuucagaauagaaaagggaaagauagucaaaucagucgaaaugaaugccccuaauuaucacuaugaggaaugcuccuguuauccugauucuagugaaaucacaugugugugcagggauaacuggcauggcucgaaucgaccgugggugucuuucaaccagaaucuggaauaucagauaggauacauaugcagugggguuuucggggacaauccacgcccuaaugauaagacaggcaguugugguccaguaucgucuaauggagcaaauggaguaaaaggauuuucauucaaauacggcaaugguguuuggauagggagaacuaaaagcauuaguucaagaaaagguuuugagaugauuugggauccgaauggauggacugggacagacaauaaauucucaauaaagcaagauaucguaggaauaaaugaguggucaggauauagcgggaguuuuguucagcauccagaacuaacagggcuggauuguauaagaccuugcuucuggguugaacuaaucagagggcgacccgaagagaacacaaucuggacuagcgggagcagcauauccuuuugugguguaaacagugacacuguggguuggucuuggccagacggugcugaguugccauuuaccauugacaaguaa

SEQ ID NO: 57578 - RNA, 1398 nt, Artificial Sequence
  derived and/or modified CDS sequence (wt) from neuraminidase__InfluenzaA__AID70635
augaauccaaaacagaagauucuaugcacuucagccacugcuaucauaauaggcgcaaucgcaguacucauuggaauagcaaaccuaggauugaacauaggacugcaucuaaaaccgggcugcaauugcucacacucacaaccugaaacaaccaacacaagccaaacaauaauaaacaacuauuauaaugaaacaaacaucaccaacauccaaauggaagaaagaacaagcaggaauuucaauaacuuaacuaaagggcucuguacuauaaauucauggcacauauaugggaaagacaaugcaguaagaauuggagaaagcucggauguuuuagucacaagagaacccuauguuucaugcgacccagaugaaugcagguucuaugcucucagccaaggaacaacaaucagagggaaacacucaaacggaacaauacacgaugggucccaguaucgcgcccugauaagcuggccacuaucaucaccgcccacaguguacaacagcaggguggaaugcauuggguggucaaguacuaguugccaugauggcaaauccaggaugucaauauguauaucaggaccaaacaacaaugcaucugcaguaguaugguacaacagaaggccuguugcagaaauuaacacaugggcccgaaacauacuaagaacacaggaaucugaauguguaugccacaacggcguaugcccaguaguguucaccgaugggucugccacuggaccugcagacacaagaauauacuauuuuaaagaggggaaaauauugaaaugggagucucugacuggaacugcuaagcauauugaagaaugcucauguuacggggaacgaacagggauuaccugcacaugcagggacaauuggcagggcucaaauagaccagugauucagauagacccaguagcaaugacacacacuagucaauauauaugcaguccuguucuuacagacaauccccgaccgaaugacccaaauauagguaaguguaaugacccuuauccagguaauaauaacaauggagucaagggauucucauaucuggauggggcuaacacuuggcuagggaggacaauaagcacagccucgaggucuggauacgagauguuaaaagugccaaaugcauugacagaugauagaucaaagccaauucaaggucagacaauuguauuaaacgcugacuggagugguuacaguggaucuuucauggacuauugggcugaaggggacugcuaucgagcguguuuuuauguggaguugauacguggaagacccaaggaggauaaagugugguggaccagcaauaguauaguaucgauguguuccaguacagaauuccugggacaauggaacuggccugauggggcuaaaauagaguacuuccucuaa

SEQ ID NO: 57579 - RNA, 1401 nt, Artificial Sequence
  derived and/or modified CDS sequence (wt) from neuraminidase__InfluenzaA__AIG44695
augaauccaaaccagaagauaacagcaauuggcucuguuucucuaaucauugcgauaauaugucuccucaugcagauugccaucuuaacaacgacuaugacacuacauuucaggcagaaugaaugcaguaacccaucgaauaaucaagugaugccaugugaaccaaucauaauagagaggaacacagugcauuugaauagcacuaccauagagagggaaauuuguccuaaaguagcagaauacaagaauuggucaaaaccacaaugucaaauuacaggguucgccccuuuuucaaaggacaacucaauuaggcucucugcaaguggggauaucugggugacaagagaacccuaugucucaugcagucucgacaaauguuaucaauuugcacuugggcagggaaccacccugaaaaacaagcacucaaauggcacuacacaugauagaaccccucacagaacucuuuuaaugaaugaguuaggugucccauuucauuugggaaccaaacaagugugcauagcauggucuaguucaagcugcuaugauggaaaagcaugguuacauguuuguguuacuggggaugauaaaaaugcuacugcuaguaucaucuaugaugggaugcuugucgacaguguugguucaugguccaaaaacauccucagaacucaggagucagaaugcguuugcaucaauggaacuugugcagugguaaugacugauggaagugcaucaggaaaggccgacacuagaguauuauuuauaagagaagggaaaauuauaaauauuagcccauugucaggaagugcucagcacguugaggaaugcucuuguuacccucgguauccugaaguuaggugugucugcagagacaauuggaagggcuccaauaggcccauucuauauauaaauauggcugauuauagcauugaguccaguuaugugugcucaggacuuguuggcgacacaccaagaaaugaugauagcuccagcagcagcaacugcagagacccuaauaacgaaagaggggccccaggagugaaagggugggccuuugacgacgggaaugauguuuggaugggacggacaaucaaaaaugguucacgcucagguuaugagaccuuuagggucgucaaugguuggaccauggcuaauucaaagucacagauaaauaggcaagucauaguugacagugacggcuggucuggguauucuggcaucuucucuguugaaggcaaaaaaugcaucaacagguguuuuuauguggaguugauaagagggagaccacaggaacccagagugugguggaccucaaauagcaucauuguguucuguggaaccucugguacauauggaacaggcucauggccugauggagcgaauaucaacuucaugccuauauaa

SEQ ID NO: 57580 - RNA, 1410 nt, Artificial Sequence
  derived and/or modified CDS sequence (wt) from neuraminidase__InfluenzaA__AIJ10793
augaauccaaaucaaaagauaauaacgauuggcucuguuucucucaccauuuccacaauaugcuucuucaugcaaauugccaucuugauaacuacuguaacauugcauuucaagcaauaugaauucaacucccccccaaacaaccaagugaugcuaugugaaccaacaauaauagaaagaaacauaacagagauaguguaucugaccaacaccaccauagagaaggaaauaugccccaaacuagcagaauacagaaauuggucaaagccgcaaugugacauuacaggauuugcaccuuuuucuaaggacaauucgauuaggcuuuccgcugguggggacaucugggugacaagagaaccuuaugugucaugcgauccugacaaguguuaucaauuugcccuuggacagggaacaacacuaaacaacgugcauucaaauaacacaguacgugauaggaccccuuaucggacccuauugaugaaugaauuagguguuccuuuucaucuggggaccaagcaagugugcauagcaugguccagcucaaguugucacgauggaaaagcauggcugcauguuuguauaacgggggaugauaaaaaugcaacugcuagcuucauuuacaaugggaggcuuguagauaguguuguuucaugguccaaagaaauccucaggacccaggagucagaaugcguuuguaucaauggaacuuguacaguaguaaugacugaugggagugcuucaggaaaagcugauacuaaaauacuauucauugaggaggggaaaaucguucauacuagcacauugucaggaagugcucagcaugucgaggaaugcucuugcuauccucgauauccuggugucagaugugucugcagagacaacuggaaaggcuccaauaggcccaucguagauauaaacauaaaggaucauagcauuguuuccaguuauguguguucaggacuuguuggagacacacccagaaaaaacgacagcuccagcaguagccauuguuuggauccuaacaaugaagaagguggucauggagugaaaggcugggccuuugaugauggaaaugacguguggaugggaagaacgaucaaugagacgucacguuuaggguaugaaaccuucaaagccauugaaggcugguccaacccuaaguccaaauugcagacaaauaggcaagucauaguugacagagguaauagguccgguuauucugguauuuucucuguugaaggcaaaagcugcaucaaucggugcuuuuauguggaguugauuaggggaagaaaagaggaaacugaagucuuguggaccucaaacaguauuguuguguuuuguggcaccucagguacauauggaacaggcucauggccugauggggcggaccuuaaucucaugccuauauaa

SEQ ID NO: 57581 - RNA, 1410 nt, Artificial Sequence; identical to SEQ ID NO: 52894
  derived and/or modified CDS sequence (wt) from neuraminidase__InfluenzaA__AIJ10794

SEQ ID NO: 57582 - RNA, 1410 nt, Artificial Sequence; identical to SEQ ID NO: 57221
  derived and/or modified CDS sequence (wt) from neuraminidase__InfluenzaA__AIJ10795

SEQ ID NO: 57583 - RNA, 1410 nt, Artificial Sequence
  derived and/or modified CDS sequence (wt) from neuraminidase__InfluenzaA__AIJ10796
augaauccaaaucaaaagauaauaacgauuggcucuguuucucucaccauuuccacaauaugcuucuucaugcaaauugccaucuugauaacuacuguaacauugcauuucaagcaauaugaauucaacucccccccaaacaaccaagugaugcugugugaaccaacaauaauagaaagaaacauaacagagauaguguaucugaccaacaccaccauagagaaggaaauaugccccaaacuagcagaauacagaaauuggucaaagccgcaaugugacauuacaggauuugcaccuuuuucuaaggacaauucgauuaggcuuuccgcugguggggacaucugggugacaagagaaccuuaugugucaugcgauccugacaaguguuaucaauuugcccuuggacagggaacaacacuaaacaacgugcauucaaauaacacaguacgugauaggaccccuuaucggacccuauugaugaaugaguuagguguuccuuuucaucuggggaccaagcaagugugcauagcaugguccagcucaaguugucacgauggaaaagcauggcugcauguuuguauaacgggggaugauaaaaaugcaacugcuagcuucauuuacaaugggaagcuuguagauaguguugucucaugguccaaagaaauccucaggacccaggagucagaaugcguuuguaucaaugggacuuguacaguaguaaugacugaugggagugcuucaggaaaagcugauacuaaaauacuauucauugaggaggggaaaaucguucauacuagcacauugucaggaagugcucagcaugucgaggagugcucuugcuauccucgauauccuggugucagaugugucugcagagacaacuggaaaggcuccaauaggcccaucguagauauaaacauaaaggaucauagcauuguuuccaguuauguguguucaggacuuguuggagacacacccagaaaaaacgacagcuccagcaguagccauuguuuggauccuaacaaugaagaagguggucauggagugaaaggcugggccuuugaugauggaaaugacguguggaugggaagaacgaucaacgagacgucacguuuaggguaugaaaccuucaaagucauugaaggcugguccaacccuaaguccaaauugcagauaaauaggcaagucauaguugacagagguaauagguccgguuauucugguauuuucucuguugaaggcaaaagcugcaucaaucggugcuuuuauguggaguugauuaggggaagaaaagaggaaacugaagucuuguggacaucaaacaguauuguuguguuuuguggcaccucagguacauauggaacaggcucauggccugauggggcggaccucaaucucaugccuauauaa

SEQ ID NO: 57584 - RNA, 1410 nt, Artificial Sequence
  derived and/or modified CDS sequence (wt) from neuraminidase__InfluenzaA__AIJ10797
augaauccaaaucaaaagauaauaacgauuggcucuguuucucucaccauuuccacaauaugcuucuucaugcaaauugccaucuugauaacuacuguaacauugcauuucaagcaauaugaauucaacucccccccaaacaaccaagugaugcugugugaaccaacaauaauagaaagaaacauaacagagauaguguaucugaccaacaccaccauagagaaggaaauaugccccaaacuagcagaauacagaaauuggucaaagccgcaaugugacauuacaggauuugcaccuuuuucuaaggacaauucgauuaggcuuuccgcugguggggacaucugggugacaagagaaccuuaugugucaugcgauccugacaaguguuaucaauuugcccuuggacagggaacaacacuaaacaacgugcauucaaauaacacaguacgugauaggaccccuuaucggacccuauugaugaaugaguuagguguuccuuuucaucuggggaccaagcaagugugcauagcaugguccagcucaaguugucacgauggaaaagcauggcugcauguuuguauaacgggggaugauaaaaaugcaacugcuagcuucauuuacaaugggaagcuuguagauaguguugucucaugguccaaagaaauccucaggacccaggagucagaaugcguuuguaucaaugggacuuguacaguaguaaugacugaugggagugcuucaggaaaagcugauacuaaaauacuauucauugaggaggggaaaaucguucauacuagcacauugucaggaagugcucagcaugucgaggagugcucuugcuauccucgauauccuggugucagaugugucugcagagacaacuggaaaggcuccaauaggcccaucguagauauaaacauaaaggaucauagcauuguuuccaguuauguguguucaggacuuguuggagacacacccagaaaaaacgacagcuccagcaguagccauuguuuggauccuaacaaugaagaagguggucauggagugaaaggcugggccuuugaugauggaaaugacguguggaugggaagaacgaucaacgagacgucacguuuaggguaugaaaccuucaaagucauugaaggcugguccaacccuaaguccaaauugcagauaaauaggcaagucauaguugacagagguaauagguccgguuauucugguauuuucucuguugaagacaaaagcugcaucaaucggugcuuuuauguggaguugauuaggggaagaaaagaggaaacugaagucuuguggacaucaaacaguauuguuguguuuuguggcaccucagguacauauggaacaggcucauggccugauggggcggaccucaaucucaugccuauauaa

SEQ ID NO: 57585 - RNA, 1410 nt, Artificial Sequence
  derived and/or modified CDS sequence (wt) from neuraminidase__InfluenzaA__AIJ10798
augaauccaaaucaaaagauaauaacgauuggcucuguuucucucaccauuuccacaauaugcuucuucaugcaaauugccaucuugauaacuacuguaacauugcauuucaagcaauaugaauucaacucccccccaaacaaccaagugaugcuaugugaaccaacaauaauagaaagaaacauaacagagauaguguaucugaccaacaccaccauagagaaggaaauaugccccacacuagcagaauacagaaauuggucaaagccgcaaugugacauuacaggauuugcaccuuuuucuaaggacaauucgauuaggcuuuccgcugguggggacaucugggugacaagagaaccuuaugugucaugcgauccugacaaguguuaucaauuugcccuuggacagggaacaacacuaaacaacgugcauucaaauaacacaguacgugauaggaccccuuaucggacccuauugaugaaugaguuagguguuccuuuucaucuggggaccaagcaagugugcauagcaugguccagcucaaguugucacgauggaaaagcauggcugcauguuuguauaacgggggaugauaaaaaugcaacugcuagcuucauuuacaaugggaggcuuguagauaguguuguuucaugguccaaagaaauccucaggacccaggagucagaaugcguuuguaucaauggaacuuguacaguaguaaugacugaugggagugcuucaggaaaagcugauacuaaaauacuauucauugaggaggggaaaaucguucauacuagcacauugucaggaagugcucagcaugucgaggagugcucuugcuauccucgauauccuggugucagaugugucugcagagacaacuggaaaggcuccaauaggcccaucguagauauaaacauaaaggaucauagcauuguuuccaguuauguguguucaggacuuguuggagacacacccagaaaaaacgacagcuccagcaguagccauuguuuggauccuaacaaugaagaagguggucauggagugaaaggcugggccuuugaugauggaaaugacguguggaugggaagaacgaucaacgagacgucacguuuaggguaugaaaccuucaaagucauugaaggcugguccaacccuaaguccaaauugcagauaaauaggcaagucauaguugacagagguaauagguccgguuauucugguauuuucucuguugaaggcaaaagcugcaucaaucggugcuuuuauguggaguugauuaggggaagaaaagaggaaacugaagucuuguggaccucaaacaguauuguuguguuuuguggcaccucagguacauauggaacaggcucauggccugauggggcggaccucaaucucaugccuauauaa

SEQ ID NO: 57586 - RNA, 1410 nt, Artificial Sequence
  derived and/or modified CDS sequence (wt) from neuraminidase__InfluenzaA__AIJ10799
augaauccaaaucaaaagauaauaacgauuggcucuguuucucucaccauuuccacaauaugcuucuucaugcaaauugccaucuugauaacuacuguaacauugcauuucaagcaauaugaauucaacucccccccaaacaaccaagugaugcugugugaaccaacaauaauagaaagaaacauaacagagauaguguaucugaccaacaccaccauagagaaggaaauaugccccaaacuagcagaauacagaaauuggucaaagccgcaaugugacauuacaggauuugcaccuuuuucuaaggacaauucgauuaggcuuuccgcugguggggacaucugggugacaagagaaccuuaugugucaugcgauccugacaaguguuaucaauuugcccuuggacagggaacaacacuaaacaacgugcauucaaauaacacaguacgugauaggaccccuuaucggacccuauugaugaaugaguuagguguuccuuuucaucuggggaccaagcaagugugcauagcaugguccagcucaaguugucacgauggaaaagcauggcugcauguuuguauaacgggggaugauaaaaaugcaacugcuagcuucauuuacaaugggaagcuuguagauaguguuguuucaugguccaaagaaauccucaggacccaggagucagaaugcguuuguaucaauggaacuuguacaguaguaaugacugaugggagugcuucaggaaaagcugauacuaaaauacuauucauugaggaggggaaaaucguucauacuagcacauugucaggaagugcucagcaugucgaggagugcucuugcuauccucgauauccuggugucagaugugucugcagagacaacuggaaaggcuccaauaggcccaucguagauauaaacauaaaggaucauagcauuguuuccaguuauguguguucaggacuuguuggagacacacccagaaaaaacgacagcuccagcaguagccauuguuuggauccuaacaaugaagaagguggucauggagugaaaggcugggccuuugaugauggaaaugacguguggaugggaagaacgaucaacgagacgucacguuuaggguaugaaaccuucaaagucauugaaggcugguccaacccuaaguccaaauugcagauaaauaggcaagucauaguugacagagguaauagguccgguuauucugguauuuucucuguugaaggcaaaagcugcaucaaucggugcuuuuauguggaguugauuaggggaagaaaagaggaaacugaagucuuguggaccucaaacaguaucguuguguuuuguggcaccucagguacauauggaacaggcucauggccugauggggcggaccucaaucucaugccuauauaa

SEQ ID NO: 57587 - RNA, 1410 nt, Artificial Sequence
  derived and/or modified CDS sequence (wt) from neuraminidase__InfluenzaA__AIJ10800
augaauccaaaucaaaagauaauaacgauuggcucuguuucucucaccauuuccacaauaugcuucuucaugcaaauugccaucuugauaacuacuguaacauugcauuucaagcaauaugaauucaacuccuccccaaacaaccaagugaugcugugugaaccaacaauaauagaaagaaacauaacagagauaguguaucugaccaacaccaccauagagaaggaaauaugccccaaacuagcagaauacagaaauuggucaaagccgcaaugugacauuacaggauuugcaccuuuuucuaaggacaauucgauuaggcuuuccgcugguggggacaucugggugacaagagaaccuuaugugucaugcgauccugacaaguguuaucaauuugcccuuggacagggaacaacacuaaacaacgugcauucaaauaacacaguacgugauaggaccccuuaucggacccuauugaugaaugaguuagguguuccuuuucaucuggggaccaagcaagugugcauagcaugguccagcucaaguugucacgauggaaaagcauggcugcauguuuguauaacgggggaugauaaaaaugcaacugcuagcuucauuuacaaugggaagcuuguagauaguguuguuucaugguccaaagaaauccucaggacccaggagucagaaugcguuuguaucaauggaacuuguacaguaguaaugacugaugggagugcuucaggaaaagcugauacuaaaauacuauucauugaggaggggaaaaucguucauacuagcacauugucaggaagugcucagcaugucgaggagugcucuugcuauccucgauauccuggugucagaugugucugcagagacaacuggaaaggcuccaauaggcccaucguagauauaaacauaaaggaucauagcauuguuuccaguuauguguguucaggacuuguuggagacacacccagaaaaaacgacagcuccagcaguagccauuguuuggauccuaacaaugaagaagguggucauggagugaaaggcugggccuuugaugauggaaaugacguguggaugggaagaacgaucaacgagacgucacguuuaggguaugaaaccuucaaagucauugaaggcugguccaacccuaaguccaaauugcagauaaauaggcaagucauaguugacagagguaauagguccgguuauucugguauuuucucuguugaaggcaaaagcugcaucaaucggugcuuuuauguggaguugauuaggggaagaaaagaggaaacugaagucuuguggaccucaaacaguauuguuguguuuuguggcaccucagguacauauggaacaggcucauggccugauggggcggaccucaaucucaugccuauauaa

SEQ ID NO: 57588 - RNA, 1410 nt, Artificial Sequence
  derived and/or modified CDS sequence (wt) from neuraminidase__InfluenzaA__AIJ10801
augaauccaaaucaaaagauaauaacgauuggcucuguuucucucaccauuuccacaauaugcuucuucaugcaaauugccaucuugauaacuacuguaacauugcauuucaagcaauaugaauucaacucccccccaaacaaccaagugaugcugugugaaccaacaauaauagaaagaaacauaacagagauaguguaucugaccaacaccaccauagagaaggaaauaugccccaaaccagcagaauacagaaauuggucaaaaccgcaauguggcauuacaggauuugcaccuuucucuaaggacaauucgauuaggcuuuccgcugguggggacaucugggugacaagagaaccuuaugugucaugcgauccugacaaguguuaucaauuugcccuuggacaaggaacaacacuaaacaacgugcauucaaauaacacaguacgugauaggaccccuuaucggacucuauugaugaaugaguuggguguuccuuuucaucuggggaccaagcaagugugcauagcaugguccagcucaaguugucacgauggaaaagcauggcugcauguuuguauaacgggggaugauaaaaaugcaacugcuagcuucauuuacaaugggaggcuuguagauaguguuguuucaugguccaaagaaauucucaggacccaggagucagaaugcguuuguaucaacggaacuuguacaguaguaaugacugauggaagugcuucaggaaaagcugauacuaaaauacuauucauugaggaggggaaaaucguucauacuagcacauugucaggaagugcucagcaugucgaagagugcucuugcuauccucgauauccuggugucagaugugucugcagagacaacuggaaaggcuccaaucggcccaucguagauauaaacauaaaggaucauagcauuguuuccaguuauguguguucaggacuuguuggagacacacccagaaaaaacgacagcuccagcaguagccauuguuuggauccuaacaaugaagaagguggucauggagugaaaggcugggccuuugaugauggaaaugacguguggaugggaagaacaaucaacgagacgucacgcuuaggguaugaaaccuucaaagucauugaaggcugguccaacccuaaguccaaauugcagauaaauaggcaagucauaguugacagaggugauagguccgguuauucugguauuuucucuguugaaggcaaaagcugcaucaaucggugcuuuuauguggaguugauuaggggaagaaaagaggaaacugaagucuuguggaccucaaacaguauuguuguguuuuguggcaccucagguacauauggaacaggcucauggccugauggggcggaccucaaucucaugccuauauaa

SEQ ID NO: 57589 - RNA, 1410 nt, Artificial Sequence; identical to SEQ ID NO: 55869
  derived and/or modified CDS sequence (wt) from neuraminidase__InfluenzaA__AIJ10803

SEQ ID NO: 57590 - RNA, 1410 nt, Artificial Sequence
  derived and/or modified CDS sequence (wt) from neuraminidase__InfluenzaA__AIJ10804
augaauccaaaucaaaagauaauaacgauuggcucuguuucucucaccauuuccacaauaugcuucuucaugcaaauugccaucuugauaacuacuguaacauugcacuucaagcaauaugaauucaacucccccccaaacaaccaagugaugcugugugaaccaacaauaauagaaagaaacauaacagagauaguguaucugaccaacaccaccauagagaaggaaauaugccccaaaccagcagaauacagaaauuggucaaaaccgcaauguggcauuacaggauuugcaccuuucucuaaggacaauucgauuaggcuuuccgcugguggggacaucugggugacaagagaaccuuaugugucaugcgauccugacaaguguuaucaauuugcccuuggacagggaacaacacuaaacaacgugcauucaaauaacacaguacgugauaggaccccuuaucggacucuauugaugaaugaguuggguguuccuuuucaucuggggaccaagcaagugugcauagcaugguccagcucaaguugucacgauggaaaagcauggcugcauguuuguauaacgggggaugauaaaaaugcaacugcuagcuucauuuacaaugggaggcuuguagauaguguuguuucaugguccaaagaaauucucaggacccaggagucagaaugcguuuguaucaauggaacuuguacaguaguaaugacugauggaagugcuucuggaaaagcugauacuaagauacuauucauugaagaggggaaaaucguucauacuagcacauugucaggaagugcucagcaugucgaagagugcucuugcuauccucgauauccuggugucagaugugucugcagagacaacuggaaaggcuccaaucggcccaucguagauauaaacauaaaggaucauagcauuguuuccaguuauguguguucaggacuuguuggagacacacccagaaaaaacgacagcuccagcaguagccauuguuuggauccuaacaaugaagaagguggucauggagugaaaggcugggccuuugaugauggaaaugacguguggaugggaagaacaaucaacgagacgucacgcuuaggguaugaaaccuucaaagucauugaaggcugguccaacccuaaguccaaauugcagauaaauaggcaagucauaguugacagaggugauagguccgguuauucugguauuuucucuguugaaggcaaaagcugcaucaaucggugcuuuuauguggaguugauuaggggaagaaaagaggaaacugaagucuuguggaccucaaacaguauuguuguguuuuguggcaccucagguacauauggaacaggcucauggccugauggggcggaccucaaucucaugccuauauaa

SEQ ID NO: 57591 - RNA, 1410 nt, Artificial Sequence
  derived and/or modified CDS sequence (wt) from neuraminidase__InfluenzaA__AIJ10805
augaauccaaaucaaaagauaauaacgauuggcucuguuucucucaccauuuccacaauaugcuucuucaugcaaauugccaucuugauaacuacuguaacauugcauuucaagcaauaugaauucaacucccccccaaacaaccaagugaugcugugugaaccaacaauaauagaaagaaacauaacagagauaguguaucugaccaacaccaccauagagaaggaaauaugccccaaaccagcagaauacagaaauuggucaaaaccgcaauguggcauuacaggauuugcaccuuucucuaaggacaauucgauuaggcuuuccgcugguggggacaucugggugacaagagaaccuuaugugucaugcgauccugacaaguguuaucaauuugcccuuggacagggaacaacacuaaacaacgugcauucaaauaacacaguacgugauaggaccccuuaucggacucuauugaugaaugaguuggguguuccuuuucaucuggggaccaagcaagugugcauagcaugguccagcucaaguugucacgauggaaaagcauggcugcauguuuguauaacgggggaugauaaaaaugcaacugcuagcuucauuuacaaugggaggcuuguagauaguguuguuucaugguccaaagaaauucucaggacccaggagucagaaugcguuuguaucaauggaacuuguacaguaguaaugacugauggaagugcuucaggaaaagcugauacuaaaauacuauucauugaggaggggaaaaucguucauacuagcacauugucaggaagugcucagcaugucgaagagugcucuugcuauccucgauauccuggugucagaugugucugcagagacaacuggaaaggcuccaaucggcccaucguagauauaaacauaaaggaucauagcauuguuuccaguuauguguguucaggacuuguuggagacacacccagaaaaaacgacagcuccagcaguagccauuguuuggauccuaacaaugaagaagguggucauggagugaaaggcugggccuuugaugauggaaaugacguguggaugggaagaacaaucaacgagacgucacgcuuaggguaugaaaccuucaaagucauugaaggcugguccaacccuaaguccaaauugcagauaaauaggcaagucauaguugacagaggugauagguccgguuauucugguauuuucucuguugaaggcaaaagcugcaucaaucggugcuuuuauguggaguugauuaggggaaggaaagaggaaacugaagucuuguggaccucaaacaguauuguuguguuuuguggcaccucagguacauauggaacaggcucauggccugauggggcggaccucaaucucaugccuauauaa

SEQ ID NO: 57592 - RNA, 1410 nt, Artificial Sequence
  derived and/or modified CDS sequence (wt) from neuraminidase__InfluenzaA__AIJ10806
augaauccaaaucaaaagauaauaacgauuggcucuguuucucucaccauuuccacaauaugcuucuucaugcaaauugccaucuugauaacuacuguaacauugcauuucaagcaauaugaauucaacucccccccaaacaaccaagugaugcugugugaaccaacaauaauagaaagaaacauaacagagauaguguaucugaccaacaccaccauagagaaggaaauaugccccaaaccagcagaauauagaaauuggucaaaaccgcaauguggcauuacaggauuugcaccuuucuccaaggacaauucgauuaggcuuuccgcugguggggacaucugggugacaagagaaccuuaugugucaugcgauccugacaaguguuaucaauuugcccuuggacagggaacaacacuaaacaacgugcauucaaauaacacaguacgugauaggaccccuuaucggacucuauugaugaaugaguuggguguuccuuuucaucuggggaccaagcaagugugcauagcaugguccagcucaaguugucacgauggaaaagcauggcugcauguuuguauaacgggggaugauaaaaaugcaacugcuagcuucauuuacaaugggaggcuuguagauaguguuguuucaugguccaaagaaauucucaggacccaggagucagaaugcguuuguaucaauggaacuuguacaguaguaaugacugauggaagugcuucaggaaaagcugauacuaaaauacuauucauugaggaggggaaaaucguucauacuagcacauugucaggaagugcucagcaugucgaagagugcucuugcuauccucgauauccuggugucagaugugucugcagagacaacuggaaaggcuccaaucggcccaucguagauauaaacauaaaggaucauagcauuguuuccaguuauguguguucaggacuuguuggagacacacccagaaaaaacgacagcuccagcauuagccauuguuuggauccuaacaaugaagaagguggucauggagugaaaggcugggccuuugaugauggaaaugacguguggaugggaagaacaaucaacgagacgucacgcuuaggguaugaaaccuucaaagucauugaaggcugguccaacccuaaguccaaauugcagauaaauaggcaagucauaguugacagaggugauagguccgguuauucugguauuuucucuguugaaggcaaaagcugcaucaaucggugcuuuuauguggaguugauuaggggaagaaaagaggaaacugaagucuuguggaccucaaacaguauuguuguauuuuguggcaccucagguacauauggaacaggcucauggccugauggggcggaccucaaucucaugccuauauaa

SEQ ID NO: 57593 - RNA, 1410 nt, Artificial Sequence
  derived and/or modified CDS sequence (wt) from neuraminidase__InfluenzaA__AIJ10807
augaauccaaaucaaaagauaauaacgauuggcucuguuucucucaccauuuccacaauaugcuucuucaugcaaauugccaucuugauaacuacuguaacauugcauuucaagcaauaugaauucaacuccccaccaaacaaccaagugaugcugugugaaccaacaauaauagaaagaaacauaacagagauaguguaucugaccaacaccaccauagagaaggaaauaugccccaaaccagcagaauacagaaauuggucaaaaccgcaauguggcauuacaggauuugcaccuuucucuaaggacaauucgauuaggcuuuccgcugguggggacaucugggugacaagagaagcuuaugugucaugcgauccugacaaguguuaucaauuugcccuuggacagggaacaacacuaaacaacgugcauucaaauaacacaguacgugauaggaccccuuaucggacucuauugaugaaugaguuggguguuccuuuucaucuggggaccaagcaagugugcauagcaugguccagcucaaguugucacgauggaaaagcauggcugcauguuuguauaacgggggaugauaaaaaugcaacugcuagcuucauuuacaaugggaggcuuguagauaguguuguuucaugguccaaagaaauucucaggacccaggagucagaaugcguuuguaucaauggaacuuguacaguaguaaugacugauggaagugcuucaggaaaagcugauacuaaaauacuauucauugaggaggggaaaaucguucauacuagcacauugucaggaagugcucagcaugucgaagagugcucuugcuauccucgauauccuggugucagaugugucugcagagacaacuggaaaggcuccaaucggcccaucguagauauaaacauaaaggaucauagcauuguuuccaguuauguguguucaggacuuguuggagacacacccagaaaaaacgacagcuccagcaguagccauuguuuggauccuaacaaugaagaagguggucauggagugaaaggcugggccuuugaugauggaaaugacguguggaugggaagaacaaucaacgagacgucacgcuuaggguaugaaaccuucaaagucauugaaggcugguccaacccuaaguccaaauugcagauaaauaggcaagucauaguugacagaggugauagguccgguuauucugguauuuucucuguugaaggcaaaagcugcaucaaucggugcuuuuauguggaguugauuaggggaagaaaagaggaaacugaagucuuguggaccucaaacaguauuguuguguuuuguggcaccucagguacauauggaacaggcucauggccugauggggcggaccucaaucucaugccuauauaa

SEQ ID NO: 57594 - RNA, 1410 nt, Artificial Sequence
  derived and/or modified CDS sequence (wt) from neuraminidase__InfluenzaA__AIJ10808
augaauccaaaucaaaagauaauaacgauugguucuguuucucucaccauuuccacaauaugcuucuucaugcaaauugccaucuugauaacuacuguaacauugcacuucaagcaauaugaauucaacucccccccaaacaaccaagugaugcugugugaaccaacaauaauagaaagaaacauaacagagauaguguaucugaccaacaccaccauagagaaggaaauaugccccaaaccagcagaauacagaaauuggucaaaaccgcaauguggcauuacaggauuugcaccuuucucuaaggacaauucgauuaggcuuuccgcugguggggacaucugggugacaagagaaccuuaugugucaugcgauccugacaaguguuaucaauuugcccuuggacagggaacaacacuaaacaacgugcauucaaauaacacaguacgugauaggaccccuuaucggacucuauugaugaaugaguuggguguuccuuuucaucuggggaccaagcaagugugcauagcaugguccagcucaaguugucacgauggaaaagcauggcugcauguuugcauaacgggggaugauaaaaaugcaacugcuagcuucauuuacaaugggaggcuuguagauaguguuguuucaugguccaaagaaguucucaggacccaggagucagaaugcguuuguaucaauggaacuuguacaguaguaaugacugauggaagugcuucaggaaaagcugauacuaaaauacuauucauugaggaggggaaaaucguucauacuagcacauugucaggaagugcucagcaugucgaagagugcucuugcuauccucgauauccuggugucagaugugucugcagagacaacuggaaaggcuccaauaggcccaucguagauauaaacauaaaggaucauagcauuguuuccaguuauguguguucaggacuuguuggagacacacccagaaaaaacgacagcuccagcaguagccauuguuuggauccuaacaaugaagaagguggucauggagugaaaggcugggccuuugaugauggaaaugacguguggaugggaagaacaaucaacgagacgucacgcuuaggguaugaaaccuucaaagucauugaaggcugguccaaccccaaguccaaauugcagauaaauaggcaagucauaguugacagaggugauagguccgguuauucugguauuuucucuguugaaggcaaaagcugcaucaaucggugcuuuuauguggaguugauuaggggaagaaaagaggaaacugaagucuuguggaccucaaacaguauuguuguguuuuguggcaccucagguacauauggaacaggcucauggccugauggggcggaccucaaucucaugccuauauaa

SEQ ID NO: 57595 - RNA, 1410 nt, Artificial Sequence; identical to SEQ ID NO: 57590
  derived and/or modified CDS sequence (wt) from neuraminidase__InfluenzaA__AIJ10809

SEQ ID NO: 57596 - RNA, 1410 nt, Artificial Sequence
  derived and/or modified CDS sequence (wt) from neuraminidase__InfluenzaA__AIJ10810
augaauccaaaucaaaagauaauaacgauuggcucuguuucucucaccauuuccacaauaugcuucuucaugcaaauugccaucuugauaacuacuguaacauugcauuucaagcaauaugaauucaacucccccccaaacaaccaagugaugcugugugaaccaacaauaauagaaagaaacauaacagagauaguguaucugaccaacaccaccauagagaaggaaauaugccccaaaccagcagaauacagaaauuggucaaaaccgcaauguggcauuacaggauuugcaccuuucucuaaggacaauucgauuaggcuauccgcugguggggacaucugggugacaagagaaccuuaugugucaugcgauccugacaaguguuaucaauuugcccuuggacagggaacaacacuaaacaacgugcauucaaauaacacaguacgugauaggaccccuuaucggacucuauugaugaaugaguuggguguuccuuuucaucuggggaccaagcaagugugcauagcaugguccagcucaaguugucacgauggaaaagcauggcugcauguuuguauaacgggggaugauaaaaaugcaacugcuagcuucauuuacaaugggaggcuuguagauaguguuguuucaugguccaaagaaauucucaggacccaggagucagaaugcguuuguaucaauggaacuuguacaguaguaaugacugauggaagugcuucaggaaaagcugauacuaaaauacuauucauugaggaggggaaaaucguucauacuagcacauugucaggaagugcucagcaugucgaagagugcucuugcuauccucgauauccuggugucagaugugucugcagagacaacuggaaaggcuccaaucggcccaucguagauauaaacauaaaggaucauagcauuguuuccaguuauguguguucaggacuuguuggagacacacccagaaaaaacgacagcuccagcaguagccauuguuuggauccuaacaaugaagaagguggucauggagugaaaggcugggccuuugaugauggaaaugacguguggaugggaagaacaaucaacgagacgucacgcuuaggguaugaaaccuucaaagucauugaaggcugguccaacccuaaguccaaauugcagauaaauaggcaggucauaguugacagaggugauagguccgguuauucugguauuuucucuguugaaggcaaaagcugcaucaaucggugcuuuuauguggaguugauuaggggaagaaaagaggaaacugaagucuuguggaccucaaacaguauuguuguguuuuguggcaccucagguacauauggaacaggcucauggccugauggggcggaccucaaucucaugccuauauaa

SEQ ID NO: 57597 - RNA, 1410 nt, Artificial Sequence
  derived and/or modified CDS sequence (wt) from neuraminidase__InfluenzaA__AIJ10812
augaauccaaaucaaaagauaauaacgauuggcucuguuucucucaccauuuccacaauaugcuucuucaugcaaauugccaucuugauaacuacuguaacauugcauuucaagcaauaugaauucaacucccccccaaacaaccaagugaugcugugugaaccaacaauaauggaaagaaacguaacagagauaguguaucugaccaacaccaccauagagaaggaaauaugcccuaaaccagcagaauacagaaauuggucaaaaccgcaauguggcauuacaggauuugcaccuuucucuaaggacaauucgauuaggcuuuccgcugguggggacaucugggugacaagagaaccuuaugugucaugcgauccugacaaguguuaucaauuugcccuuggacagggaacaacacuaaacaacgugcauucaaauaacacaguacgugauaggaccccuuaucgaacucuauugaugaaugaguuggguguuccuuuucaucuggggaccaagcaagugugcauagcaugguccagcucaaguugucacgauggaaaagcauggcugcauguuuguauaacaggggaugauaaaaaugcaacugcaagcuucauuuacaaugggaggcuuguagauaguguuguuucaugguccaaagaaauucucagaacccaggagucagaaugcguuuguaucaauggaacuuguacaguaguaaugacugauggaagugcuucaggaaaagcugauacuaaaauacuauucauugaggaggggaaaaucguucauacuagcacauugucaggaagugcucagcaugucgaagagugcucuugcuauccucgauauccuggugucagaugugucugcagagacaacuggaaaggcuccaaucggcccaucguagauauaaacauaaaggaucauagcauuguuuccaguuauguguguucaggacuuguuggagacacacccagaaaaaacgacagcuccagcaguagccauuguuuggauccuaacaaugaagaagguggucauggagugaaaggcugggccuuugaugauggaaaugacguguggaugggaagaacaaucaacgagacgucacgcuuaggguaugaaaccuucaaagucauugaaggcugguccaacccuaaguccaaauugcagauaaauaggcaagucauaguugacagaggugauagguccgguuauucugguauuuucucuguugaaggcaaaagcugcaucaaucggugcuuuuauguggaguugauuaggggaagaaaagaggaaacugaagucuuguggaccucaaacaguauuguuguguuuuguggcaccucagguacauauggaacaggcucauggccugauggggcggaccucaaucucaugccuauauaa

SEQ ID NO: 57598 - RNA, 1410 nt, Artificial Sequence
  derived and/or modified CDS sequence (wt) from neuraminidase__InfluenzaA__AIJ10813
augaauccaaaucaaaagauaauaacgauuggcucuguuucucucaccauuuccacaauaugcuucuucaugcaaauugccaucuugauaacuacuguaacauugcauuucaagcaauaugaauucaacucccccccaaacaaccaagugaugcugugugaaccaacaauaauggaaagaaacguaacagagauaguguaucugaccaacaccaccauagagaaggaaauaugcccuaaaccagcagaauacagaaauuggucaaaaccgcaauguggcauuacaggauuugcaccuuucucuaaggacaauucgauuaggcuuuccgcugguggggacaucugggugacaagagaaccuuaugugucaugcgauccugacaaguguuaucaauuugcccuuggacagggaacaacacuaaacaacgugcauucaaauaacccaguacgugauaggaccccuuaucgaacucuauugaugaaugaguuggguguuccuuuucaucuggggaccaagcaagugugcauagcaugguccagcucaaguugucacgauggaaaagcauggcugcauguuuguauaacaggggaugauaaaaaugcaacugcaagcuucauuuacaaugggaggcuuguagauaguguuguuucaugguccaaagaaauucucagaacccaggagucagaaugcguuuguaucaauggaacuuguacaguaguaaugacugauggaagugcuucaggaaaagcugauacuaaaauacuauucauugaggaggggaaaaucguucauacuagcacauugucaggaagugcucagcaugucgaagagugcucuugcuauccucgauauccuggugucagaugugucugcagagacaacuggaaaggcuccaaucggcccaucguagauauaaacauaaaggaucauagcauuguuuccaguuauguguguucaggacuuguuggagacacacccagaaaaaacgacagcuccagcaguagccauuguuuggauccuaacaaugaagaagguggucauggagugaaaggcugggccuuugaugauggaaaugacguguggaugggaagaacaaucaacgagacgucacgcuuaggguaugaaaccuucaaagucauugaaggcugguccaacccuaaguccaaauugcagauaaauaggcaagucauaguugacagaggugauagguccgguuauucugguauuuucucuguugaaggcaaaagcugcaucaaucggugcuuuuauguggaguugauuaggggaagaaaagaggaaacugaagucuuguggaccucaaacaguauuguuguguuuuguggcaccucagguacauauggaacaggcucauggccugauggggcggaccucaaucucaugccuauauaa

SEQ ID NO: 57599 - RNA, 1410 nt, Artificial Sequence
  derived and/or modified CDS sequence (wt) from neuraminidase__InfluenzaA__AIJ10814
augaauccaaaucaaaagauaauaacgauuggcucuguuucucucaccauuuccacaauaugcuucuucaugcaaauugccaucuugauaacuacuguaacauugcauuucaagcaauaugaauucaacucccccccaaacaaccaagugaugcugugugaaccaacaauaguagaaagaaacauaacagagauaguguaucugaccaacaccaccauagagaaggaaauaugccccaaaccagcagaauacagaaauuggucaaaaccgcaauguggcauuacaggauuugcaccuuucucuaaggacaauucgauuaggcuuuccgcugguggggacaucugggugacaagagaaccuuaugugucaugcgauccugacaaguguuaucaauuugcccuuggacagggaacaacacuaaacaacgugcauucaaauaacacaguacgugauaggaccccuuaucggacucuauugaugaaugaguuggguguuccuuuucaucuggggaccaagcaagugugcauagcaugguccagcucaaguugucacgauggaaaagcauggcugcauguuuguauaacaggggaugauaaaaaugcaacugcuagcuucauuuacaaugggaggcuuguagauaguguuguuucaugguccaaagaaauucucaggacccaggagucagaaugcguuuguaucaauggaacuuguacaguaguaaugacugauggaagugcuucaggaaaagcugauacuaaaauacuauucauugaggaggggaaaaucguucauacuagcacauugucaggaagugcucagcaugucgaagagugcucuugcuauccucgauauccuggugucagaugugucugcagagacaacuggaaaggcuccaaucggcccaucguagauauaaacauaaaggaucauagcauuguuuccaguuauguguguucaggacuuguuggagacacacccagaaaaaacgacagcuccagcaguagccauuguuuggauccuaacaaugaagaagguggucauggagugaaaggcugggccuuugaugauggaaaugacguguggaugggaagaacaaucaacgagacgucacgcuuaggguaugaaaccuucaaaguuauugaaggcugguccaacccuaaguccaaauugcagauaaauaggcaagucauaguugacaaaggugauagguccgguuauucugguauuuucucuguugaaggcaaaagcugcaucaaucggugcuuuuauguggaguugauuaggggaagaaaagaggaaacugaagucuuguggaccucaaacaguauuguuguguuuuguggcaccucagguacauauggaacaggcucauggccugauggggcggaccucaaucucaugccuauauaa

SEQ ID NO: 57600 - RNA, 1410 nt, Artificial Sequence
  derived and/or modified CDS sequence (wt) from neuraminidase__InfluenzaA__AIJ10815
augaauccaaaucaaaagauaauaacgauuggcucuguuucucucaccauuuccacaauaugcuucuucaugcaaauugccaucuugauaacuacuguaacauugcauuucaagcaauaugaauucaacucccccccaaacaaccaagugaugcugugugaaccaacaauaauagaaagaaacauaacagagauaguguauuugaccaacaccaccauagagaaggaaauaugccccaaaccagcagaauacagaaauuggucaaaaccgcaauguggcauuacaggauuugcaccuuucucuaaggacaauucgauuaggcuuuccgcugguggggacaucugggugacaagagaaccuuaugugucaugcgauccugacaaguguuaucaauuugcccuuggacagggaacaacacuaaacaacgugcauucaaauaacacaguacgugauaggaccccuuaucggacucuauugaugaaugaguuggguguuccuuuucaucuggggaccaagcaagugugcauagcaugguccagcucaaguugucacgauggaaaagcauggcugcauguuuguauaacgggggaugauaaaaaugcaacugcuagcuucauuuacaaugggaggcuuguagauaguguuguuucaugguccaaagaaauucucaggacccaggagucagaaugcguuuguaucaauggaacuuguacaguaguaaugacugauggaagugcuucaggaaaagcugauacuaaaauacuauucauugaggaggggaaaaucguucauacuagcacauugucaggaagugcucagcaugucgaagagugcucuugcuauccucgauauccuggugucagaugugucugcagagauaacuggaaaggcuccaaucggcccaucguagauauaaacauaaaggaucauagcauuguuuccaguuauguguguucaggacuuguuggagacacacccagaaaaaacgacagcuccagcaguagccauuguuuggauccuaacaaugaagaagguggucauggagugaaaggcugggccuuugaugauggaaaugacguguggaugggaagaacaaucaacgagacgucacgcuuaggguaugaaaccuucaaagucauugaaggcugguccaacccuaaguccaaauugcagauaaauaggcaagucauaguugacagaggugauagguccgguuauucugguauuuucucuguugaaggcaaaagcugcaucaaucggugcuuuuauguggaguugauuaggggaagaaaagaggaaaaugaagucuuguggaccucaaacaguauuguuguguuuuguggcaccucagguacauauggaacaggcucauggccugauggggcggaccucaaucucaugccuauauaa

SEQ ID NO: 57601 - RNA, 1410 nt, Artificial Sequence
  derived and/or modified CDS sequence (wt) from neuraminidase__InfluenzaA__AIJ10816
augaauccaaaucaaaagauaauaacgauuggcucuguuucucucaccaucuccacaauaugcuucuucaugcaaauugccaucuugauaacuacuguaacauugcauuucaagcaauaugaauucaacucccccccaaacaaccaagugaugcugugugaaccaacaauaauagaaagaaacauaacagagauaguguaucugaccaacaccaccauagagaaggaaauaugccccaaaccagcagaauacagaaauuggucaaaaccgcaauguggcauuacaggauuugcaccuuucucuaaggacaauucgauuaggcuuuccgcugguggggacaucugggugacaagagaaccuuaugugucaugcgauccugacaaguguuaucaauuugcccuuggacagggaacaacacuaaacaacgugcauucaaauaacacaguacgugauaggaccccuuaucggacucuauugaugaaugaguuggguguuccuuuucaucuggggaccaagcaagugugcauagcaugguccagcucaaguugucacgauggaaaagcauggcugcauguuuguauaacgggggaugauaaaaaugcaacugcuagcuucauuuacaaugggaggcuuguagauaguguuguuucaugguccaaagaaauucucaggacccaggagucagaaugcguuuguaucaauggaacuuguacaguaguaaugacugauggaagugcuucaggaaaagcugauacuaaaauacuauucauugaggaggggaaaaucguucauacuagcacauugucaggaagugcucagcaugucgaagagugcucuugcuauccucgauauccuggugucagaugugucugcagagacaacuggaaaggcuccaaucggcccaucguagauauaaacauaaaggaucauagcauuguuuccaguuauguguguucaggacuuguuggagacacacccagaaaaaacgacagcuccagcaguagccauuguuuggauccuaacaaugaagaagguggucauggagugaaaggcugggccuuugaugauggaaaugacguguggaugggaagaacaaucaacgagacgucacgcuuaggguaugaaaccuucaaagucauugaaggcugguccaacccuaaguccaaauugcagauaaauaggcaagucauaguugacagaggugauagguccgguuauucugguauuuucucuguugaaggcaaaggcugcaucaaucggugcuuuuauguggaguugauuaggggaagaaaagaggaaacugaagucuuguggaccucaaacaguauuguuguguuuuguggcaccucagguacauauggaacaggcucauggccugauggggcggaccucaaucucaugccuauauaa

SEQ ID NO: 57602 - RNA, 1410 nt, Artificial Sequence
  derived and/or modified CDS sequence (wt) from neuraminidase__InfluenzaA__AIJ10817
augaauccaaaucaaaagauaauaacgauuggcucuguuucucucaccauuuccacaauaugcuucuucaugcaaauugccaucuugauaacuacuguaacauugcauuucaagcaauaugaauucaacucccccccaaacaaccaagugaugcugugugaaccaacaauaauagaaagaaacauaacagagauaguguaucugaccaacaccaccauagagaaggaaauaugccccaaaccagcagaauacagaaauuggucaaaaccgcaauguggcauuacaggauuugcaccuuucucuaaggacaauucgauuaggcuauccgcugguggggacaucugggugacaagagaaccuuaugugucaugcgauccugacaaguguuaucaauuugcccuuggacagggaacaacacuaaacaacgugcauucaaauaacacaguacgugauaggaccccuuaucggacucuauugaugaaugaguuggguguuccuuuucaucuggggaccaagcaagugugcauagcaugguccagcucaaguugucacgauggaaaagcauggcugcauguuuguauaacgggggaugauaaaaaugcaacugcuagcuucauuuacaauggaaggcuuguagauaguguuguuucaugguccaaagaaauucucaggacccaggagucagaaugcguuuguaucaauggaacuuguacaguaguaaugacugauggaagugcuucaggaaaagcugauacuaaaauacuauucauugaggaggggaaaaucguucauacuagcacauugucaggaagugcucagcaugucgaagagugcucuugcuauccucgauauccuggugucagaugugucugcagagacaacuggaaaggcuccaaucggcccaucguagauauaaacauaaaggaucauagcauuguuuccaguuauguguguucaggacuuguuggagacacacccagaaaaaacgacagcuccagcaguagccauuguuuggauccuaacaaugaagaagguggucauggagugaaaggcugggccuuugaugauggaaaugacguguggaugggaagaacaaucaacgagacgucacgcuuaggguaugaaaccuucaaagucauugaaggcugguccaacccuaaguccaaauugcagauaaauaggcaggucauaguugacagaggugauagguccgguuauucugguauuuucucuguugaaggcaaaagcugcaucaaucggugcuuuuauguggaguugauuaggggaagaaaagaggaaacugaagucuuguggaccucaaacaguauuguuguguuuuguggcaccucagguacauauggaacaggcucauggccugauggggcggaccucaaucucaugccuauauaa

SEQ ID NO: 57603 - RNA, 1410 nt, Artificial Sequence
  derived and/or modified CDS sequence (wt) from neuraminidase__InfluenzaA__AIJ10818
augaauccaaaucaaaagauaauaacgauuggcucuguuucucucaccauuuccacaauaugcuucuucaugcaaauugccaucuugauaacuacuguaacauugcauuucaagcaauaugaauucaacucccccccaaacaaccaagugaugcugugugaaccaacaauaauagaaagaaacauaacagagauaguguaucugaccaacaccaccauagagaaggaaauaugccccaaaccagcagaauacagaaauuggucaaaaccgcaauguggcauuacaggauuugcaccuuucucuaaggacaauucgauuaggcuuuccgcugguggggacaucugggugacaagagaaccuuaugugucaugcgaucccgacaaguguuaucaauuugcccuuggacagggaacaacacuaaacaacgugcauucaaauaacacaguacgugauaggaccccuuaucggacucuauugaugaaugaguuggguguuccuuuucaucuggggaccaagcaagugugcauagcaugguccagcucaaguugucacgauggaaaagcauggcugcauguuuguauaacgggggaugauaaaaaugcaacugcuagcuucauuuacaaugggaggcuuguagauaguguuguuucaugguccaaagaaauccucaggacccaggagucagaaugcguuuguaucaauggaacuuguacaguaguaaugacugauggaagugcuucaggaaaagcugauacuaaaauacuauucauugaggaggggaaaaucguucauacuagcacauugucaggaagugcucagcaugucgaagagugcucuugcuauccucgauauccuggugucagaugugucugcagagacaacuggaaaggcuccaaucggcccaucguagauauaaacauaaaggaucauagcauuguuuccaguuauguguguucaggacuuguuggagacacacccagaaaaaacgacagcuccagcaguagccauuguuuggauccuaacaaugaagaagguggucauggagugaaaggcugggccuuugaugauggaaaugacguguggaugggaagaacaaucaacgagacgucacgcuuaggguaugaaaccuucaaagucauugaaggcugguccaauccuaaguccaaauugcagauaaauaggcaagucauaguugacagaggugauagguccgguuauucugguauuuucucuguugaaggcaaaagcugcaucaaucggugcuuuuauguggaguugauuaggggaagaaaagaggaaacugaagucuuguggaccucaaacaguauuguuguguuuuguggcaccucagguacauauggaacaggcucauggccugauggggcggaccucaaucucaugccuauauaa

SEQ ID NO: 57604 - RNA, 1410 nt, Artificial Sequence
  derived and/or modified CDS sequence (wt) from neuraminidase__InfluenzaA__AIJ10819
augaauccaaaucaaaagauaauaacgauuggcucuguuucucucaccauuuccacaauaugcuucuucaugcaaauugccaucuugauaacuacuguagcauugcauuucaagcaauaugaauucaacucccccccaaacaaccaagugaugcugugugaaccaacaauaauagaaagaaacauaacagagauaguguaucugaccaacaccaccauagagaaggaaauaugccccaaaccagcagaauacagaaauuggucaaaaccgcaauguggcauuacaggauuugcaccuuucucuaaggacaauucgauuaggcuuuccgcugguggggacaucugggugacaagagaaccuuaugugucaugcgauccugacaaguguuaucaauuugcccuuggacagggaacaacacuaaacaacgugcauucaaauaacacaguacgugauaggaccccuuaucggacucuauugaugaaugaguuggguguuccuuuucaucuggggaccaagcaagugugcauagcaugguccagcucaaguugucacgauggaaaagcauggcugcauguuuguauaacgggggaugauaaaaaugcaacugcuagcuucauuuacaaugggaggcuuguagauaguguuguuucaugguccaaagaaauucucaggacccaggagucagaaugcguuuguaucaauggaacuuguacaguaguaaugacugauggaagugcuucaggaaaagcuaauacuaaaauacuauucauugaggaggggaaaauaguucauacuagcacauugucaggaagugcucagcaugucgaagagugcucuugcuauccucgauauccuggugucagaugugucugcagagacaacuggaaaggcuccaaucggcccaucguagauauaaacauaaaggaucauagcauuguuuccaguuauguguguucaggacuuguuggagacacacccagaaaaaacgacagcuccagcaguagccauuguuuggauccuaacaaugaagaagguggucauggagugaaaggcugggccuuugaugauggaaaugacguguggaugggaagaacaaucaacgagacgucacgcuuaggguaugaaaccuucaaagucauugaaggcugguccaacccuaaguccaaauugcagauaaauaggcaagucauaguugacagaggugauagguccgguuauucugguauuuucucuguugaaggcaaaagcugcaucaaccggugcuuuuauguggaguugauuaggggaagaaaagaggaaacugaaguuuuguggaccucaaacaguauuguuguguuuuguggcaccucagguacauauggaacaggcucauggccugauggggcggaccucaaucucaugccuauauaa

SEQ ID NO: 57605 - RNA, 1410 nt, Artificial Sequence; identical to SEQ ID NO: 57596
  derived and/or modified CDS sequence (wt) from neuraminidase__InfluenzaA__AIJ10820

SEQ ID NO: 57606 - RNA, 1410 nt, Artificial Sequence
  derived and/or modified CDS sequence (wt) from neuraminidase__InfluenzaA__AIJ10821
augaauccaaaucaaaagauaauaacgauuggcucuguuucucucaccauuuccacaauaugcuucuucaugcaaauugccaucuugauaacuacuguaacauugcauuucaagcaauaugaauucaacucccccccaaacaaccaagugaugcugugugaaccaacaauaauagaaagaaacauaacagagauaguguaucugaccaacaccaccauagagaaggaaauaugccccaaaccagcagaauacagaaauuggucaaaaccgcaauguggcauuacaggauuugcaccuuucucuaaggacaauucgauuaggcuuuccgcugguggggacaucugggugacaagagaaccuuaugugucaugcgauccugacaaguguuaucaauuugcccuuggacagggaacaacacuaaacaacgugcauucaaauaacacaguacgugauaggaccccuuaucggacucuauugaugaaugaguuggguguuccuuuucaucuggggaccaagcaagugugcauagcaugguccagcucaaguugucacgauggaaaagcauggcugcauguuuguauaacgggggaugauaaaaaugcaacugcuagcuucauuuacaaugggaggcuuguagauaguguuguuucaugguccaaagaaauucucaggacccaggagucagaaugcguuuguaucaauggaacuuguacaguaguaaugacugauggaagugcuucaggaaaagcugauacuaaaauacuauucauugaggaggggaaaaucguucauacuagcacauugucaggaagugcucagcaugucgaagagugcucuugcuauccucgauauccuggugucagaugugucugcagagacaacuggaaaggcuccaaucggcccaucguagauauaaacauaaaggaucauagcauuguuuccaguuauguguguucaggacuuguuggagacacacccagaaaaaacgacagcuccagcaguagccauuguuuggauccuaacaaugaagaagguggucauggagugaaaggcugggccuuugaugauggaaaugacguguggaugggaagaacaaucaacgagacgucacgcuuaggguaugaaaccuucaaagucauugaaggcugguccaacccuaaguccaaauugcagauaaauaggcaagucauaguugacagaggugauagguccgguuauucugguauuuucucuguugaaggcaagagcugcaucaaucggugcuuuuauguggaauugauuaggggaagaaaagaggaaacugaagucuuguggaccucaaacaguauuguuguguuuuguggcaccucagguacauauggaacaggcucauggccugauggggcggaccucaaucucaugccuauauaa

SEQ ID NO: 57607 - RNA, 1410 nt, Artificial Sequence
  derived and/or modified CDS sequence (wt) from neuraminidase__InfluenzaA__AIJ10822
augaauccaaaucaaaagauaauaacgauuggcucuguuucucucaccauuuccacaauaugcuucuucaugcaaauugccaucuugauaacuacuguaacauugcauuucaagcaauaugaauucaacucccccccaaacaaccaagugaugcugugugaaccaacaauaauagaaagaaacauaacagagauaguguaucugaccaacaccaccauagagaaggaaauaugccccaaaccagcagaauacagaaauuggucaaaaccgcaauguggcauuacaggauuugcaccuuucucuaaggacaauucgauuaggcuuuccgcugguggggacaucugggugacaagagaaccuuaugugucaugcgauccugacaaguguuaucaauuugcccuuggacagggaacaacacuaaacaacgugcauucaaauaacacaguacgugauaggaccccuuaucggacucuauugaugaaugaguuggguguuccuuuucaucuggggaccaagcaagugugcauagcaugguccagcucaaguugucacgauggaaaagcauggcugcauguuuguauaacgggggaugauaaaaaugcaacugcuagcuucauuuacaaugggaggcuuguagauaguguuguuucaugguccaaagacauucucaggacccaggagucagaaugcguuuguaucaauggaacuuguacaguaguaaugacugauggaagugcuucaggaaaagcugauacuaaaauacuauucauugaggaggggaaaaucguucauacuagcacauugucaggaagugcucagcaugucgaagagugcucuugcuauccucgauacccuggugucagaugugucugcagagacaacuggaaaggcuccaaucggcccaucguagauauaaacauaaaggaucauagcauuguuuccaguuauguguguucaggacuuguuggagacacacccagaaaaaacgacagcuccagcaguagccauuguuuggauccuaacaaugaagaagguggucauggagugaaaggcugggccuuugaugauggaaaugacguguggaugggaagaacaaucaacgagacgucacgcuuaggguaugaaaccuucaaagucauugaaggcugguccaacccuaaguccaaauugcagauaaauaggcaaguuauaguugacagaggugauagguccgguuauucugguauuuucucuguugaaggcaaaagcugcaucaaucggugcuuuuauguggaguugauuaggggaagaaaagaggaaaaugaagucuuguggaccucaaacaguauuguuguguuuuguggcaccucagguacauauggaacaggcucauggccugauggggcggaccucaaucucaugccuauauaa

SEQ ID NO: 57608 - RNA, 1410 nt, Artificial Sequence
  derived and/or modified CDS sequence (wt) from neuraminidase__InfluenzaA__AIJ10823
augaauccaaaucaaaagauaauaacgauuggcucuguuucucucaccauuuccacaauaugcuucuucaugcaaauugccaucuugauaacuacuguaacauugcauuucaaucaauaugaauucaacucccccccaaacaaccaagugaugcugugugaaccaacaauaauagaaagaaacauaacagagauaguguaucugaccaccaccaccauagagaaggaaauaugccccaaaccagcagaauacagaaauuggucaaaaccgcaauguggcauuacaggauuugcaccuuuuucuaaggacaauucgauuaggcuuuccgcugguggggacaucugggugacaagagaaccuuaugugucaugcgauccugacaaguguuaucaauuugcccuuggacagggaacaacacuaaacaaugugcauucaaauaacacaguacgugauaggaccccuuuucggacuuuauugaugaaugaguuagguguuccuuuucaucuggggaccaagcaagugugcauagcaugguccagcucaaguugucacgauggaaaagcauggcugcauguuuguauaacgggggaugauaaaaaugcaacugcuagcuucauuuacaaugggaggcuuguagauaguguuguuucaugguccaaagaaauucucaggacccaggagucagaaugcguuuguaucaauggaacuuguacaguaguaaugacugauggaagugcuucaggaaaagcuguuacuaaaauacuauucauugaggaggggaaaaucguucauacuagcacauugucaggaagugcucagcaugucgaggagugcucuugcuauccucgauauccuggugucagaugugucugcagagacaacuggaaaggcuccaauaggcccaucguagauauaaacauaaaggaucauagcauugucuccgguuauguguguucaggacuuguuggagacacacccagaaaaaacgacagcuccagcaguagccauuguuugaauccuaacaaugaagaagguggucauggagugaaaggcugggccuuugaugauggaaaugacguguggaugggaagaacaaucaacgagacgucacgcuuaggguaugaaaccuucaaagucauugaaggcugguccaacccuaaguccaaauugcagauaaauaggcaagucauaguugacagaggugauagguccgguuauucugguauuuucucuguugaaggcaaaagcugcaucaaucgguguuuuuauguggaguugauuaggggaagaaaagaggaaacugaagucuuguggaccucaaacaguauuguuguguuuuguggcaccucagguacauauggaacaggcucauggccugauggggcggaccucaaucucaugccuauauaa

SEQ ID NO: 57609 - RNA, 1410 nt, Artificial Sequence
  derived and/or modified CDS sequence (wt) from neuraminidase__InfluenzaA__AIJ10824
augaauccaaaucaaaagauaauaacgauuggcucuguuucucucaccauuuccacaauaugcuucuucaugcaaauugccaucuugauaacuacuguaacauugcauuucaagcaauaugaauucaacucccccccaaacaaccaaguggugcugugugaaccaacaauaauagaaagaaacauaacagagauaguguaucugaccaacaccaccauagagaaggaaauaugccccaaaccagcagaauacagaaauuggucaaaaccgcaauguggcauuacaggauuugcaccuuucucuaaggacaauucgauuaggcuuuccgcugguggggacaucugggugacaagagaaccuuaugugucaugcgauccugacaaguguuaucaauuugcccuuggacagggaacaacacuaaacaacgugcauucaaauaacacaguacgugauaggaccccuuaucggacucuauugaugaaugaguuggguguuccuuuucaucuggggaccaagcaagugugcauagcaugguccagcucaaguugucacgauggaaaagcauggcugcauguuuguauaacgggggaugauaaaaaugcaacugcuagcuucauuuacaaugggaggcuuguagauaguguuguuucaugguccaaagaaauucucaggacccaggagucagaaugcguuuguaucaauggaacuuguacaguaguaaugacugauggaagugcuucaggaaaagcugauacuaaaauacuauucauugaggaggggaaaaucguucauacuagcacauugucaggaagugcucagcaugucgaagagugcucuugcuauccucgauauccuggugucagaugugucugcagagacaacuggaaaggcuccaaucggcccaucguagauauaaacauaaaggaucauagcauuguuuccaguuauguguguucaggacuuguuggagacacacccagaaaaaacgacagcuccagcaguagccauuguuuggauccuaacaaugaagaagguggucauggagugaaaggcugggccuuugaugauggaaaugacguguggaugggaaggacaaucaacgagacgucacgcuuaggguaugaaaccuucaaagucauugaaggcugguccaacccuaaguccaaauugcagauaaauaggcaagucauaguugacagaggugauagguccgguuauucugguauuuucucuguugaaggcaaaagcugcaucaaucggugcuuuuauguggaguugauuaggggaagaaaagaggaaacugaagucuuguggaccucaaacaguauuguuguguuuuguggcaccucagguacauauggaacaggcucauggccugauggggcggaccucaaucucaugccuauauaa

SEQ ID NO: 57610 - RNA, 1410 nt, Artificial Sequence
  derived and/or modified CDS sequence (wt) from neuraminidase__InfluenzaA__AIJ10827
augaauccaaaucaaaagauaauaacgauuggcucuguuucucucaccauuuccacaauaugcuucuucaugcaaauugccaucuugauaacuacuguaacauugcauuucaagcaauaugaauucaacucccccccaaacaaccaagugaugcugugugaaccaacaauaauagaaagaaacauaacagagauaguguaucugaccaacaccaccauagagaaggaaauaugccccaaaccagcagaauacagaaauuggucaaaaccgcaauguggcauuacaggauuugcaccuuucucuaaggacaauucgauuaggcuuuccgcugguggggacaucuggguuacaagagaaccuuaugugucaugcgauccugacaagugcuaucaauuugcccuuggacagggaacaacacuaaacaacgugcauucaaauaacacaguacgugauaggaccccuuaucggacucuacugaugaaugaguuggguguuccuuuucaucuggggaccaagcaagugugcauagcaugguccagcucaaguugucacgauggaaaagcauggcugcauguuuguauaacgggggaugauaaaaaugcaacugcuagcuucauuuacaaugggaggcuuguagauaguguuguuucaugguccaaagacauucucaggacccaggagucagaaugcguuuguaucaauggaacuuguacaguaguaaugacugauggaagugcuucaggaaaagcugauacuaaaauacuauucauugaggaggggaagaucguucauacuagcacauugucaggaagugcucagcaugucgaagagugcucuugcuauccucgauauccuggugucagaugugucugcagagacaacuggaaaggcuccaaucggcccaucguagauauaaacauaaaggaucauagcauuguuuccaguuauguguguucaggacuuguuggagacacacccagaaaaaacgacagcuccagcaguagccauuguuuggauccuaacaaugaagaagguggucauggagugaaaggcugggccuuugaugauggaaaugacguguggaugggaagaacaaucaacgagacgucacgcuuaggguaugaaaccuucaaagucauugaaggcugguccaacccuaaguccaaauugcagauaaauaggcaagucauaguugacagaggugauagguccgguuauucugguauuuucucuauugaaggcaaaagcugcaucaaucggugcuuuuauguggaguugauuaggggaagaaaagaggaaacugaagucuuguggaccucaaacaguauuguuguguuuuguggcaccucagguacauauggaacaggcucauggccugauggggcggaccucaaucucaugccuauauaa

SEQ ID NO: 57611 - RNA, 1410 nt, Artificial Sequence
  derived and/or modified CDS sequence (wt) from neuraminidase__InfluenzaA__AIJ10828
augaauccaaaucaaaagauaauaacgauuggcucuguuucucucaccauuucuacaauaugcuucuucaugcaaauugccaucuugauaacuacuguaacauugcauuucaagcaauaugaauucaacucccccccaaacaaccaagugaugcugugugaaccaacaauaauagaaagaaacauaacagagauaguguaucugaccaacaccaccauagagaaggaaauaugccccaaaccagcagaauacagaaauuggucaaaaccgcaauguggcauuacaggauuugcaccuuucucuaaggacaauucgauuaggcuuuccgcugguggggacaucuggguuacaagagaaccuuaugugucaugcgauccugacaagugcuaucaauucgcccuuggacagggaacaacacuaaacaacgugcauucaaauaacacaguacgugauaggaccccuuaucggacucuacugaugaaugaguuggguguuccuuuucaucuggggaccaagcaagugugcauagcaugguccagcucaaguugucacgauggaaaagcauggcugcauguuuguauaacgggggaugauaaaaaugcaacugcuagcuucauuuacaaugggaggcuuguagauaguguuguuucaugguccaaagacauucucaggacccaggagucagaaugcguuuguaucaauggaacuuguacaguaguaaugacugauggaagugcuucaggaaaagcugauacuaaaauacuauucauugaggaggggaaaaucguucauacuagcacauugucagggagugcucagcaugucgaagagugcucuugcuauccucgauauccuggugucagaugugucugcagagacaacuggaaaggcuccaaucggcccaucguagauauaaacauaaaggaucauagcauuguuuccaguuauguguguucaggacuuguuggagacacacccagaaaaaacgacagcuccagcaguagccauuguuuggauccuaacaaugaagaagguggucauggagugaaaggcugggccuuugaugauggaaaugacguguggaugggaagaacaaucaacgagacgucacgcuuaggguaugaaaccuucaaagucauugaaggcugguccaacccuaaguccaaauugcagauaaauaggcaagucauaguugacagaggugauagguccgguuauucugguauuuucucuauugaaggcaaaagcugcaucaaucggugcuuuuauguggaguugauuaggggaagaaaagaggaaacugaagucguguggaccucaaacaguauuguuguguuuuguggcaccucagguacauauggaacaggcucauggccugauggggcggaccucaaucucaugccuauauaa

SEQ ID NO: 57612 - RNA, 1410 nt, Artificial Sequence
  derived and/or modified CDS sequence (wt) from neuraminidase__InfluenzaA__AIJ10829
augaauccaaaucaaaagauaauaacgauuggcucuguuucucucaccauuuccacaauaugcuucuucaugcaaauugccaucuugauaacuacuguaacauugcauuucaagcaauaugaauucaacucccccccaaacaaccaagugaugcugugugaaccaacaauaauagaaagaaacauaacagagauaguguaucugaccaacaccaccauagagaaggaaauaugccccaaaccagcagaauacagaaauuggucaaaaccgcaauguggcauuacaggauuugcaccuuucucuaaggacaauucgauuaggcuuuccgcugguggggacaucuggguuacaagagaaccuuaugugucaugcgauccugacaauugcuaucaauuugcccuuggacagggaacaacacuaaacaacgugcauucaaauaacacaguacgugauaggaccccuuaucggacucuacugaugaaugaguuggguguuccuuuucaucuggggaccaagcaagugugcauagcaugguccagcucaaguugucacgauggaaaagcauggcugcauguuuguauaacgggggaugauaaaaaugcaacugcuagcuucauuuacaaugggaggcuuguagauaguguuguuucaugguccaaagacauucucaggacccaggagucagaaugcguuuguaucaauggaacuuguacaguaguaaugacugauggaagugcuucaggaaaagcugauacuaaaauacuauucauugaggaggggaaaaucguucauacuagcacauugucaggaagugcucagcaugucgaagagugcucuugcuauccucgauauccuggugucagaugugucugcagagacaacuggaaaggcuccaaucggcccaucguagauauaaacauaaaggaucauagcauuguuuccaguuauguguguucaggacuuguuggagacacacccagaaaaaacgacagcuccagcaguagccauuguuuggauccuaacaaugaagaaggugaucauggagugaaaggcugggccuuugaugauggaaaugacguguggaugggaagaacaaucaacgagacgucacgcuuaggguaugaaaccuucaaagucauugaaggcugguccaacccuaaguccaaauugcagauaaauaggcaagucauaguugacagaggugauagguccgguuauucugggauuuucucuauugaaggcaaaagcugcaucaaucggugcuuuuauguggaguugauuaggggaagaaaagaggaaacugaagucuuguggaccucaaacaguauuguuguguuuuguggcaccucagguacauauggaacaggcucauggccugauggggcggaccucaaucucaugccuauauaa

SEQ ID NO: 57613 - RNA, 1410 nt, Artificial Sequence
  derived and/or modified CDS sequence (wt) from neuraminidase__InfluenzaA__AIJ10830
augaauccaaaucaaaagauaauaacgauuggcucuguuucucucaccauuuccacaauaugcuucuucaugcaaauugccaucuugauaacuacuguaacauugcauuucaagcaauaugaauucaacucccccccaaacaaccaagugaugcugugugaaccaacaauaauagaaagaaacauaacagagauaguguaucugaccaacaccaccauagagaaggaaauaugccccaaaccagcagaauacaaaaauuggucaaaaccgcaauguggcauuacaggauuugcaccuuuuucuaaggacaauucgauuaggcuuuccgcugguggggacaucuggguuacaagagaaccuuaugugucaugcgauccugacaagugcuaucaauuugcccuuggacagggaacaacacuaaacaacgugcauucaaauaacacaguacgugauaggaccccuuaucggacucuacugaugaaugaguuggguguuccuuuucaucuggggaccaagcaagugugcauagcaugguccagcucaaguugucacgauggaaaagcauggcugcauguuuguauaacgggggaugauaaaaaugcaacugcuagcuucauuuacaaugggaggcuuguagauaguguuguuucaugguccaaagacauucucaggacccaggagucagaaugcguuuguaucaauggaacuuguacaguaguaaugacugauggaagugcuucaggaaaagcugauacuaaaauacuauucauugaggaggggaagaucguucauacuagcacauugucaggaagugcucagcaugucgaagagugcucuugcuauccucgauauccuggugucagaugugucugcagagacaacuggaaaggcuccaaucggcccaucguagauauaaacauaaaggaucauagcauuguuuccaguuauguguguucaggacuuguuggagacacacccagaaaaaacgacagcuccagcaguagccauuguuuggauccuaacaaugaagaagguggucauggagugaaaggcugggccuuugaugauggaaaugacguguggaugggaagaacaaucaacgagacgucacgcuuaggguaugaaaccuucaaagucauugaaggcugguccaacccuaaguccaaauugcagauaaauaggcaagucauaguugacagaggugauaggucagguuauucugguauuuucucuauugaaggcaaaagcugcaucaaucggugcuuuuauguggaguugauuaggggaagaaaagaggaaacugaagucuuguggaccucaaacaguauuguuguguuuuguggcaccucagguacauauggaacaggcucauggccugauggggcggaccucaaucucaugccuauauaa

SEQ ID NO: 57614 - RNA, 1410 nt, Artificial Sequence
  derived and/or modified CDS sequence (wt) from neuraminidase__InfluenzaA__AIJ10831
augaauccaaaucaaaagauaauaacgauuggcucuguuucucucaccauuucuacaauaugcuucuucaugcaaauugccaucuugauaacuacuguaacauugcauuucaagcaauaugaauucaacucccccccaaacaaccaagugaugcugugugaaccaacaauaauagaaagaaacauaacagagauaguguaucugaccaacaccaccauagagaaggaaauaugccccaaaccagcagaauacagaaauuggucaaaaccgcaauguggcauuacaggauuugcaccuuucucuaaggacaauucgauuaggcuuuccgcugguggggacaucuggguuacaagagaaccuuaugugucaugcgauccugacaagugcuaucaauuugcccuuggacagggaacaacacuaaacaacgugcauucaaauaacacaguacgugauaggaccccuuaucggacucuacugaugaaugaguuggguguuccuuuucaucuggggaccaagcaagugugcauagcaugguccagcucaaguugucacgauggaaaagcauggcugcauguuuguauaacgggggaugauaaaaaugcaacugcuagcuucauuuacaaugggaggcuuguagauaguguuguuucaugguccaaagacauucucaggacccaggagucagaaugcguuuguaucaauggaacuuguacaguaguaaugacugauggaagugcuucaggaaaagcugauacuaaaauacuauucauugaggaggggaaaaucguucauacuagcacauugucaggaagugcucagcaugucgaagagugcucuugcuauccucgauauccuggugucagaugugucugcagagacaacuggaaaggcuccaaucggcccaucguagauauaaacauaaaggaucauagcauuguuuccaguuauguguguucaggacuuguuggagacacacccagaaaaaacgacagcuccagcaguagccauuguuuggauccuaacaaugaagaagguggucauggagugaaaggcugggccuuugaugauggaaaugacguguggaugggaagaacaaucaacgagacgucacgcuuaggguaugaaaccuucaaagucauugaaggcugguccaacccuaaguccaaauugcagauaaauaggcaagucauaguugacagaggugauagguccgguuauucugguauuuucucuauugaaggcaaaagcugcaucaaucggugcuuuuauguggaguugauuaggggaagaaaagaggaaacugaagucuuguggaccucaaacaguauuguuguguuuuguggcaccucagguacauauggaacaggcucauggccugauggggcggaccucaaucucaugccuauauaa

SEQ ID NO: 57615 - RNA, 1410 nt, Artificial Sequence
  derived and/or modified CDS sequence (wt) from neuraminidase__InfluenzaA__AIJ10832
augaauccaaaucaaaagauaauaacgauuggcucuguuucucucaccauuucuacaauaugcuucuucaugcaaauugccaucuugauaacuacuguaacauugcauuucaagcaauaugaauucaacucccccccaaacaaccaagugaugcugugugaaccaacaauaauagaaagaaacauaacagagauaguguaucugaccaacaccaccauagagaaggaaauaugccccaaaccagcagaauacagaaauuggucaaaaccgcaauguggaauuacaggauuugcaccuuucucuaaggacaauucgauuaggcuuuccgcugguggggacaucuggguuacaagagaaccuuaugugucaugcgauccugacaagugcuaucaauuugcccuuggacagggaacaacacuaaacaacgugcauucaaauaacacaguacgugauaggaccccuuaucggacucuacugaugaaugaguuggguguuccuuuucaucuggggaccaagcaagugugcauagcaugguccagcucaaguugucacgauggaaaagcauggcugcauguuuguauaacgggggaugauaaaaaugcaacugcuagcuucauuuacaaugggaggcuuguagauaguguuguuucaugguccaaagacauucucaggacccaggagucagaaugcguuuguaucaauggaacuuguacaguaguaaugacugauggaagugcuucaggaaaagcugauacuaaaauacuauucauugaggaggggaaaaucguucauacuagcacauugucaggaagugcucagcaugucgaagagugcucuugcuauccucgauauccuggugucagaugugucugcagagacaacuggaaaggcuccaaucggcccaucguagauauaaacauaaaggaucauagcauuguuuccaguuauguguguucaggacuuguuggagacacacccagaaaaaacgacagcuccagcaguagccauuguuuggauccuaacaaugaagaagguggucauggagugaaaggcugggccuuugaugauggaaaugacguguggaugggaagaacaaucaacgagacgucacgcuuaggguaugaaaccuucaaagucauugaaggcugguccaacccuaaguccaaauugcagauaaauaggcaagucauaguugacagaggugauagguccgguuauucugguauuuucucuauugaaggcaaaagcugcaucaaucggugcuuuuauguggaguugauuaggggaagaaaagaggaaacugaagucuuguggaccucaaacaguauuguuguguuuuguggcaccucagguacauauggaacaggcucauggccugauggggcggaccucaaucucaugccuauauaa

SEQ ID NO: 57616 - RNA, 1410 nt, Artificial Sequence
  derived and/or modified CDS sequence (wt) from neuraminidase__InfluenzaA__AIJ10834
augaauccaaaucaaaagauaauaacgauuggcucuguuucucucaccauuuccacaauaugcuucuucaugcaaauugccaucuugauaacuacuguaacauugcauuucaagcaauaugaauucaacucccccccaaacaaccaagugaugcugugugaaccaacaauaauagaaagaaacauaacagagauaguguaucugaccaacaccaccauagagaaggaaauaugccccaaaccagcagaauacagaaauuggucaaaaccgcaauguggcauuacaggauuugcaccuuucucuaaggacaauucgauuaggcuuuccgcugguggggacaucuggguuacaagagaaccuuaugugucaugcgauccugacaagugcuaucaauuugcccuuggacagggaacaacacuaaacaacgugcauucaaauaacacaguacgugauaggaccccuuaucggacucuacugaugaaugaguuggguguuccuuuucaucuggggaccaagcaagugugcauagcaugguccagcucaaguugucacgauggaaaagcauggcugcauguuuguauaacgggggaugauaaaaaugcaacugcuagcuucauuuacaaugggaggcuuguagauaguguuguuucaugguccaaagacauucucaggacccaggagucagaaugcguuuguaucaauggaacuuguacaguaguaaugacugauggaagugcuucaggaaaagcugauacuaaaauacuauucauugaggaggggaagaucguucauacuagcacauugucaggaagugcucagcaugucgaagagugcucuugcuauccucgauauccuggugucagaugugucugcagagacaacuggaaaggcuccaaucggcccaucguagauauaaacauaaaggaucauagcauuguuuccaguuauguguguucaggacuuguuggagacacacccagaaaaaacgacagcuccagcaguagccauuguuuggauccuaacaaugaagaagguggucauggagugaaaggcugggccuuugaugauggaaaugacguguggaugggaagaacaaucaacgagacgucacgcuuaggguaugaaaccuucaaagucauugaaggcugguccaacccuaaguccaaauugcagauaaauaggcaagucauaguugacagaggugauagguccgguuauucugguauuuucucuauugaaagcaaaagcugcaucaaucggugcuuuuauguggaguugauuaggggaagaaaagaggaaacugaagucuuguggaccucaaacaguauuguuguguuuuguggcaccucagguacauauggaacaggcucauggccugauggggcggaccucaaucucaugccuauauaa

SEQ ID NO: 57617 - RNA, 1410 nt, Artificial Sequence
  derived and/or modified CDS sequence (wt) from neuraminidase__InfluenzaA__AIJ10835
augaauccaaaucaaaagauaauaacgauuggcucuguuucucucaccauuucuacaauaugcuucuucaugcaaauugccaucuugauaacuacuguaacauugcauuucaagcaauaugaauucaacuccaccccaaacaaccaagugaugcugugugaaccaacaauaauagaaagaaacauaacagagauaguguaucugaccaacaccaccauagagaaggaaauaugccccaaaccagcagaauacagaaauuggucaaaaccgcaauguggcauuacaggauuugcaccuuucucuaaggacaauucgauuaggcuuuccgcugguggggacaucuggguuacaagagaaccuuaugugucaugcgauccugacaagugcuaucaauuugcccuuggacagggaacaacacuaaacaacgugcauucaaauaacacaguacgugauaggaccccuuaucggacucuacugaugaaugaguuggguguuccuuuucaucuggggaccaagcaagugugcauagcaugguccagcucaaguugucacgauggaaaagcauggcugcauguuuguauaacgggggaugauaaaaaugcaacugcuagcuucauuuacaaugggaggcuuguagauaguguuguuucaugguccaaagacauucucaggacccaggagucagaaugcguuuguaucaauggaacuuguacaguaguaaugacugauggaagugcuucaggaaaagcugauacuaaaauacuauucauugaggaggggaaaaucguucauacuagcacauugucaggaagugcucagcaugucgaagagugcucuugcuauccucgauauccuggugucagaugugucugcagagacaacuggaaaggcuccaaucggcccaucguagauauaaacauaaaggaucauagcauuguuuccaguuauguguguucaggacuuguuggagacacacccagaaaaaacgacagcuccagcaguagccauuguuuggauccuaacaaugaagaagguggucauggagugaaaggcugggccuuugaugauggaaaugacguguggaugggaagaacaaucaacgagacgucacgcuuaggguaugaaaccuucaaagucauugaaggcugguccaacccuaaguccaaauugcagauaaauaggcaagucauaguugacagaggugauagguccgguuauucugguauuuucucuauugaaggcaaaagcugcaucaaucggugcuuuuauguggaguugauuaggggaagaaaagaggaaacugaagucuuguggaccucaaacaguauuguuguguuuuguggcaccucagguacauauggaacaggcucauggccugauggggcggaccucaaucucaugccuauauaa

SEQ ID NO: 57618 - RNA, 1410 nt, Artificial Sequence
  derived and/or modified CDS sequence (wt) from neuraminidase__InfluenzaA__AIJ10836
augaauccaaaucaaaagauaauaacgauuggcucuguuucucucaccauuuccacaauaugcuucuucaugcaaauugccaucuugauaacuacuguaacauugcauuucaagcaauaugaauucaacucccccccaaacaaccaagugaugcugugugaaccaacaauaauagaaagaaacauaacagagauaguguaucugaccaacaccaccauagagaaggaaauaugccccaaaccagcagaauacagaaauuggucaaaaccgcaauguggcauuacaggauuugcaccuuucucuaaggacaauucgauuaggcuuuccgcugguggggacaucuggguuacaagagaaccuuaugugucaugcgauccugacaagugcuaucaauuugcccuuggacagggaacaacacuaaacaacgugcauucaaauaacacaguacgugauaggaccccuuaucggacucuacugaugaaugaguuggguguuccuuuucaucuggggaccaagcaagugugcauagcaugguccagcucaaguugucacgauggaaaagcauggcugcauguuuguauaacgggggaugauaaaaaugcaacugcuagcuucauuuacaaugggaggcuuguagauaguguuguuucaugguccaaagacauucucaggacccaggagucagaaugcguuuguaucaauggaacuuguacaguaguaaugacugauggaagugcuucaggaaaagcugauacuaaaauacuauucauugaggaggggaaaaucguucauacuagcacauugucaggaagugcucagcaugucgaagagugcucuugcuauccucgauauccuggugucagaugugucugcagagacaacuggaaaggcuccaaucggcccaucguagauauaaacauaaaggaucauagcauuguuuccaguuauguguguucaggacuuguuggagacacacccagaaaaaacgacagcuccagcaguagccauuguuuggauccuaacaaugaagaagguggucauggagugaaaggcugggccuuugaugauggaaaugacguguggaugggaagaacaaucaacgagacgucacgcuuaggguaugaaaccuucaaagucauugaaggcugguccaacccuaaguccaaauugcagauaaauaggcaagucauaguugacagaggugauagguccgguuauucugggauuuucucuauugaaggcaaaagcugcaucaaucggugcuuuuauguggaguugauuaggggaagaaaagaggaaacugaagucuuguggaccucaaacaguauuguuguguuuuguggcaccucagguacauauggaacaggcucauggccugauggggcggaccucaaucucaugccuauauaa

SEQ ID NO: 57619 - RNA, 1410 nt, Artificial Sequence
  derived and/or modified CDS sequence (wt) from neuraminidase__InfluenzaA__AIJ10837
augaauccaaaucaaaagauaauaacgauuggcucuguuucucucaccauuucuacaauaugcuucuucaugcaaauugccaucuugauaacuacuguaacauugcauuucaagcaauaugaauucaacucccccccaaacaaccaagugaugcugugugaaccaacaauaauagaaagaaacauaacagagauaguguaucugaccaacaccaccauagagaaggaaauaugccccaaaccagcagaauacagaaauuggucaaaaccgcaauguggcauuacaggauuugcaccuuucucuaaggacaauucgauuaggcuuuccgcugguggggacaucuggguuacaagagaaccuuaugugucaugcgauccugacaagugcuaucaauuugcccuuggacagggaacaacacuaaacaacgugcauucaaauaacacaguacgugauaggaccccuuaucggacucuacugaugaaugaguuggguguuccuuuucaucuggggaccaagcaagugugcauagcaugguccagcucaaguugucacgauggaaaagcauggcugcauguuuguauaacgggggaugauaaaaaugcaacugcuagcuucauuuacaaugggaggcuuguagauaguguuguuucaugguccaaagacauucucaggacccaggagucagaaugcguuuguaucaauggaacuuguacaguaguaaugacugauggaagugcuucaggaaaagcugauacuaaaauacuauucauugaggaggggaaaaucauucauacuagcacauugucaggaagugcucagcaugucgaagagugcucuugcuauccucgauauccuggugucagaugugucugcagagacaacuggaaaggcuccaaucggcccaucguagauauaaacauaaaggaucauagcauuguuuccaguuauguguguucaggacuuguuggagacacacccagaaaaaacgacagcuccagcaguagccauuguuuggauccuaacaaugaagaagguggucauggagugaaaggcugggccuuugaugauggaaaugacguguggaugggaagaacaaucaacgagacgucacgcuuaggguaugaaaccuucaaagucauugaaggcugguccaacccuaaguccaaauuacagauaaauaggcaagucauaguugacagaggugauagguccgguuauucugguauuuucucuauugaaggcaaaagcugcaucaaucggugcuuuuauguggaguugauuaggggaagaaaagaggaaacugaagucuuguggaccucaaacaguauuguuguguuuuguggcaccucagguacauauggaacaggcucauggccugauggggcggaccucaaucucaugccuauauaa

SEQ ID NO: 57620 - RNA, 1410 nt, Artificial Sequence
  derived and/or modified CDS sequence (wt) from neuraminidase__InfluenzaA__AIJ10838
augaauccaaaucaaaagauaauaacgauuggcucuguuucucucaccauuucuacaauaugcuucuucaugcaaauugccaucuugauaacuacuguaacauugcauuucaagcaauaugaauucaacucccccccaaacaaccaagugaugcugugugaaccaacaauaauagaaagaaacauaacagagauaguguaucugaccaacaccaccauagagaaggagauaugccccaaaccagcagaauacagaaauuggucaaaaccgcaauguggcauuacaggauuugcaccuuucucuaaggacaauucgauuaggcuuuccgcugguggggacaucuggguuacaagagaaccuuaugugucaugcgauccugacaagugcuaucaauuugcccuuggacagggaacaacacuaaacaacgugcauucaaauaacacaguacgugauaggaccccuuaucggacucuacugaugaaugaguuggguguuccuuuucaucuggggacaaagcaagugugcauagcaugguccagcucaaguugucacgauggaaaagcauggcugcauguuuguauaacgggggaugauaaaaaugcaacugcuagcuucauuuacaaugggaggcuuguagauaguguuguuucaugguccaaagacauucucaggacccaggagucagaaugcguuuguaucaauggaacuuguacaguaguaaugacugauggaagugcuucaggaaaagcugauacuaaaauacuauucauugaggaggggaaaaucguucauacuagcacauugucaggaagugcucagcaugucgaagagugcucuugcuauccucgauauccuggugucagaugugucugcagagacaacuggaaaggcuccaaucggcccaucguagauauaaacauaaaggaucauagcauuguuuccaguuauguguguucaggacuuguuggagacacacccagaaaaaacgacagcuccagcaguagccauuguuuggauccuaacaaugaagaagguggucauggagugaaaggcugggccuuugaugauggaaaugacguguggaugggaagaacaaucaacgagacgucacgcuuaggguaugaaaccuucaaagucauugaaggcugguccaacccuaaguccaaauugcagauaaauaggcaagucauaguugacagaggugauagguccgguuauucugguauuuucucuauugaaggcaaaagcugcaucaaucggugcuuuuauguggaguugauuaggggaagaaaagaggaaacugaagucuuguggaccucaaacaguauuguuguguuuuguggcaccucagguacauauggaacaggcucauggccugauggggcggaccucaaucucaugccuauauaa

SEQ ID NO: 57621 - RNA, 1410 nt, Artificial Sequence
  derived and/or modified CDS sequence (wt) from neuraminidase__InfluenzaA__AIJ10841
augaauccaaaucaaaagauaauaacgauuggcucuguuucucucaccauuuccacaauaugcuucuucaugcaaauugccaucuugauaacuacuguaacauugcauuucaagcaauaugaauucaacucccccccaaacaaccaagugaugcugugugaaccaacaauaauagaaagaaacauaacagagauaguguaucugaccaacaccaccauagagaaggaaauaugccccaaaccagcagaauacagaaauuggucaaaaccgcaauguggcauuacaggauuugcaccuuucucuaaggacaauucgauuaggcuuuccgcugguggggauaucuggguuacaagagaaccuuaugugucaugcgauccugacaagugcuaucaauuugcccuuggacagggaacaacacuaaacaacgugcauucaaauaacacaguacgugauaggaccccuuaucggacucuacugaugaaugaguuggguguuccuuuucaucuggggaccaagcaagugugcauagcaugguccagcucaaguugucacgauggaaaagcauggcugcauguuuguauaacgggggaugauaaaaaugcaacugcuagcuucauuuacaaugggaggcuuguagauaguguuguuucaugguccaaagacauucucaggacccaggagucagaaugcguuuguaucaauggaacuuguacaguaguaaugacugauggaagugcuucaggagaagcugauacuaaaauacuauucauugaggaggggaaaaucguucauacuagcacauugucaggaagugcucagcaugucgaagagugcucuugcuauccucgauauccuggugucagaugugucugcagagauaacuggaaaggcuccaaucggcccaucguagauauaaacauaaaggaucauagcauuguuuccaguuauguguguucaggacuuguuggagacacacccagaaaaaacgacagcuccagcaguagccauuguuuggauccuaacaaugaagaagguggucauggagugaaaggcugggccuuugaugauggaaaugacguguggaugggaagaacaaucaacgagacgucacgcuuaggguaugaaaccuucaaagucauugaaggcugguccaacccuaaguccaaauugcagauaaauaggcaagucauaguugacagaggugauagguccgguuauucugguauuuucucuauugaaggcaaaagcugcaucaaucggugcuuuuauguggaguugauuaggggaagaaaagaggaaacugaagucuuguggaccucaaacaguauuguuguguuuuguggcaccucagguacauauggaacaggcucauggccugauggggcggaccucaaucucaugccuauauaa

SEQ ID NO: 57622 - RNA, 1410 nt, Artificial Sequence
  derived and/or modified CDS sequence (wt) from neuraminidase__InfluenzaA__AIJ10842
augaauccaaaucaaaagauaauaacgauuggcucuguuucucucaccauuucuacaauaugcuucuucaugcaaauugccaucuugauaacuacuguaacauugcauuucaagcaauaugaauucaacccccccccaaacaaccaagugaugcugugugaaccaacaauaauagaaagaaacauaacagagauaguguaucugaccaacaccaccauagagaaggaaauaugccccaaaccagcagaauacagaaauuggucaaaaccgcaauguggcauuacaggauuugcaccuuucucuaaggacaauucgauuaggcuuuccgcugguggggacaucuggguuacaagagaaccuuaugugucaugcgauccugacaagugcuaucaauuugcccuuggacagggaacaacacuaaacaacgugcauucaaauaacacaguacgugauaggaccccuuaucggacucuacugaugaaugaguuggguguuccuuuucaucuggggacaaagcaagugugcauagcaugguccagcucaaguugucacgauggaaaagcauggcugcauguuuguauaacgggggaugauaaaaaugcaacugcuagcuucauuuacaaugggaggcuuguagauaguguuguuucaugguccaaagacauucucaggacccaggagucagaaugcguuuguaucaauggaacuuguacaguaguaaugacugauggaagugcuucaggaaaagcugauacuaaaauacuauucauugaggaggggaaaaucguucauacuagcacauugucaggaagugcucagcaugucgaagagugcucuugcuauccucgauauccuggugucagaugugucugcagagacaacuggaaaggcuccaaucggcccaucguagauauaaacauaaaggaucauagcauuguuuccaguuauguguguucaggacuuguuggagacacacccagaaaaaacgacagcuccagcaguagccauuguuuggauccuaacaaugaagaagguggucauggagugaaaggcugggccuuugaugauggaaaugacguguggaugggaagaacaaucaacgagacgucacgcuuaggguaugaaaccuucaaagucauugaaggcugguccaacccuaaguccaaauugcagauaaauaggcaagucauaguugacagaggugacagguccgguuauucugguauuuucucuauugaaggcaaaagcugcaucaaucggugcuuuuauguggaguugauuaggggaagaaaagaggaaacugaagucuuguggaccucaaacaguauuguuguguuuuguggcaccucagguacauauggaacaggcucauggccugauggggcggaccucaaucucaugccuauauaa

SEQ ID NO: 57623 - RNA, 1410 nt, Artificial Sequence; identical to SEQ ID NO: 57620
  derived and/or modified CDS sequence (wt) from neuraminidase__InfluenzaA__AIJ10843

SEQ ID NO: 57624 - RNA, 1410 nt, Artificial Sequence
  derived and/or modified CDS sequence (wt) from neuraminidase__InfluenzaA__AIJ10844
augaauccaaaucaaaagauaauaacgauuggcucuguuucucucaccauuuccacaauaugcuucuucaugcaaauugccaucuugauaacuacuguaacauugcauuucaagcaauaugaauucaacucccccccaaacaaccaagugaugcugugugaaccaacaauaauagaaagaaacauaacagagauaguguaucugaccaacaccaccauagagaaggaaauaugccccaaaccagcagaauacagaaauuggucaaaaccgcaauguggcauuacaggauuugcaccuuuuucuaaggacaauucgauuaggcuuuccgcugguggggacaucugggugacaagagaaccuuaugugucaugcgauccugacaaguguuaucaauuugcccuuggacagggaacaacacuaaacaaugugcauucaaauaacacaguacgugauaggaccccuuuucggacuuuguugaugaaugaguuagguguuccuuuucaucuggggaccaagcaagugugcauagcaugguccagcucaaguugucacgauggaaaagcauggcugcauguuuguauaacgggggaugauaaaaaugcaacugcuagcuucauuuacaaugggaggcuuguagauaguguuguuucaugguccaaagaaauucucaggacccaggagucagaaugcguuuguaucaauggaacuuguacaguaguaaugacugauggaagugcuucaggaaaagcuguuacuaaaauacuauucauugaggaggggaaaaucguucauacuagcacauugucaggaagugcucagcaugucgaggagugcucuugcuauccucgauauccuggugucagaugugucugcagagacaacuggaaaggcuccaauaggcccaucguagauauaaacauaaaggaucauagcauugucuccgguuauguguguucaggacuuguuggagacacacccagaaaaaacgacagcuccagcaguggccauuguuuggauccuaacaaugaagaagguggucauggagugaaaggcugggccuuugaugauggaaaugacguguggaugggaagaacaaucaacgagacgucacgcuuaggguaugaaaccuucaaagucauuaaaggcugguccaacccuaaguccaaauugcagauaaauaggcaagucauaguugacagaggugauagguccgguuauucugguauuuucucuguugaaggcaaaagcugcaucaaucgguguuuuuauguggaguugauuaggggaagaaaagaggaaacugaagucuuguggaccucaaacaguauuguuguguuuuguggcaccucagguacauauggaacaggcucauggccugauggggcggaccucaaucucaugccuauauaa

SEQ ID NO: 57625 - RNA, 1410 nt, Artificial Sequence
  derived and/or modified CDS sequence (wt) from neuraminidase__InfluenzaA__AIJ10845
augaauccaaaucaaaagauaauaacgauuggcucuguuucucucaccauuuccacaauaugcuucuucaugcaaauugccaucuugauaacuacuguaacauugcauuucaagcaauaugaauucaacucccccccaaacaaccaagugaugcugugugaaccaacaauaauagaaagaaacauaacagagauaguguaucugaccaacaccaucauagagaaggaaauaugccccaaaccagcagaauacagaaauuggucaaaaccgcaauguggcauuacaggauuugcaccuuuuucuaaggacaauucgaucaggcuuuccgcugguggggacaucugggugacaagagaaccuuaugugucaugcgauccugacaaguguuaucaauuugcccuuggacagggaacaacacuaaacaaugugcauucaaauaacacaguacgugauaggaccccuuuucggacuuuauugaugaaugaguuagguguuccuuuucaucuggggaccaagcaagugugcauagcaugguccagcucaaguugucacgauggaaaagcauggcugcauguuuguauaacgggggaugauaaaaaugcaacugcuagcuucauuuacaaugggaggcuuguagauaguguuguuucaugguccaaagaaauucucaggacccaggagucagaaugcguuuguaucaauggaacuuguacaguaguaaugacugauggaagugcuucaggaaaagcuguuacuaaaauacuauucauugaggaggggaaaaucguucauacuagcacauugucaggaagugcucagcaugucgaggagugcucuugcuauccucgauauccuggugucagaugugucugcagagacaacuggaaaggcuccaauaggcccaucguagauauaaacauaaaggaucauagcauugucuccgguuauguguguucaggacuuguuggagacacacccagaaaaaacgacagcuccagcaguagccauuguuuggauccuaacaaugaagaagguggucauggagugaaaggcugggccuuugaugauggaaaugacguguggaugggaagaacaaucaacgagacgucacgcuuaggguaugaaaccuucaaagucauugaaggcugguccaacccuaaguccaaauugcagauaaauaggcaagucauaguugacagaggugauagguccgguuauucugguauuuucucuguugaaggcaaaagcugcaucaaucgguguuuuuauguggaguugauuaggggaagaaaagaggaaacugaagucuuguggaccucaaacaguauuguuguguuuuguggcaccucagguacauauggaacaggcucauggccugauggggcggaccucaaucucaugccuauauaa

SEQ ID NO: 57626 - RNA, 1410 nt, Artificial Sequence
  derived and/or modified CDS sequence (wt) from neuraminidase__InfluenzaA__AIJ10847
augaauccaaaucaaaagauaauaacgauuggcucuguuucucucaccauuucuacaauaugcuucuucaugcaaauugccaucuugauaacuacuguaacauugcauuucaagcaauaugaauucaacucccccccaaacaaccaagugaugcugugugaaccaacaauaauagaaagaaacauaacagagauaguguaucugaccaacaccaccauagagaaggaaauaugccccaaaccagcagaauacagaaauuggucaaaaccgcaauguggcauuacaggauuugcaccuuucucuaaggacaauucgauuaggcuuuccgcugguggggacaucuggguuacaagagaaccuuaugugucaugcgauccugacaagugcuaucaauuugcccuuggacagggaacaacacuaaacaacgugcauucaaauaacacaguacgugauaggaccccuuaucggacucuacugaugaaugaguuggguguuccuuuucaucuggggaccaagcaagugugcauagcaugguccagcucaaguugucacgauggaaaagcauggcugcauguuuguauaacgggggaugauaaaaaugcaacugcuagcuucauuuacaaugggaggcuuguagauaguguuguuucaugguccaaagacauucucaggacccaggagucagaaugcguuuguaucaauggaacuuguacaguaguaaugacugauggaagugcuucaggaaaagcugauacuaaaauacuauucauugaggaggggaaaaucguucauacuagcacauugucaggaagugcucagcaugucgaagagugcucuugcuauccucgauauccuggugucagaugugucugcagagacaacuggaaaggcuccaaucggcccaucguagauauaaacauaaaggaucauagcauuguuuccaguuauguguguucaggacuuguuggagacacacccagaaaaaacgacagcuucagcaguagccauuguuuggauccuaacaaugaagaagguggucauggagugaaaggcugggccuuugaugauggaaaugacguguggaugggaagaacaaucaacgagacgucacgcuuaggguaugaaaccuucaaagucauugaaggcugguccaacccuaaguccaaauugcagauaaauaggcaagucauaguugacagaggugauagguccgguuauucugguauuuucucuauugaaggcaaaagcugcaucaaucggugcuuuuauguggaguugauuaggggaagaaaagaggaaacugaagucuuguggaccucaaacaguauuguuguguuuuguggcaccucagguacauauggaacaggcucauggccugauggggcggaccucaaucucaugccuauauaa

SEQ ID NO: 57627 - RNA, 1410 nt, Artificial Sequence
  derived and/or modified CDS sequence (wt) from neuraminidase__InfluenzaA__AIJ10848
augaauccaaaucaaaagauaauaacgauuggcucuguuucucucaccauuucuacaauaugcuucuucaugcaaauugccaucuugauaacuacuguaacauugcauuucaagcaauaugaauucaacucccccccaaacaaccaagugaugcugugugaaccaacaauaauagaaagaaacauaacagagauaguguaucugaccaacaccaccauagagaaggagauaugccccaaaccagcagaauacagaaauuggucaaaaccgcaauguggcauuacaggauuugcaccuuucucuaaggacaauucgauuaggcuuuccgcugguggggacaucugggugacaagagaaccuuaugugucaugcgauccugacaagugcuaucaauuugcccuuggacagggaacaacacuaaacaacgugcauucaaauaacacaguacgugauaggaccccuuaucggacucuacugaugaaugaguuggguguuccuuuucaucuggggacaaagcaagugugcauagcaugguccagcucaaguugucacgauggaaaagcauggcugcauguuuguauaacgggggaugauaaaaaugcaacugcuagcuucauuuacaaugggaggcuuguagauaguguuguuucaugguccaaagacauucucaggacccaggagucagaaugcguuuguaucaauggaacuuguacaguaguaaugacugauggaagugcuucaggaaaagcugauacuaaaauacuauucauugaggaggggaaaaucguucauacuagcacauugucaggaagugcucagcaugucgaagagugcucuugcuauccucgauauccuggugucagaugugucugcagagacaacuggaaaggcuccaaucggcccaucguagauauaaacauaaaggaucauagcauuguuuccaguuauguguguucaggacuuguuggagacacacccagaaaaaacgacagcuccagcaguagccauuguuuggauccuaacaaugaagaagguggucauggagugaaaggcugggccuuugaugauggaaaugacguguggaugggaagaacaaucaacgagacgucacgcuuaggguaugaaaccuucaaagucauugaaggcugguccaacccuaaguccaaauugcagauaaauaggcaagucauaguugacagaggugauagguccgguuauucugguauuuucucuauugaaggcaaaagcugcaucaaucggugcuuuuauguggaguugauuaggggaagaaaagaggaaacugaagucuuguggaccucaaacaguauuguuguguuuuguggcaccucagguacauauggaacaggcucauggccugauggggcggaccucaaucucaugccuauauaa

SEQ ID NO: 57628 - RNA, 1410 nt, Artificial Sequence
  derived and/or modified CDS sequence (wt) from neuraminidase__InfluenzaA__AIJ10849
augaauccaaaucaaaagauaauaacgauuggcucuguuucucucaccauuuccacaauaugcuucuucaugcaaauugccaucuugauaacuacuguaacauugcauuucaagcaauaugaauucaacucccccccaaacaaccaagugaugcugugugaaccaacaauaauagaaagaaacauaacagagauaguguaucugaccaacacaaccauagagaaggaaauaugccccaaaccagcagaauacagaaauuggucaaaaccgcaauguggcauuacaggauuugcaccuuuuucuaaggacaauucgauuaggcuuuccgcugguggggacaucugggugacaagagaaccuuaugugucaugcgauccugacaaguguuaucaauuugcccuuggacagggaacaacacuaaacaaugugcauucaaauaacacgguacgugauaggaccccuuuucggacuuuauugaugaaugaguuagguguuccuuuucaucuggggaccaagcaagugugcauagcaugguccagcucaaguugucacgauggaaaagcauggcugcauguuuguauaacgggggaugauaaaaaugcaacugcuagcuucauuuacaaugggaggcuuguagauaguguuguuucaugguccaaagaaauucucaggacccaggagucagaaugcguuuguaucaauggaacuuguacaguaguaaugacugauggaagugcuucaggaaaagcuguuacuaaaauacuauucauugaggaggggaaaaucguucauacuagcacauugucaggaagugcucagcaugucgaggagugcucuugcuauccucgauauccuggugucagaugugucugcagagacaacuggaaaggcuccaauaggcccaucguagauauaaacauaaaggaucauagcauugucuccgguuauguguguucaggacuuguuggagacacacccagaaaaaacgacagcuccagcaguagccauuguuuggauccuaacaaugaagaagguggucauggagugaaaggcugggccuuugaugauggaaaugacguguggaugggaagaacaaucaacgagacgucacgcuuaggguaugaaaccuucaaagucauugaaggcugguccaacccuaaguccaaauugcagauaaauaggcaagucauaguugacagaggugauagguccgguuauucugguauuuucucuguugaaggcaaaagcugcaucaaucgguguuuuuauguggaguugauuaggggaagaaaagaggaaacugaagucuuguggaccucaaacaguauuguuguguuuuguggcaccucagguacauauggaacaggcucauggccugauggggcggaccucaaucucaugccuauauaa

SEQ ID NO: 57629 - RNA, 1410 nt, Artificial Sequence; identical to SEQ ID NO: 57628
  derived and/or modified CDS sequence (wt) from neuraminidase__InfluenzaA__AIJ10851

SEQ ID NO: 57630 - RNA, 1410 nt, Artificial Sequence; identical to SEQ ID NO: 57628
  derived and/or modified CDS sequence (wt) from neuraminidase__InfluenzaA__AIJ10852

SEQ ID NO: 57631 - RNA, 1410 nt, Artificial Sequence; identical to SEQ ID NO: 57624
  derived and/or modified CDS sequence (wt) from neuraminidase__InfluenzaA__AIJ10853

SEQ ID NO: 57632 - RNA, 1410 nt, Artificial Sequence; identical to SEQ ID NO: 57624
  derived and/or modified CDS sequence (wt) from neuraminidase__InfluenzaA__AIJ10854

SEQ ID NO: 57633 - RNA, 1410 nt, Artificial Sequence
  derived and/or modified CDS sequence (wt) from neuraminidase__InfluenzaA__AIJ10855
augaauccaaaucaaaagauaauaacgauuggcucuguuucucucaccauuuccacaauaugcuucuucaugcaaauugccaucuugauaacuacuguaacauugcauuucaagcaauaugaauucaacucccccccaaacaaccaagugaugcugugugaaccaacaauaauagaaagaaacauaacagagauaguguaucugaccaacacaaccauagagaaggaaauaugccccaaaccagcagaauacagaaauuggucaaaaccgcaauguggcauuacaggauuugcaccuuuuucuaaggacaauucgauuaggcuuuccgcugguggggacaucugggugacaagagaaccuuaugugucaugcgauccugacaaguguuaucaauuugcccuuggacagggaacaacacuaaacaaugugcauucaaauaacacgguacgugauaggaccccuuuucggacuuuauugaugaaugaguuagguguuccuuuucaucuggggaccaagcaagugugcauagcaugguccagcucaaguugucacgauggaaaagcauggcugcauguuuguauaacgggggaugauaaaaaugcaacugcuagcuucauuuacaaugggaggcuuguagauaguguuguuucaugguccaaagaaauucucaggacccaggagucagaaugcguuuguaucaauggaacuuguacaguaguaaugacugauggaagugcuucaggaaaagcuguuacuaaaauacuauucauugaggaggggaaaaucguucauacuagcacauugucaggaagugcucagcaugucgaggagugcucuugcuauccucgauauccuggugucagaugugucugcagagacaacuggaaaggcuccaauaggcccaucguagauauaaacauaaaggaucauagcauugucuccgguuauguguguucaggacuuguuggagacacacccagaaaaaacgacagcuccagcaguagccauuguuuggauccuaacaaugaagaaggugaucauggagugaaaggcugggccuuugaugauggaaaugacguguggaugggaagaacaaucaacgagacgucacgcuuaggguaugaaaccuucaaagucauugaaggcugguccaacccuaaguccaaauugcagauaaauaggcaagucauaguugacagaggugauagguccgguuauucugguauuuucucuguugaaggcaaaagcugcaucaaucgguguuuuuauguggaguugauuaggggaagaaaagaggaaacugaagucuuguggaccucaaacaguauuguuguguuuuguggcaccucagguacauauggaacaggcucauggccugauggggcggaccucaaucucaugccuauauaa

SEQ ID NO: 57634 - RNA, 1410 nt, Artificial Sequence
  derived and/or modified CDS sequence (wt) from neuraminidase__InfluenzaA__AIJ10856
augaauccaaauaaaaagauaauaacgauuggcucuguuucucucaccauuucuacaauaugcuucuucaugcaaauugccaucuugauaacuacuguaacauugcauuucaagcaauaugaauucaacucccccccaaacaaccaagugaugcugugugaaccaacaauaauagaaagaaacauaacagagauaguguaucugaccaacaccaccauagagaaggaaauaugccccaaaccagcagaauacagaaauuggucaaaaccacaauguggcauuacaggauuugcaccuuucucuaaggacaauucgauuaggcuuuccgcugguggggacaucuggguuacaagagaaccuuaugugucaugcgauccugacaagugcuaucaauuugcccuuggacagggaacaacacuaaagaacgugcauucaaauaacacaguacgugauaggaccccuuaucggacucuacugaugaaugaguuggguguuccuuuucaucuggggaccaagcaagugugcauagcaugguccagcucaaguugucacgauggaaaagcauggcugcauguuuguauaacgggggaugauaaaaaugcaacugcuagcuucauuuacaaugggaggcuuguagauaguguuguuucaugguccaaagacauucucaggacccaggagucagaaugcguuuguaucaauggaacuuguacaguaguaaugacugauggaagugcuucaggaaaagcugauacuaaaauacuauucauugaggaggggaaaaucguucauacuagcacauugucaggaagugcucagcaugucgaagagugcucuugcuauccucgauauccuggugucagaugugucugcagagacaacuggaaaggcuccaaucggcccaucguagauauaaacauaaaggaucauagcauuguuuccaguuauguguguucaggacuuguuggagacacacccagaaaaaacgacagcuucagcaguggccauuguuuggauccuaacaaugaagaagguggucauggagugaaaggcugggccuuugaugauggaaaugacguguggaugggaagaacaaucaacgagacgucacgcuuaggguaugaaaccuucaaagucauugaaggcugguccaacccuaaguccaaauugcagauaaauaggcaagucauaguugacagaggugauagguccgguuauucugguauuuucucuauugaaggcaaaagcugcaucaaucggugcuuuuauguggaguugauuaggggaagaaaagaggaaacugaaguauuguggaccucaaacaguauuguuguguuuuguggcaccucagguacauauggaacaggcucauggccugauggggcggaccucaaucucaugccuauauaa

SEQ ID NO: 57635 - RNA, 1410 nt, Artificial Sequence
  derived and/or modified CDS sequence (wt) from neuraminidase__InfluenzaA__AIJ10857
augaauccaaaucaaaagauaauaacgauuggcucuguuucucucaccauuuccacaauaugcuucuucaugcaaauugccaucuugauaacuacuguaacauugcauuucaagcaauaugaauucaacucccccccaaacaaccaagugaugcugugugaaccaacaauaauagaaagaaacauaacagagauaguguaucugaccaacaccaccauagagaaggaaauaugccccaaaccagcagaauacagaaauuggucaaaaccgcaauguggcauuacaggauuugcaccuuuuucuaaggacaauucgauuaggcuuuccgcugguggggacaucuggguuacaagagaaccuuaugugucaugcgauccugacaagugcuaucaauuugcccuuggacagggaacaacacuaaacaacgugcauucaaauaacacaguacgugauaggaccccuuaucggacucuacugaugaaugaguuggguguuccuuuucaucuggggaccaagcaagugugcauagcaugguccagcucaaguugucacgauggaaaagcauggcugcauguuuguauaacgggggaugauaaaaaugcaacugcuagcuucauuuacaaugggaggcuuguagauaguguuguuucaugguccaaagacauucucaggacccaggagucagaaugcguuuguaucaauggaacuuguacaguaguaaugacugauggaagugcuucaggaaaagcugauacuaaaauacuauucauugaggaggggaagaucguucauacuagcacauugucaggaagugcucagcaugucgaagagugcucuugcuauccucgauauccuggugucagaugugucugcagagacaacuggaaaggcuccaaucggcccaucguagauauaaacauaaaggaucauagcauuguuuccaguuauguguguucaggacuuguuggagacacacccagaaaaaacgacagcuccagcaguagccauuguuuggauccuaacaaugaagaagguggucauggagugaaaggcugggccuuugaugauggaaaugacguguggaugggaagaacaaucaacgagacgucacgcuuaggguaugaaaccuucaaagucauugaaggcugguccaacccuaaguccaaauugcagauaaauaggcaagucauaguugacagaggugauaggucagguuauucugguauuuucucuauugaaggcaaaagcugcaucaaucggugcuuuuauguggaguugauuaggggaagaaaagaggaaacugaagucuuguggaccucaaacaguauuguuguguuuuguggcaccucagguacauauggaacaggcucauggccugauggggcggaccucaaucucaugccuauauaa

SEQ ID NO: 57636 - RNA, 1410 nt, Artificial Sequence
  derived and/or modified CDS sequence (wt) from neuraminidase__InfluenzaA__AIJ29348
augaauccaaaucaaaagauaauaacgauuggcucuguuucucucaccauuuccacaauaugcuucuucaugcaaauugccaucuugauaacuacuguaacauugcauuucaagcaauaugaauucaacucccccccaaacaaccaagugaugcugugugaaccaacaauaauagaaagaaacauaacagagauaguguaucugaccaacaccaccauagagaaggaaauaugccccaaaccagcagaauacagaaauuggucaaaaccgcaauguggcauuacaggauuugcaccuuucucuaaggacaauucgauuaggcuuuccgcugguggggacauuugggugacaagagaaccuuaugugucaugcgauccugacaaguguuaucaauuugcccuuggacagggaacaacacuaaacaacgugcauucaaauaacacaguacgugauaggaccccuuaucggacucuauugaugaaugaguuggguguuccuuuucaucuggggaccaagcaagugugcauagcaugguccagcucaaguugucacgauggaaaagcauggcugcauguuuguauaacgggggaugauaaaaaugcaacugcuagcuucauuuacaaugggaggcuuguagauaguguuguuucaugguccaaagaaauucucaggacccaggagucagaaugcguuuguaucaauggaacuuguacaguaguaaugacugauggaagugcuucaggaaaagcugauacuaaaauacuauucauugaggaggggaaaaucguucauacuagcacauugucaggaagugcucagcaugucgaagagugcucuugcuauccucgauauccuggugucagaugugucugcagagacaacuggaaaggcuccaaucggcccaucguagauauaaacauaaaggaucauagcauuguuuccaguuauguguguucaggacuuguuggagacacacccagaaaaaacgacagcuccagcaguagccauuguuuggauccuaacaaugaagaagguggucauggagugaaaggcugggccuuugaugauggaaaugacguguggaugggaagaacaaucaacgagacgucacgcuuaggguaugaaaccuucaaagucauugaaggcugguccaacccuaaguccaaauugcagauaaauaggcaagucauaguugacagaggugauagguccgguuauucugguauuuucucuguugaaggcaaaagcugcaucaaucggugcuuuuauguggaguugauuaggggaagaaaagaggaaacugaagucuuguggaccucaaacaguauuguuguguuuuguggcaccucagguacauauggaacaggcucauggccugauggggcggaccucaaucucaugccuauauaa

SEQ ID NO: 57637 - RNA, 1410 nt, Artificial Sequence
  derived and/or modified CDS sequence (wt) from neuraminidase__InfluenzaA__AIJ29350
augaauccaaaucaaaagauaauaacgauuggcucuguuucucucaccauuuccacaauaugcuucuucaugcaaauugccaucuugauaacuacuguaacauugcauuucaagcaauaugaauucaacucccccccaaacaaccaagugaugcugugugaaccaacaauaauagaaagaaacauaacagagauaguguaucugaccaacaccaccauagagaaggaaauaugccccaaaccagcagaauacagaaauuggucaaaaccgcaauguggcauuacaggauuugcaccuuucucuaaggacaauucgauuaggcuuuccgcugguggggacaucugggugacaagagaaccuuaugugucaugcgauccugacaaguguuaucaauuugcccuuggacagggaacaacacuaaacaacgugcauucaaauaacacaguacgugauaggaccccuuaucggacucuauugaugaaugaguuggguguuccuuuucaucuggggaccaagcaagugugcauagcaugguccagcucaaguugucacgauggaaaagcauggcugcauguuuguauaacgggggaugauaaaaaugcaacugcuagcuucauuuacaaugggaggcuuguagauaguguuguuucaugguccaaagaaauucucaggacccaggagucagaaugcguuuguaucaauggaacuuguacaguaguaaugacugauggaagugcuucaggaaaggcugauacuaaaauacuauucauugaggaggggaaaaucguucauacuagcacauugucaggaagugcucagcaugucgaagagugcucuugcuauccucgauauccuggugucagaugugucugcagagacaacuggaaaggcuccaaucggcccaucguagauauaaacauaaaggaucauagcauuguuuccaguuauguguguucaggacuuguuggagacacacccagaaaaaacgacagcuccagcaguagccauuguuuggauccuaacaaugaagaagguggucauggagugaaaggcugggccuuugaugauggaaaugacguguggaugggaagaacaaucaacgagacgucacgcuuaggguaugaaaccuucaaagucauugaaggcugguccaacccuaaguccaaauugcagauaaauaggcaagucauaguugacagaggugauagguccgguuauucugguauuuucucuguugaaggcaaaagcugcaucaaucggugcuuuuauguggaguugauuaggggaagaaaagaggaaacugaagucuuguggaccucaaacaguauuguuguguuuuguggcaccucagguacauauggaacaggcucauggccugauggggcggaccucaaucucaugccuauauaa

SEQ ID NO: 57638 - RNA, 1410 nt, Artificial Sequence
  derived and/or modified CDS sequence (wt) from neuraminidase__InfluenzaA__AIJ29352
augaauccaaaucaaaagauaauaacgauuggcucuguuucucucaccauuuccacaauaugcuucuucaugcaaauugccaucuugauaaccacuguaacauugcauuucaagcaauaugaauucaacucccccccaaacaaccaagugaugcugugugaaccaacaauaauagaaagaaacauaacagagauaguguaucugaccaacaccaccauagagaaggaaauaugccccaaaccagcaaaauacagaaauuggucaaaaccgcaauguggcauuacaggauuugcaccuuucucuaaggacaauucgauuaggcuuuccgcugguggggacaucugggugacaagagaaccuuaugugucaugcgauccugacaaguguuaucaauuugcccuuggacagggaacaacacuaaacaacgugcauucaaauaacacaguacgugauaggaccccuuaucggacucuauugaugaaugaguuggguguuccuuuucaucuggggaccaagcaagugugcauagcaugguccagcucaaguugucacgauggaaaagcauggcugcauguuuguauaacgggggaugauaaaaaugcaacugcuagcuucauuuacaaugggaggcuuguagauaguguuguuucaugguccaaagaaauucucaggacccaggagucagaaugcguuuguaucaauggaacuuguacaguaguaaugacugauggaagugcuucaggaaaagcugauacuaaaauacuauucauugaggaggggaaaaucguucauacuagcacauugucaggaagugcucagcaugucgaagagugcucuugcuauccucgauauccuggugucagaugugucugcagagacaacuggaaaggcuccaaucggcccaucguagauauaaacauaaaggaucauagcauuguuuccaguuauguguguucaggacuuguuggagacacacccagaaaaaacgacagcuccagcaguagccauuguuuggauccuaacaaugaagaagguggucauggagugaaaggcugggccuuugaugauggaaaugacguguggaugggaagaacaaucaacgagacgucacgcuuaggguaugaaaccuucaaagucauugaaggcugguccaacccuaaguccaaauugcagauaaauaggcaagucauaguugacagaggugauagguccgguuauucugguauuuucucuguugaaggcaaaagcugcaucaaucggugcuuuuauguggaguugauuaggggaagaaaagaggaaacugaagucuuguggaccucaaacaguauuguuguguuuuguggcaccucagguacauauggaacaggcucauggccugauggggcggaccucaaucucaugccuauauaa

SEQ ID NO: 57639 - RNA, 1410 nt, Artificial Sequence
  derived and/or modified CDS sequence (wt) from neuraminidase__InfluenzaA__AIJ29354
augaauccaaaucaaaagauaauaacgauuggcucuguuucucucaccauuuccacaauaugcuucuucaugcaaauugccaucuugauaacuacuguaacauugcauuucaagcaauaugaauucaacucccccccaaacaaccaagugaugcugugugaaccaacaauaauagaaagaaacauaacagagauaguguaucugaccaacaccaccauagagaaggaaauaugccccaaacuagcagaauacagaaauuggucaaagccgcaaugugacauuacaggauuugcaccuuuuucuaaggacaauucgauuaggcuuuccgcugguggggacaucugggugacaagagaaccuuaugugucaugcgauccugacaaguguuaucaauuugcccuuggacagggaacaacacuaaacaacgugcauucaaauaacacaguacgugauaggaccccuuaucggacccuauugaugaaugaguuagguguuccuuuucaucuggggaccaagcaagugugcauagcaugguccagcucaaguugucacgauggaaaagcauggcugcauguuuguauaacgggggaugauaaaaaugcaacugcuagcuucauuuacaaugggaagcuuguagauaguguuguuucaugguccaaagaaauccucaggacccaggagucagaaugcgucuguaucaauggaacuuguacaguaguaaugacugaugggagugcuucaggaaaagcugauacuaaaauacuauucauugaggaggggaaaaucguucauacuagcacauugucaggaagugcucagcaugucgaggagugcucuugcuauccucgauauccuggugucagaugugucugcagagacaacuggaaaggcuccaauaggcccaucguagauauaaacauaaaggaucauagcauuguuuccaguuauguguguucaggacuuguuggagacacacccagaaaaaacgacagcuccagcaguagccauuguuuggauccuaacaaugaagaagguggucauggagugaaaggcugggccuuugaugauggaaaugacguguggaugggaagaacgaucaacgagacgucacguuuaggguaugaaaccuucaaagucauugaaggcugguccaacccuaaguccaaauugcagauaaauaggcaagucauaguugacagagguaauagguccgguuauucugguauuuucucuguugaaggcaaaagcugcaucaaucggugcuuuuauguggaguugauuaggggaagaaaggaggaaacugaagucuuguggaccucaaacaguauuguuguguuuuguggcaccucagguacauauggaacaggcucauggccugauggggcggaccucaaucucaugccuauauaa

SEQ ID NO: 57640 - RNA, 1410 nt, Artificial Sequence; identical to SEQ ID NO: 54937
  derived and/or modified CDS sequence (wt) from neuraminidase__InfluenzaA__AIJ29356

SEQ ID NO: 57641 - RNA, 1410 nt, Artificial Sequence
  derived and/or modified CDS sequence (wt) from neuraminidase__InfluenzaA__AIJ29358
augaauccaaaucaaaagauaauaacgauuggcucuguuucucucaccauuuccacaauaugcuucuucaugcaaauugccaucuugauaacuacuguaacauugcauuucaagcaauaugaauucaacucccccccaaacaaccaagugaugcugugugaaccaacaauaauagaaagaaacauaacagagauaguguaucugaccaacaccaccauagagaaggaaauaugccccaaaccagcagaauacagaaauuggucaaaaccgcaaugugacauuacaggauuugcaccuuuuucuaaggacaauucgauuaggcuuuccgcugguggggacaucugggugacaagagaaccuuaugugucaugcgauccugacaaguguuaucaauuugcccuuggacagggaacaacacuaaacaaugugcauucaaauaacacaguacgugauaggaccccuuaucggacuuuauugaugaaugaguuagguguuccuuuucaucuggggaccaagcaagugugcauagcaugguccagcucaaguugucacgauggaaaagcauggcugcauguuuguauaacgggggaugauaaaaaugcaacugcuagcuucauuuacaaugggaggcuuguagauaguguuguuucaugguccaaagaaauucucaggacccaggagucagaaugcguuuguaucaauggaacuuguacaguaguaaugacugauggaagugcuucaggaaaagcugauacuaaaauacuauucauugaggaggggaaaaucguucauacuagcacauugucaggaagugcucagcaugucgaggagugcucuugcuauccucgauauccuggugucagaugugucugcagagacaacuggaaagguuccaauaggcccaucguagauauaaacauaaaggaucauagcauugucuccaguuauguguguucaggacuuguuggagacacacccagaaaaaacgacagcuccagcaguagccauuguuuggauccuaacaaugaagaagguggucauggagugaaaggcugggccuuugaugauggaaaugacguguggaugggaagaacaaucaacgagacgucacgcuuaggguaugaaaccuucaaagucauugaaggcugguccaacccuaaguccaaauugcagauaaauaggcaagucauaguugacagaggugauagguccgguuauucugguauuuucucuguugaaggcaaaagcugcaucaaucggugcuuuuauguggaguugauuaggggaagaaaagaggaaacugaagucuuguggaccucaaacaguauuguuguguuuuguggcaccucagguacauauggaacaggcucauggccugauggggcggaccucaaucucaugccuauauaa

SEQ ID NO: 57642 - RNA, 1410 nt, Artificial Sequence
  derived and/or modified CDS sequence (wt) from neuraminidase__InfluenzaA__AIJ29360
augaauccaaaucaaaagauaauaacgauuggcucuguuucucucaccauuuccacaauaugcuucuucaugcaaauugccaucuugacaacuacuguaacauugcauuucaagcaauaugaauucaacucccccccaaacaaccaagugaugcugugugaaccaacaauaauagaaagaaacauaacagagauaguguaucugaccaacaccaccauagagaaggaaauaugccccaaaccagcagaauacagaaauuggucaaaaccgcaauguggcauuacaggauuugcaccuuucucuaaggacaauucgauuaggcuuuccgcugguggggacaucugggugacaagagaaccuuaugugucaugcgauccugacaaguguuaucaauuugcccuuggacagggaacaacacuaaacaacgugcauucaaauaacacaguacgugauaggaccccuuaucggaccuuauugaugaaugaguuggguguuccuuuucaucuggggaccaagcaagugugcauagcaugguccagcucaaguugucacgauggaaaagcauggcugcauguuuguauaacgggggaugauaaaaaugcaacugcuagcuucauuuacaaugggaggcuuguagauaguguuguuucaugguccaaagaaauucucaggacccaggagucagaaugcguuuguaucaauggaacuuguacaguaguaaugacugauggaagugcuucaggaaaagcugauacuaaaauacuauucauugaggaggggaaaaucguucauacuagcacauugucaggaagugcucagcaugucgaagagugcucuugcuauccucgauauccugguguaagaugugucugcagagacaacuggaaaggcuccaaucggcccaucguagauauaaacauaaaggaucauagcauuguuuccaguuauguguguucaggacuuguuggagacacacccagaaaaaacgacagcuccagcaguagccauuguuuggauccuaacaaugaagaagguggucauggagugaaaggcugggccuuugaugauggaaaugacguguggaugggaagaacaaucaacgagacgucacgcuuaggguaugaaaccuucaaagucauugaaggcugguccaacccuaaguccaaauugcagauaaauaggcaagucauaguugacagaggugauagguccgguuauucugguauuuucucuguugaaggcaaaagcugcaucaaucggugcuuuuauguggaguugauuaggggaagaaaagaggaaacugaagucuuguggaccucaaacaguauuguuguguuuuguggcaccucagguacauauggaacaggcucauggccugauggggcggaccucaaucucaugccuauauaa

SEQ ID NO: 57643 - RNA, 1410 nt, Artificial Sequence
  derived and/or modified CDS sequence (wt) from neuraminidase__InfluenzaA__AIJ29362
augaauccaaaucaaaagauaauaacgauuggcucuguuucucucaccauuuccacaauaugcuucuucaugcaaauugccaucuugauaacuacuguaacauugcauuucaagcaauaugaauucaacucccccccaaacaaccaagugaugcugugugaaccaacaauaauagaaagaaacauaacagagauaguguaucugaccaacaccaccauagagaaggaaauaugccccaaaccagcagaauacagaaauuggucaaaaccgcaauguggcauuacaggauuugcaccuuucucuaaggacaauucgauuaggcuuuccgcugguggggacaucugggugacaagagaaccuuaugugucaugcgauccugacaaguguuaucaauuugcucuuggacagggaacaacacuaaacaacgugcauucaaauaacacaguacgugauaggaccccuuaucggacucuauugaugaaugaguuggguguuccuuuucaucuggggaccaagcaagugugcauagcaugguccagcucaaguugucacgauggaaaagcauggcugcauguuuguauaacgggggaugauaaaaaugcaacugcuagcuucauuuacaaugggaggcuuguagauaguguuguuucaugguccaaagaaauucucaggacccaggagucagaaugcguuuguaucaauggaacuuguacaguaguaaugacugauggaagugcuucaggaaaagcugauacuaaaauacuauucauugaggaggggaaaaucguucauacuagcacauugucaggaagugcucagcaugucgaagagugcucuugcuauccucgauauccuggugucagaugugucugcagagacaacuggaaaggcuccaauaggcccaucguagauauaaacauaaaggaucauagcauuguuuccaguuauguguguucaggacuuguuggagacacacccagaaaaaacgacagcuccagcaguagccauuguuuggauccuaacaaugaagaagguggucauggagugaaaggcugggccuuugaugauggaaaugacguguggaugggaagaacaaucaacgagacgucacgcuuaggguaugaaaccuucaaagucauugaaggcugguccaacccuaaguccaaauugcagauaaauaggcaagucauaguugacagaggugauagguccgguuauucugguauuuucucuguugaaggcaaaagcugcaucaaucggugcuuuuauguggaguugauuaggggaagaaaggaggaaacugaagucuuguggaccucaaacaguauuguuguguuuuguggcaccucagguacauauggaacaggcucauggccugauggggcggaccucaaucucaugccuauauaa

SEQ ID NO: 57644 - RNA, 1410 nt, Artificial Sequence
  derived and/or modified CDS sequence (wt) from neuraminidase__InfluenzaA__AIL93626
augaauccaaaccaaaagauaauaaccauugguucggucuguaugacaauuggaauggcuaacuuaauauuacaaauuggaaacauaaucucaauauggauuagccacucaauucaacuugggaaucaaagucagauugaagcaugcaaucaaagcgucauuacuuaugaaaacaacacuuauguaaaucagacauauguuaacaucagcaacaccaauuuugcugcuggacggucagugguuuccgugaaauuagcgggcaauuccucucucugcccuguuaguggaugggcuauauacaguaaagacaacaguguaagaaucgguuccaagggggauguguuugucauaagggaaccauucauaucaugcucccccuuggaaugcagaaccuucuucuugacucaaggggccuugcuaaaugacaaacauuccaauggaaccauuaaagacaggagcccauaucgaacccuaaugagcuguccuauuggugaaguucccucuccauacaacucaagauuugagucagucgcuuggucagcaagugcuugucaugauggcaucaauuggcuaacaauuggaauuucuggcccagacaguggggcaguggcuguguuaaaguacaauggcauaauaacagacacuaucaagaguuggaaaaauaauauauugagaacacaagagucugaaugugcauguguaaaugguucuugcuuuaccauaaugaccgauggaccaagugacggacaggccucauacaagaucuuccgaauagaaaagggaaagauagucaaaucagucgaaaugaaugccccuaauuaucacuaugaggaaugcuccuguuauccugauucuagugaaaucacaugugugugcagggauaacuggcauggcucgaaucgaccgugggugucuuucaaccagaaucuggaauaucagauaggauacauaugcagugggguuuucggagacaauccacgcccuaaugauaagacaggcaguugugguccaguauugucuaauggagcaaauggaguaaaaggauuuucauucaaauacggcaaugguguuuggauagggagaacuaaaagcauuaguucaagaaaagguuuugagaugauuugggauccaaauggauggacugggacagacaauaacuucucaauaaagcaagauaucguaggaauaaaugaguggucaggauauagcgggaguuuuguucagcauccagaacuaacagggcuggauuguauaagaccuugcuucuggguugaacuaaucagagggcgacccaaagagaacacaaucuggacuagcgggagcagcauauccuuuugugguguaaacagugacacuguggguuggucuuggccagacggugcugaguugccauuuaccauugacaaguaa

SEQ ID NO: 57645 - RNA, 1410 nt, Artificial Sequence
  derived and/or modified CDS sequence (wt) from neuraminidase__InfluenzaA__AIL93648
augaauccaaaucaaaagauaauaacgauuggcucuguuucucucaccauuuccacaauaugcuucuucaugcaaauugccaucuugauaacuacuguaacauugcauuucaagcaauaugaauucaacucccccccaaacaaccaagugaugcugugugaaccaacaauaauagaaagaaacauaacagagauaguguaucugaccaacaccaccauagagaaggaaauaugccccaaaccagcagaauacagaaauuggucaaaaccgcaauguggcauuacaggauuugcaccuuucucuaaggacaauucgauuaggcuuuccgcugguggggacaucugggugacaagagaaccuuaugugucaugcgauccugacaaguguuaucaauuugcccuuggacagggaacaacacuaaacaacgugcauucaaauaacacaguacgugauaggaccccuuaucggacucuauugaugaaugaguuggguguuccuuuucaucuggggaccaagcaagugugcauagcaugguccagcucaaguugucacgauggaaaagcauggcugcauguuuguauaacgggggaugauaaaaaugcaacugcuagcuucauuuacaaugggaggcuuguagauaguguuguuucaugguccaaagaaauucucaggacccaggagucagaaugcguuuguaucaauggaacuuguacaguaguaaugacugauggaagugcuucaggaaaagcugauacuaaaauacuauucauugaggaggggagaaucguucauacuagcacauugucaggaagugcucagcaugucgaagagugcucuugcuauccucgauauccuggugucagaugugucugcagagacaacuggaaaggcuccaaucggcccaucguagauauaaacauaaaggaucauagcauuguuuccaguuauguguguucaggacuuguuggagacacacccagaaaaaacgacagcuccagcaguagccauuguuuggauccuaacaaugaagaagguggucauggagugaaaggcugggccuuugaugauggaaaugacguguggaugggaagaacaaucaacgagacgucacgcuuaggguaugaaacuuucaaagucauugaaggcugguccaacccuaaguccaaauugcagauaaauaagcaagucauaguugacagaggugauagguccgguuauucugguauuuucucugucgaaggcaaaagcugcaucaaucggugcuuuuauguggaguugauuaggggaagaaaagaggaaacugaagucuuguggaccucaaacaguauuguuguguuuuguggcaccucagguacauauggaacaggcucauggccugauggggcggaccucaaucucaugccuauauaa

SEQ ID NO: 57646 - RNA, 1410 nt, Artificial Sequence
  derived and/or modified CDS sequence (wt) from neuraminidase__InfluenzaA__AIL93660
augaauccaaaucaaaagauaauaacgauuggcucuguuucucucaccauuuccacaauaugcuucuucaugcaaauugccaucuugauaacuacuguaacauugcauuucaagcaauaugaauucaacucccccccaaacaaccaagugaugcugugugaaccaacaauaauagaaagaaacauaacagagauaguguaucugaccaacaccaccauagagaaggaaauaugccccaaaccagcagaauacagaaauuggucaaaaccgcaauguggcauuacaggauuugcaccuuucucuaaggacaauucgauuaggcuuuccgcugguggggacaucugggugacaagagaaccuuaugugucaugcgauccugacaaguguuaucaauuugcccuuggacagggaacaacacuaaacaacgugcauucaaauaacacaguacgugauaggaccccuuaucggacucuauugaugaaugaguuggguguuccuuuucaucuggggaccaagcaagugugcauagcaugguccagcucaaguugucacgauggaaaagcauggcugcauguuuguauaacgggggaugauaaaaaugcaacugcuagcuucauuuacaaugggaggcuuguagauaguguuguuucaugguccaaagaaauucucaggacccaggagucagaaugcguuuguaucaauggaacuuguacaguaguaaugacugauggaagugcuucaggaaaagcugauacuaaaauacuauucauugaggaggggaaaaucguucauacuagcacauugucaggaagugcucagcaugucgaagagugcucuugcuauccucgauauccuggugucagaugugucugcagagacaacuggaaaggauccaaucggcccaucguagauauaaacauaaaggaucauagcauuguuuccaguuauguguguucaggacuuguuggagacacacccagaaaaaacgacagcuccagcaguagccauuguuuggauccuaacaaugaagaagguggucauggagugaaaggcugggccuuugaugauggaaaugacguguggaugggaagaacaaucaacgagacgucacgcuuaggguaugaaaccuucaaagucauugaaggcugguccaacccuaaguccaaauugcagauaaauaggcaagucauaguugacagaggugauagguccgguuauucugguauuuucucugucgaaggcaaaagcugcaucaaucggugcuuuuauguggaguugauuaggggaagaaaagaggaaacugaagucuuguggaccucaaacaguauuguuguguuuuguggcaccucagguacauauggaacaggcucauggccugauggggcggaccucaaucucaugccuauauaa

SEQ ID NO: 57647 - RNA, 1410 nt, Artificial Sequence; identical to SEQ ID NO: 57646
  derived and/or modified CDS sequence (wt) from neuraminidase__InfluenzaA__AIL93672

SEQ ID NO: 57648 - RNA, 1410 nt, Artificial Sequence
  derived and/or modified CDS sequence (wt) from neuraminidase__InfluenzaA__AIL93684
augaauccaaaccaaaagauaauaaccauugguucggucuguaugacaauuggaauggcuaacuuaauauuacaaauuggaaacauaaucucaauauggauuagccacucaauucaacuugggaaucaaagucagauugaagcaugcaaucaaagcgucauuacuuaugaaaacaacacuuggguaaaucagacauauguuaacaucagcaacaccaacucugcuacuggacagucagugguuuccgugaaauuagcgggcaauuccucucucuguccuguuaguggaugggcuauauacaguaaagacaacaguguaagaaucgguuccaagggggacguguuugucauaagggaaccauucauaucaugcucccccuuggaaugcagaaccuucuucuugacucaaggggccuugcuaaaugacaaacauuccaauggaaccauuaaagacaggagcccauaucgaacccuaaugagcuguccuauuggugaaguucccucuccauacaacucaagauuugagucagucgcuuggucagcaagugcuugucaugauggcaucaauuggcuaacaauuggaauuucuggcccagacaguggggcaguggcuguguuaaaguacaauggcauaauaacagacacuaucaagaguuggaaaaauaauauauugagaacacaagagucugaaugugcauguguaaaugguucuugcuuuaccauaaugaccgauggaccaagugacggacaggccucauacaagaucuuccgaauagaaaagggaaagauagucaaaucagucgaaaugaaugccccuaauuaucacuaugaggaaugcuccuguuauccugauucuagugaaaucacaugugugugcagggauaacuggcauggcucgaaucgaccgugggugucuuucaaccagaaucuggaauaucagauaggauacauaugcagugggguuuucggagacaauccacgcccuaaugauaagacaggcaguugugguccaguauugucuaauggagcaaauggaguaaaaggauuuucauucaaauacggcaaugguguuuggauagggagaacuaaaagcauuaguucaagaaaagguuuugagaugauuugggauccaaauggauggacugggacagacaauaacuucucaauaaagcaagauaucguaggaauaaaugaguggucaggauauagcgggaguuuuguucagcauccagaacuaacaggacuggauuguauaagaccuugcuucuggauugaacuaaucagagggcgacccaaagagaacacaaucuggacuagcgggagcagcauauccuuuugugguguaaacagugacacuguggguuggucuuggccagacggugcugaguugccauuuaccauugacaaguaa

SEQ ID NO: 57649 - RNA, 1410 nt, Artificial Sequence
  derived and/or modified CDS sequence (wt) from neuraminidase__InfluenzaA__AIL93719
augaauccaaaucaaaagauaauaacgauuggcucuguuucucucaccauuuccacaauaugcuucuucaugcaaauugccaucuugauaacuacuguaacauugcauuucaagcaauaugaauucaacucccccccaaacaaccaagugaugcugugugaaccaacaauaauagaaagaaacauaacagagauaguguaucugaccaacaccaccauagagaaggaaauaugccccaaaccagcagaauacagaaauuggucaaaaccgcaauguggcauuacaggauuugcaccuuucucuaaggacaauucgauuaggcuuuccgcugguggggacaucugggugacaagagaaccuuaugugucaugcgauccugacaaguguuaucaauuugcccuuggacagggaacaacacuaaacaacgugcauucaaauaacacaguacgugauaggaccccuuaucggacucuauugaugaaugaguuggguguuccuuuucaucuggggaccaagcaagugugcauagcaugguccagcucaaguugucacgauggaaaagcauggcugcauguuuguauaacgggggaugauaaaaaugcaacugcuagcuucauuuacaaugggaggcuuguagauaguguuguuucaugguccaaagaaauucucaggacccaggagucagaaugcguuuguaucaauggaacuuguacaguaguaaugacugauggaagugcuucaggaaaagcugauacuaaaauacuauucauugaggaggggaaaaucguucauacuagcacauugucaggaagugcucagcaugucgaagagugcucuugcuauccucgauauccuggugucagaugugucugcagagacaacuggaaaggcuccaaucggcccaucguagauauaaacauaaaggaucauagcauuguuuccaguuauguguguucaggacuuguuggagacacacccagaaaaaacgacagcuccagcaguagccauuguuuggauccuaacaaugaagaagguggucauggagugaaaggcugggccuuugaugauggaaaugacguguggaugggaagaacaaucaacgagacgucacgcuuaggguaugaaacuuucaaagucauugaaggcugguccaacccuaaguccaaauugcagauaaauaagcaagucauaguugacagaggugauagguccgguuauucugguauuuucucugucgaaggcaaaagcugcaucaaucggugcuuuuauguggaguugauuaggggaagaaaagaggaaacugaagucuuguggaccucaaacaguauuguuguguuuuguggcaccucagguacauauggaacaggcucauggccugauggggcggaccucaaucucaugccuauauaa

SEQ ID NO: 57650 - RNA, 1410 nt, Artificial Sequence
  derived and/or modified CDS sequence (wt) from neuraminidase__InfluenzaA__AIL93743
augaauccaaaucaaaagauaauaacgauuggcucuguuucucucaccauuuccacaauaugcuucuucaugcaaauugccaucuugauaacuacuguaacauugcauuucaagcaauaugaauucaacucccccccaaacaaccaagugaugcugugugaaccaacaauaauagaaagaaacauaacagagauaguguaucugaccaacaccaccauagagaaggaaauaugccccaaaccagcagaauacagaaauuggucaaaaccgcaauguggcauuacaggauuugcaccuuucucuaaggacaauucgauuaggcuuuccgcugguggggacaucugggugacaagagaaccuuaugugucaugcgauccugacaaguguuaucaauuugcccuuggacagggaacaacacuaaacaacgugcauucaaauaacacaguacgugauaggaccccuuaucggacucuauugaugaaugaguuggguguuccuuuucaucuggggaccaagcaagugugcauagcaugguccagcucaaguugucacgauggaaaagcauggcugcauguuuguauaacgggggaugauaaaaaugcaacugcuagcuucauuuacaaugggaggcuuguagauaguguuguuucaugguccaaagaaauucucaggacccaggagucagaaugcguuuguaucaauggaacuuguacaguaguaaugacugauggaagugcuucaggaaaagcugauacuaaaauacuauucauugaggaggggaaaaucguucauacuagcacauugucaggaagugcucagcaugucgaagagugcucuugcuauccucgauauccuggugucagaugugucugcagagacaacuggaaaggcuccaaucggcccaucguagauauaaacauaaaggaucauagcauuguuuccaguuauguguguucaggacuuguuggagacacacccagaaaaaacgacagcuccagcaguagccauuguuuggauccuaacaaugaagaagguggucauggagugaaaggcugggccuuugaugauggaaaugacguguggaugggaagaacaaucaacgagacgucacgcuuaggguaugaaaccuucaaagucauugaaggcugguccaacccuaaguccaaauugcagauaaauaagcaagucauaguugacagaggugauagguccgguuauucugguauuuucucugucgaaggcaaaagcugcaucaaucggugcuuuuauguggaguugauuaggggaagaaaagaggaaacugaagucuuguggaccucaaacaguauuguuguguuuuguggcaccucagguacauauggaacaggcucauggccugauggggcggaccucaaucucaugccuauauaa

SEQ ID NO: 57651 - RNA, 1410 nt, Artificial Sequence; identical to SEQ ID NO: 57650
  derived and/or modified CDS sequence (wt) from neuraminidase__InfluenzaA__AIL93755

SEQ ID NO: 57652 - RNA, 1410 nt, Artificial Sequence
  derived and/or modified CDS sequence (wt) from neuraminidase__InfluenzaA__AIL93767
augaauccaaaucaaaagauaauaacgauuggcucuguuucucucaccauuuccacaauaugcuucuucaugcaaauugccaucuugauaacuacuguaacauugcauuucaagcaauaugaauucaacucccccccaaacaaccaagugaugcugugugaaccaacaauaauagaaagaaacauaacagagauaguguaucugaccaacaccaccauagagaaggaaauaugccccaaaccagcagaauacagaaauuggucaaaaccgcaauguggcauuacaggauuugcaccuuucucuaaggacaauucgauuaggcuuuccgcugguggggacaucugggugacaagagaaccuuaugugucaugcgauccugacaaguguuaucaauuugcccuuggacagggaacaacacuaaacaacgugcauucaaauaacacaguacgugauaggaccccuuaucggacucuauugaugaaugaguuggguguuccuuuucaucuggggaccaagcaagugugcauagcaugguccagcucaaguugucacgauggaaaagcauggcugcauguuuguauaacgggggaugauaaaaaugcaacugcuagcuucauuuacaaugggaggcuuguagauaguguuguuucaugguccaaagaaauucucaggacccaggagucagaaugcguuuguaucaauggaacuuguacaguaguaaugacugauggaagugcuucaggaaaagcugauacuaaaauacuauucauugaggaggggaaaaucguucauacuagcacauugucaggaagugcucagcaugucgaagagugcucuugcuauccucgauauccuggugucagaugugucugcagagacaacuggaaaggauccaaucggcccaucguagauauaaacauaaaggaucauagcauuguuuccaguuauguguguucaggacuuguuggagacacacccagaaaaaacgacagcuccagcaguagccauuguuuggauccuaacaaugaagaagguggucauggaguaaaaggcugggccuuugaugauggaaaugacguguggaugggaagaacaaucaacgagacgucacgcuuaggguaugaaaccuucaaagucauugaaggcugguccaacccuaaguccaaauugcagauaaauaggcaagucauaguugacagaggugauagguccgguuauucugguauuuucucugucgaaggcaaaagcugcaucaaucggugcuuuuauguggaguugauuaggggaagaaaagaggaaacugaagucuuguggaccucaaacaguauuguuguguuuuguggcaccucagguacauauggaacaggcucauggccugauggggcggaccucaaucucaugccuauauaa

SEQ ID NO: 57653 - RNA, 1410 nt, Artificial Sequence; identical to SEQ ID NO: 57646
  derived and/or modified CDS sequence (wt) from neuraminidase__InfluenzaA__AIL93779

SEQ ID NO: 57654 - RNA, 1410 nt, Artificial Sequence
  derived and/or modified CDS sequence (wt) from neuraminidase__InfluenzaA__AIL93791
augaauccaaaucaaaagauaauaacgauuggcucuguuucucucaccauuuccacaauaugcuucuucaugcaaauugccaucuugauaacuacuguaacauugcauuucaagcaauauaaauucaacucccccccaaacaaccaagugaugcugugugaaccaacaauaauagaaagaaacauaacagagauaguguaucugaccaacaccaccauagagaaggaaauaugccccaaaccagcagaauacagaaauuggucaaaaccgcaauguggcauuacaggauuugcaccuuucucuaaggacaauucgauuaggcuuuccgcugguggggacaucugggugacaagagaaccuuaugugucaugcgauccugacaaguguuaucaauuugcccuuggacagggaacaacacuaaacaacgugcauucaaauaacacaguacgugauaggaccccuuaucggacucuauugaugaaugaguuggguguuccuuuucaucuggggaccaagcaagugugcauagcaugguccagcucaaguugucacgauggaaaagcauggcugcauguuuguauaacgggggaugauaaaaaugcaacugcuagcuucauuuacaaugggaggcuuguagauaguguuguuucaugguccaaagaaauucucaggacccaggagucagaaugcguuuguaucaauggaacuuguacaguaguaaugacugauggaagugcuucaggaaaagcugauacuaaaauacuauucauugaggaggggaaaaucguucauacuagaacauugucaggaagugcucagcaugucgaagagugcucuugcuauccucgauauccuggugucagaugugucugcagagacaacuggaaaggcuccaaucggcccaucguagauauaaacauaaaggaucauagcauuguuuccaguuauguguguucaggacuuguuggagacacacccagaaaaaacgacagcuccagcaguagccauuguuuggauccuaacaaugaagaagguggucauggagugaaaggcugggccuuugaugauggaaaugacguguggaugggaagaacaaucaacgagacgucacgcuuaggguaugaaaccuucaaagucauugaaggcugguccaacccuaaguccaaauugcagauaaauaagcaagucauaguugacagaggugauagguccgguuauucugguauuuucucugucgaaggcaaaagcugcaucaaucggugcuuuuauguggaguugauuaggggaagaaaagaggaaacugaagucuuguggaccucaaacaguauuguuguguuuuguggcaccucagguacauauggaacaggcucauggccugauggggcggaccucaaucucaugccuauauaa

SEQ ID NO: 57655 - RNA, 1410 nt, Artificial Sequence; identical to SEQ ID NO: 57650
  derived and/or modified CDS sequence (wt) from neuraminidase__InfluenzaA__AIL93803

SEQ ID NO: 57656 - RNA, 1410 nt, Artificial Sequence
  derived and/or modified CDS sequence (wt) from neuraminidase__InfluenzaA__AIL93815
augaauccaaaucaaaagauaauaacgauuggcucuguuucucucaccauuuccacaauaugcuucuucaugcaaauugccaucuugauaacuacuguaacauugcauuucaagcaauaugaauucaacucccccccaaacaaccaagugaugcugugugaaccaacaauaauagaaagaaacauaacagagauaguguaucugaccaacaccaccauagagaaggaaauaugccccaaaccagcagaauacagaaauuggucaaaaccgcaauguggcauuacaggauuugcaccuuucucuaaggacaauucgauuaggcuuuccgcugguggggacaucugggugacaagagaaccuuaugugucaugcgauccugacaaguguuaucaauuugcccuuggacagggaacaacacuaaacaacgugcauucaaauaacacaguacgugauaggaccccuuaucggacucuauugaugaaugaguuggguguuccuuuucaucuggggaccaagcaagugugcauagcaugguccagcucaaguugucacgauggaaaagcauggcugcauguuuguauaacgggggaugauaaaaaugcaacugcuagcuucauuuacaaugggaggcuuguagauaguguuguuucaugguccaaagaaauucucaggacccaggagucagaaugcguuuguaucaauggaacuuguacaguaguaaugacugauggaagugcuucaggaaaagcugauacuaaaauacuauucauugaggaggggaaaaucguucauacuagcacauugucaggaagugcucagcaugucgaagagugcucuugcuauccucgauauccuggugucagaugugucugcagagacaacuggaaaggauccaaucggcccaucguagauauaaacauaaaggaucauagcauuguuuacaguuauguguguucaggacuuguuggagacacacccagaaaaaacgacagcuccagcaguagccauuguuugaauccuaacaaugaagaagguggucauggagugaaaggcugggccuuugaugauggaaaugacguguggaugggaagaacaaucaacgagacgucacgcuuaggguaugaaaccuucaaagucauugaaggcugguccaacccuaaguccaaauugcagauaaauaggcaagucauaguugacagaggugauagguccgguuauucugguauuuucucugucgaaggcaaaagcugcaucaaucggugcuuuuauguggaguugauuaggggaagaaaagaggaaacugaagucuuguggaccucaaacaguauuguuguguuuuguggcaccucagguacauauggaacaggcucauggccugauggggcggaccucaaucucaugccuauauaa

SEQ ID NO: 57657 - RNA, 1410 nt, Artificial Sequence; identical to SEQ ID NO: 57646
  derived and/or modified CDS sequence (wt) from neuraminidase__InfluenzaA__AIL93827

SEQ ID NO: 57658 - RNA, 1410 nt, Artificial Sequence
  derived and/or modified CDS sequence (wt) from neuraminidase__InfluenzaA__AIL93839
augaauccaaaccaaaagauaauaaccauugguucggucuguaugacaauuggaauggcuaacuuaauauuacaaauuggaaacauaaucucaauauggauuagccacucaauucaacuugggaaucaaagucagauugaagcaugcaaucaaagcgucauuacuuaugaaaacaacacuuggguaaaucagacauauguuaacaucagcaacaccaacuuugcuacuggacagucagugguuuccgugaaauuagcgggcaauuccucucucugcccuguuaguggaugggcuauauacaguaaagacaacaguguaagaaucgguuccaagggggacguguuugucauaagggaaccauucauaucaugcucccccuuggaaugcagaaccuucuucuugacucaaggggccuugcuaaaugacaaacauuccaauggaaccauuaaagacaggagcccauaucgaacccuaaugagcuguccuauuggugaaguucccucuccauacaacucaagauuugagucagucgcuuggucagcaagugcuugucaugauggcaucaauuggcuaacaauuggaauuucuggcccagacaguggggcaguggcuguguuaaaguacaauggcauaauaacagacacuaucaagaguuggaaaaauaauauauugagaacacaagagucugaaugugcauguguaaaugguucuugcuuuaccauaaugaccgauggaccaagugacggacaggccucauacaagaucuuccgaauagaaaagggaaagauagucaaaucagucgaaaugaaugccccuaauuaucacuaugaggaaugcuccuguuauccugauucuagugaaaucacaugugugugcagggauaacuggcauggcucgaaucgaccgugggugucuuucaaccagaaucuggaauaucagauaggauacauaugcagugggguuuucggagacaauccacgcccuaaugauaagacaggcaguugugguccaguaucgucuaauggagcaaauggaguaaaaggauuuucauucaaauacggcaaugguguuuggauagggagaacuaaaagcauuaguucaagaaaagguuuugagaugauuugggauccaaauggauggacugggacagacaauaacuucucaauaaagcaagauaucguaggaauaaaugaguggucaggauauagcgggaguuuuguucagcauccagaacuaacagggcuggauuguauaagaccuugcuucuggguugaacuaaucagagggcgacccaaagagaacacaaucuggacuagcgggagcagcauauccuuuugugguguaaacagugacacuguggguuggucuuggccagacggugcugaguugccauuuaccauugacaaguaa

SEQ ID NO: 57659 - RNA, 1410 nt, Artificial Sequence
  derived and/or modified CDS sequence (wt) from neuraminidase__InfluenzaA__AIL93850
augaauccaaaccaaaagauaauaaccauugguucggucuguaugacaauuggaauggcuaacuuaauauuacaaauuggaaacauaaucucaauauggauuagccacucaauucaacuugggaaucaaagucagauugaagcaugcaaucaaagcgucauuacuuaugaaaacaacacuuggguaaaucagacauauguuaacaucagcaacaccaacuuugcuacuggacagucagugguuuccgugaaauuagcgggcaauuccucucucugcccuguuaguggaugggcuauauacaguaaagacaacaguguaagaaucgguuccaagggggacguguuugucauaagggaaccauucauaucaugcucccccuuggaaugcagaaccuucuucuugacucaaggggccuugcuaaaugacaaacauuccaauggaaccauuaaagacaggagcccauaucgaacccuaaugagcuguccuauuggugaaguucccucuccauacaacucaagauuugagucagucgcuuggucagcaagugcuugucaugauggcaucaauuggcuaacaauuggaauuucugguccagacaguggggcaguggcuguguuaaaguacaauggcauaauaacagacacuaucaagaguuggaaaaauaauauauugagaacacaagagucugaaugugcauguguaaaugguucuugcuuuaccauaaugaccgauggaccaagugacggacaggccucauacaagaucuuccgaauagaaaagggaaagauagucaaaucagucgaaaugaaugccccuaauuaucacuaugaggaaugcuccuguuauccugauucuagugaaaucacaugugugugcagggauaacuggcauggcucgaaucgaccgugggugucuuucaaccagaaucuggaauaucagauaggauacauaugcagugggguuuucggagacaauccacgcccuaaugauaagacaggcaguugugguccaguaucgucuaauggagcaaagggaguaaaaggauuuucauucaaauacggcaaugguguuuggauagggagaacuaaaagcauuaguucaagaaaagguuuugagaugauuugggauccaaauggauggacugggacagacaauaacuucucaauaaagcaagauaucguaggaauaaaugaguggucaggauauagcgggaguuuuguucagcauccagaacuaacagggcuggauuguauaagaccuugcuucuggguugaacuaaucagagggcgacccaaagagaacacaaucuggacuagcgggagcagcauauccuuuugugguguaaacagugacacuguggguuggucuuggccagacggugcugaguugccauuuaccauugacaaguaa

SEQ ID NO: 57660 - RNA, 1410 nt, Artificial Sequence; identical to SEQ ID NO: 57649
  derived and/or modified CDS sequence (wt) from neuraminidase__InfluenzaA__AIL93861

SEQ ID NO: 57661 - RNA, 1410 nt, Artificial Sequence
  derived and/or modified CDS sequence (wt) from neuraminidase__InfluenzaA__AIL93885
augaauccaaaucaaaagauaauaacgauuggcucuguuucucucaccauuuccacaauaugcuucuucaugcaaauugccaucuugauaacuacuguaacauugcauuucaagcaauaugaauucgacucccccccaaacaaccaagugaugcugugugaaccaacaauaauagaaagaaacauaacagagauaguguaucugaccaacaccaccauagagaaggaaauaugccccaaaccagcagaauacagaaauuggucaaaaccgcaauguggcauuacaggauuugcaccuuucucuaaggacaauucgauuaggcuuuccgcugguggggacaucugggugacaagagaaccuuaugugucaugcgauccugacaaguguuaucaauuugcccuuggacagggaacaacacuaaacaacgugcauucaaauaacacaguacgugauaggaccccuuaucgaacucuauugaugaaugaguuggguguuccuuuucaucuggggaccaagcaagugugcauagcaugguccagcucaaguugucacgauggaaaagcauggcugcauguuuguauaacgggggaugauaaaaaugcaacugcuagcuucauuuacaaugggaggcuuguagauaguguuguuucaugguccaaagaaauucucaggacccaggagucagaaugcguuuguaucaauggaacuuguacaguaguaaugacugauggaagugcuucaggaaaagcugauacuaaaauacuauucauugaggaggggaaaaucguucauacuagcacauugucaggaagugcucagcaugucgaagagugcucuugcuauccucgauauccuggugucagaugugucugcagagacaacuggaaaggauccaaucggcccaucguagauauaaacauaaaggaucauagcauuguuuccaguuauguguguucaggacuuguuggagacacacccagaaaaaacgacagcuccagcaguagccauuguuuggauccuaacaaugaagaagguggucauggagugaaaggcugggccuuugaugauggaaaugacguguggaugggaagaacaaucaacgagacgucacgcuuaggguaugaaaccuucaaagucauugaaggcugguccaacccuaaguccaaauugcagauaaauaggcaagucauaguugacagaggugauagguccgguuauucugguguuuucucugucgaaggcaaaagcugcaucaaucggugcuuuuauguggaguugauuaggggaagaaaagaggaaacugaagucuuguggaccucaaacaguauuguuguguuuuguggcaccucagguacauauggaacaggcucauggccugauggggcggaccucaaucucaugccuauauaa

SEQ ID NO: 57662 - RNA, 1410 nt, Artificial Sequence; identical to SEQ ID NO: 57650
  derived and/or modified CDS sequence (wt) from neuraminidase__InfluenzaA__AIL93897

SEQ ID NO: 57663 - RNA, 1410 nt, Artificial Sequence
  derived and/or modified CDS sequence (wt) from neuraminidase__InfluenzaA__AIL93909
augaauccaaaccaaaagauaauaaccauugguucggucuguaugacaauuggaauggcuaacuuaauauuacaaauuggaaacauaaucucaauauggauuagccacucaauucaacuugggaaucaaagucagauugaaacaugcaaucaaagcgucauuacuuaugaaaacaacacuuggguaaaucagacauauguuaacaucagcaacaccaacuuugcugcuggacagucagugguuuccgugaaauuagcgggcaauuccucucucugcccuguuaguggaugggcuauauacaguaaagacaacaguauaagaaucgguuccaagggggauguguuugucauaagggaaccauucauaucaugcucccccuuggaaugcagaaccuucuucuugacucaaggggccuugcuaaaugacaaacauuccaauggaaccauuaaagacaggagcccauaccgaacccuaaugagcugcccuauuggugaaguucccucuccauacaacucaagauuugagucggucgcuuggucagcaagugcuugucaugauggcaucaauuggcuaacaauuggaauuucuggcccagacaguggggcaguggcuguauuaaaguacaauggcauaauaacagacacuaucaagaguuggagaaacaauauauugagaacacaagagucugaauguguauguguaaaugguucuugcuuuaccauaaugaccgauggaccaagugauggacaggccucauacaagaucuucagaauagaaaagggaaagauagucaaaucagucgaaaugaaugccccuaauuaucacuaugaggaaugcuccuguuauccugauucuagugaaaucacaugugugugcagggauaacuggcauggcucgaaucgaccgugggugucuuucaaccagaaucuggaauaucagauaggauacauaugcagugggauuuucggagacaauccacgcccuaaugauaagacaggcaguugugguccaguaucgucuaauggagcaaauggaguaaaaggauuuucauucaaauacggcaaugguguuuggauagggagaacuaaaagcauuaguucaagaaaagguuuugagaugauuugggauccaaauggauggacugggacagacaauaacuucucaauaaagcaagauaucguaggaauaaaugaguggucaggauauagcgggaguuuuguucagcauccagaacuaacagggcuggauuguauaagaccuugcuucuggguugaacuaaucagagggcgaccuaaagagaacacaaucuggacuagcgggagcagcauauccuuuugugguguaaacagugacacuguggguuggucuuggccagacggugcugaguugccauuuaccauugacaaguaa

SEQ ID NO: 57664 - RNA, 1410 nt, Artificial Sequence; identical to SEQ ID NO: 57650
  derived and/or modified CDS sequence (wt) from neuraminidase__InfluenzaA__AIL93920

SEQ ID NO: 57665 - RNA, 1410 nt, Artificial Sequence
  derived and/or modified CDS sequence (wt) from neuraminidase__InfluenzaA__AIL93943
augaauccaaaccaaaagauaauaaccauugguucggucuguaugacaauuggaauggcuaacuuaauauuacaaauuggaaacauaaucucaauauggguuagccacucaauucaacuugggaaucaaagucagauugaaacaugcaaucaaagcgucauuacuuaugaaaacaacacuuggguaaaucagacauauguuaacaucagcaacaccaacuuugcugcuggacagucagugguuuccgugaaauuagcgggcaauuccucucucugcccuguuaguggaugggcuauauacaguaaagacaacaguguaagaaucgguuccaagggggauguguuugucauaagggaaccauucauaucaugcucccccucggaaugcagaaccuucuucuugacucaaggggccuugcuaaaugacaaacauuccaauggaaccauuaaagacaggagcccauaucgaacccuaaugagcuguccuauuggugaaguucccucuccauacaacucaagauuugagucagucgcuuggucagcaagugcuugucaugauggcaucaauuggcuaacaauuggaauuucuggcccagacaguggggcaguggcuguguuaaaguacaauggcauaauaacagacacuaucaagaguuggagaaacaauauauugagaacacaagagucugaaugugcauguguaaaugguucuugcuuuaccauaaugaccgauggaccaagugauggacaggccucauacaagaucuucagaauagaaaagggaaagauagucaaaucagucgaaaugaaugccccuaauuaucacuaugaggaaugcuccuguuauccugauucuagugaaaucacaugugugugcagggauaacuggcauggcucgaaucgaccgugggugucuuucaaccagaaucuagaauaucagauaggauacauaugcagugggguuuucggagacaauccacgcccuaaugauaagacaggcaguugugguccaguaucgucuaauggagcaaauggaguaaaaggauuuucauucaaauacggcaaugguguuuggauagggagaacuaaaagcauuaguucaagaaaagguuuugagaugauuugggacccgaauggguggacugggacagacaauaacuucucaauaaagcaagauaucguaggaauaaaagaguggucaggauauagcgggaguuuuguucagcauccagaacuaacagggcuggauuguauaagaccuugcuucuggguugaacuaaucagagggcgacccgaagagaacacaaucuggacuagcgggagcagcauauccuuuugugguguaaacagugacacuguggguuggucuuggccagacggugcugaguugccauuuaccauugacaaguaa

SEQ ID NO: 57666 - RNA, 1410 nt, Artificial Sequence
  derived and/or modified CDS sequence (wt) from neuraminidase__InfluenzaA__AIL93954
augaauccaaaucaaaagauaauaacgauuggcucuguuucucucaccauuuccacaauaugcuucuucaugcaaauugccaucuugauaacuacuguaacauugcauuucaagcaauaugaauucaacucccccccaaacaaccaagugaugcugugugaaccaacaauaauagaaagaaacauaacagagauaguguaucugaccaacaccaccauagagaaggaaauaugccccaaaccagcagaauacagaaauuggucaaaaccgcaauguggcauuacaggauuugcaccuuucucuaaggacaauucgauuaggcuuuccgcugguggggacaucugggugacaagagaaccuuaugugucaugcgauccugacaaguguuaucaauuugcccuuggacagggaacaacacuaaacaacgugcauucaaauaacacaguacgugauaggaccccuuaucggacucuauugaugaaugaguuggguguuccuuuucaucuggggaccaagcaagugugcauagcaugguccagcucaaguugucacgauggaaaagcauggcugcauguuuguauaacgggggaugauaaaaaugcaacugcuagcuucauuuacaaugggaggcuuguagauaguguuguuucaugguccaaagaaauucucaggacccaggagucagaaugcguuuguaucaauggaacuuguacaguaguaaugacugauggaagugcuucaggaaaagcugauacuaaaauacuauucauugaggaggggaaaauuguucauacuagcacauugucaggaagugcucagcaugucgaagagugcucuugcuauccucgauauccuggugucagaugugucugcagagacaacuggaaaggcuccaaucggcccaucguagauauaaacauaaaggaucauagcauuguuuccaguuauguguguucaggacuuguuggagacacacccagaaaaaacgacagcuccagcaguagccauuguuuggauccuaacaaugaagaagguggucauggagugaaaggcugggccuuugaugauggaaaugacguguggaugggaagaacaaucaacgagacgucacgcuuaggguaugaaaccuucaaagucauugaaggcugguccaacccuaaguccaaauugcagauaaauaagcaagucauaguugacagaggugauagguccgguuauucugguauuuucucugucgaaggcaaaagcugcaucaaucggugcuuuuauguggaguugauuaggggaagaaaagaggaaacugaagucuuguggaccucaaacaguauuguuguguuuuguggcaccucagguacauauggaacaggcucauggccugauggggcggaccucaaucucaugccuauauaa

SEQ ID NO: 57667 - RNA, 1410 nt, Artificial Sequence; identical to SEQ ID NO: 57650
  derived and/or modified CDS sequence (wt) from neuraminidase__InfluenzaA__AIL93966

SEQ ID NO: 57668 - RNA, 1410 nt, Artificial Sequence
  derived and/or modified CDS sequence (wt) from neuraminidase__InfluenzaA__AIL93978
augaauccaaaucaaaagauaauaacgauuggcucuguuucucucaccauuuccacaauaugccucuucaugcaaauugccaucuugauaacuacuguaacauugcauuucaagcaauaugaauucaacucccccccaaacaaccaagugaugcuaugugaaccaacaauaauagaaagaaacauaacagagauaguguauuugaccaacaccaccauagagaaggaaauaugccccaaaccagcagaauacagaaauuggucaaaaccgcaauguggcauuacaggauuugcaccuuucucuaaggacaauucgauuaggcuuuccgcugguggggacaucugggugacaagagaaccuuaugugucaugcgauccugacaaguguuaucaauuugcccuuggacagggaacaacacuaaacaacgugcauucaaauaacacaguacgugauaggaccccuuaucggacucuauugaugaaugaguuggguguuccuuuucaucuggggaccaagcaagugugcauagcaugguccagcucaaguugucacgauggaaaagcauggcugcauguuuguauaacgggggaugauaaaaaugcaacugcuagcuucauuuacaaugggaggcuuguagauaguguuguuucaugguccaaagaaauucucaggacccaggagucagaaugcguuuguaucaauggaacuuguacaguaguaaugacugauggaagugcuucaggaaaagcugauacuaaaauacuauucauugaggaggggaaaaucguucauacuagcacauugucaggaagugcucagcaugucgaagagugcucuugcuauccucgauauccuggugucagaugugucugcagagacaacuggaaaggcuccaaucggcccaucguagauauaaacauaaaggaucauagcauuguuuccaguuauguguguucaggacuuguuggagacacacccagaaaaaacgacagcuccagcaguagccauuguuuggauccuaacaaugaagaagguggucauggagugaaaggcugggccuuugaugauggaaaugacguauggaugggaagaacaaucaacgagacgucacgcuuaggguaugaaaccuucaaagucauugaaggcugguccaacccuaaguccaaauugcagauaaauaggcaagucauaguugacagaggugauagguccgguuauucugguauuuuuucuguugaaggcaaaagcugcaucaaucggugcuuuuauguggaguugauuaggggaagaaaagaggaaacugaagucuuguggaccucaaacaguauuguuguguuuuguggcaccucagguacauauggaacaggcucauggccugauggggcggaccucaaucucaugccuauauaa

SEQ ID NO: 57669 - RNA, 1410 nt, Artificial Sequence
  derived and/or modified CDS sequence (wt) from neuraminidase__InfluenzaA__AIL93990
augaauccaaaccaaaagauaauaaccauugguucggucuguaugacaauuggaauggcuaacuuaauauuacaaauuggaaacauaaucucaauauggauuagccacucaauucaacuugggaaucaaagucagauugaagcaugcaaucaaagcgucaucacuuaugaaaacaacacuuggguaaaucagacauauguuaacaucagcaacaccaacuuugcuacuggacagucagugguuuccguuaaauuagcgggcaauuccucucucuguccuguuaguggaugggcuauauacaguaaagacaacaguguaagaaucgguuccaagggggacguguuugucauaagggaaccauucauaucaugcucccccuuggaaugcagaaccuucuucuugacucaaggggccuugcuaaaugacaaacauuccaauggaaccauuaaagacaggagcccauaucgaacccuaaugagcuguccuauuggugaaguucccucuccauacaacucaagauuugagucagucgcuuggucagcaagugcuugucaugauggcaucaauuggcuaacaauuggaauuucuggcccagacaguggggcaguggcuguguuaaaguacaauggcauaauaacagacacuaucaagaguuggaaaaauaauauauugagaacacaagagucugaaugugcauguguaaaugguucuugcuuuaccauaaugaccgauggaccaagugacggacaggccucauacaagaucuuccgaauagaaaagggaaagauagucaaaucagucgaaaugaaugccccuaauuaucacuaugaggaaugcuccuguuauccugauucuagugaaaucacaugugugugcagggauaacuggcauggcucgaaucgaccgugggugucuuucaaccagaaucuggaauaucagauaggauacauaugcagugggguuuucggagacaauccacgcccuaaugauaagacaggcaguugugguccaguaucgucuaauggagcaaauggaguaaaaggauuuucauucaaauacggcaaugguguuuggauagggagaacuaaaagcauuaguucaagaaaagguuuugagaugauuugggauccaaauggauggacugggacagacaauaacuucucaauaaagcaagauaucguaggaauaaaugaguggucaggauauagcgggaguuuuguucagcauccagaacuaacagggcuggauuguauaagaccuugcuucuggguugaacuaaucagagggcgacccaaagagaacacaaucuggacuagcgggagcagcauauccuuuugugguguaaacagugacacuguggguuggucuuggccagacggugcugaguugccauuuaccauugacaaguaa

SEQ ID NO: 57670 - RNA, 1410 nt, Artificial Sequence; identical to SEQ ID NO: 57646
  derived and/or modified CDS sequence (wt) from neuraminidase__InfluenzaA__AIL94001

SEQ ID NO: 57671 - RNA, 1410 nt, Artificial Sequence; identical to SEQ ID NO: 57649
  derived and/or modified CDS sequence (wt) from neuraminidase__InfluenzaA__AIL94013

SEQ ID NO: 57672 - RNA, 1410 nt, Artificial Sequence; identical to SEQ ID NO: 57649
  derived and/or modified CDS sequence (wt) from neuraminidase__InfluenzaA__AIL94025

SEQ ID NO: 57673 - RNA, 1410 nt, Artificial Sequence; identical to SEQ ID NO: 57650
  derived and/or modified CDS sequence (wt) from neuraminidase__InfluenzaA__AIL94037

SEQ ID NO: 57674 - RNA, 1410 nt, Artificial Sequence; identical to SEQ ID NO: 57650
  derived and/or modified CDS sequence (wt) from neuraminidase__InfluenzaA__AIL94049

SEQ ID NO: 57675 - RNA, 1410 nt, Artificial Sequence; identical to SEQ ID NO: 57658
  derived and/or modified CDS sequence (wt) from neuraminidase__InfluenzaA__AIL94061

SEQ ID NO: 57676 - RNA, 1410 nt, Artificial Sequence
  derived and/or modified CDS sequence (wt) from neuraminidase__InfluenzaA__AIL94072
augaauccaaaccaaaagauaauaaccauugguucggucuguaugacaauuggaauggcuaacuuaauauuacaaauuggaaacauaaucucaauauggauuagccacucaauucaacuugggaaucaaagucagauugaagcaugcaaucaaagcgucauuacuuaugaaaacaacacuuggguaaaucagacauauguuaacaucagcaacaccaacuuugcuacuggacagucagugguuuccgugaaauuagcgggcaauuccucucucuguccuguuaguggaugggcuauauacaguaaagacaacaguguaagaaucgguuccaagggggacguguuugucauaagggaaccauucauaucaugcucccccuuggaaugcagaaccuucuucuugacucaaggggccuugcuaaaugacaaacauuccaauggaaccauuaaagacaggagcccauaucgaacccuaaugagcuguccuauuggugaaguucccucuccauacaacucaagauuugagucagucgcuuggucagcaagugcuugucaugauggcaucaauuggcuaacaauuggaauuucuggcccagacaguggggcaguggcuguguuaaaguacaauggcauaauaacagacacuaucaagaguuggaaaaauaauauauugagaacacaagagucugaaugugcauguguaaaugguucuugcuuuaccauaaugaccgauggaccaagugacggacaggccucauacaagaucuuccgaauagaaaagggaaagauagucaaaucagucgaaaugaaugccccuaauuaucacuaugaggaaugcuccuguuauccugauucuagugaaaucacaugugugugcagggauaacuggcauggcucgaaucgaccgugggugucuuucaaccagaaucuggaauaucagauaggauacauaugcagugggguuuucggagacaauccacgcccuaaugauaagacaggcaguugugguccaguauugucuaauggagcaaauggaguaaaaggauuuucauucaaauacggcaaugguguuuggauagggagaacuaaaagcauuaguucaagaaaagguuuugagaugauuugggauccaaauggauggacugggacagacaauaacuucucaauaaagcaagauaucguaggaauaaaugaguggucaggauauagcgggaguuuuguucagcauccagaacuaacaggacuggauuguauaagaccuugcuucuggauugaacuaaucagagggcgacccaaagagaacacaaucuggacuagcgggagcagcauauccuuuugugguguaaacagugacacuguggguuggucuuggccagacggugcugaguugccauuuaccauugacaaguaa

SEQ ID NO: 57677 - RNA, 1410 nt, Artificial Sequence
  derived and/or modified CDS sequence (wt) from neuraminidase__InfluenzaA__AIL94083
augaauccaaaccaaaagauaauaaccauugguucggucuguaugacaauuggaauggcuaacuuaauauuacaaauuggaaacauaaucucaauauggauuagccacucaauucaacuugggaaucaaagucagauugaagcaugcaaucaaagcgucauuacuuaugaaaacaacacuuggguaaaucagacauauguuaacaucagcaacaccaacuuugcuacuggacagucagugguuuccgugaaauuagcgggcaauuccucucucugcccuguuaguggaugggcuauauacaguaaagacaacaguguaagaaucgguuccaagggggauguguuugucauaagggaaccauucauaucaugcucccccuuggaaugcagaaccuucuucuugacucaaggggccuugcuaaaugacaaacauuccaauggaaccauuaaagacaggagcccauaucgaacccuaaugagcuguccuauuggugaaguucccucuccauacaacucaagauuugagucagucgcuuggucagcaagugcuugucaugauggcaucaauuggcuaacaauuggaauuucuggcccagacaguggggcaguggcuguguuaaaguacaauggcauaauaacagacacuaucaagaguuggaaaaauaauauauugagaacacaagagucugaaugugcauguguaaaugguucuugcuuuaccauaaugaccgauggaccaagugacggacaggccucauacaagaucuuccgaauagaaaagggaaagauagucaaaucagucgaaaugaaugccccuaauuaucacuaugaggaaugcuccuguuauccugauucuagugaaaucacaugugugugcagggauaacuggcauggcucgaaucgaccgugggugucuuucaaccagaaucuggaauaucagauaggauacauaugcagugggguuuucggagacaauccacgcccuaaugauaagacaggcaguugugguccaguaucgucuaauggagcaaauggaguaaaaggauuuucauucaaauacggcaaugguguuuggauagggagaacuaaaagcauuaguucaagaaaagguuuugagaugauuugggauccaaauggauggacugggacagacaauaacuucucaauaaagcaagauaucguaggaauaaaugaguggucaggauauagcgggaguuuuguucagcauccagaacuaacagggcuggauuguauaagaccuugcuucuggguugaacuaaucagagggcgacccaaagagaacacaaucuggacuagcgggagcagcauauccuuuugugguguaaacagugacacuguggguuggucuuggccagacggugcugaguugccauuuaccauugacaaguaa

SEQ ID NO: 57678 - RNA, 1410 nt, Artificial Sequence; identical to SEQ ID NO: 57649
  derived and/or modified CDS sequence (wt) from neuraminidase__InfluenzaA__AIL94238

SEQ ID NO: 57679 - RNA, 1410 nt, Artificial Sequence
  derived and/or modified CDS sequence (wt) from neuraminidase__InfluenzaA__AIL94250
augaauccaaaccaaaagauaauaaccauugguucggucuguaugacaauuggaauggcuaacuuaauauuacaaauuggaaacauaaucucaauauggauuagccacucaauucaacuugggaaucaaagucagauugaagcaugcaaucaaagcgucauuacuuaugaaaacaacacuuggguaaaucagacauauguuaacaucagcaacaccaauuuugcugcuggacagucagugguuuccgugaaauuagcgggcaauuccucucucugcccuguuaguggaugggcuauauacaguaaagacaacaguguaagaaucgguuccaagggggauguguuugucauaagggaaccauucauaucaugcucccccuuggaaugcagaaccuucuucuugacucaaggggccuugcuaaaugacaaacauuccaauggaaccauuaaagacaggagcccauaucgaacccuaaugagcuguccuauuggugaaguucccucuccauacaacucaagauuugagucagucgcuuggucagcaagugcuugucaugauggcaucaauuggcuaacaauuggaauuucuggcccagacaguggggcaguggcuguguuaaaguacaauggcauaauaacagacacuaucaagaguuggaaaaauaauauauugagaacacaagagucugaaugugcauguguaaaugguucuugcuuuaccauaaugaccgauggaccaaaugacggacaggccucauacaagaucuuccgaauagaaaagggaaagauagucaaaucagucgaaaugaaugccccuaauuaucacuaugaggaaugcuccuguuauccugauucuagugaaaucacaugugugugcagggauaacuggcauggcucgaaucgaccgugggugucuuucaaccagaaucuggaauaucagauaggauauauaugcagugggguuuucggagacaauccacgcccuaaugauaagacaggcaguugugguccaguaucgucuaauggagcaaauggaguaaaaggauuuucauucaaauacggcaaugguguuuggauagggagaacuaaaagcauuaguucaagaaaagguuuugagaugauuugggauccaaauggauggacugggacagacaauaacuucucaauaaagcaagauaucguaggaauaaaugaguggucaggauauagcgggaguuuuguucagcauccagaacuaacagggcuggauuguauaagaccuugcuucuggguugaacuaaucagagggcgacccaaagagaacacaaucuggacuagcgggagcagcauauccuuuugugguguaaacagugacacuguggguuggucuuggccagacggugcugaguugccauuuaccauugacaaguaa

SEQ ID NO: 57680 - RNA, 1410 nt, Artificial Sequence; identical to SEQ ID NO: 57646
  derived and/or modified CDS sequence (wt) from neuraminidase__InfluenzaA__AIL94261

SEQ ID NO: 57681 - RNA, 1410 nt, Artificial Sequence; identical to SEQ ID NO: 57646
  derived and/or modified CDS sequence (wt) from neuraminidase__InfluenzaA__AIL94273

SEQ ID NO: 57682 - RNA, 1410 nt, Artificial Sequence; identical to SEQ ID NO: 57646
  derived and/or modified CDS sequence (wt) from neuraminidase__InfluenzaA__AIL94285

SEQ ID NO: 57683 - RNA, 1410 nt, Artificial Sequence
  derived and/or modified CDS sequence (wt) from neuraminidase__InfluenzaA__AIL94297
augaauccaaaucaaaagauaauaacgauuggcucuguuucucucaccauuuccacaauaugcuucuucaugcaaauugccaucuugauaacuacuguaacauugcauuucaagcaauaugaauucaacucccccccaaacaaccaagugaugcugugugaaccaacaauaauagaaagaaacauaacagagauaguguaucugaccaacaccaccauagagaaggaaauaugccccaaaccagcagaauacagaaauuggucaaaaccgcaauguggcauuacaggauuugcaccuuucucuaaggacaauucgauuaggcuuuccgcugguggggacaucugggugacaagagaaccuuaugugucaugcgauccugacaaguguuaucaauuugcccuuggacagggaacaacacuaaacaacgugcauucaaauaacacaguacgugauaggaccccuuaucggacucuauugaugaaugaguuggguguuccuuuucaucuggggaccaagcaagugugcauagcaugguccagcucaaguugucacgauggaaaagcauggcugcauguuuguauaacgggggaugauaaaaaugcaacugcuagcuucauuuacaaugggaggcuuguagauaguguuguuucaugguccaaagaaauucucaggacccaggagucagaaugcguuuguaucaauggaacuuguacaguaguaaugacugauggaagugcuucaggaaaagcugauacuaaaauacuauucauugaggaggggaaaaucguucauacuagaacauugucaggaagugcucagcaugucgaagagugcucuugcuauccucgauauccuggugucagaugugucugcagagacaacuggaaaggcuccaaucggcccaucguagauauaaacauaaaggaucauagcauuguuuccaguuauguguguucaggacuuguuggagacacacccagaaaaaacgacagcuccagcaguagccauuguuuggauccuaacaaugaagaagguggucauggagugaaaggcugggccuuugaugauggaaaugacguguggaugggaagaacaaucaacgagacgucacgcuuaggguaugaaaccuucaaagucauugaaggcugguccaacccuaaguccaaauugcagauaaauaagcaagucauaguugacagaggugauagguccgguuauucugguauuuucucugucgaaggcaaaagcugcaucaaucggugcuuuuauguggaguugauuaggggaagaaaagaggaaacugaagucuuguggaccucaaacaguauuguuguguuuuguggcaccucagguacauauggaacaggcucauggccugauggggcggaccucaaucucaugccuauauaa

SEQ ID NO: 57684 - RNA, 1410 nt, Artificial Sequence
  derived and/or modified CDS sequence (wt) from neuraminidase__InfluenzaA__AIL94309
augaauccaaaucaaaagauaauaacgauuggcucuguuucucucaccauuuccacaauaugcuucuucaugcaaauugccaucuugauaacuacuguaacauugcauuucaagcaauaugaauucaacucccccccaaacaaccaagugaugcugugugaaccaacaauaauagaaagaaacauaacagagauaguguaucugaccaacaccaccauagagaaggaaauaugccccaaaccagcagaauacagaaauuggucaaaaccgcaauguggcauuacaggauuugcaccuuucucuaaggacaauucgauuaggcuuuccgcugguggggacaucugggugacaagagaaccuuaugugucaugcgauccugacaaguguuaucaauuugcccuuggacagggaacaacacuaaacaacgugcauucaaauaacacaguacgugauaggaccccuuaucggacucuauugaugaaugaguuggguguuccuuuucaucuggggaccaagcaagugugcauagcaugguccagcucaaguugucacgauggaaaagcauggcugcauguuuguauaacgggggaugauaaaaaugcaacugcuagcuucauuuacaaugggaggcuuguagauaguguuguuucaugguccaaagaaauucucaggacccaggagucagaaugcguuuguaucaauggaacuuguacaguaguaaugacugauggaagugcuucaggaaaagcugauacuaaaauacuauucauugaggaggggaaaaucguucauacuagcacauugucaggaagugcucagcaugucgaagagugcucuugcuauccucgauauccuggugucagaugugucugcagagacaacuggaaaggcuccaaucggcccaucguagauauaaacauaaaggaucauagcauuguuuccaguuauguguguucaggacuuguuggagacacacccagaaaaaacgacagcuccagcaguagccauuguuuggauccuaacaaugaagaagguggucauggagugaaaggcugggccuuugaugauggaaaugacguguggaugggaagaacaaucaacgagacgucacgcuuaggguaugaaaccuucaaagucauugaaggcugguccaacccuaaguccaaauugcagauaaauaagcaagucauaguugacagaggugauagguccgguuauucugguauuuucucugucgaaggcaaaagcugcaucaaucggugcuuuuauguggaguugauuaggggaagaaaagaggaaacugaagucuuguggaccucaaacaguauuguuguguuuugugggaccucagguacauauggaacaggcucauggccugauggggcggaccucaaucucaugccuauauaa

SEQ ID NO: 57685 - RNA, 1410 nt, Artificial Sequence; identical to SEQ ID NO: 57668
  derived and/or modified CDS sequence (wt) from neuraminidase__InfluenzaA__AIL94321

SEQ ID NO: 57686 - RNA, 1410 nt, Artificial Sequence
  derived and/or modified CDS sequence (wt) from neuraminidase__InfluenzaA__AIL94368
augaauccaaaucaaaagauaauaacgauuggcucuguuucucucaccauuuccacaauaugcuucuucaugcaaauugccaucuugauaacuacuguaacauugcauuucaagcaauaugaauucaacucccccccaaacaaccaagugaugcugugugaaccaacaauaauagaaagaaacauaacagagauaguguaucugaccaacaccaccauagagaaggaaauaugccccaaaccagcagaauacagaaauuggucaaaaccgcaauguggcauuacaggauuugcaccuuucucuaaggacaauucgauuaggcuuuccgcugguggggacaucugggugacaagagaaccuuaugugucaugcgauccugacaaguguuaucaauuugcccuuggacagggaacaacacuaaacaacgugcauucaaauaacacaguacgugauaggaccccuuaucggacucuauugaugaaugaguuggguguuccuuuucaucuggggaccaagcaagugugcauagcaugguccagcucaaguugucacgauggaaaagcauggcugcauguuuguauaacgggggaugauaaaaaugcaacugcuagcuucauuuacaaugggaggcuuguagauaguguuguuucaugguccaaagaaauucucaggacccaggagucagaaugcguuuguaucaauggaacuuguacaguaguaaugacugauggaagugcuucaggaaaagcugauacuaaaauacuauucauugaggaggggaaaaucguucauacuagcacauugucaggaagugcucagcaugucgaagagugcucuugcuauccucgauauccuggugucagaugugucugcagagacaacuggaaaggauccaaucggcccaucguagauauaaacauaaaggaucauagcauuguuuccaguuauguguguucaggacuuguuggagacacacccagaaaaaacgacagcuccagcaguagccauuguuuggauccuaacaaugaagaagguggucauggagugaaaggcugggccuuugaugauggaaaugacguguggaugggaagaacaaucaacgagacgucacgcuuaggguaugaaaccuucaaagucauugaaggcugguccaacccuaaguccaaauugcagauaaauaggcaagucauaguugacagaggugauagguccgguuauucugguauuuucucugucgaaggcaaaagcugcaucaaucggugcuuuuauguggaguugauuaggggaagaaaagaggaaacugaagucuuguggaccucaaacaguauuguuguguuuuguggcacuucagguacauauggaacaggcucauggccugauggggcggaccucaaucucaugccuauauaa

SEQ ID NO: 57687 - RNA, 1410 nt, Artificial Sequence
  derived and/or modified CDS sequence (wt) from neuraminidase__InfluenzaA__AIL94380
augaauccaaaucaaaagauaauaacgauuggcucuguuucucucaccauuuccacaauaugcuucuucaugcaaauugccaucuugauaacuacuguaacauugcauuucaagcaauaugaauucaacucccccccaaacaaccaagugaugcugugugaaccaacaauaauagaaagaaacauaacagagauaguguaucugaccaacaccaccauagagaaggaaauaugccccaaaccagcagaauacagaaauuggucaaaaccgcaauguggcauuacaggauuugcaccuuucucuaaggacaauucgauuaggcuuuccgcugguggggacaucugggugacaagagaaccuuaugugucaugcgauccugacaaguguuaucaauuugcccuuggacagggaacaacacuaaacaacgugcauucaaauaacacaguacgugauaggaccccuuaucggacucuauugaugaaugaguuggguguuccuuuucaucuggggaccaagcaagugugcauagcaugguccagcucaaguugucacgauggaaaagcauggcugcauguuuguauaacgggggaugauaaaaaugcaacugcuagcuucauuuacaaugggaggcuuguagauaguguuguuucaugguccaaagaaauucucaggacccaggagucagaaugcguuuguaucaauggaacuuguacaguaguaaugacugauggaagugcuucaggaaaagcugauacuaaaauacuauucauugaggaggggaaaaucguucauacuagcacauugucaggaagugcucagcaugucgaagagugcucuugcuauccucgauauccuggugucagaugugucugcagagacaacuggaaaggcuccaaucggcccgucguagauauaaacauaaaggaucauagcauuguuuccaguuauguguguucaggacuuguuggagacacacccagaaaaaacgacagcuccagcaguagccauuguuuggauccuaacaaugaagaagguggucauggagugaaaggcugggccuuugaugauggaaaugacguguggaugggaagaacaaucaacgagacgucacgcuuaggguaugaaaccuucaaagucauugaaggcugguccaacccuaaguccaaauugcagauaaauaagcaagucauaguugacagaggugauagguccgguuauucugguauuuucucugucgaaggcaaaagcugcaucaaucggugcuuuuauguggaguugauuaggggaagaaaagaggaaacugaagucuuguggaccucaaacaguauuguuguguuuuguggcaccucagguacauauggaacaggcucauggccugauggggcggaccucaaucucaugccuauauaa

SEQ ID NO: 57688 - RNA, 1410 nt, Artificial Sequence
  derived and/or modified CDS sequence (wt) from neuraminidase__InfluenzaA__AIL94392
augaauccaaaccaaaagauaauaaccauugguucggucuguaugacaauuggaauggcuaacuuaauauuacaaauuggaaacauaaucucaauauggauuagccacucaauucaacuugggaaucaaagucagauugaagcaugcaaucaaagcgucauuacuuaugaaaacaacacuuggguaaaucagacauauguuaacaucagcaacaccaauuuugcugcuggacagucagugguuuccgugaaauuagcgggcaauuccucucucugcccuguuaguggaugggcuauauacaguaaagacaacaguguaagaaucgguuccaagggggauguguuugucauaagggaaccauucauaucaugcucccccuuggaaugcagaaccuucuucuugacucaaggggccuugcuaaaugacaaacauuccaauggaaccauuaaagacaggagcccauaucgaacccuaaugagcuguccuauuggugaaguucccucuccauacaacucaagauuugagucagucgcuuggucagcaagugcuugucaugauggcaucaauuggcuaacaauuggaauuucuggcccagacaguggggcaguggcuguguuaaaguacaauggcauaauaacagacacuaucaagaguuggaaaaauaauauauugagaacacaagagucugaaugugcauguguaaaugguucuugcuuuaccauaaugaccgauggaccaagugacggacaggccucauacaagaucuuccgaauagaaaagggaaagauagucaaaucagucgaaaugaaugccccuaauuaucacuaugaggaaugcuccuguuauccugauucuagugaaaucacaugugugugcagggauaacuggcauggcucgaaucgaccgugggugucuuucaaccagaaucuggaauaucagauaggauacauaugcagugggguuuucggagacaauccacgcccuaaugauaagacaggcaguugugguccaguaucgucuaauggagcaaauggaguaaaaggauuuucauucaaauacggcaaugguguuuggauagggagaacuaaaagcauuaguucaagaaaagguuuugagaugauuugggauccaaauggauggacugggacagacaauaacuucucaauaaagcaagauaucguaggaauaaaugaguggucaggauauagcgggaguuuuguucagcauccagaacuaacagggcuggauuguauaagaccuugcuucuggguugaacuaaucagagggcgacccaaagagaacacaaucuggacuagcgggagcagcauauccuuuugugguguaaacagugacacuguggguuggucuuggccagacggugcugaguugccauuuaccauugacaaguaa

SEQ ID NO: 57689 - RNA, 1410 nt, Artificial Sequence
  derived and/or modified CDS sequence (wt) from neuraminidase__InfluenzaA__AIL94403
augaauccaaaccaaaagauaauaaccauugguucggucuguaugacaauuggaauggcuaacuuaauauuacaaauuggaaacauaaucucaauauggauuagccacucaauucaacuugggaaucaaagucagauugaagcaugcaaucaaagcguuauuacuuaugaaaacaacacuuggguaaaucagacauauguuaacaucagcaacaccaauuuugcugcuggacagucagugguuuccgugaaauuagcgggcaauuccucccucugcccuguuaguggaugggccauauacaguaaagacaacaguguaagaaucgguuccaagggggauguguuugucauaagggaaccauucauaucaugcucccccuuggaaugcagaaccuucuucuugacucaaggggccuugcuaaaugacaaacauuccaauggaaccauuaaagacaggagcccauaucgaacccuaaugagcuguccuauuggugaaguucccucuccauacaacucaagauuugagucagucgcuuggucagcaagugcuugucaugauggcaucaauuggcuaacaauuggaauuucuggcccagacaguggggcaguggcuguguuaaaguacaauggcauaauaacagacacuaucaagaguuggaaaaauaauauauugagaacacaagagucugaaugugcauguguaaaugguucuugcuuuaccauaaugaccgauggaccaagugacggacaggccucauacaagaucuuccgaauagaaaagggaaagauagucaaaucagucgaaaugaaugccccuaauuaucacuaugaggaaugcuccuguuauccugauucuagugaaaucacaugugugugcagggauaacuggcauggcucgaaucgaccgugggugucuuucaaccagaaucuggaauaucagauaggauacauaugcagugggguuuucggagacaauccacgcccuaaugauaagacaggcaguugugauccaguaucgucuaauggagcaaauggaguaaaaggauuuucauucaaauacggcaaugguguuuggauagggagaacuaaaagcauuaguucaagaaaagguuuugagaugauuugggauccaaauggauggacugggacagacaauaacuucucaauaaagcaagauaucguaggaauaaaugaguggucaggauauagcgggaguuuuguucagcauccagaacuaacagggcuggauuguauaagaccuugcuucuggguugaacuaaucagagggcgacccaaagagaacacaaucuggacuagcgggagcagcauauccuuuugugguguaaacagugacacuguggguuggucuuggccagacggugcugaguugccauuuaccauugacaaguaa

SEQ ID NO: 57690 - RNA, 1410 nt, Artificial Sequence; identical to SEQ ID NO: 57646
  derived and/or modified CDS sequence (wt) from neuraminidase__InfluenzaA__AIL94426

SEQ ID NO: 57691 - RNA, 1410 nt, Artificial Sequence
  derived and/or modified CDS sequence (wt) from neuraminidase__InfluenzaA__AIL94438
augaauccaaaccaaaagauaauaaccauugguucggucuguaugacaauuggaauggcuaacuuaauauuacaaauuggaaacauaaucucaauauggauuagccacucaauucaacuugggaaucaaagucagauugaagcaugcaaucaaagcgucauuacuuaugaaaacaacacuuggguaaaucagacauauguuaacaucagcaacaccaacuuugcuacuggacagucagugguuuccgugaaauuagcgggcaauuccucucucugcccuguuaguggaugggcuauauacaguaaagacaacaguguaagaaucgguuccaagggggacguguuugucauaagggaaccauucauaucaugcucccccuuggaaugcagaaccuucuucuugacucaaggggccuugcuaaaugacaaacauuccaauggaaccauuaaagacaggagcccauaucgaacccuaaugagcuguccuauuggugaaguucccucuccauacaacucaagauuugagucugucgcuuggucagcaagugcuugucaugauggcaucaauuggcuaacaauuggaauuucuggcccagacaguggggcaguggcuguuuuaaaguacaauggcauaauaacagacacuaucaagaguuggaaaaauaauauauugagaacacaagagucugaaugugcauguguaaaugguucuugcuuuaccauaaugaccgauggaccaagugacggacaggccucauacaagaucuuccgaauagaaaagggaaagauagucaaaucagucgaaaugaaugccccuaauuaucacuaugaggaaugcuccuguuauccugauucuagugaaaucacaugugugugcagggauaacuggcauggcucgaaucgaccgugggugucuuucaaccagaaucuggaauaucagauaggauacauaugcagugggguuuucggagacaauccacgcccuaaugauaagacaggcaguugugguccaguaucgucuaauggagcaaauggaguaaaaggauuuucauucaaauacggcaaugguguuuggauagggagaacuaaaagcguuaguucaagaaaagguuuugagaugauuugggauccaaauggauggacugggacagacaauaacuucucaauaaagcaagauaucguaggaauaaaugaguggucaggauauagcgggaguuuuguucagcauccagaacuaacagggcuggauuguauaagaccuugcuucuggguugaacuaaucagagggcgacccaaagagaacacaaucuggacuagcgggagcagcauauccuuuugugguguaaacagugacacuguggguuggucuuggccagacggugcugaguugccauuuaccauugacaaguaa

SEQ ID NO: 57692 - RNA, 1410 nt, Artificial Sequence
  derived and/or modified CDS sequence (wt) from neuraminidase__InfluenzaA__AIL94449
augaauccaaaucaaaagauaauaacgauuggcucuguuucucucaccauuuccacaauaugcuucuucaugcaaauugccaucuugauaacuacuguaacauugcauuucaagcaauaugaauucaacucccccccaaacaaccaagugaugcugugugaaccaacaauaauagaaagaaacauaacagagauaguguaucugaccaacaccaccauagagaaggaaauaugccccaaaccagcaaaauacagaaauuggucaaaaccgcaauguggcauuacaggauuugcaccuuucucuaaggacaauucgauuaggcuuuccgcugguggggacaucugggugacaagagaaccuuaugugucaugcgauccugacaaguguuaucaauuugcccuuggacagggaacaacacuaaacaacgugcauucaaauaacacaguacgugauaggaccccuuaucggacucuauugaugaaugaguuggguguuccuuuucaucuggggaccaagcaagugugcauagcaugguccagcucaaguugucacgauggaaaagcauggcugcauguuuguauaacgggggaugauaaaaaugcaacugcuagcuucauuuacaaugggaggcuuguagauaguguuguuucaugguccaaagaaauucucaggacccaggagucagaaugcguuuguaucaauggaacuuguacaguaguaaugacugauggaagugcuucaggaaaagcugauacuaaaauacuauucauugaggaggggaaaaucguucauacuagcacauugucaggaagugcucagcaugucgaagagugcucuugcuauccucgauauccuggugucagaugugucugcagagacaacuggaaaggauccaaucggcccaucguagauauaaacauaaaggaucauagcauuguuuacaguuauguguguucaggacuuguuggagacacacccagaaaaaacgacagcuccagcaguagccauuguuugaauccuaacaaugaagaagguggucauggagugaaaggcugggccuuugaugauggaaaugacguguggaugggaagaacaaucaacgagacgucacgcuuaggguaugaaaccuucaaagucauugaaggcugguccaacccuaaguccaaauugcagauaaauaggcaagucauaguugacagaggugauagguccgguuauucugguauuuucucugucgaaggcaaaagcugcaucaaucggugcuuuuauguggaguugauuaggggaagaaaagaggaaacugaagucuuguggaccucaaacaguauuguuguguuuuguggcaccucagguacauauggaacaggcucauggccugauggggcggaccucaaucucaugccuauauaa

SEQ ID NO: 57693 - RNA, 1410 nt, Artificial Sequence; identical to SEQ ID NO: 57687
  derived and/or modified CDS sequence (wt) from neuraminidase__InfluenzaA__AIL94461

SEQ ID NO: 57694 - RNA, 1410 nt, Artificial Sequence
  derived and/or modified CDS sequence (wt) from neuraminidase__InfluenzaA__AIL94473
augaauccaaaccaaaagauaauaaccauugguucggucuguaugacaauuggaauggcuaacuuaauauuacaaauuggaaacauaaucucaauauggguuggccacucaauucaacuugggaaucaaagucagauugaaacaugcaaucaaagcgucauuacuuaugaaaacaacacuuggguaaaucagacauauguuaacaucagcaacaccaacuuugcugcuggacagucagugguucccgugaaauuagcgggcaauuccucucucugcccuguuaguggaugggcuauauacaguaaagacaacaguguaagaaucgguuccaagggggauguguuugucauaagggaaccauucauaucaugcucccccuuggaaugcagaaccuucuucuugacucaaggggccuugcuaaaugacaaacauuccaauggaaccauuaaagacaggagcccauaucgaacccuaaugagcuguccuauuggugaaguucccucuccauacaacucaagauuugagucagucgcuuggucagcaagugcuugucaugauggcaucaauuggcuaacaauuggaauuucuggcccagacaguggggcaguggcuguguuaaaguacaauggcauaauaacagacacuaucaagaguuggagaaacaauauauugagaacacaagagucugaaugugcauguguaaaugguucuugcuuuaccauaaugaccgauggaccaagugauggacaggccucauacaagaucuucagaauagaaaagggaaagauagucaaaucagucgaaaugaauaccccuaauuaucacuaugaggaaugcuccuguuauccugauucuagugaaaucacaugugugugcagggauaacuggcauggcucgaaucgaccgugggugucuuucaaccagaaucuggaauaucagauaggauacauaugcagugggguuuucggagacaauccacgcccuaaugauaagacaggcaguugugguccaguaucgucuaauggagcaaauggaguaaaaggauuuucauucaaauacggcaaugguguuuggauagggagaacuaaaagcauuaguucaagaaaagguuuugagaugauuugggauccgaauggauggacugggacagacaauaacuucucaauaaagcaagauaucguaggaauaaaagaguggucaggauauagcgggaguuuuguucagcauccugaacuaacagggcuggauuguauaagaccuugcuucuggguugaacuaaucagagggcgacccgaagagaacacaaucuggacuagcgggagcagcauauccuuuugugguguaaacagugacauuguggguuggucuuggccagacggugcugaguugccauuuaccauugacaaguaa

SEQ ID NO: 57695 - RNA, 1410 nt, Artificial Sequence
  derived and/or modified CDS sequence (wt) from neuraminidase__InfluenzaA__AIL94484
augaauccaaaucaaaagauaauaacgauuggcucuguuucucucaccauuuccacaauaugcuucuucaugcaaauugccaucuugauaacuacuguaacauugcauuucaagcaauaugaauucaacucccccccaaacaaccaagugaugcugugugaaccaacaauaauagaaagaaacauaacagagauaguguaucugaccaacaccaccauagagaaggaaauaugccccaaaccagcagaauacagaaauuggucaaaaccgcaauguggcauuacaggauuugcaccuuucucuaaggacaauucgauuaggcuuuccgcugguggggacaucugggugacaagagaaccuuaugugucaugcgacccugacaaguguuaucaauuugcccuuggacagggaacaacacuaaacaacgugcauucaaauaacacagcacgugauaggaccccuuaucggacucuauugaugaaugaguuggguguuccuuuucaucuggggaccaagcaagugugcauagcaugguccagcucaaguugucacgauggaaaagcauggcugcauguuuguauaacgggggaugauaaaaaugcaacugcuagcuucauuuacaaugggaggcuuguagauaguguuguuucaugguccaaagaaauucucaggacccaggagucagaaugcguuuguaucaauggaacuuguacaguaguaaugacugauggaagugcuucaggaaaagcugauacuaaaauacuauucauugaggaggggaaaaucguucauacuagcacauugucaggaagugcucagcaugucgaagagugcucuugcuauccucgauauccuggugucagaugugucugcagagacaacuggaaaggauccaaucggcccaucguagauauaaacauaaaggaucauagcauuguuuccaguuauguguguucaggacuuguuggagacacacccagaaaaaacgacagcuccagcaguagccauuguuuggauccuaacaaugaagaagguggucauggagugaaaggcugggccuuugaugauggaaaugacguguggaugggaagaacaaucaacgagacgucacgcuuaggguaugaaaccuucaaagucauugaaggcugguccaacccuaaguccaaauugcagauaaauaggcaagucauaguugacagaggugauagguccgguuauucugguauuuucucugucgaaggcaaaagcugcaucaaucggugcuuuuauguggaguugauuaggggaagaaaagaggaaacugaagucuuguggaccucaaacaguauuguuguguuuuguggcaccucagguacauauggaacaggcucauggccugauggggcggaccucaaucucaugccuauauaa

SEQ ID NO: 57696 - RNA, 1410 nt, Artificial Sequence
  derived and/or modified CDS sequence (wt) from neuraminidase__InfluenzaA__AIL94507
augaauccaaaccaaaagauaauaaccauugguucggucuguaugacaauuggaauggcuaacuuaauauuacaaauuggaaacauaaucucaauauggauuagccacucaauucaacuugggaaucaaagucagauugaagcaugcaaucaaagcgucauuacuuaugaaaacaacacuuggguaaaucagacauauguuaacaucagcaacaccaacuuugcuacuggacagucagugguuuccgugaaauuagcgggcaauuccucucucuguccuguuaguggaugggcuauauacaguaaagacaacaguguaagaaucgguuccaagggggacguguuugucauaagggaaccauucauaucaugcucccccuuggaaugcagaaccuucuucuugacucaaggggccuugcuaaaugacaaacauuccaauggaaccauuaaagacaggagcccauaucgaacccuaaugagcuguccuauuggugaaguucccucuccauacaacucaagauuugagucagucgcuuggucagcaagugcuugucaugauggcaucaauuggcuaacaauuggaauuucuggcccagacaguggggcaguggcuguguuaaaguacaauggcauaauaacagacacuaucaagaguuggaaaaauaauauauugagaacacaagagucugaaugugcauguguaaaugguucuugcuuuaccauaaugaccgauggaccaagugacggacaggccucauacaagaucuuccgaauagaaaagggaaagauagucaaaucagucgaaaugaaugccccuaauuaucacuaugaggaaugcuccuguuauccugauucuagugaaaucacaugugugugcagggauaacuggcauggcucgaaucgaccgugggugucuuucaaccagaaucuggaauaucagauaggauacauaugcagugggguuuucggagacaauccacgcccuaaugauaagacaggcaguugugguccaguaucgucuaauggagcaaauggaguaaaaggauuuucauucaaauauggcaaugguguuuggauagggagaacuaaaagcauuaguucaagaaaagguuuugagaugauuugggauccaaauggauggacugggacagacaauaacuucucaauaaagcaagauaucguaggaauaaaugaguggucaggauauagcgggaguuuuguucagcauccagaacuaacagggcuggauuguauaagaccuugcuucuggguugaacuaaucagagggcgacccaaagagaacacaaucuggacuagcgggagcagcauauccuuuugugguguaaacagugacacuguggguuggucuuggccagacggugcugaguugccauuuaccauugacaaguaa

SEQ ID NO: 57697 - RNA, 1410 nt, Artificial Sequence
  derived and/or modified CDS sequence (wt) from neuraminidase__InfluenzaA__AIL94518
augaauccaaaucaaaagauaauaacgauuggcucuguuucucucaccauuuccacaauaugcuucuucaugcaaauugccaucuugauaacuacuguaacauugcauuucaagcaauaugaauucaacucccccccaaacaaccaagugaugcugugugaaccaacaauaauagaaagaaacauaacagagauaguguaucugaccaacaccaccauagagaaggaaauaugccccaaaccagcagaauacagaaauuggucaaaaccgcaauguggcauuacaggauuugcaccuuucucuaaggacaauucgauuaggcuuuccgcugguggggacaucugggugacaagagaaccuuaugugucaugcgauccugacaaguguuaucaauuugcccuuggacagggaacaacacuaaacaacgugcauucaaauaacacaguacgugauaggaccccuuaucggacucuauugaugaaugaguuggguguuccuuuucaucuggggaccaagcaagugugcauagcaugguccagcucaaguugucacgauggaaaagcauggcugcauguuuguauaacgggggaugauaaaaaugcaacugcuagcuucauuuacaaugggaggcuuguagauaguguuguuucaugguccaaagaaauucucaggacccaggagucagaaugcguuuguaucaauggaacuuguacaguaguaaugacugauggaagugcuucaggaaaagcugauacuaaaauacuauucauugaggaggggaaaaucguucauacuagcacauugucaggaagugcucagcaugucgaagagugcucuugcuauccucgauauccuggugucagaugugucugcagagacaacuggaaaggauccaaucggcccaucguagauauaaacauaaaggaucauagcauuguuuccaguuauguguguucaggacuuguuggagacacacccagaaaaaacgacagcuccagcaguagccauuguuuggauccuaacaaugaagaagguggucauggagugaaaggcugggccuuugaugauggaaaugacguguggaugggaagaacaaucaacgagacgucacgcuuaggguaugaaaccuucaaagucauugaaggcugguccaacccuaaguccaaauugcagauaaauaagcaagucauaguugacagaggugauagguccgguuauucugguauuuucucugucgaaggcaaaagcugcaucaaucggugcuuuuauguggaguugauuaggggaagaaaagaggaaacugaagucuuguggaccucaaacaguauuguuguguuuuguggcaccucagguacauauggaacaggcucauggccugauggggcggaccucagucucaugccuauauaa

SEQ ID NO: 57698 - RNA, 1410 nt, Artificial Sequence
  derived and/or modified CDS sequence (wt) from neuraminidase__InfluenzaA__AIL94530
augaauccaaaucaaaagauaauaacgauuggcucuguuucucucaccauuuccacaauaugcuucuucaugcaaauugccaucuugauaacuacuguaacauugcauuucaagcaauaugaauucaacucccccccaaacaaccaagugaugcugugugaaccaacaauaauagaaagaaacauaacagagauaguguaucugaccaacaccaccauagagaaggaaauaugccccaaaccagcagaauacagaaauuggucaaaaccgcaauguggcauuacaggauuugcaccuuucucuaaggacaauucgauuaggcuuuccgcugguggggacaucugggugacaagagaaccuuaugugucaugcgauccugacaaguguuaucaauuugcccuuggacagggaacaacacuaaacaacgugcauucaaauaacacaguacgugauaggaccccuuaucggacucuauugaugaaugaguuggguguuccuuuucaucuggggaccaagcaagugugcauagcaugguccagcucaaguugucacgauggaaaagcauggcugcauguuuguauaacgggggaugauaaaaaugcaacugcuagcuucauuuacaaugggaggcuuguagauaguguuguuucaugguccaaagaaauucucaggacccaggagucagaaugcgucuguaucaauggaacuuguacaguaguaaugacugauggaagugcuucaggaaaagcugauacuaaaauacuauucauugaggaggggaaaaucguucauacuagcacauugucaggaagugcucagcaugucgaagagugcucuugcuauccucgauauccuggugucagaugugucugcagagacaacuggaaaggauccaaucggcccaucguagauauaaacauaaaggaucauagcauuguuuccaguuauguguguucaggacuuguuggagacacacccagaaaaaacgacagcuccagcaguagccauuguuugaauccuaacaaugaagaagguggucauggagugaaaggcugggccuuugaugauggaaaugacguguggaugggaagaacaaucaacgagacgucacgcuuaggguaugaaaccuucaaagucauugaaggcugguccaacccuaaguccaaauugcagauaaauaggcaagucauaguugacagaggugauagguccgguuauucugguauuuucucugucgaaggcaaaagcugcaucaaucggugcuuuuauguggaguugauuaggggaagaaaagaggaaacugaagucuuguggaccucaaacaguauuguuguguuuuguggcaccucagguacauauggaacaggcucauggccugauggggcggaccucaaucucaugccuauauaa

SEQ ID NO: 57699 - RNA, 1410 nt, Artificial Sequence
  derived and/or modified CDS sequence (wt) from neuraminidase__InfluenzaA__AIL94542
augaauccaaaccaaaagauaauaaccauugguucggucuguaugacaauuggaauggcuaacuuaauauuacaaauuggaaacauaaucucaauauggauuagccacucaauucaacuugggaaucaaagucagauugaagcaugcaaucaaagcgucauuacuuaugaaaacaacacuuggguaaaucagacauauguuaacaucagcaacaccaauuuugcugcuggacagucagugguuuccgugaaauuagcgggcaauuccucccucugcccuguuaguggaugggccauauacaguaaagacaacaguguaagaaucgguuccaagggggauguguuugucauaagggaaccauucauaucaugcucccccuuggaaugcagaaccuucuucuugacucaaggggccuugcuaaaugacaaacauuccaauggaaccauuaaagacaggagcccauaucgaacccuaaugagcuguccuauuggugaaguucccucuccauacaacucaagauuugagucagucgcuuggucagcaagugcuugucaugauggcaucaauuggcuaacaauuggaauuucuggcccagacaguggggcaguggcuguguuaaaguacaauggcauaauaacagacacuaucaagaguuggaaaaauaauauauugagaacacaagagucugaaugugcauguguaaaugguucuugcuuuaccauaaugaccgauggaccaagugacggacaggccucauacaagaucuuccgaauagaaaagggaaagauagucaaaucagucgaaaugaaugccccuaauuaucacuaugaggaaugcuccuguuauccugauucuagugaaaucacaugugugugcagggauaacuggcauggcucgaaucgaccgugggugucuuucaaccagaaucuggaauaucagauaggauacauaugcagugggguuuucggagacaauccacgcccuaaugauaagacaggcaguugugguccaguaucgucuaauggagcaaauggaguaaaaggauuuucauucaaauacggcaaugguguuuggauagggagaacuaaaagcauuaguucaagaaaagguuuugagaugauuugggauccaaauggauggacugggacagacaauaacuucucaauaaagcaagauaucguaggaauaaaugaguggucaggauauagcgggaguuuuguucagcauccagaacuaacagggcuggauuguauaagaccuugcuucuggguugaacuaaucagagggcgacccaaagagaacacaaucuggacuagcgggagcagcauauccuuuugugguguaaacagugacacuguggguuggucuuggccagacggugcugaguugccauuuaccauugacaaguaa

SEQ ID NO: 57700 - RNA, 1410 nt, Artificial Sequence; identical to SEQ ID NO: 57658
  derived and/or modified CDS sequence (wt) from neuraminidase__InfluenzaA__AIL94553

SEQ ID NO: 57701 - RNA, 1410 nt, Artificial Sequence; identical to SEQ ID NO: 57684
  derived and/or modified CDS sequence (wt) from neuraminidase__InfluenzaA__AIL94564

SEQ ID NO: 57702 - RNA, 1410 nt, Artificial Sequence; identical to SEQ ID NO: 57677
  derived and/or modified CDS sequence (wt) from neuraminidase__InfluenzaA__AIL94576

SEQ ID NO: 57703 - RNA, 1410 nt, Artificial Sequence
  derived and/or modified CDS sequence (wt) from neuraminidase__InfluenzaA__AIL94587
augaauccaaaccaaaagauaauaaccauugguucggucuguaugacaauuggaauggcuaacuuaauauuacaaauuggaaacauaaucucaauauggauuagccacucaauucaacuugggaaucaaagucagauugaagcaugcaaucaaagcgucauuacuuaugaaaacaacacuuggguaaaucagacauauguuaacaucagcaacaccaauuuugcugcuggacagucagugguuuccgugaaauuagcgggcaauuccucucucugcccuguuaguggaugggcuauauacaguaaagacaacaguguaagaaucgguuccaagggggauguguuugucauaagggaaccauucauaucaugcucccccuuggaaugcagaaccuucuucuugacucaaggggccuugcuaaaugacaaacauuccaauggaaccauuaaagacaggagcccauaucgaacccuaaugagcuguccuauuggugaaguucccucuccauacaacucaagauuugagucagucgcuuggucagcaagugcuugucaugauggcaucaauuggcuaacaauuggaauuucuggcccagacaguggggcaguggcuguguuaaaguacaauggcauaauaacagacacuaucaagaguuggaaaaauaauauauugagaacacaagagucugaaugugcauguguaaaugguucuugcuuuaccauaaugaccgauggaccaagugacggacaggccucauacaagaucuuccgaauagaaaagggaaagauagucaaaucagucgaaauggaugccccuaauuaucacuaugaggaaugcuccuguuauccugauucuagugaaaucacaugugugugcagggauaacuggcauggcucgaaucgaccgugggugucuuucaaccagaaucuggaauaucagauaggauacauaugcagugggguuuucggagacaauccacgcccuaaugauaagacaggcaguugugguccaguaucgucuaauggagcaaauggaguaaaaggauuuucauucaaauacggcaaugguguuuggauagggagaacuaaaagcauuaguucaagaaaagguuuugagaugauuugggauccaaauggauggaaugggacagacaauaacuucucaauaaagcaagauaucguuggaauaaaugaguggucaggauauagcgggaguuuuguucagcauccagaacuaacagggcuggauuguauaagaccuugcuucuggguugaacuaaucagagggcgacccaaagagaacacaaucuggacuggcgggagcagcauauccuuuugugguguaaacagugacacuguggguuggucuuggccagacggugcugaguugccauuuaccauugacaaguaa

SEQ ID NO: 57704 - RNA, 1410 nt, Artificial Sequence
  derived and/or modified CDS sequence (wt) from neuraminidase__InfluenzaA__AIL94598
augaauccaaaccaaaagauaauaaccauugguucggucuguaugacaauuggaauggcuaacuuaauauuacaaauuggaaacauaaucucaauauggauuagccacucaauucaacuugggaaucaaagucagauugaagcaugcaaucaaagcgucauuacuuaugaaaacaacacuuggguaaaucagacauauguuaacaucagcaacaccaauuuugcugcuggacagucagugguuuccgugaaauuagcgggcaauuccucccucugcccuguuaguggaugggccauauacaguaaagacaacaguguaagaaucgguuccaagggggauguguuugucauaagggaaccauucauaucaugcucccccuuggaaugcagaaccuucuucuugacucaaggggccuugcuaaaugacaaacauuccaauggaaccauuaaagacaggagcccauaucgaacccuaaugagcuguccuauuggugaaguucccucuccauacaacucaagauuugagucagucgcuuggucagcaagugcuugucaugauggcaucaauuggcuaacaauuggaauuucuggcccagacaguggggcaguggcuguguuaaaguacaauggcauaauaacagacacuaucaagaguuggaaaaauaauauauugagaacacaagagucugaaugugcauguguaaaugguucuugcuuuaccauaaugaccgauggaccaagugacggacaggccucauacaagaucuuccgaauagaaaagggaaagauagucaaaucagucgaaaugaaugccccuaauuaucacuaugaggaaugcuccuguuauccugauucuagugaaaucacaugugugugcagggauaacuggcauggcucgaaucgaccgugggugucuuucaaccagaaucuggaguaucagauaggauacauaugcagugggguuuucggagacaauccacgcccuaaugauaagacaggcaguugugguccaguaucgucuaauggagcaaauggaguaaaaggauuuucauucaaauacggcaaugguguuuggauagggagaacuaaaagcauuaguucaagaaaagguuuugagaugauuugggauccaaauggauggacugggacagacaauaacuucucaauaaagcaagauaucguaggaauaaaugaguggucaggauauagcgggaguuuuguucagcauccagaacuaacagggcuggauuguauaagaccuugcuucuggguugaacuaaucagagggcgacccaaagagaacacaaucuggacuagcgggagcagcauauccuuuugugguguaaacagugacacuguggguuggucuuggccagacggugcugaguugccauuuaccauugacaaguaa

SEQ ID NO: 57705 - RNA, 1410 nt, Artificial Sequence
  derived and/or modified CDS sequence (wt) from neuraminidase__InfluenzaA__AIL94609
augaauccaaaucaaaagauaauaacgauuggcucuguuucucucaccauuuccacaauaugccucuucaugcaaauugccaucuugauaaccacuguaacauugcauuucaagcaauaugaauucaacucccccccaaacaaccaagugaugcugugugaaccaacaauaauagaaagaaacauaacagagauaguguaucugaccaacaccaccauagagaaggaaauaugccccaaaccagcagaauacagaaauuggucaaaaccgcaauguggcauuacaggauuugcaccuuucucuaaggacaauucgauuaggcuuuccgcugguggggacaucugggugacaagagaaccuuaugugucaugcgauccugacaaguguuaucaauuugcccuuggacagggaacaacacuaaacaacgugcauucaaauaacacaguacgugauaggaccccuuaucggacucuauugaugagugaguuggguguuccuuuucaucuggggaccaagcaagugugcauagcaugguccagcucaaguugucacgauggaaaagcauggcugcauguuuguauaacgggggaugauaaaaaugcaacugcuagcuucauuuacaaugggaggcuuguagauaguguuguuucaugguccaaagaaauucucaggacccaggagucagaaugcguuuguaucaauggaacuuguacaguaguaaugacugauggaagugcuucaggaaaagcugauacuaaaauacuauucauugaggaggggaaaaucguucauacuagcacauugucaggaagugcucagcaugucgaagagugcucuugcuauccucuauauccuggugucagaugugucugcagagacaacuggaaaggcuccaaucggcccaucguagauauaaacauaaaggaucauagcauuguuuccaguuauguuuguucaggacuuguuggagacacacccagaaaaaacgacagcuccagcaguagccauuguuuggauccuaacaaugaagaagguggucauggagugaaaggcugggccuuugaugauggaaaugacguguggaugggaagaacaaucaacgagacgucacgcuuaggguaugaaaccuucaaagucauugaaggcugguccaacccuaaguccaaauugcagauaaauaggcaagucauaguugacagaggugauagguccgguuauucugguauuuucucugucgaaggcaaaagcugcaucaaucggugcuuuuauguggaguugauuaggggaagaaaagaggaaacugaagucuuguggaccucaaacaguauuguuguguuuuguggcaccucagguacauauggaacaggcucauggccugauggggcggaccucaaucucaugccuauauaa

SEQ ID NO: 57706 - RNA, 1410 nt, Artificial Sequence
  derived and/or modified CDS sequence (wt) from neuraminidase__InfluenzaA__AIL94621
augaauccaaaccaaaagauaauaaccauugguucggucuguaugacaauuggaauggcuaacuuaauauuacaaauuggaaacauaaucucaauauggauuagccacucaauucaacuugggaaucaaagucagauugaagcaugcaaucaaagcgucauuacuuaugaaaacaacacuuggguaaaucagacauauguuaacaucagcaacaccaauuuugcugcuggacagucagugguucccgugaaauuagcgggcaauuccucucucugcccuguuaguggaugggcuauauacaguaaagacaacaguguaagaaucgguuccaagggggauguguuugucauaagggaaccauucauaucaugcucccccuuggaaugcagaaccuucuucuugacucaaggggccuugcuaaaugacaaacauuccaauggaaccauuaaagacaggagcccauaucgaacccuaaugagcuguccuauuggugaaguucccucuccauacaacucaagauuugagucagucgcuuggucagcaagugcuugucaugauggcaucaauuggcuaacaauuggaauuucuggcccagacaguggggcaguggcuguguuaaaguacaauggcauaauaacagacacuaucaagaguuggaaaaauaauauauugagaacacaagagucugaaugugcauguguaaaugguucuugcuuuaccauaaugaccgauggaccaagugacggacaggccucauacaagaucuuccgaauagaaaagggaaagauagucaaaucagucgaaaugaaugccccuaauuaucacuaugaggaaugcuccuguuauccugauucuagugaaaucacaugugugugcagggauaacuggcauggcucgaaucgaccgugggugucuuucaaccagaaucuggaauaucagauaggauacauaugcagugggguuuucggagacaauccacgcccuaaugauaagacaggcaguugugguccaguaucgucuaauggagcaaauggaguaaaaggauuuucauucaaauacggcaaugguguuuggauagggagaacuaaaagcauuaguucaagaaaagguuuugagaugauuugggauccaaauggauggacugggacagacaaugacuucucaauaaagcaagauaucguaggaauaaaugaguggucaggauauagcgggaguuuuguucagcauccagaacuaacagggcuggauuguauaagaccuugcuucuggguugaacuaaucagagggcgacccaaagagaacacaaucuggacuagcgggagcagcauauccuuuugugguguaaacagugacacuguggguuggucuuggccagacggugcugaguugccauuuaccauugacaaguaa

SEQ ID NO: 57707 - RNA, 1410 nt, Artificial Sequence; identical to SEQ ID NO: 57658
  derived and/or modified CDS sequence (wt) from neuraminidase__InfluenzaA__AIL94632

SEQ ID NO: 57708 - RNA, 1410 nt, Artificial Sequence; identical to SEQ ID NO: 57646
  derived and/or modified CDS sequence (wt) from neuraminidase__InfluenzaA__AIL94643

SEQ ID NO: 57709 - RNA, 1410 nt, Artificial Sequence
  derived and/or modified CDS sequence (wt) from neuraminidase__InfluenzaA__AIL94655
augaauccaaaccaaaagauaauaaccauugguucggucuguaugacaauuggaauggcuaacuuaauauuacaaauuggaaacauaaucucaauauggauuagccacucaauucaacuugggaaucaaagucagauugaaacaugcaaucaaagcgucauuacuuaugaaaacaacacuuggguaaaucagacauauguuaacaucagcaacaccaacuuugcugcuggacagucagugguuuccgugaaauuagcgggcaauuccucucucugcccuguuaguggaugggcuauauacaguaaagacaacaguauaagaaucgguuccaagggggauguguuugucauaagggaaccauucauaucaugcucccccuuggaaugcagaaccuucuucuugacucaaggggccuugcuaaaugacaaacauuccaauggaaccauuaaagacaggagcccauaccgaacccuaaugagcuguccuauuggugaaguucccucuccauacaacucaagauuugagucggucgcuuggucagcaagugcuugucaugauggcaucaauuggcuaacaauuggaauuucuggcccagacaguggggcaguggcuguauuaaaguacaauggcauaauaacagacacuaucaagaguuggagaaacaauauauugagaacacaagagucugaaugugcauguguaaaugguucuugcuuuaccauaaugaccgauggaccaagugauggacaggccucauacaagaucuucagaauagaaaagggaaagauagucaaaucagucgaaaugaaugccccuaauuaucacuaugaggaaugcuccuguuauccugauucuagugaaaucacaugugugugcagggauaacuggcauggcucgaaucgaccgugggugucuuucaaccagaaucuggaauaucagauaggauacauaugcagugggauuuucggagacaauccacgcccuaaugauaagacaggcaguugugguccaguaucgucuaauggagcaaauggaguaaaaggauuuucauucaaauacggcaaugguguuuggauagggagaacuaaaagcauuaguucaagaaaagguuuugagaugauuugggauccaaauggauggacugggacagacaauaacuucucaauaaagcaagauaucguaggaauaaaugaguggucaggauauagcgggaguuuuguucagcauccagaacuaacagggcuggauuguauaagaccuugcuucuggguugaacuaaucagagggcgaccuaaagagaacacaaucuggacuagcgggagcagcauauccuuuugugguguaaacagugacacuguggguuggucuuggccagacggugcugaguugccauuuaccauugacaaguaa

SEQ ID NO: 57710 - RNA, 1410 nt, Artificial Sequence
  derived and/or modified CDS sequence (wt) from neuraminidase__InfluenzaA__AIL94677
augaauccaaaccaaaagauaauaaccauugguucggucuguaugacaauuggaauggcuaacuuaauauuacaaauuggaaacauaaucucaauauggauuagccacucaauucaacuugggaaucaaagucagauugaagcaugcaaucaaagcgucauuacuuaugaaaacaacacuuggguaaaucagacauauguuaacaucagcaacaccaauuuugcugcuggacagucagugguucccgugaaauuagcgggcaauuccucucucugcccuguuaguggaugggcuauauacaguaaagacaacaguguaagaaucgguuccaagggggauguguuugucauaagggaaccauucauaucaugcucccccuuggaaugcagaaccuucuucuugacucaaggggccuugcuaaaugacaaacauuccaauggaaccauuaaagacaggagcccauaucgaacccuaaugagcuguccuauuggugaaguucccucuccauacaacucaagauuugagucagucgcuuggucagcaagugcuugucaugauggcaucaauuggcuaacaauuggaauuucuggcccagacaguggggcaguggcuguguuaaaguacaauggcauaauaacagacacuaucaagaguuggaaaaauaauauauugagaacacaagagucugaaugugcauguguaaaugguucuugcuuuaccauaaugaccgauggaccaagugacggacaggccucauacaagaucuuccgaauagaaaagggaaagauagucaaaucagucgaaaugaaugccccuaauuaucacuaugaggaaugcuccuguuauccugauucuagugaaaucacaugugugugcagggauaacuggcauggcucgaaucgaccgugggugucuuucaaccagaaucuggaauaucagauaggauacauaugcagugggguuuucggagacaauccacgcccuaaugauaagacaggcaguugugguccaguaucgucuaauggagcaaauggaguaaaaggauuuucauucaaauacggcaaugguguuuggauagggagaacuaaaagcauuaguucaagaaaagguuuugagaugauuugggauccaaauggauggacugggacagacaauaacuucucaauaaagcaagauaucguaggaauaaaugaguggucaggauauagcgggaguuuuguucagcauccagaacuaacagggcuggauuguauaagaccuugcuucuggguugaacuaaucagagggcgacccaaagagaacacaaucuggacuagcgggagcagcauauccuuuugugguguaaacagugacacuguggguuggucuuggccagacggugcugaguugccauuuaccauugacaaguaa

SEQ ID NO: 57711 - RNA, 1410 nt, Artificial Sequence
  derived and/or modified CDS sequence (wt) from neuraminidase__InfluenzaA__AIL94688
augaauccaaaucaaaagauaauaacgauuggcucuguuucucucaccauuuccacaauaugcuucuucaugcaaauugccaucuugauaacuacuguaacauugcauuucaagcaauaugaauucaacucccccccaaacaaccaagugaugcugugugaaccaacaauaauagaaagaaacauaacagagauaguguaucugaccaacaccaccauagagaaggaaauaugccccaaaccagcagaauacagaaauuggucaaaaccgcaauguggcauuacaggauuugcaccuuucucuaaggacaauucgauuaggcuuuccgcugguggggacaucugggugacaagagaaccuuaugugucaugcgauccugacaaguguuaucaauuugcccuuggacagggaacaacacuaaacaacgugcauucaaauaacacaguacgugauaggaccccuuaucggacucuauugaugaaugaguuggguguuccuuuucaucuggggaccaagcaagugugcauagcaugguccagcucaaguugucacgauggaaaagcauggcugcauguuuguauaacgggggaugauaaaaaugcaacugcuagcuucauuuacaaugggaggcuuguagauaguguuguuucaugguccaaagaaauucucaggacccaggagucagaaugcguuuguaucaauggaacuuguacaguaguaaugacugauggaagugcuucaggaaaagcugauacuaaaauacuauucauugaggaggggaaaaucguucauacuagcacauugucaggaagugcucagcaugucgaagagugcucuugcuauccucgauauccuggugucagaugugucugcagagacaacuggaaaggcuccaaucggcccaucguagauauaaacauaaaggaucauagcauuguuuccaguuauguguguucaggacuuguuggagacacacccagaaaaaacgacagcuccagcaguagccauuguuuggauccuaacaaugaagaagguggucauggagugaaaggcugggccuuugaugauggaaaugacguguggaugggaagaacaaucaacgagacgucacgcuuaggguaugaaaccuucaaagucauugaaggcugguccaacccuaaguccaaauugcagauaaauaagcaagucauaguugacagaggcgauagguccgguuauucugguauuuucucugucgaaggcaaaagcugcaucaaucggugcuuuuauguggaguugauuaggggaagaaaagaggaaacugaagucuuguggaccucaaacaguauuguuguguuuuguggcaccucagguacauauggaacaggcucauggccugauggggcggaccucaaucucaugccuauauaa

SEQ ID NO: 57712 - RNA, 1410 nt, Artificial Sequence
  derived and/or modified CDS sequence (wt) from neuraminidase__InfluenzaA__AIL94700
augaauccaaaucaaaagauaauaacgauuggcucuguuucucucaccauuuccacaauaugcuucuucaugcaaauugccaucuugauaacuauuguaacauugcauuucaagcaauaugaauucaacucccccccaaacaaccaagugaugcugugugaaccaacaauaauagaaagaaacauaacagagauaguguaucugaccaacaccaccauagagaaggaaauaugccccaaaccagcagaauacagaaauuggucaaaaccgcaauguggcauuacaggauuugcaccuuucucuaaggacaauucgauuaggcuuuccgcugguggggacaucugggugacaagagaaccuuaugugucaugcgauccugacaaguguuaucaauuugcccuuggacagggaacaacacuaaacaacgugcauucaaauaacacaguacgugauaggaccccuuaucggacucuauugaugaaugaguuggguguuccuuuucaucuggggaccaagcaagugugcauagcaugguccagcucaaguugucacgauggaaaagcauggcugcauguuuguauaacgggggaugauaaaaaugcaacugcuagcuucauuuacaaugggaggcuuguagauaguguuguuucaugguccaaagaaauucucaggacccaggagucagaaugcguuuguaucaauggaacuuguacaguaguaaugacugauggaagugcuucaggaaaagcugauacuaaaauacuauucauugaggaggggaaaaucguucauauuagcacauugucaggaagugcucagcaugucgaagagugcucuugcuauccucgauauccuggugucagaugugucugcagagacaacuggaaaggauccaaucggcccaucguagauauaaacauagaggaucauagcauuguuuccaguuauguguguucaggacuuguuggagacacacccagaaaaaacgacagcuccagcaguagccauuguuuggauccuaacaaugaagaggguggucauggagugaaaggcugggcauuugaugauggaaaugacguguggaugggaagaacaaucaacgagacgucacgcuuaggguaugaaaccuucaaagucauugaaggcugguccaacccuaaguccaaauugcagauaaauaggcaagucauaguugacagaggugauagguccgguuauucugguauuuucucugucgaaggcaaaagcugcaucaaucggugcuuuuauguggaguugauuaggggaagaaaagaggaaacugaagucuuguggaccucaaacaguauuguuguguuuuguggcaccucagguacauauggaacaggcucauggccugauggagcggaccucaaucucaugccuauauaa

SEQ ID NO: 57713 - RNA, 1410 nt, Artificial Sequence; identical to SEQ ID NO: 57677
  derived and/or modified CDS sequence (wt) from neuraminidase__InfluenzaA__AIL94712

SEQ ID NO: 57714 - RNA, 1410 nt, Artificial Sequence; identical to SEQ ID NO: 57699
  derived and/or modified CDS sequence (wt) from neuraminidase__InfluenzaA__AIL94723

SEQ ID NO: 57715 - RNA, 1410 nt, Artificial Sequence
  derived and/or modified CDS sequence (wt) from neuraminidase__InfluenzaA__AIL94734
augaauccaaaucaaaagauaauaacgauuggcucuguuucucucaccauuuccacaauaugcuucuucaugcaaauugccaucuugauaacuacuguaacauugcauuucaagcaauaugaauucaacucccccccaaacaaccaagugaugcugugugaaccaacaauaauagaaagaaacauaacagagauaguguaucugaccaacaccaccauagagaaggaaauaugccccaaaccagcagaauacagaaauuggucaaaaccgcaauguggcauuacaggauuugcaccuuucucuaaggacaauucgauuaggcuuuccgcugguggggacaucugggugacaagagaaccuuaugugucaugcgauccugacaaguguuaucaauuugcccuuggacagggaacaacacuaaacaacgagcauucaaauaacacaguacgugauaggaccccuuaucggacucuauugaugaaugaguuggguguuccuuuucaucuggggaccaagcaagugugcauagcaugguccagcucaaguugucacgauggaaaagcauggcugcauguuuguauaacgggggaugauaaaaaugcaacugcuagcuucauuuacaaugggaggcuuguagauaguguuguuucaugguccaaagaaauucucaggacccaggagucagaaugcguuuguaucaauggaacuuguacaguaguaaugacugauggaagugcuucaggaaaagcugauacuaaaauacuauucauugaggaggggaaaaucguucauauuagcacauugucaggaagugcucagcaugucgaagagugcucuugcuauccucgauauccuggugucagaugugucugcagagacaacuggaaaggauccaaucggcccaucguagauauaaacauaaaggaucauagcauuguuuccaguuauguguguucaggacuuguuggagacacacccagaaaaaacgacagcuccagcaguagccauuguuuggauccuaacaaugaagaggguggucauggagugaaaggcugggcauuugaugauggaaaugacguguggaugggaagaacaaucaacgagacgucacgcuuaggguaugaaaccuucaaagucauugaaggcugguccaacccuaaguccaaauugcagauaaauaggcaagucauaguugacagaggugauagguccgguuauucugguauuuucucugucgaaggcaaaagcugcaucaaucggugcuuuuauguggaguugauuaggggaagaaaagaggaaacugaagucuuguggaccucaaacaguauuguuguguuuuguggcaccucagguacauauggaacaggcucauggccugauggggcggaccucaaucucaugccuauauaa

SEQ ID NO: 57716 - RNA, 1410 nt, Artificial Sequence; identical to SEQ ID NO: 57658
  derived and/or modified CDS sequence (wt) from neuraminidase__InfluenzaA__AIL94746

SEQ ID NO: 57717 - RNA, 1410 nt, Artificial Sequence; identical to SEQ ID NO: 57688
  derived and/or modified CDS sequence (wt) from neuraminidase__InfluenzaA__AIL94757

SEQ ID NO: 57718 - RNA, 1410 nt, Artificial Sequence; identical to SEQ ID NO: 57650
  derived and/or modified CDS sequence (wt) from neuraminidase__InfluenzaA__AIL94768

SEQ ID NO: 57719 - RNA, 1410 nt, Artificial Sequence; identical to SEQ ID NO: 57646
  derived and/or modified CDS sequence (wt) from neuraminidase__InfluenzaA__AIL94780

SEQ ID NO: 57720 - RNA, 1410 nt, Artificial Sequence; identical to SEQ ID NO: 57688
  derived and/or modified CDS sequence (wt) from neuraminidase__InfluenzaA__AIL94803

SEQ ID NO: 57721 - RNA, 1410 nt, Artificial Sequence; identical to SEQ ID NO: 57668
  derived and/or modified CDS sequence (wt) from neuraminidase__InfluenzaA__AIL94814

SEQ ID NO: 57722 - RNA, 1410 nt, Artificial Sequence
  derived and/or modified CDS sequence (wt) from neuraminidase__InfluenzaA__AIL94826
augaauccaaaucaaaagauaauaacgauuggcucuguuucucucaccauuuccacaauaugcuucuucaugcaaauugccaucuugauaacuacuguaacauugcauuucaagcaauaugaauucaacucccucccaaacaaccaagugaugcugugugaaccaacaauaauagaaagaaacauaacagagauaguguauuugaccaacaccaccauagagaaggaaauaugccccaaaccagcagaauacagaaauuggucaaaaccgcaauguggcauuacaggauuugcaccuuucucuaaggacaauucgauuaggcuuuccgcugguggggacaucugggugacaagagaaccuuaugugucaugcgauccugacaaguguuaucaauuugcccuuggacagggaacaacacuaaacaacgugcauucaaauaacacagcacgugauaggaccccuuaucggacucuauugaugaaugaguuggguguuccuuuucaucuggggaccaagcaagugugcauagcaugguccagcucaaguugucacgauggaaaagcauggcugcauguuuguauaacgggggaugauaaaaaugcaacugcuagcuucauuuacaaugggaggcuuguagauaguguuguuucaugguccaaagaaauucucaggacccaggagucagaaugcguuuguaucaauggaacuuguacaguaguaaugacugauggaagugcuucaggaaaagcugauacuaaaauacuauucauugaggaggggaaaaucguucauacuagcacauugucaggaagugcucagcaugucgaagagugcucuugcuauccucgauauccuggugucagaugugucugcagagacaacuggaaaggcuccaaucggcccaucguagauauaaacauaaaggaucauagcauuguuuccaguuauguguguucaggacuuguuggagacacacccagaaaaaacgacagcuccagcaguagccauuguuugaauccuaacaaugaagaagguggucauggagugaaaggcugggccuuugaugauggaaacgacguauggaugggaagaacaaucaacgagacaucacgcuuaggguaugaaaccuucaaagucauugaaggcugguccaacccuaaguccaaauugcagauaaauaggcaagucauaguugacagaggugauagguccgguuauucugguauuuucucuguugaaggcaaaagcugcaucaaucggugcuuuuauguggaguugauuaggggaagaaaagaggaaacugaagucuuguggaccucaaacaguauuguuguguuuuguggcaccucagguacauauggaacaggcucauggccugauggggcggaccucaaucucaugccuauauaa

SEQ ID NO: 57723 - RNA, 1410 nt, Artificial Sequence
  derived and/or modified CDS sequence (wt) from neuraminidase__InfluenzaA__AIL94850
augaauccaaaucaaaagauaauaacgauuggcucuguuucucucaccauuuccacaauaugcuucuucaugcaaauugccaucuugauaacuacuguuacauugcauuucaagcaauaugaauucaacucccccccaaacaaccaagugaugcuguuugaaccaacaauaauagaaagaaacauaacagagauaguguaucugaccaacaccaccauagagaaggaaauaugccccaaacuagcagaauauagaaauuggucaaagccgcaaugugacauuacaggauuugcaccuuuuucuaaggacaauucgauuaggcuuuccgcugguggggacaucugggugacaagagaaccuuaugugucaugcgauccugacaaguguuaucaauuugcccuuggacagggaacaacacuaaacaacgugcauucaaaugacacaguacgugauaggaccccuuaucggacccuauugaugaaugaguuagguguuccuuuucaucuggggaccaagcaagugugcauagcaugguccagcucaaguugucacgauggaaaagcauggcugcauguuuguauaacgggggaugauaaaaaugcaacugcuagcuucauuuacaaugggaggcuuguggauaguauuguuucaugguccaaagaaauccucaggacccaggagucagaaugcguuuguaucaauggaacuuguacaguaguaaugacugaugggagugcuucaggaaaagcugauacuaaaauacuauucauuaaggaggggaaaaucguucauacuagcacauugucaggaagugcucagcaugucgaggagugcuccugcuauccucgauauccuggugucagaugugucugcagagacaacuggaaaggcuccaauaggcccaucguagauauaaacauaaaggaucauagcauuguuuccaguuauguguguucaggacuuguuggagacacacccagaaaaaacgacagcuccagcaguagccauuguuuggauccuaacagugaagaagguggucauggagugaaaggcugggccuuugaugauggaaaugacguguggaugggaagaacgaucagcgagaagucacgcuuaggguaugaaaccuucaaagucauugaaggcugguccaacccuaaguccaaauuucagauaaauaggcaagucauaguugacagagguaauagguccgguuauucugguauuuucucuguugaaggcaaaagcugcaucaaucggugcuuuuauguggaguugauaaggggaagaaaagaggaaacugaaguuuuguggaccucaaacaguauuguuguguuuuguggcaccucagguacauauggaacaggcucauggccugauggggcggaccucaaucucaugccuauauaa

SEQ ID NO: 57724 - RNA, 1410 nt, Artificial Sequence; identical to SEQ ID NO: 51422
  derived and/or modified CDS sequence (wt) from neuraminidase__InfluenzaA__AIL94862

SEQ ID NO: 57725 - RNA, 1410 nt, Artificial Sequence
  derived and/or modified CDS sequence (wt) from neuraminidase__InfluenzaA__AIL94874
augaauccaaaucaaaagauaauaacgauuggcucuguuucucucaccauuuccacaauaugcuucuucaugcaaauugccaucuugauaacuacuguaacauugcauuucaagcaauauaaauucaacucccccccaaacaaccaagugaugcugugugaaccaacaauaauagaaagaaacauaacagagauaguguaucugaccaacaccaccauagagaaggaaauaugccccaaacuagcagaauacagaaauuggucaaaaccgcaaugugacauuacgggauuugcaccuuuuucuaaggacaauucgauuaggcuuuccgcugguggggacaucugggugacaagagaaccuuaugugucaugcgauccugacaaguguuaucaauuugcccuuggacagggaacaacacuaaacaacgugcauucaaauaacacaguacgugauaggaccccuuaucggacccuauugaugaaugaguuagguguuccuuuucaucuggggaccaagcaagugugcauagcaugguccagcucgaguugucacgauggaaaagcauggcugcauguuuguauaacgggggaugauaaaaaugcaacugcuagcuucauuuacaaugggaggcuuguagauaguguuguuucaugguccaaagaaauucucaggacccaggagucagaaugcguuuguaucaauggaacuuguacaguaguaaugacugauggaagugcuucaggaaaagcugauacuaaaauacuauucauugaggaggggaaaauuguucauacuagcacauugucaggaagugcucagcaugucgaggagugcucuugcuauccucgauauccuggugucagaugugucugcagagacaacuggaaaggcuccaauaggcccaucguagauauaaacauaaaggaucauagcauuguuuccaguuauguguguucaggacuuguuggagacacacccagaaaaaacgacagcuccagcaguagccauuguuuggauccuaacaaugaagaagguggucauggagugaaaggcugggccuuugaugauggaaaugacguguggaugggaagaacaaucaacgagacgucacgcuuaggguaugaaaccuucaaagucauugaaggcugguccaaccccaaguccaaauugcagauaaauaggcaagucauaguugacagagguaauagguccgguuauucugguauuuucucuguugaaggcaaaagcugcaucaaucggugcuuuuauguggaguugauuaggggaagaaaagaggaaacugaagucuuguggaccucaaacaguauuguuguguuuuguggcaccucagguacauauggaacaggcucauggccugauggggcggaccucaaucucaugccuauauaa

SEQ ID NO: 57726 - RNA, 1410 nt, Artificial Sequence
  derived and/or modified CDS sequence (wt) from neuraminidase__InfluenzaA__AIL94886
augaauccaaaccaaaagauaauaaccauugguucggucuguaugacaauuggaauggcuaacuuaauguuacaaauuggaaacauaaucucaauauggauuagccacucaauucaacuugggaauaaaaaucagauugaaacaugcaaucaaagcgucauuacuuaugaaaacaacacuuggguaaaucagacauauguuaacaucagcaacaccaacuuugcugcuggacagucaguggucuccgugaaaauagcgggcaauuccucucucugcccuguuaguggaugggcuauauacaguaaagacaacaguauaagaaucgguuccaagggggauguguuugucauaagggaaccauucauaucaugcucccccuuggaaugcagaaccuucuucuugacucaaggggccuugcuaaaugacaaacauuccaauggaaccauuaaagacaggagcccauaucgaacccuaaugagcuguccuauuggugaaguucccucuccauacaacucaagauuugagucagucgcuuggucagcaagugcuugucaugauggcaucaauuggcuaacaauuggaauuucuggcccagacgauggggcaguggcuguguuaaaguacaacggcauaauaacagacacuaucaagaguuggagaaacaauauauugagaacacaagagucugaaugugcauguguaaaugguucuugcuuuaccauaaugaccgauggaccaagugauggacaggccucauacaagaucuucagaauagaaaagggaaagauagucaaaucagucgaaaugaaugccccuaauuaccacuaugaggaaugcuccuguuauccugauucuagugaaaucacaugugugugcagggauaacuggcauggcucgaaucgaccgugggugucuuucaaccagaaucuggaauaucagauaggauacauaugcagugggauuuucggagacaauccacgcccucaugauaagacaggcaguugugguccaguaucgucuaauggagcaaauggaguaaaaggauuuucauucaaauacggcaaugguguuuggauagggagaacuaaaagcauuaguucaagaaaagguuuugagaugauuugggauccaaacggauggacugggacagacaauaacuucucaauaaagcaagauaucguaggaauaaaugaguggucaggauauagcgggaguuuuguucagcauccagaacuaacagggcuggacuguauaagaccuugcuucuggguugaacuaaucagagggcgacccaaagagaacacaaucuggacuagcgggagcagcauauccuuuugugguguaaacagugacacuguggguuggucuuggccagacggugcugaguugccauuuaccauugacaaguaa

SEQ ID NO: 57727 - RNA, 1410 nt, Artificial Sequence; identical to SEQ ID NO: 57227
  derived and/or modified CDS sequence (wt) from neuraminidase__InfluenzaA__AIL94897

SEQ ID NO: 57728 - RNA, 1410 nt, Artificial Sequence; identical to SEQ ID NO: 57722
  derived and/or modified CDS sequence (wt) from neuraminidase__InfluenzaA__AIL94909

SEQ ID NO: 57729 - RNA, 1410 nt, Artificial Sequence; identical to SEQ ID NO: 57646
  derived and/or modified CDS sequence (wt) from neuraminidase__InfluenzaA__AIL94921

SEQ ID NO: 57730 - RNA, 1410 nt, Artificial Sequence; identical to SEQ ID NO: 57646
  derived and/or modified CDS sequence (wt) from neuraminidase__InfluenzaA__AIL94933

SEQ ID NO: 57731 - RNA, 1410 nt, Artificial Sequence; identical to SEQ ID NO: 57650
  derived and/or modified CDS sequence (wt) from neuraminidase__InfluenzaA__AIL94945

SEQ ID NO: 57732 - RNA, 1410 nt, Artificial Sequence
  derived and/or modified CDS sequence (wt) from neuraminidase__InfluenzaA__AIL94957
augaauccaaaccaaaagauaauaaccauugguucggucuguaugacaauuggaauggcuaacuuaauauuacaaauuggaaacauaaucucaauauggauuagccacucaauucaacuugggaaucaaagucagauugaagcaugcaaucaaagcgucauuacuuaugaaaacaacacuuggguaaaucagacauauguuaacaucagcaacaccaauuuugcugcuggacagucagugguuuccgugaaauuagcgggcaauuccucucucugcccuguuaguggaugggcuauauacaguaaagacaacaguguaagaaucgguuccaagggggauguguuugucauaagggaaccauucauaucaugcucccccuuggaaugcagaaccuucuucuugacucaaggggccuugcuaaaugacaaacauuccaauggaaccauuaaagacaggagcccauaucgaacccuaaugagcuguccuauuggugaaguucccucuccauacaacucaagauuugagucagucgcuuggucagcaagugcuugucaugauggcaucaauuggcuaacaauuggaauuucuggcccagacaguggggcaguggcuguguuaaaguacaauggcauaauaacagacacuaucaagaguuggaaaaauaauauauugagaacacaagagucugaaugugcauguguaaaugguucuugcuuuaccauaaugaccgauggaccaagugacggacaggccucauacaagaucuuccgaauagaaaagggaaagauagucaaaucagucgaaauggaugccccuaauuaucacuaugaggaaugcuccuguuauccugauucuagugaaaucacaugugugugcagggauaacuggcauggcucgaaucgaccgugggugucuuucaaccagaaucuggaauaccagauaggauacauaugcagugggguuuucggagacaauccacgcccuaaugauaagacaggcaguugugguccaguaucgucuaauggagcaaauggaguaaaaggauuuucauucaaauacggcaaugguguuuggauagggagaacuaaaagcauuaguucaagaaaagguuuugagaugauuugggauccaaauggauggaaugggacagacaauaacuucucaauaaagcaagauaucguuggaauaaaugaguggucaggauauagcgggaguuuuguucagcauccagaacuaacagggcuggauuguauaagaccuugcuucuggguugaacuaaucagagggcgacccaaagagaacacaaucuggacuagcgggagcagcauauccuuuugugguguaaacagugacacuguggguuggucuuggccagacggugcugaguugccauuuaccauugacaaguaa

SEQ ID NO: 57733 - RNA, 1410 nt, Artificial Sequence; identical to SEQ ID NO: 57722
  derived and/or modified CDS sequence (wt) from neuraminidase__InfluenzaA__AIL94968

SEQ ID NO: 57734 - RNA, 1410 nt, Artificial Sequence
  derived and/or modified CDS sequence (wt) from neuraminidase__InfluenzaA__AIM55840
augaauccaaaccaaaagauaauaaccauugguucggucuguaugacaauuggaauggcuaacuuaauauuacaaauuggaaacauaaucucaauauggauuagucacucaauucaaguugggaaucaaagucagauugaaauaugcaaucaaagcgucauuacuuaugaaaacaacacuuggguaaaucagacauauguuaacaucagcaacaccaacuuugcugcugggcagccagugguuuccgugaaauuagcgggcaauuccucucucugcccuguuaguggaugggcuauauacaguaaagacaacaguguaagaaucgguuccaagggggauguguuugucauaagggaaccauucauaucaugcucccccuuggaaugcagaaccuucuucuugacucaaggggccuugcuaaaugacaaacauuccaauggaaccauuaaagacaggagcccauaucgaaccuuaaugagcuguccuauuggugaaguucccucuccauacaacucaagauuugagucagucgcuuggucagcaagugcuugucaugauggcaucaauuggcuaacaauuggaauuucuggcccagacaguggggcaguggcuguguuaaaguacaacggcauaauaacagacacuaucaagaguuggagaaacgauauauugagaacacaagagucugaaugugcauguguaaaugguucuugcuuuaccauaaugaccgauggaccaagugauggacaggccucauacaagaucuucagaauagaaaagggaaagauagucaaaucagucgaaaugaaugccccuaauuaucacuuugaggaaugcuccuguuauccugauucuagugaaaucacaugugugugcagggauaacuggcauggcucgaaucgaccgugggugucuuucaaccagaaucuggaauaucagauaggauacauaugcagugggauuuucggagacaauccacgcccuaaugauaagacaggcaguugugguccaguaucaucuaauggagcaaauggaguaaaaggauuuucauucaaauacggcaaugguguuuggauagggagaacuaaaagcauuaguucaagaaaagguuuugagaugauuugggauccaaauggauggacugggacagacaauaacuucucaauaaagcaagauaucguaggaauaaaugaguggucaggauauagcgggaguuuuguucagcauccugaacuaacagggcuggauuguauaagaccuugcuucuggguugaacuaaucagagggcgacccaaagagaacacaaucuggacuagugggagcagcauauccuuuugugguguaaacagugacacuguggguuggucuuggccagacggugcugaguugccauuuaccauugacaaguaa

SEQ ID NO: 57735 - RNA, 1410 nt, Artificial Sequence
  derived and/or modified CDS sequence (wt) from neuraminidase__InfluenzaA__AIM55851
augaauccaaaccaaaagauaauaaccauugguucggucuguaugacaauuggaauggcuaacuuaauauuacaaauuggaaacauaaucucaauauggguuagucacucaauucaacuugggaaucaaagucagauugaaacaugcaaucaaagcgucauuacuuaugaaaacaacacuuggguaaaucagacauauguuaacaucagcaacaccaacuuugcugcuggacagucagugguucccgugaaauuagcgggcaauuccucucucugcccuguuaguggaugggcuauauacaguaaagacaacaguguaagaaucgguuccaagggggauguguuugucauaagggaaccauucauaucaugcucccccuuggaaugcagaacuuucuucuugacucaaggggccuugcuaaaugacaaacauuccaauggaaccauuaaagauaggagcccauaucgaacccuaaugagcuguccuauuggugaaguucccucuccauacaacucaagauuugaaucagucgcuuggucagcaagugcuugucaugauggcaucaauuggcuaacaauuggaauuucuggcccagacaguggggcaguggcuguguuaaaguacaauggcauaauaacagacacuaucaagaguuggagaaacaauauauugagaacacaagagucugaaugugcauguguaaaugguucuugcuuuaccauaaugaccgauggaccaagugauggacaggccucauacaagaucuucagaauagaaaagggaaggauagucaaaucagucgaaaugaaugccccuaauuaucacuaugaggaaugcuccuguuauccugauucuagugaaaucacaugugugugcagggauaacuggcauggcucgaaucgaccgugggugucuuucaaccagaaucuggaauaucagauaggauacauaugcagugggguuuucggagacaauccacgcccuaaugauaagacaggcaguugugguccaguaucgucuaauggagcaaauggaguaaaaggauuuucauucaaauacggcaaugguguuuggauagggagaacuaaaagcauuaguucaagaaaagguuuugagaugauuugggauccgaauggauggacugggacagacaauaaauucucaauaaagcaagauaucguaggaauaaaugaguggucaggauauagcgggaguuuuguucagcauccagaacuaacagggcuggauuguauaagaccuugcuucuggguugaacuaaucagagggcgacccgaagagaacacaaucuggacuagcgggagcagcauauccuuuugugguguaaaaagugacacuguggguuggucuuggccagacggugcugaguugccauuuaccauugacaaguaa

SEQ ID NO: 57736 - RNA, 1410 nt, Artificial Sequence
  derived and/or modified CDS sequence (wt) from neuraminidase__InfluenzaA__AIM55862
augaauccaaaccaaaagauaauaaccauugguucggucuguaugacaauuggaauggcuaacuuaauauuacaaauuggaaacauaaucucaauauggguuagccacucaauucaacuugggaaucaaagucagauugaaacaugcaaucaaagcgucauuacuuaugaaaacaacacuuggguaaaucagacauauguuaacaucagcaacaccaacuuugcugcuggacagucagugguucccgugaaauuagcgggcaauuccucucucugcccuguuaguggaugggcuauauacaguaaagacaacaguguaagaaucgguuccaagggggauguguuugucauaagggaaccauucauaucaugcucccccuuggaaugcagaaccuucuucuugacucaaggggccuugcuaaaugacaaacauuccaauggaaccauuaaagacaggagcccauaucgaacccuaaugagcuguccuauuggugaaguucccucuccauacaacucaagauuugagucagucgcuuggucagcaagugcuugucaugauggcaucaauuggcuaacaauuggaauuucuggcccagacaguggggcaguggcuguguuaaaguacaauggcauaauaacagacacuaucaagaguuggagaaacaauauauugagaacacaagagucugaaugugcauguguaaaugguucuugcuuuaccauaaugaccgauggaccaagugauggacaggccucauacaagaucuucaaaauagaaaagggaaagauagucaaaucagucgaaaugaaugccccuaauuaucacuaugaggaaugcuccuguuauccugauucuagugaaaucacaugugugugcagggauaacuggcauggcucgaaucgaccgugggugucuuucaaccagaaucuggaauaucagauaggguacauaugcagugggguuuucggagacaauccacgcccuaaugauaagacaggcaguugugguccaguaucgucuaauggagcaaauggaguaaaaggauuuucauucaaauacggcaaugguguuuggauagggagaacuaaaagcauuaguucaagaaaagguuuugagaugauuugggauccgaauggauggaaugggacagacaauaacuucucaauaaagcaagauaucguaggaauaaaagaguggucaggauauagcgggaguuuuguucagcauccagaacuaacagggcuggauuguauaagaccuugcuucuggguugaacuaaucagagggcgacccgaagagaacacaaucuggacuagcgggagcagcauauccuuuugugguguaaacagugacacuguggguuggucuuggccagacggugcugaguugccauuuaccauugacaaguaa

SEQ ID NO: 57737 - RNA, 1410 nt, Artificial Sequence
  derived and/or modified CDS sequence (wt) from neuraminidase__InfluenzaA__AIM55873
augaauccaaaccaaaagauaauaaccauugguucggucuguaugacaauuggaauggcuaacuuaauauuacaaauuggaaacauaaucucaauauggguuagccacucaauucaacuugggaaucaaagucagauugaaacaugcaaucaaagcgucauuacuuaugaaaacaacacuuggguaaaucagacauauguuaacaucagcaacaccaacuuugcugcuggacagucagugguucccgugaaauuagcgggcaauuccucucucugcccuguuaguggaugggcuauauacaguaaagacaacaguguaagaaucgguuccaagggggauguguuugucauaagggaaccauucauaucaugcucccccuuggaaugcagaaccuucuucuugacucaaggggccuugcuaaaugacaagcauuccaauggaaccauuaaagacaggagcccauaucgaacccuaaugagcuguccuauuggugaaguucccucuccauacaacucaagauuugagucagucgcuuggucagcaagugcuugucaugauggcaucaauuggcuaacaauuggaauuucuggcccagacaguggggcaguggcuguguuaaaguacaauggcauaauaacagacacuaucaagaguuggagaaacaauauauugagaacacaagagucugaaugugcauguguaaaugguucuugcuuuacuauaaugaccgauggaccaagugauggacaggccucauacaagaucuucagaauagaaaagggaaagauagucaaaucagucgaaaugaaugccccuaauuaucacuaugaggaaugcuccuguuauccugauucuagugaaaucacaugugugugcagggauaacuggcauggcucgaaucgaccgugggugucuuucaaccagaaucuggaauaucagauaggauacauaugcagugggguuuucggagacaauccacgcccuaaugauaagacaggcaguugugguccaguaucgucuaauggagcaaauggaguaaaaggauuuucauucaaauacggcaaugguguuuggauagggagaacuaaaagcauuaguucaagaaaagguuuugagaugauuugggauccgaauggauggacugggacagacaauaacuucucaauaaagcaagauaucguaggaauaaaagaguggucaggauauagcgggaguuuuguucagcauccagaacuaacagggcuggauuguauaagaccuugcuucuggguugaacuaaucagagggcgacccgaagagaacacaaucuggacuagcgggagcagcauauccuuuugugguguaaacagugacacuguggguuggucuuggccagacggugcugaguugccauuuaccauugacaaguaa

SEQ ID NO: 57738 - RNA, 1410 nt, Artificial Sequence; identical to SEQ ID NO: 57737
  derived and/or modified CDS sequence (wt) from neuraminidase__InfluenzaA__AIM55884

SEQ ID NO: 57739 - RNA, 1410 nt, Artificial Sequence
  derived and/or modified CDS sequence (wt) from neuraminidase__InfluenzaA__AIM55918
augaauccaaaccaaaagauaauaaccauugguucggucuguaugacaauuggaauggcuaacuuaauauuacaaauuggaaacauaaucucaauauggguuagccacucaauucaacuugggaaucaaagucagauugaaacaugcaaucaaagcgucauuacuuaugaaaacaacacuuggguaaaucagacauauguuaacaucagcaacaccaacuuugcugcuggacagucagugguucccgugaaauuagcgggcaauuccucucucugcccuguuaguggaugggcuauauacaguaaagacaacaguguaagaaucgguuccaagggggauguguuugucauaagggaaccauucauaucaugcucccccuuggaaugcagaaccuucuucuugacucaaggggccuugcuaaaugacaaacauuccaauggaaccauuaaagacaggagcccauaucgaacccuaaugagcuguccuauuggugaaguucccucuccauacaacucaagauuugagucagucgcuuggucagcaagugcuugucaugauggcaucaauuggcuaacaauuggaauuucuggcccagacaguggggcaguggcuguguuaaaguacaauggcauaauaacagacacuaucaagaguuggagaaacaauauauugagaacacaagagucugaaugugcauguguaaaugguucuugcuuuaccauaaugaccgauggaccaagugauggacaggccucauacaagaucuucagaauagaaaagggaaagauagucaaaucagucgaaaugaaugccccuaauuaucacuaugaggaaugcuccuguuauccugauucuagugaaaucacaugugugugcagggauaacuggcauggcucgaaucgaccgugggugucuuucaaccagaaucuggaauaucagauaggauacauaugcagugggguuuucggagacaauccacgcccuaaugauaaaacaggcaguugugguccaguaucgucuaauggagcaaauggaguaaaaggauuuucauucaaauacggcaaugguguuuggauagggagaacuaaaagcauuaguucaagaaaagguuuugagaugauuugggauccgaauggauggacugggacagacaauaacuucucaauaaagcaagauaucguaggaauaaaagaguggucaggauauagcgggaguuuuguucagcauccagaacuaacagggcuggauuguauaagaccuugcuucuggguugaacuaaucagagggcgacccgaagagaacacaaucuggacuagcgggagcagcauauccuuuugugguguaaacagugacacuguggguuggucuuggccagacggugcugaguugccauuuaccauugacaaguaa

SEQ ID NO: 57740 - RNA, 1410 nt, Artificial Sequence
  derived and/or modified CDS sequence (wt) from neuraminidase__InfluenzaA__AIM55929
augaauccaaaccaaaagauaauaaccauugguucggucuguaugacaauuggaauggcuaacuuaauauuacaaauuggaaacauaaucucaauauggguuagccacucaauucaacuugggaaucaaagucagauugaaacaugcaaucaaagcgucauuacuuaugaaaacaacacuuggguaaaucagacauauguuaacaucagcaacaccaacuuugcugcuggacagucagugguuuccgugaaauuagcgggcaauuccucucucugcccuguuaguggaugggcuauauacaguaaagacaacaguguaagaaucgguuccaagggggauguguuugucauaagggaaccauucauaucaugcucccccuuggaaugcagaaccuucuucuugacucaaggggccuugcuaaaugacaaacauuccaauggaaccauuaaagacaggagcccauaucgaacccuaaugagcuguccuacuggugaaguucccucuccauacaacucaagauuugagucagucgcuuggucagcaagugcuugucaugauggcaucaauuggcuaacaauuggaauuucuggcccagacaguggggcaguggcuguguuaaaguacaauggcauaauaacagacacuaucaagaguuggagaaacaauauauugagaacacaagagucugaaugugcauguguaaaugguucuugcuuuaccauaaugaccgauggaccaagugauggacaggccucauacaagaucuucagaauagaaaagggaaagauagucaaaucagucgaaaugaaugccccuaauuaucacuaugaggaaugcuccuguuauccugauucuagugaaaucacaugugugugcagggauaacuggcauggcucgaaucgaccgugggugucuuucaaccagaaucuggaauaucagauaggauacauaugcagugggguuuucggagacaauccacgcccuaaugauaagacaggcaguugugguccaguaucgucuaauggagcaaauggaguaaaaggauuuucauucaaauacggcaaugguguuuggauagggagaacuaaaagcauuaguucaagaaaagguuuugagaugauuugggauccgaauggauggacugggacagacaauaacuucucaauaaagcaagauaucguaggaauaaaagaguggucaggauauagcgggaguuuuguucagcauccagaacuaacagggcuggauuguauaagaccuugcuucuggguugaacuaaucagagggcgacccgaagagaacacaaucuggacuagcgggagcagcauauccuuuugugguguaaacagugacacuguggguuggucuuggccagacggugcugaguugccauuuaccauugacaaguaa

SEQ ID NO: 57741 - RNA, 1410 nt, Artificial Sequence
  derived and/or modified CDS sequence (wt) from neuraminidase__InfluenzaA__AIM55940
augaauccaaaccaaaagauaauaaccauugguucggucuguaugacaauuggaauggcuaacuuaauauuacaaauuggaaacauaaucucuauauggguuagccacucaauucaacuugggaaucaaagucagauugaaacaugcaaucaaagcgucauuacuuaugaaaacaacacuuggguaaaucagacauauguuaacaucagcagcaccaacuuugcugcuggacagucagugguuccugugaaauuagcgggcaauuccucucucugcccuguuaguggaugggcuauauacaguaaagacaacaguguaagaaucgguuccaagggggauguguuugucauaagggaaccauucauaucaugcucccccuuggaaugcagaaccuucuucuugacucaaggggccuugcuaaaugacaaacauuccaauggaaccauuaaagacaggagcccauaucgaacccuaaugagcuguccuauuggugaaguucccucuccauacaacucaagauuugagucagucgcuuggucagcaagugcuugucaugauggcaucaauuggcuaacaauuggaauuucuggcccagacaguggggcaguggcuguguuaaaguacaauggcauaauaacagacacuaucaagaguuggagaaacaauauauugagaacacaagagucugaaugugcauguguaaaugguucuugcuuuaccauaaugaccgauggaccaagugauggacaggccucauacaagaucuucagaauagaaaagggaaagauagucaaaucagucgaaaugaaugccccuaauuaucacuaugaggaaugcuccuguuauccugauucuagugaaaucacaugugugugcagggauaacuggcauggcucgaaucgaccgugggugucuuucaaccagaaucuggaauaucagauaggauacauaugcagugggguuuucggagacaauccacgcccuaaugauaagacaggcaguugugguccaguaucgucuaauggagcaaauggaguaaaaggauuuucauucaaauacggcaaugguguuuggauagggagaacuaaaagcauuaguucaagaaaagguuuugagaugauuugggauccgaauggauggacugggacagacaauaacuucucaauaaagcaagauaucguaggaauaaaagaguggucaggauauagcgggaguuuuguucagcauccagaacuaacagggcuggauuguauaagaccuugcuucuggguugaacuaaucagagggcgacccgaagagaacacaaucuggacuagcgggagcagcauauccuuuugugguguaaacagugacacuguggguuggucuuggccagacggugcugaguugccauuuaccauugacaaguaa

SEQ ID NO: 57742 - RNA, 1410 nt, Artificial Sequence
  derived and/or modified CDS sequence (wt) from neuraminidase__InfluenzaA__AIM55965
augaauccaaaccaaaagauaauaaccauugguucggucuguaugacaauuggaauggcuaacuuaauauuacaaauuggaaacauaaucucaauauggguuagccacucaauucaacuugggaaucaaagucagauugaaacaugcaaucaaagcgucauuacuuaugaaaacaacacuuggguaaaucagacauauguuaacaucagcaacaccaacuuugcugcuggacagucagugguucccgugaaauuagcgggcaauuccucucucugcccuguuaguggaugggcuauauacaguaaagacaacaguguaagaaucgguuccaagggggauguguuugucauaagggaaccauucauaucaugcucccccuuggaaugcagaaccuucuucuugacucaaggggccuugcuaaaugacaagcauuccaauggaaccauuaaagacaggagcccauaucgaacccuaaugagcuguccuauuggugaaguucccucuccauacaacucaagauuugagucagucgcuuggucagcaagugcuugucaugauggcaucaauuggcuaacaauuggaauuucuggcccagacaguggggcaguggcuguguuaaaguacaauggcauaauaacagacacuaucaagaguuggagaaacaauauauugagaacacaagagucugaaugugcauguguaaaugguucuugcuuuacuauaaugaccgauggaccaagugauggacaggccucauacaagaucuucagaauagaaaagggaaagauagucaaaucagucgaaaugaaugccccuaauuaucacuaugaggaaugcuccuguuauccugauucuagugaaaucacaugugugugcagggauaacuggcauggcucgaaucgaccgugggugucuuucaaccagaaucuggaauaucagauaggauacauaugcagugggguuuucggagacaauccacgcccuaaugauaagacaggcaguugugguccaguaucgucuaauggagcaaauggaguaaaaggauuuucauucaaauacggcaaugguguuuggauagggagaacuaaaagcauuaguucaagaaaagguuuugagaugauuugggauccgaauggauggacugggacagacaauaacuucucaauaaagcaagauaucguaggaauaaaagaguggucaggauauagcgggaguuuuguucagcauccagaacuaacagggcuggauuguauaagaccuugcuucuggguugaacuaaucagagggcggcccgaagagaacacaaucuggacuagcgggagcagcauauccuuuugugguguaaacagugacgcuguggguuggucuuggccagacggugcugaguugccauuuaccauugacaaguaa

SEQ ID NO: 57743 - RNA, 1410 nt, Artificial Sequence
  derived and/or modified CDS sequence (wt) from neuraminidase__InfluenzaA__AIM55976
augaauccaaaccaaaagauaauaaccauugguucggucuguaugacaauuggaauggcuaacuuaauauuacaaauuggaaacauaaucucaauauggguuagccacucaauucaacuugggaaucaaagucagauugaaacaugcaaucaaagcgucauuacuuaugaaaacaacacuuggguaaaucagacauauguuaacaucagcaacaccaacuuugcugcuggacagucagugguuuccgugaaauuagcgggcaauuccucucucugcccuguuaguggaugggcuauauacaguaaagacaacaguguaagaaucgguuccaagggggauguguuugucauaagggaaccauucauaucaugcucccccuuggaaugcagaaccuucuucuugacucaaggggccuugcuaaaugacaaacauuccaauggaaccauuaaagacaggagcccauaucgaacccuaaugagcuguccuauuggugaaguucccucuccauacaacucaagauuugagucagucgcuuggucagcaagugcuugucaugauggcaucaauuggcuaacaauuggaauuucuggcccagacaguggggcaguggcuguguuaaaguacaauggcauaauaacagacacuaucaagaguuggagaaacaauauauugagaacacaagagucugaaugugcauguguaaaugguucuugcuuuaccauaaugaccgauggaccaagugauggacaggccucauacaagaucuucagaauagaaaagggaaagauagucaaaucagucgaaaugaaugccccuaauuaucacuaugaggaaugcuccuguuauccugauucuagugaaaucacaugugugugcagggauaacuggcauggcucgaaucgaccgugggugucuuucaaccagaaucuggaauaucagauaggauacauaugcagugggguuuucggagacaauccacgcccuaaugauaagacaggcaguugugguccaguaucgucuaauggagcaaauggaguaaaaggauuuucauucaaauacggcaaugguguuuggauagggagaacuaaaagcauuaguucaagaaaagguuuugagaugauuugggauccgaauggauggacugggacagacaauaacuucucaauaaagcaagauaucguaggaauaaaagaguggucaggauauagcgggaguuuuguucagcauccagaacuaacagggcuggauuguauaagaccuugcuucuggguugaacuaaucagagggcgacccgaagagaacacaaucuggacuagcgggagcagcauauccuuuugugguguaaacagugacacuguggguuggucuuggccagacggugcugaguugccauuuaccauugacaaguaa

SEQ ID NO: 57744 - RNA, 1410 nt, Artificial Sequence
  derived and/or modified CDS sequence (wt) from neuraminidase__InfluenzaA__AIM55987
augaauccaaaccaaaagauaauaaccauugguucggucuguaugacaauuggaauggcuaacuuaauauuacaaauuggaaacauaaucucaauauggguuagccacucaauucaacuugggaaucaaagucagauugaaacaugcaaucaaagcgucauuacuuaugaaaacaacacuuggguaaaucagacauauguuaacaucagcaacaccaacuuugcugcuggacagucagugguuuccgugaaauuagcgggcaauuccucucucugcccuguuaguggaugggcuauauacaguaaagacaacaguguaagaaucgguuccaagggggauguguuugucauaagggaaccauucauaucaugcucccccuuggaaugcagaaccuucuucuugacucaaggggccuugcuaaaugacaaacauuccaauggaaccauuaaagacaggagcccauaucgaacccuaaugagcuguccuacuggugaaguucccucuccauacaacucaagauuugagucagucgcuuggucagcaagugcuugucaugauggcaucaauuggcuaacaauuggaauuucuggcccagacaguggggcaguggcuguguuaaaguacaauggcauaauaacagacacuaucaagaguuggagaaacaauauauugagaacacaagagucugaaugugcauguguaaaugguucuugcuuuaccauaaugaccgauggaccaagugauggacaggccucauacaagaucuucagaauagaaaagggaaagauagucaaaucagucgaaaugaaugccccuaauuaucacuaugaggaaugcuccuguuauccugauucuagugaaaucacaugugugugcagggauaacuggcauggcucgaaucgaccgugggugucuuucaaccagaaucuggaauaucagauaggauacauaugcagugggguuuucggagacaauccacgcccuaaugauaagacaggcaguugugguccaguaucgucuaauggagcaaauggaguaaaaggauuuucauucaaauacggcaaugguguuuggauagggagaacuaaaagcauuaguucaagaaaagguuuugagaugauuugggauccgaauggauggacugggacagacaauaacuucucaauaaagcaagauaucguaggaauaaaagaguggucaggauauagcgggaguuuuguucagcauccagaacuaacagggcuggauuguauaagaccuugcuucuggguugaacuaaucagagggcgacccgaagagaacacaaucuggacuagcgggagcagcauauccuuuugugguguaaacagugacacuguggauuggucuuggccagacggugcugaguugccauuuaccauugacaaguaa

SEQ ID NO: 57745 - RNA, 1410 nt, Artificial Sequence
  derived and/or modified CDS sequence (wt) from neuraminidase__InfluenzaA__AIM55998
augaauccaaaccaaaagauaauaaccauugguucggucuguaugacaauuggaauggccaacuuaauauuacaaauuggaaacacaaucucaauauggguuagucacucaauucaacuugggaaucaaagucagauugaaacaugcaaucaaagcgucauuacuuaugaaaacaacacuuggguaaaucagacauauguuaacaucagcaacaccaacuuugcugcuggacagucagugguucccgugaaauuagcgggcaauuccucucucugcccuguuaguggaugggcuauauacaguaaagacaacaguguaagaaucgguuccaagggggauguguuugucauaagggaaccauucauaucaugcucccccuuggaaugcagaacuuucuucuugacucaaggggccuugcuaaaugacaaacauuccaauggaaccauuaaagacaggagcccauaucgaacccuaaugagcuguccuauuggugaaguucccucuccauacaacucaagauuugaaucagucgcuuggucagcaagugcuugucaugauggcaucaauuggcuaacaauuggaauuucuggcccagacaguggggcaguggcuguguuaaaguacaauggcauaauaacagacacuaucaagaguuggagaaacaauauauugagaacacaagagucugaaugugcauguguaaaugguucuugcuuuaccauaaugaccgauggaccaagugauggacaggccucauacaagaucuucagaauagaaaagggaaagauagucaaaucagucgaaaugaaugccccuaauuaucacuaugaggaaugcuccuguuauccugauucuagugaaaucacaugugugugcagggauaacuggcauggcucgaaucgaccgugggugucuuucaaccagaaucuggaauaucagauaggauacauaugcagugggguuuucggagacaauccacgcccuaaugauaagacaggcaguugugguccaguaucgucuaauggagcaaauggaguaaaaggauuuucauucaaauacggcaaugguguuuggauagggagaacuaaaagcauuaguucaagaaaagguuuugagaugauuugggauccgaauggauggacugggacagacaauaaauucucaauaaagcaagauaucguaggaauaaaugaguggucaggauauagcgggaguuuuguucagcauccagaacuaacagggcuggauuguauaagaccuugcuucuggguugaacuaaucagagggcgacccgaagagaacacaaucuggacuagcgggagcagcauauccuuuugugguguaaaaagugacacuguggguuggucuuggccagacggugcugaguugccauuuaccauugacaaguaa

SEQ ID NO: 57746 - RNA, 1410 nt, Artificial Sequence; identical to SEQ ID NO: 57743
  derived and/or modified CDS sequence (wt) from neuraminidase__InfluenzaA__AIM56009

SEQ ID NO: 57747 - RNA, 1410 nt, Artificial Sequence; identical to SEQ ID NO: 57743
  derived and/or modified CDS sequence (wt) from neuraminidase__InfluenzaA__AIM56020

SEQ ID NO: 57748 - RNA, 1410 nt, Artificial Sequence
  derived and/or modified CDS sequence (wt) from neuraminidase__InfluenzaA__AIM56031
augaauccaaaccaaaagauaauaaccauugguucggucuguaugacaauuggaauggcuaacuuaauauuacaaauuggaaacauaaucucaauauggguuagccacucaauucaacuugggaaucaaagucagauugaaacaugcaaucaaagcgucaucacuuaugaaaacaacacuuggguaaaucagacauauguuaacaucagcaacaccaacuuugcugcuggacagucagugguuuccgugaaauuagcgggcaauuccucucucugcccuguuaguggaugggcuauauacaguaaagacaacaguguaagaaucgguuccaagggggauguguuugucauaagggaaccauucauaucaugcucccccuuggaaugcagaaccuucuucuugacucaaggggccuugcuaaaugacaaacauuccaauggaaccauuaaagacaggagcccauaucgaacccuaaugagcuguccuauuggugaaguucccucuccauacaacucaagauuugagucagucgcuuggucagcaagugcuugucaugauggcaucaauuggcuaacaauuggaauuucuggcccagacaguggggcaguggcuguguuaaaguacaauggcauaauaacagacacuaucaagaguuggagaaacaauauauugagaacacaagagucugaaugugcauguguaaaugguucuugcuuuaccauaaugaccgauggaccaagugauggacaggccucauacaagaucuucagaauagaaaagggaaagauagucaaaucagucgaaaugaaugccccuaauuaucacuaugaggaaugcuccuguuauccugauucuagugaaaucacaugugugugcagggauaacuggcauggcucgaaucgaccgugggugucuuucaaccagaaucuggaauaucagauaggauacauaugcagugggguuuucggagacaauccacgcccuaaugauaagacaggcaguugugguccaguaucgucuaauggagcaaauggaguaaaaggauuuucauucaaauacggcaaugguguuuggauagggagaacuaaaagcauuaguucaagaaaagguuuugagaugauuugggauccgaauggauggacugggacagacaauaacuucucaauaaagcaagauaucguaggaauaaaagaguggucaggauauagcgggaguuuuguucagcauccagaacuaacagggcuggauuguauaagaccuugcuucuggguugaacuaaucagagggcgacccgaagagaacacaaucuggacuagcgggagcagcauauccuuuugugguguaaacagugacacuguggguuggucuuggccagacggugcugaguugccauuuaccauugacaaguaa

SEQ ID NO: 57749 - RNA, 1410 nt, Artificial Sequence
  derived and/or modified CDS sequence (wt) from neuraminidase__InfluenzaA__AIM56042
augaauccaaaccaaaagauaauaaccauugguucggucuguaugacaauuggaauggcuaacuuaauauuacaaauuggaaacauaaucucaauauggguuagccacucaauucaacuugggaaucaaagucagauugaaacaugcaaucaaagcgucauuacuuaugaaaacaacacuuggguaaaucagacauauguuaacaucagcaacaccaacuuugcugcuggacagucagugguucccgugaaauuagcgggcaauuccucucucugcccuguuaguggaugggcuauauacaguaaagacaacaguguaagaaucgguuccaagggggauguguuugucauaagggaaccauucauaucaugcucccccuuggaaugcagaaccuucuucuugacucaaggggccuugcuaaaugacaaacauuccaauggaaccauuaaagacaggagcccauaucgaacccuaaugagcuguccuauuggugaaguucccucuccauacaacucaagauuugagucagucgcuuggucagcaagugcuugucaugauggcaucaauuggcuaacaauuggaauuucuggcccagacaguggggcaguggcuguguuaaaguacaauggcauaauaacagacacuaucaagaguuggagaaacaauauauugagaacacaagagucugaaugugcauguguaaaugguucuugcuuuaccauaaugaccgauggaccaaguaauggacaggccucauacaagaucuucagaauagaaaagggaaagauagucaaaucagucgaaaugaaugccccuaauuaucacuaugaggaaugcuccuguuauccugauucuagugaaaucacaugugugugcagggauaacuggcauggcucgaaucgaccgugggugucuuucaaccagaaucuggaauaucagauaggauacauaugcagugggguuuucggagacaauccacgcccuaaugauaaaacaggcaguugugguccaguaucgucuaauggagcaaauggaguaaaaggauuuucauucaaauacggcaaugguguuuggauagggagaacuaaaagcauuaguucaagaaaagguuuugagaugauuugggauccgaauggauggacuggaacagacaauaacuucucaauaaagcaagauaucguaggaauaaaagaguggucaggauauagcgggaguuuuguucagcauccagaacuaacagggcuggauuguauaagaccuugcuucuggguugaacuaaucagagggcgacccgaagagaacacaaucuggacuagcgggagcagcauauccuuuugugguguaaacagugacacuguggguuggucuuggccagacggugcugaguugccauuuaccauugacaaguaa

SEQ ID NO: 57750 - RNA, 1410 nt, Artificial Sequence
  derived and/or modified CDS sequence (wt) from neuraminidase__InfluenzaA__AIM56053
augaauccaaaccaaaagauaauaaccauugguucggucuguaugacaauuggaauggcuaacuuaauauuacaaauuggaaacauaaucucaauauggguuagccacucaauucaacuugggaaucaaagucagauugaaacaugcaaucaaagcgucauuacuuaugaaaacaacacuuggguaaaucagacauauguuaacaucagcaacaccaacuuugcugcuggacagucagugguuuccgugaaauuagcgggcaauuccucucucugcccuguuaguggaugggcuauauacaguaaagacaacaguguaagaaucgguuccaagggggauguguuugucauaagggaaccauucauaucaugcucccccuuggaaugcagaaccuucuucuugacucaaggggccuugcuaaaugacaaacauuccaauggaaccauuaaagacaggagcccauaucgaacccuaaugagcuguccuauuggugaaguucccucuccauacaacucaagauuugagucagucgcuuggucagcaagugcuugucaugauggcaucaauuggcuaacaauuggaauuucuggcccagacaguggggcaguggcuguguuaaaguacaauggcauaauaacagacacuaucaagaguuggagaaacaauauauugagaacacaagagucugaaugugcauguguaaaugguucuugcuuuaccauaaugaccgauggaccaagugaugaacaggccucauacaagaucuucagaauagaaaagggaaagauagucaaaucagucgaaaugaaugccccuaauuaucacuaugaggaaugcuccuguuauccugauucuagugaaaucacaugugugugcagggauaacuggcauggcucgaaucgaccgugggugucuuucaaccagaaucuggaauaucagauaggauacauaugcagugggguuuucggagacaauccacgcccuaaugauaagacaggcaguugugguccaguaucgucuaauggagcaaauggaguaaaaggauuuucauucaaauacggcaaugguguuuggauagggagaacuaaaagcauuaguucaagaaaagguuuugagaugauuugggauccgaauggauggacugggacagacaauaacuucucaauaaagcaagauaucguaggaauaaaagaguggucaggauauagcgggaguuuuguucagcauccagaacuaacagggcuggauuguauaagaccuugcuucuggguugaacuaaucagagggcgacccgaagagaacacaaucuggacuagcgggagcagcauauccuuuugugguguaaacagugacacuguggguuggucuuggccagacggugcugaguugccauuuaccauugacaaguaa

SEQ ID NO: 57751 - RNA, 1410 nt, Artificial Sequence
  derived and/or modified CDS sequence (wt) from neuraminidase__InfluenzaA__AIM56064
augaauccaaaccaaaagauaauaaccauugguucggucuguaugacaauuggaauggcuaacuuaauauuacaaauuggaaacauaaucucaauauggguuagccacucaauucaacuugggaaucaaagucagauugaaacaugcaaucaaagcgucauuacuuaugaaaacaacacuuggguaaaucagacauauguuaacaucagcaacaccaacuuugcugcuggacagucagugguucccgugaaauuagcgggcaauuccucucucugcccuguuaguggaugggcuauauacaguaaagacaacaguguaagaaucgguuccaagggggauguguuugucauaagggaaccauucauaucaugcucccccuuggaaugcagaaccuucuucuugacucaaggggccuugcuaaaugacaagcauuccaauggaaccauuaaagacaggagcccauaucgaacccuaaugagcuguccuauuggugaaguucccucuccauacaacucaagauuugagucagucgcuuggucagcaagugcuugucaugauggcaucaauuggcuaacaauuggaauuucuggcccagacaguggggcaguggcuguguuaaaguacaauggcauaauaacagacacuaucaagaguuggagaaacaauauauugagaacacaagagucugaaugugcauguguaaaugguucuugcuuuacuauaaugaccgauggaccaagugauggacaggccucauacaagaucuucagaauagaaaagggaaagauagucaaaucagucgaaaugaaugccccuaauuaucacuaugaggaaugcuccuguuauccugauucuagugaaaucacaugugugugcagggauaacuggcauggcucgaaucgaccgugggugucuuucaaccagaaucuggaauaucagauaggauacauaugcagugggguuuucggagacaauccacgcccuaaugauaagacaggcaguugugguccaguaucgucuaauggagcaaauggaguaaaaggauuuucauucaaauacggcaaugguguuuggauagggagaacuaaaagcauuaguucaagaaaagguuuugagaugauuugggauccgaauggauggacugggacagacaauaacuucucaauaaagcaagauaucguaggaauaaaagaguggucaggauauagcgggaguuuuguucagcauccagaacuaacagggcuggauuguauaagaccuugcuucuggguugaacuggucagagggcgacccgaagagaacacaaucuggacuagcgggagcagcauauccuuuugugguguaaacagugacacuguggguuggucuuggccagacggugcugaguugccauuuaccauugacaaguaa

SEQ ID NO: 57752 - RNA, 1410 nt, Artificial Sequence
  derived and/or modified CDS sequence (wt) from neuraminidase__InfluenzaA__AIM56086
augaauccaaaccaaaagauaauaaccauugguucggucuguaugacaauuggaauggcuaacuuaauauuacaaauuggaaacauaaucucaauauggguuagccacucaauucaacuugggaaucaaagucauauugaaacaugcaaucaaagcgucauuacuuaugaaaacaacacuuggguaaaucagacauauguuaacaucagcaacaccaacuuugcugcuggacagucagugguucccgugaaauuagcgggcaauuccucucucugcccuguuaguggaugggcuauauacaguaaagacaacaguguaagaaucgguuccaagggggauguguuugucauaagggaaccauucauaucaugcucccccuuggaaugcagaaccuucuucuugacucaaggggccuugcuaaaugacaaacauuccaauggaaccauuaaagacaggagcccauaucgaacccuaaugagcuguccuauuggugaaguucccucuccauacaacucaagauuugagucagucgcuuggucagcaagugcuugucaugauggcaucaauuggcuaacaauuggaauuucuggcccagacaauggggcaguggcuguguuaaaguacaauggcauaauaacagacacuaucaagaguuggagaaacaauauauugagaacacaagagucugaaugugcauguguaaaugguucuugcuuuaccauaaugaccgauggaccaagugauggacaggccucauacaagaucuucagaauagaaaagggaaagauagucaaaucagucgaaaugaaugccccuaauuaucacuaugaggaaugcuccuguuauccugauucuagugaaaucacaugugugugcagggauaacuggcauggcucgaaucgaccgugggugucuuucaaccagaaucuggaauaucagauaggauacauaugcagugggguuuucggagacaauccacgcccuaaugauaagacaggcaguugugguccaguaacgucuaauggagcaaauggaguaaaaggauuuucauucaaauacggcaaugguguuuggauagggagaacuaaaagcauuaguucaagaaaagguuuugagaugauuugggauccgaauggauggacugggacagacaauaacuucucaauaaagcaagauaucauaggaauaaaagaguggucaggauauagcgggaguuuuguucagcauccagaacuaacagggcuggauuguauaagaccuugcuucuggguugaacuaaucagagggcgacccgaagagaacacaaucuggacuagcgggagcagcauauccuuuugugguguaaacagugacacuguggguuggucuuggccagacggugcugaguugccauuuaccauugacaaguaa

SEQ ID NO: 57753 - RNA, 1410 nt, Artificial Sequence
  derived and/or modified CDS sequence (wt) from neuraminidase__InfluenzaA__AIM56097
augaauccaaaccaaaagauaauaaccauugguucggucuguaugacaauuggaauggcuaacuuaauauuacaaauuggaaacauaaucucaauauggguuagccacucaauucaacuugggaaucaaagucagauugaaacaugcaaucaaagcgucauuacuuaugaaaacaacacuuggguaaaucagacauauguuaacaucagcaacaccaacuuugcugcugaacagucagugguuuccgugaaauuagcgggcaauuccucucucugcccuguuaguggaugggcuauauacaguaaagacaacaguguaagaaucgguuccaagggggauguguuugucauaagggaaccauucauaucaugcucccccuuggaaugcagaaccuucuucuugacucaaggggccuugcuaaaugacaaacauuccaauggaaccauuaaagacaggagcccauaucgaacccugaugagcuguccuauuggugaaguucccucuccauacaacucaagauuugagucagucgcuuggucagcaagugcuugccaugauggcaucaauuggcuaacaauuggaauuucuggcccagacaguggggcaguggcuguguuaaaguacaauggcauaauaacagacacuaucaagaguuggagaaacaauauauugagaacacaagagucugaaugugcauguguaaaugguucuugcuuuaccauaaugaccgauggaccaagugauggacaggccucauacaagaucuucagaauagaaaagggaaagauagucaaaucaguugaaaugaaugccccuaauuaucacuaugaggaaugcuccuguuauccugauucuagugaaaucacaugugugugcagggauaacuggcauggcucgaaucgaccgugggugucuuucaaccagaaucuggaauaucagauaggauacauaugcaguggggucuucggagacaauccacgcccuaaugauaagacaggcaguugugguccaguaucgucuaauggagcaaauggaguaaaaggauuuucauucaaauacggcaaugguguuuggauagggagaacuaaaagcauuaguucaagaaaagguuuugagaugauuugggauccgaauggauggacugggacagacaauaacuucucaauaaagcaagauaucguaggaauaaaagaguggucaggauauagcgggaguuuuguucagcauccagaacuaacagggcuggauuguauaagaccuugcuucuggguugaacuaaucagagggcgacccgaagagaacacaaucuggacuagcgggagcagcauauccuuuugugguguaaacagugacacuguggguuggucuuggccagacggugcugaguugccauuuaccauugacaaguaa

SEQ ID NO: 57754 - RNA, 1410 nt, Artificial Sequence
  derived and/or modified CDS sequence (wt) from neuraminidase__InfluenzaA__AIM56108
augaauccaaaccaaaagauaauaaccauugguucggucuguaugacaauuggaauggcuaacuuaauauuacaaauuggaaacauaaucucaauauggguuagccacucaauucaacuugggaaucaaagucagauugaaacaugcaaucaaagcgucauuacuuaugaaaacaacacuuggauaaaucagacauauguuaauaucagcaacaccaacuuugcugcuggacagucagugguucccgugaaauuagcgggcaauuccucucucugcccuguuaguggaugggcuauauacaguaaagacaacaguguaagaaucgguuccaagggggauguguuugucauaagggaaccauucauaucaugcucccccuuggaaugcagaaccuucuucuugacucaaggggccuugcuaaaugacaagcauuccaauggaaccauuaaagacaggagcccauaucgaacccuaaugagcuguccuauuggugaaguucccucuccauacaacucaagauuugagucagucgcuuggucagcaagugcuugucaugauggcaucaauuggcuaacaauuggaauuucuggcccagacaguggggcaguggcuguguuaaaguacaauggcauaauaacagacacuaucaagaguuggagaaacaauauauugagaacacaagagucugaaugugcauguguaaaugguucuugcuuuacuauaaugaccgauggaccaagugauggacaggccucauacaagaucuucagaauagaaaagggaaagauagucaaaucagucgaaaugaaugccccuaauuaucacuaugaggaaugcuccuguuauccugauucuagugagaucacaugugugugcagggauaacuggcauggcucgaaucgaccgugggugucuuucaaccagaaucuggaauaucagauaggauacauaugcagugggguuuucggagacaauccacgcccuaaugauaagacaggcaguugugguccaguaucgucuaauggagcaaauggaguaaaaggauuuucauucaaauacggcaaugguguuuggauagggagaacuaaaagcauuaguucaagaaaagguuuugagaugauuugggauccgaauggauggacugggacagacaauaacuucucaauaaagcaagauaucguaggaauaaaagaguggucaggauauagcgggaguuuuguucagcauccagaacuaacagggcuggauuguauaagaccuugcuuuuggguugaacuaaucagagggcgacccgaagagaacacaaucuggacuagcgggagcagcauauccuuuugugguguaaacagugacacuguggguuggucuuggccagacggugcugaguugccauuuaccauugacaaguaa

SEQ ID NO: 57755 - RNA, 1410 nt, Artificial Sequence
  derived and/or modified CDS sequence (wt) from neuraminidase__InfluenzaA__AIM56119
augaauccaaaccaaaagauaauaaccauugguucggucuguaugacaauuggaauggcuaacuuaauauuacaaauuggaaacauaaucucaauauggguuagccacucaauucaaauuggaaaucaaagucagauugaaacaugcaaucaaagcgucauuacuuaugaaaacaacacuuggguaaaucagacauauguuaacaucagcaacaccaacuuugcugcuggacagucagugguuuccgugaaauuagcgggcaauuccucucucugcccuguuaguggaugggcuauauacaguaaagacaacaguguaagaaucgguuccaagggggauguguuugucauaagggaaccauucauaucaugcucucccuuggaaugcagaaccuucuucuugacucaaggggccuugcuaaaugacaaacauuccaauggaaccauuaaagacaggagcccauaucgaacccuaaugagcuguccuauuggugaaguucccucuccauacaacucaagauuugagucagucgcuuggucagcaagugcuugucaugauggcaucaauuggcuaacaauuggaauuucuggcccagacaguggggcaguggcuguguuaaaguacaauggcauaauaacagacacuaucaagaguuggaggaacaauauauugagaacacaagagucugaaugugcauguguaaaugguucuugcuuuaccauaaugaccgauggaccaagugauggacaggccucauacaagaucuucagaauagaaaagggaaagauagucaaaucagucgaaaugaaugccccuaauuaucacuaugaggaaugcuccuguuauccugauucuagugaaaucacaugugugugcagggauaacuggcauggcucgaaucgaccgugggugucuuucaaccagaaucuggaauaucagauaggauacauaugcagugggguuuucggagacaauccacgcccuaaugauaagacaggcaguugugguccaguaucgucuaauggagcaaauggaguaaaaggauuuucauucaaauacggcaaugguguuuggauagggagaacuaaaagcauuaguucaagaaaagguuuugagaugauuugggauccgaauggauggacugggacugacaauaaauucucaauaaagcaagauaucguaggaauaaaugaguggucaggauauagcgggaguuuuguucagcauccagaacuuacagggcuggauuguauaagaccuugcuucuggguugaacuaaucagagggcgacccgaagagaacacaaucuggacuagcgggagcagcauauccuuuugugguguaaacagugacacuguggguuggucuuggccagacggugcugaguugccauuuaccauugacaaguaa

SEQ ID NO: 57756 - RNA, 1410 nt, Artificial Sequence
  derived and/or modified CDS sequence (wt) from neuraminidase__InfluenzaA__AIM56130
augaauccaaaccaaaagauaauaaccauugguucggucuguaugacaauuggaauggcuaacuuaauauuacaaauuggaaacauaaucucaauauggguuagucacucaauucaacuugggaaucaaagucagauugaaacaugcaaucaaagcgucauuacuuaugaaaacaacacuuggguaaaucagacauauguuaacaucagcaacaccaacuuugcugcuggacagucagugguucccgugaaauuagcgggcaauuccucucucugcccuguuaguggaugggcuauauacaguaaagacaacaguguaagaaucgguuccaagggggauguguuugucauaagggaaccauucauaucaugcucccccuuggaaugcagaacuuucuucuugacucaaggggccuugcuaaaugacaaacauuccaauggaaccauuaaagacaggagcccauaucgaacccuaaugagcuguccuauuggugaaguucccucuccauacaacucaagauuugaaucagucgcuuggucagcaagugcuugucaugauggcaucaauuggcuaacaauuggaauuucuggcccagacaguggggcaguggcuguguuaaaguacaauggcauaauaacagacacuaucaagaguuggagaaacaauauauugagaacacaagagucugaaugugcauguguaaaugguucuugcuuuaccauaaugaccgauggaccaagugauggacaggccucauacaagaucuucagaauagaaaagggaaagauagucaaaucagucgaaaugaaugccccuaauuaucacuaugaggaaugcuccuguuauccugauucuagugaaaucacaugugugugcagggauaacuggcauggcucgaaucgaccgugggugucuuucaaccagaaucuggaauaucagauaggauacauaugcagugggguuuucggagacaauccacgcccuaaugauaagacaggcaguugugguccaguaucgucuaauggagcaaauggaguaaaaggauuuucauucaaauacggcaaugguguuuggauagggagaacuaaaagcauuaguucaagaaaagguuuugagaugauuugggauccgaauggauggacugggacagacaauaaauucucaauaaagcaagauaucguaggaauaaaugaguggucaggauauagcgggaguuuuguucagcauccagaacuaacagggcuggauuguauaagaccuugcuucuggguugaacuaaucagagggcgacccgaagagaacacaaucuggacuagcgggagcagcauauccuuuugugguguaaaaagugacacuguggguuggucuuggccagacggugcugaguugccauuuaccauugacaaguaa

SEQ ID NO: 57757 - RNA, 1410 nt, Artificial Sequence
  derived and/or modified CDS sequence (wt) from neuraminidase__InfluenzaA__AIM56141
augaauccaaaccaaaagauaauaaccauugguucgguauguaugacaauuggaauggcuaacuuaauauuacaaauuggaaacauaaucucaauauggguuagccacucaauucaacuugggaaucaaagucagauugaaacaugcaaucaaagcgucauuauuuaugaaaacaacacuuggguaaaucagacauauguuaacaucagcaacaccaacuuugcugcugggcagucagugguuuccgugaaauuagcgggcaauuccucucucugcccuguuaguggaugggcuauauacaguaaagacaacaguguaagaaucgguuccaagggggauguguuugucauaagggaaccauucauaucaugcucccccuuggaaugcagaaccuucuucuugacucaaggggccuugcuaaaugacaaacauuccaauggaaccauuaaagacaggagcccauaucgaacccuaaugagcuguccuauuggugaaguucccucuccauacaacucaagauuugagucagucgcuuggucagcaagugcuugucaugauggcaucaauuggcuaacaauuggaauuucuggcccagacaguggggcaguggcuguguuaaaguacaauggcauaauaacagacacuaucaagaguuggagaaacaauauauugagaacacaagagucugaaugugcauguguaaaugguucuugcuuuaccauaaugaccgauggaccaagugauggacaggccucauacaagaucuucagaauagaaaagggaaagauagucaaaucagucgaaaugaaugccccuaauuaucacuaugaggaaugcuccuguuauccugauucuagugaaaucacaugugugugcagggauaacuggcauggcucgaaucgaccgugggugucuuucaaccagaaucuggaauaucagauaggauacauaugcagugggguuuucggagacaauccacgcccuaaugauaagacaggcaguugugguccaguaucgucuaauggagcaaauggaguaaaaggauuuucauucaaauacggcaaugguguuuggauagggagaacuaaaagcauuaguucaagaaaagguuuugagaugauuugggauccgaauggauggacugggacagacaauaacuucucaauaaagcaagauaucguaggaauaaaagaguggucaggauauagcgggaguuuuguucagcauccagaacuaacagggcuggauuguauaagaccuugcuucuggguugaacuaaucagagggcgacccgaagagaacacaaucuggacuagcgggagcagcauauccuuuugugguguaaacagugacacuguggguuggucuuggccagacggugcugaguugccauuuaccauugacaaguaa

SEQ ID NO: 57758 - RNA, 1410 nt, Artificial Sequence; identical to SEQ ID NO: 57743
  derived and/or modified CDS sequence (wt) from neuraminidase__InfluenzaA__AIM56152

SEQ ID NO: 57759 - RNA, 1410 nt, Artificial Sequence
  derived and/or modified CDS sequence (wt) from neuraminidase__InfluenzaA__AIM56163
augaauccaaaccaaaagauaauaaccauugguucggucuguaugacaauuggaauggcuaacuuaauauuacaaauuggaaacauaaucucaauauggguuagccacucaauucaacuugggaaucaaagucauauugaaacaugcaaucaaagcgucauuacuuaugaaaacaacacuuggguaaaucagacauauguuaacaucagcaacaccaacuuugcugcuggacagucagugguucccgugaaauuagcgggcaauuccucucucugcccuguuaguggaugggcuauauacaguaaagacaacaguguaagaaucgguuccaagggggauguguuugucauaagggaaccauucauaucaugcucccccuuggaaugcagaaccuucuucuugacucaaggggccuugcuaaaugacaaacauuccaauggaaccauuaaagacaggagcccauaucgaacccuaaugagcuguccuauuggugaaguucccucuccauacaacucaagauuugagucagucgcuuggucagcaagugcuugucaugauggcaucaauuggcuaacaauuggaauuucuggcccagacaauggggcaguggcuguguuaaaguacaauggcauaauaacagacacuaucaagaguuggagaaacaauauauugagaacacaagagucugaaugugcauguguaaaugguucuugcuuuaccauaaugaccgauggaccaagugauggacaggccucauacaagaucuucagaauagaaaagggaaagauagucaaaucagucgaaaugaaugccccuaauuaucacuaugaggaaugcuccuguuauccugauucuagugaaaucacaugugugugcagggauaacuggcauggcucgaaucgaccgugggugucuuucaaccagaaucuggaauaucagauaggauacauaugcagugggguuuucggagacaauccacgcccuaaugauaagacaggcaguugugguccaguaacgucuaauggagcaaauggaguaaaaggauuuucauucaaauacggcaaugguguuuggauagggagaacuaaaagcauuaguucaagaaaagguuuugagaugauuugggauccgaauggauggacugggacagacaauaacuucucaauaaagcaagauaucguaggaauaaaagaguggucaggauauagcgggaguuuuguucagcauccagaacuaacagggcuggauuguauaagaccuugcuucuggguugaacuaaucagagggcgacccgaagagaacacaaucuggacuagcgggagcagcauauccuuuugugguguaaacagugacacuguggguuggucuuggccagacggugcugaguugccauuuaccauugacaaguaa

SEQ ID NO: 57760 - RNA, 1410 nt, Artificial Sequence
  derived and/or modified CDS sequence (wt) from neuraminidase__InfluenzaA__AIM56174
augaauccaaaccaaaagauaauaaccauugguucggucuguaugacaauuggaauggcuaacuuaauauuacaaauuggaaacauaaucucaauauggguuagccacucaauucaacuugggaaucaaagucagauugaaacaugcaaucaaagcgucauuacuuaugaaaacaacacuuggguaaaucagacauauguuaacaucagcaacaccaacuuugcugcuggacagucagugguucccgugaaauuagcgggcaauuccucucucugcccuguuaguggaugggcuauauacaguaaagacaacaguguaagaaucgguuccaagggggauguguuugucauaagggaaccauucauaucaugcucccccuuggaaugcagaaccuucuucuugacucaaggggccuugcuaaaugacaagcauuccaauggaaccauuaaagacaggagcccauaucgaacccuaaugagcuguccuauuggugaaguucccucuccauacaacucaagauuugagucagucgcuuggucagcaagugcuugucaugauggcaucaauuggcuaacaauuggaauuucuggcccagacaguggggcaguggcuguguuaaaguacaauggcauaauaacagacacuaucaagaguuggagaaacaauauauugagaacacaagagucugaaugugcauguguaaaugguucuugcuuuacuauaaugaccgauggaccaagugauggacaggccucauacaagaucuucagaauagaaaagggaaagauagucaaaucagucgaaaugaaugccccuaauuaucacuaugaggaaugcuccuguuauccugauucuagugaaaucacaugugugugcagggauaacuggcauggcucgaaucgaccgugggugucuuucaaccagaaucuggaauaucagauaggauacauaugcagugggguuuucggagacaauccacgcccuaaugauaagacaggcaguugugguccaguaucgucuaauggagcaaauggaguaaaaggauuuucauucaaauacggcaaugguguuuggauagggagaacuaaaagcauuaguucaagaaaagguuuugagaugauuugggauccgaauggauggacugggacagacaauaacuucucaauaaagcaagauaucguaggaauaaaagaguggucaggauauagcgggaguuuuguucagcauccagaacuaacagggcuggauuguauaagaccuugcuucuggguugaacuaaucagagggcgacccgaagagaacacaaucuggacuagcgggagcagcauauccuuuugugguguaaacagugacacuguggguuggucuuggccagacggugcugaguugccauuuaccguugacaaguaa

SEQ ID NO: 57761 - RNA, 1410 nt, Artificial Sequence; identical to SEQ ID NO: 57756
  derived and/or modified CDS sequence (wt) from neuraminidase__InfluenzaA__AIM56185

SEQ ID NO: 57762 - RNA, 1410 nt, Artificial Sequence
  derived and/or modified CDS sequence (wt) from neuraminidase__InfluenzaA__AIM56196
augaauccaaaccaaaagauaauaaccauugguucggucuguaugacaauuggaauggcuaacuuaauauuacaaauuggaaacauaaucucaauauggguuagccacucaauucaaauuggaaaucaaagucagauugaaacaugcaaucaaagcgucauuacuuaugaaaacaacacuuggguaaaucagacauauguuaacaucagcaacaccaacuuugcugcuggacagucaguggucuccgugaaauuagcgggcaauuccucucucugcccuguuaguggaugggcuauauacaguaaagacaacaguguaagaaucgguuccaagggggauguguuugucauaagggaaccauucauaucaugcucucccuuggaaugcagaaccuucuucuugacucaaggggccuugcuaaaugacaaacauuccaauggaaccauuaaagacaggagcccauaucgaacccuaaugagcuguccuauuggugaaguucccucuccauacaacucaagauuugagucagucgcuuggucagcaagugcuugucaugauggcaucaauuggcuaacaauuggaauuucuggcccagacaguggggcaguggcuguguuaaaguacaauggcauaauaacagacacuaucaagaguuggaggaacaauauauugagaacacaagagucugaaugugcauguguaaaugguucuugcuuuaccauaaugaccgauggaccaagugauggacaggccucauacaagaucuucagaauagaaaagggaaagauagucaaaucagucgaaaugaaugccccuaauuaucacuaugaggaaugcuccuguuauccugauucuagugaaaucacaugugugugcagggauaacuggcauggcucgaaucgaccgugggugucuuucaaccagaaucuggaauaucagauaggauacauaugcagugggguuuucggagacaauccacgcccuaaugauaagacaggcaguugugguccaguaucgucuaauggagcaaauggaguaaaaggauuuucauucaaauacggcaaugguguuuggauagggagaacuaaaagcauuaguucaagaaaagguuuugagaugauuugggauccgaauggauggacugggacugacaauaaauucucaauaaagcaagauaucguaggaauaaaugaguggucaggauauagcgggaguuuuguucagcauccagaacuaacagggcuggauuguauaagaccuugcuucuggguugaacuaaucagagggcgacccgaagagaacacaaucuggacuagcgggagcagcauauccuuuugugguguaaacagugacacuguggguuggucuuggccagacggugcugaguugccauuuaccauugacaaguaa

SEQ ID NO: 57763 - RNA, 1410 nt, Artificial Sequence
  derived and/or modified CDS sequence (wt) from neuraminidase__InfluenzaA__AIM56207
augaauccaaaccaaaagauaauaaccauugguucggucuguaugacaauuggaauggcuaacuuaauauuacaaauuggaaacauaaucucaauaugggucagccacucaauucaacuugggaaucaaagucagauugaaacaugcaaucaaagcgucauuacuuaugaaaacaacacuuggguaaaucagacauauguuaacaucagcaacaccaacuuugcugcuggacagucagugguucccgugaaauuagcgggcaauuccucucucugcccuguuaguggaugggcuauauacaguaaagacaacaguguaagaaucgguuccaagggggauguguuugucauaagggaaccauucauaucaugcucccccuuggaaugcagaaccuucuucuugacucaaggggccuugcuaaaugacaagcauuccaauggaaccauuaaagacaggagcccauaucgaacccuaaugagcuguccuauuggugaaguucccucuccauacaacucaagauuugagucagucgcuuggucagcaagugcuugucaugauggcaucaauuggcuaacaauuggaauuucuggcccagacaguggggcaguggcuguguuaaaguacaauggcauaauaacagacacuaucaagaguuggagaaacaauauauugagaacacaagagucugaaugugcauguguaaaugguucuugcuuuacuauaaugaccgauggaccaagugauggacaggccucauacaagaucuucagaauagaaaagggaaagauagucaaaucagucgaaaugaaugccccuaauuaucacuaugaggaaugcuccuguuauccugauucuagugaaaucacaugugugugcagggauaacuggcauggcucgaaucgaccgugggugucuuucaaccagaaucuggaauaucagauaggauacauaugcagugggguuuucggagacaauccacgcccuaaugauaagacaggcaguugugguccaguaucgucuaauggagcaaauggaguaaaaggauuuucauucaaauacggcaaugguguuuggauagggagaacuaaaagcauuaguucaagaaaagguuuugagaugauuugggauccgaauggauggacugggacagacaauaacuucucaauaaagcaagauaucguaggaauaaaagaguggucaggauauagcgggaguuuuguucagcauccagaacuaacagggcuggauuguauaagaccuugcuucuggguugaacuaaucagagggcggcccgaagagaacacaaucuggacuagcgggagcagcauauccuuuugugguguaaacagugacacuguggguuggucuuggccagacggugcugaguugccauuuaccauugacaaguaa

SEQ ID NO: 57764 - RNA, 1410 nt, Artificial Sequence
  derived and/or modified CDS sequence (wt) from neuraminidase__InfluenzaA__AIM56229
augaauccaaaccaaaagauaauaaccauugguucggucuguaugacaauuggaauggcuaacuuaauauuacaaauuggaaacacaaucucaauauggguuagccacucaauucaaauuggaaaucaaagucagauugaaacaugcaaucaaagcgucauuacuuaugaaaacaacacuuggguaaaucagacauauguuaacaucagcaacaccaacuuugcugcuggacagucagugguuuccgugaaauuagcgggcaauuccucucucugcccuguuaguggaugggcuauauacaguaaagacaacaguguaagaaucgguuccaagggggauguguuugucauaagggaaccauucauaucaugcucucccuuggaaugcagaaccuucuucuugacucaaggggccuugcuaaaugacaaacauuccaauggaaccauuaaagacaggagcccauaucgaacccuaaugagcuguccuauuggugaaguucccucuccauauaacucaagauuugagucagucgcuuggucagcaagugcuugucaugauggcaucaauuggcuuacaauuggaauuucuggcccagacaguggggcaguggcuguguuaaaguacaauggcauaauaacagacacuaucaagaguuggaggaacaauauauugagaacacaagagucugaaugugcauguguaaaugguucuugcuuuaccauaaugaccgauggaccaagugauggacaugccucauacaagaucuucagaauagaaaagggaaagauagucaaaucagucgaaaugaaugccccuaauuaucacuaugaggaaugcuccuguuauccugauucuagugaaaucacaugugugugcagggauaacuggcauggcucgaaucgaccgugggugucuuucaaccagaaucuggaauaucagauaggauacauaugcagugggguuuucggagacaauccacgcccuaaugauaagacaggcaguugugguccaguaucgucuaauggagcaaauggaguaaaaggauuuucauucaaauacggcaaugguguuuggauagggagaacuaaaagcauuaguucaagaaaagguuuugagaugauuugggauccgaauggauggacugggacugacaauaaauucucaauaaagcaagauaucguaggaauaaaugaguggucaggauauagcgggaguuuuguucagcauccagaauuaacagggcuggauuguauaagaccuugcuucuggguugaacuaaucagagggcgacccgaagagaacacaaucuggacuagcgggagcagcauauccuuuugugguguaaacagugacacuguggguuggucuuggccagacggugcugaguugccauuuaccauugacaaguaa

SEQ ID NO: 57765 - RNA, 1410 nt, Artificial Sequence
  derived and/or modified CDS sequence (wt) from neuraminidase__InfluenzaA__AIM56240
augaauccaaaccaaaagauaauaaccauugguucggucuguaugacaauuggaauggcuaacuuaauauuacaaauuggaaacauaaucucaauauggauuagccacucaauucaaguugggaaucaaagucagaucgaaacaugcaaucaaagcgucauuacuuaugaaaacaacacuuggguaaaucagacauauguuaacaucagcaacaccaacuuugcugcugggcagccagugguuuccgugaaauuagcgggcaauuccucucucugcucuguuaguggaugggcuauauacaguaaagacaacaguguaagaaucgguuccaagggggauguguuugucauaagggaaccauucauaucaugcucccccuuggaaugcagaaccuucuucuugacucaaggggccuugcuaaaugacaaacauuccaauggaaccauuaaagacaggagcccauaucgaaccuuaaugagcuguccuauuggugaaguucccucuccauacaacucaagauuugagucagucgcuuggucagcaagugcuugucaugauggcaucaauuggcuaacaauuggaauuucuggcccagacaguggggcaguggcuguguuaaaguacaacggcauaauaacagacacuaucaagaguuggagaaacgauauauugagaacacaagagucugaaugugcauguguaaaugguucuugcuuuaccauaaugaccgauggaccaagugauggacaagccucauacaagaucuucagaauagaaaagggaaagauagucaaaucagucgaaaugaaugccccuaauuaucacuaugaggaaugcuccuguuauccugauucuagugaaaucacaugugugugcagggauaacuggcauggcucgaaucgaccgugggugucuuucaaccagaaucuggaauaucagauaggauacauaugcagugggauuuucggagacaauccacgcccuaaugauaagacaggcaguugugguccaguaucgucuaauggagcaaauggaguaaaaggauuuucauucaaauacggcaaugguguuuggauagggagaacuaaaagcauuaguucaagaaaagguuuugagaugauuugggauccaaauggauggacugggacagacaauaacuucucaauaaagcaagauaucguaggaauaaaugaguggucaggauauagcgggaguuuuguucagcauccagaacuaacagggcuggauuguauaagaccuugcuucuggguugaacuaaucagagggcgacccaaagagaacacaaucuggacuagugggagcagcauauccuuuugugguguaaacagugacacgguggguuggucuuggccagacggugcugaguugccauuuaccauugacaaguaa

SEQ ID NO: 57766 - RNA, 1410 nt, Artificial Sequence
  derived and/or modified CDS sequence (wt) from neuraminidase__InfluenzaA__AIM56251
augaauccaaaccaaaagauaauaaccauugguucggucuguaugacaauuggaauggcuaacuuaauauuacaaauuggaaacauaaucucaauauggguuagccacucaauucaacuugggaaucaaagucauauugaaacaugcaaucaaagcgucauuacuuaugaaaacaacacuuggguaaaucagacauauguuaacaucagcaacaccaacuuugcugcuggacagucagugguucccgugaaauuagcgggcaauuccucucucugcccuguuaguggaugggcuauauacaguaaagacaacaguguaagaaucgguuccaagggggauguguuugucauaagggaaccauucauaucaugcucccccuuggaaugcagaaccuucuucuugacucaaggggccuugcuaaaugacaaacauuccaauggaaccauuaaagacaggagcccauaucgaacccuaaugagcuguccuauuggugaaguucccucuccauacaacucaagauuugagucagucgcuuggucagcaagugcuugucaugauggcaucaauuggcuaacaauuggaauuucuggcccagacaguggggcaguggcuguguuaaaguacaauggcauaauaacagacacuaucaagaguuggagaaacaauauauugagaacacaagagucugaaugugcauguguaaaugguucuugcuuuaccauaaugaccgauggaccaagugauggacaggccucauacaagaucuucagaauagaaaagggaaagauagucaaaucagucgaaaugaaugccccuaauuaucacuaugaggaaugcuccuguuauccugauucuagugaaaucacaugugugugcagggauaacuggcauggcucgaaucgaccgugggugucuuucaaccagaaucuggaauaucagauaggauacauaugcagugggguuuucggagacaauccacgcccuaaugauaagacaggcaguugugguccaguaucgucuaauggagcaaauggaguaaaaggauuuucauucaaauacggcaaugguguuuggauagggagaacuaaaagcauuaguucaagaaaagguuuugagaugauuugggauccgaauggauggacugggacagacaauaacuucucaauaaagcaagauaucguaggaauaaaagaguggucaggauauagcgggaguuuuguucagcauccagaacuaacagggcuggauuguauaagaccuugcuucuggguugaacuaaucagagggcgacccgaagagaacacaaucuggacuagcgggagcagcauauccuuuugugguguaaacagugacacuguggguuggucuuggccagacggugcugaguugccauuuaccauugacaaguaa

SEQ ID NO: 57767 - RNA, 1410 nt, Artificial Sequence; identical to SEQ ID NO: 57766
  derived and/or modified CDS sequence (wt) from neuraminidase__InfluenzaA__AIM56262

SEQ ID NO: 57768 - RNA, 1410 nt, Artificial Sequence
  derived and/or modified CDS sequence (wt) from neuraminidase__InfluenzaA__AIM56273
augaauccaaaccaaaagauaauaaccauugguucggucuguaugacaauuggaauggcuaacuuaauauuacaaauuggaaacauaaucucaauauggguuagccacucaauucaacuugggaaucaaagucagauugaaacaugcaaucaaagcgucauuacuuaugaaaacaacacuuggguaaaucagacauauguuaacaucagcaacaccaacuucgcugcuggacagucagugguucccgugaaauuagcuggcaauuccucucucugcccuguuaguggaugggcuauauacaguaaagacaacaguguaagaaucgguuccaagggggauguguuugucauaagggaaccauucauaucaugcucccccuuggaaugcagaaccuucuucuugacucaaggggccuugcuaaaugacaaacauuccaauggaaccauuaaagacaggagcccauaucgaacccuaaugagcuguccuauuggugaaguucccucuccguacaacucaagauuugagucagucgcuuggucagcaagugcuugucaugauggcaucaauuggcuaacaauuggaauuucuggcccagacaguggggcaguggcuguguuaaaguacaauggcauaauaacagacacuaucaagaguuggagaaacaauauauugagaacacaagagucugaaugugcauguguaaaugguucuugcuuuaccauaaugaccgauggaccaagugauggacaggccucauacaagaucuucagaauagaaaagggaaagauagucaaaucagucgaaaugaaugccccuaauuaucacuaugaggaaugcuccuguuauccugauucuagugaaaucacaugugugugcagggauaacuggcauggcucgaaucgaccgugggugucuuucaaccagaaucuggaauaucagauaggauacauaugcagugggguuuucggagacaauccacgcccuaaugauaaaacaggcaguugugguccaguaucgucuaauggagcaaauggaguaaaaggauuuucauucaaauacggcaaugguguuuggauagggagaacuaaaagcauuaguucaagaaaagguuuugagaugauuugggauccgaauggauggacugggacagacaauaacuucucaauaaagcaagauaucguaggaauaaaagaguggucaggauauagcgggaguuuuguucagcauccagaacuaacagggcuggauuguauaagaccuugcuucuggguugaacuaaucagagggcgacccgaagagaacacaauuuggacuagcgggagcagcauauccuuuugugguguaaacagugacacuguggguuggucuuggccagacggugcugaguugccauuuaccauugacaaguaa

SEQ ID NO: 57769 - RNA, 1410 nt, Artificial Sequence
  derived and/or modified CDS sequence (wt) from neuraminidase__InfluenzaA__AIM56284
augaauccaaaccaaaagauaauaaccauugguucggucuguauaacaauuggaauggcuaacuuaauauuacaaauuggaaacauaaucucaauauggguuagccacucaauucaaauuggaaaucaaagucagauugaaacaugcaaucaaagcgucauuacuuaugaaaacaacacuuggguaaaucagacauauguuaacaucagcaacaccaacuuugcugcuggacagucagugguuuccgugaaauuagcgggcaauuccucucucugcccuguuaguggaugggcuauauacaguaaagacaacaguguaagaaucgguuccaagggggauguguuugucauaagggaaccauucauaucaugcucucccuuggaaugcagaaccuucuucuugacucaaggggccuugcuaaaugacaaacauuccaauggaaccauuaaagacaggagcccauaucgaacccuaaugagcuguccuauuggugaaguucccucuccauacaacucaagauuugagucagucgcuuggucagcaagugcuugucaugauggcaucaauuggcuaacaauuggaauuucuggcccagacaguggggcaguggcuguguuaaaguacaauggcauaauaacagacacuaucaagaguuggaggaacaauauauugagaacacaagagucugaaugugcauguguaaaugguucuugcuuuaccauaaugaccgauggaccaagugauggacaggccucauacaagaucuucagaauagaaaagggaaagauagucaaaucagucgaaaugaaugccccuaauuaucacuaugaggaaugcuccuguuauccugauucuagugaaaucacaugugugugcagggauaacuggcauggcucgaaucgaccgugggugucuuucaaccagaaucuggaauaucagauaggauacauaugcagugggguuuucggagacaauccacgcccuaaugauaagacaggcaguugugguccaguaucgucuaauggagcaaauggaguaaaaggauuuucauucaaauacggcaaugguguuuggauagggagaacuaaaagcauuaguucaagaaaagguuuugagaugauuugggauccgaauggauggacugggacugacaauaaauucucaauaaagcaagaugucguaggaauaaaugaguggucaggauauagcgggaguuuuguucagcauccagaacuaacagggcuggauuguauaagaccuugcuucuggguugaacuaaucagagggcgacccgaagagaacacaaucuggacuagcgggagcagcauauccuuuugugguguaaacagugacacuguggguuggucuuggccagacggugcugaguugccauuuaccauugacaaguaa

SEQ ID NO: 57770 - RNA, 1410 nt, Artificial Sequence; identical to SEQ ID NO: 57737
  derived and/or modified CDS sequence (wt) from neuraminidase__InfluenzaA__AIM56295

SEQ ID NO: 57771 - RNA, 1410 nt, Artificial Sequence
  derived and/or modified CDS sequence (wt) from neuraminidase__InfluenzaA__AIM56306
augaauccaaaccaaaagauaauaaccauugguucggucuguaugacaauuggaauggcuaacuuaauauuacaaauuggaaacauaaucucaauauggguuagccacucaauucaacuugggaaucaaagucagauugaaacaugcaaucaaagcgucauuacuuaugaaaacaacacuuggguaaaucagacauauguuaacaucagcaacaccaacuuugcugcuggacagucagugguucccgugaaauuagcgggcaauuccucucucugcccuguuaguggaugggcuauauacaguaaagacaacaguguaagaaucgguuccaagggggauguguuugucauaagggaaccauucauaucaugcucccccuuggaaugcagaaccuucuucuugacucaaggggccuugcuaaaugacaagcauuccaauggaaccauuaaagacaggagcccauaucgaacccuaaugagcuguccuauuggugaaguucccucuccauacaacucaagauuugagucagucgcuuggucagcaagugcuugucaugauggcaucaauuggcuaacaauuggaauuucuggcccagacaguggggcaguggcuguguuaaaguacaauggcauaauaacagacacuaucaagaguuggagaaacaauauauuaagaacacaagagucugaaugugcauguguaaaugguucuugcuuuacuauaaugaccgauggaccaagugauggacaggccucauacaagaucuucagaauagaaaagggaaagauagucaaaucagucgaaaugaaugccccuaauuaucacuaugaggaaugcuccuguuauccugauucuagugaaaucacaugugugugcagggauaacuggcauggcucgaaucgaccgugggugucuuucaaccagaaucuggaauaucagauaggauacauaugcagugggguuuucggagacaauccacgcccuaaugauaagacaggcaguugugguccaguaucgucuaauggagcaaauggaguaaaaggauuuucauucaaauacggcaaugguguuuggauagggagaacuaaaagcauuaguucaagaaaagguuuugagaugauuugggauccgaauggauggacugggacagacaauaacuucucaauaaagcaagauaucguaggaauaaaagaguggucaggauauagcgggaguuuuguucagcauccagaacuaacagggcuggauuguauaagaccuugcuucuggguugaacuaaucagagggcgacccgaagagaacacaaucuggacuagcgggagcagcauauccuuuugugguguaaacagugacacuguggguuggucuuggccagacggugcugaguugccauuuaccauugacaaguaa

SEQ ID NO: 57772 - RNA, 1410 nt, Artificial Sequence
  derived and/or modified CDS sequence (wt) from neuraminidase__InfluenzaA__AIM56317
augaauccaaaccaaaagauaauaaccauugguucggucuguaugacaauuggaauggcuaacuuaauauuacaaauuggaaacauaaucucaauauggguuagccacucaauucaacuugggaaucaaagucagauugaaacaugcaaucaaagcgucauuacuuaugaaaacaacacuuggguaaaucagacauauguuaacaucagcaacaccaacuuugcugcuggacagucagugguucccgugaaauuagcgggcaauuccucucucugcccuguuaguggaugggcuauauacaguaaagacaacaguguaagaaucgguuccaagggggacguguuugucauaagggaaccauucauaucaugcucccccuuggaaugcagaaccuucuucuugacucaaggggccuugcuaaaugacaaacauucuaauggaaccauuaaagacaggagcccauaucgaacccuaaugagcuguccuauuggugaaguucccucuccauacaacucaagauuugagucagucgcuuggucagcaagugcuugucaugauggcaucaauuggcuaacaauuggaauuucuggcccagacaguggggcaguggcuguguuaaaguacaauggcauaauaacagacacuaucaagaguuggagaaacaauauauugagaacacaagagucugaaugugcauguguaaaugguucuugcuuuaccauaaugaccgauggaccaagugauggacaggccucauacaagaucuucagaauagaaaagggaaagauagucaaaucagucgaaaugaaugccccuaauuaucacuaugaggaaugcuccuguuauccugauucuagugaaaucacaugugugugcagggauaacuggcauggcucgaaucgaccgugggugucuuucaaccagaaucuggaauaucagauaggauacauaugcagugggguuuucggagacaauccacgcccuaaugauaaaacaggcaguugugguccaguaucgucuaauggagcaaauggaguaaaaggauuuucauucaaauacggcaaugguguuuggauagggagaacuaaaagcauuaguucaagaaaagguuuugagaugauuugggauccgaauggauggacugggacagacaauaacuucucaauaaagcaagauaucguaggaauaaaagaguggucaggauauagcgggaguuuuguucagcauccagaacuaacagggcuggauuguauaagaccuugcuucuggguugaacuaaucagagggcgacccgaagagaacacaaucuggacuagcgggagcagcauauccuuuugugguguaaacagugacacuguggguuggucuuggccagacggugcugaguugccauuuaccauugacaaguaa

SEQ ID NO: 57773 - RNA, 1410 nt, Artificial Sequence
  derived and/or modified CDS sequence (wt) from neuraminidase__InfluenzaA__AIM56339
augaauccaaaccaaaagauaauaaccauugguucggucuguaugacaauuggaauggcuaacuuaauauuacaaauuggaaacauaaucucaauauggguuagucacucaauucaacuugggaaucaaagucagauugaaacaugcaaucaaagcgucauuacuuaugaaaacaacacuuggguaaaucagacauauguuaacaucagcaacaccaacuuugcugcuggacagucagugguucccgugaaauuagcgggcaauuccucucucugcccuguuaguggaugggcuauauacagcaaagacaacaguguaagaaucgguuccaagggggauguguuugucauaagggaaccauucauaucaugcucccccuuggaaugcagaacuuucuucuugacucaaggggccuugcuaaaugacaaacauuccaauggaaccauuaaagacaggagcccauaucgaacccuaaugagcuguccuauuggugaaguucccucuccauacaacucaagauuugaaucagucgcuuggucagcaagugcuugucaugauggcaucaauuggcuaacaauuggaauuucuggcccagacaguggggcaguggcuguguuaaaguacaauggcauaauaacagacacuaucaagaguuggagaaacaauauauugagaacacaagagucugaaugugcauguguaaaugguucuugcuuuaccauaaugaccgauggaccaagugauggacaggccucauacaagaucuucagaauagaaaagggaaagauagucaaaucagucgaaaugaaugccccuaauuaucacuaugaggaaugcuccuguuauccugauucuagugaaaucacaugugugugcagggauaacuggcauggcucgaaucgaccgugggugucuuucaaccagaaucuggaauaucagauaggauacauaugcagugggguuuucggagacaauccacgcccuaaugauaagacaggcaguugugguccaguaucgucuaauggagcaaauggaguaaaaggauuuucauucaaauacggcaaugguguuuggauagggagaacuaaaagcauuaguucaagaaaagguuuugagaugauuugggauccgaauggauggacugggacagacaauaaauucucaauaaagcaagauaucguaggaauaaaugaguggucaggauauagcgggaguuuuguucagcauccagaacuaacagggcuggauuguauaagaccuugcuucuggguugaacuaaucagagggcgacccgaagagaacacaaucuggacuagcgggagcagcauauccuuuugugguguaaaaagugacacuguggguuggucuuggccagacggugcugaguugccauuuaccauugacaaguaa

SEQ ID NO: 57774 - RNA, 1410 nt, Artificial Sequence
  derived and/or modified CDS sequence (wt) from neuraminidase__InfluenzaA__AIM56350
augaauccaaaccaaaagauaauaaccauugguucggucuguaugacaauuggaauggcuaacuuaauauuacaaauuggaaacauaaucucaauauggguuagccacucaauucaacuugggaaucaaagucagauugaaacaugcaaucaaagcgucauuacuuaugaaaacaacacuuggguaaaucagacauauguuaacaucagcaacaccaacuuugcugcuggacagucagugguucccgugaaauuagcgggcaauuccucucucugcccuguuaguggaugggcuauauacaguaaagacaacaguguaagaaucgguuccaagggggauguguuugucauaagggaaccauucauaucaugcucccccuuggaaugcagaaccuucuucuugacucaaggggccuugcuaaaugacaagcauuccaauggaaccauuaaagacaggagcccauaucgaacccuaaugagcuguccuauuggugaaguucccucuccauacaacucaagauuugagucagucgcuuggucagcaagugcuugucaugauggcaucaauuggcuaacaauuggaauuucuggcccagacaguggggcaguggcuguguuaaaguacaauggcauaauaacagacacuaucaagaguuggagaaacaauauauugagaacacaagagucugaaugugcauguguaaaugguucuugcuuuacuauaaugaccgauggaccaagugauggacaggccucauacaagaucuucagaauagaaaagggaaagauagucaaaucagucgaaaugaaugccccuaauuaucacuaugaggaaugcuccuguuauccugauucuagugaaaucacaugugugugcagggauaacuggcauggcucgaaucgaccgugggugucuuucaaccagaaucuggaauaucagauaggauacauaugcagugggguuuucggagacaauccacgcccuaaugauaagacaggcaguugugguccaguaucgucuaauggagcaaauggaguaaaaggauuuucauucaaauacggcaaugguguuuggauagggagaacuaaaagcauuaguucaagaaaagguuuugagaugauuugggauccgaauggauggacugggacagacaauaacuucucaauaaagcaagauaucguaggaauaaaagaguggucaggauauagcgggaguuuuguucagcauccagaacuaacagggcuggauuguauaagaccuugcuucuggguugaacuaaucagagggcgacccgaagagaacacaaucuggacuagcgggagcagcauauccuuuugugguauaaacagugacacuguggguuggucuuggccagacggugcugaguugccauuuaccauugacaaguaa

SEQ ID NO: 57775 - RNA, 1410 nt, Artificial Sequence; identical to SEQ ID NO: 57766
  derived and/or modified CDS sequence (wt) from neuraminidase__InfluenzaA__AIM56361

SEQ ID NO: 57776 - RNA, 1410 nt, Artificial Sequence
  derived and/or modified CDS sequence (wt) from neuraminidase__InfluenzaA__AIM56372
augaauccaaaccaaaagauaauaaccauugguucggucuguaugacaauuggaauggcuaacuuaauauuacaaauuggaaacauaaucucaauauggguuagccacucaauucaacuugggaaucaaagucagauugaaacaugcaaucaaagcgucauuacuuaugaaaacaacacuuggguaaaucagacauauguuaacaucagcaacaccaacuuugcugcuggacagucagugguucccgugaaauuagcgggcaauuccucucucugcccuguuaguggaugggcuauauacaguaaagacaacaguguaagaaucgguuccaagggggauguguuugucauaagggaaccauucauaucaugcucccccuuggaaugcagaaccuucuucuugacucaaggggccuugcuaaaugacaagcauuccaauggaaccauuaaagacaggagcccauaucgaacccuaaugagcuguccuauuggugaaguucccucuccauacaacucaagauuugagucagucgcuuggucagcaagugcuugucaugauggcaucaauuggcuaacaauuggaauuucuggcccagacaguggggcaguggcuguguuaaaguacaauggcauaauaacagacacuaucaagaguuggagaaacaauauauugagaacacaagagucugaaugugcauguguaaaugguucuugcuuuacuauaaugaccgauggaccaagugauggacaggccucauacaagaucuucagaauagaaaagggaaagauagucaaaucagucgaaaugaaugccccuaauuaucacuaugaggaaugcuccuguuauccugauucuagugaaaucacaugugugugcagggauaacuggcauggcucgaaucgaccgugggugucuuucaaccagaauuuggaauaucagauaggauacauaugcagugggguuuucggagacaauccacgcccuaaugauaagacaggcaguugugguccaguaucgucuaauggagcaaauggaguaaaaggauuuucauucaaauacggcaaugguguuuggauagggagaacuaaaagcauuaguucaagaaaagguuuugagaugauuugggauccgaauggauggacugggacggacaauaacuucucaauaaagcaagauaucguaggaauaaaagaguggucaggauauagcgggaguuuuguucagcauccagaacuaacagggcuggauuguauaagaccuugcuucuggguugaacuaaucagagggcgacccgaagagaacacaaucuggacuagcgggagcagcauauccuuuugugguguaaacagugacacuguggguuggucuuggccagacggugcugaguugccauuuaccauugacaaguaa

SEQ ID NO: 57777 - RNA, 1410 nt, Artificial Sequence
  derived and/or modified CDS sequence (wt) from neuraminidase__InfluenzaA__AIM56383
augaauccaaaccaaaagauaauaaccauugguucggucuguaugacaauuggaauggcuaacuuaauauuacaaauuggaaacauaaucucaauauggguuagccacucaauucaacuugggaaucaaagucauauugaaacaugcaaucaaagcgucauuacuuaugaaaacaacacuuggguaaaucagacauauguuaacaucagcaacaccaacuuugcugcuggacaaucagugguucccgugaaauuagcgggcaauuccucucucugcccuguuaguggaugggcuauauacaguaaagacaacaguguaagaaucgguuccaagggggauguguuugucauaagggaaccauucauaucaugcucccccuuggaaugcagaaccuucuucuugacucaaggggccuugcuaaaugacaaacauuccaauggaaccauuaaagacaggagcccauaucgaacccuaaugagcuguccuauuggugaaguucccucuccauacaacucaagauuugagucagucgcuuggucagcaagugcuugucaugauggcaucaauuggcuaacaauuggaauuucuggcccagacaguggggcaguggcuguguuaaaguacaauggcauaauaacagacacuaucaagaguuggagaaacaauauauugagaacacaagagucugaaugugcauguguaaaugguucuugcuuuaccauaaugaccgauggaccaagugauggacaggccucauacaagaucuucagaauagaaaagggaaagauagucaaaucagucgaaaugaaugccccuaauuaucacuaugaggaaugcuccuguuauccugauucuagugaaaucacaugugugugcagggauaacuggcauggcucgaaucgaccgugggugucuuucaaccagaaucuggaauaucagauaggauacauaugcagugggguuuucggagacaauccacgcccuaaugauaagacaggcaguugugguccaguaucgucuaauggagcaaauggaguaaaaggauuuucauucaaauacggcaaugguguuuggauagggagaacuaaaagcauuaguucaagaaaagguuuugagaugauuugggauccgaauggauggacugggacagacaauaacuucucaauaaagcaagauaucguaggaauaaaagaguggucaggauauagcgggaguuuuguucagcauccagaacuaacagggcuggauuguauaagaccuugcuucuggguugaacuaaucagagggcgacccgaagagaacacaaucuggacuagcgggagcagcauauccuuuugugguguaaacagugacacuguggguuggucuuggccagacggugcugaguugccauuuaccauugacaaguaa

SEQ ID NO: 57778 - RNA, 1410 nt, Artificial Sequence
  derived and/or modified CDS sequence (wt) from neuraminidase__InfluenzaA__AIM56394
augaauccaaaccaaaagauaauaaccauugguucggucuguaugacaauuggaauggcuaacuuaauauuacaaauuggaaacauaaucucaauauggguuagccacucaauucaaauuggaaaucaaagucagauugaaacaugcaaucaaagcgucauuacuuaugaaaacaacacuuggguaaaucagacauauguuaacaucagcaacaccaacuuugcugcuggacagucagugguuuccgugaaauuagcgggcaauuccucucucugcccuguuaguggaugggcuauauacaguaaagacaacaguguaagaaucgguuccaagggggauguguuugucauaagggaaccauucauaucaugcucucccuuggaaugcagaaccuucuucuugacucaaggggccuugcuaaaugacaaacauuccaauggaaccauuaaagacaggagcccauaucgaacccuaaugagcuguccuauuggugaaguucccucuccauacaacucaagauuugagucagucgcuuggucagcaagugcuugucaugauggcaucaauuggcuaacaauuggaauuucuggcccagacaguggggcaguggcuguguuaaaguacaauggcauaauaacagacacuaucaagaguuggaggaacaauauauugagaacacaagagucugaaugugcauguguaaaugguucuugcuuuaccauaaugaccgauggaccaagugauggacaggccucauacaagaucuucagaauagaaaagggaaagauagucaaaucagucgaaaugaaugccccuaauuaucacuaugaggaaugcuccuguuauccugauucuagugaaaucacaugugugugcagggauaacuggcauggcucgaaucgaccgugggugucuuucaaccagaaucuggaauaucagauaggauacauaugcagugggauuuucggagacaauccacgcccuaaugauaagacaggcaguugugguccaguaucgucuaauggagcaaauggaguaaaaggauuuucauucaaauacggcaaugguguuuggauagggagaacuaaaagcauuaguucaagaaaagguuuugagaugauuugggauccgaauggauggacugggacugacaauaaauucucaauaaagcaagauaucguaggaauaaaugaguggucaggauauagcgggaguuuuguccagcauccagaacuaacagggcuggauuguauaagaccuugcuucuggguugaacuaaucagagggcgacccgaagagaacacaaucuggacuagcgggagcagcauauccuuuugugguguaaacagugacacuguggguuggucuuggccagacggugcugaguugccauuuaccauugacaaguaa

SEQ ID NO: 57779 - RNA, 1410 nt, Artificial Sequence; identical to SEQ ID NO: 57755
  derived and/or modified CDS sequence (wt) from neuraminidase__InfluenzaA__AIM56405

SEQ ID NO: 57780 - RNA, 1410 nt, Artificial Sequence
  derived and/or modified CDS sequence (wt) from neuraminidase__InfluenzaA__AIM56416
augaauccaaaccaaaagauaauaaccauugguucggucuguaugacaauuggaauggcuaacuuaauauuacaaauuggaaacauaaucucaauauggguuagccacucaauucaacuugggaaucaaagucauauugaaacaugcaaucaaagcgucauuacuuaugaaaacaacacuuggguaaaucagacauauguuaacaucagcaacaucaacuuugcugcuggacagucagugguucccgugaaauuagcgggcaauuccucucucugcccuguuaguggaugggcuauauacaguaaagacaacaguguaagaaucgguuccaagggggauguguuugucauaagggaaccauucauaucaugcucccccuuggaaugcagaaccuucuucuugacucaaggggccuugcuaaaugacaaacauuccaauggaaccauuaaagacaggagcccauaucgaacccuaaugagcuguccuauuggugaaguucccucuccauacaacucaagauuugagucagucgcuuggucagcaagugcuugucaugauggcaucaauuggcuaacaauuggaauuucuggcccagacaauggggcaguggcuguguuaaaguacaauggcauaauaacagacacuaucaagaguuggagaaacaauauauugagaacacaagagucugaaugugcauguguaaaugguucuugcuuuaccauaaugaccgauggaccaagugauggacaggccucauacaagaucuucagaauagaaaagggaaagauagucaaaucagucgaaaugaaugccccuaauuaucacuaugaggaaugcuccuguuauccugauucuagugaaaucacaugugugugcagggauaacuggcauggcucgaaucgaccgugggugucuuucaaccagaaucuggaauaucagauaggauacauaugcagugggguuuucggagacaauccacgcccuaaugauaagacaggcaguugugguccaguaacgucuaauggagcaaauggaguaaaaggauuuucauucaaauacggcaaugguguuuggauagggagaacuaaaagcauuaguucaagaaaagguuuugagaugauuugggauccgaauggauggacugggacagacaauaacuucucaauaaagcaagauaucguaggaauaaaagaguggucaggauauagcgggaguuuuguucagcauccagaacuaacagggcuggauuguauaagaccuugcuucuggguugaacuaaucagagggcgacccgaagagaacacaaucuggacuagcgggagcagcauauccuuuugugguguaaacagugacacuguggguuggucuuggccagacggugcugaguugccauuuaccauugacaaguaa

SEQ ID NO: 57781 - RNA, 1410 nt, Artificial Sequence; identical to SEQ ID NO: 57755
  derived and/or modified CDS sequence (wt) from neuraminidase__InfluenzaA__AIM56428

SEQ ID NO: 57782 - RNA, 1410 nt, Artificial Sequence
  derived and/or modified CDS sequence (wt) from neuraminidase__InfluenzaA__AIM56439
augaauccaaaccaaaagauaauaaccauugguucggucuguaugacaauuggaauggcuaacuuaauauuacaaauuggaaacauaaucucaauauggguuagccacucaauucaacuugggaaucaaagucagauugaaacaugcaaucaaagcgucauuacuuaugaaaacaacacuuggguaaaucagacauauguuaacaucagcaacaccaacuuugcugcuggacagucagugguucccgugaaauuagcgggcaauuccucucucugcccuguuaguggaugggcuauauacaguaaagacaacaguguaagaaucgguuccaagggggauguguuugucauaagggaaccauucauaucgugcucccccuuggaaugcagaaccuucuucuugacucaaggggccuugcuaaaugacaagcauuccaauggaaccauuaaagacaggagcccauaucgaacccuaaugagcuguccuauuggugaaguucccucuccauacaacucaagauuugagucagucgcuuggucagcaagugcuugucaugauggcaucaauuggcuaacaauuggaauuucuggcccagacaguggggcaguggcuguguuaaaguacaauggcauaauaacagacacuaucaagaguuggagaaacaauauauugagaacacaagagucugaaugugcauguguaaaugguucuugcuuuacuauaaugaccgauggaccaagugauggacaggccucauacaagaucuucagaauagaaaagggaaagauagucaaaucagucgaaaugaaugccccuaauuaucacuaugaggaaugcuccuguuauccugauucuagugaaaucacaugugugugcagggauaacuggcauggcucgaaucgaccgugggugucuuucaaccagaaucuggaauaucagauaggauacauaugcagugggguuuucggagacaauccacgcccuaaugauaagacaggcaguugugguccaguaucgucuaauggagcaaauggaguaaaaggauuuucauucaaauacggcaaugguguuuggauagggagaacuaaaagcauuaguucaagaaaagguuuugagaugauuugggauccgaauggauggacugggacagacaauaacuucucaauaaagcaagauaucguaggaauaaaagaguggucaggauauagcgggaguuuuguucagcauccagaacuaacagggcuggauuguauaagaccuugcuucuggguugaacuaaucagagggcgacccgaagagaacacaaucuggacuagcgggagcagcauauccuuuugugguguaaacagugacacuguggguuggucuuggccagacggugcugaguugccauuuaccauugacaaguaa

SEQ ID NO: 57783 - RNA, 1410 nt, Artificial Sequence
  derived and/or modified CDS sequence (wt) from neuraminidase__InfluenzaA__AIM56450
augaauccaaaccaaaagauaauaaccauugguucggucuguaugacaauuggaauggcuaacuuaauauuacaaauuggaaacauaaucucaauauggauuagccacucaauucaaguugggaaucaaagucagaucgaaacaugcaaucaaagcgucauuacuuaugaaaacaacacuuggguaaaucagacauauguuaacaucagcaacaccaacuuugcugcugggcagccagugguuuccgugaaauuagcgggcaauuccucucucugcccuguuaguggaugggcuauauacaguaaagacaacaguguaagagucgguuccaagggggauguguuugucauaagggaaccauucauaucaugcucccccuuggaaugcagaaccuucuucuugacucaaggggccuugcuaaaugacaaacauuccaauggaaccauuaaagacaggagcccauaucgaaccuuaaugagcuguccuauuggugaaguucccucuccauacaacucaagauuugagucagucgcuuggucagcaagugcuugucaugauggcaucaauuggcuaacaauuggaauuucuggcccagacaguggggcaguggcuguguuaaaguacaacggcauaauaacagacacuaucaagaguuggagaaacgauauauugagaacacaagagucugaaugugcauguguaaaugguucuugcuuuaccauaaugaccgauggaccaagugauggacaggccucauacaagaucuucagaauagaaaagggaaagauagucaaaucagucgaaaugaaugccccuaauuaucacuaugaggaaugcuccuguuauccugauucuagugaaaucacaugugugugcagggauaacuggcauggcucgaaucgaccgugggugucuuucaaccagaaucuggaauauaagauaggauacauaugcagugggauuuucggagauaauccacgcccuaaugauaagacaggcaguugugguccaguaucgucuaauggagcaaauggaguaaaaggauuuucauucaaauacggcaaugguguuuggauagggagaacuaaaagcauuaguucaagaaaagguuuugagaugauuugggauccaaauggauggacugggacagacaauaacuucucaguaaagcaagauaucguaggaauaaaugaguggucaggauauagcgggaguuuuguucagcauccagaacuaacagggcuggauuguauaagaccuugcuucuggguugaacuaaucagagggcgacccaaagagaacacaaucuggacuagugggagcagcauauccuuuugugguguaaacagugacacgguggguuggucuuggccagacggugcugaguugccauuuaccauugacaaguaa

SEQ ID NO: 57784 - RNA, 1410 nt, Artificial Sequence
  derived and/or modified CDS sequence (wt) from neuraminidase__InfluenzaA__AIM56461
augaauccaaaccaaaagauaauaaccauugguucggucuguaugacaauuggaauggcuaacuuaauauuacaaauuggaaacauaaucucaauauggguuagccacucaauucaaauuggaaaucaaagucagauugaaacaugcaaucaaagcgucauuacuuaugaaaacaacacuuggguaaaucagacauauguuaacaucagcaacaccaacuuugcugcuggacagucagugguuuccgugaaauuagcgggcaauuccucucucugcccuguuaguggaugggcuauauacaguaaagacaacaguguaagaaucgguuccaagggggauguguuugucauaagggaaccauucauaucaugcucucccuuggaaugcagaaccuucuucuugacucaaggggccuugcuaaaugacaaacauuccaauggaaccauuaaagacaggagcccauaucgaacccuaaugagcuguccuauuggugaaguucccucuccauacaacucaagauuugagucagucgcuuggucagcaagugcuugucaugauggcaucaauuggcuaacaauuggaauuucuggcccagacaguggggcaguggcuguguuaaaguacaauggcauaauaacagacacuaucaagaguuggaagaacaauauauugagaacacaagagucugaaugugcauguguaaaugguucuugcuuuaccauaaugaccgauggaccaagugauggacaggccucauacaagaucuucagaauagaaaagggaaagauagucaaaucagucgaaaugaaugccccuaauuaucacuaugaggaaugcuccuguuauccugauucuagugaaaucacaugugugugcagggauaacuggcauggcucgaaucgaccgugggugucuuucaaccagaaucuggaauaucagauaggauacauaugcagugggguuuucggagacaauccacgcccuaaugauaagacaggcaguugugguccaguaucgucuaauggagcaaauggaguaaaaggauuuucauucaaauacggcaaugguguuuggauagggagaacuaaaagcauuaguucaagaaaagguuuugagaugauuugggauccgaauggauggacugggacugacaauaaauucucaauaaagcaagauaucguaggaguaaaugaguggucaggauauagcgggaguuuuguucagcauccagaacuaacagggcuggauuguauaagaccuugcuucuggguugaacuaaucagagggcgacccgaagagaacacaaucuggacuagcgggagcagcauauccuuuugugguguaaacagugacacuguggguuggucuuggccagacggugcugaguugccauuuaccauugacaaguaa

SEQ ID NO: 57785 - RNA, 1410 nt, Artificial Sequence
  derived and/or modified CDS sequence (wt) from neuraminidase__InfluenzaA__AIM56472
augaauccaaaccaaaagauaauaaccauugguucggucuguaugacaauuggaauggcuaacuuaauauuacaaauuggaaacauaaucucaauauggguuagccacucaauucaaauuggaaaucaaagucagauugaaacaugcaaucaaagcgucauuacuuaugaaaacaacacuuggguaaaucagacauauguuaacaucagcaacaccaacuuugcugcuggacagucagugguuuccgugaaauuagcgggcaauuccucucucugcccuguuaguggaugggcuauauacaguaaagacaacaguguaaggaucgguuccaagggggauguguuugucauaagggaaccauucauaucaugcucucccuuggaaugcagaaccuucuucuugacucaaggggccuugcuaaaugacaaacauuccaauggaaccauuaaagacaggagcccauaucgaacccuaaugagcuguccuauuggugaaguucccucuccauacaacucaagauuugagucagucgcuuggucagcaagugcuuguaaugauggcaucaauuggcuaacaauuggaauuucuggcccagacaguggggcaguggcuguguuaaaguacaauggcauaauaacagacacuaucaagaguuggaggaacaauauauugagaacacaagagucugaaugugcauguguaaaugguucuugcuuuaccauaaugaccgauggaccaagugauggacaggccucauacaagaucuucagaauagaaaagggaaagauagucaaaucagucgaaaugaaugccccuaauuaucacuaugaggaaugcuccuguuauccugauucuagugaaaucacaugugugugcagggauaacuggcauggcucgaaucgaccgugggugucuuucaaccagaaucuggaauaucagauaggauacauaugcagugggguuuucggagacaauccacgcccuaaugauaagacaggcaguugugguccaguaucgucuaauggagcaaauggaguaaaaggauuuucauucaaauacggcaaugguguuuggauagggagaacuaaaagcauuaguucaagaaaagguuuugagaugauuugggauccgaauggauggacugggacugacaauaaauucucaauaaagcaagauaucguaggaauaaaugaguggucaggauauagcgggaguuuuguucagcauccagaacuaacagggcuggauuguauaagaccuugcuucuggguugaacuaaucagagggcgacccgaagagaacacaaucuggacuagcgggagcagcauauccuuuugugguguaaacagugacacuguggguuggucuuggccagacggugcugaguugccauuuaccauugacaaguaa

SEQ ID NO: 57786 - RNA, 1410 nt, Artificial Sequence; identical to SEQ ID NO: 57743
  derived and/or modified CDS sequence (wt) from neuraminidase__InfluenzaA__AIM56483

SEQ ID NO: 57787 - RNA, 1410 nt, Artificial Sequence; identical to SEQ ID NO: 57766
  derived and/or modified CDS sequence (wt) from neuraminidase__InfluenzaA__AIM56494

SEQ ID NO: 57788 - RNA, 1410 nt, Artificial Sequence; identical to SEQ ID NO: 57756
  derived and/or modified CDS sequence (wt) from neuraminidase__InfluenzaA__AIM56505

SEQ ID NO: 57789 - RNA, 1410 nt, Artificial Sequence; identical to SEQ ID NO: 57755
  derived and/or modified CDS sequence (wt) from neuraminidase__InfluenzaA__AIM56516

SEQ ID NO: 57790 - RNA, 1410 nt, Artificial Sequence
  derived and/or modified CDS sequence (wt) from neuraminidase__InfluenzaA__AIM56527
augaauccaaaccaaaagauaauaaccauugguucggucuguaugacaauuggaauggcuaacuuaauauuacaaauuggaaacauaaucucaauauggguuagccacucaauucaacuugggaaucaaagucagauugaaacaugcaaucaaagcgucauuacuuaugaaaacaacacuuggguaaaucagacauauguuaacaucagcaacaccaacuuugcugcugaacagucagugguuuccgugaaauuagcgggcaauuccucucucugcccuguuaguggaugggcuauauacaguaaagacaacaguguaagaaucgguuccaagggggauguguuugucauaagggaaccauucauaucaugcucccccuuggaaugcagaaccuucuucuugacucaaggggccuugcuaaaugacaaacauuccaauggaaccauuaaagacaggagcccauaucgaacccugaugagcuguccuauuggugaaguucccucuccauacaacucaagauuugagucagucgcuuggucagcaagugcuugccaugauggcaucaauuggcuaacaauuggaauuucuggcccagacaguggggcaguggcuguguuaaaguacaauggcauaauaacagacacuaucaagaguuggagaaacaauauauugagaacacaagagucugaaugugcauguguaaaugguucuugcuuuaccauaaugaccgauggaccaagugauggacaggccucauacaagaucuucagaauagaaaagggaaagauagucaaaucagucgaaaugaaugccccuaauuaucacuaugaggaaugcuccuguuauccugauucuagugaaaucacaugugugugcagggauaacuggcauggcucgaaucgaccgugggugucuuucaaccagaaucuggaauaucagauaggauacauaugcagugggguccucggagacaauccacgcccuaaugauaagacaggcaguugugguccaguaucgucuaauggagcaaauggaguaaaaggauuuucauucaaauacggcaaugguguuuggauagggagaacuaaaagcauuaguucaagaaaagguuuugagaugguuugggauccgaauggauggacugggacagacaauaacuucucaauaaagcaagauaucguaggaauaaaagaguggucaggauauagcgggaguuuuguucagcauccagaacuaacagggcuggauuguauaagaccuugcuucuggguugaacuaaucagagggcgacccgaagagaacacaaucuggacuagcgggagcagcauauccuuuugugguguaaacagugacacuguggguuggucuuggccagacggugcugaguugccauuuaccauugacaaguaa

SEQ ID NO: 57791 - RNA, 1410 nt, Artificial Sequence; identical to SEQ ID NO: 57763
  derived and/or modified CDS sequence (wt) from neuraminidase__InfluenzaA__AIM56538

SEQ ID NO: 57792 - RNA, 1410 nt, Artificial Sequence
  derived and/or modified CDS sequence (wt) from neuraminidase__InfluenzaA__AIM56549
augaauccaaaccaaaagauaauaaccauugguucggucuguaugacaauuggaauggcuaaccuaauauuacaaauuggaaacauaaucucaauauggguuagccacucaauucaaauuggaaaucaaagucagauugaaacaugcaaucaaagcgucauuacuuaugaaaacaacacuuggguaaaucagacauauguuaacaucagcaacaccaacuuugcugcuggacagucagugguuuccgugaaauuagcgggcaauuccucucucugcccuguuaguggaugggcuauauacaguaaagacaacaguguaagaaucgguuccaagggggauguguuugucauaagggaaccauucauaucaugcucucccuuggaaugcagaaccuucuucuugacucaaggggccuugcuaaaugacaaacauuccaauggaaccauuaaagacaggagcccauaucgaacccuaaugagcuguccuauuggugaaguucccucuccauacaacucaagauuugagucagucgcuuggucagcaagugcuugucaugauggcaucaauuggcuaacaauuggaauuucuggcccagacaguggggcaguggcugugcuaaaguacaauggcauaauaacagacacuaucaagaguuggaggaacaauauauugagaacacaagagucugaaugugcauguguaaaugguucuugcuuuaccauaaugaccgauggaccaagugauggacaggccucauacaagaucuucagaauagaaaagggaaagauagucaaaucagucgaaaugaaugccccuaauuaucacuaugaggaaugcuccuguuauccugauucuagugaagucacaugugugugcagggauaacuggcauggcucgaaucgaccgugggugucuuucaaccagaaucuggaauaucagauaggauacauaugcagugggguuuucggagacaauccacgcccuaaugauaagacaggcaguugugguccaguaucgucuaauggagcaaauggaguaaaaggauuuucauucaaauacggcaaugguguuuggauagggagaacuaaaagcauuaguucaagaaaagguuuugagaugauuugggauccgaauggauggacugggacugacaauaaauucucaauaaagcaagauaucguaggaauaaaugaguggucaggauauagcgggaguuuuguucagcauccagaacuaacagggcuggauuguauaagaccuugcuucuggguugaacuaaucagagggcgacccgaagagaacacaaucuggacuagugggagcagcauauccuuuugugguguaaacagugacacuguggguuggucuuggccagacggugcugaguugccauuuaccauugacaaguaa

SEQ ID NO: 57793 - RNA, 1410 nt, Artificial Sequence
  derived and/or modified CDS sequence (wt) from neuraminidase__InfluenzaA__AIM56560
augaauccaaaccaaaagauaauaaccauugguucggucuguaugacaauuggaauggcuaacuuaauauuacaaauuggaaacauaaucucaauauggguuagccacucaauucaacuugggaaucaaagucauauugaaacaugcaaucaaagcgucauuacuuaugaaaacaacacuuggguaaaucagacauauguuaacaucagcaacaccaacuuugcugcuggacagucagugguucccgugaaauuagcgggcaauuccucucucugcccuguuaguggaugggccauacacagcaaagacaacaguguaagaaucgguuccaagggggauguguuugucauaagggaaccauucauaucaugcucccccuuggaaugcagaaccuucuucuugacucaaggggccuugcuaaaugacaaacauuccaauggaaccauuaaagacaggagcccauaucgaacccuaaugagcuguccuauuggugaaguucccucuccauacaacucaagauuugagucagucgcuuggucagcaagugcuugucaugauggcaucaauuggcuaacaauuggaauuucuggcccagacaauggggcaguggcuguguuaaaguacaauggcauaauaacagacacuaucaagaguuggagaaacaauauauugagaacacaagagucugaaugugcauguguaaaugguucuugcuuuaccauaaugaccgauggaccaagugauggacaggccucauacaagaucuucagaauagaaaagggaaagauagucaaaucagucgaaaugaaugccccuaauuaucacuaugaggaaugcuccuguuauccugauucuagugaaaucacaugugugugcagggauaacuggcauggcucgaaucgaccgugggugucuuucaaccagaaucuggaauaucagauaggauacauaugcagugggguuuucggagacaauccacgcccuaaugauaagacaggcaguugugguccaguaacgucuaauggagcaaauggaguaaaaggauuuucauucaaauacggcaaugguguuuggauagggagaacuaaaagcauuaguucaagaaaagguuuugagaugauuugggauccgaauggauggacugggacagacaauaacuucucaauaaagcaagauaucguaggaauaaaagaguggucaggauauagcgggaguuuuguucagcauccagaacuaacagggcuggauuguauaagaccuugcuucuggguugaacuaaucagagggcgacccgaagagaacacaaucuggacuagcgggagcagcauauccuuuugugguguaaacagugacacuguggguuggucuuggccagacggugcugaguugccauuuaccauugacaaguaa

SEQ ID NO: 57794 - RNA, 1410 nt, Artificial Sequence; identical to SEQ ID NO: 57743
  derived and/or modified CDS sequence (wt) from neuraminidase__InfluenzaA__AIM56571

SEQ ID NO: 57795 - RNA, 1410 nt, Artificial Sequence
  derived and/or modified CDS sequence (wt) from neuraminidase__InfluenzaA__AIM56582
augaauccaaaccaaaagauaauaaccauugguucggucuguauaacaauuggaauggcuaacuuaauauuacaaauuggaaacauaaucucaauauggguuagccacucaauucaacuugggaaucaaagucagauugaaacaugcaaucaaagcgucauuacuuaugaaaacaacacuuggguaaaucagacauauguuaacaucagcaacaccaacuuugcugcuggacagucagugguuuccgugaaauuagcgggcaauuccucucucugcccuguuaguggaugggcuauauacaguaaagacaacaguguaagaaucgguuccaagggggauguguuugucauaagggaaccauucauaucaugcucccccuuggaaugcagaaccuucuucuugacucaaggggccuugcuaaaugacaaacauuccaauggaaccauuaaagacaggagcccauaucgaacccuaaugagcuguccuauuggugaaguucccucuccauacaacucaagauuugagucagucgcuuggucagcaagugcuugucaugauggcaucaauuggcuaacaauuggaauuucuggcccagacaguggggcaguggcuguguuaaaguacaauggcauaauaacagacacuaucaagaguuggagaaacaauauauugagaacacaagagucugaaugugcauguguaaaugguucuugcuuuaccauaaugaccgauggaccaagugauggacaggccucauacaagaucuucagaauagaaaagggaaagauagucaaaucagucgaaaugaaugccccuaauuaucacuaugaggaaugcuccuguuauccugauucuagugaaaucacaugugugugcagggauaacuggcauggcucgaaucgaccgugggugucuuucaaccagaaucuggaauaucagauaggauacauaugcagugggguuuucggagacaauccacgcccuaaugauaagacaggcaguugugguccaguaucgucuaauggagcaaauggaguaaaaggauuuucauucaaauacggcaaugguguuuggauagggagaacuaaaagcauuaguucaagaaaagguuuugagaugauuugggauccgaauggauggacugggacagacaauaacuucucaauaaagcaagauaucguaggaauaaaagaguggucaggauauagcgggaguuuuguucagcauccagaacuaacagggcuggauuguauaagaccuugcuucuggguugaacuaaucagagggcgacccgaagagaacacaaucuggacuagcgggagcagcauauccuuuugugguguaaacagugacacuguggguuggucuuggccagacggugcugaguugccauuuaccauugacaaguaa

SEQ ID NO: 57796 - RNA, 1410 nt, Artificial Sequence
  derived and/or modified CDS sequence (wt) from neuraminidase__InfluenzaA__AIM56593
augaauccaaaccaaaagauaauaaccauugguucggucuguaugacaauuggaauggcuaacuuaauauuacaaauuggaaacauaaucucaauauggguuagccacucaauucaacuugggaaucaaagucagauugaaacaugcaaucaaagcgucauuacuuaugaaaacaacacuuggguaaaucagacauauguuaacaucagcaacaccaacuuugcugcugaacagucagugguuuccgugaaauuagcgggcaauuccucucucugcccuguuaguggaugggcuauauacaguaaagacaacaguguaagaaucgguuccaagggggauguguuugucauaagggaaccauucauaucaugcucccccuuggaaugcagaaccuucuucuugacucaaggggccuugcuaaaugacaaacauuccaauggaaccauuaaagacaggagcccauaucgaacccugaugagcuguccuauuggugaaguucccucuccauacaacucaagauuugagucagucgcuuggucagcaagugcuugccaugauggcaucaauuggcuaacaauuggaauuucuggcccagacaguggggcaguggcuguguuaaaguacaauggcauaauaacagacacuaucaagaguuggagaaacaauauauugagaacacaagagucugaaugugcauguguaaaugguucuugcuuuaccauaaugaccgauggaccaagugauggacaggccucauacaagaucuucagaauagaaaagggaaagauagucaaaucagucgaaaugaaugccccuaauuaucacuaugaggaaugcuccuguuauccugauucuagugaaaucacaugugugugcagggauaacuggcauggcucgaaucgaccgugggugucuuucaaccagaaucuggaauaucagauaggauacauaugcagugggguccucggagacaauccacgcccuaaugauaagacaggcaguugugguccaguaucgucuaauggagcaaauggaguaaaaggauuuucauucaaauacggcaaugguguuuggauagggagaacuaaaagcauuaguucaagaaaagguuuugagaugauuugggauccgaauggauggacugagacagacaauaacuucucaauaaagcaagauaucguaggaauaaaagaguggucaggauauagcgggaguuuuguucagcauccagaacuaacagggcuggauuguauaagaccuugcuucuggguugaacuaaucagagggcgacccgaagagaacacaaucuggacuagcgggagcagcauauccuuuugugguguaaacagugacacuguggguuggucuuggccagacggugcugaguugccauuuaccauugacaaguaa

SEQ ID NO: 57797 - RNA, 1410 nt, Artificial Sequence
  derived and/or modified CDS sequence (wt) from neuraminidase__InfluenzaA__AIM56604
augaauccaaaccaaaagauaauaaccauugguucggucuguaugacaauuggaauggcuaacuuaauauuacaaauuggaaacauaaucucaauauggguuagccacucaauucaaauuggaaaucaaagucagauugaaacaugcaaucaaagcgucauuacuuaugaaaacaacacuuggguaaaucagacauauguuaacaucagcaacaucaacuuugcugcuggacagucagugguuuccgugaaauuagcgggcaauuccucucucugcccuguuaguggaugggcuauauacaguaaagacaacaguguaagaaucgguuccaagggggauguguuugucauaagggaaccauucauaucaugcucucccuuggaaugcagaaccuucuucuugacucaaggggccuugcuaaaugacaaacauuccaauggaaccauuaaagacaggagcccauaucgaacccuaaugagcuguccuauuggugaaguucccucuccauacaacucaagauuugagucagucgcuuggucagcaagugcuugucaugauggcaucaauuggcuaacaauuggaauuucuggcccagacaguggggcaguggcuguguuaaaguacaauggcauaauaacagacacuaucaagaguuggaggaacaauauauugagaacacaagagucugaaugugcauguguaaaugguucuugcuuuaccauaaugaccgauggaccaagugauggacaggccucauacaagaucuucagaauagaaaagggaaagauagucaaaucagucgaaaugaaugccccuaauuaucacuaugaggaaugcuccuguuauccugauucuagugaaaucacaugugugugcagggauaacuggcauggcucgaaucgaccgugggugucuuucaaccagaaucuggaauaucagauaggauacauaugcagugggguuuucggagacaauccacgcccuaaugauaagacaggcaguugugguccaguaucgucuaauggagcaaauggaguaaaaggauuuucauucaaauacggcaaugguguuuggauagggagaacuaaaagcauuaguucaagaaaagguuuugagaugauuugggauccgaauggauggacugggacugacaauaaauucucaauaaagcaagauaucguaggaauaaaugaguggucaggauauagcgggaguuuuguucagcauccagaacuaacagggcuggauuguauaagaccuugcuucuggguugaacuaaucagagggcgacccgaagagaacacaaucuggacuagcgggagcagcauauccuuuugugguguaaacagugacacuguggguuggucuuggccagacggugcugaguugccauuuaccauugacaaguaa

SEQ ID NO: 57798 - RNA, 1410 nt, Artificial Sequence
  derived and/or modified CDS sequence (wt) from neuraminidase__InfluenzaA__AIM56615
augaauccaaaccaaaagauaauaaccauugguucggucuguaugacaauuggaauggcuaacuuaauauuacaaauuggaaacauaaucucaauauggguuagccacucaauucaaauuggaaaucaaagucagauugaaacaugcaaucaaagcgucauuacuuaugaaaacaacacuuggguaaaucagacauauguugacaucagcaacaccaacuuugcugcuggacagucagugguuuccgugaaauuagcgggcaauuccucucucugcccuguuaguggaugggcuauauacaguaaagacaacaguguaagaaucgguuccaagggggauguguuugucauaagggaaccauucauaucaugcucucccuuggaaugcagaaccuucuucuugacucaaggggccuugcuaaaugacaaacauuccaauggaaccauuaaagacaggagcccauaucgaacccuaaugagcuguccuauuggugaaguucccucuccauacaacucaagauuugagucagucgcuuggucagcaagugcuugucaugauggcaucaauuggcuaacaauuggaauuucuggcccagacaguggggcaguggcuguguuaaaguacaauggcauaauaacagacacuaucaagaguuggaggaacaauauauugagaacacaagagucugaaugugcauguguaaaugguucuugcuuuaccauaaugaccgauggaccaagugauggacaggccucauacaagaucuucagaauagaaaagggaaagauagucaaaucagucgaaaugaaugccccuaauuaucacuaugaggaaugcuccuguuauccugauucuagugaaaucacaugugugugcagggauaacuggcauggcucgaaucgaccgugggugucuuucaaccagaaucuggaauaucagauaggauacauaugcagugggguuuucggagacaauccacgcccuaaugauaagacaggcaguugugguccaguaucgucuaauggagcaaauggaguaaaaggauuuucauucaaauacagcaaugguguuuggauagggagaacuaaaagcauuaguucaagaaaagguuuugagaugauuugggauccgaauggauggacugggacugacaauaaauucucaauaaagcaagauaucguaggaauaaaugaguggucaggauauagcgggaguuuuguucagcauccagaacuaacagggcuggauuguauaagaccuugcuucuggguugaacuaaucagagggcgacccgaagagaacacaaucuggacuagcgggagcagcauauccuuuugugguguaaacagugacacuguggguuggucuuggccagacggugcugaguugccauuuaccauugacaaguaa

SEQ ID NO: 57799 - RNA, 1410 nt, Artificial Sequence; identical to SEQ ID NO: 57792
  derived and/or modified CDS sequence (wt) from neuraminidase__InfluenzaA__AIM56626

SEQ ID NO: 57800 - RNA, 1410 nt, Artificial Sequence
  derived and/or modified CDS sequence (wt) from neuraminidase__InfluenzaA__AIM56637
augaauccaaaccaaaagauaauaaccauugguucggucuguaugacaauuggaauggcuaacuuaauauuacaaauuggaaacauaaucucaauauggguuagccacucaauucaacuugggaaucaaagucagauugaaacaugcaaucaaagcgucauuacuuaugaaaacaacacuuggguaaaucagacauauguuaacaucagcaacaccaacuuugcugcuggacagucagugguucccgugaaauuagcgggcaauuccucucucugcccuguuaguggaugggcuauauacaguaaagacaacaguguaagaaucgguuccaagggggauguguuugucauaagggaaccauucauaucaugcucccccuuggaaugcagaaccuucuucuugacucaaggggccuugcuaaaugacaagcauuccaauggaaccaucaaagacaggagcccauaucgaacccuaaugagcuguccuauuggugaaguucccucuccauacaacucaagauuugagucagucgcuuggucagcaagugcuugucaugauggcaucaauuggcuaacaauuggaauuucuggcccagacaguggggcaguggcuguguuaaaguacaauggcauaauaacagacacuaucaagaguuggagaaacaauauauugagaacacaagagucugaaugugcauguguaaaugguucuugcuuuacuauaaugaccgauggaccaagugauggacaggccucauacaagaucuucagaauagaaaagggaaagauagucaaaucagucgaaaugaaugccccuaauuaucacuaugaggaaugcuccuguuauccugauucuagugaaaucacaugugugugcagggauaacuggcauggcucgaaucgaccgugggugucuuucaaccagaaucuggaauaucagauaggauacauaugcagugggguuuucggagacaauccacgcccuaaugauaagacaggcaguugugguccaguaucgucuaauggagcaaauggaguaaaaggauuuucauucaaauacggcaaugguguuuggauagggagaacuaaaagcauuaguucaagaaaagguuuugagaugauuugggauccgaauggauggacugggacagacaauaacuucucaauaaagcaagauaucguaggaauaaaagaguggucaggauauagcgggaguuuuguucagcauccagaacuaacagggcuggauuguauaagaccuugcuucuggguugaacuaaucagagggcgacccgaagagaacacaaucuggacuagcgggagcagcauauccuuuugugguguaaacagugacacuguggguuggucuuggccagacggugcugaguugccauuuaccauugacaaguaa

SEQ ID NO: 57801 - RNA, 1410 nt, Artificial Sequence; identical to SEQ ID NO: 57743
  derived and/or modified CDS sequence (wt) from neuraminidase__InfluenzaA__AIM56648

SEQ ID NO: 57802 - RNA, 1410 nt, Artificial Sequence
  derived and/or modified CDS sequence (wt) from neuraminidase__InfluenzaA__AIM56659
augaauccaaaccaaaagauaauaaccauugguucggucuguaugacaauuggaauggcuaacuuaauauuacaaauuggaaacauaaucucaauauggguuagccacucaauucaacuugggaaucaaagucauauugaaacaugcaaucaaagcgucauuacuuaugaaaacaacacuuggguaaaucagacauauguuaacaucagcaacaccaacuuugcugcuggacagucagugguucccgugaaauuagcgggcaauuccucucucugcccuguuaguggaugggcuauauacaguaaagacaacaguguaagaaucgguuccaagggggauguguuugucauaagggaaccauucauaucaugcucccccuuggaaugcagaaccuucuucuugacucaaggggccuugcuaaaugacaaacauuccaauggaaccauuaaagacaggagcccauaucgaacccuaaugagcuguccuauuggugaaguucccucuccauacaacucaagauuugagucagucgcuuggucagcaagugcuugucaugauggcaucaauuggcuaacaauuggaauuucuggcccagacaguggggcaguggcuguguuaaaguacaauggcauaauaacagacacuaucaagaguuggagaaacaauauauugagaacacaagagucugaaugugcauguguaaaugguucuugcuuuaccauaaugaccgauggaccaagugauggacaggccucauacaagaucuucagaauagaaaagggaaagauagucaaaucagucgaaaugaaugccccuaauuaucacuaugaggaaugcuccuguuauccugauucuagugaaaucacaugugugugcagggauaacuggcauggcucgaaucgaccgugggugucuuucaaccagaaucuggaauaucagauaggauacauaugcagugggguuuucggagacaauccacgcccuaaugauaagauaggcaguugugguccaguaucgucuaauggagcaaauggaguaaaaggauuuucauucaaauacggcaaugguguuuggauagggagaacuaaaagcauuaguucaagaaaagguuuugagaugauuugggauccgaauggauggacugggacagacaauaacuucucaauaaagcaagauauuguaggaauaaaagaguggucaggauauagcgggaguuuuguucagcauccagaacuaacagggcuggauuguauaagaccuugcuucuggguugaacuaaucagagggcgacccgaagagaaaacaaucuggacuagcgggagcagcauauccuuuugugguguaaacagugacacuguggguuggucuuggccagacggugcugaguugccauuuaccauugacaaguaa

SEQ ID NO: 57803 - RNA, 1410 nt, Artificial Sequence
  derived and/or modified CDS sequence (wt) from neuraminidase__InfluenzaA__AIM56670
augaauccaaaccaaaagauaauaaccauugguucggucuguaugacaauuggaauggcuaacuuaauauuacaaauuggaaacacaaucucaauauggguuagccacucaauucaaauuggaaaucaaagucagauugaaacaugcaaucaaagcgucauuacuuaugaaaacaacacuuggguaaaucagacauauguuaacaucagcaacaccaacuuugcugcuggacagucagugguuuccgugaaauuagcgggcaauuccucucucugcccuguuaguggaugggcuauauacaguaaagacaacaguguaagaaucgguuccaagggggauguguuugucauaagggaaccauucauaucaugcucucccuuggaaugcagaaccuucuucuugacucaaggggccuugcuaaaugacaaacauuccaauggaaccauuaaagacaggagcccauaucgaacccuaaugagcuguccuauuggugaaguucccucuccauacaacucaagauuugagucagucgcuuggucagcaagugcuugucaugauggcaucaauuggcuaacaauuggaauuucuggcccagacaguggggcaguggcuguguuaaaguacaauggcauaauaacagacacuaucaagaguuggaggaacaauauauugagaacacaagagucugaaugugcauguguaaaugguucuugcuuuaccauaaugaccgauggaccaagugauggacaggccucauacaagaucuucagaauagaaaagggaaagauagucaaaucagucgaaaugaaugccccuaauuaucacuaugaggaaugcuccuguuauccugauucuagugaaaucacaugugugugcagggauaacuggcauggcucgaaucgaccgugggugucuuucaaccagaaucuggaauaucagauaggauacauaugcagugggguuuucggagacaauccacgcccuaaugauaagacaggcaguugugguccaguaucgucuaauggagcaaauggaguaaaaggauuuucauucaaauacggcaaugguguuuggauagggagaacuaaaagcauuaguucaagaaaagguuuugagaugauuugggauccgaauggauggacugggacugacaauaaauucucaauaaagcaagauaucguaggaauaaaugaguggucaggauauagcgggaguuuuguucagcauccagaacuaacagggcuggauuguauaagaccuugcuucuggguugaacuaaucagagggcgacccgaagagaacacaaucuggacuagcgggagcagcauauccuuuugugguguaaacagugacacuguggguuggucuuggccagacggugcugaguugccauuuaccauugacaaguaa

SEQ ID NO: 57804 - RNA, 1410 nt, Artificial Sequence; identical to SEQ ID NO: 57755
  derived and/or modified CDS sequence (wt) from neuraminidase__InfluenzaA__AIM56703

SEQ ID NO: 57805 - RNA, 1410 nt, Artificial Sequence
  derived and/or modified CDS sequence (wt) from neuraminidase__InfluenzaA__AIM56714
augaauccaaaccaaaagauaauaaccauugguucggucuguaugacaauuggaauggcuaacuuaauauuacaaauuggaaacauaaucucaauauggguuagccacucaauucaaauuggaaaucaaagucagauugaaacaugcaaucaaagcgucauuacuuaugaaaacaacacuuggguaaaucagacauauguuaacaucagcaacaccaacuuugcugcuggacagucagugguuuccgugaaauuagcgggcaauuccucucucugcccuguuaguggaugggcuauauacaguaaagacaacaguguaagaaucgguuccaagggggauguguuugucauaagggaaccauucauaucaugcucucccuuggaaugcagaaccuucuucuugacucaaggggccuugcuaaaugacaaacauuccaauggaaccauuaaagacaggagcccauaucgaacccuaaugagcuguccuauuggugaaguucccucuccauacaacucaagauuugagucagucgcuuggucagcaagugcuugucaugauggcaucaauuggcuaacaauuggaauuucuggcccagacaguggggcaguggcuguguuaaaguacaauggcauaauaacagacacuaucaagaguuggaggaacaauauauugagaacacaagagucugaaugugcauguguaaaugguucuugcuuuaccauaaugaccgauggaccaagugauggacaggccucauacaagaucuucagaauagaaaagggaaagauagucaaaucagucgaaaugaaugccccuaauuaucacuaugaggaaugcuccuguuauccugauucuagugaaaucacaugugugugcagggauaacuggcauggcucgaaucgaccgugggugucuuucaaccagaaucuggaauaucagauaggauacauaugcagugggguuuucggagacaauccacgcccuaaugauaagacaggcaguugugguccaguaccgucuaauggagcaaauggaguaaaaggauuuucauucaaauacggcaaugguguuuggauagggagaacuaaaagcauuaguucaagaaaagguuuugagaugauuugggauccgaauggauggacugggacugacaauaaauucucaauaaagcaagauaucguaggaauaaaugaguggucaggguauagcgggaguuuuguucagcauccagaacuaacagggcuggauuguauaagaccuugcuucuggguugaacuaaucagagggcgacccgaagagaacacaaucuggacuagcgggagcagcauauccuuuugugguguaaacagugacacuguggguuggucuuggccagacggugcugaguugccauuuaccauugacaaguaa

SEQ ID NO: 57806 - RNA, 1410 nt, Artificial Sequence
  derived and/or modified CDS sequence (wt) from neuraminidase__InfluenzaA__AIM56725
augaauccaaaccaaaagauaauaaccauugguucggucuguaugacaauuggaauggcuaacuuaauauuacaaauuggaaacauaaucucaauauggguuagccacucaauucaaauuggaaaucaaagucagauugaaacaugcaaucaaagcgucauuacuuaugaaaacaacacuuggguaaaucagacauauguuaacaucagcaacaccaacuuugcugcuggacagucagugguuuccgugaaauuagcgggcaauuccucucucugcccuguuaguggaugggcuauauacaguaaagacaacaguguaagaaucgguuccaagggggauguguuugucauaagggaaccauucauaucaugcucucccuuggaaugcagaaccuucuucuugacucaaggggccuugcuaaaugacaaacauuccaauggaaccauuaaagacaggagcccauaucgaacccuaaugagcuguccuauuggugaaguucccucuccauacaacucaagauuugagucagucgcuuggucagcaagugcuugucaugauggcaucaauuggcuaacaauuggaauuucuggcccagacaguggggcaguggcugugcuaaaguacaauggcauaauaacagacacuaucaagaguuggaggaacaauauauugagaacacaagagucugaaugugcauguguaaaugguucuugcuuuaccauaaugaccgauggaccaagugauggacaggccucauacaagaucuucagaauagaaaagggaaagauagucaaaucagucgaaaugaaugccccuaauuaucacuaugaggaaugcuccuguuauccugauucuagugaagucacaugugugugcagggauaacuggcauggcucgaaucgaccgugggugucuuucaaccagaaucuggaauaucagauaggauacauaugcagugggauuuucggagacaauccacgcccuaaugauaagacaggcaguugugguccaguaucgucuaauggagcaaauggaguaaaaggauuuucauucaaauacggcaaugguguuuggauagggagaacuaaaagcauuaguucaagaaaagguuuugagaugauuugggauccgaauggauggacugggacugacaauaaauucucaauaaagcaagauaucguaggaauaaaugaguggucaggauauagcgggaguuuuguucagcauccagaacuaacagggcuggauuguauaagaccuugcuucuggguugaacuaaucagagggcgacccgaagagaacacaaucuggacuagcgggagcagcauauccuuuugugguguaaacagugacacuguggguuggucuuggccagacggugcugaguugccauuuaccauugacaaguaa

SEQ ID NO: 57807 - RNA, 1410 nt, Artificial Sequence; identical to SEQ ID NO: 57755
  derived and/or modified CDS sequence (wt) from neuraminidase__InfluenzaA__AIM56736

SEQ ID NO: 57808 - RNA, 1410 nt, Artificial Sequence
  derived and/or modified CDS sequence (wt) from neuraminidase__InfluenzaA__AIM56747
augaauccaaaccaaaagauaauaaccauugguucggucuguaugacaauuggaauggcuaacuuaauauuacaaauuggaaacauaaucucaauauggguuagccacucaauucaaauuggaaaucaaagucagauugaaacaugcaaucaaagcgucauuacuuaugaaaacaacacuuggguaaaucagacauauguuaacaucagcaacaccaacuuugcugcuggacagucagugguuuccgugaaauuagcgggcaauuccucucucugcccuguuaguggaugggcuauauacaguaaagacaacaguguaagaaucgguuccaagggggauguguuugucauaagggaaccauucauaucaugcucuuccuuggaaugcagaaccuucuucuugacucaaggggccuugcuaaaugacaaacauuccaauggaaccauuaaagacaggagcccauaucgaacccuaaugagcuguccuauuggugaaguuccuucuccauacaacucaagauuugagucagucgcuuggucagcaagugcuugucaugauggcaucaauuggcuaacaauuggaauuucuggcccagacaguggggcaguggcuguguuaaaguacaauggcauaauaacagacacuaucaagaguuggaggaacaauauauugagaacacaagagucugaaugugcauguguaaaugguucuugcuuuaccauaaugaccgauggaccaagugauggacaggccucauacaagaucuucagaauagaaaagggaaagauagucaaaucagucgaaaugaaugccccuaauuaucacuaugaggaaugcuccuguuauccugauucuagugaaaucacaugugugugcagggauaacuggcauggcucgaaucgaccgugggugucuuucaaccagaaucuggaauaucagauaggauacauaugcagugggguuuucggagacaauccacgcccuaaugauaagacaggcaguugugguccaguaucgucuaauggagcaaauggaguaaaaggauuuucauucaaauacggcaaugguguuuggauagggagaacuaaaagcauuaguucaagaaaagguuuugagaugauuugggauccgaauggauggacugggacugacaauaaauucucaauaaagcaagauaucguaggaauaaaugaguggucaggauauagcgggaguuuuguucagcauccagaacuaacagggcuggauuguauaagaccuugcuucuggguugaacuaaucagagggcgacccgaagagaacacaaucuggacuagcgggagcagcauauccuuuugugguguaaacagugacacuguggguuggucuuggccagacggugcugaguugccauuuaccauugacaaguaa

SEQ ID NO: 57809 - RNA, 1410 nt, Artificial Sequence
  derived and/or modified CDS sequence (wt) from neuraminidase__InfluenzaA__AIM56758
augaauccaaaccaaaagauaauaaccauugguucggucuguaugacaauuggaauggcuaacuuaauauuacaaauuggaaacauaaucucaauauggguuagccacucaauucaaauuggaaaucaaagucagauugaaacaugcaaucaaagcgucauuacuuaugaaaacaacacuuggguaaaucagacauauguuaacaucagcaacaccaacuuugcugcuggacagucagugguuuccgugaaauuagcgggcaauuccucucucugcccuguuaguggaugggcuauauacaguaaagacaacaguguaagaaucgguuccaagggggauguguuugucauaagggaaccauucauaucaugcucucccuuggaaugcagaaccuucuucuugacucaaggggccuugcuaaaugacaaacauuccaauggaaccauuaaagacaggagcccauaucgaacccuaaugagcuguccuauuggugaaguucccucuccauacaacucaagauuugagucagucgcuuggucagcaagugcuugucaugauggcaucaauuggcuaacaauuggaauuucuggcccagacaguggggcaguggcugugcuaaaguacaauggcauaauaacagacacuaucaagaguuggaggaacaauauauugagaacacaagagucugaaugugcauguguaaaugguucuugcuuuaccauaaugaccgauggaccaagugauggacaggccucauacaagaucuucagaauagaaaagggaaagauagucaaaucagucgaaaugaaugccccuaauuaucacuaugaggaaugcuccuguuauccugauucuagugaagucacaugugugugcagggauaacuggcauggcucgaaucgaccgugggugucuuucaaccagaaucuggaauaucagauaggauacauaugcagugggguuuucggagacaauccacgcccuaaugauaagacaggcaguugugguccaguaucgucuaauggagcaaauggaguaaaaggauuuucauucaaauacggcaaugguguuuggauagggagaacuaaaagcauuaguucaagaaaagguuuugagaugauuugggauccgaauggauggacugggacugacaauaaauucucaauaaagcaagauaucguaggaauaaaugaguggucaggauauagcgggaguuuuguucagcauccagaacuaacagggcuggauuguauaagaccuugcuucuggguugaacuaaucagagggcgacccgaagagaacacaaucuggacuagcgggagcagcauauccuuuugugguguaaacagugacacuguggguuggucuuggccagacggugcugaguugccauuuaccauugacaaguaa

SEQ ID NO: 57810 - RNA, 1410 nt, Artificial Sequence; identical to SEQ ID NO: 57755
  derived and/or modified CDS sequence (wt) from neuraminidase__InfluenzaA__AIM56769

SEQ ID NO: 57811 - RNA, 1410 nt, Artificial Sequence
  derived and/or modified CDS sequence (wt) from neuraminidase__InfluenzaA__AIM56780
augaauccaaaccaaaagauaauaaccauugguucggucuguaugacaauuggaauggcuaacuuaauauuacaaauuggaaacauaaucucaauauggguuagccacucaauucaacuugggaaucaaagucagauuggaacaugcaaucaaagcgucauuacuuaugaaaacaacacuuggguaaaucagacauauguuaacaucagcaacaccaacuuugcugcuggacagucagugguuuccgugaaauuagcgggcaauuccucucucugcccuguuaguggaugggcuauauacaguaaagacaacaguguaagaaucgguuccaagggggauguguuugucauaagggaaccauucauaucaugcucccccuuggaaugcagaaccuucuucuugacucaaggggccuugcuaaaugacaaacauuccaauggaaccauuaaagacaggagcccauaucgaacccuaaugagcugucccauuggugaaguucccucuccauacaacucaagauuugagucagucgcuuggucagcaagugcuugucaugauggcaucaauuggcuaacaauuggaauuucuggcccagacaguggggcaguggcuguguuaaaguacaauggcauaauaacagacacuaucaagaguuggagaaacaauauauugagaacacaagagucugaaugugcauguguaaaugguucuugcuuuaccauaaugaccgauggaccaagugauggacaggccucauacaagaucuucagaauagaaaagggaaagauaaucaaaucagucgaaaugaaugccccuaauuaucacuaugaggaaugcuccuguuauccugauucuagugaaaucacaugugugugcagggauaacuggcauggcucgaaucgaccgugggugucuuucaaccagaaucuggaauaucagauaggauacauaugcagugggguuuucggagacaauccacgcccuaaugauaagacaggcaguugugguccaguaucgucuaauggagcaaauggaguaaaaggauuuucauucaaauacggcaaugguguuuggauagggagaacuaaaagcauuaguucaagaaaagguuuugagaugauuugggauccgaauggauggacugggacagacaauaaauucucaauaaagcaagauaucguaggaauacaugaguggucaggauauagcgggaguuuuguucagcauccagaacuaacagggcuggauuguauaagaccuugcuucuggguugaacuaaucagagggcgacccgaagagaacacaaucuggacuagcgggagcagcauauccuuuugugguguaaacagugacacuguggguuggucuuggccagacggugcugaguugccauuuaccauugacaaguaa

SEQ ID NO: 57812 - RNA, 1410 nt, Artificial Sequence
  derived and/or modified CDS sequence (wt) from neuraminidase__InfluenzaA__AIM56791
augaauccaaaccaaaagauaauaaccauugguucgguauguaugacaauuggaauggcuaacuuaauauuacaaauuggaaacauaaucucaauauggguuagccacucaauucaacuugggaaucaaagucagauugaaacaugcaaucaaagcgucauuacuuaugaaaacaacacuuggguaaaucagacauauguuaacaucagcaacaccaacuuugcugcuggacagucagugguuuccgugaaauuagcgggcaauuccucucucugcccuguuaguggaugggcuauauacaguaaagacaacaguguaagaaucgguuccaagggggauguguuugucauaagggaaccauucauaucaugcucccccuuggaaugcagaaccuucuucuugacucaaggggccuugcuaaaugacaaacauuccaauggaaccauuaaagacaggagcccauaucgaacccuaaugagcuguccuauuggugaaguucccucuccauacaacucaagauuugagucagucgcuuggucagcaagugcuugucaugauggcaucaguuggcuaacaauuggaauuucuggcccagacaguggggcaguggcuguguuaaaguacaauggcauaauaacagacacuaucaagaguuggagaaacaauauauugagaacacaagagucugaaugugcauguguaaaugguucuugcuuuaccauaaugaccgauggaccaagugauggacaggccucauacaagaucuucagaauagaaaagggaaagauagucaaaucagucgaaaugaaugccccuaauuaucacuaugaggaaugcuccuguuauccugauucuagugaaaucacaugugugugcagggauaacuggcauggcucgaaucgaccgugggugucuuucaaccagaaucuggaauaucagauaggauacauaugcagugggguuuucggagacaauccacgcccuaaugauaagacaggcaguugugguccaguaucgucuaauggagcaaauggaguaaaaggauuuucauucaaauacggcaaugguguuuggauagggagaacuaaaagcauuaguucaagaaaagguuuugagaugauuugggauccgaauggauggacugggacagacaauaacuucucaauaaagcaagauaucguaggaauaaaagaguggucaggauauagcgggaguuuuguucagcauccagaacuaacagggcuggauuguauaagaccuugcuucuggguugaacuaaucagagggcgacccgaagagaacacuaucuggacuagcgggagcagcauauccuuuugugguguaaacagugacacuguggguuggucuuggccagacggugcugaguugccauuuaccauugacaaguaa

SEQ ID NO: 57813 - RNA, 1410 nt, Artificial Sequence
  derived and/or modified CDS sequence (wt) from neuraminidase__InfluenzaA__AIM56813
augaauccaaaccaaaagauaauaaccauugguucggucuguaugacaauuggaauggcuaacuuaauauuacaaauuggaaacauaaucucaauauggguuagccacucaauucaaauuggaaaucaaagucagauugaaacaugcaaucaaagcgucauuacuuaugaaaacaacacuuggguaaaucagacauauguuaacaucagcaacaccaacuuugcugcuggacagucagugguuuccgugaaauuagcgggcaauuccucucucugcccuguuaguggaugggcuauauacaguaaagacaacaguguaagaaucgguuccaagggggauguguuugucauaagggaaccauucauaucaugcucucccuuggaaugcagaaccuucuucuugacucaaggggccuugcuaaaugacaaacauuccaauggaaccauuaaagacaggagcccauaucgaacccuaaugagcuguccuauuggugaaguucccucuccauacaacucaaaauuugagucagucgcuuggucagcaagugcuugucaugauggcaucaauuggcuaacaauuggaauuucuggcccagacaauggggcaguggcuguguuaaaguacaauggcauaauaacagacacuaucaagaguuggaggaacaauauauugagaacacaagagucugaaugugcauguguaaaugguucuugcuuuaccauaaugaccgauggaccaagugauggacaggccucauacaagaucuucagaauagaaaagggaaagauagucaaaucagucgaaaugaaugccccuaauuaucacuaugaggaaugcuccuguuauccugauucuagugaaaucacaugugugugcagggauaacuggcauggcucgaaucgaccgugggugucuuucaaccagaaucuggaauaucagauaggauacauaugcagugggguuuucggagacaauccacgcccuaaugauaagacaggcaguugugguccaguaucgucuaauggagcaaauggaguaaaaggauuuucauucaaauacggcaaugguguuuggauagggagaacuaaaagcauuaguucaagaaaagguuuugagaugauuugggauccgaauggauggacugggacugacaauaaauucucaauaaagcaagauaucguaggaauaaaugaguggucaggauauagcgggaguuuuguucagcauccagaacuaacagggcuggauuguauaagaccuugcuucuggguugaacuaaucagagggcgacccgaagagaacacaauuuggacuagcgggagcagcauauccuuuugugguguaaacagugacacuguggguuggucuuggccagacggugcugaguugccauuuaccauugacaaguaa

SEQ ID NO: 57814 - RNA, 1410 nt, Artificial Sequence
  derived and/or modified CDS sequence (wt) from neuraminidase__InfluenzaA__AIM56824
augaauccaaaccaaaagauaauaaccauuggcucggucuguaugacaauuggaauggcuaacuuaauauuacaaauuggaaacauaaucucaauauggguuagccacucaauucaaauuggaaaucaaagucagauugaaacaugcaaucaaagcgucauuacuuaugaaaacaacacuuggguaaaucagacauauguuaacaucagcaacaccaacuuugcugcuggacagucagugguuuccgugaaauuagcgggcaauuccucucucugcccuguuaguggaugggcuauauacaguaaagacaacaguguaagaaucgguuccaagggggauguguuugucauaagggaaccauucauaucaugcucucccuuggaaugcagaaccuucuucuugacucaaggggccuugcuaaaugacaaacauuccaauggaaccauuaaagacaggagcccauaucgaacccuaaugagcuguccuauuggugaaguucccucuccauacaacucaagauuugagucagucgcuuggucagcaagugcuugucaugauggcaucaauuggcuaacaauuggaauuucuggcccagacaguggggcaguggcuguguuaaaguacaauggcauaauaacagacacuaucaagaguuggaggaacaauauauugagaacacaagagucugaaugugcauguguaaaugguucuugcuuuaccauaaugaccgauggaccaagugauggacaggccucauacaagaucuucagaauagaaaagggaaagauagucaaaucagucgaaaugaaugccccuaauuaucacuaugaggaaugcuccuguuauccugauucuagugaaaucacaugugugugcagggauaacuggcauggcucgaaucgaccgugggugucuuucaaccagaaucuggaauaucagauaggauacauaugcagugggguuuucggagacaauccacgcccuaaugauaagacaggcaguugugguccaguaccgucuaauggagcaaauggaguaaaaggauuuucauucaaauacagcaaugguguuuggauagggagaacuaaaagcauuaguucaagaaaagguuuugagaugauuugggauccgaauggauggacugggacugacaauaaauucucaauaaagcaagauaucguaggaauaaaugaguggucaggguauagcgggaguuuuguucagcauccagaacuaacagggcuggauuguauaagaccuugcuucuggguugaacuaaucagagggcgacccgaagagaacacaaucuggacuagcgggagcagcauauccuuuugugguguaaacagugacacuguggguuggucuuggccagacggugcugaguugccauuuaccauugacaaguaa

SEQ ID NO: 57815 - RNA, 1398 nt, Artificial Sequence
  derived and/or modified CDS sequence (wt) from neuraminidase__InfluenzaA__AIN76385
augaauccaaaucagaagauucuaugcacuucagccacugcuaucauaauaggcgcaaucgcaguacucauuggaauagcaaaccuaggauugaacauaggacugcaucuaaaaccgggcugcaauugcucacacucacaaccuggaacaaccaacacaagccaaacaauaauaaacaacuauuauaaugaaacaaacaucaccaacauccaaauggaagagagaacaagcaggaauuucaauagcuuaacuaaagggcucuguacuauaaauucauggcacauauaugggaaagacaaugcaguaagaauuggagagagcucggauguuuuagucacaagagaacccuauguuucaugcgacccagaugaaugcagguucuaugcucucagccaaggaacaacaaucagagggaaacacucaaacggaacaauacacgauaggucccaguaucgcgcccugauaagcuggccacuaucaucaccgcccacaguguacaacagcaggguggaaugcauuggguggucaagcacuaguugccaugauggcaaauccaggaugucaauauguauaucaggaccaaacaacaaugcaucugcaguagugugguacaacagaaggccuguugcagaaauuaacacaugggcccgaaacauacuaagaacacaggaaucugaauguguaugccacaacggcauaugcccaauaguguucaccgaugggucugccacuggaccugcagacacaagaauauacuauuuuaaagaggggaaaauauugaaaugggagucucugacuggaacugcuaagcauauugaagaaugcucauguuacggggaacgaacaggaauuaccugcacaugcaaggacaauuggcagggcucaaauagaccagugauucagauagacccaguagcaaugacacacacuagucaauauauaugcaguccuguucuuacagacacuccccgaccgaaugacccaaauauagguaaguguaaugacccuuaucccgguaauaacaacaauggagucaagggauucucauaccuggauggggcuaacacuuggcuagggaggacaauaagcacagccucgaggucuggauacgagauguuaaaagugccaaaugcauugacagaugauagaucaaagcccauucaaggucagacaauuguauuaaacgcugacuggagugguuacaguggaucuuucauggacuauugggcugaaggggacugcuaucgagcguguuuuuauguggaguugauacguggaagacccaaggaggauaaagugugguggaccagcaauaguauaguaucgauguguuccaguacagaauuccugggacaauggaacuggccugauggggcuagaauagaguacuuucucuaa

SEQ ID NO: 57816 - RNA, 1410 nt, Artificial Sequence
  derived and/or modified CDS sequence (wt) from neuraminidase__InfluenzaA__AIP93105
augaauccaaaucaaaagauaauaacaauuggcucugucucucucaccauugcaacaguaugcuuccucaugcagauugccauccugguaacuacuguaacauugcauuuuaagcaacaugagugcgacucccccgcgagcaaccaaguaaugccgugugaaccaauaauaauagaaaggaacauaacagagauaguguauuugaauaacaccaccauagagaaagagauaugccccaaaguaguggaauacagaaauuggucaaagccgcaaugucaaauuacaggauuugcaccuuuuucuaaggacaauucaauccggcuuucugcugguggggacauuugggugacgagagaaccuuaugugucaugcgauccuggcaaguguuaucaauuugcacucgggcaggggaccacacuagacaacaaacauucaaaugacacaauacaugauagaaucccucaucgaacccuauuaaugaaugaguuggguguuccauuucauuuaggaaccaggcaaguguguauagcaugguccagcucaaguugucacgauggaaaagcauggcuacauguuuguaucacuggggaugauaaaaaugcaacugcuagcuucauuuaugacgggaggcuuguggacaguauugguucauggucucaaaauauccucagaacccaggagucggaaugcguuuguaucaaugggacuugcacaguagugaugacugauggaagugcuucaggaagagccgauacuagaauacuauucauugaagaggggaaaauuguccauauuagcccauugucaggaagugcucagcauguagaggaguguuccuguuauccucgauauccuggugucagauguaucugcagagacaacuggaaaggcucuaauaggcccgucguagacauaaauauggaagauuauagcauugauuccaguuaugugugcucagggcuuguuggcgacacaccuagaaacgacgacagaucuagcaauagcaauugcaggaauccuaacaaugagagagggaaucaaggagugaaaggcugggccuuugacaauggagaugacguguggaugggaagaacgaucagcaaggauuuacgcucagguuaugaaacuuucaaagucauuggugguugguccacaccuaauuccaaaucgcagaucaauagacaagucauaguugacagcgauaaucggucagguuacucugguauuuucucuguugagggcaaaagcugcaucaauaggugcuuuuauguggaguugauaaggggaaggaaacaggagacuagaguaugguggaccucaaacaguauuguuguguuuuguggcacuucagguaccuauggaacaggcucauggccugauggggcgaacaucaauuucaugccuauauaa

SEQ ID NO: 57817 - RNA, 1410 nt, Artificial Sequence
  derived and/or modified CDS sequence (wt) from neuraminidase__InfluenzaA__AIP93117
augaauccaaaucaaaagauaauaacaauuggcucugucucucucaccauugcaacaguaugcuuccucaugcagauugccauccuggcaacuacugugacauugcauuuuaagcaacaugagugcgacucccccgcgagcaaccaaguaaugccaugugaaccaauaauaauagaaaggaacauaacagagauaguguauuugaauaacaccaccauagagaaagagauuugccccgaaguaguggaauacagaaauuggucaaagccgcaaugucaaauuacaggauuugcaccuuuuucuaaggacaauucaauccggcuuucugcugguggggacauuugggugacgagagaaccuuaugugucaugcgauccuggcaaguguuaucaauuugcacucgggcaggggaccacacuagacaacaaacauucaaauggcacaauacaugauagaaucccucaucgaacccuauuaaugaaugaguuggguguuccauuucauuuaggaaccaaacaaguguguguagcaugguccagcucaaguugucacgauggaaaagcaugguugcauguuugugucacuggggaugauagaaaugcaacugcuagcuucauuuaugacgggaggcuuguggacaguauugguucauggucucaaaauauccucaggacccaggagucggaaugcguuuguaucaaugggacuugcacaguaguaaugacugauggaagugcaucaggaagagccgauacuagaauacuauucauuaaagaggggaaaauuguccauauuagcccauugucaggaagugcucagcauauagaggaguguuccuguuacccucgauauccugacgucagauguaucugcagagacaacuggaaaggcucuaauaggcccguuauagacauaaauauggaagauuauagcauugauuccaguuaugugugcucagggcuuguuggcgacacacccaggaacgacgacagcucuagcaauagcaauugcagggauccuaacaaugagagagggaauccaggagugaaaggcugggccuuugacaauggagaugauguauggaugggaagaacaaucagcaaagauuuacgcucagguuaugaaacuuucaaagucauuggugguugguccacaccuaauuccaaaucgcaggucaauagacaggucauaguugacaacaauaauuggucugguuacucugguauuuucucuguugagggcaaaagcugcaucaauaggugcuuuuauguggaguugauaaggggaaggccacaggagacuagaguaugguggaccucaaacaguauuguuguguuuuguggcacuucagguacuuauggaacaggcucauggccugauggggcgaacaucaauuucaugccuauauaa

SEQ ID NO: 57818 - RNA, 1410 nt, Artificial Sequence
  derived and/or modified CDS sequence (wt) from neuraminidase__InfluenzaA__AIR93973
augaauccaaaccaaaagauaauaaccauugguucggucuguaugacaauuggaauggcuaacuuaauauuacaaauuggaaacauaaucucaauauggauuagccacuccauucaacuugggagucgaaaucaaauugaagcaugcaaucaaagcgucauuacuuaugaaaacaacacuuggguaaaucagacauauguuaacaucagcaacaccaacuuugcugcuggacagucagugguucccgugaaauuagcaggcaauuccucucuuugcccuguuaguggaugggcuauauacaguaaggacaacaguauaagaaucgguuccaagggggauguguuugucauaagggaaccauucauaucaugcucccccuuggaaugcagaaccuuuuucuugacucaaggggcauuguuaaaugauaaacauuccaauggaaccauuaaagacaggagcccauaucggacucuaaugagcuguccuauuggugaaguucccucuccauacaacucaagauuugagucagucgcuuggucagcaagugcuugucaugauggcaucaauuggcuaacaauuggaauuucugguccagacaauggggcaguggcuguauuaaaguacaacggcauaauaacagacacuaucaagaguuggagaaacaauauauugagaacacaggagucugaauguguauguguaaaugguucuuguuuuacuguaaugacagauggaccaaguaaugggcaggccucauacaagaucuucagaauagaaaagggaaagauagucaaaucggucgaaaugaaugccccuaauuaucacuaugaggaaugcuccuguuauccugauucuagugaaaucacaugugugugcagggauaacuggcauggcucgaaucgaccgugggugucuuucaaccagaaucuggaauaccagauaggauacauaugcagugggauuuucggagacaacccacgcccuaaugacaagacaggcaguugugguccaguaucgucuaauggagcaaauggaguaaaaggauuuucauucaaauacggcaaugguguuuggauagggagaacuaaaagcauuaguucaagaaacgguuuugagaugauuugggaucccaacggauggacugagacagacaauaacuuuucaauaaagcaagauaucguagggauaaaugaguggucaggauauagcgggaguuuuguucagcauccagaacugacagggcuggauuguauaagaccuugcuucuggguugaacuaaucagagggcgacccaaagagaacacaaucuggacuagcgggagcagcauauccuuuugugguguaaacaguaacacuguggguuggucuuggccagacggugcugaguugccauuuaccauugacaaguaa

SEQ ID NO: 57819 - RNA, 1410 nt, Artificial Sequence
  derived and/or modified CDS sequence (wt) from neuraminidase__InfluenzaA__AIR93984
augaauccaaaccaaaagauaauaaccauugguucggucuguaugacaauuggaauggcuaacuuaauauuacaaauuggaaacauaaucucaauauggauuagccacucaauucaacuugggaaucaaaaucagauugaaacaugcaaucaaagcgucauuacuuaugaaaacaacacuuggguaaaucagacauauguuaacaucagcaacaccaacuuugcugcuggacagucagugguuuccgugaaauuagcgggcaauuccucucucugcccuguuaguggaugggcuauauacaguaaagacaacaguauaagaaucgguuccaagggggauguguuugucauaagggaaccauucauauccugcucucccuuggaaugcagaaccuucuucuugacucaaggggccuugcuaaaugacaaacauuccaauggaaccauuaaagacaggagcccauaucgaacccuaaugagcuguccuauuggugaaguucccucuccauacaacucaagauuugagucagucgcuuggucagcaagugcuugucaugauggcaucaauuggcuaacaauuggaauuucuggcccagacaauggggcaguggcuguguuaaaguacaacggcauaauaacagacacuaucaagaguuggagaaacaauauauugagaacacaagagucugaaugugcauguguaaaugguucuugcuuuacuguaaugaccgauggaccaaguaauggacaggccucauacaagaucuucagaauagaaaagggaaagauagucaaaucagucgaaauaaaugccccuaauuaucacuaugaggaaugcuccuguuauccugauucaagugaaaucacaugugugugcagggauaacuggcauggcucgaaucgaccgugggugucuuucaaccagaaucuggaauaucagauaggauacauaugcagugggauuuucggagacaauccacgcccuaaugauaagacaggcaguugugguccaguaucgucuaauggagcaaauggaguaaaaggauuuucauucaaauacggcaaugguguuuggauagggagaacuaaaagcauuaguucaagaaacgguuuugagaugauuugggauccgaacggauggacugggacagacaauaacuucucaauaaagcaagauaucguaggaauaaaugaguggucaggauauagcgggaguuuuguucagcauccagaacuaacagggcuggguuguauaagaccuugcuucuggguugaacuaaucagagggcgacccaaagagaacacaauauggacuagcgggagcagcauauccuuuugugguguaaacagugacacuguggguuggucuuggccagacggugcugaguugccauuuaccauugacaaguaa

SEQ ID NO: 57820 - RNA, 1410 nt, Artificial Sequence
  derived and/or modified CDS sequence (wt) from neuraminidase__InfluenzaA__AIR93995
augaauccaaaccaaaagauaauaaucauugguucggucuguaugacaauuggaauggcuaacuuaauauugcaaauuggaaacauaaucucaauauggauuagccacucaauucaacuugggaaucaaaaucagauugaaacaugcaaucaaagcgucauuacuuaugaaaacaacacuuggguaaaucagacauauguuaacauuagcaacaccaauuuugcugcuggacagucugugguucccgugaaauuagcgggcaauuccucucucugcccugugaguggaugggcuauauacaguaaagacaauaguauaagaaucgguuccaagggggauguguuugucauaagggaaccauucauaucaugcucacccuuggaaugcagaaccuucuucuugacucaaggggccuugcuaaaugacaaacauuccaauggaaccauuaaagacaggagcccauaucgaacccuaaugagcuguccuauuggugaaguucccucuccauacaacucaagauuugagucagucgcuuggucagcaagugcuugucaugauggcaucaauuggcuaacaauuggaauuucuggcccagacaauggggcaguggcuguguuaaaguacaacggcauaauaacagacacuaucaagaguuggaaaaacaauauauugagaacacaagagucugaauguguauguguaaaugguucuugcuuuacuguaaugaccgauggaccaaguaauggacaggccucauacaagauuuucagaauagaaaagggaaaaauagucaaaucagucgaaaugaaugccccuaauuaucacuaugaggaaugcuccuguuauccugauucaagugaaaucacaugugugugcagggauaacuggcauggcucgaaucgaccaugggugucuuucaaccagaaucuggaauaucagauaggauacauaugcagugggguuuucggagacaauccacgcccuaaugauaagacaggcaguugugguccaguaucgucuaauggagcaaauggaguaaaaggauuuucauucaaauacggcaaugguguuuggauagggaggacuaaaagcauuaguucaagaaacgguuuugagaugauuugggauccgaacggauggacugggacagacaauaacuucucaauaaagcaagauaucauaggaauaaaugaguggucaggauauagcgggaguuuuguucagcauccagaacuaacagggauggauuguauaagaccuugcuucuggguugaacuaaucagagggcgacccaaagagaacacaauuuggacuagcgggagcagcauauccuuuugugguguaaacagugacacuguggguuggucuuggccagacggugcugaguugccauuuaccauugacaaguaa

SEQ ID NO: 57821 - RNA, 1401 nt, Artificial Sequence
  derived and/or modified CDS sequence (wt) from neuraminidase__InfluenzaA__AIR94118
augaauccaaaucagaagauaauagcaauuggcucuguuucucuaaucauugcgauaauaugucuccucaugcagauugccaucuuaacaacgacuaugacacuacauuucagacagaaugaaugcaauaacucaucgaauaaucaagugaugccaugugaaccgaucauaauagagaggaacacagugcauuugaauagcacuaccauagagagggaaauuuguccuaaaguagcagaauacaagaauuggucaaaaccacaaugucaaauuacaggguuugcuccuuucucaaaggacaacucaauuaggcuuucugcggguggggauaucugggugacaagagaaccuuacgucucaugcagucucgacaaauguuaccaauuugcacuugggcagggaaccacccugaaaaacaagcacucaaauggcacuacacaugauagaaccccucacagaacucuuuuaaugaaugaguuaggugucccauuucauuugggaaccaaacaagugugcauagcauggucuaguucaagcugcuaugauggaaaagcaugguuacauauuuguguuacuggggaugauaaaaaugcuacugcuaguaucaucuauaaugggaugcuuguugacaguauugguucaugguccaaaaacauccucagaacucaggagucagaaugcguuugcaucaauggaacuugugcagugguaaugacugauggaagugcaucaggaaaagccgacacuagaguauuauucauaaaagaagggaaaauuauaaauauuagcccauugucaggaagugcucagcacguugaggaaugcuccuguuauccccgguauccugaaguuaggugugucugcagagacaauuggaagggcuccaauaggcccauucuauauauaaauauggcugauuauagcauugaguccaguuaugugugcucaggacuuguuggugacacaccaagaaaugaugauagcuccagcagcagcaacugcaaagacccuaauagcgaaagaggggccccaggagugaaagggugggccuuugacgaugggaaugauguuuggaugggacggacaaucaaaaaugguucacgcucagguuaugagaccuuuagggucgucaaugguuggaccguggcuaauucaaagucacagguaaauaggcaagucauaguugacagugacgauuggucuggguauucuggcaucuucucuguugaaggcaaaaaaugcaucaacagguguuuuuauguggaguugauaagagggagaccacaagagcccagagugugguggaccucaaauagcaucauuguauucuguggaaccucagguacauauggaacaggcucauggccugauggagcgaauaucaacuucaugccuauauaa

SEQ ID NO: 57822 - RNA, 1410 nt, Artificial Sequence
  derived and/or modified CDS sequence (wt) from neuraminidase__InfluenzaA__AIT38335
augaauccaaaucaaaagauaauaacgauuggcucuguuucucucaccauugccacaauaugcuuccucaugcaaauugccauauuaguaaccacuguaacauuacauuucaagcaauaugaaugcaacucccccccaaccaaccagguaaugcugugugagccaacaauaauagaaagaaacauaacagagauaguguaucugaccaacaccaccauagagaaggagauaugccccaaacugguagaauacagaaauuggucaaagccgcaguguaaaauuacaggguuugcaccuuucucuaaggacaauucaauucgacuuucugcugguggggacauuugggugacaagagaaccuuaugugucaugcgauccugacaaguguuaucaauuugcccuuggacagggaacaacacuaaacaacaggcacucaaaugacacaguacaugauaggaccccuuaucgaacccuauugaugaaugaguuggguaucccauuucauuugggaaccaagcaagugugcauagcaugguccagcucaaguugucacgacggaaaagcauggcugcacguaugugucacuggacaugaugaaaaugcaacugccagcuucauuuacgaugggaggcucguagacaguauuguuucaugguccaaaagaauccucaggacccaggagucagaaugcgucuguaucgauggaacuuguacaguaguaaugacugaugggagugcuucgggaagagcugauacuagaauacuauucauaaaggaggggaaaaucauucauauuagccaauugucaggaagugcucagcaugucgaggagugcuccuguuauccucgcuauccuggugucagaugugucugcagagacaacuggaaaggcuccaauaggcccauuguagacauaaauguaaaggauuauagcaucaauuccaguuaugugugcucaggacuuguuggagauacacccagaaaaaacgacaguuucagcaguagcuauugccugaauccuaacaaugaagaaggaggucauggagugaaaggcugggccuuugaugauggagaugacguguggaugggaagaacgaucaaugagaaguuacgcucagguuaugaaaccuucaaggucauuaaaggcugguccaaaccuaacuccaaauugcaaauaaauaggcaagucauaguugacagggguaauagguccgguuauucugguauuuucucuguugaaggcaaaggcugcaucaaucgguguuuuuauguggaguugauaaggggaaggaaacaggaaacugaagucugguggaccucaaacaguauuguuguguuuuguggcaccucagguacauauggaacaggcucauggccugacggggcgaacaucaaccucaugccuauauaa

SEQ ID NO: 57823 - RNA, 1410 nt, Artificial Sequence
  derived and/or modified CDS sequence (wt) from neuraminidase__InfluenzaA__AIT38346
augaauccuaaucaaaagauaauaacgauugguucuauuucucucaccauugccacaauaugcuuccuuuugcaaguggccaucuugguaaccacuguaacauugcauuucaagcaauuugaaugcaacccaaccccaaacaaccaaguaaugcugugugagccaacaguaauagaaagaaauauaacaaagauaguguaucugaccaacaccacuguagagaaagaaauaugccccaaaccagcagaauacagaaauuggucaaagccgcaauguaaaauuacaggauuugcaccuuuuucuaaggacaauucaauucggcucucugccgguggggacauuuggguaacaagagaaccuuauguaucaugcgcuccuaacaagugcuaucaauuugcccuuggacagggaacaaccuuaaacaacaggcauucaaaugacacaguacaugauagaaccccuuaucgaacccuauugaugaaugaguuggguauuccauuucauuugggaaccaagcaagugugcauagcaugguccagcucaaguugucacgauggaaaagcauggcugcacguuuguguaacugggcaugauaaaaaugcaacugccagcuucauuuaugaugggaggcuuguagacaguauugguucaugguccaaaaacauccucagaacccaggagucagaaugcguuuguaucaauggaaccuguacaguaguaaugacugauggaagugcuucaggaagagcugauaccaaaauacuauucauuaaggaggggaaaaucauucauauuagccaauugucaggaagugcacaacauguagaggaaugcuccuguuauccucgauauccugguguuagaugugucugcagagacaacuggaaaggcuccaauaggcccauuguggauauaaaugugagggauuauagcaucgucuccaguuaugugugcucaggacuuguuggagacacacccaggaaaaacgacaguuucagcaguagccacugccugaauccuaacaaugaagaaggaggucauggagugaaaggcugggccuuugaugauggagaugacguguggaugggaagaacgaucagugagaaauuacgcucagguuaugaaaccuucaaggucauuaaaggcugguccaaaccuaacuccaaauugcagauaaauaggcaagucauaguugacagagguaauagguccgguuauucugguauauucucuguugaaggcaaaagcugcauaaaucggugcuuuuauguggaguugauaaggggaaggaaacaggaaacugaagucugguggaccucaaacaguauuguuguguuuuguggcacuucagguacauauggaacaggcucauggccugacggggcggacaucaaucucaugccuauauaa

SEQ ID NO: 57824 - RNA, 1410 nt, Artificial Sequence
  derived and/or modified CDS sequence (wt) from neuraminidase__InfluenzaA__AIT38361
augaauccuaaucaaaagauaauaacaauugguucuauuucucucaccauugccacaauaugcuuccuuaugcaaguggccaucuugguaaccacuguaacauugcauuucaagcaauaugaaugcaacucaaccccaaacaaccaaguaaugcugugugagccaacaguaauagaaagaaauauaacaaagauaguguaucugaccaacaccacuguagugaaagaaguaugccccaaaccagcagaauacagaaauuggucaaagccgcaauguaaaauuacaggauuugcaccuuuuucuaaggacaauucaauucggcucucugccgguggggacauuuggguaacaagagaaccuuauguaucaugcgcuccuaacaagugcuaucaauuugcccuuggacagggaacaaccuuaaacaacaggcauucaaaugacacaguacaugauagaaccccuuaucgaacccuauugaugaaugaguuggguauuccauuucauuugggaaccaagcaagugugcauagcaugguccagcucaaguuguuacgauggaaaagcauggcugcacguuuguguaacugggcaugauaaaaaugcaacugccagcuucauuuacgaugggaggcuuguagacaguauugguucaugguccaaaaacauccucagaacccaggagucagaaugcguuuguaucaauggaaccuguacaguaguaaugacugauggaagugcuucaggaagagcugauaccaaaauacuauucauuaaggaggggaaaaucauucauauuagccaauugucaggaagugcacaacauguggaggaaugcuccuguuauccucgauauccugguguuagaugugucugcagagacaacuggaaaggcuccaauaggcccauuguggauauaaauaugagggauuauagcaucgucuccaguuaugugugcucaggacuuguuggagacacacccagggaaaacgacaguuucagcaguagccacugccugaauccuaacaaugaagaaggaggucauggagugaaaggcugggccuuugaugauggagaugacguguggaugggaagaacgaucagugagaaauuacgcucagguuaugaaaccuucaaggucauuaaaggcugguccaaaccuaacuccaaauugcagauaaauaggcaagucauaguugacagagguaauagguccgguuauucugguauauucucuguugaaggcaaaagcugcauaaaucggugcuuuuauguggaguugauaaggggaaggaaacaggaaacugaagucugguggaccucaaacaguauuguuguguuuuguggcacuucagguacauauggaacaggcucauggccugacggggcggacaucaaucucaugccuauauaa

SEQ ID NO: 57825 - RNA, 1410 nt, Artificial Sequence
  derived and/or modified CDS sequence (wt) from neuraminidase__InfluenzaA__AIT38375
augaauccaaaccaaaagauaauaaccauugguucggucuguaugacaauuggaaugguuaacuuaauauuacaaauuggaaacauaaucucaauauggauuagccacucaauucaacuugggaaucaaaaucagauugaaauaugcaaucaaagcgucauuacuuaugaaaacaacacuuggguaaaucagacauauguuaacaucagcaacaccaacuuugcugcuggacagucagugguucccgugaaauuagcgggcaauuccucucucugcucuguuaguggaugggcuauauacaguaaagacaacaguauaagaaucgguuccaagggggauguguuugucauaagggaaccauucauaucaugcucccccuuggaaugcagaaccuucuucuugacucaaggggccuugcuaaaugacaaacauuccaauggaaccauuaaagacaggagcccauaucgaacccuaaugagcuguccuauuggugaaguucccucuccauacaacucaagauuugagucaguugcuuggucagcaagugcuugucaugauggcaucaauuggcuaacaauuggaauuucuggcccagacaauggggcaguggcuguguuaaaguacaacggcauaauaacagacacuaucaagaguuggagaaacaauauauugagaacacaagagucugaaugugcauguguaaaugguucuugcuuuacuguaaugaccgauggaccaagugauggacaggccucauacaagaucuucagaauagaaaagggaaagauagucaaaucagucgaaaugaaugccccuaauuaucacuaugaggaaugcuccuguuauccugauucaagugaaaucacaugugugugcagggauaacuggcauggcucgaaucgaccgugggugucuuucaaccagaaucuggaauaucagauaggauacauaugcagugggauuuucggagacaauccacgcccuaaugauaagacaggcaguugugguccaguaucgucuaauggagcaaauggaguaaaaggauuuucauucaaauacggcaaugguguuuggauagggagaacuaaaagcauuaguucaagaaacgguuuugagaugauuugggauccgaacggauggacugggacagacaauaacuucucaauaaagcaagauaucguaggaauaaaugaguggucaggauauagcgggaguuuuguucagcauccagaacuaacagggcuggauuguauaagaccuugcuucuggguugaacuaaucagagggcgacccaaagagaacacaaucuggacuagcgggagcagcauauccuuuugugguguaaacagugacacuguggguuggucuuggccagacggugcugaguugccauuuaccauugacaaguaa

SEQ ID NO: 57826 - RNA, 1410 nt, Artificial Sequence
  derived and/or modified CDS sequence (wt) from neuraminidase__InfluenzaA__AIT93148
augaauccaaaccaaaagauaauaaccauugguucggucuguaugacaauuggaauggcuaacuuaauauuacaaauuggaaacauaaucucaauauggguuagccacucaauucaacuugggaaucaaagucagauugaaacaugcaaucaaagcgucauuacuuaugaaaacaacaccuggguaaaucagacauauguuaacaucagcaacaccaacuuugcugcuggacagucagugguuuccgugaaauuagcgggcaauuccucucucugcccuguuaguggaugggcuauauacaguaaagacaacaguguaagaaucgguuccaagggggauguguuugucauaagggaaccauucauaucaugcucccccuuggaaugcagaaccuucuucuugacucaaggggccuugcuaaaugacaaacauuccaauggaaccauuaaagacaggagcccauaucgaacccuaaugagcugucccauuggugaaguucccucuccauacaacucaagauuugagucagucgcuuggucagcaagugcuugucaugauggcaucaauuggcuaacaauuggaauuucuggcccagacaguggggcaguggcuguguuaaaguacaauggcauaauaacagacacuaucaagaguuggagaaacaauauauugagaacacaagagucugaaugugcauguguaaaugguucuugcuuuaccauaaugaccgauggaccaagugauggacaggccucauacaagaucuucagaauagaaaagggaaagauagucaaaucagucgaaaugaaugccccuaauuaucacuaugaggaaugcuccuguuauccugauucuagugaaaucacaugugugugcagggauaacuggcauggcucgaaucgaccgugggugucuuucaaccagaaucuggaauaucagauaggauacauaugcagugggguuuucggagacaauccacgcccuaaugauaagacaggcaguugugguccaguaucgucuaauggagcaaauggaguaaaaggauuuucauucaaauacggcaaugguguuuggauagggagaacuaaaagcauuaguucaagaaaagguuuugagaugauuugggauccgaauggauggacugggacagacaauaaauucucaauaaagcaagauaucguaggaauaaaugaguggucaggauauagcgggaguuuuguucagcauccagaacuaacagggcuggauuguauaagaccuugcuucuggguugaacuaaucagagggcgacccgaagagaacacaaucuggacuagcgggagcagcauauccuuuugugguguaaacagugacacuguggguuggucuuggccagacggugcugaguugccauuuaccauugacaaguaa

SEQ ID NO: 57827 - RNA, 1410 nt, Artificial Sequence
  derived and/or modified CDS sequence (wt) from neuraminidase__InfluenzaA__AIU39701
augaauccaaaccaaaagauaauaaccauugguucggucuguaugacaauuggaauggcuaacuuaauauuacaaauuggaaacauaaucucaauauggauuagccacucaauucaacuugggaaucaaaaucagauugaaacaugcaaucaaagcgucauuacuuaugaaaacaacacuuggguaaaucagacauauguuaacaucagcaacaccaacuuugcugcuggacagucagugguuuccgugaaauuagcgggcaauuccucucucugcccuguuaguggaugggcuauauacaguaaagacaacaguauaagaaucgguuccaagggggauguguuugucauaagggaaccauucauaucaugcucccccuuggaaugcagaaccuucuucuugacucaaggggccuugcuaaaugacaaacauuccaauggaaccauuaaagacaggagcccauaucgaacccuaaugagcuguccuauuggugaaguucccucuccauacaacucaagauuugagucagucgcuuggucagcaagugcuugucaugauggcaucaauuggcuaacaauuggaauuucuggcccagacaauggggcaguggcuguguuaaaguacaacggcauaauaacagacacuaucaagaguuggagaaacaauauauugagaacacaagagucugaaugugcauguguaaaugguucuugcuuuacuguaaugaccgauggaccaagugauggacaggccucauacaagaucuucaaaauagaaaagggaaagauagucaaaucagucgaaaugaaugccccuaauuaucacuaugaggaaugcuccuguuauccugauucuagugaaaucacaugugugugcagggauaacuggcauggcucgaaucgaccguggguaucuuucaaccagaaucuggaauaucagauaggauacauaugcagugggauuuucggagacaauccacgcccuaaugauaagacaggcaguugugguccaguaucgucuaauggagcaaauggaguaaaaggauuuucauucaaauacggcaaugguguuuggauagggagaacuaaaagcauuaguucaagaaacgguuuugagaugauuugggauccgaacggauggacugggacagacaauaacuucucaauaaagcaagauaucguaggaauaaaugaguggucaggauauagcgggaguuuuguucagcauccagaacuaacagggcuggauuguauaagaccuugcuucuggguugaacuaaucagagggcgacccaaagagaacacaaucuggacuagcgggagcagcauauccuuuugugguguaaacagugacacuguggguuggucuuggccggacggugcugaguugccauuuaccauugacaaguaa

SEQ ID NO: 57828 - RNA, 1410 nt, Artificial Sequence; identical to SEQ ID NO: 51833
  derived and/or modified CDS sequence (wt) from neuraminidase__InfluenzaA__AIU39703

SEQ ID NO: 57829 - RNA, 1410 nt, Artificial Sequence
  derived and/or modified CDS sequence (wt) from neuraminidase__InfluenzaA__AIU39705
augaauccaaaccaaaagauaauaaccauugguucggucuguaugacaauuggaauggcuaacuuaauauuacaaauuggaaacauaaucucaauauggauuagccacucaauucaacuugggaaucaaagucagauugaaacaugcaaucaaagcgucauuacuuaugaaaacaacacuuggguaaaucagacauauguuaacaucagcaacaccaacuuugcugcuggacagucagugguuuccgugaaauuagcgggcaauuccucucucugcccuguuaguggaugggcuauauacaguaaagacaacaguauaagaaucgguuccaagggggauguguuugucauaagggaaccauucauaucaugcucccccuuggaaugcagaaccuucuucuugacucaaggggccuugcuaaaugacaaacauuccaauggaaccauuaaagacaggagcccauaucgaacccuaaugagcuguccuauuggugaaguucccucuccauacaacucaagauuugagucagucgcuuggucagcaagugcuugucaugauggcaucaauuggcuaacaauuggaauuucuggcccagacaauggggcaguggcuguguuaaaguacaacggcauaauaacagacacuaucaagaguuggagaaacaauauauugagaacacaagagucugaaugugcauguguaaaugguucuugcuuuacuguaaugaccgauggaccaagugauggacaggccucauacaagaucuucagaauagaaaagggaaagauagucaaaucagucgaaaugaaugccccuaauuaucacuaugaggaaugcuccuguuauccugauucuagugaaaucacaugugugugcagggauaacuggcauggcucgaaucgaccgugggugucuuucaaccagaaucuggaauaucagauaggauacauaugcagugggauuuucggagacaauccacgcccuaaugauaauacaggcaguugugguccaguaucgucuaauggagcaaauggaguaaaaggauuuucauucaaauacggcaaugguguuuggauagggagaacuaaaagcauuaguucaagaaacgguuuugagaugauuugggauccgaacggauggacugggacagacaauaacuucucaauaaagcaagauaucguaggaauaaaugaguggucaggauauagcgggaguuuuguucagcauccagaacuaacagggcuggauuguauaagaccuugcuucuggguugaacuaaucagagggcgacccaaagagaacacaaucuggacuagcgggagcagcauauccuuuugugguguaaacagugacacuguggguuggucuuggccagacggugcugaguugccauuuaccauugacaaguaa

SEQ ID NO: 57830 - RNA, 1413 nt, Artificial Sequence
  derived and/or modified CDS sequence (wt) from neuraminidase__InfluenzaA__AIU46611
augaauccaaaucaaaagauaacaugcauuucagcaacaggaaugacacuaucgguaguaaguaugcuaauaggaauugccaauuugggcuuaaauaucggacuccacuauaaagugggugauucaacaaauauaaacauuccaaacaugaaugaaaccagcccaacaacaacaauaauaaauaaucacccucagaauaauuucacaaacaucacuaacauuauagugacuaggaacgaggaaggacaucuucucaaccugaccaagccgcuaugugaagucaacucauggcauauucuaucgaaagacaaugcaauaagaauaggugaggaugcucauauaauagucacaagggaaccuuacuuguccugcgauccacagggcugcaggauguuugcucugagccaaggaacaacacucagagggaaacaugcgaauggaaccauacaugacaggagcccauuccgagcucuuguaaguugggaaaugggucaggcgcccaguccauauaauacuagggucgagugcauaggauggucaagcacgucaugccacgauggcauaucaaggaugucaauaugcauaucaggaccgaauaacaaugcaucggcaguagugugguauggggggagaccaguaacagagauccccucaugggcagggaacauucuuaggacucaagaaucggagugugugugccauggaggaauauguccaguggucaugacagaugguccggcaaacaacagggcagaaacuaaaauaaucuauuucaaagaaggaaagauaaagaaaauugaagaacugaagggggacgcucaacacaucgaagaguguucauguuauggagcaucagagaugaucaaguguauaugcagggacaauuggaaaggggcaaacagaccaguaauaacuauagaucccgagaugaugacccacacaagcaaguacuuguguucaaaaauccuaaccgauacaagccgucccaaugaccccaccaaugggaacugcgaagcgccaauaacaggagggagcccagacccugggguaaaaggguuugcauuccuagacggugagaacucauggcuuggaaggacuauuagcaaagacuccaggucaggcuaugaaauguuaaaaguuccaaaugcagagaccgacacucaaucgggggcaaucucacaccagauuauugucaacaaccagaauuggucaggguacucuggggcauucauugacuacugggcaaacaaggaaugcuucaauccuuguuucuauguggaacuaaucagagggagacccaaagagaguaguguacuguggacuucaaauagcauuguagcucucuguggauccaaggagcgauugggaucaugguccuggcaugauggugcugaaaucaucuacuuuaaguag

SEQ ID NO: 57831 - RNA, 1410 nt, Artificial Sequence
  derived and/or modified CDS sequence (wt) from neuraminidase__InfluenzaA__AIV09221
augaauccaaaccaaaagauaauaaccauugguucggucuguaugacaauuggaauggcuaacuuaauauuacaaauuggaaacauaaccucaauauggauuagccacucaauucaaauugggaaccggaaucaaauugaagcaugcaaucaaagcgucauuacuuaugaaaacaacacuuggguaaaucagacauauguuaacaucagcaacaccaacuuugcuguuggacagucagugguuccugugaaauuagcgggcaauuccucucuuugcccugucaguggaugggcuauauacaguaaggacaacaguauaagaaucgguucuaagggggauguguuugucauaagggaaccauucauaucaugcucccccuuggaaugcagaacauuuuucuugacucaaggggcauuguuaaaugauaaacauuccaauggaaccauuaaagacaggagcccauaucggacccuaaugagcuguccuauuggugaaguucccucuccauacaacucaagauuugagucagucgcuuggucagcaagugcuugucaugauggcaucaauuggcuaacaauuggaauuucugguccagacaauggggcaguggcuguauuaaaguacaacggcauaauaacagacacuaucaagaguuggagaaacaauauauugagaacacaggagucugaauguguauguguaaaugguucuuguuuuacuguaaugacagauggaccaaguaaugggcaggccucauacaagaucuucagaauagaaaagggaaagauagucaaaucagucgaaaugaaugccccuaauuaucacuaugaggaaugcuccuguuauccugauucuagugaaaucacaugugugugcagggauaacuggcauggcucgaaucgaccgugggugucuuucaaccagaaucuggaauaucagauaggauacauaugcaguggaauuuucggagacaacccacgcccuaaugacaagacagguaguugugguccaguaccgucuaauggagcaaauggaguaaaaggauuuucauucaaauacggcaaugguguuuggauagggagaacuaaaagcauuaguucaagaaacgguuuugagaugauuugggaucccaauggauggacugagacagacaaugacuucucaauaaagcaagauaucguagggauaaaugaguggucaggguauagcgggaguuuuguucagcauccagaacugacagggcuggauuguauaagaccuugcuucuggguugaacuaaucagggggcgacccaaagagaacacaaucuggacuagcgggagcagcauauccuuuugugguguaaacaguaacacuguggauuggucuuggccagacggugcugaguugccauuuaccauugacaaguaa

SEQ ID NO: 57832 - RNA, 1410 nt, Artificial Sequence
  derived and/or modified CDS sequence (wt) from neuraminidase__InfluenzaA__AIW60703
augaauccaaaucaaaagauaauaacuauuggcucuguuucucucacuauugccacaauaugcuuccuuaugcaaauugucauccugguaacuacuguaacauuacauuucaagcaauaugaaugcaacucccccccaaacaaccaaguaaugcugugugaaccaacaauaauagaaagaaacauaacagagauaguguaucugaccaacaccacaauagagaaggaaauaugccccaaacuagcagaauacagaaauuggucaaagccgcaauguaaaauuacaggauuugcaccuuuuucuaaggacaauucaauucggcuuuccgcugguggggacauuugggugacaagagaaccuuaugugucaugcgauccugacaaguguuaucaauuugcccuuggacagggaacaacacuaaacaacaggcauucaaaugacacaguacaugauaggaccccuuaucgaacccuauugaugaaugaguuggguguuccauuucauuugggaaccaagcaagugugcauagcaugguccagcucaaguugucacgauggaaaagcauggcugcauguuuguguaacugggcaugaugaaaaugcaacugcuagcuucauuuacgaugggaggcuuguagauaguauugguucaugguccaaaaaaauccucaggacccaggagucggaaugcguuuguaucaauggaacuuguacaguaguaaugacugauggaagugcuuccggaagagcugauacuaaaauacuauucauugaagaggggaaaaucguucauauuagcccauugucaggaagugcucagcaugucgaggagugcuccuguuauccucaauauucuggugucagaugugucugcagagacaacuggaaaggcuccaauaggcccaucguagauauaaaugugaaagauuauagcauuguuuccaguuaugugugcucaggacuuguuggagacacacccagaaaaaacgacagcuccagcaguagccauugccugaauccuaacaaugaggaagggggucauggagugaaaggcugggccuuugaugauggaaaugacguguggaugggaagaacgaucagcgagaaguuacgcucagguuaugaaaccuucaaagucauuggaggcugguccaagccuaacuccaaauugcaaauaaauaggcaagucauaguugacagagguaauagguccgguuauucugguauuuucucuguugaaggcaaaaacugcaucaaucggugcuuuuauguggaguugauaaggggaaggaaacaggaaacugaagucugguggaccucaaacaguauuguuguguuuuguggcaccucagguacauauggaacaggcucauggccugauggggcggacaucaaucucaugccuauauaa

SEQ ID NO: 57833 - RNA, 1410 nt, Artificial Sequence
  derived and/or modified CDS sequence (wt) from neuraminidase__InfluenzaA__AIW60704
augaauccaaaucaaaagauaauaacuauuggcucuguuucucucacuauugccacaauaugcuuccuuaugcaaauugucauccugguaacuacuguaacauuacauuucaagcaauaugaaugcaacucccccccaaacaaccaaguaaugcugugugaaccaacaauaauagaaagaaacauaacagagauaguguaucugaccaacaccacaauagagaaggaaauaugccccaaacuagcagaauacagaaauuggucaaagccgcaauguaaaauuacaggauuugcaccuuuuucuaaggacaauucaauucggcuuuccgcugguggggacauuugggugacaagagaaccuuaugugucaugcgauccugacaaguguuaucaauuugcccuuggacagggaacaacacuaaacaacaggcauucaaaugacauaguacaugauaggaccccuuaucgaacccuauugaugaaugaguuggguguuccauuucauuugggaaccaagcaagugugcauagcaugguccagcucaaguugucacgauggaaaagcauggcugcauguuuguguaacugggcaugaugaaaaugcaacugcuagcuucauuuacgaugggaggcuuguagauaguauugguucaugguccaaaaaaauccucaggacccaggagucggaaugcguuuguaucaauggaacuuguacaguaguaaugacugauggaagugcuuccggaagagcugauacuaaaauacuauucauugaagaggggaaaaucguucauauuagcccauugucaggaagugcucagcaugucgaggagugcuccuguuauccucaauauucuggugucagaugugucugcagagacaacuggaaaggcuccaauaggcccaucguagauauaaaugugaaagauuauagcauuguuuccaguuaugugugcucaggacuuguuggagacacacccagaaaaaacgacagcuccagcaguagccauugccugaauccuaacaaugaggaagggggucauggagugaaaggcugggccuuugaugauggaaaugacguguggaugggaagaacgaucagcgagaaguuacgcucagguuaugaaaccuucaaagucauuggaggcugguccaagccuaacuccaaauugcaaauaaauaggcaagucauaguugacagagguaauagguccgguuauucugguauuuucucuguugaaggcaaaaacugcaucaaucggugcuuuuauguggaguugauaaggggaaggaaacaggaaacugaagucugguggaccucaaacaguauuguuguguuuuguggcaccucagguacauauggaacaggcucauggccugauggggcggacaucaaucucaugccuauauaa

SEQ ID NO: 57834 - RNA, 1410 nt, Artificial Sequence
  derived and/or modified CDS sequence (wt) from neuraminidase__InfluenzaA__AIW60705
augaauccaaaucaaaagauaauaacuauuggcucuguuucucucacuauugccacaauaugcuuccuuaugcaaauugccauccugguaacuacuguaacauuacauuucaagcaauaugaaugcaacucccccccaaacaaccaaguaaugcugugugaaccaacaauaauagaaagaaacauaacagagauaguguaucugaccaacaccaccauagagaaggaaauaugccccaaacuagcagaauacagaaauuggucaaagccgcaauguaaaauuacaggauuugcaccuuuuucuaaggacaauucaauucggcuuuccgcugguggggacauuugggugacaagagaaccuuaugugucaugcgauccugacaaguguuaucaauuugcccuuggacagggaacaacacuaaacaacaggcauucaaaugacacaguacaugauaggaccccuuaucgaacccuauugaugaaugaguuggguguuccauuucauuugggaaccaagcaagugugcauagcaugguccagcucaaguugucacgauggaaaagcauggcugcauguuuguguaacugggcaugaugaaaaugcaacugcuagcuucauuuacgaugggaggcuuguagauaguauugguucaugguccaaaaaaauccucaggacccaggagucggaaugcguuuguaucaauggaacuuguacaguaguaaugacugauggaagugcuuccggaagagcugauacuaaaauacuauucauugaagaggggaaaaucguucauauuaguccauugucaggaagugcucagcaugucgaggagugcuccuguuauccucgauauucuggugucagaugugucugcagagacaacuggaaaggcuccaauaggcccaucguagauauaaaugugaaagauuauagcauuguuuccaguuaugugugcucaggacuuguuggagacacacccagaaaaaacgacagcuccagcaguagccauugccugaauccuaacaaugaggaagggggucauggagugaaaggcugggccuuugaugauggaaaugacguguggaugggaagaacgaucagcgagaaguuucgcucagguuaugaaaccuucaaagucauuggaggcugguccaaaccuaacuccaaauugcaaauaaauaggcaagucauaguugacagagguaauagguccgguuauucugguauuuucucuguugaaggcaaaagcugcaucaaucggugcuuuuauguggaguugauaaggggaaggaaacaggaaacugaagucugguggaccucaaacaguauuguuguguuuuguggcaccucagguacauauggaacaggcucauggccugauggggcggacaucaaucucaugccuauauaa

SEQ ID NO: 57835 - RNA, 1410 nt, Artificial Sequence; identical to SEQ ID NO: 57834
  derived and/or modified CDS sequence (wt) from neuraminidase__InfluenzaA__AIW60706

SEQ ID NO: 57836 - RNA, 1410 nt, Artificial Sequence
  derived and/or modified CDS sequence (wt) from neuraminidase__InfluenzaA__AIW60708
augaauccaaaucaaaagauaauaacgauuggcucuguuucucucacuauugccacaauaugcuuccuuaugcaaauugccauccugguaacuacuguaacauugcauuucaagcaauaugaaugcaacucccccccaaacaaccaaguaaugcugugugaaccaacaauaauagaaagaaacauaacagagauaguguaucugaccaacaccaccauagagaaggaaauaugccccaaacuagcagaauacagaaauuggucaaagccgcaauguaacauuacaggauuugcaccuuuuucuaaggacaauucaauucggcuuuccgcugguggagacauuugggugacaagagagccuuaugugucaugcgauccugacaaguguuaucaauuugcccuuggacagggaacaacacuaaacaacaggcauucaaaugacacaguacaugauaggaccccuuaucguacccuauugaugaaugaguuggguguuccauuucauuugggaaccaagcaagugugcauagcaugguccagcucaaguugucacgauggaaaagcauggcugcauguuuguguaacugggcaugaugaaaaugcaacugcuagcuucauuuacaaugggaggcuuguagauaguauugguucaugguccaaaaaaauccucaggacccaggagucggaaugcguuuguaucaauggaacuuguacaguaguaaugacugaugggagugcuucaggaaaagcugauacuaaaauacuauucauugaggaggggaaaaucguucauauuagcccauugucaggaagugcucagcaugucgaggagugcuccuguuauccucgauauccuggugucagaugugucugcagagacaacuggaaaggcuccaauaggcccaucguagauauaaauguaaaggauuauagcauuguuuccaguuaugugugcucaggacuuguuggagacacacccagaaaaaacgacagcuccagcaguagccauugccugaauccuaacaaugaggaagguggucauggagugaaaggcugggccuuugaugauggaaaugacguguggaugggaagaacgaucagcgagaaguuacgcucagguuaugaaaccuucaaagucauugaaggcugguccaacccuaacuccaaauugcagauaaauaggcaagucauaguugacagagguaauaguuccgguuauucugguauuuucuccguugaaggcaaaagcugcaucaaucggugcuuuuauguggaguugauaaggggaaggaaacaggaaacugaagucugguggaccucaaacaguauuguugugcuuuguggcaccucagguacauauggaacaggcucauggccugauggggcggacaucaaucucaugccuauauaa

SEQ ID NO: 57837 - RNA, 1410 nt, Artificial Sequence
  derived and/or modified CDS sequence (wt) from neuraminidase__InfluenzaA__AIW60710
augaauccaaaucaaaagauaauaacgauuggcucuguuucucucaccauugccacaauaugcuuccuuaugcaaauugccaucuugguaacuacuguaacguugcauuucaagcaauaugaaugcaacucccccccaaacaaccaagugaugcugugugaaccaacaauaauagaaagaaacauaacagagauaguguaucugaccaacaccaccauagagaaggaaauaugccccaaacuagcagaauacagaaauuggucaaagccgcaauguaacauuacaggauuugcaccuuuuucuaaggacaauucgauucggcuuuccgcugguggggacaucugggugacaagagaaccuuaugugucaugcgauccugacaaauguuaucaauuugcccuuggacagggaacaacacuaaacaacgggcauucaaaugacacaguacaugauaggaccccuuaucgaacccuauugaugaaugaguuggguguuccauuucauuugggaaccaagcaagugugcauagcaugguccagcucaaguugucacgauggaaaagcauggcugcauguuuguguaacgggggaugaugaaaaugcaacugcuagcuucauuuacaaugggaggcuuguagauaguaucgguucaugguccaaaaaaauccucaggacccaggagucggaaugcguuuguaucaauggaacuuguacaguaguaaugacugaugggagugcuucaggaaaagcugauacuaaaauacuauucauugaggaggggaaaaucguucauacuagcucauugucaggaagugcucagcaugucgaggagugcuccuguuauccucgauauccuggugucagaugugucugcagagacaacuggaaaggcuccaauaggcccaccguagauauaaauguaaaggauuauagcauuguuuccaguuaugugugcucaggacuuguuggagacacacccagaaaaaacgacagcuccagcaguagccauugcuuggauccuaacaaugaggaagguggucauggagugaaaggcugggccuuugaugauggaaaugacguguggaugggaagaacgaucagcgagaaguuacgcucaggauaugaaaccuucaaagucauugaaggcugguccaaaccuaacuccaaauugcagauaaauaggcaagucauaguugacagagguaauagguccgguuauucugguauuuucucuguugaaagcaaaagcugcaucaauaggugcuuuuauguggaguugauaaggggaaggaaacaggaaacugaagucuuguggaccucaaacaguauuguuguguuuuguggcaccucagguacauauggaacaggcucauggccugauggggcggacaucaaucucaugccuauauaa

SEQ ID NO: 57838 - RNA, 1410 nt, Artificial Sequence
  derived and/or modified CDS sequence (wt) from neuraminidase__InfluenzaA__AIW60711
augaauccaaaucaaaagauaauaacaauuggcucuguuucucucaccauugccacaauaugcuuccuuaugcaaauugccauccugguaacuacuguaacauugcauuucaagcagcaugaaugcaacucccccccaaacaaccaaguaaugcugugugaaccaacaauaauagaaagaaacauaacagagauaguguaucugaccaacaccaccauagagaaggaaauaugccccaaacuaguagaauacagaaauuggucaaagccgcaauguaacauuacaggauuugcaccuuuuucuaaggacaauucgauucggcuuuccgcugguggggacaucugggugacaagagaaccuuaugugucaugcgauccugacaaguguuaucaauuugcccuugggcagggaacaacacuaaacaacgggcauucaaaugacacaguacaugauaggaccccuuaccggacccuauugaugaaugaauuggguguuccauuucauuugggaaccaggcaagugugcauagcaugguccagcucaaguugucacgauggaaaagcauggcugcauguuuguguaacuggggaugauaaaaaugcaacugcuagcuucauuuacaaugggaggcuuguagauaguauugguucaugguccaaaaaaauacucagaacccaggagucggaaugcguuuguaucaauggaacuuguacaguaguaaugacugaugggagcgcuucaggaaaagcugauacuaaaauacuauucauugaggaggggaaaaucguucauauuagcacauugucaggaagugcucagcaugucgaggagugcuccuguuauccucgauauccuggugucagaugugucugcagagacaacuggaaaggcuccaauaggcccauuguagauauaaacguaaaggauuauagcauuguuuccaguuauguguguucaggacuuguuggagacacacccagaaaaaacgacagcuucagcaguagccauuguuuggauccuaacaaugaagaagguggucauggagugaaaggcugggccuuugaugauggaaaugacguguggaugggaagaacgaucagcgagaaguuacgcucagguuaugaaaccuucaaagucaucgaaggcugguccaaaccuaacuccaaauuacagauaaauaggcaaguuauaguugaaagagguaacagguccgguuauucugguauuuucuccguugaaggcaaaagcugcaucaaucggugcuuuuauguggaguugauaaggggaaggaaagaggaaacugaagucugguggaccucaaacaguauuguuguguuuuguggcaccucagguacauauggaacaggcucauggccugauggggcggauaucaaucucaugccuauauaa

SEQ ID NO: 57839 - RNA, 1410 nt, Artificial Sequence; identical to SEQ ID NO: 46603
  derived and/or modified CDS sequence (wt) from neuraminidase__InfluenzaA__AIW60712

SEQ ID NO: 57840 - RNA, 1410 nt, Artificial Sequence
  derived and/or modified CDS sequence (wt) from neuraminidase__InfluenzaA__AIW60713
augaauccaaaucaaaagauaauaacgauuggcucuguuucucucaccauuuccacaauaugcuucuucaugcaaauugccaucuugauaacuacuguaacauugcauuuuaagcaauaugaauucagcucccccccaaacaaccaagugaugcugugugaaccaacaauaauagaaagaaacauaacagagauaguguaucugaccaacaccaccauagagaaggaaauaugccccaaacuagcagaauacagaaauuggucaaagccgcaaugugacauuacaggauuugcaccuuuuucuaaggacaauucgauuaggcuuuccgcugguggggacaucugggugacaagagaaccuuaugugucaugcgauccugacaaguguuaucaauuugcccuuggacagggaacaacacuaaacaacgugcauucaaaugacacaguacaugauaggaccccuuaucggacccuauugaugaaugaguuagguguuccauuucaucuggggaccaagcaagugugcauagcaugguccagcucaaguugucacgauggaaaagcauggcugcauguuuguguaacgggggacgauaaaaaugcaacugcuagcuucauuuacaaugggaggcuuguagauaguauuguuucaugguccaaagaaauccucaggacccaggagucagaaugcguuuguaucaauggaacuuguacaguaguaaugaccgaugggagugcuucaggaaaagcugauacuaaaauacuauucauugaggaggggaaaaucguucauacuagcacauugucaggaagugcucagcaugucgaggagugcuccugcuauccucgauauccuggugucagaugugucugcagagacaacuggaaaggcuccaauaggcccaucguagauauaaacauaaaggauuauagcauugcuuccaguuaugugugcucaggacuuguuggagacacacccagaaaaaacgacagcuccagcaguagccauugcuuggauccuaacaaugaagaagguggucauggagugaaaggcugggccuuugaugauggaaaugacguguggaugggaaggacgaucagcgagaaguuacgcucaggauaugaaaccuucaaagucauugaaggcugguccaacccuaauuccaaauugcagauaaauaggcaagucauaguugacagagguaauagguccgguuauucugguauuuucucuguugaaggcaaaagcugcaucaaucggugcuuuuauguggaguugauaaggggaagaaaagaggaaacugaagucuuguggaccucaaacaguauuguuguguuuuguggcaccucagguacauauggaacaggcucauggccugauggggcggacaucaaucucaugccuauauaa

SEQ ID NO: 57841 - RNA, 1410 nt, Artificial Sequence
  derived and/or modified CDS sequence (wt) from neuraminidase__InfluenzaA__AIW60714
augaauccaaaucaaaagauaauaacgauuggcucuguuucucucaccauuuccacaauaugcuucuucaugcaaauugccaucuugauaacuacuguaacauugcauuuuaagcaauaugaauucagcucccccccaaacaaccaagugaugcugugugaaccaacaauaauagaaagaaacauaacagagauaguguaucugaccaacaccaccauagagaaggaaauaugccccaaacuagcagaauacagaaauuggucaaagccgcaaugugacauuacaggauuugcaccuuuuucuaaggacaauucgauuaggcuuuccgcugguggggacaucugggugacaagagaaccuuaugugucaugcgauccugacaaguguuaucaauuugcccuuggacagggaacaacacuaaacaacgugcauucaaaugacacaguacaugauaggaccccuuaucggacccuauugaugaaugaguuagguguuccauuucaucuggggaccaagcaagugugcauagcaugguccagcucaaguugucacgauggaaaagcauggcugcauguuuguguaacgggggacgauaaaaaugcaacugcuagcuucauuuacaaugggaggcuuguagauaguauuguuucaugguccaaagaaauccucaggacccaggagucagaaugcguuuguaucaauggaacuuguacaguaguaaugaccgaugggagugcuucaggaaaagcugauacuaaaauacuauucauugaggaggggaaaaucguucauacuagcacauugucaggaagugcucagcaugucgaggagugcuccugcuauccucgauauccuggugucagaugugucugcagagacaacuggaaaggcuccaauaggcccaucguagauauaaacauaaaggauuauagcauugcuuccaguuaugugugcucaggacuuguuggagacacacccagaaaaaacgacagcuccagcaguagccauugcuuggauccuaacaaugaagaagguggucauggagugaaaggcugggccuuugaugauggaaaugacguguggaugggaaggacgaucagcgagaaguuacgcucaggauaugaaaccuucaaagucauugaaggcugguccaacccuaauuccaaauugcagauaaauaggcaagucauaguuggcagagguaauagguccgguuauucugguauuuucucuguugaaggcaaaagcugcaucaaucggugcuuuuauguggaguugauaaggggaagaaaagaggaaacugaagucuuguggaccucaaacaguauuguuguguuuuguggcaccucagguacauauggaacaggcucauggccugauggggcggacaucaaucucaugccuauauaa

SEQ ID NO: 57842 - RNA, 1410 nt, Artificial Sequence
  derived and/or modified CDS sequence (wt) from neuraminidase__InfluenzaA__AIW60715
augaauccaaaucaaaagauaauaacgauuggcucuguuucucucaccauuuccacaauaugcuucuucaugcaaauugccaucuugauaacuacuguaacauugcauuucaagcaauaugaauucaacucccccccaaacaaccaagugaugcugugugaaccaacaauaauagaaagaaacauaacagagauaguguaucugaccaacaccaccauagagaaggaaauaugccccaaacuagcagaauacagaaauuggucaaagccgcaaugugacauuacaggauuugcaccuuuuucuaaggacaauucgauuaggcuuuccgcugguggggacaucugggugacaagagaaccuuaugugucaugcgauccugacaaguguuaucaauuugcccuuggacagggaacaacacuaaacaacgugcauucaaaugacacaguacgugauaggaccccuuaucggacccuauugaugaaugaguuggguguuccuuuucauuuggggaccaagcaagugugcauagcaugguccagcucaaguugucacgauggaaaagcauggcugcauguuuguauaacgggggaugauaaaaaugcaacugcuagcuucauuuacaaugggaggcuuguagauaguauuguuucaugguccaaaaaaauccucaggacccaggagucagaaugcguuuguaucaauggaacuuguacaguaguaaugacugaugggagugcuucaggaaaagcugauacuaaaauacuauucauugaggaggggaaaaucguucauacuagcacauugucaggaagugcucagcaugucgaggagugcuccugcuauccucgauauccuggugucagaugugucugcagagacaacuggaaaggcuccaauaggcccauuguagauauaaauauaaaggaucauagcauuguuuccaguuaugugugcucaggacuuguuggagacacacccagaaaaaacgacagcuccagcaguagccauuguuuagauccuaacaaugaagaagguggucauggagugaaaggcugggccuuugaugauggaaaugacguguggaugggaagaacgaucagcgagaagucacgcuuaggguaugaaaccuucaaagucauugaaggcugguccaacccuaaguccaaauugcagauaaauaggcaagucauaguugacagagguaauagguccgguuauucugguauuuucucuguugaaggcaaaagcugcaucaaucggugcuuuuauguggaguugauaaggggaagaaaagaggaaacugaagucuuguggaccucaaacaguauuguuguguuuuguggcaccucagguacauauggaacaggcucauggccugauggggcggacaucaaucucaugccuauauaa

SEQ ID NO: 57843 - RNA, 1410 nt, Artificial Sequence
  derived and/or modified CDS sequence (wt) from neuraminidase__InfluenzaA__AIW60716
augaauccaaaucaaaagauaauaacgauuggcucuguuucucucaccauuuccacaauaugcuucuucaugcaaauugccaucuugauaacuacuguaacauugcauuucaagcaauaugaauucaacucccccccaaacaaccaagugaugcugugugaaccaacaauaauagaaagaaacauaacagagauaguguaucugaccaacaccaccauagagaaggaaauaugccccaaacuagcagaauacagaaauuggucaaaaccgcaaugugacauuacaggauuugcaccuuuuucuaaggacaauucgauuaggcuuuccgcugguggggacaucugggugacaagagaaccuuaugugucaugcgauccugacaaguguuaucaauuugcccuuggacagggaacaacacuaaacaacgugcauucaaaugacacaguacgugauaggaccccuuaucggacccuauugaugaaugaguuagguguuccuuuucaucuggggaccaagcaagugugcauagcaugguccagcucaaguugucacgauggaaaagcauggcugcauguuuguauaacgggggaugauaaaaaugcaacugcuagcuucauuuacaaugggaggcuuguagauaguauuguuucaugguccaaagaaauccucaggacccaggagucagaaugcguuuguaucaauggaacuuguacaguaguaaugacugaugggagugcuucaggaaaagcugauacuaaaauacuauucauugaggaggggaaaaucguucauacuagcacauugucaggaagugcucagcaugucgaggagugcuccugcuauccucgauauccuggugucagaugugucugcagagacaacuggaaaggcuccaauaggcccaucguagauauaaacauaaaggaucauagcacuguuuccaguuauguguguucaggacuuguuggagacacacccagaaaaaacgacagcuccagcaguagccauuguuuggauccuaacaaugaagaagguggucauggagugaaaggcugggccuuugaugauggaaaugacguguggaugggaagaacgaucagcgagaagucgcgcuuaggguaugaaaccuucaaagucauugaaggcugguccaacccuaaguccaaauugcagauaaauaggcaagucauaguugacagagguaauagguccgguuauucugguauuuucucuguugaaggcaaaagcugcaucaaucggugcuuuuauguggaguugauaaggggaagaaaagaggaaacugaagucuuguggaccucaaacaguauuguuguguuuuguggcaccucagguacauauggaacaggcucauggccugauggggcggacaucaaucucaugccuauauaa

SEQ ID NO: 57844 - RNA, 1410 nt, Artificial Sequence
  derived and/or modified CDS sequence (wt) from neuraminidase__InfluenzaA__AIY54970
augaauccaaaucaaaagauaauaacgauuggcucuguuucccucaccauuuccacaauaugcuucuucaugcaaauugccauccugauaacuacuguaacauugcauuucaagcaauaugaauucaacucccccccaaacaaccaagugaugcugugugaaccaacaauaauagaaagaaacauaacagagauaguguaucugaccaacaccaccauagagaaggaaauaugccccaaacuagcagaauacagaaauuggucaaagccgcaauguaacauuacaggauuugcaccuuuuucuaaggacaauucgauucggcuuuccgcugguggggacaucugggugacaagagaaccuuaugugucaugcgauccugacaaguguuaucaauuugcccuuggacagggaacaacacuaaacaacgugcauucaaaugacacaguacaugauaggaccccuuaucggacccuauugaugaaugaguuggguguuccauuucaucuggggaccaagcaagugugcauagcaugguccagcucaaguugucacgauggaaaagcauggcugcauguuuguguaacgggggaugaugaaaaugcaacugcuagcuucauuuacaaugggaggcuuguagauaguauuguuucaugguccaaaaaaauccucaggacccaggagucagaaugcguuuguaucaauggaacuuguacaguaguaaugacugaugggagugcuucaggaaaagcugauacuaaaauacuauucauugaggaggggaaaauuguucauacuagcacauuaucaggaagugcucagcaugucgaggagugcuccuguuauccucgauauccuggugucagaugugucugcagagacaacuggaaaggcuccaauaggcccaucguagauauaaacauaaaggauuauagcauuguuuccaguuaugugugcucaggacuuguuggagacacacccagaaaaaccgacagcuccagcaguagccauugcuuggauccaaacaaugaggaagguggucauggagugaaaggcugggcauuugaugauggaaaugaccuguggaugggaagaacgaucagccagaacuuacgcucaggauaugaaaccuucaaagucauugaaggcugguccaacccuaacuccaaauugcagauaaauaggcaagucauaguugacagagguaacagguccgguuauucugguauuuucucuguugaaggcaaaagcugcaucaaucggugcuuuuauguggaguugauaaggggaagaaaacaggaaacugaagucuuguggaccucaaacaguauuguuguguuuuguggcaccucagguacauauggaacaggcucauggccugauggggcggacaucaaucucaugccuauauaa

SEQ ID NO: 57845 - RNA, 1410 nt, Artificial Sequence
  derived and/or modified CDS sequence (wt) from neuraminidase__InfluenzaA__AIY54974
augaauccaaaucaaaagauaauaacgauuggcucuguuucucucaccauuuccacaauaugcuucuucaugcaaauugccaucuugauaacuacuguaacauugcauuucaagcaauaugaauucaacucccccccaaacaaccaagugaugcugugugaaccaacaauaauagaaagaaacauaacagagauaguguaucugaccaacaccaccauagagaaggaaauaugccccaaacuagcagaauacagaaauuggucaaagccgcaaugugacauuacaggauuugcaccuuuuucuaaggacaauucgauuaggcuuuccgcugguggggacaucugggugacaagagaaccuuaugugucaugcgauccugacaaguguuaucaauuugcccuuggacagggaacaacacuaaacaacgugcauucaaaugacacaguacaugauaggaccccuuaucggacccuauugaugagugaguuagguguuccauuucaucuggggaccaagcaagugugcauagcaugguccagcucaaguugucacgauggaaaagcauggcugcauguuuguguaacgggggaugauaaaaaugcaacugcuagcuucauuuacaaugggaggcuuguagauaguauuguuucaugguccaaaaaaauccucaggacccaggagucagaaugcguuuguaucaauggaacuuguacaguaguaaugacugaugggagugcuucaggaaaagcugauacuaaaauacuauucauugaggaggggaaaaucguucauacuagcacauugucaggaagugcucagcaugucgaggagugcuccugcuauccucgauauccuggugucagaugugucugcagagacaacuggaaaggcuccaauaggcccaucguagauauaaacauaaaggauuauagcauuguuuccaguuaugugugcucaggacuuguuggagacacacccagaaaaaacgacagcuccagcaguagccauugcuuggauccuaacaaugaagaagguggucauggagugaaaggcugggccuuugaugauggaaaugacguguggaugggaagaacgaucagcgagaaguuacgcucaggauaugaaaccuucaaagucauugaaggcugguccaacccuaauuccaaauugcagauaaauaggcaagucaaaguugacagagguaauagguccgguuauucugguauuuucucuguugaaggcaaaagcugcaucaaucggugcuuuuauguggaguugauaaggggaagaaaagaggaaacuaaagucuuguggaccucaaacaguauuguuguguuuuguggcaccucagguacauauggaacaggcucauggccugauggggcggacaucaaucucaugccuauauaa

SEQ ID NO: 57846 - RNA, 1410 nt, Artificial Sequence
  derived and/or modified CDS sequence (wt) from neuraminidase__InfluenzaA__AIY54982
augaauccaaaucaaaagauaauaacgauuggcucuguuucucucaccauuuccacaauaugcuucuuuaugcaaauugccaucuugauaacuacuguaacauugcauuucaagcaauaugaauucaacucccccccaaacaaccaagugaugcugugugaaccaacaauaauagaaagaaacauaacagagauaguguaucugaccaacaccaccauagagaaggaaauaugccccaaacuagcagaauacagaaauuggucaaagccgcaaugugacauuacaggauuugcaccuuuuucuaaggacaauucgauuaggcuuuccgcugguggggacaucugggugacaagagaaccuuaugugucaugcgauccugacaaauguuaucaauuugcccuuggacagggaacaacacuaaacaacgugcauucaaaugacacaguacaugauaggaccccuuaucggacccuauugaugaaugaguuagguguuccauuucaucuggggacuaagcaagugugcauagcaugguccagcucaaguugucacgauggaaaagcauggcugcauguuuguguaacgggggaugauaaaaaugcaacugcuagcuucauuuacaaugggaggcuuguagauaguauuguuucaugguccaaagaaauccucagaacccaggagucagaaugcguuuguaucaauggaacuuguacaguaguaaugacugaugggagugcuucaggaaaagcugauacuaaaauacuauucauugaggaggggaaaaucguucauacuagcacauugucaggaagugcccagcaugucgaggagugcuccugcuauccucgauauccuggugucagaugugucugcagagacaacuggaaaggcuccaauaggcccaucguagauauaaacauaaaggauuauagcauuguuuccaguuaugugugcucaggacuuguuggagacacacccagaaaaaacgacagcuccagcaguagccauugcuuggauccuaacaaugaagaagguggucauggagugaaaggcugggccuuugaugauggaaaugacguguggaugggaagaacgaucagcgagaaguuccgcucaggauaugaaaccuucaaagucauugaaggcugguccaacccuaauuccaaauugcagauaaauaggcaagucauaguugacagagguaauagguccgguuauucugguauuuucucuguugaaggcaaaagcugcaucaaucggugcuuuuauguggaguugauaaggggaagaaaagaggaaacugaagucuuguggaccucaaacaguauuguuguguuuuguggcaccucagguacauauggaacaggcucauggccugauggggcggacaucaaucucaugccuauauaa

SEQ ID NO: 57847 - RNA, 1410 nt, Artificial Sequence
  derived and/or modified CDS sequence (wt) from neuraminidase__InfluenzaA__AIY54990
augaauccaaaucaaaagauaauaacgauuggcucuguuucucucaccauuuccacaauaugcuucuucaugcaaauugccaucuugauaacuacuguaacauugcauuucaagcaauaugaauucagcucccccccaaacaaccaagugaugcugugugaaccaacaauaauagaaagaaacauaacagagauaguguaucugaccaacaccaccauagagaaggaaauaugccccaaacuagcagaauacagaaauuggucaaagccgcaauguggcauuacaggauuugcaccuuuuucuaaggacaauucgauuaggcuuuccgcugguggggacaucugggugacaagagaaccuuaugugucaugcgauccugacaaguguuaucaauuugcccuuggacagggaacaacacuaaacaacgugcauucaaaugacacaguacaugauaggaccccuuaucggacccuauugaugaaugagcuagguguuccauuucaucuggggaccaagcaagugugcauagcaugguccagcucaaguugucacgauggaaaagcauggcugcauguuuguguaacgggggaugacaaaaaugcaacugcuagcuucauuuacaaugggaggcuuguagauaguauuguuucaugguccaaagaaauccucaggacccaggagucagaaugcguuuguaucaauggaacuuguacaguaguaaugacugaugggagugcuucaggaaaagcugauacuaaaauacuauucauugaggaggggaaaaucguucauacuagcacauugucaggaagugcucagcaugucgaggagugcuccugcuauccucgauauccuggugucagaugugucugcagagacaauuggaaaggcuccaauaggcccaucguagauauaaacauaaaggauuauagcauuguuuccagauaugugugcucaggacuuguuggagacacacccagaaaaaacgacagcuccagcaguagccauugcuuggauccuaacaaugaagaagguggucauggagugaaaggcugggccuuugaugauggaaaugacguguggaugggaagaacgaucagcgagaagucacgcucaggauaugaaaccuucaaagucauugaaggcugguccaacccuaauuccaaauugcagauaaauaggcaagucauaguugacagagguaauagguccgguuauucugguauuuucucuguugaaggcaaaagcugcaucaaucgguguuuuuauguggaguugauaaggggaagaaaagaggaaacugaaguuuuguggaccucaaacaguauuguuguguuuuguggcaccuccgguacauauggaacaggcucauggccugauggggcggacaucaaucucaugccuauauaa

SEQ ID NO: 57848 - RNA, 1401 nt, Artificial Sequence
  derived and/or modified CDS sequence (wt) from neuraminidase__InfluenzaA__AJD78177
augaauccaaaucagaagauaauagcaauuggcucuguuucucuaaucauugcgguaauaugucuccucaugcagauugccaucuuaacaacgacuaugacacuacauuucaugcagaaugaaugcaguaacccaucgaauaaucaagugaugccaugugaaccgaucauaauagagagaaacacagugcauuugaauaauacuaccauagagagagaaauuuguccuaaagcagcagaguacaagaauuggucaaaaccacaaugucaaauuacaggguucgcuccuuucucaaaagacaacucaauuaggcuuucugcagguggggauaucugggugacaagagaaccuuaugucucaugcagucucgacaaauguuaucaauuugcacuugggcagggaaccacccugaaaaacaagcacucaaauggcacuacacaugauagaaccccucacagaacucuuuuaaugaaugaguuaggugucccauuucauuugggaaccaaacaagugugcauagcauggucuaguucaagcugcuaugauggaaaagcaugguuacauauuuguguuacuggggaugauaaaaaugcuacugcuaguaucaucuaugaugggaugcuuguugacaguauugguucaugguccaaaaacauccucagaacucaggagucagaaugcguuugcaucaauggaacuugugcagugguaaugacugauggaagugcaucaggaaaggccgacacuagaguauuauucauaagagaaggaaaaauuauaaauauuagcccauugucaggaagugcucagcacguugaggaaugcuccuguuauccucgguauccugaaguuagguguguuugcagagacaauuggaagggcuccaauaggcccauucuauauauaaauauggcugauuauagcauugaguccaguuauguuugcucaggacuuguuggcgacacaccaagaaaugaugauagcuccagcagcagcaacugcagagacccuaauaacgaaagaggggccccaggagugaaagggugggccuuugacgacgggaaugauguuuggaugggacggacaaucaaaaaugguucacgcucagguuaugagacuuuuagggucgucaaugguuggaccauggcuaauucaaagucacagauaaauaggcaagucauaguugacagugacgacuggucuggguauucuggcaucuucucuguugaaggcaaaaagugcaucaacagguguuuuuauguagaguugauaagagggagaccacaggaacccagagugugguggaccucaaacagcaucauuguauucuguggaaccucagguacauauggaacaggcucauggccugauggagcgaauaucaacuucaugccuauauaa

SEQ ID NO: 57849 - RNA, 1401 nt, Artificial Sequence
  derived and/or modified CDS sequence (wt) from neuraminidase__InfluenzaA__AJD78189
augaauccaaaucagaagauaauagcaauuggcucuguuucucuaaucauugcgauaauaugucuccucaugcagauugccaucuuaacaacgacuaugacacuacauuucagacagaaugaaugcaauaacucaucgaauaaucaagugaugccaugugaaccgaucauaauagagaggaacacagugcaucugaacagcacuaccauagagagggaaauuuguccuaaaguagcagaauacaagaauuggucaaaaccacaaugucaaauuacaggguuugcuccuuucucaaaggacaacucgauuaggcuuucugcagguggggauaucugggugacaagggaaccuuacgucucaugcagucucgacaaauguuaccaauuugcacuugggcagggaaccacccugaaaaacaagcacucaaauggaacuacacaugauagaaccucucacagaacucuuuuaaugaaugaguuagguguuccauuucauuugggaaccaaacaagugugcauagcauggucuaguucaagcugcuaugauggaaaagcaugguuacauauuuguguuacuggggaugauaaaaaugcuacugcuaguaucaucuauaaugggaugcuuguugacaguauugguucaugguccaaaaacauccucagaacucaggagucagaaugcguuugcaucaauggaacuugugcagugguaaugacugauggaagugcaucaggaaaggccgacacuagaguauuauucauaagagaagggaaaauuauaaauauuagcccauugucaggaagugcucagcacguugaggaaugcuccugcuauccccgguaucccgaaguuaggugugucugcagagacaauuggaagggcuccaauaggcccauucuauauauaaauauggcugauuauagcauugaguccaguuaugugugcucaggacuuguuggugacacaccaagaaaugaugauagcuccagcagcagcaacugcaaagacccuaauagcgaaagaggggccccaggagugaaagggugggccuuugacgaugggaaugauguuuggaugggacggacaaucaaaaaugguucacgcucggguuaugagacuuuuaggguccucaaugguuggaccguggccaauucaaagucacagauaaauaggcaaguuauaguugauagugacgauuggucuggguauucuggcaucuucucuguugaaggcaaaaaaugcaucaacagguguuuuuauguggaguugauaagagggagaccacaagagcccagagugugguggaccucaaauagcaucauuguauucuguggaacaucagguacauauggaacaggcucauggccugauggagcgaauaucaacuucaugccuauauaa

SEQ ID NO: 57850 - RNA, 1401 nt, Artificial Sequence
  derived and/or modified CDS sequence (wt) from neuraminidase__InfluenzaA__AJD78201
augaauccaaaucagaagauaacagcaauuggcucuguuucucuaaucauugcgauaauaugucuccucaugcaaauugccaucuuaacaacgacuaugacauuacauuucaggcagaaagaaugcaguaacccaucgaauaaucaaguaaugccaugugaaccgaucauaauagaaaggaacacagugcauuugaauaguacuaccauagagagggaaauuuguccuaaaguagcagaauacaagaauuggucaaaaccacaaugucuaauuacaggguucgcuccuuucucaaaggacaacucaauuaggcuuucugcagguggggauaucugggugacaagagaaccuuaugucucaugcagucccgacaaauguuaucaauuugcacuugggcagggaaccacccugaaaaacaagcacucaaauggcacuacacaugauagaaccccucacagaacucuuuuaaugaaugaguuaggugucccauuucauuugggaaccaaacaagugugcauagcauggucuaguucaagcugcuaugauggaaaagcaugguuacauauuuguguuacuggggaugauaaaaaugcuacugcuaguaucaucuaugaugggaugcuuguugacaguauuggcucaugguccaaaaacauccucagaacucaggagucagaaugcguuugcaucaauggaacuugugcagugguaaugacugauggaagugcaucaggaguggccgacacuagaguauuauucauaagagaaggaaaaauuauaaauauuagaccauugucaggaagugcucagcacguugaggaaugcuccuguuauccccgauauccugaaguuagguguguuugcagagacaauuggaagggcuccaauaggcccauuauauauauaaauauggcugauuauagcauugaguccaguuaugugugcucaggacuuguuggcgacacaccaagaaaugaugauagcuccagcagcagcaacugcagagacccuaauaacgaaagaggggccccaggagugaaagggugggcuuuugacgacgggaaugauguuuggaugggacggacaaucaaaaaugguucacgcucagguuaugagacuuuuagggucauaaaugguuggacuauggcuaauucaaagucacagauaaauaggcaagucauaguugacagugacgacuggucuggguauuccggcaucuucucuguugaaggcaaaaaaugcaucaacagguguuuuuauguggaguugauaagagggagaccacaggaacccagagugugguggaccucaaauagcaucauuguauucuguggaaccucagguacauaugggacaggcucauggccugauggagcgaauaucaacuucaugccuauauaa

SEQ ID NO: 57851 - RNA, 1401 nt, Artificial Sequence
  derived and/or modified CDS sequence (wt) from neuraminidase__InfluenzaA__AJD78213
augaauccaaaucagaagauaacagcaauuggcucuguuucucuaaucauugcgauaauaugucucuucaugcaaauugccaucuuaacaacgacuaugacauuacauuucaggcagaaagaaugcaguaacccaucgaauaaucaaguaaugccaugugaaccgaucauaauagaaaggaacacagugcauuugaauaguacuaccauagagagggaaauuuguccuaaaguagcagaauacaagaauuggucaaaaccacaaugucuaauuacaggguucgcuccuuucucaaaggacaacucaauuaggcuuucugcagguggggauaucugggugacaagagaaccuuaugucucaugcagucccgacaaauguuaucaauuugcacuugggcagggaaccacccugaaaaacaagcacucaaauggcacuacacaugauagaaccccucacagaacucuuuuaaugaaugaguuaggugucccauuucauuugggaaccaaacaagugugcauagcauggucuaguucaagcugcuaugauggaaaagcaugguuacauauuuguguuacuggggaugauaaaaaugcuacugcuaguaucaucuaugaugggaugcuuguugacaguauuggcucaugguccaaaaacauccucagaacucaggagucagaaugcguuugcaucaauggaacuugugcagugguaaugacugauggaagugcaucaggaguggccgacacuagaguauuauucauaagagaaggaaaaauuauaaauauuagaccauugucaggaagugcucagcacguugaggaaugcuccuguuauccccgguauccugaaguuagguguguuugcagagacaauuggaagggcuccaauaggcccauuauauauauaaauauggcugauuauagcauugaguccaguuaugugugcucaggacuuguuggcgacacaccaagaaaugaugauagcuccagcagcagcaacugcagagacccuaauaacgaaagaggggccccaggagugaaagggugggcuuuugacgacgggaaugauguuuggaugggacggacaaucaaaaaugguucacgcucagguuaugagacuuuuagggucauaaaugguuggacuauggcuaauucaaagucacagauaaauaggcaagucauaguugacagugacgacuggucuggguauuccggcaucuucucuguugaaggcaaaaaaugcaucaacagguguuuuuauguggaguugauaagagggagaccacaggaacccagagugugguggaccucaaauagcaucauuguauucuguggaaccucagguacauaugggacaggcucauggccugauggagcgaauaucaacuucaugccuauauaa

SEQ ID NO: 57852 - RNA, 1410 nt, Artificial Sequence; identical to SEQ ID NO: 57227
  derived and/or modified CDS sequence (wt) from neuraminidase__InfluenzaA__AJI80140

SEQ ID NO: 57853 - RNA, 1410 nt, Artificial Sequence; identical to SEQ ID NO: 57227
  derived and/or modified CDS sequence (wt) from neuraminidase__InfluenzaA__AJI80152

SEQ ID NO: 57854 - RNA, 1410 nt, Artificial Sequence; identical to SEQ ID NO: 57710
  derived and/or modified CDS sequence (wt) from neuraminidase__InfluenzaA__AJI80164

SEQ ID NO: 57855 - RNA, 1410 nt, Artificial Sequence; identical to SEQ ID NO: 57711
  derived and/or modified CDS sequence (wt) from neuraminidase__InfluenzaA__AJI80175

SEQ ID NO: 57856 - RNA, 1410 nt, Artificial Sequence; identical to SEQ ID NO: 57650
  derived and/or modified CDS sequence (wt) from neuraminidase__InfluenzaA__AJI80187

SEQ ID NO: 57857 - RNA, 1410 nt, Artificial Sequence; identical to SEQ ID NO: 57650
  derived and/or modified CDS sequence (wt) from neuraminidase__InfluenzaA__AJI80199

SEQ ID NO: 57858 - RNA, 1410 nt, Artificial Sequence
  derived and/or modified CDS sequence (wt) from neuraminidase__InfluenzaA__AJI80211
augaauccaaaucaaaagauaauaacgauuggcucuguuucucucaccauuuccacaauaugcuucuucaugcaaauugccaucuugauaacuacuguaacauugcauuucaagcaauaugaauucaacucccccccaaacaaccaagugaugcugugugaaccaacaauaauagaaagaaacauaacagagauaguguaucugaccaacaccaccauagagaaggaaauaugccccaaaccagcagaauacagaaauuggucaaaaccgcaauguggcauuacaggauuugcaccuuucucuaaggacaauucgauuaggcuuuccgcugguggggacaucugggugacaagagaaccuuaugugucaugcgauccugacaaguguuaucaauuugcccuuggacagggaacaacacuaaacaacgugcauucaaauaacacaguacgugauaggaccccuuaucggacucuauugaugaaugaguuggguguuccuuuucaucuggggaccaagcaagugugcauagcaugguccagcucaaguugucacgauggaaaagcauggcugcauguuuguauaacgggggaugauaaaaaugcaacugcuagcuucauuuacaaugggaggcuuguagauaguguuguuucaugguccaaagaaauucucaggacccaggagucagaaugcguuuguaucaauggaacuuguacaguaguaaugacugauggaagugcuucaggaaaagcugauacuaaaauacuauucauugaggaggggaaaaucguucauacuagcacauugucaggaagugcucagcaugucgaagagugcucuugcuauccucgauauccuggugucagaugugucugcagggacaacuggaaaggcuccaaucggcccaucguagauauaaacauaaaggaucauagcauuguuuccaguuauguguguucaggacuuguuggagacacacccagaaaaaacgacagcuccagcaguagccauuguuuggauccuaacaaugaagaagguggucauggagugaaaggcugggccuuugaugauggaaaugacguguggaugggaagaacaaucaacgagacgucacgcuuaggguaugaaaccuucaaagucauugaaggcugguccaacccuaaguccaaauugcagauaaauaagcaagucauaguugacagaggugauagguccgguuauucugguauuuucucugucgaaggcaaaagcugcaucaaucggugcuuuuauguggaguugauuaggggaagaaaagaggaaacugaagucuuguggaccucaaacaguauuguuguguuuuguggcaccucagguacauauggaacaggcucauggccugauggggcggaccucaaucucaugccuauauaa

SEQ ID NO: 57859 - RNA, 1410 nt, Artificial Sequence
  derived and/or modified CDS sequence (wt) from neuraminidase__InfluenzaA__AJI80223
augaauccaaaucaaaagauaauaacgauuggcucuguuucucucaccauuuccacaauaugcuucuucaugcaaauugccaucuugauaacuacuguaacauugcauuucaagcaauaugaauucgacucccccccaaacaaccaagugaugcugugugaaccaacaauaauagaaagaaacauaacagagauaguguaucugaccaacaccaccauagagaaggaaauaugccccaaaccagcagaauacagaaauuggucaaaaccgcaauguggcauuacaggauuugcaccuuucucuaaggacaauucgauuaggcuuuccgcugguggggacaucugggugacaagagaaccuuaugugucaugcgauccugacaaguguuaucaauuugcccuuggacagggaacaacacuaaacaacgugcauucaaauaacacaguacgugauaggaccccuuaucggacucuauugaugaaugaguuggguguuccuuuucaucuggggaccaagcaagugugcauagcaugguccagcucaaguugucacgauggaaaagcauggcugcauguuuguauaacgggggaugauaaaaaugcaacugcuagcuucauuuacaaugggaggcuuguagauaguguuguuucaugguccaaagaaauucucaggacccaggagucagaaugcguuuguaucaauggaacuuguacaguaguaaugacugauggaagugcuucaggaaaagcugauacuaaaauacuauucauugaggaggggaaaaucguucauacuagcacauugucaggaagugcucagcaugucgaagagugcucuugcuauccucgauauccuggugucagaugugucugcagagacaacuggaaaggauccaaucggcccaucguagauauaaacauaaaggaucauagcauuguuuccaguuauguguguucaggacuuguuggagacacacccagaaaaaacgacagcuccagcaguagccauuguuuggauccuaacaaugaagaagguggucauggagugaaaggcugggccuuugaugauggaaaugacguguggaugggaagaacaaucaacgagacgucacgcuuaggguaugaaaccuucaaagucauugaaggcugguccaacccuaaguccaaauugcagauaaauaggcaagucauaguugacagaggugauagguccgguuauucugguauuuucucugucgaaggcaaaagcugcaucaaucggugcuuuuauguggaguugauuaggggaagaaaagaggaaacugaagucuuguggaccucaaacaguauuguuguguuuuguggcaccucagguacauauggaacaggcucauggccugauggggcggaccucaaucucaugccuauauaa

SEQ ID NO: 57860 - RNA, 1410 nt, Artificial Sequence; identical to SEQ ID NO: 57711
  derived and/or modified CDS sequence (wt) from neuraminidase__InfluenzaA__AJI80235

SEQ ID NO: 57861 - RNA, 1410 nt, Artificial Sequence; identical to SEQ ID NO: 57859
  derived and/or modified CDS sequence (wt) from neuraminidase__InfluenzaA__AJI80247

SEQ ID NO: 57862 - RNA, 1410 nt, Artificial Sequence; identical to SEQ ID NO: 57668
  derived and/or modified CDS sequence (wt) from neuraminidase__InfluenzaA__AJI80259

SEQ ID NO: 57863 - RNA, 1410 nt, Artificial Sequence; identical to SEQ ID NO: 57646
  derived and/or modified CDS sequence (wt) from neuraminidase__InfluenzaA__AJI80271

SEQ ID NO: 57864 - RNA, 1410 nt, Artificial Sequence; identical to SEQ ID NO: 57650
  derived and/or modified CDS sequence (wt) from neuraminidase__InfluenzaA__AJI80283

SEQ ID NO: 57865 - RNA, 1410 nt, Artificial Sequence
  derived and/or modified CDS sequence (wt) from neuraminidase__InfluenzaA__AJI80306
augaauccaaaucaaaagauaauaacgauuggcucuguuucucucaccauuuccacaauaugcuucuucaugcaaauugccaucuugauaacuacuguaacauugcauuucaagcaauaugaauucaacucccccccaaacaaccaagugaugcugugugaaccaacaauaauagaaagaaacauaacagagauaguguaucugaccaacaccaccauagagaaggaaauaugccccaaaccagcagaauacagaaauuggucaaaaccgcaauguggcauuacaggauuugcaccuuucucuaaggacaauucgauuaggcuuuccgcugguggggacaucugggugacaagagaaccuuaugugucaugcgauccugacaaguguuaucaauuugcccuuggacagggaacaacacuaaacaacgugcauucaaauaacacaguacuugauaggaccccuuaucggacucuauugaugaaugaguuggguguuccuuuucaucuggggaccaagcaagugugcauagcaugguccagcucaaguugucacgauggaaaagcauggcugcauguuuguauaacgggggaugauaaaaaugcaacugcuagcuucauuuacaaugggaggcuuguagauaguguuguuucaugguccaaagaaauucucaggacccaggagucagaaugcguuuguaucaauggaacuuguacaguaguaaugacugauggaagugcuucaggaaaagcugauacuaaaauacuauucauugaggaggggaaaaucguucauacuagcacauugucaggaagugcucagcaugucgaagagugcucuugcuauccucgauauccuggugucagaugugucugcagggacaacuggaaaggcuccaaucggcccaucguagauauaaacauaaaggaucauagcauuguuuccaguuauguguguucaggacuuguuggagacacacccagaaaaaacgacagcuccagcaguagccauuguuuggauccuaacaaugaagaagguggucauggagugaaaggcugggccuuugaugauggaaaugacguguggaugggaagaacaaucaacgagacgucacgcuuaggguaugaaaccuucaaagucauugaaggcugguccaacccuaaguccaaauugcagauaaauaagcaagucauaguugacagaggugauagguccgguuauucugguauuuucucugucgaaggcaaaagcugcaucaaucggugcuuuuauguggaguugauuaggggaagaaaagaggaaacugaagucuuguggaccucaaacaguauuguuguguuuuguggcaccucagguacauauggaacaggcucauggccugauggggcggaccucaaucucaugccuauauaa

SEQ ID NO: 57866 - RNA, 1410 nt, Artificial Sequence
  derived and/or modified CDS sequence (wt) from neuraminidase__InfluenzaA__AJI80318
augaauccaaaccaaaagauaauaaccauugguucggucuguaugacaauuggaauggcuaacuuaauauuacaaauuggaaacauaaucucaauauggauuagccacucaauucaacuugggaaucaaagucagauugaagcaugcaaucaaaacgucauuacuuaugaaaacaacacuuggguaaaucagacauauguuaacaucagcaacaccaacuuugcuacuggacagucagugguuuccgugaaauuagcgggcaauuccucucucugcccuguuaguggaugggcuauauacaguaaagacaacaguguaagaaucgguuccaagggggacguguuugucauaagggaaccauucauaucaugcucccccuuggaaugcagaaccuucuucuugacucaaggggccuugcuaaaugacaaacauuccaauggaaccauuaaagacaggagcccauaucgaacccuaaugagcuguccuauuggugaaguucccucuccauacaacucaagauuugagucagucgcuuggucagcaagugcuugucaugauggcaucaauuggcuaacaauuggaauuucuggcccagacaguggggcaguggcuguguuaaaguacaauggcauaauaacagacacuaucaagaguuggaaaaauaauauauugagaacacaagagucugaaugugcauguguaaaugguucuugcuuuaccauaaugaccgauggaccaagugacggacaggccucauacaagaucuuccgaauagaaaagggaaagauagucaaaucagucgaaaugaaugccccuaauuaucacuaugaggaaugcuccuguuauccugauucuagugaaaucacaugugugugcagggauaacuggcauggcucgaaucgaccgugggugucuuucaaccagaaucuggaauaucagauaggauacauaugcagugggguuuucggagacaauccacgcccuaaugauaagacaggcaguugugguccaguaucgucuaauggagcaaauggaguaaaaggauuuucauucaaauacggcaaugguguuuggauagggagaacuaaaagcauuaguucaagaaaagguuuugagaugauuugggauccaaauggguggacugggacagacaauaacuucucaauaaagcaagauaucguaggaauaaaugaguggucaggauauagcgggaguuuuguucagcauccagaacuaacagggcuggauuguauaagaccuugcuucuggguugaacuaaucagagggcgacccaaagagaacacaaucuggacuagcgggagcagcauauccuuuugugguguaaacagugacacuguggguuggucuuggccagacggugcugaguugccauuuaccauugacaaguaa

SEQ ID NO: 57867 - RNA, 1410 nt, Artificial Sequence
  derived and/or modified CDS sequence (wt) from neuraminidase__InfluenzaA__AJI80329
augaauccaaaccaaaagauaauaaccauugguucggucuguaugacaauuggaauggcuaacuuaauauuacaaauuggaaacauaaucucaauauggauuagccacucaauucaacuugggaaucaaagucagauugaaacaugcaaucaaagcgucauuacuuaugaaaacaacacuuggguaaaucagacauauguuaacaucagcaacaccaauuuugcugcuggacagucagugguuuccgugaaauuagcgggcaauuccucccucugcccuguuaguggaugggccauauacaguaaagacaacaguguaagaaucgguuccaagggggauguguuugucauaagggaaccauucauaucaugcucccccuuggaaugcagaaccuucuucuugacucaaggggccuugcuaaaugacaaacauuccaauggaaccauuaaagacaggagcccauaucgaacccuaaugagcuguccuauuggugaaguucccucuccauacaacucaagauuugagucagucgcuuggucagcaagugcuugucaugauggcaucaauuggcuaacaauuggaauuucuggcccagacaguggggcaguggcuguguuaaaguacaauggcauaauaacagacacuaucaagaguuggaaaaauaauauauugagaacacaagagucugaaugugcauguguaaaugguucuugcuuuaccauaaugaccgauggaccaagugacggacaggccucauacaagaucuuccgaauagaaaagggaaagauagucaaaucagucgaaaugaaugccccuaauuaucacuaugaggaaugcuccuguuauccugauucuagugaaaucacaugugugugcagggauaacuggcauggcucgaaucgaccgugggugucuuucaaccagaaucuggaauaucagauaggauacauaugcagugggguuuucggagacaauccacgcccuaaugauaagacaggcaguugugguccaguaucgucuaauggagcaaauggaguaaaaggauuuucauucaaauacggcaaugguguuuggauagggagaacuaaaagcauuaguucaagaaaagguuuugagaugauuugggauccaaauggauggacugggacagacaauaacuucucaauaaagcaagauaucguaggaauaaaugaguggucaggauauagcgggaguuuuguucagcauccagaacuaacagggcuggauuguauaagaccuugcuucuggguugaacuaaucagagggcgacccaaagagaacacaaucuggacuagcgggagcagcauauccuuuugugguguaaacagugacacuguggguuggucuuggccagacggugcugaguugccauuuaccauugacaaguaa

SEQ ID NO: 57868 - RNA, 1410 nt, Artificial Sequence
  derived and/or modified CDS sequence (wt) from neuraminidase__InfluenzaA__AJI80340
augaauccaaaccaaaagauaauaaccauugguucggucuguaugacaauuggaauggcuaacuuaauauuacaaauuggaaacauaaucucaauauggauuagccacucaauucaacuugggaaucaaagucagauugaaacaugcaaucaaagcgucauuacuuaugaaaacaacacuuggguaaaucagacauauguuaacaucagcaacaccaacuuugcugcuggacagucagugguuuccgugaaauuagcgggcaauuccucucucugcccuguuaguggaugggcuauauacaguaaagacaacaguauaagaaucgguuccaagggggauguguuugucauaagggaaccauucauaucaugcucccccuuggaaugcagaaccuucuucuugacucaaggggccuugcuaaaugacaaacauuccaauggaaccauuaaagacaggagcccauaccgaacccuaaugagcuguccuauuggugaaguucccucuccauacaacucaagauuugagucggucgcuuggucagcaagugcuugucaugauggcaucaauuggcuaacaauuggaauuucuggcccagacaguggggcaguggcuguauuaaaguacaauggcauaauaacagacacuaucaagaguuggaaaaacaauauauugagaacacaagagucugaaugugcauguguaaaugguucuugcuuuaccauaaugaccgauggaccaagugauggacaggccucauacaagaucuucagaauagaaaagggaaagauagucaaaucagucgaaaugaaugccccuaauuauuacuaugaggaaugcuccuguuauccugauucuagugaaaucacaugugugugcagggauaacuggcauggcucgaaucgaccgugggugucuuucaaccagaaucuggaauaucagauaggauacauaugcagugggauuuucggagacaauccacgcccuaaugauaagacaggcaguugugguccaguaucgucuaauggagcaaauggaguaaaaggauuuucauucaaauacggcaaugguguuuggauagggagaacuaaaagcauuaguucaagaaaagguuuugagaugauuugggauccaaauggauggacugggacagacaauaacuucucaauaaagcaagauaucguaggaauaaaugaguggucaggauauagcgggaguuuuguucagcauccagaacuaacagggcuggauuguauaagaccuugcuucuggguugaacuaaucagagggcgaccuaaagagaacacaaucuggacuagcgggagcagcauauccuuuugugguguaaacagugacacuguggguuggucuuggccagacggugcugaguugccauuuaccauugacaaguaa

SEQ ID NO: 57869 - RNA, 1410 nt, Artificial Sequence
  derived and/or modified CDS sequence (wt) from neuraminidase__InfluenzaA__AJI80351
augaauccaaaucaaaagauaauaacgauuggcucuguuucucucaccauuuccacaauaugcuucuucaugcaaauugccaucuugauaacuacuguaacauugcauuucaagcaauaugaauucaacucccccccaaacaaccaagugaugcugugugaaccaacaauaauagaaagaaacauaacagagauaguguaucugaccaacaccaccauagagaaggaaauaugccccaaaccagcagaauacagaaauuggucaaaaccgcaauguggcauuacaggauuugcaccuuucucuaaggacaauucgauuaggcuuuccgcugguggggacaucugggugacaagagaaccuuaugugucaugcgauccugacaaguguuaucaauuugcccuuggacagggaacaacacuaaacaacgugcauucaaauaacacaguacgugauaggaccccuuaucggacucuauugaugaaugaguuggguguuccuuuucaucuggggaccaagcaagugugcauagcaugguccagcucaaguugucacgauggaaaagcauggcugcauguuuguauaacgggggaugauaaaaaugcaacugcuagcuucauuuacaaugggaggcuuguagauaguguuguuucaugguccaaagaaauucucaggacccaggagucagaaugcguuuguaucaauggaacuuguacaguaguaaugacugauggaagugcuucaggaaaagcugauacuaaaauacuauucauugaggaggggaaaaucguucauacuagcacauugucaggaagugcucagcauguugaagagugcucuugcuauccucgauauccuggugucagaugugucugcagagacaacuggaaaggauccaaucggcccaucguagauauaaacauaaaggaucauagcauuguuuccaguuauguguguucaggacuuguuggagacacacccagaaaaaacgacagcuccagcaguagccauuguuuggauccuaacaaugaagaagguggucauggagugaaaggcugggccuuugaugauggaaaugacguguggaugggaagaacaaucaacgagacgucacgcuuaggguaugaaaccuucaaagucauugaaggcugguccaacccuaaguccaaauugcagauaaauaggcaagucauaguugacagaggugauagguccgguuauucugguauuuucucugucgaaggcaaaagcugcaucaaucggugcuuuuauguggaguugauuaggggaagaaaagaggaaacugaagucuuguggaccucaaacaguauuguuguguuuuguggcaccucagguacauauggaacaggcucauggccugauggggcggaccucaaucucaugccuauauaa

SEQ ID NO: 57870 - RNA, 1410 nt, Artificial Sequence
  derived and/or modified CDS sequence (wt) from neuraminidase__InfluenzaA__AJI80363
augaauccaaaucaaaagauaauaacgauuggcucuguuucucucaccauuuccacaauaugcuucuucaugcaaauugccaucuugauaacuacuguaacauugcauuucaagcaauaugaauucaacucccucccaaacaaccaagugaugcugugugaaccaacaauaauagaaagaaacauaacagagauaguguauuugaccaacaccaccauagagaaggaaauaugccccaaaccagcagaauacagaaauuggucaaaaccgcaauguggcauuacaggauuugcaccuuucucuaaggacaauucgauuaggcuuuccgcugguggggacaucugggugacaagagaaccuuaugugucaugcgauccugacaaguguuaucaauuugcccuuggacagggaacaacacuaaacaacgugcauucaaauaacacagcacgugauaggaccccuuaucggacucuauugaugaaugaguuggguguuccuuuucaucuggggaccaagcaagugugcauagcaugguccagcucaaguugucacgauggaaaagcauggcugcauguuuguauaacgggggaugauaaaaaugcaacugcuagcuucauuuacaaugggaggcuuguagauaguguuguuucaugguccaaagaaauucucaggacccaggagucagaaugcguuuguaucaauggaacuuguacaguaguaaugacugauggaagugcuucaggaaaagcugauacuaaaauacuauucauugaggaggggaaaaucguucauacuagcacauugucaggaggugcucagcaugucgaagagugcucuugcuauccucgauauccuggugucagaugugucugcagagacaacuggaaaggcuccaaucggcccaucguagauauaaacauaaaggaucauagcauuguuuccaguuauguguguucaggacuuguuggagacacacccagaaaaaacgacagcuccagcaguagccauuguuugaauccuaacaaugaagaagguggucauggagugaaaggcugggccuuugaugauggaaacgacguauggaugggaagaacaaucaacgagacaucacgcuuaggguaugaaaccuucaaagucauugaaggcugguccaacccuaaguccaaauugcagauaaauaggcaagucauaguugacagaggugauagguccgguuauucugguauuuucucuguugaaggcaaaagcugcaucaaucggugcuuuuauguggaguugauuaggggaagaaaagaggaaacugaagucuuguggaccucaaacaguauuguuguguuuuguggcaccucagguacauauggaacaggcucauggccugauggggcggaccucaaucucaugccuauauaa

SEQ ID NO: 57871 - RNA, 1410 nt, Artificial Sequence
  derived and/or modified CDS sequence (wt) from neuraminidase__InfluenzaA__AJI80375
augaauccaaaucaaaagauaauaacgauuggcucuguuucucucaccauuuccacaauaugccucuucaugcaaauugccaucuugauaacuacuguaacauugcauuucaagcaacaugaauucaacucccccccaaacaaccaagugaugcuaugugaaccaacaauaauagaaagaaacauaacagagauaguguauuugaccaacaccaccauagagaaggaaauaugccccaaaccagcagaauacagaaauuggucaaaaccgcaauguggcauuacaggauuugcaccuuucucuaaggacaauucgauuaggcuuuccgcugguggggacaucugggugacaagagaaccuuaugugucaugcgauccugacaaguguuaucaauuugcccuuggacagggaacaacacuaaacaacgugcauucaaauaacacaguacgugauaggaccccuuaucggacucuauugaugaaugaguuggguguuccuuuucaucuggggaccaagcaagugugcauagcaugguccagcucaaguugucacgauggaaaagcauggcugcauguuuguauaacgggggaugauaaaaaugcaacugcuagcuucauuuacaaugggaggcuuguagauaguguuguuucaugguccaaagaaauucucaggacccaggagucagaaugcguuuguaucaauggaacuuguacaguaguaaugacugauggaagugcuucaggaaaagcugauacuaaaauacuauucauugaggaggggaaaaucguucauacuagcacauugucaggaagugcucagcaugucgaagagugcucuugcuauccucgauauccuggugucagaugugucugcagagacaacuggaaaggcuccaaucggcccaucguagauauaaacauaaaggaucauagcauuguuuccaguuauguguguucaggacuuguuggagacacacccagaaaaaacgacagcuccagcaguagccauuguuuggauccuaacaaugaagaagguggucauggagugaaaggcugggccuuugaugauggaaaugacguauggaugggaagaacaaucaacgagacgucacgcuuaggguaugaaaccuucaaagucauugaaggcugguccaacccuaaguccaaauugcagauaaauaggcaagucauaguugacagaggugauagguccgguuauucugguauuuuuucuguugaaggcaaaagcugcaucaaucggugcuuuuauguggaguugauuaggggaagaaaagaggaaacugaagucuuguggaccucaaacaguauuguuguguuuuguggcaccucagguacauauggaacaggcucauggccugauggggcggaccucaaucucaugccuauauaa

SEQ ID NO: 57872 - RNA, 1410 nt, Artificial Sequence; identical to SEQ ID NO: 57688
  derived and/or modified CDS sequence (wt) from neuraminidase__InfluenzaA__AJI80387

SEQ ID NO: 57873 - RNA, 1410 nt, Artificial Sequence; identical to SEQ ID NO: 57688
  derived and/or modified CDS sequence (wt) from neuraminidase__InfluenzaA__AJI80398

SEQ ID NO: 57874 - RNA, 1410 nt, Artificial Sequence; identical to SEQ ID NO: 57688
  derived and/or modified CDS sequence (wt) from neuraminidase__InfluenzaA__AJI80409

SEQ ID NO: 57875 - RNA, 1410 nt, Artificial Sequence; identical to SEQ ID NO: 57688
  derived and/or modified CDS sequence (wt) from neuraminidase__InfluenzaA__AJI80420

SEQ ID NO: 57876 - RNA, 1410 nt, Artificial Sequence; identical to SEQ ID NO: 57688
  derived and/or modified CDS sequence (wt) from neuraminidase__InfluenzaA__AJI80431

SEQ ID NO: 57877 - RNA, 1410 nt, Artificial Sequence; identical to SEQ ID NO: 57683
  derived and/or modified CDS sequence (wt) from neuraminidase__InfluenzaA__AJI80442

SEQ ID NO: 57878 - RNA, 1410 nt, Artificial Sequence; identical to SEQ ID NO: 57688
  derived and/or modified CDS sequence (wt) from neuraminidase__InfluenzaA__AJI80454

SEQ ID NO: 57879 - RNA, 1410 nt, Artificial Sequence; identical to SEQ ID NO: 57683
  derived and/or modified CDS sequence (wt) from neuraminidase__InfluenzaA__AJI80465

SEQ ID NO: 57880 - RNA, 1410 nt, Artificial Sequence; identical to SEQ ID NO: 57688
  derived and/or modified CDS sequence (wt) from neuraminidase__InfluenzaA__AJI80477

SEQ ID NO: 57881 - RNA, 1410 nt, Artificial Sequence; identical to SEQ ID NO: 57688
  derived and/or modified CDS sequence (wt) from neuraminidase__InfluenzaA__AJI80488

SEQ ID NO: 57882 - RNA, 1410 nt, Artificial Sequence; identical to SEQ ID NO: 57710
  derived and/or modified CDS sequence (wt) from neuraminidase__InfluenzaA__AJI80499

SEQ ID NO: 57883 - RNA, 1410 nt, Artificial Sequence; identical to SEQ ID NO: 57699
  derived and/or modified CDS sequence (wt) from neuraminidase__InfluenzaA__AJI80510

SEQ ID NO: 57884 - RNA, 1410 nt, Artificial Sequence; identical to SEQ ID NO: 57710
  derived and/or modified CDS sequence (wt) from neuraminidase__InfluenzaA__AJI80521

SEQ ID NO: 57885 - RNA, 1410 nt, Artificial Sequence
  derived and/or modified CDS sequence (wt) from neuraminidase__InfluenzaA__AJJ98767
augaauccaaaucaaaagauaauaacgauuggcucuguuucucucaccauuuccacaauaugcuucuucaugcaaauugccaucuugauaacuacuguaacauugcauuucaagcaauaugaauucaacucccccucaaacaaccaagugaugcugugugaaccaacaauaauagaaagaaacauaacagagauaguguaucugaccaacaccaccauagagaaggaaaaaugccccaaaccagcagaauacagaaauuggucaaaaccgcaaugugacauuacaggauuugcaccuuuuucuaaggacaauucgauuaggcuuuccgcugguggggacaucugggugacaagagaaccuuaugugucaugcgauccugacaaguguuaucaauuugcccuuggacagggaacaacacuaaacaacgugcauucaaauaacacaguacgugauaggaccccuuaucggacccuauugaugaaugaguuagguguuccuuuucaucuggggaccaagcaagugugcauagcaugguccagcucaaguugucacgauggaaaagcauggcugcauguuuguauaacgggggaugauaaaaaugcaacugcuagcuucauuuacaaugggaggcuuguagauaguguuguuucaugguccaaagaaauccucaggacccaggagucagaaugcguuuguaucaauggaacuuguacaguaguaaugacugaugggagugcuucaggaaaagcugauacuaaaauacuauucauugaggagggaaaaaucguucauaccagcacauugucaggaagugcucagcaugucgaggagugcuccugcuauccucgauauccuggugucagaugugucugcagagacaacuggaaaggcuccaauaggcccaucguagauauaaacauaaaggaucauagcauuguuuccaguuauguguguucaggacuuguuggagacacacccagaaaaaacgacagcuccagcaguagccauuguuuggauccuaacaaugaagaagguggucauggagugaaaggcugggccuuugaugauggagaugacguguggaugggaagaacgaucagcgagaagucacgcuuaggguaugaaaccuucaaagucauugaaggcugguccaacccuaaguccaaauugcagauaaauaggcaagucauaguugacagagguaauagguccgguuauucugguauuuucucuguugaaggcaaaagcugcaucaaucggugcuuuuauguggaguugauaaggggaagaaaagaggaaacugacgucuuguggaccucaaacaguauuguuguguuuuguggcaccucagguacauauggaacaggcucauggccugauggggcggacaucaaucucaugccuauauaa

SEQ ID NO: 57886 - RNA, 1410 nt, Artificial Sequence
  derived and/or modified CDS sequence (wt) from neuraminidase__InfluenzaA__AJJ98779
augaauccaaaucaaaagauaauaacgauuggcucuguuucucucaccauuuccacaauaugcuucuucaugcaaacugccaucuugauaacuacuguaacauugcauuucaagcaauaugaauucaacucccccccaaacaaccaagugaugcugugugaaccaacaauaauagaaagaaacauaacagagauaguguaucugaccaacaccaccauagagaaggaaauaugccccaaaccagcagaauacagaaauuggucaaagccgcaaugugacauuacaggauuugcaccuuuuucuaaggacaauucgauuaggcuuuccgcugguggggacaucugggugacaagagaacccuaugugucaugcgauccugacaaguguuaucaauuugcccuuggacagggaacaacacuaaacaacgugcauucaaaugacacaguacgugauaggaccccuuaucggacccuauugaugaaugaguuagguguuccuuuucaucuggggaccaagcaagugugcauagcaugguccagcucaaguugucacgauggaaaagcauggcugcauguuuguauaacgggggaugauaaaaaugcaacugcuagcuucauuuacaaugggaggcuuguagauaguauuguuucauggaccaaagaaauccucaggacccaggagucagaaugcguuuguaucaauggaacuuguacaguaguaaugacugaugggagugcuucaggaaaagcugauacuaaaauacuauucauugaggaggggaaaaucguucauacuagcacauugucaggaagugcucagcaugucgaggagugcuccugcuauccucgauauccuggugucagaugugucugcagagacaacuggaaaggcuccaauaggcccaucguagauauaaacauaaaggaucauagcauuguuuccaguuauguguguucaggacuuguuggagacacacccagaaaaaacgacagcuccagcaguagccauuguuuggauccuaacaaugaagaagguggucauggagugaaaggcugggccuuugaugauggaaaugacguguggaugggaagaacgaucagcgagaagucacgauuaggguaugaaaccuucaaagucauugaaggcugguccaacccuaaguccaaauugcagauaaauaggcaagucauaguugacagagguaauagguccgguuauucugguauuuucucuguugaaggcaaaagcugcaucaaucggugcuuuuauguggaguugauaaggggaagaaaagaggaaacugaagucuuguggaccucaaacaguauuguuguguuuuguggcaccucagguacauauggaacaggcucauggccugauggggcggacaucaaucucaugccuauauaa

SEQ ID NO: 57887 - RNA, 1410 nt, Artificial Sequence; identical to SEQ ID NO: 54974
  derived and/or modified CDS sequence (wt) from neuraminidase__InfluenzaA__AJJ98791

SEQ ID NO: 57888 - RNA, 1410 nt, Artificial Sequence
  derived and/or modified CDS sequence (wt) from neuraminidase__InfluenzaA__AJJ98803
augaauccaaaucaaaagauaauaacgauuggcucuguuucucucaccauuuccacaauaugcuucuucaugcaaauugccaucuugauaacuacuguaacauugcauuucaagcaauaugaauucaacucccccccaaacaaccaagugaugcugugugaaccaacaauaauagaaagaaacauaacagagauaguguaucugaccaacaccaccauagagaaggaaauaugccccaaaccagcagaauacagaaauuggucaaaaccgcaauguggcauuacaggauuugcaccuuucucuaaggacaauucgauuaggcuuuccgcugguggggacaucugggugacaagagaaccuuaugugucaugcgauccugacaaguguuaucaauuugcccuuggacagggaacaacacuaaacaacgugcauucaaauaacaaaguacgugauaggaccccuuaucggacucuauugaugaaugaguuggguguuccuuuucaucuggggaccaagcaagugugcauagcaugguccagcucaaguugucacgauggaaaagcauggcugcauguuuguauaacgggggaugauaaaaaugcaacugcuagcuucauuuacaaugggaggcuuguagauaguguuguuucaugguccaaagaaauucucaggacccaggagucagaaugcguuuguaucaauggaacuuguacaguaguaaugacugauggaagugcuucaggaaaagcugauacuaaaauacuauucauugaggaggggaaaaucguucauacuagcacauugucaggaagugcucagcaugucgaagagugcucuugcuauccucgauauccuggugucagaugugucugcagagacaacuggaaaggcuccaaucggcccaucguagauauaaacauaaaggaucauagcauuguuuccaguuauguguguucaggacuuguuggagacacacccagaaaaaacgacagcuccagcaguagccauuguuuggauccuaacaaugaagaagguggucauggagugaaaggcugggccuuugaugauggaaaugacguguggaugggaagaacaaucaacgagacgucacgcuuaggguaugaaaccuucaaagucauugaaggcugguccaacccuaaguccaaauugcagauaaauaggcaagucauaguugacagaggugauagguccgguuauucugguauuuucucuguugaaggcaaaagcugcaucaaucggugcuucuauguggaguugauuaggggaagaaaagaggaaacugaagucuuguggaccucaaacaguauuguuguguuuuguggcaccucagguacauauggaacaggcucauggccugauggggcggaccucaaucucaugccuauauaa

SEQ ID NO: 57889 - RNA, 1410 nt, Artificial Sequence
  derived and/or modified CDS sequence (wt) from neuraminidase__InfluenzaA__AJJ98815
augaauccaaaucaaaagauaauaacgauuggcucuguuucucucaccauuuccacaauaugcuucuucaugcaaauugccaucuugauaacuacuguaacauugcauuucaagcaauaugaauucaacucccccccaaacaaccaagugaugcugugugaaccaacaauaauagaaagaaacauaacagagauaguguaucugaccaacaccaccauagagaaggaaauaugccccaaaccagcagaauacagaaauuggucaaaaccgcaauguggcauuacaggauuugcaccuuucucuaaggacaauucgauuaggcuuuccgcugguggggacaucugggugacaagagaaccuuaugugucaugcgauccugacaaguguuaucaauuugcccuuggacagggaacaacacuaaacaacgugcauucaaauaacacaguacgugauaggaccccuuaucggacucuauugaugaaugaguuggguguuccuuuucaucuggggaccaagcaagugugcauagcaugguccagcucaaguugucacgauggaaaagcauggcugcauguuuguauaacgggggaugauaaaaaugcaacugcuagcuucauuuacaaugggaggcuuguagauaguguuguuucaugguccaaagaaauucucaggacccaggagucagaaugcguuuguaucaauggaacuuguacaguaguaaugacugauggaagugcuucaggaaaagcugauacuaaaauacuauucauugaggagggaaaaaucguucauacuagcacauugucaggaagugcucagcaugucgaagagugcucuugcuauccucgauauccuggugucagaugugucugcagagacaacuggaaaggcuccaaucggcccaucguagauauaaacauaaaggaucauagcauuguuuccaguuauguguguucaggacuuguuggagacacacccagaaaaaacgacagcuccagcaguagccauuguuuggauccuaacaaugaagaagguggucauggagugaaaggcugggccuuugaugauggaaaugacguguggaugggaagaacaaucaacgagacgucacgcuuaggguaugaaaccuucaaagucauugaaggcugguccaacccuaaguccaaauugcagauaaauaggcaagucauaguugacagaggugauagguccgguuauucugguauuuucucuguugaaggcaaaagcugcaucaaucggugcuuuuauguggaguugauuaggggaagaaaagaggaaacugaaguccuguggaccucaaacaguauuguuguguuuuguggcaccucagguacauauggaacaggcucauggccugauggggcggaccucaaucucaugccuauauaa

SEQ ID NO: 57890 - RNA, 1410 nt, Artificial Sequence
  derived and/or modified CDS sequence (wt) from neuraminidase__InfluenzaA__AJJ98827
augaauccaaaucaaaagauaauaacgauuggcucuguuucucucaccauuuccacaauaugcuucuucaugcaaauugccaucuugauaacuacuguaacauugcauuucaagcaauaugaauucaacucccccccaaacaaccaagugaugcugugugaaccaacaauaauagaaagaaacauaacagagauaguguaucugaccaacaccaccauagagaaggaaauaugccccaaaccagcagaauacagaaauuggucaaaaccgcaauguggcauuacaggauuugcaccuuucucuaaggacaauucgauuaggcuuuccgcugguggggacaucugggugacaagagaaccuuaugugucaugcgauccugacaaguguuaucaauuugcccuuggacagggaacaacacuaaacaacgugcauucaaauaacacaguacgugauaggaccccuuaucggacucuauugaugaaugaguuggguguuccuuuucaucuggggaccaagcaagugugcauagcaugguccagcucaaguugucacgauggaaaagcauggcugcauguuuguauaacgggggaugauaaaaaugcaacugcuagcuucauuuacaaugggaggcuuguagauaguguuguuucaugguccaaagaaauucucaggacccaggagucagaaugcguuuguaucaauggaacuuguacaguaguaaugacugauggaagugcuucaggaaaagcugauacuaaaauacuauucauugaggaggggaaaaucguucauacuagcacauugucaggaagugcucagcaugucgaagagugcucuugcuauccucgguauccuggugucagaugugucugcagagacaacuggaaaggcuccaauaggcccaucguagauauaaacauaaaggaucauaacauuguuuccaguuauguguguucaggacuuguuggagacacacccagaaaaaacgacagcuccagcaguagccauuguuuggauccuaacaaugaagaagguggucauggagugaaaggcugggccuuugaugauggaaaugacguguggaugggaagaacaaucaacgagacgucacgcuuaggguaugaaaccuucaaagucauugaaggcugguccaacccuaaguccaaauugcagauaaauaggcaagucauaguugacagaggugauagguccgguuauucugguauuuucucuguugaaggcaaaagcugcaucaaucggugcuuuuauguggaguugauuaggggaagaaaagaggaaacugaagucuuguggaccucaaacaguauuguuguguuuuguggcaccucagguacauauggaacaggcucauggccugauggggcggaccucaaucucaugccuauauaa

SEQ ID NO: 57891 - RNA, 1410 nt, Artificial Sequence
  derived and/or modified CDS sequence (wt) from neuraminidase__InfluenzaA__AJJ98839
augaauccaaaucaaaagauaauaacgauuggcucuguuucucucaccauuuccacaauaugcuucuucaugcaaauugccaucuugauaacuacuguaacauugcauuucaagcaauaugaauucaacucccccccaaacaaccaagugaugcugugugaaccaacaauaauagaaagaaacauaacagaaauaguguaucugaccaacaccaccauagagaaggaaauaugccccaaacuagcagaauacagaaauuggucaaagccgcaaugugacauuacaggauuugcaccuuuuucuaaggacaauucgauuaggcuuuccgcugguggggacaucugggugacaagagaaccuuaugugucaugcgauccugacaaguguuaucaauuugcccuuggacagggaacaacacuaaacaacgugcauucaaauaacacaguacgugauaggaccccuuaucggacccuauugaugaaugaguuagguguuccuuuucaucuggggaccaagcaagugugcauagcaugguccagcucaaguugucacgauggaaaagcauggcugcauguuuguauaacgggggaugauaaaaaugcaacugcuagcuucauuuacaaugggaagcuuguagauaguguugucucaugguccaaagaaauccucaggacccaggagucagaaugcguuuguaucaauggaacuuguacaguaguaaugacugaugggagugcuucaggaaaagcugauaccaaaauacuauucauugaggaggggaaaaucguucauacuagcacauugucaggaagugcucagcaugucgaggagugcucuugcuauccucgauauccuggugucagaugugucugcagagacaacuggaaaggcuccaauaggcccaucguagauauaaacauaaaggaucauagcauuguuuccaguuauguguguucaggacuuguuggagacacacccagaaaaaacgacagcuccagcaguagccauuguuuggauccuaacaaugaagaagguggucauggagugaaaggcugggccuuugaugauggaaaugacguguggaugggaagaacgaucaacgagacgucacguuuaggguaugaaaccuucaaagucauugaaggcugguccaacccuaaguccaaauugcagauaaauaggcaagucauaguugacagagguaauagguccgguuauucugguauuuucucuguugaaggcaaaagcugcaucaaucggugcuuuuauguggaguugauuaggggaagaaaagaggaaacugaagucuuguggaccucaaacaguauuguuguguuuuguggcaccucagguacauauggaacaggcucauggccugauggggcggaccucaaccucaugccuauauaa

SEQ ID NO: 57892 - RNA, 1410 nt, Artificial Sequence
  derived and/or modified CDS sequence (wt) from neuraminidase__InfluenzaA__AJJ98851
augaauccaaaucaaaagauaauaacgauuggcucuguuucucucaccauuuccacaauaugcuucuucaugcaaauugccaucuugauaacuacuguaacauugcauuucaagcaauaugaauucaacucccccccaaacaaccaagugaugcugugugaaccaacaauaauagaaagaaacauaacagagauaguguaucugaccaacaccaccauagagaaggaaauaugccccaaacuagcagaauacagaaauuggucaaagccgcaaugugacauuacaggauuugcaccuuuuucuaaggacaauucgauuaggcuuuccgcugguggggacaucugggugacaagagaaccuuaugugucaugcgauccugacaaguguuaucaauuugcccuuggacagggaacaacacuaaacaaugugcauucaaauaacacaguacgugauaggaccccuuaucggacccuauugaugaaugaguuagguguuccuuuucaucuggggaccaagcaagugugcauagcaugguccagcucaaguugucacgauggaaaagcauggcugcauguuuguauaacgggggaugauaaaaaugcaacugcuagcuucauuuacaaugggaggcuuguagauaguguuguuucaugguccaaagaaauccucaggacccaggagucagaaugcguuuguaucaauggaacuuguacaguaguaaugacugaugggagugcuucaggaaaagcugauacuaaaauacuauucauugaggaggggaaaaucguucauacuagcacauugucaggaagugcucagcaugucgaggagugcucuugcuauccucgauauccuggugucagaugugucugcagagacaacuggaaaggcuccaauagacccaucguagauauaaacauaaaggaucauagcauuguuuccaguuauguguguucaggacuuguuggagacacacccagaaaaaacgacagcuccagcaguagccauuguuuggauccuaacaaugaagaagguggucauggagugaaaggcugggccuuugaugauggaaaugacguguggaugggaagaacgaucaacgagacgucacguuuaggguaugaaaccuucaaagucauugaaggcugguccaacccuaaguccaaauugcagauaaauaggcaagucauaguugacagagguaauagguccgguuauucugguauuuucucuguugaaggcaaaagcugcaucaaucggugcuuuuauguggaguugauuaggggaagaaaagaggaaacugaagucuuguggaccucaaacaguauuguuguguuuuguggcaccucagguacauauggaacaggcucauggccugauggggcggaccucaaucucaugccuauauaa

SEQ ID NO: 57893 - RNA, 1410 nt, Artificial Sequence
  derived and/or modified CDS sequence (wt) from neuraminidase__InfluenzaA__AJJ98863
augaauccaaaucaaaagauaauaacgauuggcucuguuucucucaccauuuccacaauaugcuucuucaugcaaauugccaucuugauaacuacuguaacauugcauuucaagcaauaugaauucaacucccccccaaacaaccaagugaugcugugugaaccaacaauaauagaaagaaacauaacagagauaguguaucugaccaacaccaccauagagaaggaaauaugccccaaaccagcagaauacagaaauuggucaaaaccgcaaugugacauuacaggauuugcaccuuucucuaaggacaauucgauuaggcuuuccgcugguggggacaucugggugacaagagaaccuuaugugucaugcgauccugacaaguguuaucaauuugcccuuggacagggaacaacacuaaacaacgugcauucaaauaacacaguacgugagaggaccccuuaucggacuuuauugaugaaugaguuagguguuccuuuucaucuggggaccaagcaagugugcauagcaugguccagcucaaguugucacgauggaaaagcauggcugcauguuuguauaacgggggaugauaaaaaugcaacugcuagcuucauuuacaaugggaggcuuguagauaguguuguuucaugguccaaagaaauccucaggacccaggagucagaaugcauuuguaucaauggaacuuguacaguaguaaugacugauggaagugcuucaggaaaagcugauacuaaaauacuauucauugaggagggaaaaaucguucauacuagcacauugucaggaagugcucagcaugucgaggagugcuccugcuauccucgauauccuggugucagaugugucugcagagacaacuggaaaggcuccaauaggcccaucguagauauaaacaugaaggaucauagcauuguuuccaguuauguguguucaggacuuguuggagacacacccagaaaaaacgacagcuccagcaguagccauuguuuggauccuaacaaugaagaagguggucauggagugaaaggcugggccuuugaugauggaaaugacguguggaugggaagaacgaucagcgagaagucacgcuuaggguaugaaaccuucaaagucauugaaggcugguccaacccuaaguccaaauugcagauaaauaggcaagucauaguugacagagguaauagguccgguuauucugguauuuucucuguugaaggcaaaagcugcaucaaucggugcuuuuauguggaguugauaaggggaagaaaagaggaaacugaagucuuguggaccucaaacaguauuguuguguuuuguggcacuucagguacauauggaacaggcucauggccugauggggcggacaucaaucucaugccuauauaa

SEQ ID NO: 57894 - RNA, 1410 nt, Artificial Sequence
  derived and/or modified CDS sequence (wt) from neuraminidase__InfluenzaA__AJJ98875
augaauccaaaucaaaagauaauaacgauuggcucuguuucucucaccauuuccacaauaugcuucuucaugcaaauugccaucuugauaacuacuguaacauugcauuucaagcaauaugaauucaacucccccccaaacaaccaagugaugcugugugaaccaacaauaauagaaagaaacauaacagagauaguguaucugaccaacaccaccauagagaaggaaauaugccccaaaccagcagaauacagaaauuggucaaaaccgcaaugugacauuacaggauuugcaccuuuuucuaaggacaauucgauuaggcuuuccgcugguggggacaucugggugacaagagaaccuuaugugucaugcgauccugacaaguguuaucaauuugcccuuggacagggaacaacacuaaacaacgugcauucaaaugacacaguacguaauaggaccccuuaucggacccuauugaugaaugaguuagguguuccuuuucaucuggggaccaagcaagugugcauagcaugguccagcucaaguugucacgauggaaaagcauggcugcauguuuguauaacgggggaugauaaaaaugcaacugcuagcuucauuuacaaugggaggcuuguagauaguguuguuucaugguccaaagaaauccucaggacccaggagucagaaugcguuuguaucaauggaacuuguacaguaguaaugacugaugggagugcuucaggaaaagcugauacuaaaauacuauucauugaggagggaaaaaucguucauacuagcacauugucaggaagugcucagcaugucgaggagugcuccugcuauccucgauauccuggugucagaugugucugcagagacaacuggaaaggcuccaauaggcccaucguagauauaaacauaaaggaucauagcauuguuuccaguuauguguguucaggacuuguuggagacacacccagaaaaaacgacagcuccagcaguagccauuguuuggauccuaacaaugaagaagguggucauggagugaaaggcugggccuuugaugauggaaaugacguguggaugggaagaacgaucagcgagaagucacgcuuaggguaugaaaccuucaaagucauugaaggcugguccaacccuaaguccaaauugcagauaaauaggcaagucauaguugacagagguaauagguccgguuauucugguauuuucucuguugaaggcaaaagcugcaucaaucggugcuuuuauguggaguugauaaggggaagaaaagaggaaacugaagucuuguggaccucaaacaguauuguuguguuuuguggcaccucagguacauauggaacaggcucauggccugauggggcggacaucaaucucaugccuauauaa

SEQ ID NO: 57895 - RNA, 1410 nt, Artificial Sequence
  derived and/or modified CDS sequence (wt) from neuraminidase__InfluenzaA__AJJ98887
augaauccaaaucaaaagauaauaacgauuggcucuguuucucucaccauuuccacaauaugcuucuucaugcaaauugccaucuugauaacuacuguaacauugcauuucaagcaauaugaauucaacucccccccaaacaaccaagugaugcugugugaaccaacaauaauagaaagaaacauaacagagauaguguaucugaccaacaccaccauagagaaggaaauaugccccaaacuagcagaauacagaaauuggucaaagccgcaaugugacauuacaggauuugcaccuuuuucuaaggacaauucgauuaggcuuuccgcugguggggacaucugggugacaagagaaccuuauguaucaugcgauccugacaaguguuaucaauuugcccuuggacagggaacaacacuaaacaacgugcauucaaauaacacaguacguaauaggaccccuuaucggacucuauugaugaaugaguuagguguuccuuuucaucuggggaccaagcaagugugcauagcaugguccagcucaaguugucacgauggaaaagcauggcugcauguuuguauaacgggggaugauaaaaaugcaacugcuagcuucauuuacaaugggaggcuuguagauaguauuguuucaugguccaaagaaauccucaggacccaggagucagaaugcguuuguaucaauggaacuuguacaguaguaaugacugaugggagugcuucaggaaaagcugauacuaaaauacuauucauugaggagggaaaaaucguucauacuagcacauugucaggaagugcucagcaugucgaggagugcuccugcuauccucgauauccuggugucagaugugucugcagagacaacuggaaaggcuccaauaggcccaucguagauauaaacauaaaggaucauagcauugucuccaguuauguguguucaggacuuguuggagacacacccagaaaaaacgacagcuccagcaguagccauuguuuggauccuaacaaugaagaagguggucauggagugaaaggcugggccuuugaugauggaaaugacguguggaugggaagaacgaucagcgagaagucacgcuuaggguaugaaaccuucaaagucauugaaggcugguccaacccuaaguccaaauugcagauaaauaggcaagucauaguugacagagguaauagguccgguuauucugguauuuucucuguugaaggcaaaagcugcaucaaucggugcuuuuauguagaguugauaaggggaagaaaagaggaaacugacgucuuguggaccucaaacaguauuguuguguuuuguggcaccucagguacauauggaacaggcucauggccugauggggcagacaucaaucucaugccuauauaa

SEQ ID NO: 57896 - RNA, 1410 nt, Artificial Sequence
  derived and/or modified CDS sequence (wt) from neuraminidase__InfluenzaA__AJJ98899
augaauccaaaucaaaagauaauaacgauuggcucuguuucucucaccauuuccacaauaugcuucuucaugcaaacugccaucuugauaacuacuguaacauugcauuucaagcaauaugaauucaacucccccccaaacaaccaagugaugcugugugaaccaacaauaauagaaagaaacauaacagagauaguguaucugaccaacaccaccauagagaaggaaauaugccccaaauuagcagaauacagaaauuggucaaaaccgcaaugugacauuacaggauuugcaccuuuuucuaaggacaauucgauuaggcuuuccgcugguggggacaucugggugacaagagaaccuuaugugucaugcgauccugacaaguguuaucaauuugcccuuggacagggaacaacacuaaacaacgugcauucaaauaacacaguacguaauaggaccccuuaucggacuuuauugaugaaugaguuagguguuccuuuucaucuggggaccaagcaagugugcauagcaugguccagcucaaguugucacgauggaaaagcauggcugcauguuuguauaacgggggaugauaaaaaugcaacugcuagcuucauuuacaaugggaggcuuguagauaguauuguuucaugguccaaagaaauccucaggacccaggagucagaaugcguuuguaucaauggaacuuguacaguaguaaugacugaugggagugcuucaggaaaagcugauacuaaaauacuauucauugaggaggggaaaaucguucauacuagcacauugucaggaagugcucagcaugucgaggagugcuccugcuauccucgauauccuggugucagaugugucugcagagacaacuggaaaggcuccaauaggcccaucguagauauaaacauaaaggaucauagcauuguuuccaguuauguguguucaggacuuguuggagacacacccagaaaaaacgacagcuccagcaguagccauuguuuggauccuaacaaugaagaagguggucauggagugaaaggcugggccuuugaugauggaaaugacguguggauggggagaacgaucagcgagaagucacgcuuaggguaugaaaccuucaaagucauugaaggcugguccaauccuaaguccaaauugcagauaaauaggcaagucauaguugacagagguaauagguccgguuauucugguauuuucucuguugaaggcaaaagcugcaucaaucggugcuuuuauguggaguugauaaggggaagaaaagaggaaacugaagucuuguggaccucaaacaguauuguuguguuuuguggcaccucagguacauauggaacaggcucauggccugauggggcggacaucaaucucaugccuauauaa

SEQ ID NO: 57897 - RNA, 1410 nt, Artificial Sequence
  derived and/or modified CDS sequence (wt) from neuraminidase__InfluenzaA__AJJ98911
augaauccaaaucaaaagauaauaacgauuggcucuguuucucucaccauuuccacaauaugcuucuucaugcaaauugccaucuugauaacuacuguaacauugcauuucaagcaauaugaauucaacucccccccaaacaaccaagugaugcugugugaaccaacaauaauagaaagaaacauaacagagauaguguaucugaccaauaccaccauagagaaggaaauaugccccaaaccagcagaauacagaaauuggucaaaaccgcaauguggcauuacaggauuugcaccuuucucuaaggacaauucgauuaggcuuuccgcugguggggacaucugggugacaagagaaccuuaugugucaugcgauccugacaaguguuaucaauuugcccuuggacagggaacaacacuaaacaacgugcauucaaauaacacaguacgugauaggaccccuuaucggacucuauugaugaaugaguuggguguuccuuuucaccuggggaccaagcaagugugcauagcaugguccagcucaaguugucacgauggaaaagcauggcugcauguuuguauaacgggggaugauaaaaaugcaacugcuagcuucauuuacaaugggaggcuuguagauaguguuguuucaugguccaaagaaauucucaggacccaggagucagaaugcguuuguaucaauggaacuuguacaguaguaaugacugauggaagugcuucaggaaaagcugauacuaaaauacuauucauugaggaggggaaaaucguucauacuagcacauugucaggaagugcucagcaugucgaagagugcucuugcuauccucgauauccuggugucagaugugucugcagagacaacuggaaaggcuccaaucggcccaucguagauauaaacauaaaggaucauagcauuguuuccaguuauguguguucaggacuuguuggagacacacccagaaaaaacgacagcuccagcaguagccauuguuuggauccuaacaaugaagaagguggucauggagugaaaggcugggccuuugaugauggaaaugacguguggaugggaagaacaaucaacgagacgucacgcuuaggguaugaaaccuucaaagucauugaaggcugguccaauccuaaguccaaauugcagauaaauaggcaagucauaguugacagaggugauagguccgguuauucugguauuuucucuguugaaggcaaaagcugcaucaaucggugcuuuuauguagaguugauuaggggaagaaaagaggaaacugaagucuuguggaccucaaacaguauuguuguguuuuguggcaccucagguacauauggaacaggcucauggccugauggggcggaccucaaucucaugccuauauaa

SEQ ID NO: 57898 - RNA, 1410 nt, Artificial Sequence; identical to SEQ ID NO: 56726
  derived and/or modified CDS sequence (wt) from neuraminidase__InfluenzaA__AJJ98923

SEQ ID NO: 57899 - RNA, 1410 nt, Artificial Sequence
  derived and/or modified CDS sequence (wt) from neuraminidase__InfluenzaA__AJJ98935
augaauccaaaucaaaagauaauaacgauuggcucuguuucucucaccauuuccacaauaugcuucuucaugcaaauugccaucuugauaacuacuguaacauugcauuucaagcgauaugaauucaacucccccccaaacaaccaagugaugcugugugaaccaacaauaauagaaagaaacauaacagagauaguguaucugaccaacaccaccauagagaaggaaauaugccccaaaccagcagaauacagaaauuggucaaaaccgcaauguggcauuacaggauuugcaccuuucucuaaggacaauucgauuaggcuuuccgcugguggggacaucugggugacaagagaaccuuaugugucaugcgauccugacaaguguuaucaauuugcccuuggacagggaacaacacuaaacaacgugcauucaaauaacacaguacgugauaggaccccuuaucggacucuauugaugaaugaguuggguguuccuuuucaucuggggaccaagcaagugugcauagcaugguccagcucaaguugucacgauggaaaagcauggcugcauguuuguauaacgggggaugauaaaaaugcaacugcuagcuucauuuacaaugggaggcuuguagauaguguuguuucaugguccaaagaaauucucaggacucaggagucagaaugcguuuguaucaauggaacuuguacaguaguaaugacugauggaagugcuucaggaaaagcugauacuaaaauacuauucauugaggaggggaaaaucguucauacuagcacauugucaggaagugcucagcaugucgaagagugcucuugcuauccucgauauccuggugucagaugugucuguagagacaacuggaaaggcuccaauaggcccaucguagauauaaacauaaaggaucauagcauuguuuccaguuauguguguucaggacuuguuggagacacacccagaaaaaacgacagcuccagcaguagccauuguuuggauccuaacaaugaagaagguggucauggagugaaaggcugggccuuugaugauggaaaugacguguggaugggaagaacaaucaacgagacgucacgcuuaggguaugaaaccuucaaagucauugaaggcugguccaacccuaaguccaaauugcagauaaauaggcaagucauaguugacagaggugauagguccgguuauucugguauuuucucuguugaaggcaaaagcugcaucaaucggugcuuuuauguggaguugauuaggggaagaaaagaggaaacugaagucuuguggaccucaaacaguauuguuguguuuuguggcaccucagguacauauggaacaggcucauggccugauggggcggaccucaaucucaugccuauauaa

SEQ ID NO: 57900 - RNA, 1410 nt, Artificial Sequence
  derived and/or modified CDS sequence (wt) from neuraminidase__InfluenzaA__AJJ98947
augaauccaaaucaaaagauaauaacgauuggcucuguuucucucaccauuuccacaauaugcuucuucaugcaaauugccauuuugauaacuacuguaacauugcauuucaagcaauaugaauucaacucccccccaaacaaccaagugacgcugugugaaccaacaauaauagaaagaaacauaacagagauaguguaucugaccaacaccaccauagagaaggaaauaugccccaaacuagcagaauacagaaauuggucaaagccgcaaugugacauuacaggauuugcaccuuuuucuaaggacaauucgauuaggcuuuccgcugguggggacaucugggugacaagagaaccuuaugugucaugcgauccugacaaguguuaucaauuugcccuuggacagggaacaacacuaaacaacgugcauucaaauaacacaguacgugauaggaccccuuaucggacccuauugaugaaugaguuagguguuccuuuucaucuggggaccaagcaagugugcauagcaugguccagcucaaguugucacgauggaaaagcauggcugcauguuuguauaacggggaaugauaaaaaugcaacugcuagcuucauuuacaaugggaggcuuguagauaguguuguuucaugguccaaagaaauccucaggacccaggagucagaaugcguuuguaucaauggaacuuguacaguaguaaugacugaugggagugcuucaggaaaagcugauacuaaaauacuauucauugaggaggggaaaaucguucauacuagcacauugucaggaagugcucagcaugucgaggagugcucuugcuauccucgauauccuggugucagaugugucugcagagacaacuggaaaggcuccaauaggcccaucguagauauaaacauaaaggaucauagcauuguuuccaguuauguguguucaggacuuguuggagacacacccagaaaaaacgacagcuccagcaguagccauuguuuggauccuaacaaugaagaagguggucauggagugaaaggcugggccuuugaugauggaaaugacguguggaugggaagaacgaucaacgagacgucacguuuaggguaugaaaccuucaaagucauugaaggcugguccaacccuaaguccaaauugcagauaaauaggcaagucauaguugacagagguaauagguccgguuauucugguauuuucucuguugaaggcaaaagcugcaucaaucggugcuuuuauguggaguugauuaggggaagaaaagaggaaacugaagucuuguggaccucaaacaguauuguuguguuuuguggcaccucagguacauauggaacaggcucauggccugauggggcggaccucaaucucaugccuauauaa

SEQ ID NO: 57901 - RNA, 1410 nt, Artificial Sequence
  derived and/or modified CDS sequence (wt) from neuraminidase__InfluenzaA__AJJ98971
augaauccaaaucaaaagauaauaacgauuggcucuguuucucucaccauuuccacaauaugcuucuucaugcaaauugccaucuugauaacuacuguaacauugcauuucaagcaauaugaauucaacucccccccaaacaaccaagugaugcugugugaaccaacaauaauagaaagaaacauaacagagauaguguaucugaccaacaccaccauagagaaggaaauaugccccaaacuagcagaauacagaaauuggucaaaaccgcaaugugacauuacaggauuugcaccuuuuucuaaggacaauucgauuaggcuuuccgcugguggggacaucugggugacaagagaaccuuaugugucaugcgauccugacaaguguuaucaauuugcccuuggacagggaacaacacuaaacaacgugcauucaaaugacacaguacguaauaggaccccuuaucggacccuauugaugaaugaguuagguguuccuuuucaucuggggaccaagcaagugugcauagcaugguccagcucaaguugucacgauggaaaagcauggcugcauguuuguauaacgggggaugauaaaaaugcaacugcuagcuucauuuacaaugggaggcuuguagauaguguuguuucaugguccaaagaaauccucaggacccaggagucagaaugcguuuguaucaauggaacuuguacaguaguaaugacugaugggagugcuucaggaaaagcugauacuaaaauacuauucauugaggagggaaaaaucguucauacuagcacauugucaggaagugcucagcaugucgaggagugcucuugcuauccucgauauccuggugucagaugugucugcagagacaacuggaaaggcuccaauaggcccaucguagauauaaacauaaaggaucauagcauuguuuccaguuauguguguucaggacuuguuggagacacacccagaaaaaacgacagcuccagcaguagccauuguuuggauccuaacaaugaagaagguggucauggagugaaaggcugggccuuugaugauggaaaugacguguggaugggaagaacgaucagcgagaagucacgcuuaggguaugaaaccuucaaagucauugaaggcugguccaacccuaaguccaaauugcagauaaauaggcaagucauaguugacagagguaauagguccgguuauucugguauuuucucuguugaaggcaaaagcugcaucaaucggugcuuuuauguggaguugauuaggggaagaaaagaggaaacugaagucuuguggaccucaaacaguauuguuguguuuuguggcaccucagguacauauggaacaggcucauggccugauggggcggacaucaaucucaugccuauauaa

SEQ ID NO: 57902 - RNA, 1410 nt, Artificial Sequence
  derived and/or modified CDS sequence (wt) from neuraminidase__InfluenzaA__AJJ98995
augaauccaaaucaaaagauaauaacgauuggcucuguuucucucaccauuuccacaauaugcuucuucaugcaaauugccaucuugauaacuacuguaacauugcauuucaagcaauaugaauucaacucccccccaaacaaccaagugaugcugugugaaccaacaauaauagaaagaaacaugacagagauaguguaucugaccaacaccaccauagagaaggaaauaugccccaaaccagcagaauacagaaauuggucaaaaccgcaaugugacauuacaggauuugcaccuuuuucuaaggacaauucgauuaggcuuuccgcugguggggacaucugggugacaagagaaccuuaugugucaugcgauccugacaaguguuaucaauuugcccuuggacagggaacaacacuaaacaacgugcauucaaauaacauaguacgugauaggaccccuuaucggacucuauugaugaaugaguuagguguuccuuuucaucuggggaccaagcaagugugcauagcaugguccagcucaaguugucacgauggaaaagcauggcugcauguuuguauaacgggggaugauaaaaaugcaacugcuagcuucaucuacaaugggaggcuuguagauaguguuguuucaugguccaaagaaauucucaggacccaggaaucagaaugcguuuguaucaauggaacuuguacaguaguaaugacugauggaagugcuucaggaaaagcugauacuaaaauacuauucauugaggaggggaaaaucguucauacuagcacauugucaggaagugcucagcaugucgaggagugcucuugcuauccucgauauccuggugucagaugugucugcagagacaacuggaaaggcuccaauaggcccaucguagauauaaacauaaaagaucauagcauuguuuccaguuauguguguucaggacuuguuggagacacacccagaaaaaacgacagcucaagcaguagccauuguuuggauccuaacaaugaagaagguggucauggagugaaaggcugggccuuugaugauggaaaugacguguggaugggaagaacaaucaacgagacgucacguuuaggguaugaaaccuucaaagucauugaaggcugguccaacccuaaguccaaauugcagauaaacaggcaagucauaguugacagaagugauagguccgguuauucugguauuuucucuguugaaggcaaaaguugcaucaaucggugcuuuuauguggaguugauuaggggaagaaaagaggaaacugaagucuuguggaccucaaacaguauuguuguguuuuguggcaccucagguacauauggaacaggcucauggccugauggggcggaccucaaucucaugccuauauaa

SEQ ID NO: 57903 - RNA, 1410 nt, Artificial Sequence; identical to SEQ ID NO: 53207
  derived and/or modified CDS sequence (wt) from neuraminidase__InfluenzaA__AJJ99007

SEQ ID NO: 57904 - RNA, 1410 nt, Artificial Sequence
  derived and/or modified CDS sequence (wt) from neuraminidase__InfluenzaA__AJJ99019
augaauccaaaucaaaagauaauaacgauuggcucuguuucucucaccauuuccacaauaugcuucuucaugcaaaccgccauccugauaacuacuguaacauugcauuucaagcaaugugaauucaacucccccccaaacaaccaagugaugcugugugaaccaacaauaauagaaagaaacauaacagagauaguguaucugaccaacaccaccauagagaaggaaauaugccccaaacuagcagaauacagaaauuggucaaagccgcaaugugacauuacaggauuugcaccuuuuucuaaggacaauucgauuaggcuuuccgcugguggggacaucugggugacaagagaaccuuaugugucaugcgauccugacaaguguuaucaauuugcccuuggacagggaacaacacuaaacaacgugcauucaaauaacacaguacgugauaggaccccuuaucggacucuauugaugaaugaguuagguguuccuuuucaucuggggaccaagcaagugugcauagcaugguccagcucaaguugucacgauggaaaagcauggcugcauguuuguauaacgggggaugauaaaaaugcaacugcuagcuucauuuacaaugggaggcuuguagauaguguuguuucaugguccaaagaaauccucaggacccaggagucagaaugcguuuguaucaauggaacuuguacaguaguaaugacugaugggagugcuucaggaaaagcugauacuaaaauacuauucauugaggaggggaaaaucguucauacuagcacauugucaggaagugcucagcaugucgaggagugcuccugcuauccucgauauccuggugucagaugugucugcagagacaacuggaaaggcuccaauaggcccaucguagauauaaacauaaaggaucauagcauuguuuccaauuauguguguucaggacuuguuggagacacacccagaaaaaacgacagcuccagcaguagccauuguuuggauccuaacaaugaagaagguggucauggagugaaaggcugggccuuugaugauggaaaugacguguggaugggaagaacgaucagcgagaaaucacgcuuuggguaugaaaccuucaaagucauugaaggcugguccaacccuaaguccaaauugcagauaaauaggcaagucauaguugacagagguaauagguccgguuauucugguauuuucucuguugaaggcaaaagcugcaucaaucggugcuuuuauguggaguugauaaggggaaggaaagaggaaacugaagucuuguggaccucaaacaguauuguuguguuuuguggcaccucagguacauauggaacaggcucauggccugauggggcggacaucaaucucaugccuauauaa

SEQ ID NO: 57905 - RNA, 1410 nt, Artificial Sequence
  derived and/or modified CDS sequence (wt) from neuraminidase__InfluenzaA__AJJ99031
augaauccaaaucaaaagauaauaacgauuggcucuguuucucucaccauuuccacaauaugcuucuucaugcaaauugccaucuugauaacuacuguaacauugcauuucaagcaauaugaauucaacucccccccaaacaaccaagugaugcugugugaaccaacaauaauagaaagaaacauaacagagauaguguaucugaccaacaccaccauagagaaggaaauaugccccaaacuagcagaauacagaaauuggucaaagccgcaaugugacauuacaggauuugcaccuuuuucuaaggacaauucgauuaggcuuuccgcugguggggacaucugggugacaagagaaccuuaugugucaugcgauccugacaaguguuaucaauuugcccuuggacagggaacaacaauaaacaacgugcauucaaaugacacaguacgugauaggaccccuuaucggacccuauugaugaaugaguuaggugucccuuuucaucuggggaccaagcaagugugcauagcaugguccagcucaaguugucacgauggaaaagcauggcugcauguuuguauaacgggggaugauaaaaaugcaacugcuagcuucauuuacaaugggaggcuuguagauaguguuguuucaugguccaaagaaauccucaggacccaggagucagaaugcguuuguaucaauggaacuuguacaguaguaaugacugaugggagugcuucaggaaaagcugauacuaaaauacuauucauugaggaggggaaaaucguucauacuagcacauugucaggaagugcucagcaugucgaggagugcuccugcuauccucgauauccuggugucagaugugucugcagagacaacuggaaaggcuccaauaggcccaucguagauauaaacauaaaggaucauagcauuguuuccaguuauguguguucaggacuuguuggagacacacccagaaaaaacgacagcuccagcaguagccauuguuuggauccuaacaaugaagaagguggucauggagugaaaggcugggccuuugaugauggaaaugacguguggaugggaagaacgaucagcgagaagucacgcuuaggguaugaaaccuucaaagucauugaaggcugguccaacccuaaguccaaauugcagauaaauaggcaagucauaguugacagagguaauagguccgguuauucugguauuuucucuguugaaggcaaaagcugcaucaaucggugcuuuuauguggaguugauaaggggaagaaaagaggaaacugaagucuuguggaccucaaacaguauuguuguguuuuguggcaccucagguacauauggaacaggcucauggccugauggggcggacaucaaucucaugccuauauaa

SEQ ID NO: 57906 - RNA, 1410 nt, Artificial Sequence
  derived and/or modified CDS sequence (wt) from neuraminidase__InfluenzaA__AJJ99043
augaacccaaaucaaaagauaauaacgauuggcucuguuucucucaccauuuccacaauaugcuucuucaugcaaauugccaucuuaauaacuacuguaacauugcauuucaagcaauaugaauucaacucccccccaaacaaccaagugaugcugugugaaccaacaauaauagaaagaaacauaacagagauaguguaucugaccaacaccaccauagagaaggaaauaugccccaaacuagcagaauacagaaaguggucaaagccgcaauguaauauuacaggauuugcaccuuuuucuaaggacaauucgauuaggcuuuccgcugguggggacaucugggugacaagagaaccuuaugugucaugcgauccugacaaguguuaucaauuugcccuuggacagggaacaacacuaaacaacgugcauucaaaugacacaguacgugauaggaccccuuaucggacccuauugaugaaugaguuagguguuccauuucaucuggggaccaagcaagugugcauagcaugguccagcucaaguugucacgauggaaaagcauggcugcauguuuguguaacgggggaugauaaaaaugcaacugcuagcuucauuuacaaugggaggcuuguagauaguauuguuucaugguccaaagaaauccucaggacccaggagucagaaugcguuuguaucaauggaacuuguacagugguaaugacugaugggagugcuucaggaaaagcugauacuaaaauacuauucauugaggaggggaaaaucguucauacuagcacauugucaggaagugcucagcaugucgaggagugcuccugcuauccucgauauccuggugucagaugugucugcagagacaacuggagaggcuccaauaggcccauaguagauauaaacaugaaggauuauagcauuguuuccaguuaugugugcucaggacuuguuggagacacacccagaaaaaacgacagcuccagcaguggccauugcuuggauccuaacaaugaagaagguggucauggagugaaaggcugggccuuugaugauggaaaugacguguggaugggaagaacgaucagcgagaagucacgcucaggauaugaaaccuucaaagucauugaaggcugguccaauccuaauuccaaauugcagauaaauagacaagucauaguugacagagguaauagguccgguuauucugguauuuucucuguugaaggcaaaagcugcaucaaucggugcuuuuauguggaguugauaaggggaagaaaagaggaaacugaagucuuguggaccucaaacaguauuguuguguuuuguggcaccucagguacauauggaacaggcucauggccugauggggcggacaucaaucucaugccuauauaa

SEQ ID NO: 57907 - RNA, 1410 nt, Artificial Sequence
  derived and/or modified CDS sequence (wt) from neuraminidase__InfluenzaA__AJJ99067
augaauccaaaucaaaagauaauaacgauuggcucuguuucucucaccauuuccacaauaugcuucuucaugcaaauugccaucuugauaacuacuguaacauugcauuucaagcaauaugaauucaacucccccccaaacaaccaagugaugcugugugaaccaacaauaauagaaagaaacauaacagagauaguguauuugaccaacaccaccauagagaaggaaauaugccccaaaccagcagaauacagaaauuggucaaaaccgcaauguggcauuacaggauuugcaccuuucucuaaggacaauucgauuaggcuuuccgcugguggggacaucugggugacaagagaaccuuaugugucaugcgauccugacaaguguuaucaauuugcccuuggacagggaacaacacuaaacaacgugcauucaaauaacacaguacgugguaggaccccuuaucggacucuauugaugaaugaguuggguguuccuuuccaucuggggaccaagcaagugugcauagcaugguccagcucaaguugucacgauggaaaagcauggcugcauguuuguauaacgggggaugauaaaaaugcaacugcuagcuucauuuacaaugggaggcuuguagauaguguuguuucaugguccaaagauauucucaggacccaggagucagaaugcguuuguaucaauggaacuuguacaguaguaaugacugauggaagugcuucaggaaaagcugauacuaaaauacuauucauugaggaggggaaaaucguucauacuagcacauugucaggaagugcucagcaugucgaagagugcucuugcuauccucgauauccuggugucagaugugucugcagagacaacuggaaaggcuccaaucggcccaucguagauauaaacauaaaggaucauagcauuguuuccaguuauguguguucaggacuuguuggagacacacccagaaaaaacgacagcuccagcaguagccauuguuuggauccuaacaaugaagaagguggucauggagugaaaggcugggccuuugaugauggaaaugacguguggaugggaagaacaaucaacgagacgucacgcuuaggguaugaaaccuucaaagucauugaaggcugguccaacccuaaguccaaauugcagauaaauaggcaagucauaguugacagaggugauagguccgguuauucugguauuuucucuguugaaggcaaaagcugcaucaaucggugcuuuuauguggaguugauuaggggaagaaaagaggaaacugaagucuuguggaccucaaacaguauuguuguguuuuguggcaccucagguacauauggaacaggcucauggccugauggggcggaccucaaucucaugccuauauaa

SEQ ID NO: 57908 - RNA, 1410 nt, Artificial Sequence
  derived and/or modified CDS sequence (wt) from neuraminidase__InfluenzaA__AJJ99079
augaauccaaaucaaaagauaauaacgauuggcucuguuucucucaccauuuccacaauaugcuucuucaugcaaauugccaucuugauaacuacuguaacauugcauuucaagcaauaugaauucaacucccccccaaacaaccaagugaugcugugugaaccaacaauaauagaaagaaacauaacagagauaguguaucugaccaacaccaccauagagaaggaaauaugccccaaaccagcagaauacagaaauuggucaaaaccgcaauguggcauuacaggauuugcaccuuucucuaaggacaauucgauuaggcuuuccgcugguggggacaucugggugacaagagaaccuuaugugucaugcgauccugacaaguguuaucaauuugcccuuggacagggaacaacacuaaacaacgugcauucaaauaacacaguacguaauaggaccccuuaucggacucuauugaugaaugaguuggguguuccuuuucaucuggggaccaagcaagugugcauagcaugguccagcucaaguugucacgauggaaaagcauggcugcauguuuguauaacgggggaugauaaaaaugcaacugcuagcuucauuuacaaugggaggcuuguagauaguguuguuucaugguccaaagaaauucucaggacccaggagucagaaugcguuuguaucaauggaacuuguacaguaguaaugacugauggaagugcuucaggaaaagcugauacuaaaauacuauucauugaggaggggaaaaucguucauacuagcacauugucaggaagugcucagcaugucgaagagugcucuugcuauccucgauauccuggugucagaugugucugcagagacaacuggaaaggcuccaaucggcccaucguagauauaaacauaaaggaucauagcauuguuuccaguuauguguguucaggacuuguuggagacacacccagaaaaaacgacagcuccagcaguagccauuguuuggauccuaacaaugaagaagguggucauggagugaaaggcugggccuuugaugauggaaaugacguguggaugggaagaacaaucaacgagacgucgcgcuuaggguaugaaaccuucaaagucauugaaggcugguccaacccuaaauccaaauugcagauaaauaggcaagucauaguugacagaggugauagguccgguuauucugguauuuucucuguugaaggcaaaagcugcaucaaucggugcuuuuauguggaguugauuaggggaagaaaagaggaaacugaagucuuguggaccucaaacaguauuguuguguuuuguggcaccucagguacauauggaacaggcucauggccugauggggcggaccucaaucucaugccuauauaa

SEQ ID NO: 57909 - RNA, 1410 nt, Artificial Sequence
  derived and/or modified CDS sequence (wt) from neuraminidase__InfluenzaA__AJJ99091
augaauccaaaucaaaagauaauaacgauuggcucuguuucucucaccauuuccacaauaugcuucuucaugcaaauugccaucuugauaacuacuguaacauugcauuucaagcaauaugaauucaacucccccccaaacaaccaagugaugcugugugaaccaacaauaauagaaagaaacauaacagagauaguguaucugaccaacaccaccauagagaaggaaauaugccccaaaccagcagaauacagaaauuggucaaaaccgcaauguggcauuacaggauuugcaccuuucucuaaggacaauucgauuaggcuuuccgcugguggggacaucugggugacaagagaaccuuaugugucaugcgauccugacaaguguuaucaauuugcccuuggacagggaacaacacuaaacaacgugcauucaaauaacacaguacgugauaggaccccuuaucggacucuauugaugaaugaguuggguguuccuuuucaucuggggaccaagcaagugugcauagcaugguccagcucaaguugucacgauggaaaagcauggcugcauguuuguauaacgggggaugauaaaaaugcaacugcuagcuucauuuacaaugggaggcuuguagauaguguuguuucaugguccaaagaaauucucaggacccaggagucagaaugcguuuguaucaauggaacuuguacaguaguaaugacugauggaagugcuucaggaaaagcugauacuaaaauacuauucauugaggaggggaaaaucguucauacuagcacauugucaggaagugcucagcaugucgaagagugcucuugcuauccucgauauccuggugucagaugugucugcagagacaacuggaaaggcuccaaucggcccaucguagauauaaacauaaaggaucauagcauuguuuccaguuauguguguucaggacuuguuggagacacacccagaaaaaacgacagcuccagcaguagccauuguuuggauccuaacaaugaagaagguggucauggagugaaaggcugggccuuugaugauggaaaugacuuguggaugggaagaacaaucaacgagacgucacgcuuaggguaugaaaccuucaaagucauugaaggcugguccaacccuaaauccaaauugcagauaaauaggcaagucauaguugacagaggugauagguccgguuauucugguauuuucucuguugaaggcaaaagcugcaucaaucggugcuuuuauguggaguugauuaggggaagaaaagaggaaacugaagucuuguggaccucaaacaguauuguuguguuuuguggcaccucagguacauauggaacaggcucauggccugauggggcggaccucaaucucaugccuauauaa

SEQ ID NO: 57910 - RNA, 1410 nt, Artificial Sequence
  derived and/or modified CDS sequence (wt) from neuraminidase__InfluenzaA__AJJ99103
augaauccaaaucaaaagauaauaacgauuggcucuguuucucucaccauuuccacaauaugcuucuucaugcaaauugccaucuugauaacuacuguaacauugcauuucaagcaauaugaauucaacucccccccaaacaaccaagugaugcugugugaaccaacaauaauagaaagaaacaugacagagauaguguaucugaccaacaccaccauagagaaggaaauaugccccaaaccagcagaauacagaaauuggucaaaaccgcaaugugacauuacaggauuugcaccuuuuucuaaggacaauucgauuaggcuuuccgcugguggggacaucugggugacaagagaaccuuaugugucaugcgauccugacaaguguuaucaauuugcccuuggacagggaacaacacuaaacaacgugcauucaaauaacacaguacguaauaggaccccuuaucggacucuauugaugaaugaguuagguguuccuuuucaucuggggaccaagcaagugugcauagcaugguccagcucaaguugucacgauggaaaagcauggcugcauguuuguauaacgggggaugauaaaaaugcaacugcuagcuucaucuacaaugggaggcuuguagauaguguuguuucaugguccaaagaaauucucaggacccaggaaucagaaugcguuuguaucaauggaacuuguacaguaguaaugacugauggaagugcuucaggaaaagcugauacuaaaauacuauucauugaggaggggaaaaucguucauacuagcacauugucaggaagugcucagcaugucgaggagugcucuugcuauccucgauauccuggugucagaugugucugcagagacaacuggaaaggcuccaacaggcccaucguagauauaaacauaaaagaucauagcauuguuuccaguuauguguguucaggacuuguuggagacacacccagaaaaaacgacagcucaagcaguagccauuguuuggauccuaacaaugaagaagguggucauggagugaaaggcugggccuuugaugauggaaaugacguguggaugggaagaacaaucaacgagacgucacguuuaggguaugaaaccuucaaagucauugaaggcugguccaacccuaaguccaaauugcagauaaauaggcaagucauaguugacagaagugauagguccgguuauucugguauuuucucuguugaaggcaaaaguugcaucaaucggugcuuuuauguggaguugauuaggggaagaaaagaggaaacugaagucuuguggaccucaaacaguauuguuguguuuuguggcaccucagguacauauggaacaggcucauggccugauggggcggaccucaaucucaugccuauauaa

SEQ ID NO: 57911 - RNA, 1410 nt, Artificial Sequence
  derived and/or modified CDS sequence (wt) from neuraminidase__InfluenzaA__AJJ99115
augaauccaaaucaaaagauaauaacgauuggcucuguuucucucaccauuuccacaauaugcuucuucaugcaaauugccaucuugauaacuacuguaacauugcauuucaagcaauaugaauucaacucccccccaaacaaccaagugaugcugugugaaccaacaauaauagaaagaaacauaacagagauaguguaucugaccaacaccaccauagagaaggaaauaugccccaaaccagcagaauacagaaauuggucaaaaccgcaauguggcauuacaggauuugcaccuuucucuaaggacaauucgauuaggcuuuccgcugguggggacaucugggugacaagagaaccuuaugugucaugcgauccugacaaguguuaucaauuugcccuuggacagggaacaacacuaaacaacgugcauucaaauaacacaguacgugauaggaccccuuaucggacucuauugaugaaugaguuggguguuccuuuucaucuggggaccaagcaagugugcauagcaugguccagcucaaguugucacgauggaaaagcauggcugcauguuuguauaacggggaaugauaaaaaugcaacugcuagcuucauuuacaaugggaggcuuguagauaguguuguuucaugguccaaagaaauucucaggacccaggagucagaaugcguuuguaucaauggaacuuguacaguaguaaugacugauggaagugcuucaggaaaagcugauacuaaaauacuauucauugaggaggggaaaaucguucauacuagcacauugucaggaagugcucagcaugucgaagagugcucuugcuauccucgauauccuggugucagaugugucugcagagacaacuggaaaggcuccaauaggcccaucguagauauaaacauaaaggaucauagcauuguuuccaguuauguguguucaggacuuguuggagacacacccagaaaaaacgacagcuccagcaguagccauuguuuggauccuaacaaugaagaagguggucauggagugaaaggcugggccuuugaugauggaaaugacguguggaugggaagaacaaucaacgagacgucacgcuuaggguaugaaaccuucaaagucauugaaggcugguccaacccuaaguccaaauugcagauaaauaggcaagucauaguugacagaggugauagguccgguuauucugguauuuucucuguugaaggcaaaagcugcaucaaucggugcuuuuauguggaguugauuaggggaagaaaagaggaaacugaagucuuguggaccucaaacaguauuguuguguuuuguggcaccucagguacauauggaacaggcucauggccugauggggcggaccucaaucucaugccuauauaa

SEQ ID NO: 57912 - RNA, 1410 nt, Artificial Sequence
  derived and/or modified CDS sequence (wt) from neuraminidase__InfluenzaA__AJJ99127
augaauccaaaucaaaagauaauaacgauuggcucuguuucucucaccauuuccacaauaugcuucuucaugcaaauugccaucuugauaacuacuguaacauugcauuucaagcaauaugaauucaacucccccccaaacaaccaagugaugcuaugugaaccaacaauaauagaaagaaacauaacagagauaguguaucugaccaacaccaccauagagaaggaaauaugccccaaacuagcagaauacagaaauuggucaaagccgcaaugugacauuacaggauuugcaccuuuuucuaaggacaauucgauuaggcuuuccgcugguggggacaucugggugacaagagaaccuuaugugucaugcgauccugacaaguguuaucaauuugcccuuggacagggaacaacacuaaacaacgugcauucaaauaacacaguacgugauaggaccccuuaucggacccuauugaugaaugaguuagguguuccuuuucaucuggggaccaagcaagugugcauagcaugguccagcucaaguugucacgauggaaaagcauggcugcauguuuguauaacgggggaugauaaaaaugcaacugcuagcuucauuuacaaugggaggcuuguagauaguguuguuucaugguccaaagaaauccucagaacccaggagucagaaugcguuuguaucaauggaacuuguacaguaguaaugacugaugggagugcuucaggaaaagcugauacuaaaauacuauucauugaggaggggaaaaucguccauacuagcacauugucaggaagugcucagcaugucgaggagugcucuugcuauccucgauauccuggugucagaugugucugcagagacaacuggaaaggcuccaauaggcccaucguagauauaaacauaaaggaucauagcauuguuuccaguuauguguguucaggacuuguuggagacacacccagaaaaaacgacagcuccagcaguagccauuguuuggauccuaacaaugaagaagguggucauggagugaaaggcugggccuuugaugauggaaaugacguguggaugggaagaacaaucaacgagacgucacguuuaggguaugaaaccuucaaagucauugaaggcugguccaacccuaaguccaaauugcagauaaauaggcaagucauaguugacagaggugauagguccgguuauucugguauuuucucuguugaaggcaaaagcugcaucaaucggugcuuuuauguggaguugauuaggggaagaaaagaggaaacugaagucuuguggaccucaaacaguauuguuguguuuuguggcaccucagguacauauggaacaggcucauggccugauggggcggaccucaaucucaugccuauauaa

SEQ ID NO: 57913 - RNA, 1410 nt, Artificial Sequence
  derived and/or modified CDS sequence (wt) from neuraminidase__InfluenzaA__AJJ99139
augaauccaaaucaaaagauaauaacgauuggcucuguuucucucaccauuuccacaauaugcuucuucaugcaaauugccaucuugauaacuacuguaacauugcauuucaagcaauaugaauucaacucccccccaaacaaccaagugaugcuaugugaaccaacaauaauagaaagaaacauaacagagauaguguaucugaccaacaccaccauagagaaggaaauaugccccacacuagcagaauacagaaauuggucaaagccgcaaugugacauuacaggauuugcaccuuuuucuaaggacaauucgauuaggcuuuccgcugguggggacaucugggugacaagagaaccuuaugugucaugcgauccugacaaguguuaucaauuugcccuuggacagggaacaacacuaaacaacgugcauucaaauaacacaguacgugauaggaccccuuaucggacccuauugaugaaugaguuagguguuccuuuucaucuggggaccaagcaagugugcauagcaugguccagcucaaguugucacgauggaaaagcauggcugcauguuuguauaacgggggaugauaaaaaugcaacugcuagcuucauuuacaaugggaggcuuguagauaguguuguuucaugguccaaagaaauccucaggacccaggagucagaaugcguuuguaucaauggaacuuguacaguaguaaugacugaugggagugcuucaggaaaagcugauacuaaaauacuauucauugaggaggggaaaaucguucauacuagcacauugucaggaagugcucagcaugucgaggagugcucuugcuauccucgauauccuggugucagaugugucugcagagacaacuggaaaggcuccaauaggcccaucguagauauaaacauaaaggaucauagcauuguuuccaguuauguguguucaggacuuguuggagacacacccagaaaaaacgacagcuccaguaguagccauuguuuggauccuaacaaugaagaagguggucauggagugaaaggcugggccuuugaugauggaaaugacguguggaugggaagaacgaucaacgagacgucacguuuaggguaugaaaccuucaaagucauugaaggcugguccaacccuaaguccaaauugcagauaaauaggcaagucauaguugacagagguaauagguccgguuauucugguauuuucucuguugaaggcaaaagcugcaucaaucggugcuuuuauguggaguugauuaggggaagaaaagaggaaacugaagucuuguggaccucaaacaguauuguuguguuuuguggcaccucagguacauauggaacaggcucauggccugauggggcggaccucaaucucaugccuauauaa

SEQ ID NO: 57914 - RNA, 1410 nt, Artificial Sequence
  derived and/or modified CDS sequence (wt) from neuraminidase__InfluenzaA__AJJ99151
augaauccaaaucaaaagauaauaacgauuggcucuguuucucucaccauuuccacaauaugcuucuucaugcaaauugccaucuugauaacuacuguaacauugcauuucaagcaauaugaauucaacucccccccaaacaaccaagugaugcugugugaaccaacaauaauagaaagaaacauaacagagauaguguaccugaccaacaccaccauagagaaggaaauaugccccaaaccagcagaauacagaaauuggucaaaaccgcaaugugacauuacaggauuugcaccuuuuucuaaggacaauucgauuaggcuuuccgcugguggggacaucugggugacaagagaaccuuaugugucaugcgauccugacaaguguuaucaauuugcccuuggacagggaacaacacuaaacaauguacauucaaauaacacaguacgugauaggaccccuuaucggacuuuauugaugaaugaguuagguguuccuuuucaucuggggaccaagcaagugugcauagcaugguccagcucaaguugucacgauggaaaagcauggcugcauguuuguauaacgggggaugauaaaaaugcaacugcuagcuucauuuacaaugggaggcuuguagauaguguuguuucaugguccaaagaaauccucaggacccaggagucagaaugcguuuguaucaauggaacuuguacaguaguaaugacugaugggagugcuucaggaaaagcugauacuaaaauacuauucauugaggagggaaaaaucguucauacuagcacauugucaggaagugcucagcaugucgaggagugcuccugcuauccucgauauccuggugucagaugugucugcagagacaacuggaaaggauccaauaggcccaucguagauauaaacauaaaggaucauagcauugucuccaguuauguguguucaggacuuguuggagacacacccagaaaaaacgacagcuccagcaguagccauuguuuggauccuaacaaugaggaagguggucauggggugaaaggcugggccuuugaugaugggaaugacguguggaugggaagaacgaucagcgagaagucacgcuuaggguaugaaaccuucaaagucauugaaggaugguccaacccuaaguccaaauugcagauaaauaggcaagucauaguugacagagguaauagguccgguuauucugguauuuucucuguugaaggcaaaagcugcaucaaucggugcuuuuauguggaguugauaaggggaagaaaagaggaaacugaagucuuguggaccucaaacaguauuguuguguuuuguggcaccucagguacauauggaacaggcucauggccugauggggcggacaucaaucucaugccuauauaa

SEQ ID NO: 57915 - RNA, 1410 nt, Artificial Sequence
  derived and/or modified CDS sequence (wt) from neuraminidase__InfluenzaA__AJJ99163
augaauccaaaucaaaagauaauaacgauuggcucuguuucucucaccauuuccacaauaugcuucuucaugcaaauugccaucuugauaacuacuguaacauugcauuucaagcaauaugaauuuaacucccccccaaacaaccaagugaugcugugugaaccaacaauaauagaaagaaacauaacagagauaguguaucugaccaacaccaccauagagaaggaaauaugccccaaacuagcagaauacagaaauuggucaaagccgcaaugugacauuacaggauuugcaccuuuuucuaaggacaauucgauuaggcuuuccgcugguggggacaucugggugacaagagaaccuuaugugucaugcgauccugacaaguguuaucaauuugcccuuggacagggaacaacacuaaacaacgugcauucaaauaacacaguacgugauaggaccccuuaucggacccuauugaugaaugaguuagguguuccuuuucaucuggggaccaagcaagugugcauagcaugguccagcucaaguugucacgauggaaaagcauggcugcauguuuguauaacgggggaugauaaaaaugcaacugcuagcuucauuuacaaugggaggcuuguagauaguguuguuucaugguccaaagaaauccucaggacccaggagucagaaugcguuuguaucaauggaacuuguacaguaguaaugacugaugggagugcuucaggaaaagcugauacuaaaauacuauucauugaggaggggaaaaucguucauaccagcacauugucaggaagugcucagcaugucgaggagugcuccugcuauccucgauauccuggugucagaugugucugcagagacaacuggaaaggcuccaauaggcccaucguagauauaaacauaaaggaucauagcauuguuuccaguuauguguguucaggacuuguuggagacacacccagaaaaaacgacagcuccagcaguagccauuguuuggauccuaauaaugaagaagguggucauggagugaaaggcugggccuuugaugaugggaaugacguguggaugggaagaacgaucagcgagaagucacgcuuaggguaugaaaccuucaaagucauugaaggcugguccaacccuaaguccaaauugcagauaaauaggcaagucauaguugacagagguaauagguccgguuauucugguauuuucucuguugaaggcaaaagcugcaucaaucggugcuuuuauguggaguugauaaggggaagaaaagaggaaacugaagucuuguggaccucgaacaguauuguuguguuuuguggcaccucagguacauauggaacaggcucauggccugauggggcggacaucaaucucaugccuauauaa

SEQ ID NO: 57916 - RNA, 1410 nt, Artificial Sequence
  derived and/or modified CDS sequence (wt) from neuraminidase__InfluenzaA__AJJ99175
augaauccaaaucaaaagauaauaacgauuggcucuguuucucucaccauuuccacaauaugcuuauucaugcaaauugccaucuugauaacuacuguaacauugcauuucaagcaauaugaauucaacucccccccaaacaaccaagugaugcugugugaaccaacaauaauagaaagaaacauaacagagauaguguaucugaccaacaccaccauagagaaggaaauaugccccaaacuagcagaauacagaaauuggucaaagccgcaaugugacauuacaggauuugcaccuuuuucuaaggacaauucgauuaggcuuuccgcugguggggacaucugggugacaagagaaccuuaugugucaugcgauccugacaaguguuaucaauuugcccuuggacagggaacaacacuaaacaacgugcauucaaauaacacaguacgugauaggaccccuuaucggacccuauugaugaaugaguuagguguuccuuuucaucuggggaccaagcaagugugcauagcaugguccagcucaaguugucacgauggaaaagcauggcugcauguuuguauaacgggggaugauaaaaaugcaacugcuagcuucauuuacaaugggaggcuuguagauaguguuguuucaugguccaaagaaauccucaggacccaggagucagaaugcguuuguaucaauggaacuuguacaguaguaaugacugaugggagugcuucaggaaaagcugauacuaaaauacuauucauugaggaggggaaaaucguucauacuagcacauugucaggaagugcucagcaugucgaggagugcuccugcuauccucgauauccuggugucagaugugucugcagagacaacuggaaaggcuccaauaggcccaucguagauauaaacauaaaggaucauagcauuguuuccaguuauguguguucaggacuuguuggagacacacccagaaaaaacgacagcuccagcaguagccauuguuuggauccuaacaaugaagaagguggucauggagugaaaggcugggccuuugaugauggaaaugacguguggaugggaagaacgaucagcgagaagucacgcuuaggguaugaaaccuucaaagucauugaaggaugguccaacccuaaguccaaauugcagauaaauaggcaagucauaguugacagagguaauagguccgguuauucugguauuuucucuguugaaggcaaaagcugcaucaaucggugcuuuuauguggaguugauaaggggaagaaaagaggaaacugaagucuuguggaccucaaacaguauuguuguguuuuguggcaccucagguacauauggaacaggcucauggccugaugggacggacaucaaucucaugccuauauaa

SEQ ID NO: 57917 - RNA, 1410 nt, Artificial Sequence
  derived and/or modified CDS sequence (wt) from neuraminidase__InfluenzaA__AJJ99199
augaauccaaaucaaaagauaauaacgauuggcucuguuucucucaccauuuccacaauaugcuucuucaugcaaauugccaucuugauaacuacuguaacauugcauuucaagcaauaugaauucaacucccccccaaacaaccaagugaugcugugugaaccaacaauaauagaaagaaacauaacagagauaguguaucugaccaacaccaccauagagaaggaaauaugccccaaacuagcagaauacagaaauuggucaaagccgcaaugugacauuacaggauuugcaccuuuuucuaaggacaauucgauuaggcuuuccgcugguggggacaucugggugacaagagaaccuuaugugucaugcgauccugacaaguguuaucaauucgcccuuggacagggaacaacacuaaacaaugugcauucaaaugacacaguacguaauaggaccccuuaucggacucuauugaugaaugaguuagguguuccuuuucaucuggggaccaagcaagugugcauagcaugguccagcucaaguugucacgauggaaaagcauggcugcauguuuguauaacgggggaugauaaaaaugcaacugcuagcuucauuuacaaugggaggcuuguagauaguauuguuucaugguccaaagaaauccucaggacccaggagucagaaugcguuuguaucaauggaacuuguacagugguaaugacugaugggagugcuucaggaaaagcugauacuaaaauacuauucauugaggaggggaaaaucguucauacuagcacauugucaggaagugcucagcaugucgaggagugcuccugcuauccucgauauccuggugucagaugugucugcagagacaacuggaaaggcuccaauaggcccaucguagauauaaacauaaaggaucauagcauuguuuccaguuauguguguucaggacuuguuggagacacacccagaaaaaacgacagcuccagcaguagccauuguuuggauccuaacaaugaagaagguggucauggagugaaaggcugggccuuugaugauggaaaugacguguggaugggaagaacgaucagcgagaagucacgcuuaggguaugaaaccuucaaagucauugaaggcugguccaacccuaaguccaaauugcagauaaauaggcaagucauaguugacagagguaauagguccgguuauucugguauuuucucuguugaaggcaaaagcugcaucaaucggugcuuuuauguggaguugauaaggggaagaaaagaggaaacugaagucuuguggaccucaaacaguauuguuguguuuuguggcaccucagguacauauggaacaggcucauggccugauggggcggacaucaaucucaugccuauauaa

SEQ ID NO: 57918 - RNA, 1410 nt, Artificial Sequence
  derived and/or modified CDS sequence (wt) from neuraminidase__InfluenzaA__AJJ99211
augaauccaaaucaaaagauaauaacgauuggcucuguuucucucaccauuuccacaauaugcuucuucaugcaaauugccaucuuaauaacuacuguaacauugcauuucaagcaauaugaauucaacucccccccaaacaaccaagugaugcugugugaaccaacaauaauagaaagaaacauaacagagauaguguaucugaccaacaccaccauagagaaggaaauaugccccaaacuagcagaauacagaaaguggucaaagccgcaauguaauauuacaggauuugcaccuuuuucuaaggacaauucgauuaggcuuuccgcugguggggacaucugggugacaagagaaccuuaugugucaugcgauccugacaaguguuaucaauuugcccuuggacagggaacaacacuaaacaaugugcauucaaaugacacaguacgugauaggaccccuuaucggacucuauugaugaaugaguuagguguuccauuucaucuggggaccaagcaagugugcauagcaugguccagcucaaguugucacgauggaaaagcauggcugcauguuuguguaacgggggaugauaaaaaugcaacugcuagcuucauuuacaaugggaggcuuguagauaguauuguuucaugguccaaagaaauccucaggacccaggagucagaaugcguuuguaucaauggaacuuguacaguaguaaugacugaugggagugcuucaggaaaagcugauacuaaaauacuauucauugaggaggggaaaaucguucauacuagcacauugucaggaagugcucagcaugucgaggagugcuccugcuauccucgauauccuggugucagaugugucugcagagacaacuggagaggcuccaauaggcccauaguagauauaaacaugaaggauuauagcauugucuccaguuaugugugcucaggacuuguuggagacacacccagaaaaaacgacagcuccagcaguggccauugcuuggauccuaacaaugaagaagguggucauggagugaaaggcugggccuuugaugauggaaaugacguguggaugggaagaacgaucagcgagaaguuacgcucaggauaugaaaccuucaaagucauugaaggcugguccaacccuaauuccaaauugcagauaaauaggcaagucauaguugacagagguaauagguccgguuauucugguauuuucucuguugaaggcaaaagcugcaucaaucggugcuuuuauguggaguugauaaggggaagaaaagaggaaacugaagucuuguggaccucaaacaguauuguuguguuuuguggcaccucagguacauauggaacaggcucauggccugauggggcggacaucaaucucaugccuauauaa

SEQ ID NO: 57919 - RNA, 1410 nt, Artificial Sequence
  derived and/or modified CDS sequence (wt) from neuraminidase__InfluenzaA__AJJ99223
augaauccaaaucaaaagauaauaacgauuggcucuguuucucucaccauuuccacaauaugcuucuucaugcaaauugccaucuugauaacuacuguaacauugcauuucaagcaauaugaauucaacucccccccaaacaaccaagugaugcugugugaaccaacaauaauagaaagaaacauaacagagauaguguaucugaccaacaccaccauagagaaggaaauaugccccaaacuagcagaauacagaaauuggucaaagccgcaaugugacauuacaggauuugcaccuuuuucuaaggacaauucgauuaggcuuuccgcugguggggacaucugggugacaagagaaccuuaugugucaugcgauccugacaaguguuaucaauuugcccuuggacagggaacaacacuaaacaacgugcauucaaaugacacaguacguaauaggaccccuuaucggacuuuauugaugaaugaguuagguguuccuuuucaucuggggaccaagcaagugugcauagcaugguccagcucaaguugucacgauggaaaagcauggcugcauguuuguauaacgggggaugauaaaaaugcaacugcuagcuucauuuacaaugggaggcuuguagauaguauuguuucaugguccaaagaaauccucaggacccaggagucagaaugcguuuguaucaauggaacuuguacaguaguaaugacugaugggagugcuucaggagaagcugauacuaaaauacuauucauugaggaggggaaaaucguucauacuagcacauugucaggaagugcucagcaugucgaggagugcuccugcuauccucgauauccuggugucagaugugucugcagagacaacuggaaaggcuccaauaggcccaucguagauauaaacauaaaggaucauagcauuguuuccaguuauguguguucaggacuuguuggagacacacccagaaaaaacgacagcuccagcaguagccauuguuuggacccuaacaaugaagaagguggucauggagugaaaggcugggccuuugaugauggaaaugacgugugggugggaagaacgaucagcgagaagucacgcuuaggguaugaaaccuucaaagucauugaaggcugguccaacccuaaguccaaauugcagauaaauaggcaagucauaguugacagagguaauagguccgguuauucugguauuuucucuguugaaggcaaaagcugcaucaaucggugcuuuuauguggaguugauaaggggaagaaaagaggaaacugaagucuuguggaccucaaacaguauuguuguguuuuguggcaccucagguacauauggaacaggcucauggccugauggggcggacaucaaucucaugccuauauaa

SEQ ID NO: 57920 - RNA, 1410 nt, Artificial Sequence
  derived and/or modified CDS sequence (wt) from neuraminidase__InfluenzaA__AJJ99235
augaauccaaaucaaaagauaauaacgauuggcucuguuucucucaccauuuccacaauaugcuucuucaugcaaauugccaucuugauaacuacuguaacauugcauuucaagcaauaugaauucaacucccccccaaacaaccaagugaugcugugugaaccaacaauaauagaaagaaacauaacagagauaguguaucugaccaacaccaccauagagaaggaaauaugccccaaaccagcagaauacagaaauuggucaaaaccgcaaugugacauuacaggauuugcaccuuuuucuaaggacaauucgauuaggcuuuccgcugguggggacaucugggugacaagagaaccuuaugugucaugcgauccugacaaguguuaucaauuugcccuuggacagggaacaacacuaaacaaugugcauucaaaugacacaguacgugauaggaccccuuaucggacuuuauugaugaaugaguuagguguuccuuuucaucuggggaccaagcaagugugcauagcaugguccagcucaaguugucacgauggaaaagcauggcugcauguuuguauaacgggggaugauaaaaaugcaacugcuagcuucauuuacaaugggaggcuuguagauaguauuguuucaugguccaaagaaauccucaggacccaggagucagaaugcguuuguaucaauggaacuuguacaguaguaaugacugaugggagugcuucaggagaagcugauacuaaaauacuauucauugaggagggaaaaaucguucauacuagcacauugucaggaagugcucagcaugucgaggagugcuccugcuauccucgauauccuggugucagaugugucugcagagacaacuggaaaggcuccaauaggcccaucguagauauaaacauaaaggaucauagcauuguuuccaguuauguguguucaggacuuguuggagacacacccagaaaaaacgacagcuccagcaguagccauuguuuggacccuaacaaugaagaagguggucauggagugaaaggcugggccuuugaugauggaaaugacguguggaugggaagaacgaucagcgagaagucacgcuuaggguaugaaaccuucaaagucauugaaggcugguccaacccuaaguccaaauugcagauaaauaggcaagucauaguugacagagguaauagguccgguuauucugguauuuucucuguugaaggcaaaagcugcaucaaucggugcuuuuauguggaguugauaaggggaagaaaagaggaaacugaagucuuguggaccucaaacaguauuguuguguuuuguggcaccucagguacauauggaacaggcucauggccugauggggcggacaucaaucucaugccuauauaa

SEQ ID NO: 57921 - RNA, 1410 nt, Artificial Sequence
  derived and/or modified CDS sequence (wt) from neuraminidase__InfluenzaA__AJJ99246
augaauccaaaccaaaagauaauaaccauugguucggucuguaugacaauuggaauggcuaacuuaauauuacaaauuggaaacauaaucucaauauggauuagccacucaauucaacuugggaaucaaagucagauugaaacaugcaaucaaaacgucauuacuuaugaaaacaacacuuggguaaaucagacauauguuaacaucagcaacaccaacuuugcugcuggacagucagugguuuccgugaaauuagcgggcaauuccucucucugcccuguuaguggaugggcuauauacaguaaagacaacaguguaagaaucgguuccaagggggauguguuugucauaagggaaccauucauaucaugcucccccuuggaaugcagaaccuucuucuugacucaaggggccuugcuaaaugacaaacauuccaauggaaccauuaaagacaggagcccauaucgaacccuaaugagcuguccuauuggugaaguucccucuccauacaacucaagauuugagucagucgcuuggucagcaagugcuugucaugauggcaucaauuggcuaacaauuggaauuucuggcccagacaguggggcaguggcuguguuaaaguacaauggcauaauaacagacacuaucaagaguuggagaaacaauauauugagaacacaagagucugaaugugcauguuuaaaugguucuugcuuuaccauaaugaccgauggaccaagugauggacaggccucauacaagaucuucagaauagaaaagggaaagauagucaaaucagucgaaaugaaugccccuaauuaucacuaugaggaaugcuccuguuauccugauucuagugaaaucacaugugugugcagggauaacuggcauggcucgaaucgaccgugggugucuuucaaccagaaucuggaauaucagauaggauacauaugcagugggauuuucggagacaauccacgcccuaaugauaagacaggcaguugugguccaguaucgucuaguggagcaaauggaguaaaaggauuuucauucaaauacggcaaugguguuuggauagggagaacuaaaagcauuaguucaagaaaagguuuugagaugauuugggauccaaauggauggacugggacagacaauaacuucucaauaaagcaagauaucguaggaauaaaugaguggucaggauauagcgggaguuuuguucagcauccagaacuaacagggcuggauuguauaagaccuugcuucuggguugaacuaaucagagggcgacccaaagagaacacaaucuggacuagcgggagcagcauauccuuuugugguguaaacagugacacuguggguuggucuuggccagacggugcugaguugccauuuaccauugacaaguaa

SEQ ID NO: 57922 - RNA, 1410 nt, Artificial Sequence
  derived and/or modified CDS sequence (wt) from neuraminidase__InfluenzaA__AJJ99257
augaauccaaaccaaaagauaauaaccauugguucggucuguaugacaauuggaauggcuaacuuaauauuacaaauuggaaacauaaucucaauauggauuagccacucaauucaacuugggaaucaaaaucagauugaaacaugcaaucaaagcgucauuacuuaugaaaacaacacuuggguaaaucagacauauguuaacaucagcaacaccaacuuugcugcuggacagucagugguuuccgugaaauuagcgggcaauuccucucucugcccuguuaguggaugggcuauauacaguaaagacaacaguauaagaaucgguuccaagggggauguguuugucauaagggaaccauucauaucaugcucccccuuggaaugcagaaccuucuucuugacucaaggggccuugcuaaaugacaaacauuccaauggaaccauuaaagacaggagcccauaucgaaccuuaaugagcuguccuauuggugaaguucccucuccauacaacucaagauuugaaucagucgcuuggucagcaagugcuugucaugauggcaucaauuggcuaacaauuggaauuucuggcccagacaauggggcaguggcuguguuaaaguacaacggcauaauaacagacacuaucaagaguuggagaaacaauauauugagaacacaagagucugaaugugcauguguaaaugguucuugcuuuaccauaaugaccgauggaccaagugauggacaggccucauacaagaucuucagaauagaaaagggaaagauagucaaaucagucgaaaugaaugccccuaauuaucacuaugaggaaugcuccuguuauccugauucuagugaaaucacaugugugugcagggauaacuggcauggcucgaaucgaccgugggugucuuucaaccagaaucuggaauaucagauaggauacauaugcagugggauuuucggagacaauccacgcccuaaugauaagacaggcaguugugguccagugccgucuaauggagcaaauggaguaaaaggauuuucauucaaauacggcaaugguguuuggauagggagaacuaaaagcauuaguucaagaaaagguuuugagaugauuugggauccaaacggauggacugggacagacaauagcuucucaauaaagcaagauaucguaggaacaaaugaguggucaggauauagcgggaguuuuguucagcauccagaacuaacagggcuggacuguauaagaccuugcuucuggguugaacuaaucagagggcgacccaaagagaacacaaucuggacuagugggagcagcauauccuuuugugguguaaacaguggcacuguggguuggucuuggccagacggugcugaguugccauuuaccauugacaaguaa

SEQ ID NO: 57923 - RNA, 1413 nt, Artificial Sequence
  derived and/or modified CDS sequence (wt) from neuraminidase__InfluenzaA__AJJ99269
augaacccaaaucaaaagauaauaaccauuggaucaaucaguauagcaaucggaauaauuagucuaauguugcaaauaggaaauauuauuucaauaugggcuagucacucaauccaaacuggaagucaaaacaacacuggaauaugcaaccaaagaaucaucacauaugaaaacagcaccugggugaaucacacauauguuaauauuaacaacacuaauguuguugcaggagaggacaaaacuucagugacauuggccggcaauucgucucuuuguucuaucaguggaugggcuauauacacaaaagacaacagcauaagaauuggcuccaaaggagauguuuuugucauaagagaaccuuucauaucauguucucacuuggaaugcagaaccuuuuuucugacccaaggcgcucuauuaaaugacaaacauucaaaugggaccguaaaggacagaaguccuuauagggccuuaaugagcuguccucuaggugaagcuccguccccauacaauucaaaguucgaaucaguugcauggucagcaagcgcaugccaugauggcaugggcugguuaacaaucggaauuucugguccagacaauggagcuguggcuguacuaaaauacaacggaauaauaacuggaaccauaaaaaguuggaaaaagcaaauauuaagaacacaagagucugaaugugucuguaugaacgggucauguuucaccauaaugaccgauggcccgaguaauaaggccgccucguacaaaauuuucaagaucgaaaaggggaagguuacuaaaucaauagaguugaaugcacccaauuuucauuaugaggaauguuccuguuacccagacacuggcauagugauguguguaugcagggacaacuggcaugguucaaaucgaccuugggugucuuuuaaucaaaacuuggauuaucaaauaggauacaucugcaguggaguguucggugacaauccgcgucccgaagauggagagggcagcugcaauccagugacuguugauggagcaaacggaguaaaaggguuuucauacaaauaugauaaugguguuuggauaggaaggaccaaaaguaacagacuuagaaagggguuugagaugaucugggauccuaauggauggacaaauaccgacagugauuucucagugaaacaggauguuguagcaauaacugauuggucaggguacagcggaaguuucguccaacauccugaguuaacaggauuggacuguauaagaccuugcuucuggguugaguuagucagagggcugccuagagaaaauacaacaaucuggacuagugggagcagcauuucuuuuuguggcguuaauagugauacugcaaauuggucuuggccagacggugcugaguugccguucaccauugacaaguag

SEQ ID NO: 57924 - RNA, 1410 nt, Artificial Sequence; identical to SEQ ID NO: 52970
  derived and/or modified CDS sequence (wt) from neuraminidase__InfluenzaA__AJJ99280

SEQ ID NO: 57925 - RNA, 1410 nt, Artificial Sequence; identical to SEQ ID NO: 52817
  derived and/or modified CDS sequence (wt) from neuraminidase__InfluenzaA__AJJ99291

SEQ ID NO: 57926 - RNA, 1413 nt, Artificial Sequence
  derived and/or modified CDS sequence (wt) from neuraminidase__InfluenzaA__AJJ99303
augaacccaaaucaaaagauaauaaccauuggaucaaucaguauagcaaucggaauaauuagucuaauguugcaaauaggaaauauuauuucaauaugggcuagucacucaauccaaacuggaagucaaaacaacacuggaauaugcaaccaaagaaucaucacauaugaaaacagcaccugggugaaucacacauauguuaauauuaacaacacuaauguuguugcuggagaggacaaaacuucagugacauuggcuggcaauucaucucuuuguuccaucaguggaugggcuauauacacaaaagacaacagcauaagaauuggcuccaaaggagauguuuuuguaauaagagaaccuuucauaucauguucucacuuggaaugcagaaccuuuuuucugacccaaggcgcucuauuaaaugacaaacauucaaaugggaccguaaaggacagaaguccuuauagggccuuaaugagcuguccucuaggugaagcuccguccccauacaauucaaaguucgaaucaguugcauggucagcaagcgcaugccacgacggcaugggcugguuaacaaucggaauuucugguccagacaauggagcuguggcuguacuaaaauacaacggaauaauaacuggaaccauaaaaaguuggaaaaagcaaauauuaagaacacaagagucugaaugugucuguaugaacgggucauguuucaccauaaugaccgauggcccgaguaauaaggccgccucguacaaaauuuucaagaucgaaaaggggaagguuacuaaaucaauggaguugaaugcacccaauuuucauuaugaggaauguuccuguuacccagacacuggcauagugauguguguaugcagggacaacuggcaugguucaaaucgaccuugggugucuuuuaaucaaaacuuggauuaucaaauaggauacaucugcaguggaguguucggugacaauccgcgucccgaagauggagagggcagcugcaauccagugacuguugauggagcaaacggaguaaaaggguuuucauacaaauaugauaaugguguuuggauaggaaggaccaaaaguaacagacuuagaaagggguuugagaugauuugggauccuaauggauggacaaauaccgacagugauuucucagugaaacaggauguuguagcaauaacugauuggucgggguacagcggaaguuucguccaacauccugaguuaacaggauuggacuguauaagaccuugcuucuggguugaguuagucagagggcugccuagagaaaauacaacaaucuggacuagugggagcagcauuucuuuuuguggcguuaauagugauacugcaaacuggucuuggccagacggugcugaguugccguucaccauugacaaguag

SEQ ID NO: 57927 - RNA, 1410 nt, Artificial Sequence
  derived and/or modified CDS sequence (wt) from neuraminidase__InfluenzaA__AJJ99314
augaauccaaaccaaaagauaauaaccauugguucggccuguaugacaauuggaauggcuaacuuaauauuacaaauuggaaacauaaucucaauauggauuagccacucaauucaacuugggaaucaaaaucagauugaaacaugcaaucaaagcgucauuacuuaugaaaacaacacuuggguaaaucagacauauguuaacaucagcaacaccaacuuugcugcuggacagucagugguuuccgugaaauuagcgggcaauuccucucucugcccuguuaguggaugggcuauauacaguaaagacaacaguauaagaaucgguuccaagggggauguguuugucauaagggaaccauucauaucaugcucccccuuggaaugcagaaccuucuucuugacucagggggccuugcuaaaugacaaacauuccaauggaaccauuaaagacaggagcccauaucgaacccuaaugagcuguccuauuggugaaguucccucuccauacaacucaagauuugagucagucgcuuggucagcaagugcuugucaugauggcaucaauuggcuaacaauuggaauuucuggcccagacaauggggcaguggcuguguuaaaguacaacggcauaauaacagacacuaucaagaguuggagaaacaauauauugagaacacaagagucugaaugugcauguguaaaugguucuugcuuuacuguaaugaccgauggaccaagugauggacaggccucauacaagaucuucagaauagaaaagggaaagauagucaaaucagucgaaaugaaugccccuaauuaucacuaugaggaaugcuccuguuauccugauucuagugaaaucacaugugugugcagggauaacuggcauggcucgaaucgaccgugggugucuuucaaccagaaucuggaauaucagauaggauacauaugcagugggauuuucggagacaauccacgcccuaaugauaagacaggcaguugugguccaguaucgucuaauggagcaaauggaguaaaaggauuuucauucaaauacggcaaugguguuuggauagggagaacuaaaagcauuaguucaagaaacgguuuugagaugauuugggauccgaacggauggacugggacagacaauaacuucucaauaaagcaagauaucguagggauaaaugaguggucaggauauagcgggaguuuuguucagcauccagaacuaacagggcuggauuguauaagaccuugcuucuggguugaacuaaucagagggcgacccaaagagaacacaaucuggacuagugggagcagcauauccuuuugugguguaaacagugacacuguggguuggucuuggccagacggugcugaguugccauuuaccauugacaaguaa

SEQ ID NO: 57928 - RNA, 1413 nt, Artificial Sequence
  derived and/or modified CDS sequence (wt) from neuraminidase__InfluenzaA__AJJ99326
augaacccaaaucaaaagauaauaaccauuggaucaaucaguauagcaaucggaauaauuagucuaauguugcaaauaggaaauauuauuucaauaugggcuagucacucaauccaaacugggagucaaaacaacacuggaauaugcaaccaaagaaucaucacauaugaaaacagcaccugggugaaucacacauauguuaauauuaacaacacuaauguuguugcuggagaggacaaaacaucagugacauuggccggcaauucaucucuuuguucuaucaguggaugggcuauauacacaaaagacaacagcauaagaauuggcuccaaaggagauguuuuugucauaagagaaccuuucauaucauguucucacuuggaaugcagaaccuuuuuucugacccaaggcgcucuauuaaaugacaaacauucaaaugggaccguaaaggacagaaguccuuauagggccuuaaugagcuguccucuaggugaagcuccguccccauacaauucaaaguucgaaucaguugcauggucagcaagcgcaugccaugauggcuugggcugguuaacaaucggaauuucugguccagacaauggagcuguggcuguacuaaaauacaacggaauaauaacuggaaccauaaaaaguuggaaaaagcaaauauuaagaacacaagagucugaaugugucuguaugaacgggucauguuucaccauaaugaccgauggcccgaguaauaaggccgccucguacaaaauuuucaagaucgaaaaggggaagguuacuaaaucaauagaguugaaugcacccaauuuuuauuaugaggaaugcuccuguuacccagauacuggcauagugauguguguaugcagggacaacuggcaugguucaaaucgaccuugggugucuuuuaaucaaaacuuggauuaucaaauaggauacaucugcaguggaguguuuggugacaauccgcgucccgaagauggagagggcagcugcaauccagugacuguugauggagcaaacggaguaaaaggguuuucauacaaauaugguaaugguguuuggauagggaggaccaaaaguaacagacuuagaaagggguuugagaugauuugggauccuaauggauggacaaauaccgacagugauuucucagugaaacaggauguuguagcaauaacugauuggucaggguacagcggaaguuucguccaacauccugaguuaacaggauuggacuguauaagaccuugcuucuggguugaguuagucagagggcugccuagagaaaauacaacaaucuggacuagugggagcagcauuucuuuuuguggcguuaauagugauacugcaaacuggucuuggccagacggugcugaguugccguucaccauugacaaguag

SEQ ID NO: 57929 - RNA, 1410 nt, Artificial Sequence
  derived and/or modified CDS sequence (wt) from neuraminidase__InfluenzaA__AJJ99337
augaauccaaaccaaaagauaauaaccauuaguucggucuguaugacaauuggaauggcuaacuuaauauuacaaauuggaaacauaaucucaauauggauuagccacucaauucaacuugggaaucaaaaucagauugaaacaugcaaucaaagcgucauuacuuaugaaaacaacacuuggguaaaucagacauauguuaacaucagcaacaccaacuuugcugcuggacagucagugguuuccgugaaauuagcgggcaauuccucucucugcccuguuaguggaugggcuauauacaguaaagacaacaguauaagaaucgguuccaagggggauguguuugucauaagggaaccauucauaucaugcucccccuuggaaugcagaaccuucuucuugacucaaggggccuugcuaaaugacaaacauuccaauggaaccauuaaagacaggagcccauaucgaacccuaaugagcuguccuauuggugaaguucccucuccauacaacucaagauuugagucagucgcuuggucagcaagugcuugucaugauggcaucaauuggcuaacaauuggaauuucuggcccagacaauggggcaguggcuguguuaaaguacaacggcauaauaacagacacuaucaagaguuggagaaacaauauauugagaacacaagagucugaaugugcauguguaaaugguucuugcuuuacuguaaugaccgauggaccaagugauggacaggccucauacaagaucuucagaauagaaaagggaaagauagucaaaucagucgaaaugaaugccccuaauuaucacuaugaggaaugcuccuguuauccugauucuagugaaaucacaugugugugcagggauaacuggcauggcucgaaucgaccgugggugucuuucaaccagaaucuggaauaucagauaggauacauaugcagugggauuuucggagacaauccacgcccuaaugauaagacaggcaguugugguccaguaucgucuaauggagcaaauggaguaaaaggauuuucauucaaauacggcaaugguguuuggauagggagaacuaaaagcauuaguucaagaaacgguuuugagaugauuugggauccgaacggauggacugggacagacaauaacuucucaauaaagcaagauaucguaggaauaaaugaguggucaggauauagcgggaguuuuguucagcauccagaacuaacagggcuggauuguauaagaccuugcuucuggguugaacuaaucagagggcgacccaaagagaacacaaucuggacuagcgggagcagcauauccuuuugugguguaaacagugacacuguggguuggucuuggccagacggugcugaguugccauuuaccauugacaaguaa

SEQ ID NO: 57930 - RNA, 1410 nt, Artificial Sequence
  derived and/or modified CDS sequence (wt) from neuraminidase__InfluenzaA__AJJ99348
augaauccaaaccaaaagauaauaaccauugguucggucuguaugacaauuggaauggcuaacuuaauauuacaaauuggaaacauaaucucaauauggauuagccacucaauucaacuugggaaucaaaaucagauugaaacaugcaaucaaagcgucauuacuuaugagaacaacacuuggguaaaucagacauauguuaacaucagcaacaccaacuuugcugcuggacagucagugguuuccaugaaauuagcgggcaauuccucucucugcccuguuaguggaugggcuauauacaguaaagacaacaguauaagaaucgguuccaagggggauguguuugucauaagggaaccauucauaucaugcucccccuuggaaugcagaaccuucuucuugacucaaggggccuugcuaaaugacaaacauuccaauggaaccauuaaagacaggagcccauaucgaacccuaaugagcuguccuauuggugaaguucccucuccauacaacucaagauuugagucagucgcuuggucagcaagugcuugucaugauggcaucaauuggcuaacaauuggaauuucuggcccagacaauggggcaguggcuguguuaaaguacaacggcauaauaacagacacuaucaagaguuggagaaacaauauauugagaacacaagagucugaaugugcauguguaaaugguucuugcuuuacuguaaugaccgauggaccaagugauggacaggccucauacaagaucuucagaauagaaaagggaaagauagucaaaucagucgaaaugaaugccccuaauuaucacuaugaggaaugcuccuguuauccugauucuagugaaaucacaugugugugcagggauaacuggcauggcucgaaucgaccgugggugucuuucaaccagaaucuggaauaucagauaggauacauaugcagugggauuuucggagacaauccacgcccuaaugauaagacaggcaguugugguccaguaucgucuaauggagcaaauggaguaaaaggauuuucauucaaauacgguaaugguguuuggauaggaagaacuaaaagcauuaguucaagaaacgguuuugagaugauuugggauccgaacggauggacugggacagacaauaacuucucaauaaagcaagauaucguaggaauaaaugaguggucaggauauagcgggaguuuuguucagcauccagaacuaacagggcuggauuguauaagaccuugcuucuggguugaacuaaucagagggcgacccaaagagaacacaaucuggacuagcgggagcagcauauccuuuugugguguaaacagugacacuguggguuggucuuggccagacggugcugaguugccauuuaccauugacaaguaa

SEQ ID NO: 57931 - RNA, 1410 nt, Artificial Sequence
  derived and/or modified CDS sequence (wt) from neuraminidase__InfluenzaA__AJJ99359
augaauccaaaccaaaagauaauaaccauugguucggucuguaugacaauuggaauggccaacuuaauauuacaaauuggaaacauaaucucaauauggauuagccacucaauucaacuugggaaucaaaaucagauugaaacaugcaaucaaagcgucauuacuuaugaaaacaacacuuggguaaaucagacauauguuaacaucagcaacaccaacuuugcugcuggacagucagugguuuccgugaaauuagcgggcaauuccucucucugcccuguuaguggaugggcuauauacaguaaagacaacaguauaagaaucgguuccaagggggauguguuugucauaagggaaccauucauaucaugcucccccuuggaaugcagaacuuucuucuugacucaaggggccuugcuaaaugacaaacauuccaauggaaccauuaaagacaggagcccauaucgaacccuaaugagcuguccuauuggugaaguucccucuccauacaacucaagauuugagucagucgcuuggucagcaagugcuugucaugauggcaucaauuggcuaacaauuggaauuucuggcccagacaauggggcaguggcuguguuaaaguacaacggcauaauaacagacacuaucaagaguuggagaaacaauauauugagaacacaagagucugaaugugcauguguaaaugguucuugcuuuacuguaaugaccgauggaccaagugauggacaggccucauacaagaucuucagaauagaaaagggaaagauagucaaaucagucgaaaugaaugccccuaauuaucacuaugaggaaugcuccuguuauccugauucuagugaaaucacaugugugugcagggauaacuggcauggcucgaaucgaccgugggugucuuucaaccagaaucuggaauaucagauaggauacauaugcagugggauuuucggagacaauccacgcccuaaugauaagacaggcaguugugguccaguaucgucuaauggagcaaauggaguaaaaggauuuucauucaaauacggcaaugguguuuggauagggagaacuaaaagcauuaguucaagaaacgguuuugagaugauuugggauccgaacggauggacugggacagacaauaacuucucaauaaagcaagauaucguaggaauaaaugaguggucaggauauagcgggaguuuuguucagcauccagaacuaacagggcuggauuguauaagaccuugcuucuggguugaacuaaucagagggcgacccaaagagaacacaaucuggacuagcgggagcagcauauccuuuugugguguaaacagugacacuguggguuggucuuggccagacggugcugaguugccauuuaccauugacaaguaa

SEQ ID NO: 57932 - RNA, 1410 nt, Artificial Sequence
  derived and/or modified CDS sequence (wt) from neuraminidase__InfluenzaA__AJJ99370
augaauccaaaccaaaagauaauaaccauugguucggucugcaugauaauuggaauggcuaacuuaauauuacaaauuggaaacauaaucucaauauggauuagccacucaauucaacuuggaaaucaaagucagauugaaacaugcaaucaaagcgucauuacuuaugaaaacaacacuuggguaaaucagacauauguuaacaucagcaacaccaacuuugcugcuggacagucagugguuuccgugaaauuagcgggcaauuccucucucugcccuguuaguggaugggcuauauacaguaaagacaacaguauaagaaucgguuccaagggggauguguuugucauaagggaaccauucauaucaugcucccccuuggaaugcagaaccuucuucuugacucaaggggccuugcuaaaugacaaacauuccaauggaaccauuaaagacaggagcccacaucgaacccuaaugagcuguccuauuggugaaguucccucuccauacaacucaagauuugagucagucgcuuggucagcaagugcuugucaugauggcaucaauuggcuaacaauuggaauuucuggcccagacaauggggcaguggcuguguuaaaguacaacggcauaauaacagacacuaucaagaguuggagaaacaauauauugagaacacaagagucugaaugugcauguguaaaugguucuugcuuuaccauaaugaccgauggaccaagugauagacaggccucauacaagaucuucagaauagaaaagggaaagauagucaaaucggucgaaaugaaugccccuaauuaucacuaugaggaaugcuccuguuauccugauucuagugaaaucacaugugugugcagggauaacuggcauggcucgaaucgaccgugggugucuuucaaccagaaucuggaauaucagauaggauacauaugcagugggauuuucggagacaauccacgcccuaaugauaagacaggcaguugugguccaguaucgucuaauggagcaaauggaguaaaaggauuuucauucaaauacggcaaugguguuuggauagggagaacuaaaagcauuaguucaagaaaagguuuugagaugauuugggauccaaauggauggacugggacagacaauaacuucucaauaaagcaagauaucguaggaauaaaugaguggucaggauauagcgggaguuuuguucagcauccagaacuaacagggcuggauuguauaagaccuugcuucuggguugaacuaaucagagggcgacccaaagagaacacaaucuggacuagcgggagcagcauauccuuuugugguguaaacagugacacuguggguuggucuuggccagacggugcugaguugccauuuaccauugacaaguaa

SEQ ID NO: 57933 - RNA, 1410 nt, Artificial Sequence; identical to SEQ ID NO: 52602
  derived and/or modified CDS sequence (wt) from neuraminidase__InfluenzaA__AJJ99381

SEQ ID NO: 57934 - RNA, 1410 nt, Artificial Sequence
  derived and/or modified CDS sequence (wt) from neuraminidase__InfluenzaA__AJJ99392
augaauccaaaccaaaagauaauaaccauugguucggucuguaugacaauuggaauggcuaacuuaauauuacaaauuggaaacauaaucucaauauggauuagccacucaauucaacuugggaaucaaaaucagauugaaacaugcaaucaaagcgucauuacuuaugaaaacaacacuuggguaaaucagacauauguuaacaucagcaacaccaacuuugcugcuggacagucagugguuuccgugaaauuggcgggcaauuccucucucugcccuguuaguggaugggcuauauacaguaaagacaacaguauaagaaucgguuccaagggggauguguuugucauaagggaaccauucauaucaugcucccccuuggaaugcagaaccuucuucuugacucaaggggccuugcuaaaugacaaacauuccaauggaaccauuaaagacaggagcccauaucgaacccuaaugagcuguccuauuggugaaguucccucuccauacaacucaagauuugagucagucgcuuggucagcaagugcuugucaugauggcaucaauuggcuaacaauuggaauuucuggcccagacaauggggcaguggcuguguuaaaguacaacggcauaauaacagacacuaucaagaguuggagaaacaauauauugagaacacaagagucugaaugugcauguguaaaugguucuugcuuuacuguaaugaccgauggaccaagugauggacaggccucauacaagaucuucagaauagaaaagggaaagauagucaaaucagucgaaaugaaugccccuaauuaucacuaugaggaaugcuccuguuauccugauucuagugaaaucacaugugugugcagggauaacuggcauggcucgaaucgaccgugggugucuuucaaccagaaucuggaauaucagauaggauacauaugcagugggauuuucggagacaauccacgcccuaaugauaagacaggcaguugugguccaguaucgccuaauggagcaaauggaguaaaaggauuuucauucaaauacggcaaugguguuuggauagggagaacuaaaagcauuaguucaagaaacggguuugagaugauuugggauccgaacggauggacugggacagacaauaacuucucaauaaagcaagauaucguaggaauaaaugaguggucaggauauagcgggaguuuuguucagcauccagaacuaacagggcuggauuguauaagaccuugcuucuggguugaacuaaucagagggcgacccaaagagaacacaaucuggacuagcgggagcagcauauccuuuugugguguaaacagugacacuguggguuggucuuggccagacggugcuaaguugccauuuaccauugacaaguaa

SEQ ID NO: 57935 - RNA, 1410 nt, Artificial Sequence; identical to SEQ ID NO: 48750
  derived and/or modified CDS sequence (wt) from neuraminidase__InfluenzaA__AJJ99403

SEQ ID NO: 57936 - RNA, 1413 nt, Artificial Sequence
  derived and/or modified CDS sequence (wt) from neuraminidase__InfluenzaA__AJJ99415
augaacccaaaucaaaagauaauaaccauuggaucaaucaguauagcaaucggaauaauuagucuaauguugcaaauaggaaauauuauuucaauaugggcuagucacucaauccaaacugggagucaaaacaacacuggaauaugcaaccaaagaaucaucacauaugaaaacagcaccugggugaaucacacauauguuaauaucaacaacacuaauguuguugcuggagaggacaaaacaucagugacauuggccggcaauucaucucuuuguucuaucaguggaugggcuauauacacaaaagacaacagcauaagaauuggcuccaaaggagauguuuuugucauaagagaaccuuucauaucauguucucacuuggaaugcagaaccuuuuuucugacccaaggcgcucuauuaaaugacaaacauucaaaugggaccguaaaggacagaaguccuuacagggccuuaaugagcuguccucuaggugaagcuccguccccauacaauucaaaguucgaaucaguugcauggucagcaagcgcaugccaugauggcaugggcugguuaacaaucggaauuucugguccagacaauggagcuguggcuguacuaaaauacaacggaauaauaacuggaaccauaaaaaguuggaaaaagcaaauauuaagaacacaagagucugaauguguuuguaugaacgggucauguuucaccauaaugaccgauggcccgaguaauaaggccgccucguacaaaauuuucaagaucgaaaaggggaagguuacuaaaucaauagaguugaaugcacccaauuuuuauuaugaggaaugcuccuguuacccagauacuggcauagugauguguguaugcagggacaacuggcaugguucaaaucgaccuugggugucuuuuaaucaaaacuuggauuaucaaauaggauacaucugcaguggaguguuuggugacaauccgcgucccgaagauggagagggcagcugcaauccagugacuguugauggagcaaacggaguaaaaggguuuucauacaaauaugguaaugguguuuggauagggaggaccaaaaguaacagacuuagaaagggguuugagaugauuugggauccuaauggauggacaaauaccgacagugauuucucagugaaacaggauguuguagcaauaacugauuggucaggguacagcggaaguuucguccaacauccugaguuaacaggauuggacuguauaagaccuugcuucuggguugaguuagucagagggcugccuagagaaaauacaacaaucuggacuagugggagcagcauuucuuuuuguggcguuaauagugauacugcaaacuggucuuggccagacggugcugaguugccguucaccauugacaaguag

SEQ ID NO: 57937 - RNA, 1413 nt, Artificial Sequence
  derived and/or modified CDS sequence (wt) from neuraminidase__InfluenzaA__AJJ99427
augaacccaaaucaaaagauaauaaccauuggaucaaucaguauagcaaucggaauaauuagucuaauguugcaaauagggaauauuauuucaauaugggcuagucacucaauccaaacugggagucaaaacaacacuggaauaugcaaccaaagaaucaucacauacgaaaacagcaccugggugaaucacacauauguuaauauuaacaacacuaauguuguugcuggagaggacaaaacaucagugacauuggccggcaauucaucucuuuguucuaucaguggaugggcuguauacacaaaagacaacagcauaagaauuggcuccaaaggagauguuuuugucauaagagaaccuuucauaucauguucucacuuggaaugcagaaccuuuuuucugacccaaggcgcucuauuaaaugacaaacauucaaaugggaccguaaaggacagaaguccuuauagggccuuaaugagcuguccucuaggugaagcuccguccccauacaauucaaaguucgaaucaguugcauggucagcaagcgcaugccaugauggcaugggcugguuaacaaucggaauuucugguccagacaauggagcuguggcuguacuaaaauacaacggaauaauaacuggaaccauaaaaaguuggaaaaagcaaauauuaagaacacaagagucugaaugugucugcaugaaugggucauguuucaccauaaugaccgauggcccgagugauaaggccgccucguacaaaauuuucaagaucgaaaaggggaagguuacuaaaucaauagaguugaaugcacccaauuuuuauuaugaggaaugcuccuguuacccagauacuggcauagugauguguguaugcagggacaacuggcaugguucaaaucgaccuugggugucuuuuaaucaaaacuuggauuaucaaauaggauacaucugcaguggaguguuuggugacaauccgcgucccgaagauggagagggcagcugcaauccagugacuguugauggagcaaacggaguaaaaggguuuucauacaaauaugguaaugguguuuggauagggaggaccaaaaguaacagacuuagaaagggguuugagaugauuugggauccuaauggauggauaaauaccgacagugauuucucagugaaacaggauguuguagcaauaacugauuggucaggguacagcggaaguuucguccaacauccugaguuaacaggauuggacuguauaagaccuugcuucuggguugaguuagucagagggcugccuagagaaaauacaacaaucuggacuagugggagcagcauuucuuuuuguggcguuaauagugauacugcaaacuggucuuggccagacggugcugaguugccguucaccauugacaaguag

SEQ ID NO: 57938 - RNA, 1413 nt, Artificial Sequence
  derived and/or modified CDS sequence (wt) from neuraminidase__InfluenzaA__AJJ99439
augaacccaaaucaaaagauaauaaccauuggaucaaucaguauagcaaucggaauaauuagucuaauguugcaaauaggaaauauuauuucaauaugggcuagucacucaauccaaacugggagucaaaacaacacuggaauaugcaaccaaagaaucaucacauaugaaaacagcaccugggugaaucacacauauguuaauauuaacaacacuaauguuguugcuggagaggacaaaacaucagugacauuggccggcaauucaucucuuuguucuaccaguggaugggcuauauacacaaaagacaacagcauaagaauuggcuccaaaggagauguuuuugucauaagagaaccuuucauaucauguucucacuuggaaugcagaaccuuuuuucugacccaaggcgcucuauuaaaugacaaacauucaaaugggaccguaaaggacagaaguccuuauagggccuuaaugagcuguccucuaggugaagcuccguccccauacaauucaaaguucgaaucaguugcauggucagcaagcgcaugccaugauggcaugggcugguuaacaaucggaauuucugguccagacaauggagcuguggcuguacuaaaauacaacggaauaauaacuggaaccauaaaaaguuggaaaaagcaaauauuaagaacacaagagucugaaugugucuguaugaacgggucauguuucaccauaaugaccgauggcccgaguaauaaggccgccucguacaaaauuuucaagaucgaaaaggggaagguuacuaaaucaauagaguugaaugcacccaauuuuuauuaugaggaaugcuccuguuacccagauacuggcauagugauguguguaugcagggacaacuggcaugguucaaaucgaccuugggugucuuuuaaucaaaacuuggauuaucaaauaggauacaucugcaguggaguguuuggugacaauccgcgucccgaagauggagagggcagcugcaauccagugacuguugauggagcaaacggaguaaaaggguuuucauacaaauaugguaaugguguuuggauagggaggaccaaaaguaacagacuuagaaagggguuugagaugauuugggauccuaauggauggacaaauaccgacagugauuucucagugaaacaggauguuguagcaauaacugauuggucaggguacagcggaaguuucguccaacauccugaguuaacaggauuggacuguauaagaccuugcuucuggguugaguuagucagagggcugccuagagaaaauacaacaaucuggacuagugggagcagcauuucuuuuuguggcguuaauagugauacugcaaacuggucuuggccagacggugcugaguugccguucaccauugacaaguag

SEQ ID NO: 57939 - RNA, 1413 nt, Artificial Sequence
  derived and/or modified CDS sequence (wt) from neuraminidase__InfluenzaA__AJJ99451
augaacccaaaucaaaagauaauaaccauuggaucaaucaguauagcaaucggaauaauuagucuaauguugcaaauaggaaauauuauuucaauaugggcuagucacucaauccaaacuggaagucaaaacaacacuggaauaugcaaccaaagaaucaucacauaugaaaacagcaccugggugaaucacacauauguuaauauuaacaacacuaauguuguugcuggagaggacaaaacuucagugacauuggccggcaauucaucucuuuguucuaucaguggaugggcuauauacacaaaagacaacagcauaagaauuggcuccaaaggagauguuuuugucauaagagaaccuuucauaucauguucucacuuggaaugcagaaccuuuuuucugacccaaggcgcucuauuaaaugacaaacauucaaauaggaccguaaaggacagaaguccuuauagggccuuaaugagcuguccucuaggugaagcuccguccccauacaauucaaaguucgaaucaguugcauggucagcaagcgcaugccaugauggcaugggcugguuaacaaucggaauuucugguccagacaauggagcuguggcuguacuaaaauacaacggaauaauaacuggaaccauaaaaaguuggaaaaagcaaauauuaagaacacaagagucugaaugugucuguaugaacgggucauguuucaccauaaugaccgauggcccgaguaauaaggccgccucguacaaaauuuucaagaucgaaaaggggaagguuacuaaaucaauagaguugaaugcacccaauuuucauuaugaggaauguuccuguuacccagacacuggcauagugauguguguaugcagggacaacuggcaugguucaaaucgaccuugggugucuuuuaaucaaaacuuggauuaucaaauaggauacaucugcaguggaguguuuggugacaauccgcgucccgaagauggagagggcagcugcaauccagugacuguugauggagcaaacggaguaaaaggguuuucauacaaauaugauaaugguguuuggauaggaaggaccaaaaguaacagacuuagaaagggguuugagaugauuugggauccuaauggauggacaaauaccgacagugauuucucagugaaacaggauguuguagcaauaacugauuggucaggguacagcggaaguuucguccaacauccugaguuaacaggauuggacuguauaagaccuugcuucuggguugaguuagucagagggcugccuagagaaaauacaacaaucuggacuagugggagcagcauuucuuuuuguggcguuaauagugauacugcaaacuggucuuggccagacggugcugaguugccguucaccauugacaaguag

SEQ ID NO: 57940 - RNA, 1413 nt, Artificial Sequence; identical to SEQ ID NO: 57923
  derived and/or modified CDS sequence (wt) from neuraminidase__InfluenzaA__AJJ99463

SEQ ID NO: 57941 - RNA, 1410 nt, Artificial Sequence
  derived and/or modified CDS sequence (wt) from neuraminidase__InfluenzaA__AJJ99474
augaauccaaaccaaaagauaauaaccauugguucggucuguaugacaauuggaauagcuaacuuaauauuacaaauuggaaacauaaucucaauauggauuagccacucaauucaacuugggaaucaaaaucagauugaaacaugcaaucaaagcgucauuaucuaugaaaacaacacuuggguaaaucagacauauguuaacaucagcaacaccaacuuugcugcuggacagucagugguuuccgugaaauuagcgggcaauuccucucucugcccuguuaguggaugggcuauauacaguaaagacaacaguauaagaaucgguuccaagggggauguguuugucauaagggaaccauucauaucaugcucccccuuggaaugcagaaccuucuucuugacucaaggggccuugcuaaaugacaaacauuccaauggaaccauuaaagacaggagcccauaucgaaccuuaaugagcuguccuauuggugaaguucccucuccauacaacucgagauuugagucagucgcuuggucagcaagugcuugucaugauggcaucaauuggcuaacaauuggaauuucuggcccagacaauggggcaguggcuguguuaaaguacaacggcauaauaacagacacuaucaagaguuggagaaacaauauauugagaacacaagagucugaaugugcauguguaaaugguucuugcuuuaccauaaugaccgauggaccaagugauggacaggccucauacaagaucuucagaauagaaaagggaaagauaaucaaaucagucgaaaugaaugccccuaauuaucacuaugaggaaugcuccuguuauccugauucuagugaaaucacaugugugugcagggauaacuggcauggcucgaaucgaccgugggugucuuucaaccagaaucuggaauaucagauaggauacauaugcagugguauuuucggagacaauccacgcccuaaugauaagacaggcaguugugguccagugucgucuaauggagcaaauggaguaaaaggauuuucauucaaauacggcaaugguguuuggauagggagaacuaaaagcauuaguucaagaaaagguuuugagaugauuugggauccaaacggauggacugggacagacaauagcuucucaauaaagcaagauaucguaggaauaaaugaguggucaggauauagcgggaguuuuguucagcauccagaacuaacagggcuggacuguauaagaccuugcuucuggguugaacuaaucagagggcgacccaaagagaacacaaucuggacuagugggagcagcauauccuuuugugguguaaacaguggcacuguggguuggucuuggccagacggugcugaguugccauuuaccauugacaaguaa

SEQ ID NO: 57942 - RNA, 1410 nt, Artificial Sequence; identical to SEQ ID NO: 52817
  derived and/or modified CDS sequence (wt) from neuraminidase__InfluenzaA__AJJ99496

SEQ ID NO: 57943 - RNA, 1410 nt, Artificial Sequence
  derived and/or modified CDS sequence (wt) from neuraminidase__InfluenzaA__AJJ99507
augaauccaaaccaaaagauaauaaccauugguucggucuguaugacaauuggaauggcuaacuuaauauuacaaauuggaaacauaaucucaauauggauuagccacucaauucaacuugggaaucaaaaucagauugaaacaugcaaucaaagcgucauuacuuaugaaaacaacacuuggguaaaucagacauauguuaacaucagcaacaccaacuuugcugcuggacagucagugguuuccgugaaauuagcgggcaauuccucucucugcccuguuaguggaugggcuauauacaguaaagacaacaguauaagaaucgguuccaagggggauguguuugucauaagggaaccauucauaucaugcuccccuuuggaaugcagaaccuucuucuugacucaaggggccuugcuaaaugacaaacauuccaauggaaccauuaaagacaggagcccauaucgaacccuaaugagcuguccuauuggugaaguucccucuccauacaacucaagauuugagucagucgcuuggucagcaagugcuugucaugauggcaucaauuggcuaacaauuggaauuucuggcccagacaauggggcaguggcuguguuaaaguacaacggcauaauaacagacacuaucaagaguuggagaaacaauauauugagaacacaagagucugaaugugcauguguaaaugguucuugcuuuacugugaugaccgauggaccaagugauggacaggccucauacaagaucuucagaauagaaaagggaaagauagucaaaucagucgaaaugaaugccccuaauuaucacuaugaggaaugcuccuguuauccugauucuagugaaaucacaugugugugcagggauaacuggcauggcgcgaaucgaccgugggugucuuucaaccagaaucuggaauaucagauaggauacauaugcagugggauuuucggagacaauccacgcccuaaugauaagacaggcaguugugguccaguaucgucuaauggagcaaauggaguaaaaggauuuucauucaaauacgacaaugguguuuggauagggagaacuaaaagcauuaguucaagaaacgguuuugagaugauuugggauccgaacggauggacugggacagacaaugacuucucaauaaagcaagauaucguaggaauaaaugaguggucaggauauagcgggaguuuuguucagcauccagaacuaacagggcuggauuguauaagaccuugcuucuggguugaacuaaucagagggcgacccaaagagaacacaaucuggacuagcgggagcagcauauccuuuugugguguaaacagugacacuguggguuggucuuggccagacggugcugaguugccauuuaccauugacaaguaa

SEQ ID NO: 57944 - RNA, 1410 nt, Artificial Sequence
  derived and/or modified CDS sequence (wt) from neuraminidase__InfluenzaA__AJJ99518
augaauccaaaccaaaagauaauaaccauugguucggucuguaugacaauuggaauggcuaacuuaauauuacaaauuggaaacauaaucucaauauggauuagccacucaauucaacuugggaaucaaaaucagauugaaacaugcaaucaaagcgucauuacuuaugaaaacaacacuuggguaaaucagacauauguuaacaucagcaacaccaacuuugcugcuggacagucagugguuuccgugaaauuagcgggcaauuccucucucugcccuguuaguggaugggcuauauacaguaaagacaacaguauaagaaucgguuccaagggggauguguuugucauaagggaaccauucauaucaugcucccccuuggaaugcagaaccuucuucuugacucaaggggccuugcuaaaugacaaacauuccaauggaaccauuaaagacaggagcccauaucgaacccuaaugagcuguccuauuggugaaguucccucuccauacaacucaagauuugagucagucgcuuggucagcaagugcuugucaugauggcaucaauuggcuaacaauuggaauuucugggccagacaauggggcaguggcuguguuaaaguacaacggcauaauaacagacacuaucaagaguuggagaaacaauauauugagaacacaagagucugaaugugcauguguaaaugguucuugcuuuacuguaaugaccgauggaccaagugauggacaggccucauacaagaucuucagaauagaaaagggaaagauagucaaaucagucgaaaugaaugccccuaauuaucacuaugaggaaugcuccuguuauccugauucuagugaaaucacaugugugugcagggauaacuggcauggcucgaaucgaccgugggugucuuucaaccagaaucuggaauaucagauaggauacauaugcagugggauuuucggagacaauccacgcccuaaugauaagacaggcaguugugguccaguaucgucuaauggagcaaauggaguaaaaggauuuucauucaaauacggcaaugguguuuggauagggagaacuaaaagcauuaguucaagaaacgguuuugagaugauuugggauccgaacggauggacugggacagacaauaacuucucaauaaagcaagauaucguaggaauaaaugaguggucaggauauagcgggaguuuuguucagcauccagaacuaacagggcuggauuguauaagaccuugcuucuggguugaacuaaucagagggcgacccaaagagaacacaaucuggacuagcgggagcagcauauccuuuugugguguaaacagugacacuguggguuggucuuggccagacggugcugaguugccauuuaccauugacaaguaa

SEQ ID NO: 57945 - RNA, 1410 nt, Artificial Sequence
  derived and/or modified CDS sequence (wt) from neuraminidase__InfluenzaA__AJJ99529
augaauccaaaccaaaagauaauaaccauugguucggucuguaugacaauuggaauggcuaacuuaauauuacaaguuggaaacauaaucucaauauggauuagccacucaauucaacuugggaaucaaaaucagauugaaacaugcaaucaaagcgucauuacuuaugaaaacaacacuuggguaaaucagacauauguuaacaucagcaacaccaauuuugcugcuggacagucagugguuuccgugaaauuagcgggcaauuccucucucugcccuguuaguggaugggcuauauacaguaaagacaacaguauaagaaucgguuccaagggggauguguuugucauaagggaaccauucauaucaugcucccccuuggaaugcagaaccuucuucuugacucaaggggccuugcuaaaugacaaacauuccaauggaaccauuaaagacaggagcccauaucgaaccuuaaugagcuguccuauuggugaaguucccucuccauacaacucgagauuugagucagucgcuuggucagcaagugcuugucaugauggcuucaauuggcuaacaauuggaauuucuggcccagacaauggggcaguggcuguguuaaaguacaacggcauaauaacagacacuaucaagaguuggagaaacaauauauugagaacacaagagucugaaugugcauguguaaaugguucuugcuuuaccauaaugaccgauggaccaagugauggacaggccucauacaagaucuucagaauagaaaagggaaagauaaucaaaucagucgaaaugaaugccccuaauuaucacuaugaggaaugcuccuguuauccugauucuagugaaaucacaugugugugcagggauaacuggcauggcucgaaucgaccgugggugucuuucaaccagaaucuggaauaucagauaggauacauaugcagugggauuuucggagacaauccacgcccuaaugauaagacaggcaguugugguccaguaucgucuaauggagcaaauggaguaaaaggauuuucauucaaauacggcaaugguguuuggauagggagaacuaaaagcauuaguucaagaaaagguuuugagaugauuugggauccaaacggauggacugggacagacaauagcuucucaauaaagcaagauaucguaggaauaaaugaguggucaggauauagcgggaguuuuguucagcauccagaacuaacagggcuggacuguauaagaccuugcuucuggguugaacuaaucagagggcgacccaaagagaacacaauuuggacuagugggagcagcauauccuuuugugguguaaacaguggcacuguggguuggucuuggccagacggugcugaguugccauuuaccauugacaaguaa

SEQ ID NO: 57946 - RNA, 1410 nt, Artificial Sequence
  derived and/or modified CDS sequence (wt) from neuraminidase__InfluenzaA__AJJ99540
augaauccaaaccaaaagauaauaaccauugguucggucuguaugacaauuggaauggcuaacuuaauauuacaaauuggaaacauaaucucaauauggauuagccacucaauucaacucgggaaucaaaaucagauugaaacaugcaaucaaagcgucauuacuuaugaaaacaacacuuggguaaaucagacauauguuaacaucagcaacaccaacuuugcugcuggacagucaguggucuccgugaaauuagcgggcaauuccucucucugcccuguuaguggaugggcuauauacaguaaagacaacaguauaagaaucgguuccaagggggauguguuugucauaagggaaccauucauaucaugcucacccuuggaaugcagaaccuucuucuugacucaaggggccuugcuaaaugacaaacauuccaauggaaccauuaaagacaggagcccauaucgaacccuaaugagcuguccuauuggugaaguucccucuccauacaacucaagauuugagucaguugcuuggucagcaagugcuugucaugauggcaucaauuggcuaacaauuggaauuucugguccagacaauggggcaguggcuguguuaaaguacaacggcauaauaacagacacuaucaagaguuggagaaacaauauauugagaacacaagagucugaaugugcauguguaaaugguucuugcuuuaccauaaugaccgauggaccaagugauggacaggccucauacaagaucuucagaauagaaaagggaaagauagucaaaucaguugaaaugaaugccccuaauuaucacuaugaggaaugcuccuguuauccugauucuaguaaaaucacaugugugugcagggauaacuggcauggcucaaaucgaccgugggugucuuucaaccagaaucuggaauaucagauaggauacauaugcagugggauuuucggagacaauccacgcccuaaugauaagacaggcaguugugguccaguaucgucuaauggagcaaauggaguaaaaggauuuucauucaaauacggcaauggcauuuggauagggagaacuaaaagcauuaguucaagaaaagguuuugagaugauuugggacccaaacggauggacugggacagacaauaacuucucaauaaagcaagauaucguaggaauaaaugaguggucaggauauagcgggaguuuuguucagcauccagaacuaacagggcuggauuguauaagaccuugcuucuggguugaacuaaucagagggcgacccaaagagaacacaaucuggacuagcgggagcagcauauccuuuugugguguaaacagugacacuguggguuggucuuggccagacggugcugaguugccauucaccauugacaaguaa

SEQ ID NO: 57947 - RNA, 1410 nt, Artificial Sequence
  derived and/or modified CDS sequence (wt) from neuraminidase__InfluenzaA__AJJ99551
augaauccaaaccaaaagauaauaaccauugguucggucuguaugacaauuggaauggcuaacuuaauauuacaaauuggaaacauaaucucaauauggauuagccacucaauucaacuugggaaucaaagucagaccgaaacaugcaaucaaagcgucauuacuuaugaaaacaacacuuggguaaaucagacauauguuaacaucagcaacaccaacccugcugcuggacagucagugguuuccgugaaauuagcgggcaauuccucucucugcccuguuaguggaugggcuauauacaguaaagacaacaguauaagaaucgguuccaagggggauguguuugucauaagggaaccauucauaucaugcuccuccuuggaaugcagaaccuucuucuugacucaaggggccuugcuaaaugacaaacauuccaauggaaccauuaaagacaggagcccauaucgaacccuaaugagcuguccuauuggugaaguucccucucccuacaacucaagauuugagucagucgcuuggucagcaagugcuugucaugauggcaucaauuggcuaacaauuggaauuucuggcccagacaauggggcaguggcuguguuaaaguacaacggcauaauaacagacacuaucaagaguuggagaaacaauauauugagaacacaagagucugaaugugcauguguaaaugguucuugcuuuaccauaaugaccgauggaccaagugauggacaggccucauacaagaucuucagaauagaaaagggaaagauagucaaaucagucgaaaugaaugccccuaauuaucacuaugaggaaugcuccuguuauccugauucuagugaaaucacaugugugugcagggauaacuggcauggcucgaaucgaccgugggugucuuucaaccagaaucuggaauaucagauaggauauauaugcagugggauuuucggagacaauccacgcccuaaugauaagacaggcaguugugguccaguaucgucuaauggagcaaauggaguaaaaggauuuucauucaaauacggcaaugguguuuggauagggagaacuaaaagcauuaguucaagaaaagguuuugagaugauuugggauccaaacggauggacugggacagacaauaacuucucaauaaagcaagauaucguaggaauaaaugaguggucaggauauagcgggaguuuuguucagcauccagaacuaacagggcuggauuguauaagaccuugcuucuggguugaacuaaucagagggcgacccaaagagaacacaaucuggacuagcgggagcagcauauccuuuugugguguaaacagugacacuguggguuggucuuggccagacggugcugaguugccauuuaccauugacaaguaa

SEQ ID NO: 57948 - RNA, 1410 nt, Artificial Sequence; identical to SEQ ID NO: 57157
  derived and/or modified CDS sequence (wt) from neuraminidase__InfluenzaA__AJJ99562

SEQ ID NO: 57949 - RNA, 1410 nt, Artificial Sequence
  derived and/or modified CDS sequence (wt) from neuraminidase__InfluenzaA__AJJ99573
augaauccaaaccaaaagauaauaaccauugguucggucuguaugacaauuggaauggcuaacuuaauauuacaaauuggaaacauaaucucaauauggauuagccacucaauucaacuugggaaucaaagucagauugaaacaugcaaucaaagcgucauuacuuaugaaaacaacacuuggguaaaucagacauauguuaacaucagcaacaccaacuuugcugcuggacagucagugguuuccgugaaauuagcgggcaauuccucucucugcccuguuaguggaugggcuauauacaguaaagacaacaguauaagaaucgguuccaagggggauguguuugucauaagggaaccauucauaucaugcucccccuuggaaugcagaaccuucuucuugacucaaggggccuugcuaaaugacaaacauuccaauggaaccauuaaagacaggagcccauaucgaacccuaaugagcuguccuauuggugaaguucccucuccauauaacucaagauuugagucagucgcuuggucagcaagugcuugucaugauggcaucaauuggcuaacaauuggaauuucuggcccagacaauggggcaguggcuguguuaaaguacaacggcauaauaacagacacuaucaagaguuggagaaacaauauauugagaacacaagagucugaaugugcauguguaaaugguucuugcuuuaccauaaugaccgauggaccaagugauggacaggccucauacaagaucuucagaauagaaaagggaaagauagucaaaucagucgaaaugaaugccccuaauuaucacuaugaggaaugcuccuguuauccugauucuagugaaaucacaugugugugcagggauaacuggcauggcucgaaucgaccgugggugucuuucaaccagaaucuggaauaucagauaggauacauaugcagugggauuuucggagacaauccacgcccuaaugauaagacaggcaguugugguccaguaucgucuaauggagcaaauggaguaaaaggauuuucauucaaauacggcaaugguguuuggauagggagaacuaaaagcauuaguucaagaaaagguuuugagaugauuugggauccaaacggauggacugggacagacaauaacuucucaauaaagcaagaugucguaggaauaaaugaguggucaggauauagcgggaguuuuguucagcauccagaacuaacagggcuggauuguauaagaccuugcuucuggguugaacuaaucagagggcgacccaaagagaacacaaucuggacuagcgggagcagcauauccuuuugugguguaaacagugacacuguggguuggucuuggccagacggugcugaguugccauuuaccauugacaaguaa

SEQ ID NO: 57950 - RNA, 1410 nt, Artificial Sequence
  derived and/or modified CDS sequence (wt) from neuraminidase__InfluenzaA__AJJ99584
augaauccaaaccaaaagauaauaaccauugguucggccuguaugacaauuggaauggcuaacuuaauauuacaaauuggaaacauaaucucaauauggauuagccacucaauucaacuugggaaucaaaaucagauugaaacaugcaaucaaagcgucauuacuuaugaaaacaacacuuggguaaaucagacauauguuaacaucagcaacaccaacuuugcugcuggacagucagugguuuccgugaaauuagcgggcaauuccucucucugcccuguuaguggaugggcuauauacaguaaagacaacaguauaagaaucgguuccaagggggauguguuugucauaagggaaccauucauaucaugcucccccuuggaaugcagaaccuucuucuugacucagggggccuugcuaaaugacaaacauuccaauggaaccauuaaagacaggagcccauaucgaacccuaaugagcuguccuauuggugaaguucccucuccauacaacucaagauuugagucagucgcuuggucagcaagugcuugucaugauggcaucaauuggcuaacaauuggaauuucuggcccagacaauggggcaguggcuguguuaaaguacaacggcauaauaacagacacuaucaagaguuggagaaacaauauauugagaacacaagagucugaaugugcauguguaaaugguucuugcuuuacuguaaugaccgauggaccaagugauggacaggccucauacaagaucuucagaauagaaaagggaaagauagucaaaucagucgaaaugaaugccccuaauuaucacuaugaggaaugcuccuguuauccugauucuagugaaaucacaugugugugcagggauaacuggcauggcucgaaucgaccgugggugucuuucaaccagaaucuggaauaucagauaggauacauaugcagugggauuuucggagacaauccacgcccuaaugauaagacaggcaguugugguccaguaucgucuaauggagcaaauggaguaaaaggauuuucauucaaauacggaaaugguguuuggauagggagaacuaaaagcauuaguucaagaaacgguuuugagaugauuugggauccgaacggauggacugggacagacaauaacuucucaauaaagcaagauaucguagggauaaaugaguggucaggauauagcgggaguuuuguucagcauccagaacuaacagggcuggauuguauaagaccuugcuucuggguugaacuaaucagagggcgacccaaagagaacacaaucuggacuagugggagcagcauauccuuuugugguguaaacagugacacuguggguuggucuuggccagacggugcugaguugccauuuaccauugacaaguaa

SEQ ID NO: 57951 - RNA, 1410 nt, Artificial Sequence
  derived and/or modified CDS sequence (wt) from neuraminidase__InfluenzaA__AJJ99595
augaauccaaaccaaaagauaauaaccauugguucggucuguaugacaauuggaauggcuaacuuaauauuucaaauuggaaacauaaucucaauauggauuagccacucaauucaacuugggaaucaaaaucagauugaaacaugcaaucaaagcgucauuacuuaugaaaacaacacuuggguaaaucagacauauguuaacaucagcaacaccaacuuugcugcuggacagucagugguuuccgugaaauuagcgggcaauuccucucucugcccuguuaguggaugggcuauauacaguaaagacaacaguauaagaaucgguuccaagggggauguguuugucauaagggaaccauucauaucaugcucccccuuggaaugcagaaccuucuucuugacucaaggggccuugcuaaaugacaaacauuccaauggaaccauuaaagacaggagcccauaucgaacccuaaugagcuguccuauuggugaaguucccucuccauacaacucaagauuugagucagucgcuuggucagcaagugcuugucaugauggcaucaauuggcuaacaauuggaauuucuggcccagacaauggggcaguggcuguguuaaaguacaacggcauaauaacagacacuaucaagaguuggagaaacaauauauugagaacacaagagucugaaugugcauguguaaaugguucuugcuuuacuguaaugaccgauggaccaagugauggacaggccucauacaagaucuucagaauagaaaagggaaagauagucaaaucagucgaaaugaaugccccuaauuaucacuaugaggaaugcuccuguuauccugauucuagugaaaucacaugugugugcagggauaacuggcauggcucgaaucgaccgugggugucuuucaaccagaaucuggaauaucaaauaggauacauaugcagugggauuuucggagacaauccacgcccuaaugauaagacaggcaguugugguccaguaucgucuaauggagcaaauggaguaaaaggauuuucauucaaauacggcaaugguguuuggauagggagaacuaaaagcauuaguucaagaaacgguuuugagaugauuugggauccgaacggauggacugggacagacaauaacuucucaauaaagcaagauaucguaggaauaaaugaguggucaggauauagcgggaguuuuguucagcauccagaacuaacagggcuggauuguauaagaccuugcuucuggguugaacuaaucagagggcgacccaaagagaacacaaucuggacuagcgggagcagcauauccuuuugugguguaaacagugacacuguggguuggucuuggccagacggugcugaguugccauuuaccauugacaaguaa

SEQ ID NO: 57952 - RNA, 1410 nt, Artificial Sequence
  derived and/or modified CDS sequence (wt) from neuraminidase__InfluenzaA__AJJ99606
augaauccaaaccaaaagauaauaaccauugguucggucuguaugacaauuggaauggcuaacuuaauauuacaaauuggaaacauaaucucaauauggauuagccacucaauucaacuugggaaucaaaaucagauugaaacaugcaaucaaagcgucauuacuuaugaaaacaacacuuggguaaaucagacauauguuaacaucagcaacaccaacuuugcugcuggacagucagugguuuccgugaaauuagcgggcaauuccucucucugcccuguuaguggaugggcuauauacaguaaagacaacaguauaagaaucgguuccaagggggauguguuugucauaagggaaccauucauaucaugcucccccuuggaaugcagaaccuucuucuugacucaaggggccuugcuaaaugacaaacauuccaauggaaccauuaaagacaggagcccauaucgaacccuaaugagcuguccuauuggugaaguucccucuccauacaacucaagauuugagucagucgcuuggucagcaagugcuugucaugauggcaucaauuggcuaacaauuggaauuucuggcccagacaauggggcaguggcuguguuaaaguacaacggcguaauaacagacacuaucaagaguuggagaaacaauauauugagaacacaagagucugaaugugcauguguaaaugguucuugcuuuacuguaaugaccgauggaccaagugauggacaggccucauacaagaucuucagaauagaaaagggaaagauagucaaaucagucgaaaugaaugccccuaauuaucacuaugaggaaugcuccuguuauccugauucuagugaaaucacaugugugugcagggauaacuggcauggcucgaaucgaccgugggugucuuucaaccagaaucuggaauaucagauaggauacauaugcagugggauuuucggagacaauccacgcccuaaugauaagacaggcaguugugguccaguaucgucuaauggagcaaauggaguaaaaggauuuucauucaaauacggcaaugguguuuggauagggagaacuaaaagcauuaguucaagaaacgguuuugagaugauuugggauccgaacggauggacugggacagacaauaacuucucaauaaagcaagauaucguaggaauaaaugaguggucaggauauagcgggaguuuuguucagcauccagaacuaacagggcuggauuguauaagaccuugcuucuggguugaacuaaucagagggcgacccaaagagaacacaaucuggacuagcgggagcagcauauccuuuugugguguaaacagugacacuguggguuggucuuggccagacggugcugaguugccauuuaccauugacaaguaa

SEQ ID NO: 57953 - RNA, 1413 nt, Artificial Sequence
  derived and/or modified CDS sequence (wt) from neuraminidase__InfluenzaA__AJJ99618
augaacccaaaucaaaagauaauaaccauuggaucaaucaguauagcaaucggaauaauuagucuaauguugcaaauaggaaauauuauuucaauaugggcuagucacucaauccaaacugggagucaaaacaacacuggaauaugcaaccaaagaaucaucacauaugaaaacagcaccugggugaaucacacauauguuaauauuaacaacacuaauguuguugcuggagaggacaaaacaucagugacauuggccggcaauucaucucuuuguucuaucaguggaugggcuauauacacaaaagacaacagcauaagaauuggcuccaaaggagauguuuuugucauaagagaaccuuucauaucauguucucacuuggaaugcagaaccuuuuuucugacccaaggcgcucuacuaaaugacaaacauucaaaugggaccguaaaggacagaaguccuuauagggccuuaaugagcuguccucuaggugaagcuccguccccauacaauucaaaguucgaaucaguugcauggucagcaagcgcaugccaugauggcaugggcugguuaacaaucggaauuucugguccagacaauggagcuguggcuguacuaaaauacaacggaauaauaacuggaaccauaaaaaguuggaaaaaacaaauauuaagaacacaagagucugaaugugucuguaugaacgggucauguuucaccauaaugaccgauggcccgaguaauaaggccgccucguacaaaauuuucaagaucgaaaaggggaagguuacuaaaucaauagaguugaaugcacccaauuuuuauuaugaggaaugcuccuguuacccagauacuggcauagugauguguguaugcagggacaacuggcaugguucaaaucgaccuugggugucuuuuaaucaaaacuuggauuaucaaauaggauacaucugcaguggaguguuuggugacaauccgcgucccgaagauggagagggcagcugcaauccagugacuguugauggagcaaacggaguaaaaggguuuucauacaaauaugguaaugguguuuggauagggagaaccaaaaguaacagacuuagaaagggguuugagaugauuugggauccuaauggauggacaaauaccgacagugauuucucagugaaacaggauguuguagcaauaacugauuggucaggguacagcggaaguuucguccaacauccugaguuaacaggauuggacuguauaagaccuugcuucuggguugaguuagucagagggcugccuagagaaaauacaacaaucuggacuagugggagcagcauuucuuuuuguggcguuaauagugauacugcaaacuggucuuggccagacggugcugaguugccguucaccauugacaaguag

SEQ ID NO: 57954 - RNA, 1413 nt, Artificial Sequence
  derived and/or modified CDS sequence (wt) from neuraminidase__InfluenzaA__AJJ99630
augaacccaaaucaaaagauaauaaccauuggaucaaucaguauagcaaucggaauaauuagucuaauguugcaaauaggaaauauuauuucaauaugggcuagucacucaauccaaacugggagucaaaacaacacuggaauaugcaaccaaagaaucaucacauaugaaaacagcaccugggugaaucacacauauguuaauauuaacaacacuaauguuguugcuggagaggacaaaacaucagugacauuggccggcaauucaucucuuuguucuaucaguggaugggcuauauacacaaaagacaacagcauaagaauuggcuccaaaggagauguuuuugucauaagagaaccuuucauaucauguucucacuuggaaugcagaaccuuuuuucugacccaaggcgcucuauuaaaugacaaacauucaaaugggaccguaaaggacagaaguccuuauagggccuuaaugagcuguccucuaggugaagcuccguccccauacaauucaaaguucgaaucaguugcauggucagcaagcgcaugccaugauggcaugggcugguuaacaaucggaauuucugguccagacaauggagcuguggcuguacuaaaauacaacggaauaauaacuggaaccauaaaaaguuggaaaaagcaaauauuaagaacacaagagucugaaugugucuguaugaacgggucauguuucaccauaaugaccgauggcccgaguaauaaggccgccucguacaaaauuuucaagaucgaaaaggggaagguuacuaaaucaauagaguugaaugcacccaauuuuuauuaugaggaaugcuccuguuacccagauacuggcauagugauguguguaugcagggacaacuggcaugguucaaaucgaccuugggugucuuuuaaucaaaacuuggauuaucaaauaggauacaucugcaguggaguguuuggugacaauccgcgucccgaagauggagagggcagcugcaauccagugacuguugauggagcaaacggaguaaaaggguuuucauacaaauaugguaaugguguuuggauagggaggaccaaaaguaacagacuuagaaagggguuugagaugauuugggauccuaauggauggacaaauaccgacagugauuucucaaugaaacagaauguuguagcaauaacugauuggucaggguacagcggaaguuucguccaacauccugaguuaacaggauuggacuguauaagaccuugcuucuggguugaguuagucagagggcugccuagagaaaauacaacaaucuggacuagugggagcagcauuucuuuuuguggcguuaauagugauacugcaaacuggucuuggccagacggugcugaguugccguucaccauugacaaguag

SEQ ID NO: 57955 - RNA, 1413 nt, Artificial Sequence; identical to SEQ ID NO: 51797
  derived and/or modified CDS sequence (wt) from neuraminidase__InfluenzaA__AJJ99642

SEQ ID NO: 57956 - RNA, 1413 nt, Artificial Sequence; identical to SEQ ID NO: 51797
  derived and/or modified CDS sequence (wt) from neuraminidase__InfluenzaA__AJJ99654

SEQ ID NO: 57957 - RNA, 1413 nt, Artificial Sequence
  derived and/or modified CDS sequence (wt) from neuraminidase__InfluenzaA__AJJ99666
augaacccaaaucaaaagauaauaaccauuggaucaaucaguauagcaaucggaauaauuagucuaauguugcaaauaggaaauauuauuucaauaugggcuagucacucaauccaaacuggaagucaaaacaacacuggaauaugcaaccaaagaaucaucacauaugaaaacagcaccugggugaaucacacauauguuaauauuaacaacaauaauguuguugcuggagaggacaaaacuucagugacauuggccggcaauucaucucuuuguucuaucaguggaugggcuauauacacaaaagacaacagcauaagaauuggcuccaaaggagauguuuuugucauaagagaaccuuucauaucauguucucacuuggaaugcagaaccuuuuuucugacccaaggcgcucuauuaaaugacaaacauucaaaugggaccguaaaggacagaaguccuuauagggccuuaaugagcuguccucuaggugaagcuccguccccauacaauucaaaguucgaaucaguugcauggucagcaagcgcaugccaugauggcaugggcugguuaacaaucggaauuucugguccagacaauggggcuguggcuguacuaaaauacaacggaauaauaacuggaaccauaaaaaguuggaaaaagcaaauauuaagaacacaagagucugaaugugucuguaugaacgggucauguuucaccauaaugaccgauggcccgaguaauaaggccgccucguacaaaauuuucaagaucgaaaaggggaagguuacuaaaucaauagaguugaaugcacccaauuuucauuaugaggaauguuccuguuacccagacacuggcauagugauguguguaugcagggacaacuggcaugguucaaaucgaccuugggugucuuuuaaucaaaacuuggauuaucaaauaggauacaucugcaguggaguguuuggugacaauccgcgucccgaagauggagagggcagcugcaauccagugacuguugauggagcaaacggaguaaaaggguuuucauacaaauaugauaaugguguuuggauaggaaggaccaaaaguaacagacuuagaaagggguuugagaugaucugggauccuaauggauggacaaauaccgacagugauuucucagugaaacaggauguuguagcaauaacugauuggucaggguacagcggaaguuucguccaacauccugaguuaacaggauuggacuguauaagaccuugcuucuggguugaguuagucagagggcugccuagagaaaauacaacaaucuggacuagugggagcagcauuucuuuuuguggcguuaauagugauacugcaaacuggucuuggccagacggugcugaguugccguucaccauugacaaguag

SEQ ID NO: 57958 - RNA, 1410 nt, Artificial Sequence
  derived and/or modified CDS sequence (wt) from neuraminidase__InfluenzaA__AJJ99677
augaauccaaaccaaaagauaauaaccauugguucggucuguaugacaauuggaauggcuaacuuaauauuacaaauuggaaacauaaucucaauauggauuagccacucaauucaacuugggaaucaaaaucagauugaaacaugcaaucaaagcgucauuacuuaugaaaacaacacuuggguaaaucagacauauguuaacaucagcaacaccaacuuugcugcuggacagucagugguuuccgugaaauuagcgggcaauuccucucucugcccuguuaguggaugggcuauauacaguaaagacaacaguauaagaaucgguuccaagggggauguguuugucauaagggaaccauucauaucaugcucccccuuggaaugcagaaccuucuucuugacucaaggggccuugcuaaaugacaaacauuccaauggaaccauuaaagacaggagcccauaucgaaccuuaaugagcuguccuauuggugaaguucccucuccauacaacucgagauuugagucagucgcuuggucagcaagugcuugucaugauggcaucaauuggcuaacaauuggaauuucuggcccagacaauggggcaguggcuguguuaaaguacaacggcauaauaacagacacuaucaagaguuggagaaacaauauauugagaacacaagagucugaaugugcauguguaaaugguucuugcuuuaccauaaugacugauggaccaagugauggacaggccucauacaagaucuucagaauagaaaagggaaagauaaucaaaucagucgaaaugaaugccccuaauuaucacuaugaggaaugcuccuguuauccugauucuagugaaaucacaugugugugcagggauaacuggcauggcucgaaucgaccgugggugucuuucaaccagaaucuggaauaucagauaggauacauaugcagugggauuuucggagacaauccacgcccuaaugauaagacaggcaguugugguccagugucgucuaauggagcaaauggaguaaaaggauuuucauucaaauacggcaaugguguuuggauagggagaacuaaaagcauuaguucaagaaaagguuuugagaugauuugggauccaaacggauggacugggacagacaauagcuucucaauaaagcaagauaucguaggaaugaaugaguggucaggauauagcgggaguuuuguucagcauccagaacuaacagggcuggacuguauaagaccuugcuucuggguugaacuaaucagagggcgacccaaagagaacacaaucuggacuagugggagcagcauauccuuuugugguguaaacaguggcacuguggguuggucuuggccagacggugcugaguugccauuuaccauugacaaguaa

SEQ ID NO: 57959 - RNA, 1410 nt, Artificial Sequence
  derived and/or modified CDS sequence (wt) from neuraminidase__InfluenzaA__AJJ99688
augaauccaaaccaaaagauaauaaccauugguucggucuguaugacaauuggaauggcuaacuuaauauuacaaauuggaaacauaaucucaauauggauuagccacucaauucaacuugggaaucaaaaucagauugaaacaugcaaucaaagcgucauuacuuaugaaaacaacacuuggguaaaucagacauauguuaacaucagcaacaccaacuuugcugcuggacagucagugguuuccgugaaauuagcgggcaauuccucucucugcccuguuaguggaugggcuauauacaguaaagacaacaguauaagaaucgguuccaagggggauguguuugucauaagggaaccauucauaucaugcucccccuuggaaugcagaaccuucuucuugacucaaggggccuugcuaaaugacaaacauuccaauggaaccauuaaagacaggagcccauaucgaaccuuaaugagcuguccuauuggugaaguucccucuccauacaacucgagauuugagucagucgcuuggucagcaagugcuugucaugauggcaucaauuggcuaacaauuggaauuucuggcccagacaauggggcaguggcuguguuaaaguacaacggcauaauaacagacacuaucaagaguuggagaaacaauauauugagaacacaagagucugaaugugcauguguaaaugguucuugcuuuaccauaaugaccgauggaccaagugauggacaggccucauacaagaucuucagaauagaaaagggaaagauaaucaaaucagucgaaaugaaugccccuaauuaucacuaugaggaaugcuccuguuauccugauucuagugaaaucacaugugugugcagggauaacuggcauggcucgaaucgaccgugggugucuuucaaccagaaucuggaauaucagauaggauacauaugcagugggauuuucggagacaauccacgcccuaaugauaagacaggcaguugugguccagugucgucuaauggagcaaauggaguaaaaggauuuucauucaaauacggcaaugguguuuggauagggagaacuaaaagcauuaguucaagaaaagguuuugagaugauuugggauccaaacggauggacugggacagacaauagcuucucaauaaagcaagauaucguaggaauaaaugaguggucaggauauagcgggaguuuuguucagcauccagaacuaacagggcuggacuguauaagaccuugcuucuggguugaacuaaucagagggcgacccaaagagaacacaaucuggacuagugggagcagcauauccuuuugugguguaaacaguggcacuguggguuggucuuggccagacggugcugaguugccauuuaccauugacaaguaa

SEQ ID NO: 57960 - RNA, 1410 nt, Artificial Sequence
  derived and/or modified CDS sequence (wt) from neuraminidase__InfluenzaA__AJJ99710
augaauccaaaccaaaagauaauaaccauugguucggucuguaugacaauuggaauggcuaacuuaauauuacaaauuggaaacauaaucucaauauggauuagccacucaauucaacuugggaaucaaagucagauugaaacaugcaaucaaagcgucauuacuuaugaaaacaacacuuggguaaaucagacauauguuaacaucagcaacaccaacuuugcugcuggacagucaguggucuccgugaaauuagcgggcaauuccucucucugcccuguuaguggaugggcuauauacaguaaagacaacaguauaagaaucgguuccaagggggauguguuugucauaagggaaccauucauaucaugcucccccuuggaaugcagaaccuucuucuugacucaaggggccuugcuaaaugacaaacauuccaauggaaccauuaaagacaggagcccauaucgaacccuaaugagcuguccuauuggugaaguucccucuccauacaacucaagauuugagucagucgcuuggucagcaagugcuugucaugauggcaucaauuggcuaacaauuggaauuucuggcccagacaauggggcaguggcuguguuaaaguacaacggcauaauaacagacacuaucaagaguuggagaaacaauauauugagaacacaagagucugaaugugcauguguaaaugguucuugcuuuaccauaaugaccgauggaccaagugauggacaggccucauacaagaucuucagaauagaaaagggaaagauagucaaaucagucgaaaugaaugccccuaauuaucacuaugaggaaugcuccuguuauccugauucuaguaaaaucacaugugugugcagggauaacuggcauggcucgaaucgaccgugggugucuuucaaccagaaucuggaauaucagauaggauacauaugcagugggauuuucggagacaauccacgcccuaaugauaagacaggcaguugugguccaguaucgucuaauggagcaaauggaguaaaaggauuuucauucaaauacggcaauggcguuuggauagggagaacuaaaagcauuaguucaagaaaagguuuugagaugauuugggacccaaacggauggacugggacagacaauaacuucucaauaaagcaagauaucguaggaauaaaugaguggucaggauauagcgggaguuuuguucagcauccagaacuaacagggcuggauuguauaagaccuugcuucuggguugaacuaaucagagggcgacccaaagagaacacaaucuggacuagcgggagcagcauauccuuuugugguguaaacagugacacuguggguuggucuuggccagacggugcugaguugccauuuaccauugacaaguaa

SEQ ID NO: 57961 - RNA, 1410 nt, Artificial Sequence
  derived and/or modified CDS sequence (wt) from neuraminidase__InfluenzaA__AJJ99721
augaauccaaaccaaaagauaauaaccauugguucggucugcaugacaauuggaauggcuaacuuaauauugcaaauuggaaacauaaucucaauauggauuagccacucaauucaacuuggaaaucaaagucagauugaaacaugcaaucaaagcgucauuacuuaugaaaacaacacuuggguaaaucagacauauguuaacaucagcaacaccaacuuugcugcuggacagucagugguuuccgugaaauuagcgggcaauuccucucucugcccuguuaguggaugggcuauauacaguaaagacaacaguauaagaaucgguuccaagggggauguguuugucauaagggaaccauucauaucaugcucccccuuggaaugcagaaccuucuucuugacucaaggggccuugcuaaaugacaaacauuccaauggaaccauuaaagacaggagcccauaucgaacccuaaugagcuguccuauuggugaaguucccucuccauacaacucaagguuugagucagucgcuuggucagcaagugcuugucaugauggcaucaauuggcuaacaauuggaauuucuggcccagacaauggggcaguggcuguguuaaaguacaacggcauaauaacagacacuaucaagaguuggagaaacaauauauugagaacacaagagucugaaugugcauguguaaaugguucuugcuuuaccauaaugaccgauggaccaagugauggacaggccucauacaagaucuucagaauagaaaagggaaagauagucaaaucagucgaaaugaaugccccuaauuaucacuaugaggaaugcuccuguuauccugauucuagugaaaucacaugugugugcagggauaacuggcauggcucgaaucgaccgugggugucuuucaaccagaaucuggaauaucagauaggauacauaugcagugggauuuucggagacaauccacgcccuaaugauaagacaggcaguugugguccaguaucgucuaauggagcaaauggaguaaaaggauuuucauucaaauacggcaaugguguuuggauagggagaacuaaaagcauuaguucaagaaaagguuuugagaugauuugggauccaaauggauggacugggacagacaauaacuucucaauaaagcaagauaucguaggaauaaaugaguggucaggauauagcgggaguuuuguucagcauccagaacuaacagggcuggauuguauaagaccuugcuucuggguugaacuaaucagagggcgacccaaagagaacacaaucuggacuagcgggagcagcauauccuuuugugguguaaacagugacacuguggguuggucuuggccagacggugcugaguugccauuuaccauugacaaguaa

SEQ ID NO: 57962 - RNA, 1410 nt, Artificial Sequence
  derived and/or modified CDS sequence (wt) from neuraminidase__InfluenzaA__AJJ99732
augaauccaaaccaaaagauaauaaccauugguucggucugcaugacaauuggaauggcuaacuuaauauuacaaauuggaaacauaaucucaauauggauuagccacucaauucaacuuggaaaucaaagucagauugaaacaugcaaucaaagcgucauuacuuaugaaaacaacacuuggguaaaucagacauauguuaacaucagcaacaccaacuuugcugcuggacagucagugguuuccgugaaauuagcgggcaauuccucucucugcccuguuaguggaugggcuauauacaguaaagacaacaguauaagaaucgguuccaagggggauguguuugucauaagggaaccauucauaucaugcucccccuuggaaugcagaaccuucuucuugacucaaggggccuugcuaaaugacaaacauuccaauggaaccauuaaagacaggagcccauaucgaacccuaaugagcuguccuauuggugaaguucccucuccauacaacucaagauuugagucagucgcuuggucagcaagugcuugucaugauggcaucaauuggcuaacaauuggaauuucuggcccagacaauggggcaguggcuguguuaaaguacaacggcauaauaacagacacuaucaagaguuggagaaacaauauauugagaacacaagagucugaaugugcauguguaaaugguucuugcuuuaccauaaugaccgauggaccaagugauggacaggccucauacaagaucuucagaauagaaaagggaaagauagucaaaucagucgaaaugaaugccccuaauuaucacuaugaggaaugcuccuguuauccugauucuagugaaaucacaugugugugcagggauaacuggcauggcucgaaucgaccgugggugucuuucaaccagaaucuggaauaucagauaggauacauaugcagugggauuuucggagacaauccacgcccuaaugauaagacaggcaguugugguccaguaucgucuaauggagcaaauggaguaaaaggauuuucauucaaauacggcaaugguguuuggauagggagaacuaaaagcauuaguucaagaaaagguuuugagaugauuugggauccaaauggauggacugggacagacaauaacuucucaauaaagcaagauaucguaggaauaaaugaguggucaggauauagcgggaguuuuguucagcauccagaacuaacagggcuggauuguauaagaccuugcuucuggguugaacuaaucagagggcgacccaaagagaacacaaucuggacuagcgggagcagcauauccuuuugugguguaaacagugacacuguggguuggucuuggccagacggugcugaguugccauuuaccauugacaaguaa

SEQ ID NO: 57963 - RNA, 1410 nt, Artificial Sequence; identical to SEQ ID NO: 52969
  derived and/or modified CDS sequence (wt) from neuraminidase__InfluenzaA__AJJ99743

SEQ ID NO: 57964 - RNA, 1410 nt, Artificial Sequence
  derived and/or modified CDS sequence (wt) from neuraminidase__InfluenzaA__AJJ99754
augaauccaaaccaaaagauaauaaccauugguucggucuguaugacaauuggaauggcuaacuuaauacuacaaauuggaaacauaaucucaauauggauuagccacucaauucaacuugggaaucaaaaucagauugaaacaugcaaucaaagcgucauuacuuaugaaaacaaaacuuggguaaaucagacauauguuaacaucagcaacaccaacuuugcugcuggacagucagugguuuccgugaaauuagcgggcaauuccucucucugcccuguuaguggaugggcuauauacaguaaagacaacaguauaagaaucgguuccaagggggauguguuugucauaagggaaccauucauaucaugcucccccuuggaaugcagaaccuucuucuugacucaaggggccuugcuaaaugacaaacauuccaauggaaccauuaaagacaggagcccauaucgaacccuaaugagcuguccuauuggugaaguucccucuccauacaacucaagauuugagucagucgcuuggucagcaagugcuugucaugauggcaucaauuggcuaacaauuggaauuucuggcccagacaauggggcaguggcuguguuaaaguacaacggcauaauaacagacacuaucaagaguuggagaaacaauauauugagaacacaagagucugaaugugcauguguaaaugguucuugcuuuacuguaaugaccgauggaccaagugauggacaggccucauacaagaucuucagaauagaaaagggaaagauagucaaaucagucgaaaugaaugccccuaauuaucacuaugaggaaugcuccuguuauccugauucuagugaaaucacaugugugugcagggauaacuggcauggcucgaaucgaccgugggugucuuucaaccagaaucuggaauaucagauaggauacauaugcagugggauuuucggagacaauccacgcccuaaugauaagacaggcaguugugguccaguaucgucuaauggagcaaauggaguaaaaggauuuucauucaaauacggcaaugguguuuggauagggagaacuaaaagcauuaguucaagaaacgguuuugagaugauuugggacccgaacggauggacugggacagacaauaacuucucaauaaagcaagauaucguaggaauaaaugaauggucaggauauagcgggaguuuuguucagcauccagaacuaacagggcuggauuguauaagaccuugcuucuggguugaacuaaucagagggcgacccaaagagaacacaaucuggacuagcgggagcagcauauccuuuugugguguaaacagugacacuguggguuggucuuggccagacggugcugaguugccauuuaccauugacaaguaa

SEQ ID NO: 57965 - RNA, 1410 nt, Artificial Sequence
  derived and/or modified CDS sequence (wt) from neuraminidase__InfluenzaA__AJJ99765
augaauccaaaccaaaagauaauaaccauugguucggucuguaugacaauuggaauggcuaacuuaauauuacaaauuggaaacauaaucucaauauggauuagccacucaauucaacuugggaaucaaaaucagauugaaacaugcaaucaaagcgucauuacuuaugaaaacaacacuuggguaaaucagacauauguuaacaucagcaacaccaacuuugcuacuggacagucagugguuuccgugaaauuagcgggcaauuccucucucugcccuguuaguggaugggcuauauacaguaaagacaacaguauaagaaucgguuccaagggggauguguuugucauaagggaaccauucauaucaugcucccccuuggaaugcagaaccuucuucuugacucaaggggccuugcuaaaugacaaacauuccaauggaaccauuaaggacaggaguccauaucgaacccuaaugagcuguccuauuggugaaguucccucuccauacaacucaagauuugagucagucgcuuggucagcaagugcuugucaugauggcaucaauuggcuaacaauuggaauuucuggcccagacaauggggcaguggcuguguuaaaguacaacggcauaauaacagacacuaucaagaguuggagaaacaauauauugagaacacaagagucugaaugugcauguguaaaugguucuugcuuuacuguaaugaccgauggaccaagugauggacaggccucauacaagaucuucagaauagaaaagggaaagauagucaaaucagucgaaaugaaugccccuaauuaucacuaugaggaaugcuccuguuauccugauucuagugaaaucacaugugugugcagggauaacuggcauggcucgaaucgaccguggguguccuucaaccagaaucuggaauaucagauaggauacauaugcagugggauuuucggagacaauccacgcccuaaugauaagacaggcaguugugguccaguaucgucuaauggagcaaauggaguaaaaggauuuucauucaaauacggcaaugguguuuggauagggagaacuaaaagcauuaguucaagaaacgguuuugagaugauuugggauccgaacggauggacugggacagacaauaacuucucaauaaagcaagauaucguaggaauaaaugaguggucaggauauagcgggaguuuuguucagcauccagaacuaacagggcuggauuguauaagaccuugcuucuggguugaacuaaucagagggcgacccaaagagaacacaaucuggacuagcgggagcagcauauccuuuugugguguaaacagugacacuguggguuggucuuggccagacggugcugaguugccauuuaccauugacaaguaa

SEQ ID NO: 57966 - RNA, 1413 nt, Artificial Sequence
  derived and/or modified CDS sequence (wt) from neuraminidase__InfluenzaA__AJJ99777
augaacccaaaucaaaagauaauaaccauuggaucaaucaguauagcaaucggaauaauuagucuaauauugcaaauaggaaauauuauuucaauaugggcuagucacucaauccaaacugggagucaaaacaacacuggaauaugcaaccaaagaaucaucacauaugaaaacagcaccugggugaaucacacauauguuaauauuaacaacacuaauguuguugcuggagaggacaaaacaucagugacauuggccggcaauucaucucuuuguucuaucaguggaugggcuauauacacaaaagacaacagcauaagaauuggcuccaaaggagauguuuuugucauaagagaacccuucauaucauguucucacuuggaaugcagaaccuuuuuucugacccaaggcgcucuauuaaaugacaaacauucaaaugggaccguaaaggacagaaguccuuauagggccuuaaugagcuguccucuaggugaagcuccguccccauacaauucaaaguucgaaucaguugcauggucagcaagcgcaugccaugauggcaugggcugguuaacaaucggaauuucugguccagacaauggagcuguggcuguacuaaaauacaacggaauaauaacuggaaccauaaaaaguuggaaaaagcaaauauuaagaacacaagagucugaaugugucuguaugaacgggucauguuucaccauaaugaccgauggcccgaguaauaaggccgccucguacaaaauuuucaagaucgaaaaggggaagguuacuaaaucaauagaguugaaugcacccaauuuuuauuaugaggaaugcuccuguuacccagauacuggcauagugauguguguaugcagggacaacuggcaugguucaaaccgaccuugggugucuuuuaaucaaaacuuggauuaucaaauaggauacaucugcaguggaguguuuggugacaauccgcgucccgaagauggggagggcagcugcaauccagugacuguugauggagcaaacggaguaaaaggguuuucauacaaauaugguaaugguguuuggauagggaggaccaaaaguaacagacuuagaaagggguuugagaugauuugggauccuaauggauggacaaauaccgacagugauuucucagugaaacaggauguuguagcaauaacugauuggucaggguacagcggaaguuucguccaacauccugaguuaacaggauuggacuguauaagaccuugcuucuggguugaguuggucagagggcugccuagagaaaauacagcagucuggacuagugggagcagcauuucuuuuuguggcguuaauagugauacugcaaacuggucuuggccagacggugcugaguugccguucaccauugacaaguag

SEQ ID NO: 57967 - RNA, 1410 nt, Artificial Sequence; identical to SEQ ID NO: 48750
  derived and/or modified CDS sequence (wt) from neuraminidase__InfluenzaA__AJJ99788

SEQ ID NO: 57968 - RNA, 1413 nt, Artificial Sequence
  derived and/or modified CDS sequence (wt) from neuraminidase__InfluenzaA__AJJ99800
augaacccaaaucaaaagauaauaaccauuggaucaaucaguauagcaaucggaauaauuagucuaauguugcaaauaggaaauauuauuucaauaugggcuagucacucaauucaaacugggagucaaaacaacacuggaauaugcaaccaaaggaucaucacauaugaaaacagcaccugggugaaucacacauauguuaauauuaacaacacuaauguuguugcuggagaggacaaaacaucagugacauuggccggcaauucaucucuuuguucuaucaguggaugggcuauauacacaaaagacaacagcauaagaauuggcuccaaaggagauguuuuugucauaagagaaccuuucauaucauguucucacuuggaaugcagaaccuuuuuucugacccaaggcgcucuauuaaaugacaaacauucaaaugggaccguaaaggacagaaguccuuauagggccuuaaugagcuguccucuaggugaagcuccguccccauacaauucaaaguucgaaucaguugcauggucagcaagcgcaugccaugauggcaugggcugguuaacaaucggaauuucugguccagacaauggagcuguggcuguacuaaaauacaacggaauaauaacuggaaccauaaaaaguuggaaaaagcaaauauuaagaacacaagagucugaaugugucuguaugaacgggucauguuucaccauaaugaccgauggcccgaguaauaaggccgccucguacaaaauuuucaagaucgaaaaggggaagguuacuaaaucaauagaguugaaugcacccaauuuuuauuaugaggaaugcuccuguuacccagauacuggcauagugauguguguaugcagggacaacuggcaugguucaaaucgaccuugggugucuuuuaaucaaaacuuggauuaucaaauaggauacaucugcaguggaguguuuggugacaauccgcgucccgaagauggagagggcagcugcaauccagugacuguugauggagcaaacggaguaaaaggguuuucauacaaauaugguaaugguguuuggauagggaggaccaaaaguaacagacuuagaaagggguuugagaugauuugggauccuaauggauggacaaauaccgacagugauuucucagugaaacaggauguuguagcaauaacugauuggucaggguacagcggaaguuucguccaacauccugaguuaacaggauuggacuguauaagaccuugcuucuggguugaguuagucagagggcugccuagagaaaauacaacaaucuggacuagugggagcagcauuucuuuuuguggcguuaauagugauacugcaaacuggucuuggccagacggugcugaguugccguucaucauugacaaguag

SEQ ID NO: 57969 - RNA, 1413 nt, Artificial Sequence
  derived and/or modified CDS sequence (wt) from neuraminidase__InfluenzaA__AJJ99812
augaacccaaaucaaaagauaauaaccauuggaucaaucaguauagcaaucggaauaauuagucuaauguugcaaauaggaaauauuauuucaauaugggcuagucacucaauccaaacuggaagucaaaacaacacuggaauaugcaaccaaagaaucaucacauaugaaaacagcaccugggugaaucacacauauguuaauauuaacaacacuaauguuguugcuggagaggacaaaacuucagugacauuggccggcaauucaucccuuuguucuaucaguggaugggcuauauacacaaaagacaacagcauaagaauuggcuccaaaggagauguuuuugucauaagagaaccuuucauaucauguucucacuuggaaugcagaaccuuuuuucugacccaaggcgcucuauuaaaugacaaacauucaaaugggaccguaaaggacagaaguccuuauagggccuuaaugagcuguccucuaggugaagcuccguccccauacaauucaaaguucgaaucaguugcauggucagcaagcgcaugccaugauggcaugggcugguuaacaaucggaauuucugguccagacaauggagcuguggcuguacuaaaauacaacggaauaauaacuggaaccauaaaaaguuggaaaaagcaaauauuaagaacacaagagucugaaugugucuguaugaacgggucauguuucaccauaaugaccgauggcccgaguaauaaggccgccucguacaaaauuuucaagaucgaaaaggggaagguuacuaaaucaauagaguugaaugcacccaauuuuuauuaugaggaaugcuccuguuacccagacacuggcauagugauguguguaugcagggacaacuggcaugguucaaaucgaccuugggugucuuuuaaucaaaacuuggauuaucaaauaggauacaucugcaguggaguguuuggugacaauccgcgucccgaagauggagagggcagcugcaauccagugacuguugauggagcaaacggaguaaaaggguuuucauacaaauaugguaaugguguuuggauaggaaggaccaaaaguaacagacuuagaaagggguuugagaugauuugggauccuaauggauggacaaauaccgacagugauuucucagugaaacaggauguuguagcaauaacugauuggucaggguacagcggaaguuucguccaacauccugaguuaacaggauuggacuguauaagaccuugcuucuggguugaguuagucagagggcugccuagagaaaauacaacaaucuggacuagugggagcagcauuuccuuuuguggcguuaauagugauacugcaaacuggucuuggccagacggugcugaguugccguucaccauugacaaguag

SEQ ID NO: 57970 - RNA, 1413 nt, Artificial Sequence
  derived and/or modified CDS sequence (wt) from neuraminidase__InfluenzaA__AJJ99824
augaacccaaaucaaaagauaauaaccauuggaucaaucaguauagcaaucggaacaauuagucuaauguugcaaauaggaaauauuauuucaauaugggcuagucacucaauccaaacuggaagucaaaacaacacuggaauaugcaaccaaagaaucaucacauaugaaaacagcaccugggugaaucacacauaugucaauauuaacaacacuaauguuguugcuggagaggacaaaacuucagugacauuggccggcaauucaucucuuuguucuaucaguggaugggcuauauacacaaaagacaacagcauaagaauuggcuccaaaggagauguuuuugucauaagagaaccuuucauaucauguucucacuuggaaugcagaaccuuuuuucugacccaaggcgcucuauuaaaugacaaacauucaaaugggaccguaaaggacagaaguccuuauagggccuuaaugagcuguccucuaggugaagcuccguccccauacaauucaaaguucgaaucaguugcauggucagcaagcgcaugccaugauggcaugggcugguuaacaaucggaauuucugguccagacaauggagcuguggcuguacuaaaauacaacggaauaauaacuggaaccauaaaaaguuggaaaaagcaaauauuaagaacacaagagucugaaugugucuguaugaacgggucauguuucaccauaaugaccgauggcccgaguaauaaggccgccucguacaaaauuuucaagaucgaaaaggggaagguuacuaaaucaauagaguugaaugcacccaauuuucauuaugaggaauguuccuguuacccagacacuggcauagugauguguguaugcagggacaacuggcaugguucaaaucgaccuugggugucuuuuaaucaaaacuuggauuaucaaauaggauacaucugcaguggaguguuuggugacaauccgcgucccgaagauggagagggcagcugcaauccagugacuguugauggagcaaacggaguaaaaggguuuucauacaaauaugauaaugguguuuggauaggaaggaccaaaaguaacagacuuagaaagggguuugagaugauuugggauccuaauggauggacaaauaccgacagugauuucucagugaaacaggauguuguagcaauaacugauuggucaggguacagcggaaguuucguccaacauccugaguuaacaggauuggacuguauaagaccuugcuucuggguugaguuagucagagggcugccuagagaaaauacaacaaucuggacuagugggagcagcauuucuuuuuguggcguuaauagugauacugcaaacuggucuuggccagacggugcugaguugccuuucaccauugacaaguag

SEQ ID NO: 57971 - RNA, 1410 nt, Artificial Sequence; identical to SEQ ID NO: 57959
  derived and/or modified CDS sequence (wt) from neuraminidase__InfluenzaA__AJJ99835

SEQ ID NO: 57972 - RNA, 1410 nt, Artificial Sequence
  derived and/or modified CDS sequence (wt) from neuraminidase__InfluenzaA__AJJ99846
augaauccaaaccaaaagauaauaaccauugguucggucugcaugacaauuggaauggcuaacuuaauauugcaaauuggaaacauaaucucaauauggauuagccacucaauucaacuuggaaaucaaagucagauugaaacaugcaaucaaagcgucauuacuuaugaaaacaacacuuggguaaaucagacauauguuaacaucagcaacaccaacuuugcugcuggacagucagugguuuccgugaaauuagcgggcaauuccucucucugcccuguuaguggaugggcuauauacaguaaagacaacaguauaagaaucgguuccaagggggauguguuugucauaagggaaccauucauaucaugcucccccuuggaaugcagaaccuucuucuugacucagggggccuugcuaaaugacaaacauuccaauggaaccauuaaagacaggagcccauaucgaacccuaaugagcuguccuauuggugaaguucccucuccauacaacucaagauuugagucagucgcuuggucagcaagugcuugucaugauggcaucaauuggcuaacaauuggaauuucuggcccagacaauggggcaguggcuguguuaaaguacaacggcauaauaacagacacuaucaagaguuggagaaacaauauauugagaacacaagagucugaaugugcauguguaaaugguucuugcuuuaccauaaugaccgauggaccaagugauggacaggccucauacaagaucuucagaauagaaaagggaaagauagucaaaucagucgaaaugaaugccccuaauuaucacuaugaggaaugcuccuguuauccugauucuagugaaaucacaugugugugcagggauaacuggcauggcucgaaucgaccgugggugucuuucaaccagaaucuggaauaucagauaggauacauaugcagugggauuuucggagacaauccacgcccuaaugauaagacaggcaguugugguccaguaucgucuaauggagcaaauggaguaaaaggauuuucauucaaauacggcaaugguguuuggauagggagaacuaaaagcauuaguucaagaaaagguuuugagaugauuugggauccaaauggauggacugggacagacaauaacuucucaauaaagcaagauaucguaggaauaaaugaguggucaggauauagcgggaguuuuguucaacauccagaacuaacagggcuggauuguauaagaccuugcuucuggguugaacuaaucagagggcgacccaaagagaacacaaucuggacuagcgggagcagcauauccuuuugugguguaaacagugacacuguggguuggucuuggccagacggugcugaguugccauuuaccauugacaaguaa

SEQ ID NO: 57973 - RNA, 1410 nt, Artificial Sequence; identical to SEQ ID NO: 52602
  derived and/or modified CDS sequence (wt) from neuraminidase__InfluenzaA__AJJ99857

SEQ ID NO: 57974 - RNA, 1410 nt, Artificial Sequence
  derived and/or modified CDS sequence (wt) from neuraminidase__InfluenzaA__AJJ99868
augaauccaaaccaaaagauaauaaccauugguucggucuguaugacaauuggaauggcuaacuuaauauuacaaauuggaaacauaaucucaauauggauuagccacucaauucaacuugggaaucaaaaucagauugaaacaugcaaucaaagcgucauuacuuaugaaaacaacacuuggguaaaucagacauauguuaacaucagcaacaccaacuuugcugcuggacagucagugguuuccgugaaauuagcgggcaauuccucucucugcccuguuaguggaugggcuauauacaguaaagacaacaguauaaggaucgguuccaagggggauguguuugucauaagggaaccauucauaucaugcucccccuuggaaugcagaaccuucuucuugacucaaggggccuugcuaaaugacaaacauuccaauggaaccauuaaagacaggagcccauaucgaacccuaaugagcuguccuauuggugaaguucccucuccauacaacucaagauuugagucagucgcuuggucagcaagugcuugucaugauggcaucaauuggcuaacaauuggaauuucuggcccagacaauggggcaguggcuguguuaaaguacaacggcauaauaacagacacuaucaagaguuggagaaacaauauauugagaacacaagagucugaaugugcauguguaaaugguucuugcuuuacuguaaugaccgauggaccaagugauggacaggccucauacaagaucuucagaauagaaaagggaaagauagucaaaucagucgaaaugaaugccccuaauuaucacuaugaggaaugcuccuguuauccugauucuaguguaaucacaugugugugcagggauaacuggcauggcucgaaucgaccgugggugucuuucaaccagaaucuggaauaucagauaggauacauaugcagugggauuuucggagacaauccacgcccuaaugauaagacaggcaguugugguccaguaucgucuaauggagcaaauggaguaaaaggauuuucauucaaauacggcaaugguguuuggauagggagaacuaaaagcauuaguucaagaaacgguuuugagaugauuugggauccgaacggauggacuggaacagacaauaacuucucaauaaagcaaaauaucguaggaauaaaugaguggucaggauauagcgggaguuuuguccagcauccggaacuaacagggcuggauuguauaagaccuugcuucuggguugaacuaaucagagggcgacccaaagagaacacaaucuggacuagcgggagcagcauauccuuuugugguguaaacagugacacuguggguuggucuuggccagacggugcugaguugccauuuaccauugacaaguaa

SEQ ID NO: 57975 - RNA, 1410 nt, Artificial Sequence; identical to SEQ ID NO: 54858
  derived and/or modified CDS sequence (wt) from neuraminidase__InfluenzaA__AJJ99879

SEQ ID NO: 57976 - RNA, 1410 nt, Artificial Sequence; identical to SEQ ID NO: 48750
  derived and/or modified CDS sequence (wt) from neuraminidase__InfluenzaA__AJJ99890

SEQ ID NO: 57977 - RNA, 1410 nt, Artificial Sequence
  derived and/or modified CDS sequence (wt) from neuraminidase__InfluenzaA__AJJ99901
augaauccaaaccaaaagauaauaaccauugguucggucuguaugacaauuggaauggcuaacuuaauauuacaaauuggaaacauaaucucaauauggauuagccacucaauucaacuugggaaucaaaaucagauugaaacaugcaaccaaagcgucauuacuuaugaaaacaacacuuggguaaaucagacauauguuaacaucagcaacaccaacuuugcagcuggacagucagugguuuccgugaaauuagcgggcaauuccucucucugcccuguuaguggaugggcuauauacaguaaagacaacaguauaagaaucgguuccaagggggauguguuugucauaagggaaccauucauaucaugcucccccuuggaaugcagaaccuucuucuugacucaaggggccuugcuaaaugacaaacauuccaauggaaccauuaaagacaggagcccauaucgaaccuuaaugagcuguccuauuggugaaguucccucuccauacaacucaagauuugagucagucgcuuggucagcaagugcuugucaugauggcaucaauuggcuaacaauuggaauuucuggcccagacaauggggcaguggcuguguuaaaguacaacggcauaauaacagacacuaucaaaaguuggagaaacaauauauugagaacacaagagucugaaugugcauguguaaaugguucuugcuuuaccauaaugaccgauggaccaagugauggacaggccucauacaagaucuucagaauagaaaagggaaagauagucaaaucagucgaaaugaaugccccuaauuaucacuaugaggaaugcuccuguuauccugauucuagugaaaucacaugugugugcagggauaacuggcauggcucgaaucgaccgugggugucuuucaaccagaaucuggaauaucagauaggauacauaugcagugggauuuucggagacaauccacgcccuaaugauaagacaggcaguugugguccaguaucgucuaauggagcaaauggaguaaaaggauuuucauucaaauacggcaaugguguuuggauagggagaacuaaaagcauuaguucaagaaaagguuuugagaugauuugggauccaaacggauggacugggacagacaauagcuucucaauaaagcaagauaucguaggaauaaaugaguggucaggauauagcgggaguuuuguucagcauccagaacuaacagggcuggacuguauaagaccuugcuucuggguugaacuaaucagagggcgacccaaagagaacacaaucuggacuagcgggagcagcauaucuuuuugugguguagacaguggcacuguggguuggucuuggccagacggugcugaguugccauuuaccauugacaaguaa

SEQ ID NO: 57978 - RNA, 1410 nt, Artificial Sequence
  derived and/or modified CDS sequence (wt) from neuraminidase__InfluenzaA__AJJ99912
augaauccaaaccaaaagauaauaaccauugguucggucuguaugacaauuggaauggcuaacuuaauauuacaaauuggaaacauaaucucaauauggauuagccacucaauucaacuugggaaucaaagucagauugaaacaugcaaucaaagcgucauuacuuaugaaaacaacacuuggguaaaucagacauauguuaacaucagcaacaccaacuuugcugcuggacagucaguggucuccgugaaauuagcgggcaauuccucucucugcccuguuaguggaugggcuauauacaguaaagacaacaguauaagaaucgguuccaagggggauguguuugucauaagggaaccauucauaucaugcucccccuuggaaugcagaaccuucuucuugacucaaggggccuugcuaaaugacaaacauuccaauggaaccauuaaagacaggagcccauaucgaacccuaaugagcuguccuauuggugaaguucccucuccauacaacucaagauuugagucagucgcuuggucagcaagugcuugucaugauggcaucaauuggcuaacaauuggaauuucuggcccagacaauggggcaguggcuguguuaaaguacaauggcauaauaacagacacuaucaagaguuggagaaacaauauauugagaacacaagagucugaaugugcauguguaaaugguucuugcuuuaccauaaugaccgauggaccaagugauggacaggccucauacaagaucuucagaauagaaaagggaaagauagucaaaucagucgaaaugaaugccccuaauuaucacuaugaggaaugcuccuguuauccugauucuaguaaaaucacaugugugugcagggauaacuggcauggcucgaaucgaccgugggugucuuucaaccagaaucuggaauaucagauaggauacauaugcagugggauuuucggagacaauccacgcccuaaagauaagacaggcaguugugguccaguaucgucuaauggagcaaauggaguaaaaggauuuucauucaaauacggcaauggcguuuggauagggagaacuaaaagcauuaguucaagaaaagguuuugagaugauuugggacccaaacggauggacugggacagacaauaacuucucaauaaagcaagauaucguaggaauaaaugaguggucaggauauagcgggaguuuuguucagcauccagaacuaacagggcuggauuguauaagaccuugcuucuggguugaacuaaucagagggcgacccaaagagaacacaaucuggacuagcgggagcagcauauccuuuugugguguaaacagugacacuguggguuggucuuggccagacggugcugaguugccauuuaccauugacaaguaa

SEQ ID NO: 57979 - RNA, 1410 nt, Artificial Sequence
  derived and/or modified CDS sequence (wt) from neuraminidase__InfluenzaA__AJJ99923
augaauccaaaccaaaagauaauaaccauugguucggucuguaugacaauuggaauggcuaacuuaauauuacaaauuggaaacauaaucucaauauggauuagccacucaauucaacuugguaaucaaagucagauugaaacaugcaaucaaagcgucauuacuuaugaaaacaacacuuggguaaaucagacauauguuaacaucagcaacaccaacuuugcugcuggacagucagugguuuccgugaaauuagcgggcaauuccucucucugcccuguuaguggaugggcuauauacaguaaagacaacaguauaagaaucgguuccaagggggauguguuugucauaagggaaccauucauaucaugcucccccuuggaaugcagaaccuucuucuugacucaaggggccuugcuaaaugacaaacauuccaauggaaccauuaaagacaggagcccauaucgaacccuaaugagcuguccuauuggugaaguucccucuccauacaacucaagauuugagucagucgcuuggucagcaagugcuugucaugauggcaucaauuggcuaacaauaggaauuucuggcccagacaauggggcaguggcuguguuaaaguacaacggcauaauaacagacacuaucaagaguuggagaaacaauauauugagaacacaagagucugaaugugcauguguaaaugguucuugcuuuaccauaaugaccgauggaccaagugauggacaggccucauacaagaucuucagaauagaaaagggaaagauagucaaaucagucgaaaugaaugccccuaauuaucacuaugaggaaugcuccuguuauccugauucuagugaaaucacaugugugugcagggauaacuggcauggcucgaaucgaccgugggugucuuucaaccagaaucuggaauaucagauaggauacauaugcagugggauuuucggagacaauccacgcccuaaugauaagacaggcaguugugguccaguaucgucuaauggagcaaauggaguaaaaggauuuucauucaaauacggcaaugguguuuggauagggagaacuaaaagcauuaguucaagaaaagguuuugagaugauuugggauccaaauggauggacugggacagacaauaacuucucaauaaagcaagauaucguaggaauaaaugaguggucaggauauagcgggaguuuuguucagcauccagaacuaacagggcuggauuguauaagaccuugcuucuggguugaacuaaucagagggcgacccaaagagaacacaaucuggacuagcgggagcagcauauccuuuugugguguaaacagugacacuguggguuggucuuggccagacggugcugaguugccauuuaccauugacaaguaa

SEQ ID NO: 57980 - RNA, 1410 nt, Artificial Sequence; identical to SEQ ID NO: 52817
  derived and/or modified CDS sequence (wt) from neuraminidase__InfluenzaA__AJJ99934

SEQ ID NO: 57981 - RNA, 1410 nt, Artificial Sequence; identical to SEQ ID NO: 52602
  derived and/or modified CDS sequence (wt) from neuraminidase__InfluenzaA__AJJ99945

SEQ ID NO: 57982 - RNA, 1410 nt, Artificial Sequence
  derived and/or modified CDS sequence (wt) from neuraminidase__InfluenzaA__AJJ99956
augaauccaaaucaaaagauaauaaccauugguucggucuguaugacaauuggaauggcuaacuuaauauuacaaauuggaaacauaaucucaauauggauuagccacucaauucaacuugggaaucaaaaucagauugaaacaugcaaucaaagcgucauuacuuaugaaaacaacacuuggguaaaucagacauauguuaacaucagcaacaccaacuuugcugcuggacagucagugguuuccgugaaauuagcgggcaauuccucucucugcccuguuaguggaugggcuauauacaguaaagacaacaguauaagaaucgguuccaagggggauguguuugucauaagggaaccauucauaucaugcuccccccuggaaugcagaaccuucuucuugacucaaggggccuugcuaaaugacaaacauuccaauggaaccauuaaagacaggagcccauaucgaacccuaaugagcuguccuauuggugaaguucccucuccauacaacucaagauuugagucagucgcuuggucagcaagugcuugucaugauggcaucaauuggcuaacaauuggaauuucuggcccagacaauggggcaguggcuguguuaaaguacaacggcauaauaacagacacuaucaagaguuggagaaacaauauauugagaacacaagagucugaaugugcauguguaaaugguucuugcuuuacuguaaugaccgauggaccaagugauggacaggccucauacaagaucuucagaauagaaaagggaaagauagucaaaucagucgaaaugaaugccccuaauuaucacuaugaggaaugcuccuguuauccugauucuagugaaaucacaugugugugcagggauaacuggcauggcucgaaucgaccgugggugucuuucaaccagaaucuggaauaucagauaggauacauaugcagugggauuuucggagacaauccacgcccuaaugauaagacaggcaguugugguccaguauugucuaauggagcaaauggaguaaaaggauuuucauucaaauacggcaaugguguuuggauagggagaacuaaaagcauuaguucaagaaacgguuuugagaugauuugggauccgaacggauggacugggacagacaauaacuucucaauaaagcaagauaucguaggaauaaaugaguggucaggauauagcgggaguuuuguucagcauccagaacuaacagggcuggauuguauaagaccuugcuucuggguugaacuaaucagagggagacccaaagagaacacaaucuggacuagcgggagcagcauauccuuuugugguguaaacagugacacuguggguuggucuuggccagacggugcugaguugccguuuaccauugacaaguaa

SEQ ID NO: 57983 - RNA, 1410 nt, Artificial Sequence; identical to SEQ ID NO: 49794
  derived and/or modified CDS sequence (wt) from neuraminidase__InfluenzaA__AJJ99967

SEQ ID NO: 57984 - RNA, 1413 nt, Artificial Sequence
  derived and/or modified CDS sequence (wt) from neuraminidase__InfluenzaA__AJJ99991
augaacccaaaucaaaagauaauaaccauuggaucaaucaguauagcaaucggaauaaucagucuaauguugcaaauaggaaauauuauuucaauaugggcuagucacucaauccaaacuggaagucaaaacaacacuggaauaugcaaccaaagaaucaucacauaugaaaacugcaccugggugaaucacacauauguuaauauuaacaacacuaauguuguugcuggagaggacaaaacuucagugacauuggccggcaauucaucucuuuguucuaucaguggaugggcuauauacacaaaagacaacagcauaagaauuggcuccaaaggagauguuuuugucauaagagaaccuuucauaucauguucucacuuggaaugcagaaccuuuuuucugacccaaggcgcucuauuaaaugacaaacauucaaaugggaccguaaaggacagaaguccuuauagggccuuaaugagcuguccacuaggugaagcuccguccccauacaauucaaaguucgaaucaguugcauggucagcaagcgcaugccaugauggcaugggcugguuaacaaucggaauuucugguccagacaauggagcuguggcuguacuaaaauacaacggaauaauaacuggaaccauaaaaaguuggaaaaagcaaauauuaagaacacaagagucugaaugugucuguaugaacgggucauguuucaccauaaugaccgauggcccgaguaauaaggccgccucguacaaaauuuucaagaucgaaaaggggaagguuacuaaaucaauagaguugaaugcacccaauuuucauuaugaggaauguuccuguuacccagacacuggcauagugauguguguaugcagggacaauuggcaugguucaaaucgaccuugggugucuuuuaaucaaaacuuggauuaucaaauaggauacaucugcaguggaguguucggugacaauccgcgucccgaagauggagagggcagcugcaauccagugacuguugauggagcaaacggaguaaaaggguuuucauacaaauaugauaaugguguuuggauaggaaggaccaaaaguaacagacuuagaaagggguuugagaugauuugggauccuaauggauggacaaauaccgacagugauuucucagugaaacaggauguuguagcaauaacugauuggucaggguacagcggaaguuucguccaacauccugaguuaacaggauuggacuguauaagaccuugcuucuggguugaguuagucagagggcugccuagagaaaauacaacaaucuggacuagugggagcagcauuucuuuuuguggcguuaauagugauacugcaaacuggucuuggccagacggugcugaguugccguucaccauugacaaguag

SEQ ID NO: 57985 - RNA, 1410 nt, Artificial Sequence
  derived and/or modified CDS sequence (wt) from neuraminidase__InfluenzaA__AJK00003
augaauccaaaccaaaagauaauaaccauugguucggucuguaugacaauuggaauggcuaacuuaauauuacaaauuggaaacauaaucucaauauggauuagccacucaauucaacuugggaaucaaaaucagauugaaacaugcaaucaaagcgucauuacuuaugaaaacaacacuuggguaaaucagacauauguuaacaucagcaacaccaacuuugcugcuggacagucagugguuuccgugaaauuagcgggcaauuccucucucugcccuguuaguggaugggcuauauacaguaaagacaacaguauaagaaucgguuccaagggggauguguuugucauaagggaaccauucauaucaugcucccccuuggaaugcagaaccuucuucuugacucaaggggccuugcuaaaugacaaacauuccaauggaaccauuaaagacaggagcccauaucgaaccuuaaugagcuguccuauuggugaaguucccucuccauacaacucgagauuugagucagucgcuuggucagcaagugcuugucaugauggcaucaauuggcuaacaauuggaauuucuggcccagacaauggggcaguggcuguguuaaaguacaacggcauaauaacagacacuaucaagaguuggagaaacaauauauugagaacacaagagucugaaugugcauguguaaaugguucuugcuuuaccauaaugaccgauggaccaagugauggacaggccucauacaagaucuucagaauagaaaagggaaagauaaucaaaucagucgaaaugaaugccccuaauuaucacuaugaggaaugcuccuguuauccugauucuagugaaaucacaugugugugcagggauaacuggcauggcucgaaucgaccguggguaucuuucaaccagaaucuggaauaucagauaggauacauaugcagugggauuuuuggagacaauccacgcccuaaugauaagacaggcaguugugguccagugucgucuaauggagcaaauggaguaaaaggauuuucauucaaauacggcaaugguguuuggauagggagaacuaaaagcauuaguucaagaaaagguuuugagaugauuugggauccaaacggauggacugggacagacaauagcuucucaauaaagcaagauaucguaggaauaaaugaguggucaggauauagcgggaguuuuguucagcauccagaacuaacagggcuggacuguauaagaccuugcuucuggguugaacuaaucagagggcgacccaaagagaacacaaucuggacuagugggagcagcauauccuuuugugguguaaacaguggcacuguggguuggucuuggccagacggugcugaguugccauuuaccauugacaaguaa

SEQ ID NO: 57986 - RNA, 1410 nt, Artificial Sequence
  derived and/or modified CDS sequence (wt) from neuraminidase__InfluenzaA__AJK00014
augaauccaaaccaaaagauaauaaccauugguucggucuguaugacaauuggaauggcuaacuuaauauuacaaauuggaaacauaaucucaauauggauuagccacucaauucaacuugggaaucaaagucagauugaaacaugcaaucaaagcgucauuacuuaugaaaacaacacuuggguaaaucagacauauguuaacaucagcaacaccaacuuugcagcuggacagucagugguuucugugaaauuagcgggcaauuccucucucugcccuguuagugggugggcuauauacaguaaagacaacaguauaagaaucgguuccaagggggauguguuugucauaagggaaccauucauaucaugcucccccuuggaaugcagaaccuucuucuugacucaaggggccuugcuaaaugacaaacauuccaauggaaccauuaaagacaggagcccauaucgaacccuaaugagcuguccuauuggugaaguucccucuccauacaacucaagauuugaguccgucgcuuggucagcaagugcuugucaugauggcaucaauuggcuaacaauuggaauuucuggcccagacaauggggcaguggcuguguuaaaguacaacggcguaauaacagacacuaucaagaguuggagaaacaauauauugagaacacaagagucugaaugugcauguguaaaugguucaugcuuuaccauaaugaccgauggaccaagugauggacaggccucauacaagaucuucagaauagaaaagggaaagauagucaaaucagucgaaaugaaugccccuaauuaucacuaugaggaaugcuccuguuauccugauucuagugaaaucacauguguaugcagggauaacuggcauggcucgaaucgaccgugggugucuuucaaccagaaucuggaauaucagauaggauacauaugcagugggauuuucggagacaauccacgcccuaaugauaagacaggcaguugugguccaguaucgucuaauggagcaaauggaguaaaaggauuuucauucaaauacggcaaugguguuuggauagggagaacuaaaagcauuaguucaagaaaagguuuugagaugauuugggauccaaacggauggacugggacagacaauaacuucucaacaaagcaagauaucguaggaauaaaugaguggucaggauauagcgggaguuuuguucagcauccagaacuaacagggcuggauuguauaagaccuugcuucuggguugaacuaaucagagggcgacccaaagagaacacaaucuggacuagcgggagcaucauauccuuuugugguguaaacagugacacuguggguuggucuuggccagacggugcugaguugccauuuaccauugacaauuaa

SEQ ID NO: 57987 - RNA, 1410 nt, Artificial Sequence
  derived and/or modified CDS sequence (wt) from neuraminidase__InfluenzaA__AJK00025
augaauccaaaccaaaagauaauaaccauugguucggucuguaugacaauuggaauggcuaacuuaauauuacaaauuggaaacauaaucucaauauggauuagccacucaauucaacuugggaaucaaaaucagauugaaacaugcaaucaaagcgucauuacuuaugaaaacaacacuuggguaaaucagacauauguuaacaucagcaacaccaacuuugcugcuggacagucagugguuuccgugaaauuagcgggcaauuccucucucugcccuguuaguggaugggcuauauacaguaaagacaacaguauaagaaucgguuccaagggggauguguuugucauaagggaaccauucauaucaugcucccccuuggaaugcagaaccuucuucuugacucaaggggccuugcuaaaugacaaacauuccaauggaaccauuaaagacaggagcccauaucgaaccuuaaugagcuguccuauuggugaaguucccucuccauacaacucaagauuugagucagucgcuuggucagcaagugcuugucaugauggcaucaauuggcuaacaauuggaauuucuggcccagacaauggggcaguggcuguguuaaaguacaacggcauaauaacagacacuaucaagaguuggagaaacaauauauugagaacacaagagucugaaugugcauguguaaaugguucuugcuuuaccauaaugaccgauggaccaagugauggacaggccucauacaagaucuucagaauagaaaagggaaagauagucaaaucagucgaaaugaaugccccuaauuaucacuaugaggaaugcuccuguuauccugauucuagugaaaucacaugugugugcagggauaacuggcauggcucgaaucgaccgugggugucuuucaaccagaaucuggaauaucagauaggauacauaugcagugggauuuucggagacaauccacgcccuaaugauaagacaggcaguugugguccagugucgucuaauggagcaaauggaguaaaaggauuuucauucaaauacggcaaugguguuuggauagggagaacuaaaagcauuaguucaagaaaagguuuugagaugauuugggauccaaacggauggacugggacagacaauagcuucucaauaaagcaagauaucguaggaauaaaugaguggucaggauauagcgggaguuuuguucagcauccagaacuaacagggcuggacuguauaagaccuugcuucuggguugaacuaaucagagggcgacccaaagagaacacaaucuggacuagugggagcagcauauccuuuugugguguaaacaguggcacuguggguuggucuuggccagacggugcugaguugccauuuaccauugacaaguaa

SEQ ID NO: 57988 - RNA, 1410 nt, Artificial Sequence
  derived and/or modified CDS sequence (wt) from neuraminidase__InfluenzaA__AJK00036
augaauccaaaccaaaagauaauaaccauugguucggucugcaugacaauuggaauggcuaacuuaauauuacaaauuggaaacauaaucucaauauggauuagccacucaauucaacuuggaaaucaaagucagauugaaacaugcaaucaaagcgucauuacuuaugaaaacaacacuuggguaaaucagacauauguuaacaucagcaacaucaacuuugcugcuggacagucagugguuuccgugaaauuagcgggcaauuccucucucugcccuguuaguggaugggcuauauacaguaaagacaacaguauaagaaucgguuccaagggggauguguuugucauaagggaaccauucauaucaugcucccccuuggaaugcagaaccuucuucuugacucaaggggccuugcuaaaugacaaacauuccaauggaaccauuaaagacaggagcccauaucgaacccuaaugagcuguccuauuggugaaguucccucuccauacaacucaagauuugagucagucgcuuggucagcaagugcuugucaugauggcaucaauuggcuaacaauuggaauuucuggcccagacaauggggcaguggcuguguuaaaguacaacggcauaauaacagacacuaucaagaguuggagaaacaauauauugagaacacaagagucugaaugugcauguguaaaugguucuugcuuuaccauaaugaccgauggaccaagugauggacaggccucauacaagaucuucagaauagaaaagggaaagauagucaaaucagucgaaaugaaugccccuaauuaucacuaugaggaaugcuccuguuauccugauucuagugaaaucacaugugugugcagggauaacuggcauggcucgaaucgaccgugggugucuuucaaccagaaucuggaauaucagauaggauacauaugcagugggauuuucggagacaauccacgcccuaaugauaagacaggcaguugugguccaguaucgucuaauggagcaaauggaguaaaaggauuuucauucaaauacggcaaugguguuuggauagggagaacuaaaagcauuaguucaagaaaagguuuugagaugauuugggauccaaauggauggacugggacagacaauaacuucucaauaaagcaagauaucguaggaauaaaugaguggucaggauauagcgggaguuuuguucagcauccagaacuaacagggcuggauuguauaagaccuugcuucuggguugaacuaaucagagggcgacccaaagagaacacaaucuggacuagcgggagcagcauauccuuuugugguguaaacagugacacuguggguuggucuuggccagacggugcugaguugccauuuaccauugacaaguaa

SEQ ID NO: 57989 - RNA, 1410 nt, Artificial Sequence
  derived and/or modified CDS sequence (wt) from neuraminidase__InfluenzaA__AJK00047
augaauccaaaccaaaagauaauaaccauugguucggucuguaugacaauuggaauggccaacuuaauauuacaaauuggaaacauaaucucaauauggauuagccacucaauucaacuugggaaucaaaaucagauugaaacaugcaaucaaagcgucauuacuuaugaaaacaacacuuggguaaaucagacauacguuaacaucagcaacaccaacuuugcugcuggacagucagugguuuccgugaaauuagcgggcaauuccucucucugcccuguuaguggaugggcuauauacaguaaagacaacaguauaagaaucgguuccaagggggauguguuugucauaagggaaccauucauaucauguucccccuuggaaugcaggaccuucuucuugacucaaggggccuugcuaaaugacaaacauuccaauggaaccauuaaagacaggagcccauaucgaacucuaaugagcuguccuauuggugaaguucccucuccauacaacucaagauuugaaucagucgcuuggucagcaagugcuugucaugauggcaucaauuggcuaacaauuggaauuucuggcccagacaauggggcaguggcuguguuaaaguacaacggcauaauaacagacacuaucaagaguuggagaaacaauauauugagaacacaagagucugaaugugcauguguaaaugguucuugcuuuacuguaaugaccgauggaccaagugauggacaggccucauacaagaucuucagaauagaaaagggaaagauagucaaaucagucgaaaugaaugccccuaauuaucacuaugaggaaugcuccuguuauccugauucuagugaaaucacaugugugugcagggauaacuggcauggcucgaaucgaccgugggugucuuucaaccagaaucuggaauaucagauaggauacauaugcagugggauuuucggggacaauccacgcccuaaugauaagacaggcaguugugguccaguaucgucuaauggagcaaauggaguaaaaggauuuucauucaaauacggcaaugguguuuggauagggagaacuaaaagcauuaguucaagaaacgguuuugagaugauuugggauccgaacggauggacuggaacagacaauaacuucucaguaaagcaagauaucauaggaauaaaugaguggucaggauauagcgggaguuuuguucagcauccagaacuaacagggcuggauuguauaagaccuugcuucuggguugagcuaaucagagggcggcccaaagagaacacaaucuggacuagcgggagcagcauauccuuuugugguguaaacagugacacuguggguuggucuuggccagacggugcugaguugccauuuaccauugacaaguaa

SEQ ID NO: 57990 - RNA, 1410 nt, Artificial Sequence; identical to SEQ ID NO: 52969
  derived and/or modified CDS sequence (wt) from neuraminidase__InfluenzaA__AJK00058

SEQ ID NO: 57991 - RNA, 1410 nt, Artificial Sequence
  derived and/or modified CDS sequence (wt) from neuraminidase__InfluenzaA__AJK00069
augaauccaaaccaaaagauaauaaccauugguucggucuguaugacaauuggaauggcuaacuuaauauuacaaauuggaaacauaaucucaauauggauuagccacucaauucaacuugggaaucaaaaucagauugaaacaugcaaucaaagcgucauuacuuaugaaaacaacacuuggguaaaucagacauauuuuaacaucagcaacaccaacuuugcugcuggacagucagugguuuccgugaaauuagcgggcaauuccucucucugcccuguuaguggaugggcuauauacaguaaagacaacaguauaagaaucgguuccaagggggauguguuugucauaagggaaccauucauaucaugcucccccuuggaaugcagaaccuucuucuugacucaaggggccuugcuaaaugacaaacauuccaauggaaccauuaaagacaggagcccauaucgaacccuaaugagcuguccuauuggugaaguucccucuccauacaacucaagauuugagucagucgcuuggucagcaagugcuugucaugauggcaucaauuggcuaacaauuggaauuucuggcccagacaauggggcaguggcuguguuaaaguacaacggcauaauaacagacacuaucaagaguuggagaaacaauauauugagaacacaagagucugaaugugcauguguaaaugguucuugcuuuacuguaaugaccgauggaccaagugauggacaggccucauacaagaucuucagaauagaaaagggaaagauagucaaaucagucgaaaugaaugccccuaauuaucacuaugaggaaugcuccuguuauccugauucuagugaaaucacaugugugugcagggauaacuggcauggcucgaaucgaccgugggugucuuucaaccagaaucuggaauaucagauaggauacauaugcagugggauuuucggagacaauccacgcccuaaugauaagacaggcaguugugguccaguaucgucuaauggagcaaauggaguaaaaggauuuucauucaaauacggcaaugguguuuggauagggagaacuaaaagcauuaguucaagaaacgguuuugagaugauuugggauccgaacggauggacugggacagacaauaacuucucaauaaagcaagauaucguaggaauaaaugaguggucaggauauagcgggaguuuuguucagcauccagaacuaacagggcuggauuguauaagaccuugcuucuggguugaacuaaucagagggcgacccaaagagaacacaaucuggacuagcgggagcagcauauccuuuugugguguaaacagugacacuguggguuggucuuggccagacggugcugaguugccauuuaccauugacaaguaa

SEQ ID NO: 57992 - RNA, 1413 nt, Artificial Sequence; identical to SEQ ID NO: 51797
  derived and/or modified CDS sequence (wt) from neuraminidase__InfluenzaA__AJK00081

SEQ ID NO: 57993 - RNA, 1413 nt, Artificial Sequence; identical to SEQ ID NO: 57923
  derived and/or modified CDS sequence (wt) from neuraminidase__InfluenzaA__AJK00093

SEQ ID NO: 57994 - RNA, 1413 nt, Artificial Sequence
  derived and/or modified CDS sequence (wt) from neuraminidase__InfluenzaA__AJK00105
augagcccaaaucaaaagauaauaaccauuggaucaaucaguauagcaaucggaauaauuagucuaauguugcaaauaggaaauacuauuucaauaugggcuagucacucaauccaaacuggaagucaaaacaacacuggaauaugcaaccaaagaaucaucacauaugaaaacagcaccugggugaaucacacauauguuaauauuaacaacacuaauguuguugcaggagaggacaaaacuucagugacauuggccggcaauucgucucuuuguucuaucaguggaugggcuauauacacaaaagacaacagcauaagaauuggcuccaaaggagauguuuuugucauaagagaaccuuucauaucauguucucacuuggaaugcagaaccuuuuuucugacccaaggcgcucuauuaaaugacaaacauucaaaugggaccguaaaggacagaaguccuuauagggccuuaaugagcuguccucuaggugaagcuccguccccauacaauucaaaguucgaaucaguugcauggucagcaagcgcaugccaugauggcaugggcugguuaacaaucggaauuucugguccagacaauggagcuguggcuguacuaaaauacaacggaauaauaacuggaaccauaaaaaguuggaaaaagcaaauauuaagaacacaagagucugaaugugucuguaugaacgggucauguuucaccauaaugaccgauggcccgaguaauaaggccgccucuuacaaaauuuucaagaucgaaaaggggaagguuacuaaaucaauagaguugaaugcacccaauuuucauuaugaggaauguuccuguuacccagacacuggcauagugauguguguaugcagggacaacuggcaugguucaaaucgaccuugggugucuuuuaaucaaaacuuggauuaucaaauaggauacaucugcaguggaguguucggugacaauccgcgucccgaagauggagagggcagcugcaauccagugacuguugauggagcaaacggaguaaaaggguuuucauacaaauaugauaaugguguuuggauaggaaggaccaaaaguaacagacuuagaaagggguuugagaugaucugggauccuaauggauggacaaauaccgacagugauuucucagugaaacaggauguuguagcaauaacugauuggucaggguacagcggaaguuucguccaacauccugaguuaacaggauuggacuguauaagaccuugcuucuggguugaguuagucagagggcugccuagagaaaauacaacaaucuggacuagugggagcagcauuucuuuuuguggcguuaauagugauacugcaaauuggucuuggccagacggugcugaguugccguucaccauugacaaguag

SEQ ID NO: 57995 - RNA, 1410 nt, Artificial Sequence
  derived and/or modified CDS sequence (wt) from neuraminidase__InfluenzaA__AJK00116
augaauccaaaccaaaagauaauaaccauugguucggucuguaugacaauuggaauggcuaacuuaauauuacaaauugggaacauaaucucaauauggauuagccacucaauucaacuugggaauaaaaaucagauugaaacaugcaaucaaagcgucauuacuuaugaaaacaacacuuggguaaaucagacauauguuaacaucagcaacaccaacuuugcugcuggacagucagugguuuccgugaaauuagcgggcaauuccucucucugcccuguuaguggaugggcuauauacaguaaagacaacaguauaagaaucgguuccaagggggauguguuugucauaagggaaccauucauaucaugcuccccccuggaaugcagaaccuucuucuugacucaaggggccuugcuaaaugacaaacauuccaauggaaccauuaaagacaggagcccauaucgaacccuaaugagcuguccuauuggugaaguucccucuccauacaacucaagauuugagucagucgcuuggucagcaagugcuugucaugauggcaucaauuggcuaacaauuggaauuucuggcccagacaauggggcaguggcuguguuaaaguacaacggcauaauaacagacacuaucaagaguuggagaaacaauauauugagaacacaagagucugaaugugcauguguaaaugguucuugcuuuacuguaaugaccgauggaccaagugauggacaggccucauacaagaucuucaggauagaaaagggaaagauagucaaaucagucgaaaugaaugccccuaauuaucacuaugaggaaugcuccuguuauccugauucuagugaaaucacaugugugugcagggauaacuggcauggcucaaaucgaccgugggugucuuucaaccagaaucuggaauaucagauaggauacauaugcagugggauuuucggagacaauccacgcccuaaugauaagaaagguaguugugguccaguaucgucuaauggagcaaacggaguaaaaggauuuucauucaaauacggcaaugguguuuggauagggagaacuaaaagcauuaguucaagaaacgguuuugagaugauuugggauccgaacggauggacugggacagacaauaacuucucaauaaagcaagauaucguaggaauaaaugaauggucaggauauagcgggaguuuuguucagcauccagaacuaacagggcuggauuguauaagaccuugcuucuggguugaacuaaucagagggcgacccaaagagaacacaaucuggacuagcgggagcagcauauccuuuugugguguaaacagugacacuguggguuggucuuggccagacggugcugaguugccauuuaccauugacaaguaa

SEQ ID NO: 57996 - RNA, 1410 nt, Artificial Sequence; identical to SEQ ID NO: 57930
  derived and/or modified CDS sequence (wt) from neuraminidase__InfluenzaA__AJK00127

SEQ ID NO: 57997 - RNA, 1410 nt, Artificial Sequence
  derived and/or modified CDS sequence (wt) from neuraminidase__InfluenzaA__AJK00138
augaauccaaaccaaaagauaauaaccauugguucggucuguaugacaauuggaauggcuaacuuaauauuacaaauuggaaacauaaucucaauauggauuagccacucaauucaacuugggaaucaaaaucagauugaaacaugcaaucaaagcgucauuacuuaugaaaacaacacuuggguaaaucagacauauguuaacaucagcaacaccaacuuugcugcuggacagucagugguuuccgugaaauuagcgggcaauuccucucucugcccuguuaguggaugggcuauauacaguaaagacaacaguauaagaaucgguuccaagggggauguguuugucauaagggaaccauucauaucaugcucccccuuggaaugcagaaccuucuucuugacucaaggggccuugcuaaaugacaaacauuccaauggaaccauuaaagacaggagcccauaucgaacccuaaugagcuguccuauuggugaaguucccucuccauacaacucaagauuugagucagucgcuuggucagcaagugcuugucaugauggcaucaauuggcuaacaaucggaauuucuggcccagacaauggggcaguggcuguguuaaaguacaacggcauaauaacagacacuaucaagaguuggagaaacaauauauugagaacacaagagucugaaugugcauguguaaaugguucuugcuuuacuguaaugaccgauggaccaagugauggacaggccucauacaagaucuucagaauagaaaagggaaagauagucaaaucagucgaaaugaaugccccuaauuaucacuaugaggaaugcuccuguuauccugauucuagugaaaucacaugugugugcagggauaacuggcauggcucgaaucgaccgugggugucuuucaaccagaaucuggaauaucagauaggauacauaugcagugggauuuucggagacaauccacgcccuaaugauaagacaggcaguugugguccaguaucgucuaauggagcaaauggaguaaaaggauuuucauucaaauacggcaaugguguuuggauagggagaacuaaaagcauuaguucaagaaacgguuuugagaugauuugggauccgaacggauggacugggacagacaauaacuucucaauaaagcaagauaucguaggaauaaaugaguggucaggauauagcgggaguuuuguucagcauccagaacuaacagggcuggauuguauaagaccuugcuucuggguugaacuaaucagagggcgacccaaagagaacacaaucuggacuagcgggagcagcauauccuuuugugguguaaacagugacacuguggguuggucuuggccagacggugcugaguugccauuuaccauugacaaguaa

SEQ ID NO: 57998 - RNA, 1350 nt, Artificial Sequence
  derived and/or modified CDS sequence (wt) from neuraminidase__InfluenzaA__AJK00152
augaauccaaaucaaaagauaauaaccauuggaucaaucuguaugguaacuggaauaguuagcuuaaugcuacagauugggaacauaaucucaaugugggucagucauucaauucaaacaaggaaucaacaccaaacugaaccaaucagaaauacuaauuuucuuacugagaacgcuguggcuucaguaacauuagcgggcaauucgucucuuugccccauuagaggaugggcuguacacaguaaagacaacaguauaaggauugguuccaagggggauguguuuguaauuagagagccguucaucucaugcucccauuuggaaugcagaacuuucuuuuugacccagggagcauuaauaaaugacaagcacuccaacgggacugucaaagacagaagcccucacagaacacuaaugaguugcccugugggugaggcucccuccccauauaacucaagguuugagucuguugcuuggucagcaagugcuugccaugauggcaccaguuggcugacaauuggaauuucugguccagacaauggggcgguggcuguauugaaauacaacggcauaauaacagacaccaucaagaguuggaggaacaacauacugagaacucaagagucugaaugugcauguguaaauggcucuugcuuuacuguaaugacugacggaccaaguaauggacaggcaucauauaagaucuucaaaauggaaaaagggaaaguaguuaaaucagucgaauugaaugcuccuaauuaucacuaugaggaaugcuccuguuauccugaugcuggagaaaucacaugugugugcagggauaauuggcauggcucaaauaggccauggguaucuuucaaucagaauuuggaguaucaaauaggauacauaugcaguggaguuuucggagacaauccacgccccaaugauggaacagguaguugugguccaguguccccuaacggggcauaugggauaaaaggguuuucauuuaaauacggcaaugguguuuggaucgggagaaccaaaagcacuaauuccaggagcggcuuugaaaugauuugggauccaaaugguuggacuggaacggacagugacuuuucggugaaacaagauauaguagaaauaacugauuggucaggauauagcgggaguuuuguccagcauccagaacugacaggauuagauugcauaagaccuugcuucuggguugaguugaucagagggcggcccaaagagagcacaauuuggacuagugggagcagcauaucuuuuugugguguaaauagugacacugugaguuggucuuggccagacggugcugaguugccauucaccauugacaaguag

SEQ ID NO: 57999 - RNA, 1350 nt, Artificial Sequence
  derived and/or modified CDS sequence (wt) from neuraminidase__InfluenzaA__AJK00167
augaauccaaaucagaagauaauaaccauugggucaaucuguaugguaauuggaauaguuagcuuaauguuacaaauugggaacaugaucucaauaugggucagucauucaauucaaacagggaaucaacaccaagcugaaccaaucagaaaugcuaauuuucuuacugagaacgcuguggcuucaguaacauuagcgggcaauucaucucuuugccccguuagaggaugggcuguacacaguaaagacaacaguauaaggauugguuccaagggggauguguuuguuauuagagagccguucaucucaugcucccacuuggaaugcagaacuuucuuuuugacucagggagccuuacugaaugacaagcacuccaaugggacugucaaagacagaagcccucacagaacauuaaugaguuguccugugggugaggcucccuccccauauaacucaagguuugagucuguugcuuggucagcaagugcuugccaugauggcaccaguugguugacaauuggaauuucuggcccagacaauggggcuguggcuguauugaaauacaaugguauaauaacagacaccaucaagaguuggaggaacaacauacugagaacucaagagucugaaugugcauguguaaauggcucuugcuuuacuguaaugacugauggaccaaguaaugggcaggcaucauauaagaucuucaaaauggagaaagggaaagugguuaaaucagucgaauugaaugcuccuaauuaucacuaugaggaaugcuccuguuauccugaugcuggcgaaaucacaugugugugcagggauaauuggcauggcucaaauaggccauggguaucuuucaaucagaauuuggaguaucaaauaggauauauaugcaguggaguuuucggagacaauccacgccccaaugauggaacagguaguugugguccaguguccccuaacggggcauaugggauaaaaggguuuucauuuaaauacggcaaugguguuuggaucggaagaaccaaaagcacuaauuccaggagcggcuuugaaaugauuugggauccaaauggguggacugaaacggacaguaacuucucggugaaacaagauauaguagcaauaacugauuggucaggauauagcgggaguuuuguccagcauccagaacugacaggauuagauugcauaagaccuugcuucuggguugaguuaaucagagggcggcccaaagagagcacaauuuggacuagugggagcagcauaucuuuuugugguguaaauagugacacugugaguuggucuuggccagacggugcugaguugccauucaccauugacaaguag

SEQ ID NO: 58000 - RNA, 1350 nt, Artificial Sequence
  derived and/or modified CDS sequence (wt) from neuraminidase__InfluenzaA__AJK00178
augaauccaaaucaaaagauaauaaccauugggucaaucuguaugguaauuggaauaguuagcuuaauguugcaaauugggaacaugaucucaauaugggccagucacucaauucggacagggaaucaaaaccaaguugagccaaucaucaauacuaauuuucccaccgagaaagccgcggcuucaauaacauuagcgggcaauucaucucuuugcccuauuagagggugggcuauacacaguaaggacaacaguauaaggauugguuccaagggggauguguuuguuauuagagagccauucaucucaugcucucacuuggaaugcagaacuuucuuuuugacucagggagccuugcugaaugacaagcacuccaacgggacugucaaagacagaagcccucacagaacauuaaugaguuguccugugggugaggcucccuccccauauaacucaagguuugagucuguugcuuggucagcaagugcuugccaugauggcaccaguugguuaacaauuggaauuucuggcccggacaauggggcuguggcuguauugaaauacaauggcauaauaacagacaccaucaagaccuggaggaacaacauauugagaacucaagaguccgaaugugcaugcguaaauggcucuugcuuuacuguaaugacugacggaccaagugaugggcaggcaucauauaagaucuucaaaauggaaaaaggaaaaguaauuaaaucaguugaauuggaugcuccuaauuaccacuaugaggaaugcuccuguuauccugaugccggugaaaucacaugugugugcagagacaauuggcauggcucaaaucggccauggguguccuucaaucaaaaucuggaguaucaaauaggguauauaugcaguggaguuuucggagacaauccacgcccuacugauggaacagguaguugugguccggugucccauaauggggcauaugggguaaaaggguuuucauuuaaauacggcaaugguguuuggaucgggagaaccaaaagcccuaauuccaggagcgguuuugaaaugauuugggauccaaauggguggagugaaacggacaguagcuucucggugaaacaagauauaguagcaauaaccgauuggucaggauauagcgggaguuuuguccagcauccagaacugacagguuuagauugcauaagaccuuguuucuggguugaguuaaucagagggcggcccaaagagaguacaguuuggacuagugggagcagcauauccuuuugugguguaaauagugacacugugaguuggucuuggccagacggugcugaguugccauucaccauugacaaguaa

SEQ ID NO: 58001 - RNA, 1350 nt, Artificial Sequence
  derived and/or modified CDS sequence (wt) from neuraminidase__InfluenzaA__AJK00199
augaauccaaaucaaaagauaauaaccauugggucaaucuguaugguaauuggaauaguuagcuuaauguugcaaauugggaacaugaucucaauaugggucagucauucaauucagacagggaaucaaaaccaaguugagccaaucaucaauacuaauuuucuuacugagaaagcugugguuucaauaacauuagcgggcaauucaucucuuugcccuauuagaggaugggcuauacacaguaaggacaacaguauaaggauugguuccaagggggauguguuuguuauuagagagccauucaucucaugcucucacuuggaaugcagaacuuucuuuuugacucagggagccuugcugaaugacaagcacuccaacgggacugucaaagacagaagcccucauagaacauuaaugaguuguccugugggugaggcuccuuccccauauaacucaagguuugagucuguugcuuggucagcaagugcuugccaugauggcaccaguugguugacaauuggaauuucuggcccggacaauggggcugcggcuguauugaaauacaauggcauaauaacagacaccaucaagagcuggaggaacaacauacugagaacucaagaguccgaaugugcauguguaaauggcucuugcuuuacuguaaugacugacggaccaagugaugggcaggcaucauauaagaucuucaaaauggaaaaagggaaaguaauuaaaucagucgaauuggaugcuccuaauuaccacuaugaggaaugcuccugcuauccugaugccggugaaaucacaugugugugcagagauaauuggcauggcucaaaucggccauggguguccuucaaucaaaaucuggaguaucaaauaggauauauaugcaguggaguuuucggagacaauccacgccccaaugauggaacagguaguuguaguccggugucccauaauggggcauaugggguaaaaggguuuucauuuaaauacggcaaugguguuuggaucgggagaaccaaaagcccuaauuccaggagcggcuuugaaaugauuugggauccaaauggauggagugaaacagacaguagcuucucggugaaacaagauauaguagcaauaaccgauuggucaggauauagcgggaguuuuguccagcauccagaacugacagguuuagauugcauaagaccuuguuucuggguugaguuaaucagagggcggcccaaagagaguacaguuuggacuagugggagcagcauauccuuuugugguguaaauagugacacugugaguuggucuuggccagacggugcugaguugccauucaccauugacaaguaa

SEQ ID NO: 58002 - RNA, 1350 nt, Artificial Sequence
  derived and/or modified CDS sequence (wt) from neuraminidase__InfluenzaA__AJK00208
augaauccaaaucaaaagauaauaaccauuggaucaaucuguaugguaacuggaauaguuagcuuaaugcuacagauugggaacauaaucucaaugugggucagucauucaauucaaacaaggaaucaacaccaaacugaaccaaucagaaauacuaauuuucuuacugagaacgcuguggcuucaguaacauuagcgggcaauucgucucuuugccccauuagaggaugggcuguacacaguaaagacaacaguauaaggauugguuccaagggggauguguuuguaauuagagagccguucaucucaugcucccauuuggaaugcagaacuuucuuuuugacccagggagcauuacugaaugacaagcacuccaacgggacugucaaagacagaagcccucacagaacacuaaugaguugcccugugggugaggcucccuccccauauaacucaagguuugagucuguugcuuggucagcaagugcuugccaugauggcaccaguuggcugacaauuggaauuucugguccagacaauggggcgguggcuguauugaaauacaacggcauaauaacagacaccaucaagaguuggaggaacaacauacugagaacucaagagucugaaugugcauguguaaauggcucuugcuuuacuguaaugacugauggaccaaguaauggacaggcaucauauaagaucuucaaaauggaaaaagggaaaguaguuaaaucagucgaauugaaugcuccuaauuaucacuaugaggaaugcuccuguuauccugaugcuggagaaaucauaugugugugcagggauaauuggcauggcucaaauaggccauggguaucuuucaaucagaauuuggaguaucaaauaggauacauaugcaguggaguuuucggagacaauccacgccccaaugauggaacagguaguugugguccaguguccccuaacggggcauaugggauaaaaggguuuucauuuaaauacggcaaugguguuuggaucgggagaaccaaaagcacuaauuccaggagcggcuuugaaaugauuugggauccaaaugguuggacuggaacggacagugacuuuucggugaaacaagauauaguagaaauaacugauuggucaggauauagcgggaguuuuguccagcauccagaacugacaggauuagauugcauaagaccuugcuucuggguugaguuaaucagagggcggcccaaagagagcacaauuuggacuagugggagcagcauaucuuuuugugguguaaauagugacacugugaguuggucuuggccagacggugcugaguugccauucaccauugacaaguag

SEQ ID NO: 58003 - RNA, 1350 nt, Artificial Sequence
  derived and/or modified CDS sequence (wt) from neuraminidase__InfluenzaA__AJK00219
augaauccaaaucaaaagauaauaaccauuggaucaaucuguaugguaacuggaauaguuagcuuaaugcuacagauugggaacauaaucucaaugugggucagucauucaauucaaacaaggaaucaacaccaagcugaaccaaucagaaauacuaauuuucuuacugagaacgcuguggccucaguaacauuagcgggcaauuugucucuuugccccauuagaggaugggcuguacacaguaaagacaacaauauaaggauugguuccaagggggacguguuuguaauuagagagccguucaucucaugcucccauuuggaaugcagaacuuucuuuuugacccagggagcauuacugaaugacaagcacuccaacgggacugucaaagacagaagcccucacagaacacuaaugaguugcccugugggugaggcucccuccccauauaacucaagguuugagucuguugcuuggucagcaagugcuugccaugauggcaccaguuggcugacaauuggaauuucugguccagacaauggggcgguggcuguauugaaauacaacggcauaauaacagacacaaucaagaguuggaggaacaacauacugagaacucaagagucugaaugugcauguguaaauggcucuugcuucacuguaaugacugauggaccaaguaauggacaggcaucauauaagaucuucaaaauggaaaaagggaaaguaguuaaaucagucgaauugaaugcuccuaauuaucacuaugaggaaugcuccuguuauccugaugcuggagaaaucauaugugugugcagggauaauuggcauggcucaaauaggccauggguaucuuucaaucagaauuuggaguaucaaauaggauacauaugcaguggaguuuucggcgacaauccacgccccaaugaugggacagguaguugugguccaguguccccuaacggggcauaugggauaaaaggguuuucauuuaaauacggcaaugguguuuggaucgggagaaccaaaagcacuaauuccaggagcggcuuugaaaugauuugggauccaaaugguuggacuggaacggacagugacuuuucggugaaacaagauauaguagaaauaacugauuggucaggauauagcgggaguuuuguccagcauccagaacugacaggauuagauugcauaagaccuugcuucuggguugaguuaaucagagggcggcccaaagagagcacaauuuggacuagugggagcagcauauccuuuugugguguaaauagugacacugugaguuggucuuggccagacggugcugaguugccauucaccauugacaaguag

SEQ ID NO: 58004 - RNA, 1350 nt, Artificial Sequence
  derived and/or modified CDS sequence (wt) from neuraminidase__InfluenzaA__AJK00230
augaauccaaaucaaaagauaauaaccauuggaucaaucuguaugguaacuggaauaguuagcuuaaugcuacagauugggaacauaaucucaaugugggucagucauucaauucaaacaaggaaucaacaccaaacugaaccaaucagaaauacuaauuuucuuacugagaacgcuguggcuucaguaacauuagcgggcaauucgucucuuugccccauuagaggaugggcuguacacaguaaagacaacaguauaaggauugguuccaagggggauguguuuguaauuagagagccguucaucucaugcucccauuuggaaugcagaacuuucuuuuugacccagggagcauuaauaaaugacaagcacuccaacgggacugucaaagacagaagcccucacagaacacuaaugaguugcccugugggugaggcucccuccccauauaacucaagguuugagucuguugcuuggucagcaagugcuugccaugauggcaccaguuggcugacaauuggaauuucugguccagacaauggggcgguggcuguauugaaauacaacggcauaauaacagacaccaucaagaguuggaggaacaacauacugagaacucaagagucugaaugugcauguguaaauggcucuugcuuuacuguaaugacugacggaccaaguaauggacaggcaucauauaagaucuucaaaauggaaaaagggaaaguaguuaaaucagucgaauugaaugcuccuaauuaucacuaugaggaaugcuccuguuauccugaugcuggagaaaucauaugugugugcagggauaauuggcauggcucaaauaggccauggguaucuuucaaucagaauuuggaguaucaaauaggauacauaugcaguggaguuuucggagacaauccacgccccaaugauggaacagguaguugugguccaguguccccuaacggggcauaugggauaaaaggguuuucauuuaaauacggcaaugguguuuggaucgggagaaccaaaagcacuaauuccaggagcggcuuugaaaugauuugggauccaaaugguuggacuggaacggacagugacuuuucggugaaacaagauauaguagaaauaacugauuggucaggauauagcgggaguuuuguccagcauccagaacugacaggauuagauugcauaagaccuugcuucuggguugaguugaucagagggcggcccaaagagagcacaauuuggacuagugggagcagcauaucuuuuugugguguaaauagugacacugugaguuggucuuggccagacggugcugaguugccauucaccauugacaaguag

SEQ ID NO: 58005 - RNA, 1380 nt, Artificial Sequence
  derived and/or modified CDS sequence (wt) from neuraminidase__InfluenzaA__AJS18470
augaauccaaaucaaaagauaacaugcauuucagcaacaggaguaacacuaucggugguaagucugcuaauaggaaucgccaauuugggccuaaauaucggacuacacuacaaaguggaugauucaacaacuauaaacauuccaaacaugaaugagaccaacccaacaauaacaaacaucacuaacauuauagugaauaagaacgaagaaagaacauuucucaacuugaccaagccgcuaugugaagucaacucauggcacauucuaucgaaagacaaugcaauaagaauaggugaggaugcucauauacuggucacaagggaaccuuacuuguccugugacccacaaggaugcaggauguuugcucugagucaaggcacaacacucagagggcgacaugcgaauggaaccauacaugauaggagcccauuucgagcucuuauaaguugggaaaugggucaggcacccaguccauauaauacuagggucgaaugcauaggauggucaagcacgucaugccaugauggcauaucaaggaugucaauaugcauaucaggaccgaauaacaaugcaucggcaguggugugguacagggggagaccaguaacagaaaucccaucauggguagggaacauucuuaggacucaagaaucagaaugugugugccauaaaggaaucugcccaguggucaugacagaugguccagcaaacaacaaggcagcaacuaagauaaucuacuucaaagagggaaagauacagaaaauugaagaacugcaagggaacgcucaacacgucgaagaguguucaugcuacggagcagcagggaugaucaaauguguaugccgagacaauuggaagggggcaaauagaccaauaaucacuauagaucccgaaaugaugacccacacaagcaaauacuuguguucaaaaauuuuaaccgacacaagucguccuaaugaccccaccaaugggaacugcgaugcgccaauaauaggagggagcccagacccagggguaaaaggguuugcauaccuagacggggagaauucauggcuuggaaggacaauuagcaaagacuccagaucaggcuacgaaauguuaaaggucccaaaugcagaaaccgacacucaaucagggccaaccucauaccagcugauugucaacaaccaaaauuggucaggguacucaggggcauucauagacuacugggcaaacaagggaugcuucaauccuuguuuuuauguggagcuaaucagagggagacccaaagagauugauguacuguggacuuccaauagcaugguagcucucuguggauccagggagcgauugggaucaugguccuggcaugauggugcagaaaucaucuacuuuaaguag

SEQ ID NO: 58006 - RNA, 1380 nt, Artificial Sequence
  derived and/or modified CDS sequence (wt) from neuraminidase__InfluenzaA__AJS18481
augaauccaaaucaaaagauaacaugcauuucagcaacaggaguaacacuaucggugguaagccugcuaauaggaaucgccaauuugggccuaaauaucggacuacacuacaaagugagugauucaacaacuauaaacaguccaaacaugaaugagaccaacccaacaacaacaaacaucacuaacauuauagugaauaagaacgaagaaagaacauuucucaauuugaccaagccgcuaugugaagucaacucauggcacauucuaucgaaagacaaugcaauaagaauaggugaggaagcucauauacuggucacaagggaaccuuacuuguccugugauccacaaggaugcaggauguuugcucugagucaaggcacaacacucagagggcgacaugcgaauggaaccauacaugauaggagcccauuucgagcucuuauaaguugggaaaugggucaggcacccagcccauauaauacuagggucgaaugcauaggauggucaagcacgucaugccaugauggcauaucaaggaugucaauaugcauaucaggaccgaauaacaaugcaucggcaguggugugguacagggggagaccaguaacagaaaucccaucaugggcagggaacauucuuaggacucaagaaucagaaugugugugccauaaaggaaucugcccaguggucaugacagacgguccagcaaacaacaaggcagcaacuaagauaauuuacuucagagagggaaagauacagaaaauugaagaacugcaagggaaugcucaacacaucgaagaguguucaugcuacggagcagcagggaugaucaaaugugcaugcagagacaauuggaagggggcaaauagaccaauaaucacuauagaucccgaaaugaugacccacacuagcaaauacuuguguucaaaaaucuuaaccgacacaagucguccuaaugaccccaccaaugggaacugcgaugcgccaguaacaggagggagcccagacccagggauaaaaggguuugcauuccuagacggggagaauucauggcuuggaaggacaauuagcaaaaacuccagaucaggcuacgaaauguuaaaggucccaaaugcagaaaccgacacucaaucagggccaaccucauaccagcugauuguaaacaaccaaaauuggucuggguacucaggggcauucauagacuacugggcaaacaaggaaugcuucaauccuuguuuuuauguggagcuaaucagagggagacccaaagagagugauguacuguggacuuccaauagcaugguagcucucuguggauccagggagcgauugggaucaugguccuggcaugauggugcagaaaucaucuacuuuaaguag

SEQ ID NO: 58007 - RNA, 1410 nt, Artificial Sequence
  derived and/or modified CDS sequence (wt) from neuraminidase__InfluenzaA__AKA59350
augaauccaaaccaaaagauaauaaccauugguucggucuguaugacaauuggaguggcuaacuuaauauuacaaauuggaaacauaaucucaauauggauuagccacucaauucaacuugggaaucaaaaucagauugaaacaugcaaucaaagcgucauuacuuaugaaaacaacacuuggguaaaccagacagauguuaacaucagcaacaccaacuuugcugcuggacagucagugguuuccgugaaauuagcgggcaauuccucucucugcccuguuaguggaugggcuauauacaguaaagacaacaguauaagaauugguuccaagggggauguguuugucauaagggaaccauucauaucaugcuccccuuuggaaugcagaaccuucuucuugacucaaggggcauugcuaaaugacaaacauuccaauggaaccauuaaagacaggagcccauaucgaacccuaaugagcuguccuauuggugaaguucccucuccauacaacucaagauuugagucagucgcuuggucagcaagugcuugccaugauggcaucaauuggcuaacaauuggaauuucuggcccagacaauggggcaguggcgguguuaaaguacaacggcauaauaacagacacuaucaagaguuggagaaacaauauauugagaacacaagagucugaauguguauguguaaaugguucuugcuuuacuguaaugaccgauggaccaaguaauggacaggccucauacaagaucuucagaauagaaaagggaaagauaguuaaaucagucgaaaugaaugccccuaauuaucacuaugaggaaugcuccuguuauccugauucuagugaaaucacaugugugugcagggauaacuggcauggcucgaaucgaccgugggugucuuucaaccagaaucuagaauaucagauaggauacauaugcagugggauuuucggagacaauccacgcccuaaugauaagacaggcaguugugguccagugucgucuaauggagcaaauggaguaaaaggauuuucauucaaauacggcaaugguguuuggauagggagaacuaaaagcauuagcucaagaaacgguuuugagaugauuugggauccaaacggauggacugggacagacaauaacuucucaauaaagcaagauaucguaggaauaaaugaguggucaggauauagcgggaguuuuguccagcauccagaacuaacagggcuggauuguauaagaccuugcuucuggguugaacuaaucagagggcgacccaaagagaacacagucuggacuagcgggagcagcauauccuuuugugguguaaacagugacacuguggguuggucuuggccagacggugcugaguugccauuuaccauugacaaguaa

SEQ ID NO: 58008 - RNA, 1410 nt, Artificial Sequence
  derived and/or modified CDS sequence (wt) from neuraminidase__InfluenzaA__AKA59352
augaauccaaaccaaaagauaauaaccauugguucggucuguaugacaauuggaauggcuaacuuaauguuacaaauuggaaacauaaucucaauauggauuagccacucaauucaacuugggaaucaaaaucagauugaaacaugcaaucaaagcgucauuacuuaugaaaacaacacuuggguaaaucagacauauguuaacaucagcaacaccaaccuugcuguuggacagucagugguuuccacgaaauuagcgggcaauuccucucucugcccuguuaguggaugggcuauauacaguaaagacaacaguauaagaaucgguuccaaaggggauguguuugucauaagggaaccauucauaucaugcucccccuuggaaugcagaaccuucuucuugacucaaggggccuugcuaaaugacaaacauuccaauggaaccauuaaagacaggagcccauaucgaacccuaaugagcuguccuauuggugaaguucccucuccauacaacucaagauuugagucagucgcuuggucagcaagugccugucaugauggcaucaauuggcuaacaauuggaauuucugguccagacaauggggcaguggcuguguuaaaguacaacggcauaauaacagacacuaucaaaaguuggagaaacaauauauugagaacacaagagucugaaugugcauguguaaaugguucuugcuuuacuguaaugaccgauggaccaagugauggacaggccucauacaagaucuucagaauagaaaagggaaagauagucaaaucagucgaaaugaaugccccuaauuaucacuaugaggaaugcuccuguuauccugauucuagugaaaucacaugugugugcagggauaacuggcauggcucgaaucgaccgugggugucuuucaaccagaaucuggaauaucagauaggauacauaugcagugggauuuucggagacaauccacgcccuaaugauaagacaggcaguugugguccaguaucgucuaauggagcaaauggaguaaaaggauuuucauucaaauacgguaaugguguuuggauagggagaacuaaaagcauuaguucaagaaacgguuuugagaugauuugggauccgaacggauggacugggacagacaauaacuucucaauaaagcaagauaucguaggaauaaaugaguggucaggauacagcgggaguuuuguucagcaucccgaacuaacagggcuagauuguauaagaccuugcuucuggguugaacuaaucagagggcgacccaaagagaacacaaucuggacuagcgggagcagcauauccuuuugugguguaaacagugacacuguggguuggucuuggccagacggugcugaguugccauuuaccauugacaaguaa

SEQ ID NO: 58009 - RNA, 1410 nt, Artificial Sequence
  derived and/or modified CDS sequence (wt) from neuraminidase__InfluenzaA__AKA59354
augaauccaaaccaaaagauaauaaccauugguucggucuguaugacaauuggaguggcuaacuuaauauuacaaauuggaaacauaaucucaauauggauuagccacucaauucaacuugggaaucaaaaucagauugaaacaugcaaucaaagcgucauuacuuaugaaaacaacacuugggcaaaccagacauauguuaacaucagcaacaccaacuuugcugcuggacagucagugguuuccgugaaauuagcgggcaauuccucucucugcccuguuaguggaugggcuauauacaguaaagacaacaguauaagaauugguuccaagggggauguguuugucauaagggaaccauucauaucaugcuccccuuuggaaugcagaaccuucuucuugacucaaggggcauugcuaaaugacaaacauuccaauggaaccauuaaagacaggagcccauaucgaacccuaaugagcuguccuauuggugaaguucccucuccauacaacucaagauuugagucagucgcuuggucagcaagugcuugccaugauggcaucaauuggcuaacaauuggaauuucuggcccagacaauggggcaguggcgguguuaaaguacaacggcauaauaacagacacuaucaagaguuggagaaacaauauauugagaacacaagagucugaauguguauguguaaaugguucuugcuuuacuguaaugaccgauggaccaaguaauggacaggccucauacaagaucuucagaauagaaaagggaaagauaguuaaaucagucgaaaugaaugccccuaauuaucacuaugaggaaugcuccuguuauccugauucuagugaaaucacaugugugugcagggauaacuggcauggcucgaaucgaccgugggugucuuucaaccagaaucuagaauaucagauaggauacauaugcagugggauuuucggagacaauccacgcccuaaugauaagacaggcaguugugguccagugucgucuaauggagcaaauggaguaaaaggauuuucauucaaauacggcaaugguguuuggauagggagaacuaaaagcauuagcucaagaaacgguuuugagaugauuugggauccaaacggauggacugagacagacaauaacuucucaauaaagcaagauaucguaggaauaaaugaguggucaggauauagcgggaguuuuguccagcauccagaacuaacagggcuggauuguauaagaccuugcuucuggguugaacuaaucagagggcgacccaaagagaacacagucuggacuagcgggagcagcauauccuuuugugguguaaacagugacacuguggguuggucuuggccagacggugcugaguugccauuuaccauugacaaguaa

SEQ ID NO: 58010 - RNA, 1380 nt, Artificial Sequence
  derived and/or modified CDS sequence (wt) from neuraminidase__InfluenzaA__AKS48026
augaauccaaaucaaaagauaacaugcauuucagcaacaggaguaacacuaucggugguaagccugcuaauaggaaucgccaauuugggccuaaauaucggacuacacuacaaagugagugauucaacaacuauaaacauuccaaacaugaaugagaccaacccaacaacaacaaacaucacuaacauuauagugaauaagaacgaagaaagaacauuucucaacuugaccaagccacuaugugaagucaacucauggcacauucuaucgaaagacaaugcaauaagaauaggugaggaugcucauauacuggucacaagggaaccuuacuuguccugugauccacaaggaugcaggauguuugcucugagucaaggcacaacacucagagggcgacaugcgaauggaaccauacaugauaagagcccauuucgagcucuuauaaguugggaaaugggucaggcacccaguccauauaauacuagggucgaaugcauaggauggucaagcacgucaugccaugauggcauaucaaggaugucaauaugcauaucaggaccgaauaacaaugcaucggcaguggugugguacagggggagaccaguaacagaaaucccaucauggguagggaacauucuuaggacucaagaaucagaauguguaugccauaaaggaaucugcccaguggucaugacagaugguccagcaaacaacaaggcagcaacuaagauaaucuacuucaaagagggaaagauacagaaaauugaagaacuacaagggaacgcucaacacaucgaagaguguucaugcuacggagcagcagggaugaucaaauguguaugcagagacaauuggaagggggcaaauagaccaauaaucacuauagaucccgaaaugaugacccacacaagcaaauacuuguguucaaaaaucuuaaccgacacaagucguccuaaugaccccaccaaugggaacugcgaugagccaauaacaggagggagcccagacccagggguaaaaggguuugcauuccuagacggggagaauucauggcuuggaaggacaauuagcaaagacuccagaucaggcuacgaaauguuaaaggucccaaaugcagaaaccgacacucaaucagggccaaccucauaccagcugauugucaacaaccaaaauuggucgggguacucaggggcauucauagacuacugggcaaacaaggaaugcuucaauccuuguuuuuauguggagcuaaucagagggagacccaaagagauugauguacugugggcuuccaauagcaugguggcucucuguggauccagggagcgauugggaucaugguccuggcaugauggugcagaaaucaucuacuuuaaguag

SEQ ID NO: 58011 - RNA, 1380 nt, Artificial Sequence
  derived and/or modified CDS sequence (wt) from neuraminidase__InfluenzaA__AKS48040
augaauccaaaucaaaagauaacaugcauuucagcaacaggaaugacacuaucggugguaagccugcuaauaggaaucgccaauuugggccuaaauaucggacuacacuacaaagugagugauucaacaacuauaaacauuccaaacaugaaugagaccaacccaacaacaacaaacaucacuaacauuauagugaauaagaacgaagaaagaacauuucucaacuugaccaagccacuaugugaagucaacucauggcacauucuaucgaaagacaaugcaauaagaauaggugaggaugcucauauacuggucacaagggaaccuuacuuguccugugauccacaaggaugcaggauguuugcucugagucaaggcacaacacucagagggcgacaugcgaauggaaccauacaugauaggagcccauuucgagcucuuauaaguugggaaaugggucaggcacccaguccauauaauacuagggucgaaugcauaggauggucaagcacgucaugccaugauggcauaucaaggaugucaauaugcauaucaggaccgaauaacaaugcaucggcaguggugugguacagggggagaccaguaacagaaaucccaucauggguagggaacauucuuaggacucaagaaucagaauguguaugccauaaaggaaucugcccaguggucaugacagaugguccagcaaacaacaaggcagcaacuaagauaaucuacuucaaagagggaaagauacagaaaauugaagaacuacaagggaacgcucaacacaucgaagaguguucaugcuacggagcagcagggaugaucaaauguguaugcagagacaauuggaagggggcaaauagaccaauaaucacuauagaucccgaaaugaugacccacacaagcaaauacuuguguucaaaaaucuuaaccgacacaagucguccuaaugaccccaccaaugggaacugcgaugcgccaauaacaggagggagcccagacccagggguaaaaggguuugcauuccuagacggggagaauucauggcuuggaaggacaauuagcaaagacuccagaucaggcuacgaaauguuaaaggucccaaaugcagaaaccgacacucaaucagggccaaccucauaccagcugauugucaacaaccaaaauuggucgggguacucaggggcauucauagacuacugggcaaacaaggaaugcuucaauccuuguuuuuauguggagcuaaucagagggagacccaaagagauugauguacugugggcuuccaauagcaugguggcucucuguggauccagggagcgauugggaucaugguccuggcaugauggugcugaaaucaucuacuuuaaguag

SEQ ID NO: 58012 - RNA, 1380 nt, Artificial Sequence
  derived and/or modified CDS sequence (wt) from neuraminidase__InfluenzaA__ALO75898
augaauccaaaucaaaagauaacaugcauuucagcaacaggaguaacacuaucggugguaagccugcuaauaggaaucgccaauuugggccuaaauaucggacuacacuacaaagugagugauucaacaacuauaaacauuccaaacaugaaugagaccaacccaacaacaacaaacaucacuaacauuauagugaauaagaacgaagaaagaacauuucucaacuugaccaagccacuaugugaagucaacucauggcacauucuaucgaaagacaaugcaauaagaauaggugaggaugcucauauacuggucacaagggaaccuuacuuguccugugauccacaaggaugcaggauguuugcucugagucaaggcacaacacucagagggcgacaugcgaauggaaccauacaugauaggagcccauuucgagcucuuauaaguugggaaaugggucaggcacccaguccauauaauacuagggucgaaugcauaggauggucaagcacgucaugccaugauggcauaucaaggaugucaauaugcauaucaggaccgaauaacaaugcaucggcaguggugugguacagggggagaccaguaacagaaaucccaucauggguagggaacauucuuaggacucaagaaucagaauguguaugccauaaaggaaucugcccaguggucaugacagaugguccagcaaacaacaaggcagcaacuaagauaaucuacuucaaagagggaaagauacagaaaauugaagaacugcaagggaacgcucaacacaucgaagaguguucaugcuacggagcagcagggaugaucaaauguguaugcagagacaauuggaagggggcaaauagaccaauaaucacuauagaucccgaaaugaugacccacacaagcaaauacuuguguucaaaaaucuuaaccgacacaagucguccuaaugaccccaccaaugggaacugcgaugcgccaauaacaggagggagcccagacccagggguaaaaggguuugcauuccuagacggggagaauucauggcuuggaaggacaauuagcaaagacuccagaucaggcuacgaaauguuaaaggucccaaaugcagaaaccgacacucaaucagggccaaccucauaccagcugauugucaacaaccaaaauuggucgggguacucaggggcauucauagacuacugggcaaacaaggaaugcuucaauccuuguuuuuauguggagcuaaucagagggagacccaaagagauugauguacugugggcuuccaauagcaugguggcucucuguggauccagggagcgauugggaucaugguccuggcaugauggugcagaaaucaucuacuuuaaguag

SEQ ID NO: 58013 - RNA, 1380 nt, Artificial Sequence
  derived and/or modified CDS sequence (wt) from neuraminidase__InfluenzaA__ALO75910
augaauccaaaucaaaagauaacaugcauuucagcaacaggaguaacacuaucggugguaagccugcuaauaggaaucgccaauuugggccuaaauaucggacuacacuacaaagugagugauucaacaacuauaaacauuccaaacaugaaugagaccaacccaacaacaacaaacaucacuaacauuauagugaauaagaacgaagaaagaacauuucucaacuugaccaagccacuaugugaagucaacucauggcacauucuaucgaaagacaaugcaauaagaauaggugaggaugcucauauacuggucacaagggaaccuuacuuguccugugauccacaaggaugcaggauguuugcucugagucaaggcacaacacucagagggcgacaugcgaauggaaccauacaugauaggagcccauuucgagcucuuauaaguugggaaaugggucaggcacccaguccauauaauacuagggucgaaugcauaggauggucaagcacgucaugccaugauggcauaucaaggaugucaauaugcauaucaggaccgaauaacaaugcaucggcaguggugugguacagggggagaccaguaacagaaaucccaucauggguagggaacauucuuaggacucaagaaucagaauguguaugccauaaaggaaucugcccaguggucaugacagaugguccagcaaacaacaaggcagcaacuaagauaaucuacuucaaagagggaaagauacagaaaauugaagaacuacaagggaacgcucaacacaucgaagaguguucaugcuacggagcagcagggaugaucaaauguguaugcagagacaauuggaagggggcaaauagaccaauaaucacuauagaucccgaaaugaugacccacacaagcaaauacuuguguucaaaaaucuuaaccgacacaagucguccuaaugaccccaccaaugggaacugcgaugcgccaauaacaggagggagcccagacccagggguaaaaggguuugcauuccuagacggggagaauucauggcuuggaaggacaauuagcaaagacuccagaucaggcuacgaaauguuaaaggucccaaaugcagaaaccgacacucaaucagggccaaccucauaccagcugauugucaacaaccaaaauuggucgggguacucaggggcauucauagacuacugggcaaacaaggaaugcuucaauccuuguuuuuauguggagcuaaucagagggagacccaaagagauugauguacugugggcuuccaauagcaugguggcucucuguggauccagggagcgauugggaucaugguccuggcaugauggugcagaaaucaucuacuuuaaguag

SEQ ID NO: 58014 - RNA, 1380 nt, Artificial Sequence
  derived and/or modified CDS sequence (wt) from neuraminidase__InfluenzaA__ALO75922
augaauccaaaucaaaagauaacaugcauuucagcaacaggaguaacacuaucggugguaagccugcuaauaggaaucgccaauuugggccuaaauaucggacuacacuacaaagugagugauucaacaacuauaaacauuccaaacaugaaugagaccaacccaacaacaacaaacaucacuaacauuauagugaauaagaacgaagaaagaacauuucucaacuugaccaagccacuaugugaagucaacucauggcacauucuaucgaaagacaaugcaauaagaauaggugaggaugcucauauacuggucacaagggaaccuuacuuguccugugauccacaaggaugcaggauguuugcucugagucaaggcacaacacucagagggcgacaugcgaauggaaccauacaugauaggagcccauuucgagcucuuauaaguugggaaaugggucaggcacccaguccauauaauacuagggucgaaugcauaggauggucaagcacgucaugccaugauggcauaucaaggaugucaauaugcauaucaggaccgaauaacaaugcaucggcaguggugugguacagggggagaccaguaacagaaaucccaucauggguagggaacauucuuaggacucaagaaucagaauguguaugccauaaaggaaucugcccaguggucaugacagaugguccagcaaacaacaaggcagcaacuaagauaaucuacuucaaagagggaaagauacagaaaauugaagaacuacaagggaacgcucaacacaucgaagaguguucaugcuacggagcagcagggaugaucaaauguguaugcagagacaauuggaagggggcaaauagaccaauaaucacuauagaucccgaaaugaugacccacacaagcaaauacuuguguucaaaaaucuuaaccgacacaagucguccuaaugaccccaccaaugggaacugcgaugagccaauaacaggagggagcccagacccagggguaaaaggguuugcauuccuagacggggagaauucauggcuuggaaggacaauuagcaaagacuccagaucaggcuacgaaauguuaaaggucccaaaugcagaaaccgacacucaaucagggccaaccucauaccagcugauugucaacaaccaaaauuggucgggguacucaggggcauucauagacuacugggcaaacaaggaaugcuucaauccuuguuuuuauguggagcuaaucagagggagacccaaagagauugauguacugugggcuuccaauagcaugguggcucucuguggauccagggagcgauugggaucaugguccuggcaugauggugcagaaaucaucuacuuuaaguag

SEQ ID NO: 58015 - RNA, 1401 nt, Artificial Sequence
  derived and/or modified CDS sequence (wt) from neuraminidase__InfluenzaA__ALT20083
augaauccaaaccagaggauaacagcaauuggcucugucucucuaaucauugcgauaauaugucuccucaugcagauugccaucuuaacaacgaccaugacacuacauuucaggcagaaugaaugcaguaacccaucgaauaaucaagugaugccaugugaaccaaucauaauagagaggaauacagugcauuugaauagcacuaccauagagagggaaauuuguccuaaaguagcagaauacaagaauuggucaaaaccacaaugucagauuacaggguucgccccuuuuucaaaggacaacucaauuaggcucucugcaaguggggacaucugggugacaagagaacccuaugucucaugcagucucaacaaauguuaucaauuugcacuugggcagggaaccacccugaaaaacaagcacucaaauggcacuacacaugauagaaccccucacagaacucuuuuaaugaaugaguuaggugucccauuucauuugggaaccaaacaaguaugcauagcauggucuaguucaagcugcuaugaugggaaagcaugguuacauguuuguguuacuggggaugauaaaaaugcuacugcuaguaucaucuaugaugggaugcuugucgacaguauugguucaugguccaaaaacauccucagaacucaggagucagaaugcguuugcaucaauggaacuugugcagugguaaugacugauggaagugcaucaggaaaggccgacacuagaguauuauuuauaagagaagggaaaauuauaaauauuagcccauugucaggaagugcucagcacguugaggaaugcucuuguuacccucgguauccugaaguuaggugugucugcagagacaauuggaagggcuccaauaggcccauucuauauauaaauauggcugauuauagcauugaguccaguuaugugugcucagggcuuguuggcgacacaccaagaaaugaugauagcuccagcagcagcaacugcagagacccuaauaacgaaagaggggccccaggagugaaagggugggccuuugacgacgggaaugauguuuggaugggacggacaaucaaaaaugguucacgcucagguuaugagaccuuuagggucgucaaugguuggaccauggcuaauucaaagucacagauuaauaggcaagucauaguugacaguaacgacuggucuggguauucugguaucuucucuguugaaggcaaaaaaugcaucaacagguguuuuuauguggaguugauaagagggagaccacaggaacccagagugugguggaccucaaauagcaucauuguguucuguggaaccucugguacauauggaacaggcucauggccugauggagcgaauaucaacuucaugccuauauaa

SEQ ID NO: 58016 - RNA, 1410 nt, Artificial Sequence
  derived and/or modified CDS sequence (wt) from neuraminidase__InfluenzaA__AMA65392
augaauccaaaccaaaagauaauaaccauugguucggucuguaugacaauuggaauggcuaacuuaauauuacaaauuggaaacauaaucucaauauggguuagccacucaauucaaauuggaaaucaaagccagauugaaacaugcaaucaaagcgucauuacuuaugaaaacaacacuuggguaaaucagacauauguuaacaucagcaacaccaacuuugcugcuggacagucagugguuuccgugaaauuagcgggcaauuccucucucugcccuguuaguggaugggcuauauacaguaaagacaacaguguaagaaucgguuccaggggggauguguuugucauaagggaaccauucauaucaugcucucccuuggaaugcagaaccuucuucuugacucaaggggccuugcuaaaugacaaacauuccaauggaaccauuaaagacaggagcccauaucgaacccuaaugagcuguccuauuggugaaguucccucuccauauaacucaagauuugagucaguugcuuggucagcaagugcuugucaugauggcaucaauuggcuaacaauuggaauuucuggcccagacaguggggcaguggcuguguuaaaguacaauggcauaauaacagacacuaucaagaguuggaggaacaauauauugagaacacaagagucugaaugugcauguguaaaugguucuugcuuuaccauaaugaccgauggaccaagugauggacaggccucauacaaaaucuucagaauagaaaagggaaagauaaucaaaucagucgaaaugaaagccccuaauuaucacuaugaggaaugcuccuguuacccugauucuagugaaaucacaugugugugcagggauaacuggcauggcucgaaucgaccgugggugucuuucaaccagaaucuggaauaucagaugggauacauaugcagugggguuuucggagacaauccacgcccuaaugauaagacaggcaguugugguccaguaucgucuaauggagcaaauggaguaaaaggauuuucauucaaauacggcaaugguguuuggauagggagaacuaaaagcauuaguucaagaaaagguuuugagaugauuugggauccgaauggauggacugggacugacaauaaauucucaauaaagcaagauaucguaggaauaaaugaguggucaggguauagcgggaguuuuguucagcauccagaacuaacagggcuggauuguauaagaccuugcuucuggguugaacuaauaagagggcgacccgaagagaacacaaucuggacuagcgggagcagcauauccuuuugugguguaaacagugacacuguggguuggucuuggccagacggugcugaguugccauuuaccauugacaaguaa

SEQ ID NO: 58017 - RNA, 1410 nt, Artificial Sequence
  derived and/or modified CDS sequence (wt) from neuraminidase__InfluenzaA__AMA65394
augaauccaaaccaaaagauaauaaccauugguucggucuguaugacaauuggaauggcuaacuuaauauuacaaauuggaaacauaaucucaauauggguuagccacucaauucaaauuggaaaucaaagccagauugaaacaugcaaucaaagcgucauuacuuaugaaaacaacacuuggguaaaucagacauauguuaacaucagcaacaccaacuuugcugcuggacagucagugguuuccgugaaauuagcgggcaauuccucucucugcccuguuaguggaugggcuauauacaguaaagacaacaguguaagaaucgguuccaagggggauguguuugucauaagggaaccauucauaucaugcucucccuuggaaugcagaaccuucuucuugacucaaggggccuugcuaaaugacaaacauuccaauggaaccauuaaagacaggagcccauaucgaacccuaaugagcuguccuauuggugaaguucccucuccauacaacucaagauuugagucagucgcuuggucagcaagugcuugucaugauggcaucaauuggcuaacaauuggaauuucuggcccagacaguggggcaguggcuguguuaaaguacaauggcauaauaacagacacuaucaagaguuggaggaacaauauauugagaacacaagagucugaaugugcauguguaaaugguucuugcuuuaccauaaugaccgauggaccaagugauggacaggccucauacaaaaucuucagaauagaaaagggaaagauaaucaaaucagucgaaaugaaagccccuaauuaucacuaugaggaaugcuccuguuacccugauucuagugaaaucacaugugugugcagggauaacuggcauggcucgaaucgaccgugggugucuuucaaccagaaucuggaauaucagaugggauacauaugcagugggguuuucggagacaauccacgcccuaaugauaagacaggcaguugugguccaguaucgucuaauggagcaaauggaguaaaaggauuuucauucaaauacggcaaugguguuuggauagggagaacuaaaagcauuaguucaagaaaagguuuugagaugauuugggauccgaauggauggacugggacugacaauaaauucucaauaaagcaagauaucguaggaauaaaugaguggucaggguauagcgggaguuuuguucagcauccagaacuaacagggcuggauuguauaagaccuugcuucuggguugaacuaauaagagggcgacccgaagagaacacaaucuggacuagcgggagcagcauauccuuuugugguguaaacagugacacuguggguuggucuuggccagacggugcugaguugccauuuaccauugacaaguaa

SEQ ID NO: 58018 - RNA, 1410 nt, Artificial Sequence
  derived and/or modified CDS sequence (wt) from neuraminidase__InfluenzaA__BAA00618
augaauccaaaucaaaagauaauaacaaugggcucugucucuaucauuauugcaauaguaugcuuacucaugcagauugccauccugguaacuacuguaacauugcauuuuagacaacaugagagcgacucccccccaagcaaccaaguaauaccgugugaaccaauuauaauagaaaggaacauaacagagauaguguauuugaauaacaccaccauagagaaagagacaugccccaaaucaguggaauacagaaauuggucaaagccgcaauguaaaauuacaggguuugcaccuuuuucuaaggacaauucaauccgacuuucugcugguggggacauuugggugacgagagagccuuaugugucaugcgauccuggcaaguguuaccaauuugcacucgggcaggggaccacacuagacaauaaacauucaaaugacacaauacaugauagaaucccacaucgaacccuauugaugaaugaauuaggagucccauuccauuuaggaaccaggcaaguguguauagcgugguccagcucaaguugucacgauggaaaagcauggcugcauguuugugucacuggggaugauaaaaaugcaacugcuagcuucauuuauaacgggagacuuguggauaguauugguucauggucucaaaauauucucagaacccaggagucagaaugcguuugcaucaaugguacuugcacaguaguaaugacugaugggagugcuucagggagagccgauacuagaauacuauucauugaagagggaaaaauuguccauauuagcccguugucaggaagugcucagcauguagaggaguguucuuguuauccccgauauccugacgucagauguaucugcagagacaacuggaaaggcucuaauagcccagucguagacauaaauaugaaagauuauagcauugauuccaguuaugugugcucagggcuuguuggcgacacaccuagaaacgacgacagaucuagcaagagcaauugcaggaauccuaacaaugagagagggaaucacggagugaaaggcugggccuuugacaauggagaugacguguggaugggaagaacgaucagcaaggauuuacgcucagguuaugaaaccuuuaaagucauuggugguugguccacaccuaauuccaaaucgcagaccaauaggcaagucauaguugacagcaauaauuggucagguuauucugguauuuucucuguugagggcaaaagcugcaucaauagaugcuuuuauguggaguugauaaggggaaggaaacaggaaacuagaguaugguggacuucaaacaguauuguuguguuuuguggcacuucagguaccuauggaacaggcucauggccugauggggcgaacaucgacuucaugccuauauaa

SEQ ID NO: 58019 - RNA, 1410 nt, Artificial Sequence
  derived and/or modified CDS sequence (wt) from neuraminidase__InfluenzaA__BAA00619
augaauccaaaucaaaagauaauaacaauuggcucugucucucucaccuuugcagcaauaugcuuccucaugcagauugccaucuugguaacuacuguaacauugaauuucaagcaauaugaaugcgacccccccgcgaccaaccaaguaaugccgugugaaccaauaauaauagaaaggaacauaacagaaauaguguauuugacuaacaccaccauagagagagagauaugccccaaauugguggaauacaggaauuggucaaagccacaauguaaaauuacaggauuugcaccuuuuuccaaggacaauucaauucggcuuucugcugguggggacauuugggugacgagagaaccuuaugugucaugcgauccuggcagguguuaucaauuugcacucggccagggaaccacacuagacaacaaacauucaaaugacacaauacaugauagaaccccucaucgaacccuauugaugaaugaguuggguguuccauuucauuuaggaaccaggcaaguguguauagcaugguccagcucaaguugucacgauggaaaagcauggcugcaugucuguaucacuggguaugauaaaaaugcaacugcuagcuucauuuacgaugggaggcucguagacaguauugguucauggucuaaaaauauccucaggacccaggagucggaaugcguuugcaucaaugggacuuguacuguaguaaugacugauggaagugcuucaggaagagcugauacuagaauacuauucauugaagaggggagaauuguucauauuagcccauugucaggaagugcucagcauguggaggaguguuccuguuauccucgauauccuggugucagauguaucugcagagacaacuggaaaggcucuaauaggcccguaguggauauaaaugugaaagacuauagcaucaauuccaguuacgugugcucagggcuuguaggcgacacacccagaaacaacgacagaucuagcaauagcuauugccagaauccuaacaaugagaaagggaaucacggagugaaaggcugggccuuugacgauggaaaugacguguggaugggaagaacgaucagugaggauucacgcucagguuaucaaaccuucaaagucauuggcgguuggucuacaccuaacuccaaauugcagauaaauaggcaagucauaguugacagugauaauaggucagguuauucuggaauuuucucuguugagggcaaaagcugcaucaauagguguuuuuauguggagcugauaaggggaaggagacaagaaacuagaguaugguggaccucaaacaguauuguuguguuuugcggcacuucagguaccuaugggacaggcucauggccugauggggcggacaucaaucucaugccuauauaa

SEQ ID NO: 58020 - RNA, 1410 nt, Artificial Sequence
  derived and/or modified CDS sequence (wt) from neuraminidase__InfluenzaA__BAA00620
augaauccaaaucaaaagauaaugacaauuggcucuguaucucucaucauugcagcaguaugcuuccucaugcagauugccauccugguaacuacgguaacauugcauuuuaaacaaugugagugcgacucacccucgaacaaccaaguaaaaccgugugaaccaauaauaauagagaggaacauaacugagauaguguauuugaauaacaccaccauagagaaagagacaugccccaaguuaguugaauacagaaauuggucaaagccgcaauguaaaauuacaggauuugcaccuuuuucuaaggacaauucaauccgacuuucugcugguggggacauuuggguaacgagagagccuuaugugucgugcgauccuggcaaguguuaucaauuugcacucgggcaggggaccacacuagacaacaaacauucaaaugacacaauacaugauagaaucccacaucgaacccuauugaugaaugaauuggguguuccauuucauuuaggaaccagacaaguguguauagcaugguccagcucaaguugucacgauggaaaagcaugguugcauguuugugucacuggggaugauaaaaaugcaacugcuagcuucauuuaugacgggaggcuuguggacaguauugguucauggucucaaaauauccucaggacccaggagucggaaugcguuuguaucaaugguacuugcacaguaguaaugacugaugggagugcuucagggagagccgauacuagaauacuauucauugaagagggaaaaauuguccauauuagcccguugucaggaagugcucagcauguagaggaguguuccuguuauccucgauauccuaacgucagauguaucugcagagacaauuggaaaggcucuaauaggcccaucguagacauaaauaugaaagauuauagcauugauuccaguuauguuugcucagggcuuguuggcgacacaccuagaaacgacgacagaucuagcaagagcaauugcaggaauccuaacaaugagaaagggaaucacggagugaaaggcugggccuuugacaauggagaugacguguggaugggaagaacgaucagcaaggauuuacgcucagguuaugaaaccuuuaaagucauuggugguugguucacaccuaauuccaaaucgcaggucaauagacaagucauaguugacagcgauaaucggucagguuauucugguauuuucucuguugagggcaaaagcugcaucaauaggugcuuuuauguggaguugauaaggggaaggggacaggagacuagaguaugguggacuucaaauaguauuguuguguuuugcggcacuucagguaccuauggaaaaggcucauggccugauggggcgaauaucaacuucaugccuauauaa

SEQ ID NO: 58021 - RNA, 1410 nt, Artificial Sequence
  derived and/or modified CDS sequence (wt) from neuraminidase__InfluenzaA__BAA00621
augaauccaaaucaaaagauaauaacaauuggcucugucucucucaccauugcaacaauaugcuuccucaugcagauugccauccugguaacuacuguaacauugcauuucaagcaauaugagugcgacuccccagcgaacaaccaaguaaugccgugugaaccaauaauaauagaaaggaacauaacagagauaguguauuugacuaacaccaccauagaaaaagagauaugccccaaauuaguggaauacaggaauuggucaaagccacaauguaaaauuacaggauuugcaccuuucucuaaggacaauucaauucggcuuucugcugguggggacauuugggugacgagagaaccuuaugugucaugcgauccuggcaaguguuaucaauuugcacucgggcaggggaccacacuagacaacaaacauucaaaugacacaauacaugauagaaccccucaucgaacccuauugaugaaugaguuggguguuccauuucacuugggaaccaggcaaguguguauagcaugguccagcucaaguugucacgauggaaaagcauggcugcauguuugugucacuggguaugauaaaaaugcaacugcuagcuucauuuacgaugggaggcuuguagacagcauugguucauggucucaaaauauccucaggacccaggagucggaauguguuuguaucaaugggacuuguacaguaguaaugacugauggaagugcuucaggaagagcugauacuaaaauacuauucauugaagaggggaaaauuguucauacuagcccauugucaggaagugcucagcauguagaggaguguuccuguuacccucgauauccuggugucagauguaucugcagagacaacuggaaaggcucuaauaggccagucguagauauaaaugugaaagauuauagcauugauuccaguuaugugugcucagggcuugugggcgacacacccagaaaaaacgacagaucuagcaguagcuauugccggaauccuaacaaugaaaaagggacucacggagugaaaggaugggccuuugacgauggaaaugacguguggaugggaagaacgaucagcgaggauucacgcucagguuaugaaaccuucaaagucauuggugguugguccacaccuaauuccaaauugcagauaaauaggcaagucauaguugacagcaaugauaggucagguuauucugguauuuucucuguugagggcaaaagcugcaucaauaggugcuuuuauguggaguugauaaggggaagggaacaggaaacuagaguaugguggaccucaaacaguauuguuguguuuuguggcacuucagguaccuaugggacaggcucauggccugauggggcggacaucaaucucaugccuauauaa

SEQ ID NO: 58022 - RNA, 1413 nt, Artificial Sequence
  derived and/or modified CDS sequence (wt) from neuraminidase__InfluenzaA__BAA06714
augaauccaaaucagaaaauaauaaccauuggaucaaucaguauggcaaucggaauaauuagucuaauauuacaaauaggaaauauuauuucaauauggguuagccacucaauccaaacuggaagucaaaaccacacuggaauaugcaaccaaagaaucauuacauaugaaaauagcaccuggguaaaucaaacauauguuaauauuaacaacacuaauguuguugcuggaaaggacaaaacuucagugacauuggccggcaauucaucucuuuguccuauccgugggugggcuauauacacaaaagacaacagcauaagaauugguuccaaaggagauguuuuugucauaagagaaccuuuuauaucauguucucacuuggaaugcagaaccuuuuuucugacccaaggugcucuauuaaaugacaagcauucaaaugggaccguuaaggacaggagcccuuauaggcgcuuaaugagcuguccucuaggugaagcuccgucuccauacaauucaagguuugaaucgauugcuuggucagcaagcgcaugccaugauggcaugggcuggcuaacaaucggaauuucugguccagaugauggagcaguggcuguacuaaaauacaacggcauaauaacugaaaccauaaaaaguuggaagaagcgaauauuaagaacacaagagucugaaugugucuguguaaacgguucauguuuuaccauaaugaccgauggcccgaguaaugggcaggccucguacagaaucuucaaaaucgagaaggggaagguuacuaaaucaauagaguuggaugcacccaauucucauuacgaggaauguuccuguuacccagacaccggcacagugaugugugugugcagggacaauuggcacgguucgaaucgaccuugggugucuuuuaaucaaaaccuggauuaucaaauaggauacaucugcagugguguuuucggugacaauccgccucccaaagauggaaaaggcagcugugauccaguaacuguugauggagcagacggaguaaagggguuuucauacagauaugguaaugguguuuggauaggaaggacuaaaaguaacagauucagaaagggauuugagaugauuugggauccuaauggauggacagauaccgacagugauuucuuagugaaacaggauguaguggcaaugacugauuggucaggguacagcggaaguuucguucaacauccugagcuaacaggauuggacuguaugaggccuugcuucuggguugaauuagucagagggcggccuagagaaaauacaacaaucuggacuagugggagcagcauuucuuuuuguggcgugaauagugauacugcaaauuggucuuggccagacggugccgaguugccauucaccauugacaaguag

SEQ ID NO: 58023 - RNA, 1413 nt, Artificial Sequence
  derived and/or modified CDS sequence (wt) from neuraminidase__InfluenzaA__BAA06715
augaauccaaaucagaaaauaauaaccauuggaucaaucaguauggcaaucggaauaauuagucuaauauugcaaauaggaaauauuauuucaauaugggcuagccacucaauccaaacuggaagucaaaaccacacuggaauaugcaaccaaagaaucauuacauaugaaaauagcaccugggugaaucaaacauauguuaauauuaacaacacuaauguuguugcuggaaaggacaaaacuucagugacauuggccggcaauucaucucuuugcccuauccgugggugggcuauauacacaaaagacaacagcauaagaauugguuccaaaggagauguuuuugucauaagagagccuuuuauaucauguucucacuuggaaugcagaaccuuuuuucugacccaaggugcucuauuaaaugacaagcauucaaaugggaccguuaaggacagaagcccuuauagggccuuaaugagcuguccucuaggugaagcuccgucuccauacaauucaagauuugaaucaguugcuuggucagcaagcgcaugccaugauggcaugggcuggcuaacaaucggaauuucugguccagauaauggagcaguggcuguacuaaaauacaacggcauaauaacugaaaccauaaaaaguuggaagaagcgaauauuaagaacacaagagucugaaugugucugugugaacgguucauguuuuaccauaaugaccgauggcccgaguaauggggccgccucguacagaaucuucaaaaucgagaaggggaagguuacuaaaucaauagaguuggaugcacccaauuaucauuacgaggaauguuccuguuacccagacaccggcacagugaugugugugugcagggacaauuggcacgguucaaaucgaccuuccgugucuuuuaaucaaaaccuggauuaucaaauaggauacaucugcagugggguguucggugacaauccgcgucccaaagauggagaaggcagcuguaauccagugacuguugauggagcagacggaguaaagggguuuucauacagauaugguaaugguguuuggauaggaaggacuaaaaguaacagacucagaaagggauuugagaugauuugggauccuaauggauggacagauaccgacagugauuucucagugaaacaggaugucguggcaaugacugauuggucaggguacagcggaaguuucguucaacauccugagcuaacaggauuggacuguaugagaccuugcuucuggguugaauuaaucagagggcgaccuagagaaaagacaacaaucuggacuagugggagcagcauuucuuuuuguggcguaaauagcgauacugcaaacuggucuuggccagacggugccgaguugccauucaccauugacaaguag

SEQ ID NO: 58024 - RNA, 1410 nt, Artificial Sequence
  derived and/or modified CDS sequence (wt) from neuraminidase__InfluenzaA__BAA06716
augaauacaaaucaaagaauaauaaccauugggacaaucugucuaauaguuggaauaauuagucuauuauugcagauaggaaauauaaucuuguuauggaugagccauucaauucagacuggagaaaaaagccauccuaagguaugcaaccaaagugucauuaccuaugaaaacaacacaugggugaaccagacuuauguaaacauuagcaauaccaauauugcugcuggacagggugugacuccaauaauacuagccggcaauuccucucuuugcccaaucagugggugggcuauauacagcaaagacaauagcauaaggauugguuccaaaggagacauuuuugucaugagagagccauucauuucaugcucucacuuggaaugcagaaccuuuuuucugacccaaggcgcuuugcugaaugacaggcauucuaauggaaccgucaaggacaggaguccuuauagaaccuuaaugagcugccccaucggugaagcuccaucuccguacaauucaagguucgaaucaguugcuuggucagcaagugcaugccaugauggaaugggauggcuaacaaucgggauuuccgguccagauaauggagcaguggcuguuuuaaaauacaaugguauaauaacagauacaauaaaaaguuggagaaacaaaauauuaagaacacaagagucugaauguguuuguauaaacgguucguguuuuacuauaaugacugacggcccaagcaaugggcaagccucguacaaauuauucaaaauggagaaagggaagauuauuaagucaauugagcuggaugcaccuaauuaccacuaugaggaaugcuccuguuacccugauacaggcaaaguggugugugugugcagagacaauuggcaugcuucgaaucgaccaugggucucuuucgaucagaaucuugauuaucaaauaggguacauaugcagugggguuuucggugauaauccgcguucuaaugaugggaaaggcaauuguggcccaguacuuucuaauggagcaaauggagugaagggguuuucauuuagauauggcaaugguguuuggauaggaagaacuaaaaguaucagcucuagacguggauuugagaugauuugggauccuaauggauggacagaaacugauaguaguuucucuaugaagcaagauauuauagcauuaacugauuggucgggauacaguggaaguuuuguccaacauccugaauuaacaggaaugaacugcauaaggccuuguuucuggguagaguuaaucagagggcaacccaaggagagcacaaucuggacuaguggaagcagcauuucuuucuguggcgugaacaguggcacugcaagcuggucauggccagacggagcugaucugccauucaccauugacaaguag

SEQ ID NO: 58025 - RNA, 1413 nt, Artificial Sequence
  derived and/or modified CDS sequence (wt) from neuraminidase__InfluenzaA__BAA06717
augaauccaaaucagaaaauaauaaccauuggaucaaucaguauggcaaucggaauaauuagucuaauauugcaaauagggaauauuauuucaauaugggcgagccacucaauccaaacuggaagucaaaaccacacuggaauaugcaaccaaagaaugauuacauaugaaaauagcaccugggugaaucaaacauauguuaauauuagcaacacuaauguuguugcuggaaaggacaaaacuucagugacauuagccggcaauucaucucuuugcccuauccgugggugggcuauauacacaaaagacaacagcauaagaauugguuccaaaggagauguuuuugucauaagagagccuuuuauaucauguucucacuuggaaugcagaaccuuuuuucugacccaaggugcucuauuaaaugacaagcauucaaaugggaccguuaaggacagaagcccuuauagggccuuaaugagcuguccucuaggugaagcuccgucuccauacaauucaagguuugaaucgguugcuuggucagcaagugcaugucaugauggcaugggcuggcuaacaaucggaauuucugguccagaugauggagcaguggcuguacuaaaauacaacggcauaauaacugaaaccauaaaaaguuggaggaagcaaauauuaagaacacaagagucugaaugugucuguguaaacgguucauguuuuaccauaaugaccgauggcccgagugaugggccggccucguacagaaucuucaaaaucgagaaggggaagguuacuaaaucaauagaguuggaugcacccaauuaucauuacgaggaauguuccuguuacccagacaccggcacagugaugugugugugcagggacaauuggcacgguucaaaucgaccuugggugucuuuuaaucaaaaccuggauuaucaaauaggauacaucugcagugggguguucggugacaauccgcgucccaaagauggagaaggcagcuguaauccaguaacuguugauggagcagacggaguaaagggguuuucauacagauaugguaaugguguuuggauaggaaggacuaaaaguaacagacucagaaagggauuugagaugauuugggauccuaauggauggacagauaccgacagugauuucucagugaaacaggaugucguggcaaugacugauuggucaggguacagcggaaguuucguucaacauccugagcuaacaggauuggacuguaugagaccuugcuucuggguugaauuaaucagagggcgaccuagagaaaagacaacaaucuggacuagugggagcagcauuucuuuuuguggcguaaauagcgauacugcaaacuggucuuggccagacggugccgaguugccauucaccauugacaaguag

SEQ ID NO: 58026 - RNA, 1413 nt, Artificial Sequence
  derived and/or modified CDS sequence (wt) from neuraminidase__InfluenzaA__BAA06718
augaauccaaaucagaaaauaauaaccauaggaucaaucuguauggcaauaggaauaauuagucuaauauugcaaauaggaaauauuguuucaauauggauuagccacucaauccaaacuggaagucaaaacuacacuggaauaugcaaccaaagaaucauuaccuaugaaaauagcaccuggguaaaucaaacauauguuaauauuaacaacacuaauguuguugcuggacaggacacaacuucaguggcauuagccggcaauucaucucuuuguccuaucagugggugggcuauauacagcaaagacaacagcauaagaauugguuccaaaggagauguuuuugucauaagagaaccuuuuauaucauguucucacuuggaaugcagaaccuuuuuucugacccaaggugcucuauuaaaugacaagcauucaaauggaaccguuaaggacagaagcccuuauaggcgcuuaaugagcuguccuauaggugaagcuccgucucccuacaauucaagguuugaaucgguugcuuggucagcaagcgcaugucaugauggcaugggcuggcuaacaaucggaauuucugguccagaugauggagcaguggcuguacuaaaauacaacgguauaauaacugaaaccauaaaaaguuggaggaagcgaauauuaagaacacaagagucugaaugugucuguguaaacgguucauguuuuaccauaaugaccgauggcccgaauaaugggccggccucguacagaaucuucaaaaucgagaaggggaagauuacuaaaucaauagaguuggaugcacccaauucucauuacgaggaauguuccuguuacccagacgccggcacagugaugugugugugcagagacaauuggcaugguucgaaucgaccuugggugucuuuuaaucaaaaccuggauuaucaaauaggauacaucugcagugguguuuuuggugacaauccgcgucccaaagauggaaaaggcagcugugauccaguaacuguugauggagcagacggaguaaagggguuuucauacagguaugguaaugguguuuggauaggaaggacuaaaaguaacagcuccagaagaggauuugagaugauuugggauccuaauggauggacagauaccgauaguaaauucuuagugaaacaggauguaguggcaaugacugauuggucaggguacagcggaagcuucguucaacauccugaacuaacaggauuggauuguaugaggccuugcuucuggguugaauuagucagaggacgaccuagagaaaauacaacaaucuggacuagugggagcagcauuucuuuuuguggcgugaauggugauacugcaaauuggucuuggccagacggugccgaguugccauucaccauugacaaguag

SEQ ID NO: 58027 - RNA, 1413 nt, Artificial Sequence
  derived and/or modified CDS sequence (wt) from neuraminidase__InfluenzaA__BAA06720
augaauccaaaucagaaaauaauaaccauuggaucaaucaguauggcaaucggaauaauuagucuaauauugcaaauaggaaauauuauuucaauauggguuagccacucaauccaaacuggaagucaaaaccacacuggaauaugcaaccaaagaaucauuacauaugaaaauagcaccugggugaaucaaacauauguuaauauuaacaacacuaauguuguugcuggaaaggacaaaacuucagugacauuggccggcaauucaucucuuugcccuauccuugggugggcuauauacacaaaagacaacagcauaagaauugguuccaaaggagauguuuuugucauaagagaaccuuuuauaucauguucucacuuggaaugcagaaccuuuuuucugacccaaggugcucuauuaaaugacaagcauucaaaugggaccguuaaggacagaagcccuuauaggcgcuuaaugagcuguccucuaggugaagcuccgucuccauacaauucaagguuugaaucaguugcuuggucagcaagcgcaugccaugauggcaugggcuggcuaacaaucggaauuucugguccagaugauggagcaguggcuguacuaaaauacaacggcauaauaacugaaaccauaaaaaguuggaagaagcgaauauuaagaacacaagagucugaaugugucuguguaaacgguucauguuuuaccauaaugaccgauggcccgaguaauggggccgccucguacagaaucuucaaaaucgagaaggggaagguuacuaaaucaauagaguuggaugcacccaauucucauuacgaggaauguuccuguuacccagacaccggcacagugaugugugugugcagggacaauuggcacgguucaaaucgaccuugggugucuuuuaaucaaaaccuggauuaucaaauaggauacaucugcagugggguguucggugacaauccgccucccaaagauggaaaaggcagcuguaauccagugacuguugauggagcagacggaguaaagggguuuucauacagauaugguaaugguguuuggauaggaaggacuaaaaguaacagauucagaaagggauuugagaugauuugggauccuaauggauggacagauaccgacagugauuucucagugaaacaggauguaguggcaaugacugauuggucaggguacagcggaaguuucguucaacauccugagcuaacaggauuggacuguaugagaccuugcuucuggguugaauuagucagagggcggccuagagaaaauacaacaaucuggacuagugggagcagcauuucuuuuuguggcgugaauagugauacugcaaacuggucuuggccagacggugccgaguugccauucaccauugacaaguag

SEQ ID NO: 58028 - RNA, 1410 nt, Artificial Sequence
  derived and/or modified CDS sequence (wt) from neuraminidase__InfluenzaA__BAD16637
augaauccaaaucaaaagauaauaacaauuggcucugucucucucaccauugcaacaguaugcuuccucaugcagauugccauccuggcaacuacugugacauugcauuuuaagcaacaugagugcgacucccccgcgagcaaccaaguaaugccaugugaaccaauaauaauagaaaggaacauaacagagauaguguauuugaauaacaccaccauagagaaagagauuugccccgaaguaguggaauacagaaauuggucaaagccgcaaugucaaauuacaggauuugcaccuuuuucuaaggacaauucaauccggcuuucugcugguggggacauuugggugacgagagaaccuuaugugucaugcgauccuggcaaguguuaucaauuugcacucgggcaggggaccacacuagacaacaaacauucaaauggcacaauacaugauagaaucccucaucgaacccuauuaaugaaugaguuggguguuccauuucauuuaggaaccaaacaaguguguguagcaugguccagcucaaguugucacgauggaaaagcaugguugcauguuugugucacuggggaugauagaaaugcaacugcuagcuucauuuaugacgggaggcuuguggacaguauugguucauggucucaaaauauccucaggacccaggagucggaaugcguuuguaucaaugggacuugcacaguaguaaugacugauggaagugcaucaggaagagccgauacuagaauacuauucauuaaagaggggaaaauuguccauauuagcccauugucaggaagugcucagcauauagaggaguguuccuguuacccucgauauccugacgucagauguaucugcagagacaacuggaaaggcucuaauaggcccguuauagacauaaauauggaagauuauagcauugauuccaguuaugugugcucagggcuuguuggcgacacacccaggaacgacgacagcucuagcaauagcaauugcagggauccuaacaaugagagagggaauccaggagugaaaggcugggccuuugacaauggagaugauguauggaugggaagaacaaucagcaaagauucacgcucagguuaugagacuuucaaagucauuggugguugguccacaccuaauuccaaaucgcaggucaauagacaggucauaguuggcaacaauaauuggucugguuacucugguauuuucucuguugagggcaaaagcugcaucaauaggugcuuuuauguggaguugauaaggggaaugccacaggagacuagaguaugguggaccucaaacaguauuguuguguuuuguggcacuucagguacuuauggaacaggcucauggccugauggggcgaacaucaauuucaugccuauauaa

SEQ ID NO: 58029 - RNA, 1410 nt, Artificial Sequence
  derived and/or modified CDS sequence (wt) from neuraminidase__InfluenzaA__BAD16638
augaauccaaaucaaaagauaauaacaauuggcucugucucucucaccauugcaacaguaugcuuccucaugcagauugccauccuggcaacuacugugacauugcauuuuaaacaacaugagugcgacucccccgcgagcaaccaaguaaugccaugugaaccaauaauaauagaaaggaacauaacagagauaguguauuugaauaacaccaccauagagaaagagauuugccccgaaguaguggaauacagaaauuggucaaagccgcaaugucaaauuacaggauuugcaccuuuuucuaaggacaauucaauccggcuuucugcugguggggacauuugggugacgagagaaccuuaugugucaugcgauccuggcaaguguuaucaauuugcacucgggcaggggaccacacuagacaacaaacauucaaauggcacaauacaugauagaaucccucaucgaacccuauuaaugaaugaguuggguguuccauuucauuuaggaaccaaacaaguguguguagcaugguccagcucaaguugucacgauggaaaagcaugguugcauguuugugucacuggggaugauagaaaugcgacugcuagcuucauuuaugacgggaggcuuguggacaguauugguucauggucucaaaauauccucaggacccaugagucggaaugcguuuguaucaaugggacuugcacaguaguaaugacugauggaagugcaucaggaagagccgauacuagaauacuauucauuaaagaggggaaaauuguccauauuagcccauugucaggaagugcucagcauauagaggaguguuccuguuacccucgauauccugacgucagauguaucugcagagacaacuggaaaggcucuaauaggcccguuauagacauaaauauggaagauuauagcauugauuccaguuaugugugcucagggcuuguuggcgacacacccaggaacgacgacagcucuagcaauagcaauugcagggauccuaacaaugagagagggaauccaggagugaaaggcugggccuuugacaauggagaugauguauggaugggaagaacaaucaacaaagauucacgcucagguuaugaaacuuucaaagucauuggugguugguccacaccuaauuccaaaucgcaggucaauagacaggucauaguugacaacaauaauuggucugguuacucugguauuuucucuguugagggcaaaagcugcaucaauaggugcuuuuauguggaguugauaaggggaaggccacaggagacuagaguaugguggaccucaaacaguauuguuguguuuuguggcacuucagguacuuauggaacaggcucauggccugauggggcgaacaucaauuucaugccuauauaa

SEQ ID NO: 58030 - RNA, 1410 nt, Artificial Sequence
  derived and/or modified CDS sequence (wt) from neuraminidase__InfluenzaA__BAD16639
augaauccaaaucagaagauaauaacaauuggcucugucucucucaccauugcaacaguaugcuuccucaugcagauugccauccuggcaacuacugugacauugcauuuuaagcaacaugagugcgacucccccgcgagcaaccaaguaaugccaugugaaccaauaauaauagaaaggaacauaacagagauaguguauuugaauaacaccaccauagagaaagagauuugccccgaaguaguggaauacagaaauuggucaaagccgcaaugucaaauuacaggauuugcaccuuuuucuaaggacaauucaauccggcuuucugcugguggggacauuugggugacgagagaaccuuaugugucaugcgauccuggcaaguguuaucaauuugcacucgggcaggggaccacacuagacaacaaacauucaaauggcacaauacaugauagaagcccucaucgaacccuauuaaugaaugaguuggguguuccauuucauuuaggaaccaaacaagugugugcagcaugguccagcucaaguugucacgauggaaaagcaugguugcauguuugugucacuggggaugauagaaaugcaacugcuagcuucauuuaugacgggaggcuuguggacaguauugguucauggucucaaaauauccucaggacccaggagucggaaugcguuuguaucaaugggacuugcacaguaguaaugacugauggaagugcaucaggaagagccgauacuagaauacuauucauuaaagaggggaaaauuguccauauuggcccauugucaggaagugcucagcauauagaggaguguucuuguuacccucgauauccugacgucagauguaucugcagagacaacuggaaaggcucuaauaggcccguuauagacauaaauauggaagauuauagcauugauuccaguuaugugugcucagggcuuguuggcgacacacccaggaacgacgacagcucuagcaauagcaauugcagggauccuaacaaugagagagggaauccaggagugaaaggcugggccuuugacaauggagaugauguauggaugggaagaacaaucagcaaggauuuacgcucagguuaugaaacuuucaaagucauuggugguugguccacaccuaauuccaaaucgcaggucaauagacaggucauaguugacaacaauaauuggucugguuacucugguauuuucucuguugagggcaaaagcugcaucaauaggugcuuuuauguggaguugauaaggggaaggccacaggagacuagaguaugguggaccucaaacaguauuguuguauuuuguggcacuucagguacuuauggaacaggcucauggccugauggggcgaacaucaauuucaugccuauauaa

SEQ ID NO: 58031 - RNA, 1410 nt, Artificial Sequence
  derived and/or modified CDS sequence (wt) from neuraminidase__InfluenzaA__BAD16640
augaauccaaaucaaaagauaauaacaauuggcucugucucucucaccauugcaacaguaugcuuccucaugcagauugccauccugguaacuacuguaacauugcauuuuaagcaacaugagugcgacucccccgcgagcaaccaaguaaugccgugugaaccaauaauaauagaaaggaacauaacagagauaguguauuugaauaacaccaccauagagaaagagaucugccccgaaguaguggaauacagaaauuggucaaagccgcaaugucaaauuacaggauuugcaccuuuuucuaaggacaauucaauccggcuuucugcugguggggacauuugggugacgagagaaccuuaugugucaugcgauccuggcaaguguuaucaauuugcacucgggcaggggaccacacuagacaacaaacauucaaaugacacaauacaugauagaaucccucaucgaacccuauuaaugaaugaguuggguguuccauuucauuuaggaaccaggcaaguguguguagcaugguccagcucaaguugucacgauggaaaagcaugguugcauguuugugucacuggggaugauaaaaaugcaacugcuagcuucauuuaugacgggaggcuuauggacaguauugguucauggucucaaaauauccucaggacccaggagucggaaugcguuuguaucaaugggacuugcacaguaguaaugacugauggaagugcuucaggaagagccgauacuagaauacuauucauugaagaggggaaaauuguccauauuagcccauugucaggaagugcucagcauguagaggaguguuccuguuauccucgauauccugacgucagauguaucugcagagacaacuggaaaggcucuaauaggcccgucauagacauaaauauggaagauuauagcauugauuccaguuaugugugcucagggcuuguuggcgacacacccagaaacgacgacagaucuagcaauaguaauugcaggaauccuaacaaugagagagggaauccaggagugaaaggcugggccuuugacaauggagaugacguguggaugggaagaacgaucagcaaggauuuacgcucagguuaugagacuuucaaagucauuggugguugguccacaccuaauuccaaaucgcagaucaauagacaggucauaguugacagcaauaauuggucagguuacucugguauuuucucuguugagggcaaaagcugcaucaauaggugcuuuuauguggaguugauaaggggaaggcaacaggagacuagaguaugguggaccucaaacaguauuguuguguuuuguggcacuucagguacuuauggaacaggcucauggccugauggggcgaacaucaauuucaugccuauauaa

SEQ ID NO: 58032 - RNA, 1410 nt, Artificial Sequence
  derived and/or modified CDS sequence (wt) from neuraminidase__InfluenzaA__BAD16641
augaauccaaaucaaaagauaauaacaauuggcucugccucucucaccauugcaacaguaugcuuccucaugcagauugccauccugguaacuacuguaacauugcauuucaagcaacaugagugcgacucccccgcgagcaaccaaguaaugccgugugaaccaauaauaauagaaaggaacacaacagagauaguguauuugaauaacaccaccauagagaaagagauaugccccaaaguaguggaauacagaaauuggucaaagccgcaauguaaaauuacaggauuugcaccuuuuucuaaggacaauucaauccggcuuucugcugguggggacauuugggugacgagagaaccuuaugugucaugcgauccuggcaaguguuaucaauuugcacucgggcaggggaccacacuagacaacaaacauucaaaugacacaauacaugauagaaucccucaucgaacccuauugaugaaugaguuggguguuccauuucauuuaggaaccaggcaaguguguauagcaugguccagcucaaguugucacgauggaaaagcauggcugcauguuugugucacuggggaugauaaaaaugcaacugcuagcuucauuuaugacgggaggcuuguggacaguauugguucauggucucaaaauauccucaggacccaggagucggaaugcguuuguaucaaugggacuuguacaguaguaaugacugauggaagugcuucaggaagagccgauacuagaauacuauucauugaagaggggaaaauuguccauauuagcccauugucaggaagugcucagcauguagaggaguguuccuguuauccucgauauccugacgucagauguaucugcagagacaacuggaaaggcucuaauaggcccgucguagacauaaauauggaagauuauagcauugauuccaguuaugugugcucagggcuuguuggagacacaccuagaaacgacgacagaucuagcaauagcaauugcagaaauccuaacaaugagaaagggaaucaaggagugaaaggcugggccuuugacaauggagaugacguguggaugggaagaacgaucagcaaggauuuacgcucagguuaugaaacuuucaaagucauuggugguugguccacaccuaauuccaaaucgcagaucaauaggcaagucauaguugacagcgauaauaggucagguuauucugguauuuucucuguugagggcaaaagcugcaucaauaggugcuuuuauguggaguugauaaggggaaggaaacaggagacuagaguaugguggaccucaaacaguauugucguguucuguggcacuucagguaccuaugggacaggcucauggccugauggggcgaacaucaaucucaugccuauauaa

SEQ ID NO: 58033 - RNA, 1410 nt, Artificial Sequence
  derived and/or modified CDS sequence (wt) from neuraminidase__InfluenzaA__BAD16642
augaauccaaaucaaaagauaauaacaauuggcucugucucucucaccauugcaacaguaugcuuccucaugcagauugccauccugguaacuacuguaacauugcauuuuaagcaauaugagugcgacucccccgcgagcaaccaaguaaugccgugugaaccaauaauaauagaaaggaacauaacagagauaguguauuugaauaacaccaccauagacaaagagaaaugccccaaaguaguggaauacagaaauuggucaaagccgcaaugucaaauuacaggauuugcaccuuuuucuaaggacaauucaauccggcuuucugcugguggggacauuugggugacgagagaaccuuaugugucaugcgaucauggcaaguguuaucaauuugcacucgggcaggggaccacacuagacaacaaacauucaaaugacacaauacaugauagaaucccucaucgaacccuauuaaugaaugaguuggguguuccauuucauuuaggaaccaggcaaguguguauagcaugguccagcucaaguugucacgauggaaaagcauggcugcauguuuguaucacuggggaugacaaaaaugcaacugcuagcuucauuuaugacgggaggcuuguggacaguauugguucauggucucaaaauauccucagaacccaggagucggaaugcguuuguaucaaugggacuugcacaguaguaaugacugauggaagugcuucaggaagagccgauacuagaauacuauucauugaagaggggaaaauuguccauauuagcccauugucaggaagugcucagcauguagaagaguguuccuguuauccuagauauccuggcgucagauguaucugcagagacaacuggaaaggcucuaauaggcccgucguagacauaaauauggaagauuauagcauugauuccaguuaugugugcucagggcuuguuggcgacacaccuagaaacgacgacagaucuagcaauagcaauugcaggaauccuaauaaugagagagggaaucaaggagugaaaggcugggccuuugacaauggagaugacguguggaugggaagaacgaucagcaaggauuuacgcucagguuaugaaacuuucaaagucauuggugguugguccacaccuaauuccaaaucgcagaucaauagacaagucauaguugacagcgauaaucggucagguuacucugguauuuucucuguugagggcaaaagcugcaucaauaggugcuuuuauguggaguugauaaggggaaggaaacaggagacuagagugugguggaccucaaacaguauuguuguguuuuguggcacuucagguaccuauggaacaggcucauggccugauggggcgaacaucaauuucaugccuauauaa

SEQ ID NO: 58034 - RNA, 1410 nt, Artificial Sequence
  derived and/or modified CDS sequence (wt) from neuraminidase__InfluenzaA__BAD16643
augaauccaaaucaaaagauaauaacaauuggcucugucucucucaccauugcaacaauaugcuuccucaugcagauugccauccugguaacuacuguaacauugcauuucaagcaauaugagugcgacucccccgcgaacaaccaaguaaugccgugugaaccaauaauaauagaaaggaacauaacagagauaguguauuugacuaacaccaccauagagaaagagauaugccccaaauuaguggaauacaggaauuggucaaagccgcaauguaaaauuacaggauuugcaccuuuuucuaaggacaauucaauucggcuuucugcugguggggacauuugggugacgagagaaccuuaugugucaugcgauccuggcaaguguuaucaauuugcacucgggcaggggaccacacuagacaacaaacauucaaaugacacaauacaugauagaaccccucaucgaacccuauugaugaaugaguuggguguuccauuucauuugggaaccaggcaaguguguauagcaugguccagcucaaguugucacgauggaaaagcauggcugcauguuugugucacuggguaugauaaaaaugcaacugcuagcuucauuuacgaugggaggcuuguagacaguauugguucauggucucaaaauauccucaggacccaggagucggaaugcguuuguaucaaugggacuuguacaguaguaaugacugauggaagugcuucaggaagagcugauacuaaaauacuauucauugaagaggggaaaauuguucauauuagcccauugucaggaagugcucagcauguagaggaguguuccuguuauccucgauauccuggugucagauguaucugcagagacaacuggaaaggcucuaauaggcccgucguagauauaaaugugaaagauuauagcauugauuccaguuaugugugcucagggcuuguuggcgacacacccagaaacaacgacagaucuagcaauagcuauugccggaauccuaacaaugagaaagggaaucacggagugaaaggcugggccuuugacgauggaaaugacguguggaugggaagaacgaucagcgaggauucacgcucagguuaugaaaccuucaaagucauuggugguuuguucacaccuaauuccaaauugcagauaaauaggcaagucauaguugacagcgauaauaggucagguuauucugguauuuucucuguugagggcaaaagcugcaucaauaggugcuuuuauguggaguugauaaggggaagggaacaggaaacuagaguaugguggaccucaaacaguauuguuguguuuuguggcacuucagguaccuaugggacaggcucauggccugauggggcggacaucaaucucaugccuauauaa

SEQ ID NO: 58035 - RNA, 1410 nt, Artificial Sequence
  derived and/or modified CDS sequence (wt) from neuraminidase__InfluenzaA__BAD16644
augaauccaaaucaaaagauaauaacaauugggucugucucucucaccauugcaacaauaugcuuccucaugcagauugccauccugguaacuacuguaacauugcauuucaagcaauaugaaugcgacucccccccgaacaaccaaguaaugccgugugaaccaauaauaauagaaaggaacauaacagagauaguguauuugacuaacaccaccauagagaaagagauaugccccaaauuaguggaauacaggaauuggucaaagccgcaauguaaaauuacaggauuugcaccuuuuucuaaggacaauucaauucggcuuucugcugguggggacauuugggugacgagagaaccuuaugugucaugcgauccuggcaaguguuaucaauuugcacucgggcaggggaccacacuagacaacaaacauucaaaugacacaauacaugauagaaccccucaucgaacccuauugaugaaugaguuggguguuccauuucauuugggaaccaggcaaguguguauagcauggucucgcucaaguugucacgauggaaaagcauggcugcauguuugugucacuggguaugauaaaaaugcaacugcuagcuucauuuacgaugggaggcuuguagacaguauugguucaugguccaaaaauauccucaggacccaggagucggaaugcguuuguaucaaugggacuuguacaguaguaaugacugauggaagugcuucaggaagagcugauacuaaaauacuauucauugaagaggggaaaauuguucauauuagcccauugucaggaagugcucagcauguagaggaguguuccuguuauccucgauauccuggugucagauguaucugcagagacaacuggaaaggcucuaauaggcccgucguagauauaaaugugaaagauuauagcauugauuccaguuaugugugcucagggcuuguuggcgacacacccagaaacaacgacagaucuagcaauagcuauugccggaauccuaacaaugagaaagggaaucacggagugaaaggcugggccuuugacgauggaaaugacguguggaugggaagaacgaucagcgaggauucacgcucagguugugaaaccuucaaagucauuggugguugguccacaccuaauuccaaauugcagauaaauaggcaagucauaguugacagcgauaauaggucagguuauucugguauuuucucuguugagggcaaaagcugcaucaauaggugcuuuuauguggaguugauaaggggaagggaacaggaaacuagaguaugguggaccucaaacaguauuguuguguuuuguggcacuucagguaccuaugggacaggcucauggccugauggggcggacaucaaucucaugccuauauaa

SEQ ID NO: 58036 - RNA, 1410 nt, Artificial Sequence
  derived and/or modified CDS sequence (wt) from neuraminidase__InfluenzaA__BAD16645
augaauccaaaucaaaagauaauaacaauuggcucugucucucucaccauugcaacaauaugcuuccuuaugcaaauugccauccugguaacuacuguaacauugcauuucaagcaauaugagugcgacuccccagcgaacaaccaaguaaugccgugugaaccaauaauaauagaaaggaacauaacagagauaguguauuugacuaacaccaccauagaaaaagagauaugccccaaauuaguggaauacaggaauuggucaaagccacaauguaaaauuacaggauuugcaccuuucucuaaggacaauucaauucggcuuucugcugguggggacauuugggugacgagagaaccuuaugugucaugcgauccuggcaaauguuaucaauuugcacucgggcaggggaccacacuagacaacaaacauucaaaugacacaauacaugauagaaccccucaucgaacccuauugaugaaugaguuggguguuccauuucacuugggaaccaggcaaguguguauagcaugguccagcucaaguugucacgauggaaaagcauggcugcauguuugugucacuggguaugauaaaaaugcaacugcuagcuucauuuacgaugggaggcuuguagacagcauugguucauggucucaaaauauccucaggacccaggagucggaauguguuuguaucaaugggacuuguacaguaguaaugacugauggaagugcuucaggaagagcugauacuaaaauacuauucauugaagaggggaaaauuguucauacuagcccauugucaggaagugcucagcauguagaggaguguuccuguuauccucgauauccuggugucagauguaucugcagagacaacuggaaaggcucuaauaggccagucguagauauaaaugugaaagauuauagcauugauuccaguuaugugugcucagggcuugugggcgacacacccagaaacaacgacagaucuagcaguagcuauugccggaauccuaacaaugaaaaagggacucacggagugaaaggcugggccuuugacgauggaaaugacguguggaugggaagaacgaucagcgaggauucacgcucagguuaugaaaccuucaaagucauuggugguugguccacaccuaauuccaaauugcagauaaauaggcaagucauaguugacagcgauaauaggucagguuauucugguauuuucucuguugagggcaaaagcugcaucaauaggugcuuuuauguggaguugauaaggggaagggaacaggaaacuagaguaugguggaccucaaacaguauuguuguguuuuguggcacuucagguaccuaugggacaggcucauggccugauggggcggacaucaaucucaugccuauauaa

SEQ ID NO: 58037 - RNA, 1410 nt, Artificial Sequence; identical to SEQ ID NO: 54556
  derived and/or modified CDS sequence (wt) from neuraminidase__InfluenzaA__BAD16646

SEQ ID NO: 58038 - RNA, 1410 nt, Artificial Sequence
  derived and/or modified CDS sequence (wt) from neuraminidase__InfluenzaA__BAD16647
augaauccaaaucaaaagauaauaacaauuggcucugucucucucaccauugcaacaauaugcuuccucaugcagauugccauccugguaacuacuguaacauugcauuucaagcaauaugagugcgacuccccagcgaacaaccaaguaaugccgugugaaccaauaauaauagaaaggaacauaacagagauaguguauuugacuaacaccaccauagaaaaagagauaugccccaaauuaguggaauacaggaauuggucaaagccacaauguaaaauuacaggauuugcaccuuucucuaaggacaauucaauucggcuuucugcugguggggacauuugggugacgagagaaccuuaugugucaugcgauccuggcaaauguuaucaauuugcacucgggcaggggaccacacuagacaacaaacauucaaaugacacaauacaugauagaaccccucaucgaacccuauugaugaaugaguuggguguuccauuucacuugggaaccaggcaaguguguauagcaugguccagcucaaguugucacgauggaaaagcauggcugcauguuugugucacuggguaugauaaaaaugcaacugcuagcuucauuuacgaugggaggcuuguagacagcauugguucauggucucaaaauauccucaggacccaggagucggaauguguuuguaucaaugggacuuguacaguaguaaugacugauggaagugcuucaggaagagcugauacuaaaauacuauucauugaagaggggaaaauuguucauacuagcccauugucaggaagugcucagcauguagaggaguguuccuguuauccucgauauccuggugucagauguaucugcagagacaacuggaaaggcucuaauaggccagucguagauauaaaugugaaagauuauagcauugauuccaguuaugugugcucagggcuugugggcgacacacccagaaacaacgacagaucuagcaguagcuauugccggaauccuaacaaugaaaaagggacucacggagugaaaggcugggccuuugacgauggaaaugacguguggaugggaagaacgaucagcgaggauucacgcucagguuaugaaaccuucaaagucauuggugguugguccacaccuaauuccaaauugcagauaaauaggcaagucauaguugacagcgauaauaggucagguuauucugguauuuucucuguugagggcaaaagcugcaucaauaggugcuuuuauguggaguugauaaggggaagggaacaggaaacuagaguaugguggaccucaaacaguauuguuguguuuuguggcacuucagguaccuaugggacaggcucauggccugauggggcggacaucaaucucaugccuauauaa

SEQ ID NO: 58039 - RNA, 1410 nt, Artificial Sequence
  derived and/or modified CDS sequence (wt) from neuraminidase__InfluenzaA__BAD16648
augaauccaaaucaaaagauaauaacaauugguucugucucucucaccauugcaacaauaugcuuccuuaugcaaaucgccauucugguaacuacugugacauugcauuucaagcaauaugagugcagcucccccccaaacaaccaaguaaugccgugugaaccaauaauaauagaaagaaacauaacagagauaguguauuugacuaacaccaccauagagaaagagauaugccccaaacuaguggaauacagaaauuggucaaagccgcaauguaaaauuacaggauuugcaccuuuuucuaaggacaauucaauucggcuuucugcugguggggacauuugggugacgagagaaccuuaugugucaugcgauccuggcaaguguuaucaauuugcacucgggcaggggaccacacuagacaacaagcauucaaaugacacaauacaugauaggaccccuuaucgaacccuauugaugaaugaguuggguguuccauuucauuugggaaccaggcaaguguguauagcaugguccagcucaaguugucacgauggaaaagcauggcugcauguuugugucacuggguaugauaaaaaugcaacugcuagcuucauuuacgaugggaggcuuguagacaguauagguucaugguccaaaaauauccucaggacccaggagucggaauguguuuguaucuaugggacuuguacaguaguaaugacugauggaagugcuucagaaagagcugaaacuaaaauacuauucauugaagaggggaaaaucguucauauuagcccauugucaggaagugcucagcauguagaggaguguuccuguuauccucgauauccuggugucagaugugucugcagagacaacuggaaaggcuccaauaggcccgucguagauauaaaugugaaagauuauagcauuguuuccaguuaugugugcucagggcuuguuggcgacacacccagaaaaaacgacagaucuagcaguagcuauugccggaauccuaacaaugagaaagggaaucauggagugaaaggcugggccuuugacgauggaaaugacguguggaugggaagaacgaucagcgaggagucacgcucagguuaugaaaccuucaaggucauuggugguugguccacaccuaauuccaaauugcagauaaauaggcaagucauaguugacagcgauaauagguccgguuauucugguauuuucucuguugagggcaaaagcugcaucaauaggugcuuuuauguggaguugauaaggggaagggaacaggaaacuagagucugguggaccucaaacaguauuguuguguuuuguggcacuucagguaccuauggaacaggcucauggccugauggagcggacaucaaucucaugccuauauaa

SEQ ID NO: 58040 - RNA, 1410 nt, Artificial Sequence
  derived and/or modified CDS sequence (wt) from neuraminidase__InfluenzaA__BAE07203
augaauccaaaucagaagauaacaaccauuggaucaaucuguaugguaauuggaauaguuagcuugauguuacaaauugggaacauaaucucaauauggguuagucauucaauucaaacagggaaucaacaccaggcugaaccaugcaaucaaagcauuauuacuuaugaaaacaacaccuggguaaaccagacauaugucaacaucagcaauaccaauuuucuuacugagaaagcuguggcuucaguaacauuagcgggcaauucaucucuuugccccauuaguggaugggcuguauacaguaaggacaacgguauaagaaucgguuccaagggggauguguuuguuauaagagagccguucaucucaugcucccacuuggaaugcagaacuuucuuuuugacucagggagccuugcugaaugacaagcauucuaaugggaccgucaaagacagaagcccucacagaacauuaaugaguugucccgugggugaggcuccuuccccauacaacucgagguuugagucuguugcuuggucggcaagugcuugucaugauggcacuaguugguugacaauuggaauuucuggcccagacaauggggcuguggcuguauugaaauacaauggcauaauaacagacacuaucaagaguuggaggaacaacauaaugagaacucaagagucugaaugugcauguguaaauggcucuugcuuuacuguuaugacugauggaccaaguaaugggcaggcuucauacaaaaucuucagaauagaaaaagggaaaguaguuaaaucagccgaauuaaaugccccuaauuaucacuaugaggagugcuccuguuauccugaugcuggagaaaucacaugugugugcagggauaacuggcauggcucaaaucggccauggguaucuuucaaucaaaauuuggaguaucgaauaggauauauaugcaguggaguuuucggagacaauccacgccccaaugaugggacaggcaguugugguccgguguccccuaaaggggcauauggaauaaaaggguucucauuuaaauacggcaaugguguuuggaucgggagaaccaaaagcacuaauuccaggagcggcuuugaaaugauuugggauccaaauggauggacugguacggacaguaauuuuucaguaaagcaagauauuguagcuauaaccgauuggucaggauauagcgggaguuuuguccagcauccagaacugacaggauuagauugcauaagaccuuguuucuggguugagcuaaucagagggcggcccaaagagagcacaauuuggacuagugggagcagcauauccuuuugugguguaaauagugacacuguggguuggucuuggccagacggugcugaguugccauucaccauugacaaguag

SEQ ID NO: 58041 - RNA, 1410 nt, Artificial Sequence
  derived and/or modified CDS sequence (wt) from neuraminidase__InfluenzaA__BAF46322
augaauccaaauccaaagauaauaacgauuggcucuguuucucucaccauuuccacaauaugcuucuucaugcaaauugccaucuugauaacuacuguaacauugcauuuuaagcaauaugaauucaacuccccuccaaacaaccaagugaugcugugugaaccaacaauaauagaaagaaacauaacagagauaguguaucugaccaacaccaccauagagaaggaaauaugccccaaacuagcagaauacaggaauuggucaaagccgcaaugugacauuacaggauuugcaccuuuuucuaaggacaauucgauuaggcuuuccgcugguggggacaucugggugacaagagaaccuuaugugucaugcgauccugacaaguguuaucaauuugcucuuggacagggaacaacacuaaacaacgugcauucaaaugacacagugcaugauaggaccccuuaucggacccuauugaugaaugaguuagguguuccauuucaucuggggaccaagcaagugugcauagcaugguccagcucaaguugucacgauggaaaagcauggcugcauguuuguguaacgggggaugauaaaaaugcaacugcuagcuucauuuacaaugggaggcuuguagauaguauuguuucaugguccaaaaaaauccucaggacccaggagucagaaugcguuuguaucaauggaacuuguacaguaguaaugacugaugggagugcuucaggaaaagcugauacuaaaauacuauucauugaggaggggaaaaucguucauacuagcacauugucaggaagugcucagcaugucgaggagugcuccugcuauccucgauauccuggugucagaugugucugcagagacaacuggaaaggcuccaauaggcccaucguagauauaaacauaaaggauuauagcauuguuuccaguuaugugugcucaggacuuguuggagacacacccagaaaaaacgacagcuccagcaguagccauugcuuggauccuaacaaugaagaagguggucauggagugaaaggcugggccuuugaugauggaaaugacguguggaugggaagaacgaucagcgagaaguuacgcucaggauaugaaaccuucaaagucauugaaggcugguccaacccuaauuccaaauugcagauaaauaggcaagucauaguugacagagguaauagguccgguuauucugguauuuucucuguugaaggcaaaagcugcaucaaucggugcuuuuauguggaguugauaaggggaagaaaagaggaaacugaagucuuguggaccucaaacaguauuguuguguuuuguggcaccucagguacauauggaacaggcucauggccugauggggcggacaucaaucucaugccuauauaa

SEQ ID NO: 58042 - RNA, 1410 nt, Artificial Sequence
  derived and/or modified CDS sequence (wt) from neuraminidase__InfluenzaA__BAF46323
augaauccaaaucaaaagauaauaacgauuggcucuguuucucucaccauuuccacaauaugcuucuucaugcaaauugccaucuugauaacuacuguaacauugcauuuuaagcaauaugaauucaacuccccuccaaacaaccaagugaugcugugugaaccaacaauaauagaaagaaacauaacagagauaguguaucugaccaacaccaccauagagaaggaaauaugccccaaacuagcagaauacaggaauuggucaaagccgcaaugugacauuacaggauuugcaccuuuuucuaaggacaauucgauuaggcuuuccgcugguggggacaucugggugacaagagaaccuuaugugucaugcgauccugacaaguguuaucaauuugcucuuggacagggaacaacacuaaacaacgugcauucaaaugacacagugcaugauaggaccccuuaucggacccuauugaugaaugaguuagguguuccauuucaucuggggaccaagcaagugugcauagcaugguccagcucaaguugucacgauggaaaagcauggcugcauguuuguguaacgggggaugauaaaaaugcaacugcuagcuucauuuacaaugggaggcuuguagauaguauuguuucaugguccaaaaaaauccucaggacccaggagucagaaugcguuuguaucaauggaacuuguacaguaguaaugacugaugggagugcuucaggaaaagcugauacuaaaauacuauucauugaggaggggaaaaucguucauacuagcacauugucaggaagugcucagcaugucgaggagugcuccugcuauccucgauauccuggugucagaugugucugcagagacaacuggaaaggcuccaauaggcccaucguagauauaaacauaaaggauuauagcauuguuuccaguuaugugugcucaggacuuguuggagacacacccagaaaaaacgacagcuccagcaguagccauugcuuggauccuaacaaugaagaagguggucauggagugaaaggcugggccuuugaugauggaaaugacguguggaugggaagaacgaucagcgagaaguuacgcucaggauaugaaaccuucaaagucauugaaggcugguccaacccuaauuccaaauugcagauaaauaggcaagucauaguugacagagguaauagguccgguuauucugguauuuucucuguugaaggcaaaagcugcaucaaucggugcuuuuauguggaguugauaaggggaagaaaagaggaaacugaagucuuguggaccucaaacaguauuguuguguuuuguggcaccucagguacauauggaacaggcucauggccugauggggcggacaucaaucucaugccuauauaa

SEQ ID NO: 58043 - RNA, 1410 nt, Artificial Sequence
  derived and/or modified CDS sequence (wt) from neuraminidase__InfluenzaA__BAF46324
augaauccaaaucaaaagauaauaacgauuggcucuguuucucucaccauuuccacaauaugcuucuucaugcaaauugccauuuugauaacuacuguaacauugcauuuuaagcaauaugaauucaacuccccuccaaacaaccaagugaugcugugugaaccaacaauaauagaaagaaacauaacagagauaguguaucugaccaacaccaccauagagaaggaaauaugccccaaacuagcagaauacaggaauuggucaaagccgcaaugugacauuacaggauuugcaccuuuuucuaaggacaauucgauuaggcuuuccgcugguggggacaucugggugacaagagaaccuuaugugucaugcgauccugacaaguguuaucaauuugcucuuggacagggaacaacacuaaacaacgugcauucaaaugacauagugcaugauaggaccccuuaucggacccuauugaugaaugaguuagguguuccauuucaucuggggaccaagcaagugugcauagcaugguccagcucaaguugucacgauggaaaagcauggcugcauguuuggguaacgggggaugauaaaaaugcaacugcuagcuucauuuacaaugggaggcuuguagauaguauuguuucaugguccaaaaaaauccucaggacccaggagucagaaugcguuuguaucaauggaacuuguacaguaguaaugacugaugggagugcuucaggaaaagcugauacuaaaauacuauucauugaggaggggaaaaucguucauacuagcacauugucaggaagugcucagcaugucgaggagugcuccugcuauccucgauauccuggugucagaugugucugcagagacaacuggaaaggcuccaauaggcccaucguagauauaaacauaaaggauuauagcauuguuuccaguuaugugugcucaggacuuguuggagacacacccagaaaaaacgacagcuccagcaguagccauugcuuggauccuaacaaugaagaagguggucauggagugaaaggcugggccuuugaugauggaaaugacguguggaugggaagaacgaucagcgagaaguuacgcucaggauaugaaaccuucaaagucauugaaggcugguccaacccuaauuccaaauugcagauaaauaggcaagucauaguugacagagguaauagguccgguuauucugguauuuucucuguugaaggcaaaagcugcaucaaucggugcuuuuauguggaguugauaaggggaagaaaagaggaaacugaagucuuguggaccucaaacaguauuguuguguuuuguggcaccucagguacauauggaacaggcucauggccugauggggcggacaucaaucucaugccuauauaa

SEQ ID NO: 58044 - RNA, 1410 nt, Artificial Sequence
  derived and/or modified CDS sequence (wt) from neuraminidase__InfluenzaA__BAF46332
augaauccaaaucaaaagauaauaacgauuggcucuguuucucucaccauuuccacaauaugcuucuucaugcaaauugccaucuugauaacuacuguaacauugcauuucaagcaauaugaauucaacucccccccaaacaaccaagugaugcugugugaaccaacaauaauagaaagaaacauaacagagauaguguaucugaccaacaccaccauagagaaggaaauaugccccaaacuagcagaauacagaaaguggucaaagccgcaauguaacauuacaggauuugcaccuuuuucuaaggacaauucgauuaggcuuuccgcugguggggacaucugggugacaagagaaccuuaugugucaugcgauccugacaaguguuaucaauuugcccuuggacagggaacaacacuaaacaacgugcauucaaaugacacaguacgugauaggaccccuuaucggacccuauugaugaaugaguuagguguuccauuucaucuggggaccaagcaagugugcauagcaugguccagcucaaguugucacgauggaaaagcauggcugcauguuuguguaacgggggaugauaaaaaugcaacugcuagcuucauuuacaaugggaggcuuguagauaguauuguuucaugguccaaagaaauccucaggacccaggagucagaaugcguuuguaucaauggaacuuguacaguaguaaugacugaugggagugcuucaggaaaagcugauacuaaaauacuauucauugaggaggggaaaaucguucauacuagcacauugucaggaagugcucaccaugucgaggagugcuccugcuauccucgauauccuggugucagaugugucugcagagacaacuggaaaggcuccaauaggcccauaguagauauaaacauaaaggauuauagcauuguuuccaguuaugugugcucaggacuuguuggagacacacccagaaaaaacgacagcuccagcaguagccauugcuuggauccuaacaaugaagaagguggucauggagugaaaggcugggccuuugaugauggaaaugacguguggaugggaagaacgaucagcgagaaguuacgcucaggauaugaaaccuucaaagucauugaaggcugguccaacccuaauuccaaauugcagauaaauaggcaagucauaguugacagagguaauagguccgguuauucugguauuuucucuguugaaggcaaaagcugcaucaaucggugcuuuuauguggaguugauaaggggaagaaaagaggaaacugaagucuuguggaccucaaacaguauuguuguguuuuguggcaccucagguacauauggaacaggcucauggccugauggggcggacaucaaucucaugccuauauaa

SEQ ID NO: 58045 - RNA, 1410 nt, Artificial Sequence
  derived and/or modified CDS sequence (wt) from neuraminidase__InfluenzaA__BAF46334
augaauccaaaucaaaagauaauaacgauuggcucuguuucucucaccauuuccacaauaugcuucuucaugcaaauugccaucuugauaacuacuguaacauugcauuucaagcaauaugaauucaacucccccccaaacaaccaagugaugcugugugaaccaacaauaauagaaagaaacauaacagagauaguguaucugaccaacaccaccauagagaaggaaauaugccccaaacuagcagaauacagaaaguggucaaagccgcaauguaacauuacaggauuugcaccuuuuucuaaggacaauucgauuaggcuuuccgcugguggggacaucugggugacaagagaaccuuaugugucaugcgauccugacaaguguuaucaauuugcccuuggacagggaacaacacuaaacaacgugcauucaaaugacacaguacgugauaggaccccuuaucggacccuauugaugaaugaguuagguguuccauuucaucuggggaccaagcaagugugcauagcaugguccagcucaaguugucacgauggaaaagcauggcugcauguuuguguaacgggggaugauaaaaaugcaacugcuagcuucauuuacaaugggaggcuuguagauaguauuguuucaugguccaaagaaauccucaggacccaggagucagaaugcguuuguaucaauggaacuuguacaguaguaaugacugaugggagugcuucaggaaaagcugauacuaaaauacuauucauugaggaggggaaaaucguucauacuagcacauugucaggaagugcucagcaugucgaggagugcuccugcuauccucgauauccuggugucagaugugucugcagagacaacuggaaaggcuccaauaggcccauaguagauauaaacauaaaggauuauagcauuguuuccaguuaugugugcucaggacuuguuggagacacacccagaaaaaacgacagcuccagcaguagccauugcuuggauccuaacaaugaagaagguggucauggagugaaaggcugggccuuugaugauggaaaugacguguggaugggaagaacgaucagcgagaaguuacgcucaggauaugaaaccuucaaagucauugaaggcugguccaacccuaauuccaaauugcagauaaauaggcaagucauaguugacagagguaauagguccgguuauucugguauuuucucuguugaaggcaaaagcugcaucaaucggugcuuuuauguggaguugauaaggggaagaaaagaggaaacugaagucuuguggaccucaaacaguauuguuguguuuuguggcaccucagguacauauggaacaggcucauggccugauggggcggacaucaaucucaugccuauauaa

SEQ ID NO: 58046 - RNA, 1410 nt, Artificial Sequence; identical to SEQ ID NO: 58045
  derived and/or modified CDS sequence (wt) from neuraminidase__InfluenzaA__BAF46335

SEQ ID NO: 58047 - RNA, 1410 nt, Artificial Sequence
  derived and/or modified CDS sequence (wt) from neuraminidase__InfluenzaA__BAF46337
augaauccaaaucaaaagauaauaacgauuggcucuguuucucucaccauuuccacaauaugcuucuucaugcaaauugccaucuugauaacuacuguaacauugcauuucaagcaauaugaauucaacucccccccaaacaaccaagugaugcugugugaaccaacaauaauagaaagaaacauaacagagauaguguaucugaccaacaccaccauagagaaggaaauaugccccaaacuagcagaguacagaaaguggucaaagccgcaauguaacauuacaggauuugcaccuuuuucuaaggacaauucgauuaggcuuuccgcugguggggacaucugggugacaagagaaccuuaugugucaugcgauccugacaaguguuaucaauuugcccuuggacagggaacaacacuaaacaacgugcauucaaaugacacaguacguguuaggaccccuuaucggacccuauugaugaaugaguuagguguuccauuucaucuggggaccaagcaagugugcauagcaugguccagcucaaguugucacgauggaaaagcauggcugcauguuuguguaacgggggaugauaaaaaugcaacugcuagcuucauuuacaaugggaggcuuguagauaguauuguuucaugguccaaagaaauccucaggacccaggagucagaaugcguuuguaucaauggaacuuguacaguaguaaugacugaugggagugcuucaggaaaagcugauacuaaaauacuauucauugaggaggggaaaaucguucauacuagcacauugucaggaagugcucagcauguagaggagugcuccugcuauccucgauauccuggugucagaugugucugcagagacaacuggaaaggcuccaauaggcccauaguagauauaaacauaaaggauuauagcauuguuuccaguuaugugugcucaggacuuguuggagacacacccagaaaaaacgacagcuccagcaguagccauugcuuggauccuaacaaugaagaagguggucauggagugaaaggcugggccuuugaugauggaaaugacguguggauggcaagaacgaucagcgagaaguuacgcucaggauaugaaaccuucaaagucauugaaggcugguccaacccuaauuccaaauugcagauaaauaggcaagucauaguugacagagguaauagguccgguuauucugguauuuucucuguugaaggcaaaagcugcaucaaucggugcuuuuauguggaguugauaaggggaagaaaagaggaaacugaagucuuguggaccucaaacaguauuguuguguuuuguggcaccucagguacauauggaacaggcucauggccugauggggcggacaucaaucucaugccuauauaa

SEQ ID NO: 58048 - RNA, 1410 nt, Artificial Sequence; identical to SEQ ID NO: 58045
  derived and/or modified CDS sequence (wt) from neuraminidase__InfluenzaA__BAF46345

SEQ ID NO: 58049 - RNA, 1410 nt, Artificial Sequence
  derived and/or modified CDS sequence (wt) from neuraminidase__InfluenzaA__BAF46346
augaauccaaaucaaaagauaauaacgauuggcucuguuucucucaccauuuccacaauaugcuucuucaugcaaauugccaucuugauaacuacuguaacauugcauuucaagcaauaugaauucaacucccccccaaacaaccaagugaugcugugugaaccaacaauaauagaaagaaacauaacagagauaguguaucugaccaacaccaccauagagaaggaaauaugccccaaacuagcagaauacagaaaguggucaaagccgcaauguaacauugcaggauuugcaccuuuuucuaaggacaauucgauuaggcuuuccgcugguggggacaucugggugacaagagaaccuuaugugucaugcgauccugacaaguguuaucaauuugcccuuggacagggaacaacacuaaacaacgugcauucaaaugacacaguacgugauaggaccccuuaucggacccuauugaugaaugaguuagguguuccauuucaucuggggaccaagcaagugugcauagcaugguccagcucaaguugucacgauggaaaagcauggcugcauguuuguguaacgggggaugauaaaaaugcaacugcuagcuucauuuacaaugggaggcuuguagauaguauuguuucaugguccaaagaaauccucaggacccaggagucagaaugcguuuguaucaauggaacuuguacaguaguaaugacugaugggagugcuucaggaaaagcugauacuaaaauacuauucauugaggaggggaaaaucguucauacuagcacauugucaggaagugcucagcaugucgaggagugcuccugcuauccucgauauccuggugucauaugugucugcagagacaacuggaaaggcuccaauaggcccauaguagauauaaacauaaaggauuauagcauuguuuccaguuaugugugcucaggacuuguuggagacacacccagaaaaaacgacagcuccagcaguagccauugcuuggauccuaacaaugaagaagguggucauggagugaaaggcugggccuuugaugauggaaaugacguguggaugggaagaacgaucagcgagaaguuacgcucaggauaugaaaccuucaaagucauugaaggcugguccaacccuaauuccaaauugcagauaaauaggcaagucauaguugacagagguaauagguccgguuauucugguauuuucucuguugaaggcaaaagcugcaucaaucggugcuuuuauguggaguugauaaggggaagaaaagaggaaacugaagucuuguggaccucaaacaguauuguuguguuuuguggcaccucagguacauauggaacaggcucauggccugauggggcggacaucaaucucaugccuauauaa

SEQ ID NO: 58050 - RNA, 1410 nt, Artificial Sequence
  derived and/or modified CDS sequence (wt) from neuraminidase__InfluenzaA__BAF46347
augaauccaaaucaaaagauaauaacgauuggcucuguuucucucaccauuuccacaauaugcuucuucaugcaaauugccaucuugauaacuacuguaacauugcauuucaagcaauaugaauucaacucccccccaaacaaccaagugaugcugugugaaccaacaauaauagaaagaaacauaacagagauaguguaucugaccaacaccaccauagagaaggaaauaugccccaaacuagcagaauacagaaaguggucaaagccgcaauguaacauuacaggauuugcaccuuuuucuaaggacaauucgauuaggcuuuccgcugguggggacaucugggugacaagagaaccuuaugugucaugcgauccugacaaguguuaucaauuugcccuuggacagggaacaacacuaaacaacgugcauucaaaugacacaguacgugauaggaccccuuaucggacccuauugaugaaugaguuagguguuccauuucaucuggggaccaagcaagugugcauagcaugguccagcucaaguugucacgauggaaaagcauggcugcauguuuguguaacgggggaugauaaaaaugcaacugcuaccuucauuuacaaugggaggcuuguagauaguauuguuucaugguccaaagaaauccucaggacccaggagucagaaugcguuuguaucaauggaacuuguacaguaguaaugacugaugggagugcuucaggaaaagcugauacuaaaauacuauucauugaggaggggaaaaucguucauacuagcacauugucaggaagugcucagcaugucgaggagugcuccugcuauccucgauauccuggugucagaugugucugcagagacaacuggaaaggcuccaauaggcccauaguagauauaaacauaaaggauuauagcauuguuuccaguuaugugugcucaggacuuguuggagacacacccagaaaaaacgacagcuccagcaguagccauugcuuggauccuaacaaugaagaagguggucauggagugaaaggcugggccuuugaugauggaaaugacguguggaugggaagaacgaucagcgagaaguuacgcucaggauaugaaaccuucaaagucauugaaggcugguccaacccuaauuccaaauugcagauaaauaggcaagucauaguugacagagguaauagguccgguuauucugguauuuucucuguugaaggcaaaagcugcaucaaucggugcuuuuauguggaguugauaaggggaagaaaagaggaaacugaagucuuguggaccucaaacaguauuguuguguuuuguggcaccucagguacauauggaacaggcucauggccugauggggcggacaucaaucucaugccuauauaa

SEQ ID NO: 58051 - RNA, 1410 nt, Artificial Sequence
  derived and/or modified CDS sequence (wt) from neuraminidase__InfluenzaA__BAF46349
augaauccaaaucaaaagauaauaacgauuggcucuguuucucucaccauuuccacaauaugcuucuucaugcaaauugccaucuugauaacuacuguaacauugcauuucaagcaauaugaauucaacucccccccaaacaaccaagugaugcugugugaaccaacaauaauagaaagaaacauaacagagauaguguaucugaccaacaccaccauagagaaggaaauaugccccaaacuagcagaauauagaaaguggucaaagccgcaauguaacauuacaggauuugcaccuuuuucuaaggacaauucgauuaggcuuuccgcugguggggacaucugggugacaagagaaccuuaugugucaugcgauccugacaaguguuaucaauuugcccuuggacagggaacaacacuaaacaacgugcauucaaaugacacaguacgugcuaggaccccuuaucggacccuauugaugaaugaguuagguguuccauuucaucuggggaccaagcaagugugcauagcaugguccagcucaaguugucacgauggaaaagcauggcugcauguuuguguaacgggggaugauaaaaaugcaacugcuagcuucauuuacaaugggaggcuuguagauaguauuguuucaugguccaaagaaauccucaggacccaggagucagaaugcguuuguaucaauggaacuuguacaguaguaaugacugaugggagugcuucaggaaaagcugauacuaaaauacuauucauugaggaggggaaaaucguucauacuagcacauugucaggaagugcucagcaugucgaggagugcuccugcuauccucgauauccuggugucagaugugucugcagagacaacuggaaaggcuccaauaggcccauaguagauauaaacauaaaggauuauagcauuguuuccaguuaugugugcucaggacuuguuggagacacacccagaaaaaacgacagcuccagcaguagccauugcuuggauccuaacaaugaagaagguggucauggagugaaaggcugggccuuugaugauggaaaugacguguggaugggaagaacgaucagcgagaaguuacgcucaggauaugaaaccuucaaagucuuugaaggcugguccaacccuaauuccaaauugcagauaaauaggcaagucauaguugacagagguaauagguccgguuauucugguauuuucucuguugaaggcaaaagcugcaucaaucggugcuuuuauguggaguugauaaggggaagaaaagaggaaacugaagucuuguggaccucaaacaguauuguuguguuuuguggcaccucagguacauauggaacaggcucauggccugauggggcggacaucaaucucaugccuauauaa

SEQ ID NO: 58052 - RNA, 1410 nt, Artificial Sequence; identical to SEQ ID NO: 58045
  derived and/or modified CDS sequence (wt) from neuraminidase__InfluenzaA__BAF46350

SEQ ID NO: 58053 - RNA, 1410 nt, Artificial Sequence
  derived and/or modified CDS sequence (wt) from neuraminidase__InfluenzaA__BAF46351
augaauccaauucaaaagauaauaacgauuggcucuguuucucucaccauuuccacaauaugcuucuucaugcaaauugccaucuugauaacuacuguaacauugcauuucaagcaauaugaauucaacucccccccaaacaaccaagugaugcugugugaaccaacaauaauagaaagaaacauaacagagauaguguaucugaccaacaccaccauagagaaggaaauaugccccaaacuagcagaauacagaaaguggucaaagccgcaauguaacauuacaggauuugcaccuuuuucuaaggacaauucgauuaggcuuuccgcugguggggacaucugggugacaagagaaccuuaugugucaugcgauccugacaaguguuaucaauuugcccuuggacagggaacaacacuaaacaacgugcauucaaaugacacaguacgugauaggaccccuuaucggacccuauugaugaaugaguuagguguuccauuucaucuggggaccaagcaagugugcauagcaugguccagcucaaguugucacgauggaaaagcauggcugcauguuuguguaacgggggaugauaaaaaugcaacugcuagcuucauuuacaaugggaggcuuguagauaguauuguuucaugguccaaagaaauccucaggacccaggagucagaaugcguuuguaucaauggaacuuguacaguaguaaugacugaugggagugcuucaggaaaagcugauacuaaaauacuauucauugaggaggggaaaaucguucauacuagcacauugucaggaagugcucagcaugucgaggagugcuccugcuauccucgauauccuggugucagaugugucugcagagacaacuggaaaggcuccaauaggcccaugguagauauaaacauaaaggauuauagcauuguuuccaguuaugugugcucaggacuuguuggagacacacccagaaaaaacgacagcuccagcaguagccauugcuuggauccuaacaaugaagaagguggucauggagugaaaggcugggccuuugaugauggaaaugacguguggaugggaagaacgaucagcgagaaguuacgcucaggauaugaaaccuucaaagucauugaaggcugguccaacccuaauuccaaauugcagauaaauaggcaagucauaguugacagagguaauagguccgguuauucugguauuuucucuguugaaggcaaaagcugcaucaaucggugcuuuuauguggaguugauaaggggaagaaaagaggaaacugaagucuuguggaccucaaacaguauuguuguguuuuguggcaccucagguacauauggaacaggcucauggccugauggggcggacaucaaucucaugccuauauaa

SEQ ID NO: 58054 - RNA, 1410 nt, Artificial Sequence
  derived and/or modified CDS sequence (wt) from neuraminidase__InfluenzaA__BAF46368
augaauccaaaucaaaagauaauaacgauuggcucuguuucucucaccauuuccacaauaugcuucuucaugcaaauugccaucuugauaacuacuguaacauugcauuucaagcaauaugaauucaacucccccccaaacaaccaagugaugcugugugaaccaacaauaauagaaagaaacauaacagagauaguguaucugaccaacaccaccauagagaaggaaauaugccccaaacuagcagaauacagaaauuggucaaagccgcaauguaacauuacaggauuugcaccuuuuucuaaggacaauucgauuaggcuuuccgcugguggggacaucugggugacaagagaaccuuaugugucaugcgauccugacaaguguuaucaauuugcccuuggacagggaacaacacuaaacaacgugcauucaaaugacacaguacgugaaaggaccccuuaucggacccuauugaugaaugaguuagguguuccauuucaucuggggaccaagcaagugugcauagcaugguccagcucaaguugucacgauggaaaagcauggcugcauguuuguguaacgggggaugauaaaaaugcaacugcuagcuucauuuacaaugggaggcuuguagauaguauuguuucaugguccaaagaaauccucaggacccaggagucagaaugcguuuguaucaauggaacuuguacaguaguaaugacugaugggagugcuucaggaaaagcugauacuaaaauacuauucauugaggaggggaaaaucguucauacuagcacauugucaggaagugcucagcaugucgaggagugcuccugcuauccucgauauccuggugucagaugugucugcagagacaacuggaaaggcuccaauaggcccauaguagauauaaacauaaaggauuauagcauuguuuccaguuaugugugcucaggacuuguuggagacacacccagaaaaaacgacagcuccagcaguagccauugcuuggauccuaacaaugaagaagguggucauggagugaaaggcugggccuuugaugauggaaaugacguguggaugggaagaacgaucagcgagaaguuacgcucaggauaugaaaccuucaaagucauugaaggcugguccaacccuaauuccaaauugcagauaaauaggcaagucauaguugacagagguaauagguccgguuauucugguauuuucucuguugaaggcaaaagcugcaucaaucggugcuuuuauguggaguugauaaggggaagaaaagaggaaacugaagucuuguggaccucaaacaguauuguuguguuuuguggcaccucagguacauauggaacaggcucauggccugauggggcggacaucaaucucaugccuauauaa

SEQ ID NO: 58055 - RNA, 1410 nt, Artificial Sequence
  derived and/or modified CDS sequence (wt) from neuraminidase__InfluenzaA__BAF46369
augaauccaaaucaaaagauaauaacgauuggcucuguuucucucaccauuuccacaauaugcuucuucaugcaaauugccaucuugauaacuacugugacauugcauuucaagcaauaugaauucaacucccccccaaacaaccaagugaugcugugugaaccaacaauaauagaaagaaacauaacagagauaguguaucugaccaacaccaccauagagaaggaaauaugccccaaacuagcagaauacagaaauuggucaaagccgcaauguaacauuacaggauuugcgccuuuuucuaaggacaauucgauuaggcuuuccgcugguggggacaucugggugacaagagaaccuuaugugucaugcgauccugacaaguguuaucaauuugcccuuggacagggaacaacacuaaacaacgugcauucaaaugacacaguacaugauaggaccccuuaucggacccuauugaugaaugaguuagguguuccauuucaucuggggaccaagcaagugugcauagcaugguccagcucaaguugucacgauggaaaagcauggcugcauguuuguguaacgggggaugauaagaaugcaacugcuagcuucauuuacaaugggaagcuuguagauaguauuguuucaugguccaaagaaauccucaggacccaggagucagaaugcguuuguaucaauggaacuuguacaguaguaaugacugaugggagugcuucaggaaaagcugauacuaaaauacuauucauugaggaggggaaaaucguucauacuagcacauugucaggaagugcucagcaugucgaggagugcuccugcuauccucgauauccuggugucagaugugucugcagagacaacuggaaaggcuccaauaggcccauaguagauauaaacauaaaggauuauagcauuguuuccaguuaugugugcucaggacuuguuggagacacacccagaaaaaacgacagcuccagcaguagccauugcuuggauccuaacaaugaagaaggugggcauggagugaaaggcugggccuuugaugauggaaaugacguguggaugggaagaacgaucagcgagaagucacgcucaggauaugaaaccuuccaagucauugaaggcugguccaacucuaauuccaaauugcagauaaauaggcaagucauaguugacagagguaauagguccgguuauucugguauuuucucuguugaaggcaaaagcugcaucaaucggugcuuuuauguggaguugauaaggggaagaaaagaggaaacugaagucuuguggaccucaaacaguauuguuguguuuuguggcaccucagguacauauggaacaggcucauggccugauggggcggacaucaaucucaugccuauauaa

SEQ ID NO: 58056 - RNA, 1410 nt, Artificial Sequence
  derived and/or modified CDS sequence (wt) from neuraminidase__InfluenzaA__BAF46370
augaauccaaaucaaaagauaauaacgauuggcucuguuucucucaccauuuccacaauaugcuucuucaugcaaauugccaucuugauaacuacuguaacauugcauuucaagcaauaugaauucaacucccucccaaacaaccaagugaugcugugugaaccaacaauaauagaaaggaacauaacagagauaguguaucugaccaacaccaccauagagaaggaaauaugccccaaacuagcagaauacagaaauuggucaaagccgcaauguaacauuacaggauuugcaccuuuuucuaaggacaauucgauuaggcuuuccgcugguggggacaucugggugacaagagaaccuuaugugucaugcgauccugacaaguguuaucaauuugcccuuggacagggaacaacacuaaacaacgugcauucaaaugacacaguacaugauaggaccccuuaucggacccuauugaugaaugaguuagguguuccauuucaucuggggaccaagcaaguaugcauagcaugguccagcucaaguugucacgauggaaaagcauggcugcauguuuguguaacgggggaugauaaaaaugcaacugcuagcuucauuuacaaugggaggcuuguagauaguauuguuucaugguccaaagaaauccucaggacccaggagucagaaugcguuuguaucaauggaacuuguacaguaguaaugacugaugggagugcuucaggaaaagcugauacuaaaauacuauucauugaggaggggaaaaucguucauacuagcacauugucaggaagugcucagcaugucgaggagugcuccugcuauccucgauauccuggugucagaugugucugcagagacaacuggaaaggcuccaauaggcccauaguagauauaaacauaaaggauuauagcauuguuuccaguuaugugugcucaggacuuguuggagacacacccagaaaaaacgacagcuccagcaguagccauugcuuggauccuaacaaugaagaagguggucauggggugaaaggcugggccuuugaugauggaaaugacguguggaugggaagaacgaucagcgagaaguuacgcucaggauaugaaaccuucaaagucauugaaggcugguccaacccuaauuccaaauugcagauaaauaggcaagucauaguugacagagguaauagguccgguuauucugguauuuucucuguugaaggcaaaagcugcaucaaucggugcuuuuauguggaguugauaaggggaagaaaagaggaaacugaagucuuguggaccucaaccaguauuguuguguuuuguggcuccucagguacauauggaacaggcucauggccugauggggcggacaucaaucucaugccuauauaa

SEQ ID NO: 58057 - RNA, 1410 nt, Artificial Sequence
  derived and/or modified CDS sequence (wt) from neuraminidase__InfluenzaA__BAF46371
augaauccaaaucaaaagauaauaacgauuggcucuguuucucucaccauuuccacaauaugcuucuucaugcaaauugccaucuugauaacuacuguaacauugcauuucaagcaauaugaauucaacucccccccaaacaaccaagugaugcugugugaaccaacaauaauagaaagaaacauaacagagauagugcaucugaccaacaccaccauagagaaggaaauaugccccaaacuagcagaauacagaaauuggucaaagccgcaauguaacauuacaggauuugcaccuuuuucuaaggacaauucgauuaggcuuuccgcugguggggacaucugggugacaagagaaccuuaugugucaugcgauccugacaaguguuaucaauuugcccuuggacagggaacaacacuaaacaacgugcauucaaaugacacaguacaugauaggaccccuuaucggacccuauugaugaaugaguuagguguuccauuucaucuggggaccaagcaagugugcauagcaugguccagcucaaguugucacgauggaaaagcauggcugcauguuugugugacgggggaugauaaaaaugcaacugcuagcuucauuuacaaugggaggcuuguagauaguauuguuucaugguccaaagaaauccucaggacccaggagucagaaugcguuuguaucaauggaacuuguacaguaguaaugacugaugggagugcuucaggaaaagcugauacuaaaauacuauucauugaggaggggaaaaucguucauacuagcacauugucaggaagugcucagcaugucgaggagugcuccugcuauccucgauauccuggugucagaugugucugcagagacaacuggaaaggcuccaauaggcccauaguagauauaaacauaaaggauuauagcauuguuuccaguuaugugugcucaggacuuguuggagacacaccccgaaaaaacgacagcuccagcaguagccauugcuuggauccuaacaaugaagaagguggucauggagugaaaggcugggccuuugaugauggaaaugacguguggaugggaagaacgaucagcgagaaguuacgcucaggauaugaaaccuucaaagucauugaaggcugguccaacccuaauuccaaauugcagacaaauaggcaagucauaguugacagaaguaauagguccgguuauucugguauuuucucuguugaaggcaaaagcugcaucaaucggugcuuuuauguggaguugauaaggggaagaaaagaggaaacugaagucuuguggaccucaaacagcauuguuguguuuuguggcaccucagguacauauggaacaggcucauggccugauggggcggacaucaaucucaugccuauauaa

SEQ ID NO: 58058 - RNA, 1410 nt, Artificial Sequence
  derived and/or modified CDS sequence (wt) from neuraminidase__InfluenzaA__BAF46372
augaauccaaaucaaaagauaauaacgauuggcucuguuucucucaccauuuccacaauaugcuucuucaugcaaauugccaucuugauaacuacuguaacauugcauuuuaagcaauaugaauucaacuccccuccaaacaaccaagugaugcugugugaaccaacaauaauagaaagaaacauaacagagauaguguaucugaccaacaccaccauagagaaggaaauaugccccaaacuagcagaauacaggaauuggucaaagccgcaaugugacauugcaggauuugcaccuuuuucuaaggacaauucgauuaggcuuuccgcugguggggacaucugggugacaagagaaccuuaugugucaugcgauccugacaaguguuaucaauuugcucuuggacagggaacaacacuaaacaacgugcauucaaaugacacagugcaugauaggaccccuuaucggacccuauugaugaaugaguuagguguuccauuucaucuggggaccaagcaagugugcauagcaugguccagcucaaguugucacgauggaaaagcauggcugcauguuuguguaacgggggaugauaaaaaugcaacugcuagcuucauuuacaaugggaggcuuguagauaguauuguuucaugguccaaaaaaauccucaggacccaggagucagaaugcguuuguaucaauggaacuuguacaguaguaaugacugaugggagugcuucaggaaaagcugauacuaaaauacuauucauugaggaggggaaaaucguucauacuagcacauugucaggaagugcucagcaugucgaggagugcuccugcuauccucgauauccuggugucagaugugucugcagagacaacuggaaaggcuccaauaggcccaucguagauauaaacauaaaggauuauagcauuguuuccaguuaugugugcucaggacuuguuggagacacacccagaaaaaacgacagcuccagcaguagccauugcuuggauccuaacaaugaagaagguggucauggagugaaaggcugggccuuugaugauggaaaugacguguggaugggaagaacgaucagcgagaaguuacgcucaggauaugaaaccuucaaagucauugaaggcugguccaacccuaauuccaaauugcagauaaauaggcaagucauaguugacagagguaauagguccgguuauucugguauuuucucuguugaaggcaaaagcugcaucaaucggugcuuuuauguggaguugauaaggggaagaaaagaggaaacugaagucuuguggaccucaaacaguauuguuguguuuuguggcaccucagguacauauggaacaggcucauggccugauggggcggacaucaaucucaugccuauauaa

SEQ ID NO: 58059 - RNA, 1410 nt, Artificial Sequence
  derived and/or modified CDS sequence (wt) from neuraminidase__InfluenzaA__BAF46385
augaauccaaaucaaaagauaauaacgauuggcucuguuucucucaccauuuccacaauaugcuucuucaugcaaauugccaucuugauaacuacuguaacauugcauuucaagcaauaugaauucaacucccccccaaacaaccaagugauguugugugaaccaacaauaauagaaagaaacauaacagagauaguguaucugaccaacaccaccauagagaaggaaauaugccccaaacuagcagaauacagaaauuggucaaagccgcaauguaacauuacaggauuugcaccuuuuucuaaggacaauucgauuaggcuuuccgcugguggggacaucugggugacaagagaaccuuaugucucaugcgauccugacaaguguuaucaauuugcccuuggacagggaacaacacuaaacaacgugcauucaaaugacacaguacaugauaggaccccuuaucggacccuauugaugaaugaguuagguguuccauuucaucuggggaccaagcaagugugcauagcaugguccagcucaaguugucccgauggaaaagcauggcugcauguuuguguaacgggggaugauaaaaaugcaacugcuagcuucauuuacaaugggaggcuuguagauaguauuguuucaugguccaaagaaauccucaggacccaggagucagaaugcguuuguaucaauggaacuuguacaguaguaaugacugaugggagugcuucaggaaaagcugauacuaaaauacuauucauugaggaggggaaaaucguucauacuagcacauugucaggaagugcucagcaugucgaggagugcuccugcuauccucgauauccuggugccagaugugucugcagagacaacuggaaaggcuccaauaggcccauaguagauauaaacauaaaggauuauagcauuguuuccaguuaugugugcucaggacuuguuggagacacacccagaaaaaacgacagcuccagcaguagccauugcuuggauccuaacaaugaagaagguggucauggagugaaaggcugggccuuugaugauggaaaugacguguggaugggaagaacgaucagcgagaaguuacgcucaggauaugaaaccuucaaagucauugaaggcugguccaacccuaauuccaaauugcagacaaauaggcaagucauaguugacagagguaauagguccgguuauucugguauuuucucuguugaaggcaaaagcugcaucaaucggugcuuuuauguggaguugauaaggggaagaaaagaggaaacugaagucuuguggaccucaaacaguauuguuguguuuuguggcaccucaaguacauauggaacaggcucauggccugauggggcggauaucaaucucaugccuauauaa

SEQ ID NO: 58060 - RNA, 1410 nt, Artificial Sequence
  derived and/or modified CDS sequence (wt) from neuraminidase__InfluenzaA__BAF46386
augaauccaaaucaaaagauaauaacgauuggcucuguuucucucaccauuuccacaauaugcuucuucaugcaaauugccaucuugauaacuacuguaacauugcauuucaagcaauaugaauucaacucccccccaaacaaccaagugaugcugugugaaccaacaauaauagaaagaaacauaacagagauaguguaucugaccaacaccaccauagagaaggaaauaugccccaaacuagcagaauacagaaauuggucaaagccgcaauguaacauuacaggauuugcacccuuuucuaaggacaauucgauuaggcuuuccgcugguggggacaucugggugacaagagaaccuuaugugucaugcgauccugacaaguguuaucaauuugcccuuggacagggaacaacacuaaacaacgugcauucaaaugacacaguacaugauaggaccccuuaucggacccuauugaugaaugaguuagguguuccauuucaucuggggaccaagcaagugugcauagcaugguccagcucaaguugucacgauggaaaagcauggcugcauguuuguguaacgggggaugauaaaaaugcaacugcuagcuucauuuacaaugggaggcuuguagauaguauuguuucaugguccaaagaaauccucaggacccaggagucagaaugcguuuguaucaauggaacuuguacaguaguaaugacugaugggagugcuucaggaaaagcugauacuaaaauacuauucauugaggaggggaaaaucguucauacuagcacauugucaggaagugcucagcaugucgaggagugcuccugcuauccucgauauccuggugucagaugugucugcagagacaacuggaaaggcuccaauaggcccauaguagauauaaacauaaaggauuauagcauuguuuccaguuaugugugcucaggacuuguuggagacacacccagaaaaaacgacagcuccagcaguagccauugcuuggauccuaacaaugaagaagguggucauggagugaaaggcugggccuuugaugauggaaaugacguguggaugggaagaacgaucagcgagaaguuacgcucaggauaugaaaccuucaaagucauugaaggcugguccaacccuaauuccaaauugcagacaaauaggcaagucauaguugacagagguaauagguccgguuauucugguauuuucucuguugaaggcaaaagcugcaucaaucggugcuuuuauguggaguugauaaggggaagaaaagaggaaacugaagucuuguggaccucaaacaguauuguuguguuuuguggcaccucaaguacauauggaacaggcucauggccugauggggcggacaucaaucucaugccuauauaa

SEQ ID NO: 58061 - RNA, 1410 nt, Artificial Sequence
  derived and/or modified CDS sequence (wt) from neuraminidase__InfluenzaA__BAF46387
augaauccaaaucaaaagauaauaacgauuggcucuguuucucucaccauuuccacaauaugcuucuuuaugcaaauugccaucuugauaacuacuguaacauugcauuucaagcaauaugaauucaacucccccccaaacaaccaagugaugcugugugaaccaacaauaauagaaagaaacauaacagagauaguguaucugaccaacaccaccauagagaaggaaauaugccccaaacuagcagaauacagaaauuggucaaagccgcaauguaacauuacaggauuugcacccuuuucuaaggacaauucgauuaggcuuuccgcugguggggacaucugggugacaagagaaccuuaugugucaugcgauccugacaaguguuaucaauuugcccuuggacagggaacaacacuaaacaacgugcauucaaaugacacaguacaugauaggaccccuuaucggacccuauugaugaaugaguuagguguuccauuucaucuggggaccaagcaagugugcauagcaugguccagcucaaguugucacgauggaaaagcauggcugcauguuuguguaacgggggaugauaaaaaugcaacugcuagcuucauuuacaaugggaggcuuguagauaguauuguuucaugguccaaagaaauccucaggacccaggagucagaaugcguuuguaucaauggaacuuguacaguaguaaugacugaugggagugcuucaggaaaagcugauacuaaaauacuauucauugaggaggggaaaaucguucauacuagcacauugucaggaagugcucagcaugucgaggagugcuccugcuauccucgauauccuggugucagaugugucugcagagacaacuggaaaggcuccaauaggcccauaguagauauaaacauaaaggauuauagcauuguuuccaguuaugugugcucaggacuuguuggagacacacccagaaaaaacgacagcuccagcaguagccauugcuuggauccuaacaaugaagaagguggucauggagugaaaggcugggccuuugaugauggaaaugacguguggaugggaagaacgaucagcgagaaguuacgcucaggauaugaaaccuucaaagucauugaaggcugguccaacccuaauuccaaauugcagacaaauaggcaagucauaguugacagagguaauagguccgguuauucugguauuuucucuguugaaggcaaaagcugcaucaaucggugcuuuuauguggaguugauaaggggaagaaaagaggaaacugaagucuuguggaccucaaacaguauuguuguguuuuguggcaccucagguacauauggaacaggcucauggccugauggggcggacaucaaucucaugccuauauaa

SEQ ID NO: 58062 - RNA, 1410 nt, Artificial Sequence
  derived and/or modified CDS sequence (wt) from neuraminidase__InfluenzaA__BAF46388
augaauccaaaucaaaagauaauaacgauuggcucuguuucucucaccauuucuacaauaugcuucuucaugcaaauugccaucuugauaacuacuguaacauugcauuucaagcaauaugaauucaacucccccccaaacaaccaagugaugcugugugaaccaacaauaauagaaagaaacauaacagagauaguguaucugaccaacaccaccauagagaaggaaauaugccccaaacuagcagaauacagaaauuggucaaagccgcaauguaacauuacaggauuugcaccuuuuucuaaggacaauucgauuaggcuuuccgcugguggggacaucugggugacaagagaaccuuaugugucaugcgauccugacaaguguuaucaauuugcccuuggacagggaacaacacuaaacaacgugcauucaaaugacacaguacaugauaggaccccuuaucggacccuauugaugaaugaguuaggaguuccauuucaucuggggaccaagcaagugugcauagcaugguccagcucaaguugucacgauggaaaagcauggcugcauguuuguguaacgggggaugauaaaaaugcaacugcuagcuucauuuacaaugggaggcuuguagauaguauuguuucaugguccaaagaaauccucaggacccaggagucagaaugcguuuguaucaauggaacuuguacaguaguaaugacugaugggagugcuucaggaaaagcugauacuaaaauacuauucauugaggaggggaaaaucguucauacuagcacauugucaggaagugcucagcaugucgaggagugcuccugcuauccucgauauccuggugucagaugugucugccgagacaacuggaaaggcuccaauaggcccauaguagauauaaacauaaaggauuauagcauuguuuccaguuaugugugcucaggacuuguuggagacacacccagaaaaaacgacagcuccagcaguagccauugcuuggauccuaacaaugaagaagguggucauggagugaaaggcugggccuuugaugauggaaaugacguguggaugggaagaacgaucagcgagaaguuacgcucaggauaugaaaccuucaaagucauugaaggcugguccaacccuaauuccaaauugcagauaaauaggcaagacauaguugacagagguaauagguccgguuauucugguauuuucucuguugaaggcaaaaguugcaucaaucggugcuuuuauguggaguugauaaggggaagaaaagaggaaaaugaagucuuguggaccucaaacaguauuguuguguuuuguggcaccucagguacauauggaacaggcucauggccugauggggcggacaucaaucucaugccuauauaa

SEQ ID NO: 58063 - RNA, 1410 nt, Artificial Sequence
  derived and/or modified CDS sequence (wt) from neuraminidase__InfluenzaA__BAF47922
augaauccaaaucaaaagauaauaacgauuggcucuguuucucucaccauuuccacaauaugcuucuucaugcaaauugccaucuugauaacuacuguaacauugcauuuuaagcaauaugaauucaacucccccccaaacauccaagugaugcugugugaaccaacaauaauagaaagaaacauaacagagauaguguaucugaccaacaccaccauagagaaggaaauaugccccaaacuagcagaauacagaaauuggucaaagccgcaaugugacauuacaggauuugcaccuuuuucuaaggacaauucgauuaggcuuuccgcugguggggacaucugggugacaagagaaccuuaugugucaugcgauccugacaaguguuaucaauuugcccuuggacagggaacaacacuaaacaacgugcauucaaaugacacaguacaugauaggaccccuuaucggacccuauugaugaaugaguuagguguuccauuucaucuggggaccaagcaagugugcauagcaugguccagcucaaguugucacgauggaaaagcauggcugcauguuuguguaacgggggacgauaaaaaugcaacugcuagcuucauuuacaaugggaggcuuguagauaguauuguuucaugguccaaagaaauccucaggacccaggagucagaaugcguuuguaucaauggaacuuguacaguaguaaugaccgaugggagugcuucaggaaaagcugauacuaaaauacuguucauugaggaggggaaaaucguucauacuagcacauugucaggaagugcucagcaugucgaggagugcuccugcuauccucgauauccuggugucagaugugucugcagagacaacuggaaaggcuccaauaggcccaucguagauauaaacauaaaggauuauagcauugcuuccaguuaugugugcucaggacuuguuggagacacacccagaaaaaacgacagcuccagcaguagccauugcuuggauccuaacaaugaagaagguggucauggagugaaaggcugggccuuugaugauggaaaugacguguggaugggaagaacgaucagcgagaaguuacgcucaggauaugaaaccuucaaagucauugaaggcugguccaacccuaauuccaaauugcagauaaauaggcaagucauaguugacagagguaauagguccgguuauucugguauuuucucuguugaaggcaaaagcugcaucaaucggugcuuuuauguggaguugauaaggggaagaaaagaggaaacugaagucuuguggaccucaaacaguauuguuguguuuuguggcaccucagguacauauggaacaggcucauggccugauggggcggacaucaaucucaugccuauauaa

SEQ ID NO: 58064 - RNA, 1410 nt, Artificial Sequence
  derived and/or modified CDS sequence (wt) from neuraminidase__InfluenzaA__BAF47923
augaauccaaaucaaaagauaauaacgauuggcucuguuucucucaccauuuccacaauaugcuucuucaugcaaauugccaucuugauaacuacuguaacauugcauuucaagcaauaugaauucaacucccccccaaacaaccaagugaugcugugugaaccaacaauaauagaaagaaacauaacagagauaguguaucugaccaacaccaccauagagaaggaaauaugccccaaacuagcagaauacagaaauuggucaaagccgcaaugugacauuacaggauuugcaccuuuuucuaaggacaauucgauuaggcuuuccgcugguggggacaucugggugacaagagaaccuuaugugucaugcgauccugacaaguguuaucaauuugcccuuggacagggaacaacacuaaacaacgugcauucaaaugacacaguacaugauaggaccccuuaucggacccuauugaugaaugaguuagguguuccauuucaucuggggaccaagcaagugugcauagcaugguccagcucaaguugucacgauggaaaagcauggcugcauguuuguguaacgggggaugauaaaaaugcaacugcuagcuucauuuacaaugggaggcuuguagauaguauuguuucaugguccaaagaaauccucaggacccaggagucagaaugcguuuguaucaauggaacuuguacaguaguaaugacugaugggagugcuucaggaaaagcugauacuaaaauacuauucauugaggaggggaaaaucguucauacuagcacauugucaggaagugcucagcaugucgaggagugcuccugcuauccucgauauccuggugucagaugugucugcagagacaacuggaaaggcuccaauaggcccaucguagauauaaacauaaaggauuauagcauuguuuccaguuaugugugcucaggacuuguuggagacacacccagaaaaaacgacagcuccagcaguagccauugcuuggauccuaacaaugaagaagguggucauggagugaaaggcugggccuuugaugauggaaaugacguguggaugggaagaacgauaagcgagaaguuacgcuuaggauaugaaaccuucaaagucauugaaggcugguccaacccuaauuccaaauugcagauaaauaggcaagucauaguugacagagguaauagguccgguuauucugguauuuucucuguugaaggcaaaagcugcaucaaucggugcuuuuauguggaguugauaaggggaagaaaagaggaaacugaagucuuguggaccucaaacaguauuguuguguuuuguggcaccucagguacauauggaacaggcucauggccugauggggcggacaucaaucucaugccuauauaa

SEQ ID NO: 58065 - RNA, 1410 nt, Artificial Sequence
  derived and/or modified CDS sequence (wt) from neuraminidase__InfluenzaA__BAF47924
augaauccaaaucaaaagauaauaacgauuggcucuguuucucucaccauuuccacaauaugcuucuucaugcaaauugccaucuugauaacuacuguaacauugcauuucaagcaauaugaauucaacucccccccaaacaaccaagugaugcugugugaaccaacaauaauagaaagaaacauaacagagauaguguaucugaccaacaccaccauagagaaggaaauaugccccaaacuagcagaauacagaaauuggucaaagccgcaauguaacauuacaggauuugcacccuuuucuaaggacaauucgauuaggcuuuccgcugguggggacaucugggugacaagagaaccuuaugugucaugcgauccugacaaguguuaucaauuugcccuuggacagggaacaacacuaaacaacgugcauucaaaugacacaguacaugauaggaccccuuaucggacccuauugaugaaugaguuagguguuccauuucaucuggggaccaagcaagugugcauagcaugguccagcucaaguugucacgauggaaaagcauggcugcauguuuguguaacgggggaugauaaaaaugcaacugcuagcuucauuuacaaugggaggcuuguagauaguauuguuucaugguccaaagaaauccucaggacccaggagucagaaugcguuuguaucaauggaacuuguacaguaguaaugacugaugggagugcuucaggaaaagcugauacuaaaauacuauucauugaggaggggaaaaucguucauacuagcacauugucaggaagugcucagcaugucgaggagugcuccugcuauccucgauauccuggugucagaugugucugcagagacaacuggaaaggcuccaauaggcccauaguagauauaaacauaaaggauuauagcauuguuuccaguuaugugugcucaggacuuguuggagacacacccagaaaaaacgacagcuccagcaguagccauugcuuggauccuaacagugaagaagguggucauggagugaaaggcugggccuuugaugauggaaaugacguguggaugggaagaacgaucagcgagaaguuacgcucaggauaugaaaccuucaaagucauugaaggcugguccaacccuaauuccaaauugcagacaaauaggcaagucauaguugacagagguaauagguccgguuauucugguauuuucucuguugaaggcaaaagcugcaucaaucggugcuuuuauguggaguugauaaggggaagaaaagaggaaacugaagucuuguggaccucaaacaguauuguuguguuuuguggcaccucagguacauauggaacaggcucauggccugauggggcggacaucaaucucaugccuauauaa

SEQ ID NO: 58066 - RNA, 1410 nt, Artificial Sequence
  derived and/or modified CDS sequence (wt) from neuraminidase__InfluenzaA__BAF47925
augaauccaaaucaaaagauaauaacgauuggcucuguuucucucaccauuuccacaauaugcuucuucaugcaaauugccaucuugauaacuacuguaacauugcauuucaagcaauaugaauucaacucccccccaaacaaccaagugaugcugugugaaccaacaauaauagaaagaaacauaacagagauaguguaucugaccaacaccaccauagagaaggaaauaugccccaaacuggcagaauacagaaauuggucaaagccgcaauguaacauuacaggauuugcaccuuuuucuaaggacaauucgauuaggcuuuccgcugguggggacaucugggugacaagagaaccuuaugugucaugcgauccugacaaauguuaucaauuugcccuuggacagggaacaacacuaaacaacgugcauucaaaugacacaguacaugauaggaccccuuaucggacccuauugaugaaugaguuagguguuccauuucaucuggggaccaagcaagugugcauagcaugguccagcucaaguugucacgauggaaaagcauggcugcauguuuguguaacgggggaugauaaaaaugcaacugcuagcuucauuuacaaugggaggcuuguagauaguauuguuucaugguccaaagaaauccucaggacccaggagucagaaugcguuuguaucaauggaacuuguacaguaguaaugacugaugggagugcuucaggaaaagcugauacuaaaauacuauucauugaggaggggaaaaucguucauacuagcacauugucaggaagugcucagcaugucgaggagugcuccugcuauccucgauauccuggugucaggugugucugcagagacaacuggaaaggcuccaauaggcccauaguagauauaaacauaaaggauuauagcauuguuuccaguuaugugugcucaggacuuguuggagacacacccagaaaaaacgacagcuccagcaguagccauugcuuggauccuaacaaugaagaagguggucauggagugaaaggcugggccuuugaugauggaaaugacguguggaugggaagaacgaucagcgagaaguuacgcucaggauaugaaaccuucaaagucauugaaggcugguccaacccuaauuccaaauugcagauaaauaggcaagucauaguugacagagguaauagguccgguuauucugguauuuucucuguugaaggcaaaagcugcaucaaucggugcuuuuauguggaguugauaaggggaagaaaagaggaaacugaagucuuguggaccucaaacaguauuguuguguuuuguggcaccucagguacauauggaacaggcucauggccugauggggcggacaucaaucucaugccuauauaa

SEQ ID NO: 58067 - RNA, 1410 nt, Artificial Sequence
  derived and/or modified CDS sequence (wt) from neuraminidase__InfluenzaA__BAF47926
augaauccaaaucaaaagauaauaacgauuggcucuguuucucucaccauuuccacaauaugcuucuucaugcaaauugccaucuugauaacuacuguaacauugcauuucaagcaauaugaauucaacucccccccaaacaaccaagugaugcugugugaaccaacaauaauagagagaaacauaacagagauaguguaucugaccaacaccaccauagagaaggaaauaugccccaaacuagcagaauacagaaauuggucaaagccgcaauguaacauuacaggauuugcaccuuuuucuaaggacaauucgauuaggcuuuccgcugguggggacaucugggugacaagagaaccuuaugugucaugcgauccugacaaguguuaucaauuugcccuuggacagggaacaacacuaaacaacgugcauucaaaugacacaguacaugauaggaccccuuaucggacccuauugaugaaugaguuagguguuccauuucaucuggggaccaagcaagugugcauagcaugguccagcucaaguugucacgauggaaaagcauggcugcauguuuguguaacgggggaugauaaaaaugcaacugcuagcuucauuuacaaugggaggcuuguagauaguauuguuucaugguccaaagaaauccucaggacccaggagucagaaugcguuuguaucaauggaacuuguacaguaguaaugacugaugggagugcuucaggaaaagcugauacuaaaauacuauucauugaggaggggaaaaucguucauacuagcacauugucaggaagugcucagcaugucgaggagugcuccugcuauccucgauauccuggugucagaugugucugcagagacaacuggaaaggcuccaauaggcccauaguagauauaaacauaaaggauuauagcauuguuuccaguuaugugugcucaggacuuguuggagacacacccagaaaaaacgacagcuccagcaguagccauugcuuggauccuaacaaugaagaagguggucauggagugaaaggcugggccuuugaugauggaaaugacguguggaugggaagaacgaucagcgagaaauuacgcucaggauaugaaaccuucaaagucauugaaggcugguccaacccuaauuccaaauugcagauaaauaggcaagucauaguugacagagguaauagguccgguuauucugguauuuuuucuguugaaggcaaaagcugcaucaaucggugcuuuuauguggaguugauaaggggaagaaaagaggaaacugaaguuuuguggaccucaaacaguauuguuguguuuuguggcaccucagguacauauggaacaggcucauggccugauggggcggacaucaaucucaugccuauauaa

SEQ ID NO: 58068 - RNA, 1410 nt, Artificial Sequence
  derived and/or modified CDS sequence (wt) from neuraminidase__InfluenzaA__BAF47927
augaauccaaaucaaaagauaauaacgauuggcucuguuucucucaccauuucuacaauaugcuucuucaugcaaauugccaucuugauaacuacuguaacauugcauuucaagcaauaugaauucaacucccccccaaacaaccaagugaugcugugugaaccaacaauaauagaaagaaacauaacagagauaguguaucugaccaacaccaccauagagaaggaaauaugccccaaacuagcagaauacagaaauuggucaaagccgcaauguaacauuacaggauuugcaccuuuuucuaaggacaauucgauuaggcuuuccgcugguggggacaucugggugacaagagaaccuuaugugucaugcgauccugacaaguguuaucaauuugcccuuggacagggaacaacacuaaacaacgugcauucaaaugacacaguacaugauaggaccccuuaucggacccuauugaugaaugaguuagguguuccauuucaucuggggaccaagcaagugugcauagcaugguccagcucaaguugucacgauggaaaagcauggcugcauguuuguguaacgggggaugauaaaaaugcaacugcuagcuucauuuacaaugggaggcuuguagauaguauuguuucaugguccaaagaaauccucaggacccaggagucagaaugcguuuguaucaauggaacuuguacaguaguaaugacugaugggagugcuucaggaaaagcugauacuaaaauacuauucauugaggaggggaaaaucguucauacuagcacauugucaggaagugcucagcaugucgaggagugcuccugcuauccucgauauccuggugucagaugugucugcagagacaacuggaaaggcuccaauaggcccauaguagauauaaacauaaaggauuauagcauuguuuccaguuaugugugcucaggacuuguuggagacacacccagaaaaaacgacagcuccagcaguagccauugcuuggauccuaacaaugaagaagguggucauggagugaaaggcugggccuuugaugauggaaaugacguguggaugggaagaacgaucagcgagaaguuacgcucaggauaugaaaccuucaaagucauugaaggcugguccaacccuaauuccaaauugcagauaaauaggcaagucauaguugacagagguaauagguccgguuauucugguauuuucucuguugaaggcaaaagcugcaucaaucggugcuuuuauguggaguugauaaggggaagaaaagaggaaaaugaagucuuguggaccucaaacaguauuguuguguuuuguggcaccucagguacauauggaacaggcucauggccugauggggcggacaucaaccucaugccuauauaa

SEQ ID NO: 58069 - RNA, 1410 nt, Artificial Sequence; identical to SEQ ID NO: 52714
  derived and/or modified CDS sequence (wt) from neuraminidase__InfluenzaA__BAF47928

SEQ ID NO: 58070 - RNA, 1410 nt, Artificial Sequence
  derived and/or modified CDS sequence (wt) from neuraminidase__InfluenzaA__BAF47929
augaauccaaaucaaaagauaauaacgauuggcucuguuucucucaccauuucuacaauaugcuucuucaugcaaauugccaucuugauaacuacuguaacauugcauuucaagcaauaugaauucaacucccccccaaacaaccaagugaugcugugugaaccaacaauaauagaaagaaacauaacagagauaguguaucugaccaacaccaccacagagaaggaaauaugccccaaacuagcagaauacagaaauuggucaaagccgcaauguaacauuacaggauuugcaccuuuuucuaaggacaauucgauuaggcuuuccgcugguggggacaucugggugacaagagaaccuuaugugucaugcgauccugacaaguguuaucaauuugcccuuggacagggaacaacacuaaacaacgugcauucagaugacacaguacaugauaggaccccuuaucggacccuauugaugaaugaguuagguguuccauuucaucuggggaccaagcaagugugcauagcaugguccagcucaaguugucacgauggaaaagcauggcugcauguuuguguaacgggggaugauaaaaaugcaacugcuagcuucauuuacaaugggaggcuuguagauaguauuguuucaugguccaaagaaauccucaggacccaggagucagaaugcguuuguaucaauggaacuuguacaguaguaaugacugaugggagugcuucaggaaaagcugauacuaaaauacuauucauugaggaggggaaaaucguucauacuagcacauugucaggaagugcucagcaugucgaggagugcuccugcuauccucgauauccuggugucagaugugucugcagagacaacuggaaaggcuccaauaggcccauaguagauauaaacauaaaggauuauagcauuguuuccaguuaugugugcucaggacuuguuggagacacacccagaaaaaacgacagcuccagcaguagccauugcuuggauccuaacaaugaagaagguggucauggagugaaaggcugggccuuugaugauggaaaugacguguggaugggaagaacgauaagcgagaaguuacgcucaggauaugaaaccuucaaagucauugaaggcugguccaacccuaauuccaaauugcagauaaauaggcaagucauaguugacagagguaauagguccgguuauucugguauuuucucuguugaagguaaaagcugcaucaaucggugcuuuuauguggaguugauaaggggaagaaaagaggaaaaugaagucuuguggaccucaaacaguauuguuguguuuuguggcaccucagguacauauggaacaggcucauggccugauggggcggacaucaaucucaugccuauauaa

SEQ ID NO: 58071 - RNA, 1410 nt, Artificial Sequence
  derived and/or modified CDS sequence (wt) from neuraminidase__InfluenzaA__BAF47930
augaauccaaaucaaaagauaauaacgauuggcucuguuucucucaccauuuccacaauaugcuucuucaugcaaauugccaucuugauaacuacuguaacauugcauuucaagcaauaugaauucaacucccccccaaacaaccaagugaugcugugugaaccaacaauaauagaaagaaacauaacagagauaguguaucugaccaacaccaccauagagaaggaaauaugccccaaacuagcagaauacagaaauuggucaaagccgcaauguaacauuacaggauuugcaccuuuuucuaaggacaauucgauuaggcuuuccgcugguggggacaucugggugacaagagaaccuuaugugucaugcgauccugacaaguguuaucaauuugcccuuggacagggaacaacacuaaacaacgugcauucaaaugacacaguacaugguaggaccccuuaucggacccuauugaugaaugaguuagguguuccauuucaucugggaaccaagcaagugugcauagcaugguccagcucaaguugucacgauggaaaagcauggcugcauguuuguguaacgggggaugauaaaaaugcaacugcuagcuucauuuacaaugggaggcuuguagauaguauuguuucaugguccaaagaaauccucaggacccaggagucagaaugcguuuguaucaauggaacuuguacaguaguaaugacugaugggagugcuucaggaaaagcugauacuaaaauacuauucauugaggaggggaaaaucguucauacuagcacauugucaggaagugcucagcaugucgaggagugcuccugcuauccucgauauccuggugucagaugugucugcagagacaacuggaaaggcuccaauaggcccauaguagauauaaacauaaaggauuauagcacuguuucuaguuaugugugcucaggacuuguuggagacacacccagaaaaaacgacagcuccagcaguggccauugcuuggauccuaacaaugaagaagguggucauggagugaaaggcugggccuuugaugauggaaaugacguguggaugggaagaacgaucagcgagaaguuacgcucaggauaugaaaccuucaaagucauugaaggcugguccaacccuaauuccaaauugcagauaaauaggcaagucauaguugacagagguaauagguccgguuauucugguauuuucucuguugaaggcaaaagcugcaucaaucggugcuuuuauguggaguugauaaggggaagaaaagaggaaacugaagucuuguggaccucaaacaguauuguuguguuuuguggcaccucagguacauauggaacaggcucauggccugauggggcggacaucaaucucaugccuauauaa

SEQ ID NO: 58072 - RNA, 1410 nt, Artificial Sequence
  derived and/or modified CDS sequence (wt) from neuraminidase__InfluenzaA__BAF47931
augaauccaaaucaaaagauaauaacgauuggcucuguuucucucaccauuucuacaauaugcuucuucaugcaaauugccaucuugauaacuacuguaacauugcauuucaagcaauaugaauucaacucccccccaaacaaccaagugaugcugugugaaccaacaauaauagaaagaaacauaacagagauaguguaucugaccaacaccaccauagagaaggaaauaugccccaaacuagcagaauacagaaauuggucaaagccgcaauguaacauuacaggauuugcaccuuuuucuaaggacaauucgauuaggcuuuccgcugguggggacaucugggugacaagagaaccuuaugugucaugcgauccugacaaguguuaucaauuugcccuuggacagggaacaacacuaaacaacgugcauucaaaugacacaguacaugauaggaccccuuaucggacccuauugaugaaugaguuagguguuccauuucaucuggggaccaagcaagugugcauagcaugguccagcucaaguugucacgauggaaaagcauggcugcauguuuguguaacgggggaugauaaaaaugcaacugcuagcuucauuuacaaugggaggcuuguagauaguauuguuucaugguccaaagaaauccucaggacccaggagucagaaugcguuuguaucaauggaacuuguacaguaguaaugacugaugggagugcuucaggaaaagcugauacuaaaauacuauucauugaggaggggaaaaucguucauacuagcacauugucaggaagugcucagcaugucgaggagugcuccugcuauccucgauauccuggugucagaugugucugcagagacaacuggaaaggcuccaauaggcccauaguagauauaaacauaaaggauuauagcauuguuuccaguuaugugugcucaggacuuguuggagacacacccagaaaaaacgacagcuccagcaguagccauugcuuggauccuaacaaugaagaagguggucauggagugaaaggcugggccuuugaugauggaaaugacguguggaugggaagaacgaucagcgagaaguuacgcucaggauaugaaaccuucaaagucauugaaggcugguccaacccuaauuccaaauugcagauaaauaggcaagucauaguugacagagguaauagguccgguuauucugguauuuucucuguugaaggcaaaaguugcaucaaucggugcuuuuauguggaguugauaaggggaagaaaagaggaaaaugaagucuuguggaccucaaacaguauuguuguguuuuguggcaccucagguacauauggaacaggcucauggccugauggggcggacaucaaucucaugccuauauaa

SEQ ID NO: 58073 - RNA, 1410 nt, Artificial Sequence
  derived and/or modified CDS sequence (wt) from neuraminidase__InfluenzaA__BAF47932
augaauccaaaucaaaagauaauaacgauuggcucuguuucucucaccauuuccacaauaugcuucuucaugcaaauugccaucuugauaacuacuguaacauugcauuucaagcaauaugaauucaacucccccccaaacaaccaagugaugcugugugaaccaacaauaauagaaagaaacauaacagagauaguguaucugaccaacaccaccauagagaaggaaauaugccccaaacuagcagaauacagaaauuggucaaagccgcaauguaacauuacaggauuugcaccuuuuucuaaggacaauucgauuaggcuuuccgcugguggggacaucugggugacaagagaaccuuaugugucaugugauccugacaaguguuaucaauuugcccuuggacagggaacaacacuaaacaacgugcauucaaaugacacaguacaugauaggaccccuuaucggacccuauugaugaaugaguuagguguuccauuucaucuggggaccaagcaagugugcauagcaugguccagcucaaguugucacgauggaaaagcauggcugcauguuuguguaacgggggaugauaaaaaugcaacugcuagcuucauuuacaaugggaggcuuguagauaguauuguuucaugguccaaagaaauccucaggacccaggagucagaaugcguuuguaucaauggaacuuguacaguaguaaugacugaugggagugcuucaggaaaagcugauacuaaaauacuauucauugaggaggggaaaaucguucauacuagcacauugucaggaagugcucagcaugucgaggagugcuccugcuauccucgauauccuggugucagaugugucugcagagacaacuggaaaggcuccaauaggcccauaguagauauaaacauaaaggauuauagcauuguuucuaguuaugugugcucaggacuuguuggagacacacccagaaaaaacgacagcuccagcaguggccauugcuuggauccuaacaaugaagaagguggucauggagugaaaggcugggccuuugaugauggaaaugacguguggaugggaagaacgaucagcgagaaguuacgcucaggauaugaaaccuucaaagucauugaaggcugguccaacccuaauuccaaauugcagauaaauaggcaagucauaguugacagagguaauagguccgguuauucugguauuuucucuguugaaggcaaaagcugcaucaaucggugcuuuuauguggaguugauaaggggaagaaaagaggaaacugaagucuuguggaccucaaacaguauuguuguguuuuguggcaccucagguacauauggaacaggcucauggccugauggggcggacaucaaucucaugccuauauaa

SEQ ID NO: 58074 - RNA, 1410 nt, Artificial Sequence
  derived and/or modified CDS sequence (wt) from neuraminidase__InfluenzaA__BAF47933
augaauccaaaucaaaagauaauaacgauuggcucuguuucucucaccauuuccacaauaugcuucuucaugcaaauugcuaucuugauaaccacuguaacauugcauuucaagcaauaugaauucaacucccccccaaacaaccaagugaugcugugugaaccaacaauaauagaaagaaacauaacagagauaguguaucugaccaacaccaccauagagaaggaaauaugccccaaacuagcagaauacagaaauuggucaaagccgcaauguaacauuacaggauuugcaccuuuuucuaaggacaauucgauuaggcuuuccgcugguggggacaucugggugacaagagaaccuuaugugucaugcgauccugacaaguguuaucaauuugcccuuggacagggaacaacacuaaacaacgugcauucaaaugacacaguacaugauaggaccccuuaucggacccuauugaugaaugaguuagguguuccauuucaucuggggaccaagcaagugugcauagcaugguccagcucaaguugucacgauggaaaagcauggcugcauguuuguguaacgggggaugauaaaaaugcaacugcuagcuucauuuacaaugggaggcuuguagauaguauuguuucaugguccaaagaaauccucaggacccaggagucagaaugcguuuguaucaauggaacuuguacaguaguaaugacugaugggagugcuucaggaaaagcugauacuaaaauacuauucauugaggaggggaaaaucguucauacuagcacauugucaggaagugcucaacaugucgaggagugcuccugcuauccucgauauccuggugucagaugugucugcagagacaacuggaaaggcuccaauaggcccauaguagauauaaacauaaaggauuauagcauuguuuccaguuaugugugcucaggacuuguuggagacacacccagaaaaaacgacagcuccagcaguagccauugcuuggauccuaacaaugaagaagguggucauggagugaaaggcugggccuuugaugauggaaaugacguguggaugggaagaacgaucagcgagaaguuacgcucaggauaugaaaccuucaaagucauugaaggcugguccaacccuaauuccaaauugcagauaaauaggcaagucauaguugacagagguaauagguccgguuauucugguauuuucucuguugaaggcaaaagcugcaucaaucggugcuuuuauguggaguugauaaggggaagaaaagaggaaacugaagucuuguggaccucaaacaguauuguuguguuuuguggcaccucagguacauauggaacaggcucauggccugauggggcggacaucaaucucaugccuauauaa

SEQ ID NO: 58075 - RNA, 1410 nt, Artificial Sequence; identical to SEQ ID NO: 58042
  derived and/or modified CDS sequence (wt) from neuraminidase__InfluenzaA__BAF47934

SEQ ID NO: 58076 - RNA, 1410 nt, Artificial Sequence
  derived and/or modified CDS sequence (wt) from neuraminidase__InfluenzaA__BAF47935
augaauccaaaucaaaagauaauaacgauuggcucuguuucucucaccauuuccacaauaugcuucuucaugcaaauugccaucuugauaacuacuguaacauugcauuuuaagcaauaugaauucaacucccccccaaacaaccaagugaugcugugugaaccaacaauaauagaaagaaacauaacagagauaguguaucugaccaacaccaccauagagaaggaaauaugccccaaacuagcagaauacaggaauuggucaaagccgcaaugugacauuacaggauuugcaccuuuuucuaaggacaauucgauuaggcuuuccgcugguggggacaucugggugacaagagaaccuuaugugucaugcgauccugacaaguguuaucaauuugcucuuggacagggaacaacacuaaacaacgugcauucaaaugacacagugcaugauaggaccccuuaucggacccuauugaugaaugaguuagguguuccauuucaucuggggaccaagcaagugugcauagcaugguccagcucaaguugucacgauggaaaagcauggcugcauguuuguguaacgggggaugauaaaaaugcaacugcuagcuucauuuacaaugggaggcuuguagauaguauuguuucaugguccaaaaaaauccucaggacccaggagucagaaugcguuuguaucaauggaacuuguacaguaguaaugacugaugggagugcuucaggaaaagcugauacuaaaauacuauucauugaggaggggaaaaucguucauacuagcacauugucaggaagugcucagcaugucgaggagugcuccugcuauccucgauauccuggugucagaugugucugcagagacaacuggaaaggcuccaauaggcccaucguagauauaaacauaaaggauuauagcauuguuuccaguuaugugugcucaggacuuguuggagacacacccagaaaaaacgacagcuccagcaguagccauugcuuggauccuaacaaugaagaagguggucauggagugaaaggcugggccuuugaugauggaaaugacguguggaugggaagaacgaucagcgagaaguuacgcucaggauaugaaacuuucaaagucauugaaggcugguccaacccuaauuccaaauugcagauaaauaggcaagucauaguugacagagguaauagguccgguuauucugguauuuucucuguugaaggcaaaagcugcaucaaucggugcuuuuauguggaguugauaaggggaagaaaagaggaaacugaagucuuguggaccucaaacaguauuguuguguuuuguggcaccucagguacauauggaacaggcucauggccugauggggcggacaucaaucucaugccuauauaa

SEQ ID NO: 58077 - RNA, 1410 nt, Artificial Sequence
  derived and/or modified CDS sequence (wt) from neuraminidase__InfluenzaA__BAF47936
augaauccaaaucaaaagauaauaacgauuggcucuguuucucucaccauuuccacaauaugcuucuucaugcaaauugccaucuugauaacuacuguaacauugcauuucaagcaauaugaauucaacucccccccaaacaaccaagugaugcugugugaaccaacaauaauagaaagaaacauaacagagauaguguaucugaccaacaccaccauagagaaggaaauaugccccaaacuagcagaauacagaaauuggucaaagccgcaauguaacauuacaggauuugcaccuuuuucuaaggacaauucgauuaggcuuuccgcugguggggacaucugggugacaagagaaccuuaugugucaugcgauccugacaaguguuaucaauuugcccuuggacagggaacaacacuaaacaacgugcauucaaaugacacaguacaugauaggaccccuuaucggacccuauugaugaaugaguuagguguuccauuucaucuggggaccaagcaagugugcauagcaugguccagcucaaguugucacgauggaaaagcauggcugcauguuuguauaacgggggaugauaaaaaugcaacugcuagcuucauuuacaaugggaggcuuguagauaguauuguuucaugguccaaagaaauccucaggacccaggagucagaaugcguuuguaucaauggaacuuguacaguaguaaugacugaugggagugcuucaggaaaagcugauacuaaaauacuauucauugaggaggggaaaaucguucauacuagcacauugucaggaagugcucagcaugucgaggagugcuccugcuauccucgauauccuggugucagaugugucugcagagacaacuggaaaggcuccaauaggcccauaguagauauaaacauaaaggauuauagcauuguuucuaguuaugugugcucaggacuuguuggagacacacccagaaaaaacgacagcuccagcaguggccauugcuuggauccuaacaaugaagaagguggucauggagugaaaggcugggccuuugaugauggaaaugacguguggaugggaagaacgaucagcgagaaguuacgcucaggauaugaaaccuucaaagucauugaaggcugguccaacccuaauuccaaauugcagauaaauaggcaagucauaguugacagagguaauagguccgguuauucugguauuuucucuguugaaggcaaaagcugcaucaaucggugcuuuuauguggaguuaauaaggggaagaaaagaggaaacugaagucuuguggaccucaaacaguauuguuguguuuuguggcaccucagguacauauggaacaggcucauggccugauggggcggacaucaaucucaugccuauauaa

SEQ ID NO: 58078 - RNA, 1410 nt, Artificial Sequence
  derived and/or modified CDS sequence (wt) from neuraminidase__InfluenzaA__BAF47937
augaauccaaaucaaaagauaauaacgauuggcucuguuucucucaccauuuccacaauaugcuucuucaugcaaauugcuaucuugauaaccacuguaacauugcauuucaagcaauaugaauucaacucccccccaaacaaccaagugaugcugugugaaccaacaauaauagaaagaaacauaacagagauaguguaucugaccaacaccaccauagagaaggaaauaugccccaaacuagcagaauacagaaauuggucaaagccgcaauguaacauuacaggauuugcaccuuuuucuaaggacaauucgauuaggcuuuccgcugguggggacaucugggugacaagagaaccuuaugugucaugcgguccugacaaguguuaucaauuugcccuuggacagggaacaacacuaaacaacgugcauucaaaugacacaguacaugauaggaccccuuaucggacccuauugaugaaugaguuagguguuccauuucaucuggggaccaagcaagugugcauagcaugguccagcucaaguugucacgauggaaaagcauggcugcauguuuguguaacgggggaugauaaaaaugcaacugcuagcuucauuuacaaugggaggcuuguagauaguauuguuucaugguccaaagaaauccucaggacccaggagucagaaugcguuuguaucaauggaacuuguacaguaguaaugacugaugggagugcuucaggaaaagcugauacuaaaauacuauucauugaggaggggaaaaucguucauacuagcacauugucaggaagugcucaacaugucgaggagugcuccugcuauccucgauauccuggugucagaugugucugcagagacaacuggaaaggcuccaauaggcccauaguagauauaaacauaaaggauuauagcauuguuuccaguuaugugugcucaggacuuguuggagacacacccagaaaaaacgacagcuccagcaguagccauugcuuggauccuaacaaugaagaagguggucauggagugaaaggcugggccuuugaugauggaaaugacguguggaugggaagaacgaucagcgagaaguuacgcucaggauaugaaaccuucaaagucauugaaggcugguccaacccuaauuccaaauugcagauaaauaggcaagucauaguugacagagguaauagguccgguuauucugguauuuucucuguugaaggcaaaagcugcaucaaucggugcuuuuauguggaguugauaaggggaagaaaagaggaaacugaagucuuguggaccucaaacaguauuguuguguuuuguggcaccucagguacauauggaacaggcucauggccugauggggcggacaucaaucucaugccuauauaa

SEQ ID NO: 58079 - RNA, 1410 nt, Artificial Sequence
  derived and/or modified CDS sequence (wt) from neuraminidase__InfluenzaA__BAF47938
augaauccaaaucaaaagauaauaacgauuggcucuguuucucucaccauuuccacaauaugcuucuucaugcaaauugccaucuugauaacuacuguaacauugcauuucaagcaauaugaauucaacucccucccaaacaaccaagugaugcugugugaaccaacaauaauagaaaggaacauaacagagauaguguaucugaccaacaccaccauagagaaggaaauaugccccaaacuagcagaauacagaaauuggucaaagccgcaauguaacauuacaggauuugcaccuuuuucuaaggacaauucgauuaggcuuuccgcugguggggacaucugggugacaagagaaccuuaugugucaugcgauccugacaaguguuaucaauuugcccuuggacagggaacaacacuaaacaacgugcauucaaaugacacaguacaugguaggaccccuuaucggacccuauugaugaaugaguuagguguuccauuucaucuggggaccaagcaaguaugcauagcaugguccagcucaaguugucacgauggaaaagcauggcugcauguuuguguaacgggggaugauaaaaaugcaacugcuagcuucauuuacaaugggaggcuuguagauaguauuguuucaugguccaaagaaauccucaggacccaggagucagaaugcguuuguaucaauggaacuuguacaguaguaaugacugaugggagugcuucaggaaaagcugauacuaaaauacuauucauugaggaggggaaaaucguucauacuagcacauugucaggaagugcucagcaugucgaggagugcuccugcuauccucgauauccuggugucagaugugucugcagagacaacuggaaaggcuccaauaggcccauaguagauauaaacauaaaggauuauagcauuguuuccaguuaugugugcucaggacuuguuggagacacacccagaaaaaccgacagcuccagcaguagccauugcuuggauccuaacaaugaagaagguggucauggggugaaaggcugggccuuugaugauggaaaugacguguggaugggaagaacgaucagcgagaaguuacgcucaggauaugaaaccuucaaagucauugaaggcugguccaacccuaauuccaaauugcagauaaauaggcaagucauaguugacagagguaauagguccgguuauucugguauuuucucuguugaaggcaaaagcugcaucaaucggugcuuuuauguggaguugauaaggggaagaaaagaggaaacugaagucuuguggaccucaaacaguauuguuguguuuuguggcaccucagguacauauggaacaggcucauggccugauggggcggacaucaaucucaugccuauauaa

SEQ ID NO: 58080 - RNA, 1410 nt, Artificial Sequence
  derived and/or modified CDS sequence (wt) from neuraminidase__InfluenzaA__BAF47939
augaauccaaaucaaaagauaauaacgauuggcucuguuucucucaccauuuccacaauaugcuucuucaugcaaauugccaucuugauaacuacuguaacauugcauuuuaagcaauaugaauucaacucccccccaaacaaccaagugaugcugugugaaccaacaauaauagaaagaaacauaacagagauaguguaucugaccaacaccaccauagagaaggaaauaugccccaaacuagcagaauacaggaauuggucaaagccgcaaugugacauuacaggauuugcaccuuuuucuaaggacaauucgauuaggcuuuccgcugguggggacaucugggugacaagagaaccuuaugugucaugcgauccugacaaguguuaucaauuugcucuuggacagggaacaacacuaaacaacgugcauucaaaugacacagugcaugauaggaccccuuaucggacccuauugaugaaugaguuagguguuccauuucaucuggggaccaagcaagugugcauagcaugguccagcucaaguugucacgauggaaaagcauggcugcauguuuguguaacgggggaugauaaaaaugcaacugcuagcuucauuuacaaugggaggcuuguagauaguauuguuucaugguccaaaaaaauccucaggacccaggagucagaaugcguuuguaucaauggaacuuguacaguaguaaugacugaugggagugcuucaggaaaagcugauacuaaaauacuauucauugaggaggggaaaaucguucauacuagcacauugucaggaagugcucagcaugucgaggagugcuccugcuauccucgauauccuggugucagaugugucugcagagacaacuggaaaggcuccaauaggcccaucguagauauaaacauaaaggauuauagcauuguuuccaguuaugugugcucaggacuuguuggagacacacccagaaaaaacgacagcuccagcaguagccauugcuuggauccuaacaaugaagaagguggucauggagugaaaggcugggccuuugaugauggaaaugacguguggaugggaagaacgaucagcgagaaguuacgcucaggauaugaaaccuucaaagucauugaaggcugguccaacccuaauuccaaauugcagauaaauaggcaagucauaguugacagagguaauagguccgguuauucugguauuuucucuguugaaggcaaaagcugcaucaaucggugcuuuuauguggaguugauaaggggaagaaaagaggaaacugaagucuuguggaccucaaacaguauuguuguguuuuguggcaccucagguacauauggaacaggcucauggccugauggggcggacaucaaucucaugccuauauaa

SEQ ID NO: 58081 - RNA, 1410 nt, Artificial Sequence
  derived and/or modified CDS sequence (wt) from neuraminidase__InfluenzaA__BAF47940
augaauccaaaucaaaagauaauaacgauuggcucuguuucucucaccauuuccacaauaugcuucuucaugcaaauugccaucuugauaacuacuguaacauugcauuuuaagcaauaugaauucaacucccccccaaacaaccaagugaugcugugugaaccaacaauaauagaaagaaacauaacagagauaguguaucugaccaacaccaccauagagaaggaaauaugccccaaacuagcagaauacaggaauuggucaaagccgcaaugugacauuacaggauuugcaccuuuuucuaaggacaauucgauuaggcuuuccgcugguggggacaucugggugacaagagaaccuuauguaucaugcgauccugacaaguguuaucaauuugcucuuggacagggaacaacacuaaacaacgugcauucaaaugacacagugcaugauaggaccccuuaucggacccuauugaugaaugaguuagguguuccauuucaucuggggaccaagcaagugugcauagcaugguccagcucaaguugucacgauggaaaagcauggcugcauguuuguguaacgggggaugauaaaaaugcaacugcuagcuucauuuacaaugggaggcuuguagauaguauuguuucaugguccaaaaaaauccucaggacccaggagucagaaugcguuuguaucaauggaacuuguacaguaguaaugacugaugggagugcuucaggaaaagcugauacuaaaauacuauucauugaggaggggaaaaucguucauacuagcacauugucaggaagugcucagcaugucgaggagugcuccugcuauccucgauauccuggugucagaugugucugcagagacaacuggaaaggcuccaauaggcccaucguagauauaaacauaaaggauuauagcauuguuuccaguuaugugugcucaggacuuguuggagacacacccagaaaaaacgacagcuccagcaguagccauugcuuggauccuaacaaugaagaagguggucauggagugaaaggcugggccuuugaugauggaaaugacguguggaugggaagaacgaucagcgagaaguuacgcucaggauaugaaacuuucaaagucauugaaggcugguccaacccuaauuccaaauugcagauaaauaggcaagucauaguugacagagguaauagguccgguuauucugguauuuucucuguugaaggcaaaagcugcaucaaucggugcuuuuauguggaguugauaaggggaagaaaagagaaaacugaagucuuguggaccucaaacaguauuguuguguuuuguggcaccucagguacauauggaacaggcucauggccugauggggcggacaucaaucucaugccuauauaa

SEQ ID NO: 58082 - RNA, 1410 nt, Artificial Sequence; identical to SEQ ID NO: 58066
  derived and/or modified CDS sequence (wt) from neuraminidase__InfluenzaA__BAF47941

SEQ ID NO: 58083 - RNA, 1410 nt, Artificial Sequence
  derived and/or modified CDS sequence (wt) from neuraminidase__InfluenzaA__BAF47943
augaauccaaaucaaaagauaauaacgauuggcucuguuucucucaccauuuccacaauaugcuucuucaugcaaauugccaucuugauaacuacuguaacauugcauuucaagcaauaugaauucaacucccccccaaacaaccaagugaugcugugugaaccaacaauaauagaaagaaacauaacagagauaguguaucugaccaacaccaccauagagaaggaaauaugccccaaacuagcagaauacagaaauuggucaaagccgcaauguaacauuacaggauuugcacccuuuucuaaggacaauucgauuaggcuuuccgcugguggggacaucugggugacaagagaaccuuaugugucaugcgauccugacaaguguuaucaauuugcccuuggacagggaacaacacuaaacaacgugcauucaaaugacacaguacaugauaggaccccuuaucggacccuauugaugauugaguuagguguuccauuucaucuggggaccaagcaagugugcauagcaugguccagcucaaguugucacgauggaaaagcauggcugcauguuuguguaacgggggaugauaaaaaugcaacugcuagcuucauuuacaaugggaggcuuguagauaguauuguuucaugguccaaagaaauccucaggacccaggagucagaaugcguuuguaucaauggaacuuguacaguaguaaugacugaugggagugcuucaggaaaagcugauacuaaaauacuauucauugaggaggggaaaaucguucauacuagcacauugucaggaagugcucagcaugucgaggagugcuccugcuauccucgauauccuggugucagaugugucugcagagacaacuggaaaggcuccaauaggcccauaguagauauaaacauaaaggauuauagcauuguuuccaguuaugugugcucaggacuuguuggagacacacccagaaaaaacgacagcuccagcaguagccauugcuuggauccuaacaaugaagaagguggucauggagugaaaggcugggccuuugaugauggaaaugacguguggaugggaagaacgaucagcgagaaguuacgcucaggauaugaaaccuucaaagucauugaaggcugguccaacccuaauuccaaauugcagacaaauaggcaagucauaguugacagagguaauagguccgguuauucugguauuuucucuguugaaggcaaaagcugcaucaaucggugcuuuuauguggaguugauaaggggaagaaaagaggaaacugaagucuuguggaccucaaacaguauuguuguguuuuguggcaccucagguacauauggaacaggcucauggccugauggggcggacaucaaucucaugccuauauaa

SEQ ID NO: 58084 - RNA, 1410 nt, Artificial Sequence
  derived and/or modified CDS sequence (wt) from neuraminidase__InfluenzaA__BAF47944
augaauccaaaucaaaagauaauaacgauuggcucuguuucucucaccauuuccacaauaugcuucuucaugcaaauugccaucuugauaacuacuguaacauugcauuucaagcaauaugaauucaacucccccccaaacaaccaagugauguugugugaaccaacaauaauagaaagaaacauaacagagauaguguaucugaccaacaccaccauagagaaggaaauaugccccaaacuaacagaauacagaaauuggucaaagccgcaauguaacauuacaggauuugcaccuuuuucuaaggacaauucgauuaggcuuuccgcugguggggacaucugggugacaagagaaccuuaugucucaugcgauccugacaaguguuaucaauuugcccuuggacagggaacaacacuaaacaacgugcauucaaaugacccaguacaugauaggaccccuuaucggacccuauugaugaaugaguuagguguuccauuccaucuggggaccaagcaagugugcauagcaugguccagcucaaguugucacgauggaaaagcauggcugcauguuuguguaacgggggaugauaaaaaugcaacugcuagcuucauuuacaaugggaggcuuguagauaguauuguuucaugguccaaagaaauccucaggacccaggagucagaaugcguuuguaucaauggaacuuguacaguaguaaugacugaugggagugcuucaggaaaagcugauacuaaaauacuauucauugaggaggggaaaaucguucauacuagcacauugucaggaagugcucagcaugucgaggagugcuccugcuauccucgauauccuggugucagaugugucugcagagacaacuggaaaggcuccaauaggcccauaguagauauaaacauaaaggauuauagcauuguuuccaguuaugugugcucaggacuuguuggagacacacccagaaaaaaugacagcuccagcaguagccauugcuuggauccuaacaaugaagaagguggucauggagugaaaggcugggccuuugaugauggaaaugacguguggaugggaagaacgaucagcgagaaguuacgcucaggauaugaaaccuucaaagucauugaaggcugguccaacccuaauuccaaauugcagacaaauaggcaagucauaguugacagagguaauagguccgguuauucugguauuuucucuguugaaggcaaaagcugcaucaaucggugcuuuuauguggaguugauaaggggaagaaaagaggaaacugaagucuuguggaccucaaacaguauuguuguguuuuguggcaccucagguacauauggaacaggcucauggccugauggggcggacaucaaucucaugccuauauaa

SEQ ID NO: 58085 - RNA, 1410 nt, Artificial Sequence
  derived and/or modified CDS sequence (wt) from neuraminidase__InfluenzaA__BAF47945
augaauccaaaucaaaagauaauaacgauuggcucuguuucucucaccauuuccacaauaugcuucuucaugcaaauugccaucuugauaacuacuguaacauugcauuucaagcaauaugaauucaacucccccccaaacaaccaagugaagcugugugaaccaacaauaauagaaagaaacauaacagagauaguguaucugaccaacaccaccauagagaaggaaauaugccccaaacuagcagaauacagaaauuggucaaagccgcaauguaacauuacaggauuugcaccuuuuucuaaggacaauucgauuaggcuuuccgcugguggggacaucugggugacaagagaaccuuaugugucaugcgauccugacaaguguuaucaauuugcccuuggacagggaacaacacuaaacaacgugcauucaaaugacacaguacaugauaggaccccuuaucggacccuauugaugaaugaguuagguguuccauuucaucuggggaccaagcaagugugcauagcaugguccagcucaaguugucacgauggaaaagcauggcugcauguuuguguaacgggggaugauaaaaaugcaacugcuagcuucauuuacaaugggaggcuuguagauaguauuguuucaugguccaaagaaauccucaggacccaggagucagaaugcguuuguaucaauggaacuuguacaguaguaaugacugaugggagugcuucaggaaaagcugauacuaaaauacuauucauugaggaggggaaaaucguucauacuagcacauugucaggaagugcucagcaugucgaggagugcuccugcuauccucgauauccuggugucagaugugucugcagagacaacuggaaaggcuccaauaggcccauaguagauauaaacauaaaggauuauagcauuguuuccaguuaugugugcucaggacuuguuggagacacacccagaaaaaacgacagcuccagcaguagccauugcuuggauccuaacaaugaagaagguggucauggagugaaaggcugggccuuugaugauggaaaugacguguggaugggaagaacgaucagcgagaaguuacgcucaggauaugaaaccuucaaagucauugaaggcugguccaacccuaauuccaaauugcagacaaauaggcaagucauaguugacagagguaauagguccgguuauucugguauuuucucuguugaaggcaaaagcugcaucaaucggugcuuuuauguggaguugauaaggggaagaaaagaggaaacugaagucuuguggaccucaaacaguauuguuguguuuuguggcaccucagguacauauggaacaggcucauggccugauggggcggacaucaaucucaugccuauauaa

SEQ ID NO: 58086 - RNA, 1410 nt, Artificial Sequence
  derived and/or modified CDS sequence (wt) from neuraminidase__InfluenzaA__BAF47946
augaauccaaaucaaaagauaauaacgauuggcucuguuucucucaccauuuccacaauaugcuucuucaugcaaauugccaucuugauaacuacuguaacauugcauuucaagcaauaugaauucaacucccccccaaacaaccaagugaugcugugugaaccaacaauaauagaaagaaacauaacagagauaguguaucugaccaacaccaccauagagaaggaaauaugccccaaacuagcagaauacagaaauuggucaaagccgcaauguaacauuacaggauuugcacccuuuucuaaggacaauucgauuaggcuuuccgcugguggggacaucugggugacaagagaaccuuaugugucaugcgauccugacaaguguuaucaauuugcccuuggacagggaacaacacuaaacaacgugcauucaaaugacacaguacaugauaggaccccuuaucggacccuauugaugaaugaguuagguguuccauuucaucuggggaccaagcaagugugcauagcaugguccagcucaaguugucacgauggaaaagcauggcugcauguuuguguaacgggggaugauaaaaaugcaacugcuagcuucauuuacaaugggaggcuuguagauaguauuguuucaugguccaaagaaauccucaggacccaggagucagaaugcguuuguaucaauggaacuuguacaguaguaaugacugaugggagugcuucaggaaaagcugauacuaaaauacuauucauugaggaggggaaaaucguucauacuagcacauugucaggaagugcucagcaugucgaggagugcuccugcuauccucgauauccuggugucagaugugucugcagagacaacuggaaaggcuccaauaggcccauaguagauauaaacauaaaggauuauagcauuguuuccaguuaugugugcucaggacuuguuggagacacacccagaaaaaacgacagcuccagcaguagccauugcuuggauccuaacaaugaagaagguggucauggagugaaaggcugggccuuugaugauggaaaugacguguggaugggaagaacgaucagcgagaaguuacgcucaggauaugaaaccuucaaaguccuugaaggcugguccaacccuaauuccaaauugcagacaaauaggcaagucauaguugacagagguaauagguccgguuauucugguauuuucucuguugaaggcaaaagcugcaucaaucggugcuuuuauguggaguugauaaggggaagaaaagaggaaacugaagucuuguggaccucaaacaguauuguuguguuuuguggcaccucagguacauauggaacaggcucauggccugauggggcggacaucaaucucaugccuauauaa

SEQ ID NO: 58087 - RNA, 1410 nt, Artificial Sequence
  derived and/or modified CDS sequence (wt) from neuraminidase__InfluenzaA__BAF47948
augaauccaaaucaaaagauaauaacgauuggcucuguuucucucaccauuuccacaauaugcuucuucaugcaaauugccaucuugauaacuacuguaacauugcauuuuaagcaauaugaauucaacucccccccaaacaaccaagugaugcugugugaaccaacaauaauagaaagaaacauaacagagauaguguaucugaccaacaccaccauagagaaggaaauaugccccaaacuagcagaauacaggaauuggucaaagccgcaaugugacauuacaggauuugcaccuuuuucuaaggacaauucgauuaggcuuuccgcugguggggacaucugggugacaagagaaccuuaugugucaugcgauccugacaaguguuaucaauuugcucuuggacagggaacaacacuaaacaacgugcauucaaaugacaaagugcaugauaggaccccuuaucggacccuauugaugaaugaguuagguguuccauuucaucuggggaccaagcaagugugcauagcaugguccagcucaaguugucacgauggaaaagcauggcugcauguuuguguaacgggggaugauaaaaaugcaacugcuagcuucauuuacaaugggaggcuuguagauaguauuguuucaugguccaaaaaaauccucaggacccaggaaucagaaugcguuuguaucaauggaacuuguacaguaguaaugacugaugggagugcuucaggaaaagcugauacuaaaauacuauucauugaggaggggaaaaucguucauacuagcacauugucaggaagugcucagcaugucgaggagugcuccugcuauccucgauauccuggugucagaugugucugcagagacaacuggaaaggcuccaauaggcccaucguagauauaaacauaaaggauuauagcauuguuuccaguuaugugugcucaggacuuguuggagacacacccagaaaaaacgacagcuccagcaguagccauugcuuggauccuaacaaugaagaagguggucauggagugaaaggcugggccuuugaugauggaaaugacguguggaugggaagaacgaucagcgagaaguuacgcucaggauaugaaaccuucaaagucauugaaggcugguccaacucuaauuccaaauugcagauaaauaggcaagucauaguugacagagguaauagguccgguuauucugguauuuucucuguugaaggcaaaagcugcaucaaucggugcuuuuauguggaguugauaaggggaagaaaagaggaaacugaagucuuguggaccucaaacaguauuguuguguuuuguggcaccucagguacauauggaacaggcucauggccugauggggcggacaucaaucucaugccuauauaa

SEQ ID NO: 58088 - RNA, 1410 nt, Artificial Sequence
  derived and/or modified CDS sequence (wt) from neuraminidase__InfluenzaA__BAF47949
augaauccaaaucaaaagauaauaacgauuggcucuguuucucucaccauuuccacaauaugcuucuucaugcaaauugccaucuugauaacuacuguaacauugcauuuuaagcaauaugaauucaacucccccccaaacaaccaagugaugcugugugaaccaacaauaauagaaagaaacauaacagagauaguguaucugaccaacaccaccauagagaaggaaauaugccccaaacuagcagaauacaggaauuggucaaagccgcaaugugacauuacaggauuugcaccuuuuucuaaggacaauucgauuaggcuuuccgcugguggggacaucugggugacaagagaaccuuaugugucaugcgauccugacaaguguuaucaauuugcucuuggacagggaacaacacuaaacaacgugcauucaaaugacaaagugcaugauaggaccccuuaucggacccuauugaugaaugaguuagguguuccauuucaucuggggaccaagcaagugugcauagcaugguccagcucaaguugucacgauggaaaagcauggcugcauguuuguguaacgggggaugauaaaaaugcaacugcuagcuucauuuacaaugggaggcuuguagauaguauuguuucaugguccaaaaaaauccucaggacccaggagucagaaugcguuuguaucaauggaacuuguacaguaguaaugacugaugggagugcuucaggaaaagcugauacuaaaauacuauucauugaggaggggaaaaucguucauacuagcacauugucaggaagugcucagcaugucgaggagugcuccugcuauccucgauauccuggugucagaugugucugcagagacaacuggaaaggcuccaauaggcccaucguagauauaaacauaaaggauuauagcauuguuuccaguuaugugugcucaggacuuguuggagacacacccagaaaaaacgacagcuccagcaguagccauugcuuggauccuaacaaugaagaagguggucauggagugaaaggcugggccuuugaugauggaaaugacguguggaugggaagaacgaucagcgagaaguuacgcucaggauaugaaaccuucaaagucauugaaggcugguccaacccuaauuccaaauugcagauaaauaggcaagucauaguugacagagguaauagguccgguuauucugguauuuucucuguugaaggcaaaagcugcaucaaucggugcuuuuauguggaguugauaaggggaagaaaagaggaaacugaagucuuguggaccucaaacaguauuguuguguuuuguggcaccucagguacauauggaacaggcucauggccugauggggcggacaucaaucucaugccuauauaa

SEQ ID NO: 58089 - RNA, 1410 nt, Artificial Sequence; identical to SEQ ID NO: 58080
  derived and/or modified CDS sequence (wt) from neuraminidase__InfluenzaA__BAF47950

SEQ ID NO: 58090 - RNA, 1410 nt, Artificial Sequence
  derived and/or modified CDS sequence (wt) from neuraminidase__InfluenzaA__BAF47951
augaauccaaaucaaaagauaauaacgauuggcucuguuucucucaccauuuccacaauaugcuucuucaugcaaauugccaucuugauaacuacuguaacauugcauuuuaagcaauaugaauucaacucccccccaaacaaccaagugaugcugugugaaccaacaauaauagaaagaaacauaacagagauaguguaucugaccaacaccaccauagagaaggaaauaugccccaaacuagcagaauacaggaauuggucaaagccgcaaugugacauuacaggauuugcaccuuuuucuaaggacaauucgauuaggcuuuccgcugguggggacaucugggugacaagagaaccuuaugugucaugcgauccugacaaguguuaucaauuugcucuuggacagggaacaacacuaaacaacgugcauucaaaugacacagugcaugauaggaccccuuaucggacccuauugaugaaugaguuagguguuccauuucaucuggggaccaagcaagugugcauagcaugguccagcucaaguugucacgauggaaaagcauggcugcauguuuguguaacgggggaugauaaaaaugcaacugcuagcuucauuuacaaugggaggcuuguagauaguauuguuucaugguccaaaaaaauccucaggacccaggaaucagaaugcguuuguaucaauggaacuuguacaguaguaaugacugaugggagugcuucaggaaaagcugauacuaaaauacuauucauugaggaggggaaaaucguucauacuagcacauugucaggaagugcucagcaugucgaggagugcuccugcuauccucgauauccuggugucagaugugucugcagagacaacuggaaaggcuccaauaggcccaucguagauauaaacauaaaggauuauagcauuguuuccaguuaugugugcucaggacuuguuggagacacacccagaaaaaacgacagcuccagcaguagccauugcuuggauccuaacaaugaagaagguggucauggagugaaaggcugggccuuugaugauggaaaugacguguggaugggaagaacgaucagcgagaaguuacgcucaggauaugaaaccuucaaagucauugaaggcugguccaacucuaauuccaaauugcagauaaauaggcaaguaauaguugacagagguaauagguccgguuauucugguauuuucucuguugaaggcaaaagcugcaucaaucggugcuuuuauguggaguugauaaggggaagaaaagaggaaacugaagucuuguggaccucaaacaguauuguuguguuuuguggcaccucagguacauauggaacaggcucauggccugauggggcggacaucaaucucaugccuauauaa

SEQ ID NO: 58091 - RNA, 1410 nt, Artificial Sequence
  derived and/or modified CDS sequence (wt) from neuraminidase__InfluenzaA__BAF47952
augaauccaaaucaaaagauaauaacgauuggcucuguuucucucaccauuuccacaauaugcuucuucaugcaaauugccaucuugauaacuacuguaacauugcauuucaagcaauaugaauucaacucccccccaaacaaccaagugaugcugugugaaccaacaauaauagaaagaaacauaacagagauaguguaucugaccaacaccaccauagagaaggaaauaugccccaaacuagcagaauacagaaauuggucaaagccgcaauguaacauuacaggauuugcacccuuuucuaaggacaauucgauuaggcuuuccgcugguggggacaucugggugacaagagaaccuuaugugucaugcgauccugacaaguguuaucaauuugcccuuggacagggaacaacacuaaacaacgugcauucaaaugacacaguacaugauaggaccccuuaucggacccuauugaugaaugaguuagguguuccauuucaucuggggaccaagcaagugugcauagcaugguccagcucaaguugucacgauggaaaagcauggcugcauguuuguguaacgggggaugauaaaaaugcaacugcuagcuucauuuacaaugggaggcuuguagauaguauuguuucaugguccaaagaaauccucaggacccaggagucagaaugcguuuguaucaauggaacuuguacaguaguaaugacugaugggagugcuucaggaaaagcugauacuaaaauacuauucauugaggaggggaaaaucguucauacuagcacauugucaggaagugcucagcaugucgaggagugcuccugcuauccucgauauccuggugucagaugugucugcagagacaacuggaaaggcuccaauaggcccauaguagauauaaacauaaaggauuauagcauuguuuccaguuaugugugcucaggacuuguuggagacacacccagaaaaaacgacagcuccagcaguagccauugcuuggauccuaacaaugaagaagguggucauggagugaaaggcugggccuuugaugauggaaaugacguguggaugggaagaacgaucagcgagaaguuacgcucaggauaugaaaccuucaaagucauugaaggcugguccaacccuaauuccaaauugcagacaaauaggcaagucauaguugacagagguaauagguccgguuauucugguauuuucucuguugaaggcaaaagcugcaucaaucggugcuuuuauguggaguugauaaggggaagaaaagaggaaacugaagucuuguggaccucaaacaguauuguuguguuuuguggcaccucagguacauauggaacaggcucauggccugauggggcgaacaucaaucucaugccuauauaa

SEQ ID NO: 58092 - RNA, 1410 nt, Artificial Sequence
  derived and/or modified CDS sequence (wt) from neuraminidase__InfluenzaA__BAF47953
augaauccaaaucaaaagauaauaacgauuggcucuguuucucucaccauuuccacaauaugcuucuucaugcaaauugccaucuugauaacuacuguaacauugcauuuuaagcaauaugaauucaacucccccccaaacaaccaagugaugcugugugaaccaacaauaauagaaagaaacauaacagagauaguguaucugaccaacaccaccauagagaaggaaauaugccccaaacuagcagaauacaggaauuggucaaagccgcaaugugacauuacaggauuugcaccuuuuucuaaggacaauucgauuaggcuuuccgcugguggggacaucugggugacaagagaaccuuaugugucaugcgauccugacaaguguuaucaauuugcucuuggacagggaacaacacuaaacaacgugcauucaaaugacacagugcaugauaggaccccuuaucggacccuauugaugaaugaguuagguguuccauuucaucuggggaccaagcaagugugcauagcaugguccagcucaaguugucacgauggaaaagcauggcugcauguuuguguaacgggggaugaugaaaaugcaacugcuagcuucauuuacaaugggaggcuuguagauaguauuguuucaugguccaaaaaaauccucaggacccaggagucagaaugcguuuguaucaauggaacuuguacaguaguaaugacugaugggagugcuucaggaaaagcugauacuaaaauacuauucauugaggaggggaaaaucguucauacuagcacauugucaggaagugcucagcaugucgaggagugcuccugcuauccucgauauccuggugucagaugugucugcagagacaacuggaaaggcuccaauaggcccaucguagauauaaacauaaaggauuauagcauuguuuccaguuaugugugcucaggacuuguuggagacacacccagaaaaaacgacagcuccagcaguagccauugcuuggauccuaacaaugaagaagguggucauggagugaaaggcugggccuuugaugauggaaaugacguguggaugggaagaacgaucagcgagaaguuacgcucaggauaugaaaccuucaaagucauugaaggcugguccaacccuaauuccaaauugcagauaaauaggcaagucauaguugacagagguaauagguccgguuauucugguauuuucucuguugaaggcaaaagcugcaucaaucggugcuuuuauguggaguugauaaggggaagaaaagaggaaacugaagucuuguggaccucaaacaguauuguuguguuuuguggcaccucagguacauauggaacaggcucauggccugauggggcggacaucaaucucaugccuauauaa

SEQ ID NO: 58093 - RNA, 1410 nt, Artificial Sequence
  derived and/or modified CDS sequence (wt) from neuraminidase__InfluenzaA__BAF47954
augaauccaaaucaaaagauaauaacgauuggcucuguuucucucaccauuuccacaauaugcuucuucaugcaaauugccaucuugauaacuacuguaacauugcauuucaagcaauaugaauucaacucccccccaaacaaccaagugaugcugugugaaccaacaauaauagaaagaaacauaacagagauaguguaucugaccaacaccaccauagagaaggaaauaugccccaaacuagcagaauacagaaaguggucaaagccgcaauguaacauuacaggauuugcaccuuuuucuaaggacaauucgauuaggcuuuccgcugguggggacaucugggugacaagagaaccuuaugugucaugcgauccugacaaguguuaucaauuugcccuuggacagggaacaacacuaaacaacgugcauucaaaugacacaguacgugauaggaccccuuaucggacccuauugaugaaugaguuagguguuccauuucaucuggggaccaagcaagugugcauagcaugguccagcucaaguugucacgauggaaaagcauggcugcauguuuguguaacgggggaugauaaaaaugcaacugcuagcuucauuuacaaugggaggcuuguagauaguaucguuucaugguccaaagaaauccucaggacccaggagucagaaugcguuuguaucaauggaacuuguacaguaguaaugacugaugggagugcuucaggaaaagcugauacuaaaauacuauucauugaggaggggaaaaucguucauacuagcacauugucaggaagugcucagcaugucgaggagugcuccugcuauccucgauauccuggugucagaugugucugcagagacaacuggaaaggcuccaauaggcccauaguagauauaaacauaaaggauuauagcauuguuuccaguuaugugugcucaggacuuguuggagacacacccagaaaaaacgacagcuccagcaguagccauugcuuggauccuaacaaugaagaagguggucauggagugaaaggcugggccuuugaugauggaaaugacguguggaugggaagaacgaucagcgagaaguuacgcucaggauaugaaaccuucaaagucauugaaggcugguccaacccuaauuccaaauugcagauaaauaggcaagucauaguugacagagguaauagguccgguuauucugguauuuucucuguugaaggcaaaagcugcaucaaucggugcuuuuauguggaguugauaaggggaagaaaagaggaaacugaagucuuguggaccucaaacaguauuguuguguuuuguggcaccucagguacauauggaacaggcucauggccugauggggcggacaucaaucucaugccuauauaa

SEQ ID NO: 58094 - RNA, 1410 nt, Artificial Sequence; identical to SEQ ID NO: 58093
  derived and/or modified CDS sequence (wt) from neuraminidase__InfluenzaA__BAF47955

SEQ ID NO: 58095 - RNA, 1410 nt, Artificial Sequence
  derived and/or modified CDS sequence (wt) from neuraminidase__InfluenzaA__BAF47956
augaauccaaaucaaaagauaauaacgauuggcucuguuucucucaccauuuccacaauaugcuucuucaugcaaauugccaucuugauaacuacuguaacauugcauuucaagcaauaugaauucaacucccccccaaacaaccaagugaugcugugugaaccaacaauaauagaaagaaacauaacagagauaguguaucugaccaacaccaccauagagaaggaaauaugccccaaacuagcagaauacagaaaguggucaaagccgcaauguaacauuacaggauuugcaccuuuuucuaaggacaauucgauuaggcuuuccgcugguggggacaucugggugacaagagaaccuuaugugucaugcgauccugacaaguguuaucaauuugcccuuggacagggaacaacacuaaacaacgugcauucaaaugacacaguacgugauaggaccccuuaucggacccuauugaugaaugaguuagguguuccauuucaucuggggaccaagcaagugugcauagcaugguccagcucaaguugucacgauggaaaagcauggcugcauguuuguguaacgggggaugauaaaaaugcaacugcuagcuucauuuacaaugggaggcuuguagauaguauuguuucaugguccaaagaaauccucaggacccaggagucagaaugcguuuguaucaauggaacuuguacaguaguaaugacugaugggagugcuucaggaaaagcugauacuaaaauacuauucauugaggaggggaaaaucguucauacuagcacauugucaggaagugcucagcaugucgaggagugcuccugcuauccucgauauccuggugucagaugugucugcagagacaacuggaaaggcuccaauaggcccauaguagauauaaacauaaaagauuauagcauuguuuccaguuaugugugcucaggacuuguuggagacacacccagaaaaaacgacagcuccagcaguagccauugcuuggauccuaacaaugaagaagguggucauggagugaaaggcugggccuuugaugauggaaaugacguguggaugggaagaacgaucagcgagaaguuacgcucaggauaugaaaccuucaaagucauugaaggcugguccaacccuaauuccaaauugcagauaaauaggcaagucauaguugacagagguaauagguccgguuauucugguauuuucucuguugaaggcaaaagcugcaucaaucggugcuuuuauguggaguugauaaggggaagaaaagaggaaacugaagucuuguggaccucaaacaguauuguuguguuuuguggcaccucagguacauauggaacaggcucauggccugauggggcggacaucaauuucaugccuauauaa

SEQ ID NO: 58096 - RNA, 1410 nt, Artificial Sequence
  derived and/or modified CDS sequence (wt) from neuraminidase__InfluenzaA__BAF47958
augaauccaaaucaaaagauaauaacgauuggcucuguuucucucaccauuuccacaauaugcuucuucaugcaaauugccaucuugauaacuacuguaacauugcauuucaagcaauaugaauucaacucccccccaaacaaccaagugaugcugugugaaccaacaauaauagaaagaaacauaacagagauaguguaucugaccaacaccaccauagagaaggaaauaugccccaaacuagcagaauacagaaaguggucaaagccgcaauguaacauuacaggauuugcaccuuuuucuaaggacaauucgauuaggcuuuccgcugguggggacaucugggugacaagagaaccuuaugugucaugcgauccugacaaguguuaucaauuugcccuuggacagggaacaacacuaaacaacgugcauucaaaugacacaguacgugauaggaccccuuaucggacccuaaugaugaaugaguuagguguuccauuucaucuggggaccaagcaagugugcauagcaugguccagcucaaguugucacgauggaaaagcauggcugcauguuuguguaacgggggaugauaaaaaugcaacugcuagcuucauuuacaaugggaggcuuguagauaguauuguuucaugguccaaagaaauccucaggacccaggagucagaaugcguuuguaucaauggaacuuguacaguaguaaugacugaugggagugcuucaggaaaagcugauacuaaaauacuauucauugaggaggggaaaaucguucauacuagcacauugucaggaagugcucagcaugucgaggagugcuccugcuauccucgauauccuggugucagaugugucugcagagacaacuggaaaggcuccaauaggcccauaguagauauaaacauaaaagauuauagcauuguuuccaguuaugugugcucaggacuuguuggagacacacccagaaaaaacgacagcuccagcaguagccauugcuuggauccuaacaaugaagaagguggucauggagugaaaggcugggccuuugaugauggaaaugacguguggaugggaagaacaaucagcgagaaguuacgcucaggauaugaaaccuucaaagucauugaaggcugguccaacccuaauuccaaauugcagauaaauaggcaagucauaguugacagagguaauagguccgguuauucugguauuuucucuguugaaggcaaaagcugcaucaaucggugcuuuuauguggaguugauaaggggaagaaaagaggaaacugaagucuuguggaccucaaacaguauuguuguguuuuguggcaccucagguacauauggaacaggcucauggacugauggggcggacaucaauuucaugccuauauaa

SEQ ID NO: 58097 - RNA, 1410 nt, Artificial Sequence
  derived and/or modified CDS sequence (wt) from neuraminidase__InfluenzaA__BAF47959
augaauccaaaucaaaagauaauaacgauuggcucuguuucucucaccauuuccacaauaugcuucuucaugcaaauugccaucuugauaacuacuguaacauugcauuucaagcaauaugaauucaacucccccccaaacaaccaagugaugcugugugaaccaacaauaauagaaagaaacauaacagagauaguguaucugaccaacaccacuauagagaaggaaauaugccccaaacuagcagaauacagaaauuggucaaagccgcaauguaacauuacaggauuugcaccuuuuucuaaggacaauucgauuaggcuuuccgcugguggggacaucugggugacaagagaaccuuaugugucaugcgauccugacaaguguuaucaauuugcccuuggacagggaacaacacuaaacaacgugcauucaaauuacacaguacaugauaggaccccuuaucggacccuauugaugaaugaguuagguguuccauuucaucuggggaccaagcaagugugcauagcaugguccagcucaaguugucacgauggaaaagcauggcugcauguuugugugacgggggaugauaaaaaugcaacugcuagcuucauuuacaaugggaggcuuguagauaguauuguuucaugguccaaagaaauccucaggacccaggagucagaaugcguuuguaucaauggaacuuguacaguaguaaugacugaugggagugcuucaggaaaagcugauacuaaaauacuauucauugaggaggggaaaaucguucauacuagcacauugucaggaagugcucagcaugucgaggagugcuccugcuauccucgauauccuggugucagaugugucugcagagacaacuggaaaggcuccaauaggcccauaguagauauaaacauaaaggauuauagcauuguuucuaguuaugugugcucaggacuuguuggagacacacccagaaaaaacgacagcuccagcaguggccauugcuuggauccuaacaaugaagaagguggucauggagugaaaggcugggccuuugaugauggaaaugacguguggaugggaagaacgaucagcgagaaguuacgcucaggauaugaaaccuucaaagucauugaaggcugguccaacccuaauuccaaauugcagauaaauaggcaagucauaguugacagagguaauagguccgguuauucugguauuuucucuguugaaggcaaaagcugcaucaaucggugcuuuuauguggaguugauaaggggaagaaaagaggaaacugaagucuuguggaccucaaacaguauuguuguguuuuguggcaccucagguacauauggaacaggcucauggccugauggggcggacaucaaucucaugccuauauaa

SEQ ID NO: 58098 - RNA, 1410 nt, Artificial Sequence
  derived and/or modified CDS sequence (wt) from neuraminidase__InfluenzaA__BAF47960
augaauccaaaucaaaagauaauaacgauuggcucuguuucucucaccauuuccacaauaugcuucuucaugcaaauugccaucuugauaacuacuguaacauugcauuucaagcaauaugaauucaacucccccccaaacaaccaagugaugcugugugaaccaacaauaauagaaagaaacauaacagagauaguguaucugaccaacaccaccauagagaaggaaauaugccccaaacuagcagaauacagaaauuggucaaagccgcaauguaacauuacaggauuugcaccuuuuucuaaggacaauucgauuaggcuuuccgcugguggggacaucugggugacaagagaaccuuaugugucaugcgauccugacaaguguuaucaauuugcccuuggacagggaacaacacuaaacaacgugcauucaaaugacacaguacauaauaggaccccuuaucggacccuauugaugaaugaguuagguguuccauuucaucuggggaccaagcaagugugcauagcaugguccagcucaaguugucacgauggaaaagcauggcugcauguuuguguaacgggggaugauaaaaaugcaacugcuagcuucauuuacaaugggaggcuuguagauaguauuguuucaugguccaaagaaauccucaggacccaggagucagaaugcguuuguaucaauggaacuuguacaguaguaaugacugaugggagugcuucaggaaaagcugauacuaaaauacuauucauugaggaggggaaaaucguucauacuagcacauugucaggaagugcucagcaugucgaggagugcuccugcuauccucgauauccuggugucagaugugucugcagagacaacuggaaaggcuccaauaggcccauaguagauauaaacauaaaggauuauagcauuguuucuaguuaugugugcucaggacuuguuggagacacacccagaaaaaacgacagcuccagcaguggccauugcuuggauccuaacaaugaagaagguggucauggagugaaaggcugggccuuugaugauggaaaugacguguggaugggaagaacgaucagcgagaaguuacgcucaggauaugaaaccuucaaagucauugaaggaugguccaacccuaauuccaaauugcagauaaauaggcaagucauaguugacagagguaauagguccgguuauucugguauuuucucuguugaaggcaaaagcugcaucaaucggugcuuuuauguggaguugauaaggggaagaaaagaggaaacugaagucuuguggaccucaaacaguauuguuguguuuuguggcaccucagguacauauggaacaggcucauggccugauggggcggacaucaaucucaugccuauauaa

SEQ ID NO: 58099 - RNA, 1410 nt, Artificial Sequence
  derived and/or modified CDS sequence (wt) from neuraminidase__InfluenzaA__BAF47975
augaauccaaaucaaaagauaauaacgauuggcucuguuucucucaccauuuccacaauaugcuucuucaugcaaauugccaucuugauaacuacuguaacauugcauuucaagcaauaugaauucaacucccccccaaacaaccaagugaugcugugugaaccaacaauaauagaaagaaacauaacagagauaguguaucugaccaacaccaccauagagaaggaaauaugccccaaacuagcagaauacagaaaguggucaaagccgcaauguaacauuacaggauuugcaccuuuuucuaaggacaauucgauuaggcuuuccgcugguggggacaucugggugacaagagaaccuuaugugucaugcgauccugacaaguguuaucaauuugcccuuggacagggaacaacacuaaacaacgugcauucaaaugacacaguacgugauaggaccccuuaucggacccuauugaugaaugaguuagguguuccauuucaucuggggaccaagcaagugugcauagcaugguccagcucaaguugucacgauggaaaagcauggcugcauguuuguguaacgggggaugauaaaaaugcaacugcuagcuucauuuacaaugggaggcuuguagauaguauuguuucaugguccaaagaaauccucaggacccaggagucagaaugcguuuguaucaauggaacuuguacaguaguaaugacugaugggagugcuucaggaaaagcugauacuaaaauacuauucauugaggaggggaaaaucguucauacuagcacauugucaggaagugcucagcaugucgaggagugcuccugcuauccucgauauccuggugucagaugugucugcagagacaacuggaaaggcuccaauaggcccauaguagauauaaacauaaaggauuauagcauuguuuccaguuaugugugcucaggacuuguuggagacacacccagaaaaaacgacagcuccagcaguagccauugcuuggauccuaacaaugaagaagguggucauggagugaaaggcugggccuuugaugauggaaaugacguguggaugggaagaacgaucagcgagaaguuacgcucaggauaugaaaccuucaaagucauugaaggcugguccaacccuaauuccaaauugcagauaaauaggcaagucauaguugacagagguaauagguccgguuauucugguauuuucucuguugaaggcaaaagcugcaucaaucggugcuuuuauguggaguugauaaggggaagaaaagaggaaacugaagucuuguggaccucaaacaguauuguuguguuuuguggcaccucagguacauauggaacaggcucauggccugauggggcggacaucaaucacaugccuauauaa

SEQ ID NO: 58100 - RNA, 1410 nt, Artificial Sequence; identical to SEQ ID NO: 58074
  derived and/or modified CDS sequence (wt) from neuraminidase__InfluenzaA__BAF47976

SEQ ID NO: 58101 - RNA, 1410 nt, Artificial Sequence
  derived and/or modified CDS sequence (wt) from neuraminidase__InfluenzaA__BAF47977
augaauccaaaucaaaagauaauaacgauuggcucuguuucucucaccauuuccacaauaugcuucuucaugcaaauugccaucuugauaacuacuguaacauugcaauucaagcaauaugaauucaacucccccccaaacaaccaagugauguugugugaaccaacaauaauagaaagaaacauaacagagauaguguaucugaccaacaccaccauagagaaggaaauaugccccaaacuagcagaauacagaaauuggucaaagccgcaauguaacauuacaggauuugcaccuuuuucuaaggacaauucgauuaggcuuuccgcugguggggacaucugggugacaagagaaccuuaugucucaugcgauccugacaaguguuaucaauuugcccuuggacagggaacaacacuaaacaacgugcauucaaaugacacaguacaugguaggaccccuuaucggacccuauugaugaaugaguuagguguuccauuucaucuggggaccaagcaagugugcauagcaugguccagcucaaguugucacgauggaaaagcauggcugcauguuuguguaacgggggaugauaaaaaugcaacugcuagcuucauuuacaaugggaggcuuguagauaguauuguuucaugguccaaagaaauccucaggacccaggagucagaaugcguuuguaucaauggaacuuguacaguaguaaugacugaugggagugcuucaggaaaagcugauacuaaaauacuauucauugaggaggggaaaaucguucauacuagcacauugucaggaagugcucagcaugucgaggagugcuccugcuauccucgauauccuggugucagaugugucugcagagacaacuggaaaggcuccaauaggcccauaguagauauaaacauaaaggauuauagcauuguuuccaguuaugugugcucaggacuuguuggagacacacccagaaaaaacgacagcuccagcaguagccauugcuuggauccuaacaaugaagaagguggucauggagugaaaggcugggccuuugaugauggaaaugacguguggaugggaagaacgaucagcgagaaguuacgcucaggauaugaaaccuucaaagucauugaaggcugguccaacccuaauuccaaauugcagacaaauaggcaagucauaguugacagagguaauagguccgguuauucugguauuuucucuguugaaggcaaaagcugcaucaaucggugcuuuuauguggaguugauaaggggaagaaaagaggaaacugaagucuuguggaccucaaacaguauuguuguguuuuguggcaccucagguacauauggaacaggcucauggccugauggggcggacaucaaucucaugccuauauaa

SEQ ID NO: 58102 - RNA, 1410 nt, Artificial Sequence
  derived and/or modified CDS sequence (wt) from neuraminidase__InfluenzaA__BAF47978
augaauccaaaucaaaagauaauaacgauuggcucuguuucucucaccauuuccacaauaugcuucuucaugcaaauugccaucuugguaacuacuguaacauugcauuucaagcaauaugaauucaacucccccccaaacaaccaagugaugcugugugaaccaacaauaauagaaagaaacauaacagagauaguguaucugaccaacaccaccauagagaaggaaauaugccccaaacuagcagaauacagaaauuggucaaagccgcaauguaacauuacaggauuugcaccuuuuucuaaggacaauucgauuaggcuuuccgcugguggggacaucugggugacaagagaaccuuaugugucaugcgauccugacaaguguuaucaauuugcccuuggacagggaacaacacuaaacaacgugcauucaaaugacacaguacaugauaggaccccuuaucggacccuauugaugaaugaguuagguguuccauuucaucuggggaccaagcaagugugcauagcaugguccagcucaaguugucacgauggaaaagcauggcugcauguuuguguaacgggggaugauaaaaaugcaacugcuagcuucauuuauaaugggaggcuuguagauaguauuguuucaugguccaaagaaauccucaggacccaggagucagaaugcguuuguaucaauggaacuuguacaguaguaaugacugaugggagugcuuccggaaaagcugauacuaaaauacuauucauugaggaggggaaaaucguucauacuagcacauugucaggaagugcucagcaugucgaggagugcuccugcuauccucgauauccuggugucagaugugucugcagagacaacuggaaaggcuccaauaggcccauaguagauauaaacauaaaggauuauagcauuguuuccaguuaugugugcucaggacuuguuggagacacacccagaaaaaacgacagcuccagcaguagccauugcuuggaucccaacaaugaagaagguggucauggagugaaaggcugggccuuugaugauggaaaugacgcguggaugggaagaacgaucagcgagaaguuacgcucaggauaugaaaccuucaaagucauugaaggcugguccaacccuaauuccaaauugcagauaaauaggcaagucauaguugacagagguaauagguccgguuauucugguauuuucucuguugaaggcaaaagcugcaucaaucggugcuuuuauguggaguugauaaggggaagaaaagaggaaacugaagucuuguggaccucaaacaguauuguuguguuuuguggcaccucagguacauauggaacaggcucauggccugauggggcggacaucaaucucaugccuauauaa

SEQ ID NO: 58103 - RNA, 1410 nt, Artificial Sequence
  derived and/or modified CDS sequence (wt) from neuraminidase__InfluenzaA__BAF47979
augaauccaaaucaaaagauaauaacgauuggcucuguuucucucaccauuuccacaauaugcuucuucaugcaaauugccaucuugauaacuacuguaacauugcauuucaagcaauaugaauucaacucccccccaaacaaccaagugauguugugugaaccaacaauaauagaaagaaacauaacagagauaguguaucugaccaacaccaccauagagaaggaaauaugccccaaacuagcagaauacagaaauuggucaaagccgcaauguaacauuacaggauuugcaccuuuuucuaaggacaauucgauuaggcuuuccgcugguggggacaucugggugacaagagaaccuuaugucucaugcgauccugacaaguguuaucaauuugcccuuggacagggaacaacacuaaacaacgugcauucaaaugacacaguacauaauaggaccccuuaucggacccuauugaugaaugaguuagguguuccauuucaucuggggaccaagcaagugugcauagcaugguccagcucaaguugucacgauggaaaagcauggcugcauguuuguguaacgggggaugauaaaaaugcaacugcuagcuucauuuacaaugggaggcuuguagauaguauuguuucaugguccaaagaaauccucaggacccaggagucagaaugcguuuguaucaauggaacuuguacaguaguaaugacugaugggagugcuucaggaaaagcugauacuaaaauacuauucauugaggaggggaaaaucguucauacuagcacauugucaggaagugcucagcaugucgaggagugcuccugcuauccucgauauccuggugucagaugugucugcagagacaacuggaaaggcuccaauaggcccauaguagauauaaacauaaaggauuauagcauuguuuccaguuaugugugcucaggacuuguuggagacacacccagaaaaaacgacagcuccagcaguagccauugcuuggauccuaacaaugaagaagguggucauggagugaaaggcugggccuuugaugauggaaaugacguguggaugggaagaacgaucagcgagaaguuacgcucaggauaugaaaccuucaaagucauugaaggcugguccaacccuaauuccaaauugcagacaaauaggcaagucauaguugacagagguaauagguccgguuauucugguauuuucucuguugaaggcaaaagcugcaucaauaggugcuuuuauguggaguugauaaggggaagaaaagaggaaacugaagucuuguggaccucaaacaguauuguuguguuuuguggcaccucagguacauauggaacaggcucauggccugauggggcggacaucaaucucaugccuauauaa

SEQ ID NO: 58104 - RNA, 1410 nt, Artificial Sequence
  derived and/or modified CDS sequence (wt) from neuraminidase__InfluenzaA__BAF47980
augaauccaaaucaaaagauaauaacgauuggcucuguuucucucaccauuuccacaauaugcuucuucaugcaaauugccaucuugauaacuacuguaacauugcauuucaagcaauaugaauucaacucccccccaaacaaccaagugauguugugugaaccaacaauaauagaaagaaacauaacagagauaguguaucugaccaacaccaccauagagaaggaaauaugccccaaacuagcagaauacagaaauuggucaaagccgcaauguaacauuacaggauuugcaccuuuuucuaaggacaauucgauuaggcuuuccgcugguggggacaucugggugacaagagaaccuuaugucucaugcgauccugacaaguguuaucaauuugcccuuggacagggaacaacacuaaacaacgugcauucaaaugacacaguacaugauaggaccccuuaucggacccuauugaugaaugaguuagguguuccauuucaucuggggaccaagcaagugugcauagcaugguccagcucaaguugucacgauggaaaagcauggcugcauguuuguguaacgggggaugauaaaaaugcaacugcuagcuucauuuacaaugggaggcuuguagauaguauuguuucaugguccaaagaaauccucaggacccaggagucagaaugcguuuguaucaauggaacuuguacaguaguaaugacugaugggagugcuucaggaaaagcugauacuaaaauacuauucauugaggaggggaaaaucguucauacuagcacauugucaggaagugcucagcaugucgaggagugcuccugcuauccucgauauccuggugucagaugugucugcagagacaacuggaaaggcuccaauaggcccauaguagauauaaacauaaaggauuauagcauuguuuccaguuaugugugcucaggacuuguuggagacacacccagaaaaaacgacagcuccagcaguagccauugcuuggauccuaacaaugaagaagguggucauggagugaaaggcugggccuuugaugauggaaaugacguguggaugggaagaacgaucagcgagaaguuacgcucaggauaugaaaccuucaaagucauugaaggcugguccaacccuaauuccaaauugcagacaaauaggcaagucauaguugacagagguaauagguccgguuauucugguauuuucucuguugaaggcaaaagcugcaucaaucggugcuuuuauguggaguugauaaggggaagaaaagaggaaacugaagucuuguggaccucaaacaguauuguuguguuuuguggcaccucagguacauauggaacaggcucauggccugauggggcggacaucaaucucaugccuauauaa

SEQ ID NO: 58105 - RNA, 1410 nt, Artificial Sequence
  derived and/or modified CDS sequence (wt) from neuraminidase__InfluenzaA__BAF47981
augaauccaaaucaaaagauaauaacgauuggcucuguuucucucaccauuuccacaauaugcuuauucaugcaaauugccaucuugauaacuacuguaacauugcauuucaagcaauaugaauucaacucccccccaaacaaccaagugaugcugugugaaccaacaauaauagaaagaaacauaacagagauaguguaucugaccaacaccaccauagagaaggaaauaugccccaaacuagcagaauacagaaaguggucaaagccgcaauguaacauuacaggauuugcaccuuuuucuaaggacaauucgauuaggcuuuccgcugguggggacaucugggugacaagagaaccuuaugugucaugcgauccugacaaguguuaucaauuugcccuuggacagggaacaacacuaaacaacgugcauucaaaugacacaguacguaauaggaccccuuaucggacccuauugaugaaugaguuagguguuccauuucaucuggggaccaagcaagugugcauagcaugguccagcucaaguugucacgauggaaaagcauggcugcauguuuguguaacgggggaugauaaaaaugcaacugcuagcuucauuuacaaugggaggcuuguagauaguauuguuucaugguccaaagaaauccucaggacccaggagucagaaugcguuuguaucaauggaacuuguacaguaguaaugacugaugggagugcuucaggaaaagcugauacuaaaauacuauucauugaggaggggaaaaucguucauacuagcacauugucaggaagugcucagcaugucgaggagugcuccugcuauccucgauauccuggugucagaugugucugcagagacaacuggaaaggcuccaauaggcccauaguagauauaaacauaaaggauuauagcauuguuuccaguuaugugugcucaggacuuguuggagacacacccagaaaaaacgacagcuccagcaguagccauugcuuggauccuaacaaugaagaagguggucauggagugaaaggcugggccuuugaugauggaaaugacguguggaugggaagaacgaucagcgagaaguuacgcucaggauaugaaaccuucaaagucauugaaggcugguccaacccuaauuccaaauugcagauaaauaggcaagucauaguugacagagguaauagguccgguuauucugguauuuucucuguugaaggcaaaagcugcaucaaucggugcuuuuauguggaguugauaaggggaagaaaagaggaaacugaagucuuguggaccucaaacaguauuguuguguuuuguggcaccucagguacauauggaacaggcucauggccugauggggcggacaucaaucucaugccuauauaa

SEQ ID NO: 58106 - RNA, 1410 nt, Artificial Sequence
  derived and/or modified CDS sequence (wt) from neuraminidase__InfluenzaA__BAF47982
augaauccaaaucaaaagauaauaacgauuggcucuguuucucucaccauuuccacaauaugcuucuucaugcaaauugccaucuugauaacuacuguaacauugcauuucaagcaauaugaauucaacucccccccaaacaaccaagugaugcugugugaaccaacaauaauagaaagaaacauaacagagauaguguaucugaccaacaccaccauagagaaggaaauaugccccaaacuagcagaauacagaaaguggucaaagccgcaauguaacauuacaggauuugcaccuuuuucuaaggacaauucgauuaggcuuuccgcugguggggacaucugggugacaagagaaccuuaugugucaugcgauccugacaaguguuaucaauuugcccuuggacagggaacaacacuaaacaacgugcauucaaaugacacaguacguaauaggaccccuuaucggacccuauugaugaaugaguuagguguuccauuucaucuggggaccaagcaagugugcauagcaugguccagcucaaguugucacgauggaaaagcauggcugcauguuuguguaacgggggaugauaaaaaugcaacugcuagcuucauuuacaaugggaggcuuguagauaguauuguuucaugguccaaagaaauccucaggacccaggagucagaaugcguuuguaucaauggaacuuguacaguaguaaugacugaugggagugcuucaggaaaagcugauacuaaaauacuauucauugaggaggggaaaaucguucauacuagcacauugucaggaagugcucagcaugucgaggagugcuccugcuauccucgauauccuggugucagaugugucugcagagacaacuggaaaggcuccaauaggcccauaguagauauaaacauaaaggauuauagcauuguuuccaguuaugugugcucaggacuuguuggagacacacccagaaaaaacgacagcuccagcaguagccauugcuuggauccuaacaaugaagaagguggucauggagugaaaggcugggccuuugaugauggaaaugacguguggaugggaagaacgaucagcgagaaguuacgcucaggauaugaaaccuucaaagucauugaaggcugguccaacccuaauuccaaauugcagauaaauaggcaagucauaguugacagagguaauagguccgguuauucugguauuuucucuguugaaggcaaaagcugcaucaaucggugcuuuuauguggaguugauaaggggaagaaaagaggaaacugaagucuuguggaccucaaacaguauuguuguguuuuguggcaccucagguacauauggaacaggcucauggccugauggggcggacaucaaucucaugccuauauaa

SEQ ID NO: 58107 - RNA, 1410 nt, Artificial Sequence; identical to SEQ ID NO: 58104
  derived and/or modified CDS sequence (wt) from neuraminidase__InfluenzaA__BAF47983

SEQ ID NO: 58108 - RNA, 1410 nt, Artificial Sequence
  derived and/or modified CDS sequence (wt) from neuraminidase__InfluenzaA__BAF47984
augaauccaaaucaaaagauaauaacgauuggcucuguuucucucaccauuuccacaauaugcuucuucaugcaaauugccaucuugauaacuacuguaacauugcauuucaagcaauaugaauucaacucccccccaaacaaccaagugaugcugugugaaccaacaauaauagaaagaaacauaacagagauaguguaucugaccaacaccaccauagagaaggaaauaugccccaaacuagcagaauacagaaauuggucaaagccgcaauguaacauuacaggauuugcaccuuuuucuaaggacaauucgauuaggcuuuccgcugguggggacaucugggugacaagagaaccuuaugugucaugcgauccugacaaauguuaucaauuugcccuuggacagggaacaacacuaaacaacgugcauucaaaugacacaguacaugguagaaccccuuaucggacccuauugaugaaugaguuagguguuccauuucaucuggggaccaagcaagugugcauagcaugguccagcucaaguugucacgauggaaaagcauggcugcauguuuguguaacgggagaugauaaaaaugcaacugcuagcuucauuuacaaugggaggcuuguagauaguauuguuucaugguccaaagaaauccucaggacccaggagucagaaugcguuuguaucaauggaacuuguacaguaguaaugacugaugggagugcuucaggaaaagcugauacuaaaauacuauucauugaggaggggaaaaucguucauacuagcacauugucaggaagugcucagcaugucgaggagugcuccugcuauccucgauauccuggugucagaugugucugcagagacaacuggaaaggcuccaauaggcccauaguagauauaaacauaaaggauuauagcauuguuuccaguuaugugugcucaggacuuguuggagacacacccagaaaaaacgacagcuccagcaguagccauugcuuggauccuaacaaugaagaaggugaucauggagugaaaggcugggccuuugaugauggaaaugacguguggaugggaagaacgaucagcgagaaguuacgcucaggauaugaaaccuucaaagucauugaaggcugguccaacccuaauuccaaauugcagauaaauaggcaagucauaguugacagagguaauagguccgguuauucugguauuuucucuguugaaggcaaaagcugcaucaaucggugcuuuuauguggaguugauaaggggaagaaaagaggaaacugaagucuuguggaccucaaacaguauuguuguguuuuguggcaccucagguacauauggaacaggcucauggccugauggggcggacaucaaucucaugccuauauaa

SEQ ID NO: 58109 - RNA, 1410 nt, Artificial Sequence
  derived and/or modified CDS sequence (wt) from neuraminidase__InfluenzaA__BAF47985
augaauccaaaucaaaagauaauaacgauuggcucuguuucucucaccauuuccacaauaugcuucuucaugcaaauugcaaucuugauaacuacuguaacauugcauuuuaagcaauaugaauucaacuuccccccaaacaaccaagugaugcugugugaaccaacaauaauagaaagaaacauaacagagauaguguaucugaccaacaccaccauagagaaggaaauaugccccaaacuagcagaauacaggaauuggucaaagccgcaaugugacauuacaggauuugcaccuuuuucuaaggacaauucgauuaggcuuuccgcugguggggacaucugggugacaagagaaccuuaugugucaugcgauccugacaaguguuaucaauuugcucuuggacagggaacaacacuaaacaacgugcauucaaaugacacagugcaugauaggaccccuuaucggacccuauugaugaaugaguuagguguuccauuucaucuggggaccaagcaagugugcauagcaugguccagcucaaguugucacgauggaaaagcauggcugcauguuuguguaacgggggaugauaaaaaugcaacugcuagcuucauuuacaaugggaggcuuguagauaguauuguuucaugguccaaaaaaauccucaggacccaggagucagaaugcguuuguaucaauggaacuuguacaguaguaaugacugaugggagugcuucaggaaaagcugauacuaaaauacuauucauugaggaggggaaaaucguucauacuagcacauugucaggaagugcucagcaugucgaggagugcuccugcuauccucgauauccuggugucagaugugucugcagagacaacuggaaaggcuccaauaggcccaucguagauauaaacauaaaggauuauagcauuguuuccaguuaugugugcucaggacuuguuggagacacacccagaaaaaacgacagcuccagcaguagccauugcuuggauccuaacaaugaagaagguggucauggagugaaaggcugggccuuugaugauggaaaugacguguggaugggaagaacgaucagcgagaaguuacgcucaggauaugaaaccuucaaagucauugaaggcugguccaacccuaauuccaaauugcagauaaauaggcaagucauaguugacagagguaauagguccgguuauucugguauuuucucuguugaaggcaaaagcugcaucaaucggugcuuuuauguggaguugauaaggggaagaaaagaggaaacugaagucuuguggaccucaaacaguauuguuguguuuuguggcaccucagguacauauggaacaggcucauggccugauggggcggacaucaaucucaugccuauauaa

SEQ ID NO: 58110 - RNA, 1410 nt, Artificial Sequence
  derived and/or modified CDS sequence (wt) from neuraminidase__InfluenzaA__BAF47986
augaauccaaaucaaaagauaauaacgauuggcucuguuucucucaccauuuccacaauaugcuucuucaugcaaauugcaaucuugauaacuacuguaacauugcauuuuaagcaauaugaauucaacuuccccccaaacaaccaagugaugcugugugaaccaacaauaauagaaagaaacauaacagagauaguguaucugaccaacaccaccauagagaaggaaauaugccccaaacuagcagaauacaggaauuggucaaagccgcaaugugacauuacaggauuugcaccuuuuucuaaggacaauucgauuaggcuuuccgcugguggggacaucugggugacaagagaaccuuaugugucaugcgauccugacaaguguuaucaauuugcucuuggacagggaacaacacuaaacaacgugcauucaaaugacacagugcaugauaggaccccuuaucggacccuauugaugaaugaguuagguguuccauuucaucuggggaccaagcaagugugcauagcaugguccagcucaaguugucacgauggaaaagcauggcugcauguuuguguaacgggggaugauaaaaaugcaacugcuagcuucauuuacaaugggaggcuuguagauaguauuguuucaugguccaaaaaaauccucaggacccaggagucagaaugcguuuguaucaauggaacuuguacaguaguaaugacugaugggagugcuucaggaaaagcugauacuaaaauacuauucauugaggaggggaaaaucguucauacuagcacauugucaggaagugcucagcaugucgaggagugcuccugcuauccucgauauccuggugucagaugugucugcagagacaacuggaaaggcuccaauaggcccaucguagauauaaacauaaaggauuauagcauuguuuccaguuaugugugcucaggacuuguuggagacacacccagaaaaaacgacagcuccagcaguagccauugcuuggauccuaacaaugaagaagguggucauggagugaaaggcugggccuuugaugauggaaaugacguguggaugggaagaacgaucagcgagaaguuacgcucaggauaugaaaccuucaaagucauugaaggcugguccaacccuaauuccaaauugcagauaaauaggcaagucauaguugacagagguaauagguccgguuauucugguauuuucucuguugaaggcaaaagcugcaucaaucggcgcuuuuauguggaguugauaaggggaagaaaagaagaaacugaagucuuguggaccucaaacaguauuguuguguuuuguggcaccucagguacauauggaacaggcucauggccugauggggcggacaucaaucucaugccuauauaa

SEQ ID NO: 58111 - RNA, 1410 nt, Artificial Sequence
  derived and/or modified CDS sequence (wt) from neuraminidase__InfluenzaA__BAF47987
augaauccaaaucaaaagauaauaacgauuggcucuguuucucucaccauuucgacaauaugcuucuucaugcaaauugcaaucuugauaacuacuguaacauugcauuuuaagcaauaugaauucaacuuccccccaaacaaccaagugaugcugugugaaccaacaauaauagaaagaaacauaacagagauaguguaucugaccaacaccaccauagagaaggaaauaugccccaaacuagcagaauacaggaauuggucaaagccgcaaugugacauuacaggauuugcaccuuuuucuaaggacaauucgauuaggcuuuccgcugguggggacaucugggugacaagagaaccuuaugugucaugcgauccugacaaguguuaucaauuugcucuuggacagggaacaacacuaaacaacgugcauucaaaugacaaagugcaugauaggaccccuuaucggacccuauugaugaaugaguuagguguuccauuucaucuggggaccaagcaagugugcauagcaugguccagcucaaguugucacgauggaaaagcauggcugcauguuuguguaacgggggaugauaaaaaugcaacugcuagcuucauuuacaaugggaggcuuguagauaguauuguuucaugguccaaaaaaauccucaggacccaggagucagaaugcguuuguaucaauggaacuuguacaguaguaaugacugaugggagugcuucaggaaaagcugauacuaaaauacuauucauugaggaggggaaaaucguucauacuagcacauugucaggaagugcucagcaugucgaggagugcuccugcuauccucgauauccuggugucagaugugucugcagagacaacuggaaaggcuccaauaggcccaucguagauauaaacauaaaggauuauagcauuguuuccaguuaugugugcucaggacuuguuggagacacacccagaaaaaacgacagcuccagcaguagccauugcuuggauccuaacaaugaagaagguggucauggagugaaaggcugggccuuugaugauggaaaugacguguggaugggaagaacgaucagcgagaaguuacgcucaggauaugaaaccuucaaagucauugaaggcugguccaacccuaauuccaaauugcagauaaauaggcaagucauaguugacagagguaauagguccgguuauucugguauuuucucuguugaaggcaaaagcugcaucaaucggugcuuuuauguggaguugauaaggggaagaaaagaggaaacugaagucuuguggaccucaaacaguauuguuguguuuuguggcaccucagguacauauggaacaggcucauggccugauggggcggacaucaaucucaugccuauauaa

SEQ ID NO: 58112 - RNA, 1410 nt, Artificial Sequence; identical to SEQ ID NO: 58076
  derived and/or modified CDS sequence (wt) from neuraminidase__InfluenzaA__BAF47988

SEQ ID NO: 58113 - RNA, 1410 nt, Artificial Sequence
  derived and/or modified CDS sequence (wt) from neuraminidase__InfluenzaA__BAF47989
augaauccaaaucaaaagauaauaacgauuggcucuguuucucucaccauuuccacaauaugcuucuucaugcaaauugccaucuugauaacuacuguaacauugcauuuuaagcaauaugaauucaacuccccuccaaacaaccaagugaugcugugugaaccaacaauaauagaaagaaacauaacagagauaguguaucugaccaacaccaccauagagaaggaaauaugccccaaacuagcagaauacaggaauuggucaaagccgcaaugugacauuacaggauuugcaccuuuuucuaaggacaauucgauuaggcuuuccgcugguggggacaucugggugacaagagaaccuuaugugucaugugauccugacaaguguuaucaauuugcucuuggacagggaacaacacuaaacaacgugcauucaaaugacacagugcaugauaggaccccuuaucggacccuauugaugaaugaguuagguguuccauuucaucuggggaccaagcaagugugcauagcaugguccagcucaaguugucacgauggaaaagcauggcugcauguuuguguaacgggggaugauaaaaaugcaacugcuagcuucauuuacaaugggaggcuuguagauaguauuguuucaugguccaaaaaaauccucaggacccaggagucagaaugcguuuguaucaauggaacuuguacaguaguaaugacugaugggagugcuucaggaaaagcugauacuaaaauacuauucauugaggaggggaaaaucguucauacuagcacauugucaggaagugcucagcaugucgaggagugcuccugcuauccucgauauccuggugucagaugugucugcagagacaacuggaaaggcuccaauaggcccaucguagauauaaacauaaaggauuauagcauuguuuccaguuaugugugcucaggacuuguuggagacacacccagaaaaaacgacagcuccagcaguagccauugcuuggauccuaacaaugaagaagguggucauggagugaaaggcugggccuuugaugauggaaaugauguguggaugggaagaacgaucagugagaaguuacgcucaggauaugaaaccuucaaagucauugaaggcugguccaacccuaauuccaaauugcagauaaauaggcaagucauaguugacagagguaauagguccgguuauucugguauuuucucuguugaaggcaaaagcugcaucaaucggugcuuuuauguggaguugauaaggggaagaaaagaggaaacugaagucuuguggaccucaaacaguauuguuguguuuuguggcaccucagguacauauggaacaggcucauggccugauggggcggacaucaaucucaugccuauauaa

SEQ ID NO: 58114 - RNA, 1410 nt, Artificial Sequence
  derived and/or modified CDS sequence (wt) from neuraminidase__InfluenzaA__BAF47990
augaauccaaaucaaaagauaauaacgauuggcucuguuucucucaccauuuccacaauaugcuucuucaugcaaauugccaucuugauaacuacuguaacauugcauuucaagcaauaugaauucaacucccccccaaacaaccaagugaugcugugugaaccaacaauaauagaaagaaacauaacagagauaguguaucugaccaacaccaccauagagaaggaaauaugccccaaacuagcagaguacagaaauuggucaaagccgcaauguaacauuacaggauuugcaccuuuuucuaaggacaauucgauuaggcuuuccgcugguggggacaucugggugacaagagaaccuuaugugucaugcgauccugacaaguguuaucaauuugcccuuggacagggaacaacacuaaacaacgugcauucaaaugacacaguacaugauaggaccccuuaucggacccuauugaugaaugaguuagguguuccauuucaucuggggaccaagcaagugugcauagcaugguccagcucaaguugucacgauggaaaagcauggcugcauguuuguguaacgggggaugauaaaaaugcaacugcuagcuucauuuacaaugggaggcuuguagauaguauuguuucaugguccaaagaaauccucaggacccaggagucagaaugcguuuguaucaauggaacuuguacaguaauaaugacugaugggagugcuucaggaaaagcugauacuaaaauacuauucauugaggaggggaaaaucguucauacuagcacauugucaggaagugcucagcaugucgaggagugcuccugcuauccucgauauccuggugucagaugugucugcagagacaacuggaaaggcuccaauaggcccauaguagauauaaacauaaaggauuauagcauuguuuccaguuaugugugcucaggacuuguuggagacacacccagaaaaaacgacagcuccagcaguagccauugcuuggauccuaacaaugaagaagguggucauggagugaaaggcugggccuuugaugauggaaaugacguguggaugggaagaacggucagcgaaaaguuacgcucaggauaugaaaccuucaaagucauugaaggcugguccaacccuaauuccaaauugcagauaaauaggcaagucauaguugacagagguaauagguccgguuauucugguauuuucucuguugaaggcaaaagcugcaucaaucggugcuuuuauguggaauugauaaggggaagaaaagaggaaacugaaguuuuguggaccucaaacaguauuguuguguuuuguggcaccucagguacauauggaacaggcucauggccugauggggcggacaucaaucucaugccuauauaa

SEQ ID NO: 58115 - RNA, 1410 nt, Artificial Sequence
  derived and/or modified CDS sequence (wt) from neuraminidase__InfluenzaA__BAF47991
augaauccaaaucaaaagauaauaacgauuggcucuguuucucucaccauuuccacaauaugcuucuucaugcaaauugccaucuugauaacuacuguaacauugcauuuuaagcaauaugaauucaacucccccccaaacaaccaagugaugcugugugaaccaacaauaauagaaagaaacauaacagagauaguguaucugaccaacaccaccauagagaaggaaauaugccccaaacuagcagaauacaggaauuggucaaagccgcaaugugacauuacaggauuugcaccuuuuucuaaggacaauucgauuaggcuuuccgcugguggggacaucugggugacaagagaaccuuaugugucaugcgauccugacaaguguuaucaauuugcucuuggacagggaacaacacuaaacaacgugcauucaaaugacauagugcaugauaggaccccuuaucggacccuauugaugaaugaguuagguguuccauuucaucuggggaccaagcaagugugcauagcaugguccagcucaaguugucacgauggaaaagcauggcugcauguuuguguaacgggggaugauaaaaaugcaacugcuagcuucauuuacaaugggaggcuuguagauaguauuguuucaugguccaaaaaaauccucaggacccaggagucagaaugcguuuguaucaauggaacuuguacaguaguaaugacugaugggagugcuucaggaaaagcugauacuaaaauacuauucauugaggaggggaaaaucguucauacuagcacauugucaggaagugcucagcaugucgaggagugcuccugcuauccucgauauccugguaucagaugugucugcagagacaacuggaaaggcuccaauaggcccaucguagauauaaacauaaaggauuauagcauuguuuccaguuaugugugcucaggacuuguuggagacacacccagaaaaaacgacagcuccagcaguagccauugcuuggauccuaacaaugaagaagguggucauggagugaaaggcugggccuuugaugauggaaaugacguguggaugggaagaacgaucagcgagaaguuacgcucaggauaugaaaccuucaaagucauugaaggcugguccaacccuaauuccaaauugcagauaaauaggcaagucauaguugacagagguaauagguccgguuauucugguauuuucucuguugaaggcaaaagcugcaucaaucggugcuuuuauguggaguugauaaggggaagaaaagaggaaacugaagucuuguggaccucaaacaguauuguuguguuuuguggcaccucagguacauauggaacaggcucauggccugauggggcggacaucaaucucaugccuauauaa

SEQ ID NO: 58116 - RNA, 1410 nt, Artificial Sequence
  derived and/or modified CDS sequence (wt) from neuraminidase__InfluenzaA__BAF47992
augaauccaaaucaaaagauaauaacgauuggcucuguuucucucaccauuuccacaauaugcuucuucaugcaaauugccaucuugauaacuacuguaacauugcauuucaagcaauaugaauucaacucccccccaaacaaccaagugaugcugugugaaccaacaauaauagaaagaaacauaacagagauaguguaucugaccaacaccaccauagagaaggaaauaugccccaaacuagcagaauacagaaauuggucaaagccgcaauguaacauuacaggauuugcaccuuuuucuaaggacaauucgauuaggcuuuccgcugguggggacaucugggugacaagagaaccuuaugugucaugcgagccugacaaguguuauccauuugcccuuguacagggaacaacucuaaacaacgugcauucaaaugacacaguacaugauaggaccccuuaucggacccuauugaugaaugaguuagguguuccauuucaucuggggaccaagcaagugugcauagcaugguccagcucaaguugucacgauggaaaagcauggcugcauguuuguguaacgggggaugauaaaaaugcaacugcuagcuucauuuacaaugggaggcuuguagauaguauuguuucaugguccaaagaaauccucaggacccaggagucagaaugcguuuguaucaauggaacuuguacaguaguaaugacugaugggagugcuucaggaaaagcugauacuaaaauacuauucauugaggaggggaaaaucguucauacuagcacauugucaggaagugcucagcaugucgaggagugcuccugcuauccucgauauccuggugucagaugugucugcagagacaacuggaaaggcuccaauaggcccauaguagauauaaacauaaaggauuauagcauuguuucuaguuaugugugcucaggacuuguuggagacacacccagaaaaaacgacagcuccagcaguggccauugcuuggauccuaacaaugaagaagguggucauggagugaaaggcugggccuuugaugauggaaaugacguguggaugggaagaacgaucagcgagaaguuacgcucaggauaugaaaccuucaaagucauugaaggcugguccaacccuaauuccaaauugcagauaaauaggcaagucauaguugacagagguaauagguccgguuauucugguauuuucucuguugaaggcaaaagcugcaucaaucggugcuuuuauguggaguugauaaggggaagaaaagaggaaacugaagucuuguggaccucaaacaguuuuguuguguuuuguggcaccucagguacauauggaacaggcucauggccugauggggcggacaucaaucucaugccuauauaa

SEQ ID NO: 58117 - RNA, 1410 nt, Artificial Sequence
  derived and/or modified CDS sequence (wt) from neuraminidase__InfluenzaA__BAF47993
augaauccaaaucaaaagauaauaacgauuggcucuguuucucucaccauuuccacaauaugcuucuucaugcaaauugccaucuugauaacuacuguaacauugcauuucaagcaauaugaauucaacucccccccaaacaaccaagugaugcugugugaaccaacaauaauagaaagaaacauaacagagauaguguaucugaccaacaccaccauagagaaggaaauaugccccaaacuagcagaauacagaaauuggucaaagccgcaauguaacauuacaggauuugcaccuuuuucuaaggacaauucgauuaggcuuuccgcugguggggacaucugggugacaagagaaccuuaugugucaugcgauccugacaaguguuaucaauuugcccuuggacagggaacaacacuaaacaacgugcauucaaaugacacaguacaugauaggaccccuuaucggacccuauugaugaaugaguuagguguuccauuucaucuggggaccaagcaagugugcauagcaugguccagcucaaguugucacgauggaaaagcauggcugcauguuuguguaacgggggaugauaaaaaugcaacugcuagcuucauuuacaaugggaggcuuguagauaguauuguuucaugguccaaagaaauccucaggacccaggagucagaaugcguuuguaucaauggaacuuguacaguaguaaugacugaugggagugcuucaggaaaagcugauacuaaaauacuauucauugaggaggggaaaaucguucauacuagcacauugucaggaagugcucagcaugucgaggagugcuccugcuauccucgauauccuggugucagaugugucugcagagacaacuggaaaggcuccaauaggcccauaguagauauaaacauaaaggauuauagcauuguuucuaguuaugugugcucaggacuuguuggagacacacccagaaaaaacgacagcuccagcaguggccauugcuuggauccuaacaaugaagaagguggucauggagugaaaggcugggccuuugaugauggaaaugacguguggaugggaagaacgaucagcgagaaguuacgcucaggauaugaaaccuucaaagucauugaaggcugguccaacccuaauuccaaauugcagauaaauaggcaagucauaguugacagagguaauagguccgguuauucugguauuuucucuguugaaggcaaaagcugcaucaaucggugcuuuuauguggaguugauaaggggaagaaaagaggaaacugaagucuuguggaccucaaacaguauuguuguguuuuguggcaccucagguacauauggaacaggcucauggccugauggggcggacaucaaucucaugccuauauaa

SEQ ID NO: 58118 - RNA, 1410 nt, Artificial Sequence
  derived and/or modified CDS sequence (wt) from neuraminidase__InfluenzaA__BAF47994
augaauccaaaucaaaagauaauaacgauuggcucuguuucucucaccauuuccacaauaugcuucuucaugcaaauugccaucuugauaacuacuguaacauugcauuucaagcaauaugaauucaacucccccccaaacaaccaagugaugcugugugaaccaacaauaauagaaagaaacauaacagagauaguguaucugaccaacaccaccauagagaaggaaauaugccccaaacuagcagaguacagaaauuggucaaagccgcaauguaacauuacaggauuugcaccuuuuucuaaggacaauucgauuaggcuuuccgcugguggggacaucugggugacaagagaaccuuaugugucaugcgauccugacaaguguuaucaauuugcccuuggacagggaacaacacuaaacaacgugcauucaaaugacacaguacaugauaggaccccuuaucggacccuauugaugaaugaguuagguguuccauuucaucuggggaccaagcaagugugcauagcaugguccagcucaaguugucacgauggaaaagcauggcugcauguuuguguaacgggggaugauaaaaaugcaacugcuagcuucauuuacaaugggaggcuuguagauaguauuguuucaugguccaaagaaauccucaggacccaggagucagaaugcguuuguaucaauggaacuuguacaguaguaaugacugaugggagugcuucaggaaaagcugauacuaaaauacuauucauugaggaggggaaaaucguucauacuagcacauugucaggaagugcucagcaugucgaggagugcuccugcuauccucgauauccuggugucagaugugucugcagagacaacuggaaaggcuccaauaggcccauaguagauauaaacauaaaggauuauagcauuguuuccaguuaugugugcucaggacuuguuggagacacacccagaaaaaacgacagcuccagcaguagccauugcuuggauccuaacaaugaagaagguggucauggagugaaaggcugggccuuugaugauggaaaugacguguggaugggaagaacgaucagcgaaaaguuacgcucaggauaugaaaccuucaaagucauugaaggcugguccaacccuaauuccaaauugcagauaaauaggcaagucauaguugacagagguaauagguccgguuauucugguauuuucucuguugaaggcaaaagcugcaucaaucggugcuuuuauguggaauugauaaggggaagaaaagaggaaacugaaguuuuguggaccucaaacaguauuguuguguuuuguggcaccucagguacauauggaacaggcucauggccugauggggcggacaucaaucucaugccuauauaa

SEQ ID NO: 58119 - RNA, 1410 nt, Artificial Sequence
  derived and/or modified CDS sequence (wt) from neuraminidase__InfluenzaA__BAF47995
augaauccaaaucaaaagauaauaacgauuggcucuguuucucucaccauuuccacaauaugcuucuucaugcaaauugccaucuugauaacuacuguaacauugcauuucaagcaauaugaauucaacucccccccaaacaaccaagugaugcugugugaaccaacaauaauagaaagaaacauaacagagauaguguaucugaccaacaccaccauagagaaggaaauaugccccaaacuagcagaguacagaaauuggucaaagccgcaauguaacauuacaggauuugcaccuuuuucuaaggacaauucgauuaggcuuuccgcugguggggacaucugggugacaagagaaccuuaugugucaugcgauccugacaaguguuaucaauuugcccuuggacagggaacaacacuaaacaacgugcauucaaaugacacaguacaugguaggaccccuuaucggacccuauugaugaaugaguuagguguuccauuucaucuggggaccaagcaagugugcauagcaugguccagcucaaguugucacgauggaaaagcauggcugcauguuuguguaacgggggaugauaaaaaugcaacugcuagcuucauuuacaaugggaggcuuguagauaguauuguuucaugguccaaagaaauccucaggacccaggagucagaaugcguuuguaucaauggaacuuguacaguaguaaugacugaugggagugcuucaggaaaagcugauacuaaaauacuauucauugaggaggggaaaaucguucauacuagcacauugucaggaagugcucagcaugucgaggagugcuccugcuauccucgauauccuggugucagaugugucugcagagacaacuggaaaggcuccaauaggcccauaguagauauaaacauaaaggauuauagcauuguuuccaguuaugugugcucaggacuuguuggagacacacccagaaaaaacgacagcuccagcaguagccauugcuuggauccuaacaaugaagaagguggucauggagugaaaggcugggccuuugaugauggaaaugacguguggaugggaagaacgaucagcgaaaaguuacgcucaggauaugaaaccuucaaagucauugaaggcugguccaacccuaauuccaaauugcagauaaauaggcaagucauaguugacagagguaauagguccgguuauucugguauuuucucuguugaaggcaaaagcugcaucaaucggugcuuuuauguggaauugauaaggggaagaaaagaggaaacugaaguuuuguggaccucaaacaguauuguuguguuuuguggcaccucagguacauauggaacaggcucauggccugauggggcggacaucaaucucaugccuauauaa

SEQ ID NO: 58120 - RNA, 1410 nt, Artificial Sequence; identical to SEQ ID NO: 58119
  derived and/or modified CDS sequence (wt) from neuraminidase__InfluenzaA__BAF47996

SEQ ID NO: 58121 - RNA, 1410 nt, Artificial Sequence; identical to SEQ ID NO: 58080
  derived and/or modified CDS sequence (wt) from neuraminidase__InfluenzaA__BAF47997

SEQ ID NO: 58122 - RNA, 1410 nt, Artificial Sequence
  derived and/or modified CDS sequence (wt) from neuraminidase__InfluenzaA__BAF57504
augaauccaaaucaaaagauaauaacgauuggcucuguuucucucaccauuuccacaauaugcuucuucaugcaaauugccaucuugauaacuacuguaacauugcauuucaagcaauaugaauucaacccccccccaaacaaccaagugaugcugugugaaccaacaauaauagaaagaaacauaacagaaauaguguaucugaccaacaccaccauagagaaggaaauaugccccaaacuagcagaauacagaaauuggucaaagccgcaauguaacauuacaggauuugcaccuuuuucuaaagacaauucgauucggcuuuccgcugguggggacaucugggugacaagagaaccuuaugugucuagcgauccugacaaguguuaucaauuugcccuuggacagggaacaacacuaaacaacgugcauucaaaugacacaguacaugauaggaccccuuaucggacccuauugaugaaagaguuggguguuccauuucaucuggggaccaagcaagugugcauagcaugguccagcucaaguugucacgauggaaaagcauggcugcauguuuguguaacgggggaugaugaaaaugcaacugcuagcuucauuuacaaugggaggcuuguagauaguguuguuucaugguccaaaaaaauccucaggacccaggagucagaaugcguuuguaucaauggaacuuguacaguaguaaugacugaugggagugcuucaggaaaagcugauacuaaaauacuauucauugaggaggggaaaaucguucauacuagcucauugucaggaagugcucagcaugucgaggagugcuccuguuauccucgauauccuggugucagaugugucugcagagacaacuggaaaggcuccaauaggcccaucguagauauaaacauaaaggauuauagcauuguuuccaguuaugugugcucaggacuuguuggagacacacccagaaaaaacgacagcuccagcaguagccauugcuuggauccuaacaaugaggaagguggucauggagugaaaggcugggccuuugaugauggaaaugacguguggaugggaagaacgaucagcgagaaguuacgcucaggauaugaaaccuucaaagucauugaaggcugguccaacccuaacuccaaauugcagauaaauaggcaagucauaguugacagagguaauagguccgguuauucugguauuuucucuguugaaggcaaaagcugcaucaaucggugcuuuuauguggaguugauaaggggaagaaaacaggaaacugaagucuuguggaccucaaacaguauuguuguguuuuguggcaccucagguacauauggaacaggcuccuggccugauggggcggacaucaaucucaugccuauauaa

SEQ ID NO: 58123 - RNA, 1410 nt, Artificial Sequence
  derived and/or modified CDS sequence (wt) from neuraminidase__InfluenzaA__BAF57508
augaauccaaaucaaaagauaauaacgauuggcucuguuucucucaccauuuccacaauaugcuucuucaugcaaauugccauccugauaacuacuuuaacauugcauuucaagcaauaugaauucaacucccccccaaacaaccaagugaugcugugugaaccaacaauaauagaaagaaacauaacagagauaguguaucugaccaacaccaccauagagaaggaaauaugccccaaacuagcagaauacagaaauuggucaaagccgcaauguaacauuacaggauuugcaccuuuuucuaaggacaauucgauucggcuuuccgcugguggggacaucugggugacaagagaaccuuaugugucaugcgauccugacaaguguuaucaauuugcccuuggacagggaacaacacuaaacaacgugcauucaaaugacacaguacaugauaggaccccuuaucggacccuauugaugaaugaguuggguguuccauuucaucuggggaccaagcaagugugcauagcaugguccagcucaaguugucacgauggaaaagcauggcugcauguuuguguaacgggggaugaugaaaaugcaacugcuagcuucauuuacaaugggaggcuuguagauaguauuguuucaugguccaaaaaaauccucaggacccaggagucagaauguguuuguaucaauggaacuuguacaguaguaaugacugaugggagugcuucaggaaaagcugauacuaaaauacuauucauugaggaggggaaaaucguucauacuagcacauugucaggaagugcucagcaugucgaggaaugcuccuguuauccucgauauccuggugucagaugugucugcagagacaacuggaaaggcuccaauaggcccaucguagauauaaacauaaaggauuauagcauuguuuccaguuaugugugcucaggacuuguuggagacacacccagaaaaaacgacagcuccagcaguagccauugcuuggauccuaacaaugaggaagguggucauggagugaaaggcugggccuuugaugauggaaaugacguguggaugggaagaacgaucagcgagaaauuacgcucaggauaugaaaccuucaaagucauugaaggcugguccaacccuaacuccaaauugcagauaaauaggcaagucauaguugacagagguaauagguccgguuauucugguauuuucucuguugaaggcaaaagcugcaucaaucggugcuuuuauguggaguugauaaggggaagaaaacaggaaacugaagucuuguggaccucaaacaguauuguuguguuuuguggcaccucagguacauauggaacaggcucauggccugauggggcggacaucaaucucaugccuauauaa

SEQ ID NO: 58124 - RNA, 1410 nt, Artificial Sequence
  derived and/or modified CDS sequence (wt) from neuraminidase__InfluenzaA__BAF57511
augaauccaaaucaaaagauaauaacgauuggcucuguuucucucaccauuuccacaauaugcuucuucaugcaaauugccauccugauaacuacuguaacauugcauuucaagcaauaugaauucaacucccccccaaacaaccaagugaugcugugugaaccaacaauaauagaaagaaacauaacagagauaguguaucugaccaacaccaccauagagaaggaaauaugccccaaacuagcagaauacagaaauuggucaaagccgcaauguaacauuacaggauuugcaccuuuuucuaaggacaauucgauucggcuuuccgcugguggggacaucugggugacaagagaaccuuaugugucaugcgauccugacaaguguuaucaauuugcccuuggacagggaacaacacuaaacaacgugcauucaaaugacacaguacaugauaggaccccuuaucggacccuauugaugaaugaguuggguguuccauuucaucuggggaccaagcaagugugcauagcaugguccagcucaaguugucacgauggaaaagcauggcugcauguuuguguaacgggggaugaugaaaaugcaacugcuagcuucauuuacaaugggaggcuuguagauaguauuguuucaugguccaaaaaaauccucaggacccaggagucagaauguguuuguaucaauggaacuuguacaguaguaaugacugaugggagugcuucaggaaaagcugauacuaaaauacuauucauugaggaggggaaaaucguucauacuagcacauugucaggaagugcucagcaugucgaggaaugcuccuguuauccucgauauccuggugucagaugugucugcagagacaacuggaaaggcuccaauaggcccaucguagauauaaacauaaaggauuauagcauuguuuccaguuaugugugcucaggacuuguuggagacacacccagaaaaaacgacagcuccagcaguagccauugcuuggauccuaacaaugaggaagguggucauggagugaaaggcugggccuuugaugauggaaaugacguguggaugggaagaacgaucagcgagaaauuacgcucaggauaugaaaccuucaaagucauugaaggcugguccaacccuaacuccaaauugcagauaaauaggcaagucauaguugacagagguaauagguccgguuauucugguauuuucucuguugaaggcaaaagcugcaucaaucggugcuuuuauguggaguugauaaggggaagaaaacaggaaacugaagucuuguggaccucaaacaguauuguuguguuuuguggcaccucagguacauauggaacaggcucauggccugauggggcggacaucaaucucaugccuauauaa

SEQ ID NO: 58125 - RNA, 1410 nt, Artificial Sequence
  derived and/or modified CDS sequence (wt) from neuraminidase__InfluenzaA__BAF57515
augaauccaaaucaaaggauaauaacgauuggcucuguuucucucaccauuuccacaauaugcuucuucaugcaaauugccauccugauaacuacuguaacauugcauuucaagcaauaugaauucaacucccccccaaacaaccaagugaugcugugugaaccaacaauaauagaaagaaacauaacagagauaguguaucugaccaacaccaccauagagaaggaaauaugccccaaacuagcagaauacagaaauuggucaaagccgcaauguaacauuacaggauuugcaccuuuuucuaaggacaauucgauucggcuuuccgcugguggggacaucugggugacaagagaaccuuaugugucaugcgauccugacaaguguuaucaauuugcccuuggacagggaacaacacuaaacaacgugcauucaaaugacaaaguacaugauaggaccccuuaucggacccuauugaugaaugaguuggguguuccauuucaucuggggaccaagcaagugugcauagcaugguccagcucaaguugucacgauggaaaagcauggcugcauguuuguguaacgggggaugaugaaaaugcaacugcuagcuucauuuacaaugggaggcuuguagauaguauuguuucaugguccaaaaaaauccucaggacccaggagucagaauguguuuguaucaauggaacuuguacaguaguaaugacugaugggagugcuucaggaaaagcugauacuaaaauacuauucauugaggaggggaaaaucguucauacuagcacauugucaggaagugcucagcaugucgaggaaugcuccuguuauccucgauauccuggugucagaugugucugcagagacaacuggaaaggcuccaauaggcccaucguagauauaaacauaaaggauuauagcauuguuuccaguuaucugugcucaggacuuguuggagacacacccagaaaaaacgacagcuccagcaguagccauugcuuggauccuaacaaugaggaagguggucauggagugaaaggcugggccuuugaugauggaaaugacguguggaugggaagaacgaucagcgagaaauuacgcucaggauaugaaaccuucaaagucauugaaggcuggucccacccuaacucccaauugcagauaaauaggcaagucauaguugacagagguaauagguccgguuauucugguauuuucucuguugaaggcaaaagcugcaucaaucggugcuuuuauguggaguugauaaggggaagaaaacaggaaacugaagucuuguggaccucaaacaguauuguuguguuuuguggcaccucagguacauauggaacaggcucauggccugauggggcggacaucaaucucaugccuauauaa

SEQ ID NO: 58126 - RNA, 1410 nt, Artificial Sequence
  derived and/or modified CDS sequence (wt) from neuraminidase__InfluenzaA__BAF57522
augaauccaaaucaaaagauaauaacgauuggcucuguuucucucaccauuuccacaauaugcuucuucaugcaaauugccauccugauaacuacuguaacauugcauuucaagcaauaugaauucaacucccccccaaacaaccaagugaugcugugugaaccaacaauaauagaaagaaacauaacagagauaguguaucugaccaacaccaucauagagaaggaaauaugccccaaacuagcagaauacagaaauuggucaaagccgcaauguaacauuacaggauuugcaccuuuuucuaaggacaauucgauucggcuuuccgcugguggggacaucugggugacaagagaaccuuaugugucaugcgauccugacaaguguuaucaauuugcccuuggacagggaacaacacuaaacaacgugcauucaaaugacacaguacaugauaggaccccuuaucggacccuauugaugaaugaguuggguguuccauuucaucuggggaccaagcaagugugcauagcaugguccagcucaaguugucacgauggaaaagcauggcugcauguuuguguaacgggggaugaugaaaaugcaacugcuagcuucauuuacaaugggagacuuguagauaguauuguuucaugguccaaaaaaauccucaggacccaggagucagaaugcguuuguaucaauggaacguguacaguaguaaugacugaugggagugcuucaggaaaagcugauacuaaaauacuauucauugaggaggggaaaaucguucauacuagcacauugucaggaagugcucagcaugucgaggagugcuccuguuauccucgauaucccggugucagaugugucugcagagacaacuggaaaggcuccaauaggcccaucguagauauaaacauaaaggauuauagcauuguuuccaguuaugugugcucaggacuuguuggagacacacccagaaaaaacgaccgcucccgcaguagccauugcuuggauccuaacaaugaggaagguggucauggagugaaaggcugggccuuugaugauggaaaugacguguggaugggaagaacgaucagcgagaaguuacgcucaggauaugaaaccuucaaagucauugagggcugguccaaaccuaacuccaaauugcagauaaauaggcaagucauaguugacagagguaauaggaccgguuauucugguauuuucucuguugaaggcaaaagcugcaucaaucggugcuuuuauguggaguugauaaggggaagaaaacaggaaacugaagucuuguggaccucaaacaguauuguuguguuuuguggcaccucagguacauauggaacaggcucauggccugauggggcggacaucaaucucaugccuauauaa

SEQ ID NO: 58127 - RNA, 1410 nt, Artificial Sequence
  derived and/or modified CDS sequence (wt) from neuraminidase__InfluenzaA__BAF57529
augaauccaaaucaaaagauaauaacgauuggcucuguuucucucaccauuuccacaauaugcuucuucaugcaaauugccaucuugauaacuacuguaacauugcauuucaagcaauaugaauucaacucccccccaaacaaccaagugaugcugugugaaccaacaauaauagaaagaaacauaacagagauaguguaucugaccaacaccaccauagagaaggaaauaugccccaaacuagcagaauacagaaauuggucaaagccgcaaugugacauuacaggauuugcaccuuuuucuaaggacaauucgauuaggcuuuccgcugguggggacaucugggugacaagagaaccuuaugugucaugcgauccugacaaguguuaucaauuugcccuuggacagggaacaacacuaaacaacgugcauucaaaugacaaaguacaugagaggaccccuuaucggaccuuauugaugaaugaauuagguguuccauuucaucuggggaccaagcaagugugcauagcaugguccagcucaaguugucacgauggaaaagcauggcugcauguuuguguaacgggggaugauaaaaaugcaacugcuagcuucauuuacaaugggaggcuuguagauagcauuguuucaugguccaaaaaaauccucaggacccaggagucagaaugcguuuguaucaauggaacuuguacaguaguaaugacugaugggagugcuucaggaaaagcugauacuaaaauacuauucauugaggaggggaaaaucguucauacuagcacauugucaggaagugcucagcaugucgaggagugcuccugcuauccucgauauccuggugucagaugugucugcagagacaacuggaaaggcuccaauaggcccaucguagauauaaacauaaaggauuauagcauuguuuccaguuaugugugcucaggacuuguuggagacacacccagaaaaaaugacagcuccagcaguagccauugcuuggauccuaacaaugaagaagguggucauggagugaaaggcugggccuuugaugauggaaaugacguguggaugggaagaacgaucagcgagaaguuacgcucaggauaugaaaccuucaaagucauugaaggcugguccaacccuaauuccaaauugcagauaaauaggcaagucauaguugacagagguaauagguccgguuauucugguauuuucucuguugaaggcaaaagcugcaucaaucggugcuuuuauguggaguugauaaggggaagaaaagaggaaacugaagucuuguggaccucaaacaguauuguuguguuuuguggcaccucagguacauauggaacaggcucauggccugauggggcggacaucaaucucaugccuauauaa

SEQ ID NO: 58128 - RNA, 1410 nt, Artificial Sequence
  derived and/or modified CDS sequence (wt) from neuraminidase__InfluenzaA__BAF57532
augaauccaaaucaaaagauaauaacgauuggcucuguuucucucaccauuuccacaauaugcuucuucaugcaaauugccaucuugauaacuacuguaacauugcauuucaagcaauaugaauucaacucccccccaaacaaccaagugaugcugugugaaccaacaauaauagaaagaaacauaacagagauaguguaucugaccaacaccaccauagagaaggaaauaugccccaaacuagcagaauacagaaauuggucaaagccgcaaugugacauuacaggauuugcaccuuuuucuaaggacaauucgauuaggcuuuccgcugguggggacaucugggugacaagagaaccuuaugugucaugcgauccugacaaguguuaucaauuugcccuuggacagggaacaacacuaaacaacgugcauucaaaugacacaguacauaauaggaccccuuaucggaccuuauugaugaaugaguuagguguuccauuucaucuggggaccaagcaagugugcauagcaugguccagcucaaguugucacgauggaaaagcauggcugcauguuuguguaacgggggaugauaaaaaugcaacugcuagcuucauuuacaaugggaggcuuguagauaguauuguuucaugguccaaaaaaauccucaggacccaggagucagaaugcguuuguaucaauggaacuuguacaguaguaaugacugaugggagugcuucaggaaaagcugauacuaaaauacuauucauugaggaggggaaaaucguucauacuagcacauugucaggaagugcucagcaugucgaggagugcuccugcuauccucgauauccuggugucagaugugucugcagagacaacuggaaaggcuccaauaggcccaucguagauauaaacauaaaggauuauagcauuguuuccaguuaugugugcucaggacuuguuggagacacacccagaaaaaaugacagcuccagcaguagccauugcuuggauccuaacaaugaagaagguggucauggagugaaaggcugggccuuugaugauggaaaugacguguggaugggaagaacgaucagcgagaaguuacgcucaggauaugaaaccuucaaagucauugaaggcugguccaacccuaauuccaaauugcagauaaauaggcaagucauaguugacagagguaauagguccgguuauucugguauuuucucuguugaaggcaaaagcugcaucaaucggugcuuuuauguggaguugauaaggggaagaaaagaggaaacugaagucuuguggaccucaaacaguauuguuguguuuuguggcaccucagguacauauggaacaggcucauggccugauggggcggacaucaaucucaugccuauauaa

SEQ ID NO: 58129 - RNA, 1410 nt, Artificial Sequence; identical to SEQ ID NO: 53563
  derived and/or modified CDS sequence (wt) from neuraminidase__InfluenzaA__BAF57536

SEQ ID NO: 58130 - RNA, 1410 nt, Artificial Sequence
  derived and/or modified CDS sequence (wt) from neuraminidase__InfluenzaA__BAF57539
augaauccaaaucaaaagauaauaacgauuggcucuguuucucucaccauuuccacaauaugcuucuucaugcaaauugccaucuugauaacuacuguaacauugcauuucaagcaauaugaauucaacucccccccaaacaaccaagugaugcugugugaaccaacaauaauagaaagaaacauaacagagauaguguaucugaccaacaccaccauagagaaggaaauaugccccaaacuagcagaauacagaaauuggucaaagccgcaaugugacauuacaggauuugcaccuuuuucuaaggacaauucgauuaggcuuuccgcugguggggacaucugggugacaagagaaccuuaugugucaugcgauccugacaaguguuaucaauuugcccuuggacagggaacaacacuaaacaacgugcauucaaaugacacaguacaugauaggaccccuuaucggaccuuauugaugaaugaguuagguguuccauuucaucuggggaccaagcaagugugcauagcaugguccagcucaaguugucacgauggaaaagcauggcugcauguuuguguaacgggggaugauaaaaaugcaacugcuagcuucauuuacaaugggaggcuuauagauaguauuguuucaugguccaaaaaaauccucaggacccaggagucagaaugcguuuguaucaauggaacuuguacaguaguaaugacugaugggagugcuucaggaaaagcugauacuaaaauacuauucauugaggaggggaaaaucguucauacuagcacauugucaggaagugcucagcaugucgaggagugcuccugcuauccucgauauccuggugucagaugugucugcagagacaacuggaaaggcuccaauaggcccaucguagauauaaacauaaaggauuauagcauuguuuccaguuaugugugcucaggacuuguuggagacacacccaggaaaaacgacagcuccagcaguagccauugcuuggauccuaacaaugaagaagguggucauggagugaaaggcugggccuuugaugauggaaaugacguguggaugggaagaacgaucagcgagaaguugcgcucaggauaugaaaccuucaaagucauugaaggcugguccaacccuaauuccaaauugcagauaaauaggcaagucauaguugacagagguaauagguccgguuauucugguauuuucucuguugaaggcaaaagcugcaucaaucggugcuuuuauguggaguugauaaggggaagaaaagagaaaacugaagucuuguggaccucaaacaguauuguuguguuuuguggcaccucagguacauauggaacaggcucauggccugauggggcggacaucaaucucaugccuauauaa

SEQ ID NO: 58131 - RNA, 1410 nt, Artificial Sequence
  derived and/or modified CDS sequence (wt) from neuraminidase__InfluenzaA__BAF57543
augaauccaaaucaaaagauaauaacgauuggcucuguuucucucaccauuuccacaauaugcuucuucaugcaaauugccaucuugauaacuacuguaacauugcauuucaagcaauaugaauucaacucccccccaaacaaccaagugaugcugugugaaccaacaauaauagaaagaaacauaacagagauaguguaucugaccaacaccaccauagagaaggaaauaugccccaaacuagcagaauacagaaauuggucaaagccgcaaugugacauuacaggauuugcaccuuuuucuaaggacaauucgauuaggcuuuccgcugguggggacaucugggugacaagagaaccuuaugugucaugcgauccugacaaguguuaucaauuugcccuuggacagggaacaacacuaaacaacgugcauucaaaugacacaguacaugauaggaccccuuaucggaccuuauugaugaaugaguuagguguuccauuucaucuggggaccaagcaagugugcauagcaugguccagcucaaguugucacgauggaaaagcauggcugcauguuuguguaacgggggaugauaaaaaugcaacugcuagcuucauuuacaaugggaggcuuguagauaguauuguuucaugguccaaaaaaauccucaggacccaggagucagaaugcguuuguaucaauggaacuuguacaguaguaaugacugaugggagugcuucaggaaaagcugauacuaaaauacuauucauugaggaggggaaaaucguucauacuagcacauugucaggaagugcucagcaugucgaggagugcuccugcuauccucgauauccuggugucagaugugucugcagagacaacuggaaaggcuccaauaggcccaucguagauauaaacauaaaggauuauagcauuguuuccaguuaugugugcucaggacuuguuggagacacacccagaaaaaacgacagcuccagcaguagccauugcuuggauccuaacaaugaagaagguggucauggagugaaaggcugggccuuugaugauggaaaugacguguggaugggaagaacgaucagcgagaaguuacgcucaggauaugaaaccuucaaagucauugaaggcugguccaacccuaauuccaaauugcagauaaauaggcaagucauaguugacagagguaauagguccgguuauucugcuauuuucucuguugaaggcaaaagcugcaucaaucggugcuuuuauguggaguugauaaggggaagaaaagaggaaacugaagucuuguggaccucaaacaguauuguuguguuuuguggcaccucagguacauauggaacaggcucauggccugauggggcggacaucaaucucaugccuauauaa

SEQ ID NO: 58132 - RNA, 1410 nt, Artificial Sequence
  derived and/or modified CDS sequence (wt) from neuraminidase__InfluenzaA__BAF57547
augaauccaaaucaaaagauaauaacgauuggcucuguuucucucaccauuuccacaauaugcuucuucaugcaaauugccaucuugauaacuacuguaacauugcauuucaagcaauaugaauucaacucccccccaaacaaccaagugaugcugugugaaccaacaauaauagaaagaaacauaacagagauaguguaucugaccaacaccaccauagagaaggaaauaugccccaaacuagcagaauacagaaauuggucaaagccgcaaugugacauuacaggauuugcaccuuuuucuaaggacaauucgauuaggcuuuccgcugguggggacaucugggugacaagagaaccuuaugugucaugcgauccugacaaguguuaucaauuugcccuuggacagggaacaacacuaaacaacgugcauucaaaugacacaguacaugauaggaccccuuaucggaccuuauugaugaaugaguuagguguuccauuucaucuggggaccaagcaagugugcauagcaugguccagcucaaguugucacgauggaaaagcauggcugcauguuuguguaacgggggaugauaaaaaugcaacugcuagcuucauuuacaaugggaggcuuguagauaguauuguuucaugguccaaaaaaauccucaggacccaggagucagaaugcguuuguaucaauggaacuuguacaguaguaaugacugaugggagugcuucaggaaaagcugauacuaaaauacuauucauugaggaggggaaaaucguucauacuagcacauugucaggaagugcucagcaugucgaggagugcuccugcuauccucgauauccuggugucagaugugucugcagagacaacuggaaaggcuccaauaggcccaucguagauauaaacauaaaggauuauagcauuguuuccaguuaugugugcucaggacuuguuggagacacacccagaaaaaacgacagcuccagcaguagccauugcuuggauccuaacaaugaagaagguggucauggagugaaaggcugggccuuugaugauggaaaugacguguggaugggaagaacgaucagcgagaaguuacgcucaggauaugaaaccuucaaagucauugaaggcugguccaacccuaauuccaaauugcagauaaauaggcaagucauaguugacagagguaauagguccgguuauucugguauuuucucuguugaaggcaaaagcugcaucaaucggugcuuuuauguggaguugauaaggggaagaaaagaggaaacugaagccuuguggaccucaaacaguauuguuguguuuuguggcaccucagguacauauggaacaggcucauggccugauggggcggacaucaaucucaugccuauauaa

SEQ ID NO: 58133 - RNA, 1410 nt, Artificial Sequence; identical to SEQ ID NO: 53570
  derived and/or modified CDS sequence (wt) from neuraminidase__InfluenzaA__BAF57551

SEQ ID NO: 58134 - RNA, 1410 nt, Artificial Sequence; identical to SEQ ID NO: 53461
  derived and/or modified CDS sequence (wt) from neuraminidase__InfluenzaA__BAF57555

SEQ ID NO: 58135 - RNA, 1410 nt, Artificial Sequence; identical to SEQ ID NO: 46740
  derived and/or modified CDS sequence (wt) from neuraminidase__InfluenzaA__BAF57559

SEQ ID NO: 58136 - RNA, 1410 nt, Artificial Sequence
  derived and/or modified CDS sequence (wt) from neuraminidase__InfluenzaA__BAF57563
augaauccaaaucaaaagauaauaacgauuggcucuguuucucucaccauuuccacaauaugcuucuucaugcaaauugccaucuugauaacuacuguaacauugcauuucaagcaauaugaauucaacucccccccaaacaaccaagugaugcugugugaaccaacaauaauagaaagaaacauaacagagauaguguaucugaccaacaccaccauagagaaggaaauaugccccaaacuagcagaauacagaaauuggucaaagccgcaaugugacauuacaggauuugcaccuuuuucuaaggacaauucgauuaggcuuuccgcugguggggacaucugggugacaagagaaccuuaugugucaugcgauccugacaaguguuaucaauuugcccuuggacagggaacaacacuaaacaacgugcauucaaaugacauaguacaugauaggaccccguaucggacccuauugaugaaugaguuagguguuccauuucaucuggggaccaagcaagugugcauagcaugguccagcucaaguugucacgauggaaaagcauggcugcauguuuguguaacgggggaugauaaaaaugcaacugcuagcuucauuuacaaugggaggcuuguagauaguauuguuucaugguccaaggaaauccucaggacccaggagucagaaugcguuuguaucaauggaacuuguacaguaguaaugacugaugggagugcuucaggaaaagcugauacuaaaauacuauucauugaggaggggaaaaucguucauacuagcacauugucaggaagugcucagcaugucgaggagugcuccugcuauccucgauauccuggugucagaugugucuguagagacaacuggaaaggcuccaauaggcccaucguagauauaaacauaaaggauuauagcauuguuuccaguuaugugugcucaggacuuguuggagacacacccagaaaaaacgacagcuccagcaguagccauugcuuggauccuaacaaugaagaagguggucauggagugaaaggcugggccuuugaugauggaaaugacguguggaugggaagaacgaucagcgagaaguuacgcucaggauaugaaaccuucaaagucauugaaggcugguccaacccuaauuccaaauugcagauaaauaggcaagucauaguugacagagguaauagguccgguuauucugguauuuucucuguugaaggcaaaagcugcaucaaucgguguuuuuauguggaguugauaaggggaagaaaagaggaaacugaagucuuguggaccucaaacaguauuguuguguuuuguggcaccucagguacauauggaacaggcucauggccugauggggcggacaucaaucucaugccuauauaa

SEQ ID NO: 58137 - RNA, 1410 nt, Artificial Sequence
  derived and/or modified CDS sequence (wt) from neuraminidase__InfluenzaA__BAF57571
augaauccaaaucaaaagauaauaacgauuggcucuguuucucucaccauuuccacaauaugcuucuucaugcaaauugccaucuugauaacuacuguaacauugcauuucaagcaauaugaauucaacucccccccaaacaaccaagugaugcugugugaaccaacaauaauagaaagaaacauaacagagauaguguaucugaccaacaccaccauagagaaggaaauaugccccaaacuagcagaauacagaaauuggucaaagccgcaauguaacauuacaggauuugcaccuuuuucuaaggacaauucgauuaggcuuuccgcugguggggacaucugggugacaagagaaccuuaugugucaugcgauccugacaaguguuaucaauuugcccuuggacagggaacaacacuaaacaacgugcauucaaaugacacaguacaugauaggaccccuuaucggacccuauugaugaaugaguuagguguuccauuucaucuggggaccaagcaagugugcauagcaugguccagcucaaguugucacgauggaaaagcauggcugcauguuuguguaacgggggaugauaaaaaugcaacugcuagcuucauuuacaaugggaggcuuguagauaguauuguuucaugguccaaagaaauccucaggacccaggagucagaaugcguuuguaucaauggaacuuguacaguaguaaugacugaugggagugcuucaggaaaagcugauacuaaaauacuauucauugaggaggggaaaaucguucauacuagcacauugucaggaagugcucagcaugucgaggagugcuccugcuauccucgauauccuggugucagaugugucugcagagacaacuggaaaggcuccaauaggcccauaguagauauaaacauaaaggauuauagcauuguuuccaguuaugugugcucaggacuuguuggagacacacccagaaaaaacgacagcuccagcaguagccauugcuuggauccuaacaaugaagaagguggucauggagugaaaggcugggccuuugaugauggaaaugacguguggaugggaagaacgaucagcgagaaguuacgcucaggauaugaaaccuucaaagucauugaaggcugguccaacccuaauuccaaauugcagauaaauaggcaagucauaguugacagagguaauagguccgguuauucugguauuuucucuguugaaggcaaaagcugcaucaaucggugcuuuuauguggaguugauaaggggaagaaaagaggaaacugaagucuuguggaccucaaacaguauuguuguguuuuguggcaccucagguacauauggaacaggcucguggccugauggggcggacaucaaucucaugccuauauaa

SEQ ID NO: 58138 - RNA, 1410 nt, Artificial Sequence; identical to SEQ ID NO: 53468
  derived and/or modified CDS sequence (wt) from neuraminidase__InfluenzaA__BAF57575

SEQ ID NO: 58139 - RNA, 1410 nt, Artificial Sequence
  derived and/or modified CDS sequence (wt) from neuraminidase__InfluenzaA__BAF57579
augaauccaaaucaaaagauaauaacgauuggcucuguuucucucaccauuuccacaauaugcuucuucaugcaaauugccaucuugauaacuacuguaacauugcauuucaagcaauaugaauucaacucccccccaaacaaccaagugaugcugugugaaccaacaauaauagaaagaaacauaacagagauaguguaucugaccaacaccaccauagagaaggaaauaugccccaaacuagcagaauacagaaauuggucaaagccgcaaugugacauuacaggauuugcaccuuuuucuaaggacaauucgauuaggcuuuccgcugguggggacaucugggugacaagagaaccuuaugugucaugcgauccugacaaguguuaucaauuugcccuuggacagggaacaacacuaaacaacgugcauucaaaugacacaguacaugauaggaccccguaucggacccuauugaugaaugaguuagguguuccauuucaucuggggaccaagcaagugugcauagcaugguccagcucaaguugucacgauggaaaagcauggcugcauguuuguguaacgggggaugauaaaaaugcaacugcuagcuucauuuacaaugggaggcuuguagauaguauuguuucaugguccaaggaaauccucaggacccaggagucagaaugcguuuguaucaauggaacuuguacaguaguaaugacugaugggagugcuucaggaaaagcugauacuaaaauacuauucauugaggaggggaaaaucguucauacuagcacauugucaggaagugcucagcaugucgaggagugcuccugcuauccucgauauccuggugucagaugugucuguagagacaacuggaaaggcuccaauaggcccaucguagauauaaacauaaaggauuauagcauuguuuccaguuaugugugcucaggacuuguuggagacacacccagaaaaaacgacagcuccagcaguagccauugcuuggauccuaacaaugaagaagguggucauggagugaaaggcugggccuuugaugauggaaaugacguguggaugggaagaacgaucagcgaaaaguuacgcucaggauaugaaaccuucaaagucauugaaggcugguccaacccuaauuccaaauugcagauaaauaggcaagucauaguugacagagguaauagguccgguuauucugguauuuucucuguugaaggcaaaagcugcaucaaucgguguuuuuauguggaguugauaaggggaagaaaagaggaaacugaagucuuguggaccucaaacaguauuguuguguuuuguggcaccucagguacauauggaacaggcucauggccugauggggcggacaucaaucucaugccuauauaa

SEQ ID NO: 58140 - RNA, 1410 nt, Artificial Sequence
  derived and/or modified CDS sequence (wt) from neuraminidase__InfluenzaA__BAF57583
augaauccaaaucaaaagauaauaacgauuggcucuguuucucucaccauuuccacaauaugcuucuucaugcaaauugccaucuugauaacuacuguaacauugcauuucaagcaauaugaauucaacucccccccaaacaaccaagugaugcugugugaaccaacaauaauagaaagaaacauaacagagauaguguaucugaccaacaccaccauagagaaggaaauaugccccaaacuagcagaauacagaaauuggucaaagccgcaauguaacauuacaggauuugcaccuuuuucuaaggacaauucgauuaggcuuuccgcugguggggacaucagggugacaagagaaccuuaugugucaugcgauccugacaaguguuaucaauuugcccuuggacagggaacaacacuaaacaacgugcauucaaaugacacaguacaugauaggaccccuuaucggacccuauugaugaaugaguuagguguuccauuucaucuggggaccaagcaagugugcauagcaugguccagcucaaguugucacgauggaaaagcauggcugcauguuuguguaacgggggaugauaaaaaugcaacugcuagcuucauuuacaaugggaggcuuguagauaguauuguuucaugguccaaagaaauccucaggacccaggagucagaaugcguuuguaucaauggaacuuguacaguaguaaugacugaugggagugcuucaggaaaagcugauacuaaaauacuauucauugaggaggggaaaaucguucauacuagcacauugucaggaagugcucagcaugucgaggagugcuccugcuauccucgauauccuggugucagaugugucugcagagacaacuggaaaggcuccaauaggcccauaguagauauaaacauaaaggauuauagcauuguuuccaguuaugugugcucaggacuuguuggagacacacccagaaaaaacgacagcuccagcaguagccauugcuuggauccuaacaaugaagaagguggucauggagugaaaggcugggccuuugaugauggaaaugacguguggaugggaagaacgaucagcgagaaguuacgcucaggauaugaaaccuucaaagucauugaaggcugguccaacccuaauuccaaauugcagauaaauaggcaagucauaguugacagagguaauagguccgguuauucugguauuuucucuguugaaggcaaaagcugcaucaaucggugcuuuuauguggaguugauaaggggaagaaaagaggaaacugaagucuuguggaccucaaacaguauuguuguguuuuguggcaccucagguacauauggaacaggcucauggccugauggggcggacaucaaucucaugccuauauaa

SEQ ID NO: 58141 - RNA, 1410 nt, Artificial Sequence
  derived and/or modified CDS sequence (wt) from neuraminidase__InfluenzaA__BAF57587
augaauccaaaucaaaagauaauaacgauuggcucuguuucucucaccauuuccacaauaugcuucuucaugcaaauugccaucuugauaacuacuguaacauugcauuucaagcaaugugaauucaacucccccccaaacaaccaagugaugcugugugaaccaacaauaauagaaagaaacauaacagagauaguguaucugaccaacaccaccauagagaaggaaauaugccccaaacuagcagaauacagaaauuggucaaagccgcaauguaacauuacaggauuugcaccuuuuucuaaggacaauucgauuaggcuuuccgcugguggggacaucugggugacaagagaaccuuaugugucaugcgauccugacaaguguuaucaauuugcccuuggacagggaacaacacuaaacaacgugcauucaaaugacacaguacaugauaggaccccuuaucggacccuauugaugaaugaguuagguguuccauuucaucuggggaccaagcaagugugcauagcaugguccagcucaaguugucacgauggaaaagcauggcugcauguuuguguaacgggggaugauaaaaaugcaacugcuagcuucauuuacaaugggaggcuuguagauaguauuguuucaugguccaaagaaauccucaggacccaggagucagaaugcguuuguaucaauggaacuuguacaguaguaaugacugaugggagugcuucaggaaaagcugauacuaaaauacuauucauugaggaggggaaaaucguucauacuagcacauugucaggaagugcucagcaugucgaggagugcuccugcuauccucgauauccuggugucagaugugucugcagagacaacuggaaaggcuccaauaggcccauaguagauauaaacauaaaggauuauagcauuguuuccaguuaugugugcucaggacuuguuggagacacacccagaaaaaacgacagcuccagcaguagccauugcuuggauccuaauaaugaagaagguggucauggagugaaaggcugggccuuugaugauggaaaugacguguggaugggaagaacgaucagcgagaaguuacgcucaggauaugaaaccuucaaagucauugaaggcugguccaacccuaauuccaaauugcagauaaauaggcaagucauaguugacagagguaauagguccgguuauucugguauuuucucuguugaaggcaaaagcugcaucaaucggugcuuuuauguggaguugauaaggggaagaaaagaggaaacugaagucuuguggaccucaaacaguauuguuguguuuuguggcaccucagguacauauggaacaggcucauggccugauggggcggacaucaaucucaugccuauauaa

SEQ ID NO: 58142 - RNA, 1410 nt, Artificial Sequence
  derived and/or modified CDS sequence (wt) from neuraminidase__InfluenzaA__BAF57591
augaauccaaaucaaaagauaauaacgauuggcucuguuucucucaccauuuccacaauaugcuucuuuaugcaaauugccaucuugauaacuacuguaacauugcauuucaagcaauaugaauucaacucccccccaaacaaccaagugaugcugugugaaccaacaauaauagaaagaaacauaacagagauaguguaucugaccaacaccaccauagagaaggaaauaugccccaaacuagcagaauacagaaauuggucaaagccgcaaugugacauuacaggauuugcaccuuuuucuaaggacaauucgauuaggcuuuccgcugguggggacaucugggugacaagagaaccuuaugugucaugcgauccugacaaaugcuaucaauuugcccuuggacagggaacaacacuaaacaacgugcauucaaaugacacaguacaugauaggaccccuuaucggacccuauugaugaaugaguuagguguuccauuucaucuggggacuaagcaagugugcauagcaugguccagcucaaguugucacgauggaaaagcauggcugcauguuuguguaacaggggaugauaaaaaugcaacugcuagcuucauuuacaaugggaggcuuguagauaguauuguuucaugguccaaagaaauccucagaacccaggagucagaaugcguuuguaucaauggaacuuguacaguaguaaugacugaugggagugcuucagggaaagcugauacuaaaauacuauucauugaggaggggaaaaucguucauacuagcacauugucaggaagugcccagcaugucgaggagugcuccugcuauccucgauauccuggugucagaugugucugcagagacaacuggaaaggcuccaauaggcccaucguacauauaaacauaaaggauuauagcauuguuuccaguuaugugugcucaggacuuguuggagacacacccagaaaaaacgacagcuccagcaguagccauugcuugaauccuaacaaugaagaagguggucauggagugaaaggcugggccuuugaugauggaaaugacguguggaugggaagaacgaucagcgagaaguuacgcuuaggauaugaaaccuucaaagucauugaaggcugguccaacccuaauuccaaauugcagauaaauaggcaagucauaguugacagagguaauagauccgguuauucugguauuuucucuguugaaggcaaaagcugcaucaaucggugcuuuuauguggaguugauaaggggaagaaaagaggaaacugaagucuuguggaccucaaacaguauuguuguguuuuguggcaccucagguacauauggaacaggcucauggccugauggggcggacaucaaucucaugccuauauaa

SEQ ID NO: 58143 - RNA, 1410 nt, Artificial Sequence
  derived and/or modified CDS sequence (wt) from neuraminidase__InfluenzaA__BAF57595
augaauccaaaucaaaagauaauaacgauuggcucuguuucucucaccauuuccacaauaugcuucuucaugcaaauugccaucuugauaacuacuguaacauugcauuucaagcaauaugaauucaacucccccccaaacaaccaagugaugcugugugaaccaacaauaauagaaagaaacauaacagagauaguguaucugaccaacaccaccauagagaaggaaauaugccccaaaauagcagaauacagaaauuggucaaagccgcaauguaacauuacaggauuugcaccuuuuucuaaggacaauucgauuaggcuuuccgcugguggggacaucugggugacaagagaaccuuaugugucaugcgauccugacaaguguuaucaauuugcccuuggacagggaacaacacuaaacaacgugcauucaaaugacacaguacaugauaggaccccuuaucggacccuauugaugaaugaguugggcguuccauuucaucuggggaccaagcaagugugcauagcaugguccagcucaaguugucacgauggaaaagcauggcugcauguuuguguaacgggggaugauaaaaaugcaacugcuagcuucauuuacaaugggaggcuuguagauaguauuguuucaugguccaaagaaauccucaggacccaggagucagaaugcguuugugucaauggaacuuguacaguaguaaugacugaugggagugcuucaggaaaagcugauacuaaaauacuauucauugaggaggggaaaaucguucauacuagcacauugucaggaagugcucagcaugucgaggagugcuccugcuauccucgauauccuggugucagaugugucugcagagacaacuggaaaggcuccaauaggcccauaguagauauaaacauaaaggauuauagcauuguuuccaguuaugugugcucaggacuuguuggagacacacccagaaaaaacgacagcuccagcaguagccauugcuuggauccuaacaaugaagaagguggucauggagugaaaggcugggccuuugaugauggaaaugacguguggaugggaagaacgaucagcgagaaguuacguucaggauaugaaaccuucaaagucauugaaggcugguccaacccuaauuccaaauugcagauaaauaggcaagucauaguugacagagguaauagguccgguuauucugguauuuucucuguugaaggcaaaagcugcaucaaucggugcuuuuauguggaguugauaaggggaagaaaagaggaaacugaagucuuguggaccucaaacaguauuguuguguuuuguggcaccucagguacauauggaacaggcucauggccugauggggcggacaucaaucucaugccuauauaa

SEQ ID NO: 58144 - RNA, 1410 nt, Artificial Sequence
  derived and/or modified CDS sequence (wt) from neuraminidase__InfluenzaA__BAF57599
augaauccaaaucaaaagauaauaacgauuggcucuguuucucucaccauuuccacaauaugcuucuucaugcaaauugccaucuugauaacuacuguaacauugcauuucaagcaauaugaauucaacucccccccaaacaaccaagugaugcugugugaaccaacaauaauagaaagaaacauaacagagauaguguaucugaccaacaccaccauagagaaggaaauaugccccaaacuagcagaauacagaaauuggucaaagccgcaauguaacauuacaggauuugcaccuuuuucuaaggacaauucgauuaggcuuuccgcugguggggacaucugggugaccagagaaccuuaugugucaugcgauccugacaagugcuaucaauuugcccuuggacagggaacaacacuaaacaacgugcauucaaaugacacaguacaugauaggaccccuuaucggacccuauugaugaaugaguuagguguuccauuucaucuggggaccaagcaagugugcauagcaugguccagcucaaguugucacgauggaaaagcauggcugcauguuugugugacgggggaugauaaaaaugcaacugcuagcuucauuuacaaugggaggcuuguagauaguauuguuucaugguccaaagaaauccucaggacccaggagucagaaugcguuuguaucgauggaacuuguacaguaguaaugacugaugggagugcuucaggaaaagcugauacuaaaauacuauucauugaggaggggaaaaucguucauacuagcacauugucaggaagugcucagcaugucgaggagugcuccugcuauccucgauauccuggugucagaugugucugcagagacaacuggaaaggcuccaauaggcccauaguagauauaaacauaaaggauuauagcauuguuuccaguuaugugugcucaggacuuguuggagacacacccagaaaaaacgacagcuccagcaguagccauugcuuggauccuaacaaugaagaagguggucauggagugaaaggcugggccuuugaugauggaaaugacguguggaugggaagaacgaucagcgagaaguuacgcucaggauaugaaaccuucaaagucauugaaggcugguccaacccuaauuccaaauugcagauaaauaggcaagucauaguugacagagguaauagguccgguuauucugguauuuucucuguugaaggcaaaagcugcaucaaucggugcuuuuauguggaguugauaaggggaagaaaagaggaaacugaagucuuguggaccucaaacaguauuguuguguuuuguggcaccucagguacauauggaacaggcucauggccugauggggcggacaucaaucucaugccuauauaa

SEQ ID NO: 58145 - RNA, 1410 nt, Artificial Sequence
  derived and/or modified CDS sequence (wt) from neuraminidase__InfluenzaA__BAF57603
augaauccaaaucaaaagauaauaacgauuggcucuguuucucucaccauuuccacaauaugcuucuucaugcaaauugccaucuugauaacuacuguaacauugcauuucaagcaauaugaauucaacucccccccaaacaaccaagugaugcugugugaaccaacaauaauagaaaggaacauaacagagauaguguaucugaccaacaccaccauagagaaggaaauaugccccaaacuagcagaauacagaaauuggucaaagccgcaauguaacauuacaggauuugcaccuuuuucuaaggacaauucgauuaggcuuuccgcugguggggacaucugggugacaagagaaccuuaugugucaugcgauccugacaaguguuaucaauuugcccuuggacagggaacaacacuaaacaacgugcauucaaaugacacaguacaugauaggaccccuuaucggacccuauugaugaaugaguuagguguuccauuucaucuggggaccaagcaagugugcauagcaugguccagcucaaguugucacgauggaaaagcauggcugcauguuuguguaacgggggaugauaaaaaugcaacugcuagcuucauuuacaaugggaggcuuguagauaguauuguuucaugguccaaagaaauccucaggacccaggagucagaaugcguuuguaucaauggaacuuguacaguaguaaugacugaugggagugcuucaggaaaagcugauacuaaaauacuauucauugaggaggggaaaaucguucauacuagcacauugucaggaagugcucagcaugucgaggagugcuccugcuauccucgauauccuggugucagaugugucugcagagacaacuggaaaggcuccaauaggcccauaguagauauaaacauaaaggauuauagcauuguuuccaguuaugugugcucaggacuuguuggagacacacccagaaaaaacgacagcuccagcaguagccauugcuuggauccuaacaaugaagaagguggucauggagugaaaggcugggccuuugaugauggaaaugacguguggaugggaagaacgaucagcgagaaguuacgcucaggauaugaaaccuucaaagucauugaaggcugguccaacccugauuccaaauugcagauaaauaggcaagucauaguugacagagguaauagguccgguuauucugguauuuucuccguugaaggcaaaagcugcaucaaucggugcuuuuauguggaguugauaaggggaagaaaagaggaaacugaagucuuggggaccucgaacaguauuguuguguuuuguggcaccucagguacauauggaacaggcucauggccugauggggcggacaucaaucucaugccuauauaa

SEQ ID NO: 58146 - RNA, 1410 nt, Artificial Sequence
  derived and/or modified CDS sequence (wt) from neuraminidase__InfluenzaA__BAF62620
augaauccaaaucaaaagauaauaacgauuggcucuguuucucucaccauuuccacaauaugcuucuucaugcaaauugccaucuugauaacuacuguaacauugcauuucaagcaauaugaauucaacucccccccaaacaaccaagugaugcugugugaaccaacaauaauagaaagaaacauaacagagauaguguaucugaccaacaccaccauagagaaggaaauaugccccaaacuagcagaauacagaaauuggucaaagccgcaaugugacauuacaggauuugcaccuuuuucuaaggacaauucgauuaggcuuuccgcugguggggacaucugggugacaagagaaccuuaugugucaugcgauccugacaaguguuaucaauuugcccuuggacagggaacaacacuaaacaacgugcauucaaaugacacaguacauaauaggaccccuuaucggaccuuauugaugaaugaguuagguguuccauuucaucuggggaccaagcaagugugcauagcaugguccagcucaaguugucacgauggaaaagcauggcugcauguuuguguaacgggggaugauaaaaaugcaacugcuagcuucauuuacaaugggaggcuuguagauaguauuguuucaugguccaaaaaaauccucaggacccaggagucagaaugcguuuguaucaauggaacuuguacaguaguaaugacugaugggagugcuucaggaaaagcugauacuaaaauacuauucauugaggaggggaaaaucguucauacuagcacauugucaggaagugcucagcaugucgaggagugcuccugcuauccucgauauccuggugucagaugugucugcagagacaacuggaaaggcuccaauaggcccaucguagauauaaacauaaaggauuauagcauuguuuccaguuaugugugcucaggacuuguuggagacacacccagaaaaaacgacagcuccagcaguagccauugcuuggauccuaacaaugaagaagguggucauggagugaaaggcugggccuuugaugauggaaaugacguguggaugggaagaacgaucagcgagaaguugcgcucaggauaugaaaccuucaaagucauugaaggcugguccaacccuaauuccaaauugcagauaaauaggcaagucauaguugacagagguaauagguccgguuauucugguauuuucucuguugaaggcaaaagcugcaucaaucggugcuuuuauguggaguugauaaggggaagaaaagaggaaacugaagucuuguggaccucaaacaguauuguuguguuuuguggcaccucagguacauauggaacaggcucauggccugauggggcggacaucaaucucaugccuauauaa

SEQ ID NO: 58147 - RNA, 1413 nt, Artificial Sequence
  derived and/or modified CDS sequence (wt) from neuraminidase__InfluenzaA__BAF63036
augaauccaaaucaaaaaauaauaaccauuggaucaaucaguauagcaaucggaauaauuagucuaauguugcaaauaggaaauauuauuucaauaugggcuagucacucaauccaaacuggaagucagaaccacacuggaauaugcaaccaaagaaucaucacauaugaaaacagcaccugggugaaucacacauauguuacuauuaacaacacuaauguuguugcuggaaaagacaaaacuucagugacauuggccggcaauucaucucuuuguucuaucaguggaugggcuauauacacaaaagacaacagcauaagaauuggcuccaaaggagauguuuuugucauaagagaaccuuucauaucauguucucacuuggaaugcagaaccuuuuuucugacccaaggugcucuauuaaaugacaaacauucaaaugggaccguuaaggacagaaguccuuauagggccuuaaugagcuguccucuaggugaagcuccguccccauacaauucaaaguuugaaucaguugcauggucagcaagcgcaugccaugauggcaugggcugguuaacaaucggaauuucugguccagacaauggagcuguggcuguauuaaaauacaacggaauaauaacugaaaccauaaaaaguuggaaaaaacgaauauuaagaacacaagagucugaaugugucugugugaacgggucauguuucaccauaaugaccgauggcccgaguaauggggccgccucguacaaaaucuucaagaucgaaaaggggaagguuacuaaaucaauagaguugaaugcacccaauuuucauuaugaggaauguuccuguuacccagacacuggcacagugauguguguaugcagggacaacuggcaugguucaaaucgaccuugggugucuuuuaaucaaaacuuggauuaccaaauaggauacaucugcaguggaguguucggugacaauccgcgucccaaagauggaaagggcagcuguaauccagugacuguugauggagcagacggaguaaaaggguuuucauacaaauaugguaaugguguuuggauaggaaggacuaaaaguaacagacuuagaaagggguuugagaugauuugggauccuaauggauggacagauaccgacagugauuucucagugaaacaggauguuguggcaauaacugauuggucaggguacagcggaaguuucguucaacauccugaguuaacaggauuggacuguauaaggccuugcuucuggguugaguuagucagaggacugccuagagaaaauacaacaaucuggacuagugggagcagcauuucuuuuuguggcguuaauagugauacugcaaacuggucuuggccagacggugcugaguugccguucaccauugacaaguag

SEQ ID NO: 58148 - RNA, 1413 nt, Artificial Sequence; identical to SEQ ID NO: 53453
  derived and/or modified CDS sequence (wt) from neuraminidase__InfluenzaA__BAF63040

SEQ ID NO: 58149 - RNA, 1413 nt, Artificial Sequence
  derived and/or modified CDS sequence (wt) from neuraminidase__InfluenzaA__BAF63047
augaauccaaaucaaaaaauaauaaccauuggaucaaucaguauagcaaucggaauaauuagucuaguguugcaaauaggaaauauuauuucaauaugggcuagucacucaauccaaacuggaagucaaaaccacacuggaauaugcaaccaaagaaucaucacauaugaaaacagcaccugggugaaucacacauauguuaauauuaacaacacuaauguuguugcuggaaaagacaaaacuucagugacauuggccggcaauucaucucuuuguucuaucaguggaugggcuauauacacaaaagacaacagcauaagaauuggcuccaaaggagauguuuuugucauaagagaaccuuucauaucauguucucacuuggaaugcagaaccuuuuuucugacccaaggugcucuauuaaaugacaaacauucaaaugggaccguuaaggacagaaguccuuauagggccuuaaugagcuguccucuaggugaagcuccguccccauacaauucaaaguuugaaucaguugcauggucagcaagcgcaugccaugauggcaugggcugguuaacaaucggaauuucugguccagacaauggagcuguggcuguacuaaaauacaacggaauaauaacugaaaccauaaaaaguuggaaaaagcgaauauuaagaacacaagagucugaaugugucugugugaacgggucauguuucaccauaaugaccgauggcccgaguaauggggccgccucguacaaaaucuucaagaucgaaaaggggaagguuacuaaaucaauagaauugaaugcacccaauuuucauuaugaggaauguuccuguuacccagacacuggcacaguaauguguguaugcagggacaacuggcaugguucaaaucgaccuugggugucuuuuaaucaaaacuuggauuaucaaauaggauacaucugcaguggaguguucggugacaauccgcgucccaaagauggagagggcagcuguaauccagugacuguugauggagcagacggaguaaagggguuuucauacaaauaugguaaugguguuuggauaggaaggacuaaaaguaacagacuuagaaagggguuugagaugauuugggauccuaauggauggacagauaccgacagugauuucucagugaaacaggauguuguggcaauaacugauuggucaggguacagcggaaguuucguucaacauccugaguuaacaggauuggacuguauaagaccuugcuucuggguugaguuagucagaggacugccuagagaaaauacaacaaucuggacuagugggagcagcauuucuuuuuguggcguuaauagugauacugcagacuggucuuggccagacggugcugaguugccguucaccauugacaaguag

SEQ ID NO: 58150 - RNA, 1413 nt, Artificial Sequence
  derived and/or modified CDS sequence (wt) from neuraminidase__InfluenzaA__BAF63058
augaauccaaaucaaaaaauaauaaccauuggaucaaucaguauagcaaucggaauaauuagucuaauguugcaaauaggaaauauuauuucaauaugggcuagucacucaauccaaacuggaagucaaaaccacacuggaauaugcaaccaaagaaucaucacauaugaaaacagcaccugggugaaucacacauauguuaauauuaacaacacuaauguuguugcuggaaaggacaaaacuucagugacauuggccggcaauucaucucuuugugcuaucaguggaugggcuauauacacaaaagacaacagcauaagaauuggcuccaaaggagauguuuuugucauaagagaaccuuucauaucauguucucacuuggaaugcagaaccuuuuuucugacccaaggugcucuauuaaaugacaaacauucaaaugggaccguuaaggacagaaguccuuauagggccuuaaugagcuguccucuaggugaagcuccguccccauacaauucaaaguuugaaucaguugcauggucagcaagcgcaugccaugauggcaugggcugguuaacaaucggaauuucugguccagacaauggagcuguggcuguacuaaaauacaacggaauaauaacugaaaccauaaaaaguuggaaaaagcgaauauuaagaacacaagagucugaaugugucugugugaacgggucauguuucaccauaaugaccgauggcccgaguaaugaggccgccucguacaaaaucuucaagaucgaaaaggggaagguuacuaaaucaauagaguugaaugcacccaauuuucauuaugaggaaugcuccuguuacccagacacuggcacagugauguguguaugcagggacaacuggcaugguucaaaucgaccuugggugucuuuuaauccaaacuuggauuaucaaauaggauacaucugcaguggaguguucggugacaauccgcgucccaaagauggagagggcagcuguaauccagugacuguugauggagcagacggaguaaagggguuuucauacaaauaugguaaugguguuuggauaggaaggacuaaaaguaacagacuuagaaagggguuugagaugguuugggauccuaauggauggacagauaccgacagugauuucucagugaaacaggauguuguggcaauaacugauuggucaggguacagcggaaguuucguucaacauccugaguuaacaggauuggacuguauaagaccuugcuucuggguugaguuagucagaggacugccuaaagaaaauacaacaaucuggacuagugggagcagcauuuccuuuuguggcguuaauagugacacugcaaacuggucuuggccagacggugcugaguugccguucaccauugacaaguag

SEQ ID NO: 58151 - RNA, 1413 nt, Artificial Sequence; identical to SEQ ID NO: 53453
  derived and/or modified CDS sequence (wt) from neuraminidase__InfluenzaA__BAF63065

SEQ ID NO: 58152 - RNA, 1413 nt, Artificial Sequence; identical to SEQ ID NO: 53453
  derived and/or modified CDS sequence (wt) from neuraminidase__InfluenzaA__BAF63069

SEQ ID NO: 58153 - RNA, 1413 nt, Artificial Sequence
  derived and/or modified CDS sequence (wt) from neuraminidase__InfluenzaA__BAF63079
augaauccaaaucaaaaaauaauaaccauuggaucaaucaguauagcaaucggaauaauuagucuaauguugcaaauaggaaauauuauuucaauaugggcuagucacucaauccaaacuggaauucaaaaccacacuggaauaugcaaccaaagaaucaucacauaugaaaacagcaccugggugaaucacacauauguuacuauuaacaacacuaauguuguugcuggaaaagacaaaacuucagugacauuggccggcaauucaucucuuuguucuaucaguggaugggcuauauacacaaaagacaacagcauaagaauuggcuccaaaggagauguuuuugucauaagagaaccuuucauaucauguucucacuuggaaugcagaaccuuuuuucugacccaaggugcucuauuaaaugacaaacauucaaaugggaccguuaaggacagaaguccuuauagggccuuaaugagcuguccucuaggugaagcuccguccccauacaauucaaaguuugaaucaguugcauggucagcaagcgcaugccaugauggcaugggcugguuaacaaucggaauuucugguccagacaauggagcuguggcuguacuaaaauacaacggaauaauaacugaaaccauaaaaaguuggaaaaagcgaauauuaagaacacaagagucugaaugugucugugugaaugggucauguuucaccauaaugaccgauggcccgaguaauggggccgccucguacaaaaucuucaagaucgaaaaggggaagguuacuaaaucaauagaguugaaugcacccaauuuucauuaugaggaauguuccuguuacccagacacuggcacagugauguguguaugcagggacaacuggcauggcucaaaucgaccuugggugucuuuuaaucaaaacuuggauuaucaaauaggauacaucugcaguggaguguucggugacaauccgcgucccagagauggagagggcagcuguaauccagugacuguugauggagcagacggaguaaagggguuuucauacaaauaugguaaugguguuuggauaggaaggacuaaaaguaacagacuuagaaagggguuugagaugauuugggauccuaauggauggacagauaccgacagugauuucucagugaaacaggauguuguggcaauaacugauuggucaggguacagcggaaguuucguucagcauccugaguuaacaggauuggacuguauaagaccuugcuucuggguugaguuagucagaggacugccuagagaaaauacaacaaucuggacuagugggagcagcauuucuuuuuguggcguuaauagugauacugcaaacuggucuuggccagacggugcugaguugccguucaccauugacaaguag

SEQ ID NO: 58154 - RNA, 1413 nt, Artificial Sequence; identical to SEQ ID NO: 58153
  derived and/or modified CDS sequence (wt) from neuraminidase__InfluenzaA__BAF63092

SEQ ID NO: 58155 - RNA, 1413 nt, Artificial Sequence; identical to SEQ ID NO: 53453
  derived and/or modified CDS sequence (wt) from neuraminidase__InfluenzaA__BAF63098

SEQ ID NO: 58156 - RNA, 1413 nt, Artificial Sequence
  derived and/or modified CDS sequence (wt) from neuraminidase__InfluenzaA__BAF63104
augaauccaaaucaaaaaauaauaaccauuggaucaaucaguauagcaaucggaauaauuagucuaauguugcaaguaggaauaguuguuucaauaugggcuagucacucaauccaaacuggaagucaaaaccacacuggaauaugcaaccaaagaaucaucacauaugaaaacagcaccugggugaaucacacauauguuaauauuaacaacacuaauguuguugcuggaaaggacaaaacuucaguggcauuggccggcaauucaucucuuuguucuaucaguggaugggcuauauacacaaaagacaacagcauaagaauuggcuccaaaggagauguuuuugucauaagagaaccuuucauaucauguucucacuuggaaugcagaaccuuuuuucugacccaaggugcucuauuaaaugacaaacauucaaauggaaccguuaaggacagaaguccuuauagggccuuaaugagcuguccucuaggugaagcuccguccccauacaauucaaaguuugaaucaguugcauggucagcaagcgcaugccaugauggcaugggcugguuaacaaucggaauuucugguccagacaauggagcuguggcuguacuaaaauacaacggaauaauaacugaaaccauaaaaaguuggaaaaagcgaauauugagaacacaagagucugaaugugucugugugaacgggucauguuucaccauaaugaccgauggcccgaguaauggggccgccucguauaaaaucuucaagaucgaaaaggggcagguuacuaaaucaguagaguuaaaugcacccaauuuucauuaugaggaauguuccuguuacccagacacuggcacagugauguguguaugcagggacaacuggcaugguucaaaucgaccuugggugucuuuuaaucaaaacuuggauuaucaaauaggauacaucugcaguggaguguucggugacaauccgcgucccaaagauggaaagggcagcuguaauccagugacuguugauggagcagacggaguuaagggguuuucauacaaauaugguaaugguguuuggauaggaaggacuaaaaguaacagacuuagaaagggguuugagaugauuugggauccuaauggauggacagauaccgacagugauuucucagugaaacaggauguuguggcaauaacugauuggucaggguacagcggaaguuucguucaacauccugaguuaacaggauuggacuguauaagaccuugcuucuggguugaguuagucagaggacugccuagagaaaauacaacaaucuggacuagugggagcagcauuucuuuuuguggcguugauagugauacugcaaacuggucuuggccagacggugcugaguugccguucaccauugacaaguag

SEQ ID NO: 58157 - RNA, 1413 nt, Artificial Sequence
  derived and/or modified CDS sequence (wt) from neuraminidase__InfluenzaA__BAF63112
augaauccaaaucaaaaaauaauaaccauuggaucaaucaguauagcaaucggaauaauuagucuaauguugcaaguaggaaauauuauuucaauaugggcuagucacucaauccaaacuggaagucaaaaccacacuggaauaugcaaccaaagaaucaucacauaugaaaacagcaccugggugaaucacacauauguuaauauuaacaacacuaauguuguugcuggaaaggacaaaacuucaguggcauuggccggcaauucaucucuuuguucuaucaguggaugggcuauauacacaaaagacaacagcauaagaauuggcuccaaaggagauguuuuugucauaagagaaccuuucauaucauguucucacuuggaaugcagaaccuuuuuucugacccaaggugcucuauuaaaugacaaacauucaaauggaaccguuaaggacagaaguccuuauagggccuuaaugagcuguccucuaggugaagcuccguccccauacaauucaaaguuugaaucaguugcauggucagcaagcgcaugccaugauggcaugggcugguuaacaaucggaauuucugguccagacaauggagcuguggcuguacuaaaauacaacggaauaauaacugaaaccauaaaaaguuggaaaaagcgaauauugagaacacaagagucugaaugugucugugugaacgggucauguuucaccauaaugaccgauggcccgaguaauggggccgccucguauaaaaucuucaagaucgaaaaggggcagguuacuaaaucaguagaguuaaaugcacccaauuuucauuaugaggaauguuccuguuacccagacacuggcacagugauguguguaugcagggacaacuggcaugguucaaaucgaccuugggugucuuuuaaucaaaacuuggauuaucaaauaggauacaucugcaguggaguguucggugacaauccgcgucccaaagauggaaagggcagcuguaauccagugacuguugauggagcagacggaguuaagggguuuucauacaaauaugguaaugguguuuggauaggaaggacuaaaaguaacagacuuagaaagggguuugagaugauuugggauccuaauggauggacagauaccgacagugauuucucagugaaacaggauguuguggcaauaacugauuggucaggguacagcggaaguuucguucaacauccugaguuaacaggauuggacuguauaagaccuugcuucuggguugaguuagucagaggacugccuagagaaaauacaacaaucuggacuagugggagcagcauuucuuuuuguggcguugauagugauacugcaaacuggucuuggccagacggugcugaguugccguucaccauugacaaguag

SEQ ID NO: 58158 - RNA, 1413 nt, Artificial Sequence
  derived and/or modified CDS sequence (wt) from neuraminidase__InfluenzaA__BAF63116
augaauccaaaucaaaaaauaauaaccauuggaucaaucaguauagcaaucggaauaauuagucuaauguugcaaguaggaaauauuauuucaauaugggcuagucacucaauccaaacuggaagucaaaaccacacuggaauaugcaaccaaagaaucaucacauaugaaaacagcaccugggugaaucacacauauguuaauauuaacaacacuaauguuguugcuggaaaggacaaaacuucaguggcauuggccggcaauucaucucuuuguucuaucagugggugggcuauauacacaaaagacaacagcauaagaauuggcuccaaaggagauguuuuugucauaagagaaccuuucauaucauguucucacuuggaaugcagaaccuuuuuucugacccaaggugcucuauuaaaugacaaacauucaaauggaaccguuaaggacagaaguccuuauagggccuuaaugagcuguccucuaggugaagcuccguccccauacaauucaaaguuugaaucaguugcauggucagcaagcgcaugccaugauggccugggcugguuaacaaucggaauuucugguccagacaauggagcuguggcuguacuaaaauacaacggaauaauaacugaaaccauaaaaaguuggaaaaagcgaauauugagaacacaagagucugaaugugucugugugaacgggucaugcuucaccauaaugaccgauggcccgaguaauggggccgccucguauaaaaucuucaagaucgaaaaggggcagguuacuaaaucaguagaguuaaaugcacccaauuuucauuaugaggaauguuccuguuacccagacacuggcacagugauguguguaugcagggacaacuggcaugguucaaaucgaccuugggugucuuuuaauccagacuuggauuaucaaauaggauacaucugcaguggaguguucggugacaauccgcgucccaaagauggaaagggcagcuguaauccagugacuguugauggagcagacggaguuaagggguuuucauacaaauaugguaaugguguuuggauaggaaggacuaaaaguaacagacuuagaaagggguuugagaugauuugggauccuaauggauggacagauaccgacagugauuucucagugaaacaggauguuguggcaauaacugauuggucaggguacagcggaaguuucguucaacauccugaguuaacaggauuggacuguauaagaccuugcuucuggguugaguuagucagaggacugccuagagaaaauacaacaaucuggacuagugggagcagcauuucuuuuuguggcguugauagugauacugcaaacuggucuuggccagacggugcugaguugccguucaccauugacaaguag

SEQ ID NO: 58159 - RNA, 1413 nt, Artificial Sequence
  derived and/or modified CDS sequence (wt) from neuraminidase__InfluenzaA__BAF63124
augaauccaaaucaaaaaauaauaaccauuggaucaaucaguauagcaaucggaauaauuagucuaauguugcaaauaggaaauauuauuucaauaugggcuagucacucaauccaaacuggaagucaaaaccacacuggaauaugcaaccaaagaaucaucacauaugaaaacagcaccugggugaaucacacauauguuaauauuaacaacacuaauguuguugcuggaaaggacaaaacuucagugacauuggccggcaauucaucucuuuguucuaucaguggaugggcuauauacacaaaagacaacagcauaagaauuggcuccaaaggagauguuuuugucauaagagaaccuuucauaucauguucucacuuggaaugcagaaccuuuuuucugacccaaggugcucuauuaaaugacaaacauucaaauggaaccguuaaggacagaaguccuuauagggccuuaaugagcuguccucuaggugaagcuccguccccauacaauucaaaguuugaaucaguugcauggucagcaagugcaugccaugauggcaugggcugguuaacaaucggaauuucugguccagacaauggagcuguggcuguacuaaaauacaacggaauaauaacugaaaccauaaaaaguuggaaaaagcgaauauugagaacacaagagucugaaugugucugugugaacgggucauguuucaccauaaugaccgauggcccgaguaauggggccgccucguacaaaaucuucaagaucgaaaagggaaagguuacuaaaucaagagaguuaaaugcacccaauuuucauuaugaggaauguuccuguuacccagacacuggcacagugauguguguaugcagggacaacuggcaugguucaaaucgaccuugggugucuuuuaauccaaacuuggauuaucaaauaggauacaucugcaguggaguggucggugacaauccgcgucccaaagauggaaagggcagcuguaauccagugacugcugauggagcagacggaguuaagggguuuucauacaaauaugguaaugguguuuggauaggaaggacuaaaaguaacagacuuagaaaggguuuugagaugauuugggauccuaauggauggacagauaccgacagugauuucucagugaaacaggauguuguggcaauaacugauuggucaggguacagcggaaguuucguucaacauccugaguuaacaggauuggacuguauaagaccuugcuucuggguugaguuagucagaggacugccuagagaaaauacaacaaucuggacuagugggagcagcauuucuuuuuguggcguugauagugauacugcaaacuggucuuggccagacggugcugaguugccguucaccauugacaaguag

SEQ ID NO: 58160 - RNA, 1413 nt, Artificial Sequence
  derived and/or modified CDS sequence (wt) from neuraminidase__InfluenzaA__BAF63132
augaauccaaaucaaaaaauaauaaccauuggaucaaucaguauagcaaucggaauaauuagucuaauguugcaaauaggaaauauuauuucaauaugggcuagucacucaauccaaacuggaagucaaaaccacacuggaauaugcaaccaaagaaucaucacauaugaaaacagcaccugggugaaucacacauauguuaauauuaacaacacuaauguuguugcuggaaaggacaaaacuucagugacauuggccggcaauucaucucuuuguucuaucaguggaugggcuauauacacaaaagacaacagcauaagaauuggcuccaaaggagauguuuuugucauaagagaaccuuucauaucauguucucacuuggaaugcagaaccuuuuuucugacccaaggugcucuauuaaaugacaaacauucaaauggaaccguuaaggacagaaguccuuauagggccuuaaugagcuguccucuaggugaagcuccguccccauacaauucaaaguuugaaucaguugcauggucagcaagugcaugccaugauggcaugggcugguuaacaaucggaauuucugguccagacaauggagcuguggcuguacuaaaauacaacggaauaauaacugaaaccauaaaaaguuggaaaaagcgaauauugagaacacaagagucugaaugugucugugugaacgggucauguuucaccauaaugaccgauggcccgaguaauggggccgccucguacaaaaucuucaagaucgaaaagggaaagguuacuaaaucaagagaguuaaaugcacccaauuuucauuaugaggaauguuccuguuacccagacacuggcacagugauguguguaugcagggacaacuggcaugguucaaaucgaccuugggugucuuuuaaucaaaacuuggauuaucaaauaggauacaucugcaguggaguguucggugacaauccgcgucccaaagauggaaagggcagcuguaauccagugacugcugauggagcagacggaguuaagggguuuucauacaaauaugguaaugguguuuggauaggaaggacuaaaaguaacagacuuagaaaggguuuugagaugauuugggauccuaauggauggacagauaccgacagugauuucucagugaaacaggauguuguggcaauaacugauuggucaggguacagcggaaguuucguucaacauccugaguuaacaggauuggacuguauaagaccuugcuucuggguugaguuagucagaggacugccuagagaaaauacaacaaucuggacuagugggagcagcauuucuuuuuguggcguugauagugauacugcaaacuggucuuggccagacggugcugaauugccguucaccauugacaaguag

SEQ ID NO: 58161 - RNA, 1413 nt, Artificial Sequence
  derived and/or modified CDS sequence (wt) from neuraminidase__InfluenzaA__BAF63136
augaauccaaaucaaaaaauaauaaccauuggaucaaucaguauagcaaucggaauaauuagucuaauguugcaaauaggaaauauuauuucaauaugggcuagucacucaauccaaacuggaagucaaaaccacacuggaauaugcaaccaaagaaucaucacauaugaaaacagcaccugggugaaucacacauauguuaauauuaacaacacuaauguuguugcuggaaaggacaaaacuucagugacauuggccggcaacucaucucuuuguucuaucaguggaugggcuauauacacaaaagacaacagcauacgaauuggcuccaaaggagauguuuuugucauaagagaaccuuucauaucauguucucacuuagaaugcaaaaccuuuuuucugacccaaggcgcucuauuaaaugacaaacauucaaaugggaccguaaaggacagaaguccuuauagggccuuaaugagcuguccucuaggugaagcuccguccccauacaauucaaaguucgaaucaguugcauggucagcaagcgcaugccaugauggcaugggcugguuaacaaucggaauuucugguccagacaauggagcuguggcuguacuaaaauacaacggaauaauaacuggaaccauaaaaaguuggaaaaagcaaauauuaagaacacaagagucugaaugugucuguaugaacgggucauguuucaccauaaugaccgaugguccgaguaauggggccgccucguacaaaauuuucaagaucgaaaaggggaagguuacuaaaucaauagaguugaaugcacccaauuuucauuaugaggaauguuccuguuacccagacacuggcacagugaugugcguaugcagggacaacuggcaugguucaaaucgaccuugggugucuuuuaaucaaaacuuggauuaucaaauaggauacaucugcaguggaguguucggggacaauccgcgucccaaagauggagagggcagcugcaauccagugacuguugauggagcaaacggaguaaaaggguuuucauacaaauaugguaaugguguuuggauaggaaggaccaaaaguaacagacuuagaaagggguuugagaugauuugggauccuaauggauggacaaauaccgacagugauuucucagugaaacaggauguuguagcaauaacugauuggucaggguacagcggaaguuucguccaacauccugaguuaacaggauuggacuguauaagaccuugcuucuggguugaguuagucagagggcugccuagagaaaauacaacaaucuggacuagugggagcagcauuuccuuuuguggcguuaauagugauacugcaaacuggucuuggccagacggugcugaguugccguucaccauugacaaguag

SEQ ID NO: 58162 - RNA, 1350 nt, Artificial Sequence
  derived and/or modified CDS sequence (wt) from neuraminidase__InfluenzaA__BAH24021
augaauccaaaucagaagauaauaaccauugggucaaucuguaugguaauuggaauaguuagcuuaauguuacaaauugggaacauggucucauuaugggucagucauucaauucagacagggaaucaacaccaaguugaaccaaucagcaauacuaauuuucuuacugagaaagcuguggcuucaguaacauuagcgggcaauucaucucuuugccccauuagaggaugggcuguacacaguaaggacaacaguauaaggauugguuccaaaggggauguguuuguuauuagagagccauucaucucaugcucccacuuggaaugcagaacuuucuuuuugacucagggagccuugcugaaugacaagcacuccaacgggacugucaaagacagaagcccucacagaacauuaaugaguuguccugugggugaggcucccuccccauauaacucaagguuugaaucuguugcuuggucagcaagugcuugccaugauggcaccaguugguugacaauuggaauuucuggcccagacaauggggcuguggcuguauugaaauacaauggaaugauaacagacaccaucaagaguuggaggaacaacauacugagaacucaagagucugaaugugcauguguaaauggcucuugcuuuacuguaaugacugauggaccaaguaaugggcaggcaucauauaagaucuucaaaauggaaaaaggaaaagugguuaaaucagucgaauuggaugcuccuaauuaccacuaugaggaaugcuccuguuauccugaugccggcgaaaucacaugugugugcagggauaauuggcauggcucaaaucggccauggguaucuuucaaucaaaauuuggaguaucaaauaggauauauaugcagcggaguuuucggggacaauccacgccccaaugguggaacagguaguugugguccgguguccccuaauggggcauaugggguaaaaggguuuucauuuaaauacggcaaugguguuuggaucgggagaaccaaaagcccuaguuccaggagcggcuuugaaaugauuugggauccaaauggguggacugaaacggacaguagcuucucggugaaacaagauauaguagcaauaacugauuggucaggauauagcgggaguuuuguccagcauccagaacugacaggauuagauugcauaagaccuuguuucuggguugaguuaaucagagggcggcccaaagagagcacaauuuggacuagugggagcagcauauccuuuugugguguaaauagugacacugugaguuggucuuggccagacggugcugaguugccauucaccauugacaaguaa

SEQ ID NO: 58163 - RNA, 1410 nt, Artificial Sequence; identical to SEQ ID NO: 48905
  derived and/or modified CDS sequence (wt) from neuraminidase__InfluenzaA__BAH95825

SEQ ID NO: 58164 - RNA, 1410 nt, Artificial Sequence; identical to SEQ ID NO: 48813
  derived and/or modified CDS sequence (wt) from neuraminidase__InfluenzaA__BAH95826

SEQ ID NO: 58165 - RNA, 1410 nt, Artificial Sequence
  derived and/or modified CDS sequence (wt) from neuraminidase__InfluenzaA__BAJ07994
augaauccaaaucagaagauaacaaccauuggaucaaucuguaugguaauuggaauaguuagcuugauguuacaaauugggaacauaaucucaauauggguuagucauucaauucaaacagggaaucaacaccaggcugaaccaugcaaucaaagcauuauuacuuaugaaaacaacaccuggguaaaccagacauaugucaacaucagcaauaccaauuuucuuacugagaaagcuguggcuucaguaacauuagcgggcaauucaucucuuugccccauuaguggaugggcuguauacaguaaggacaacgguauaagaaucgguuccaagggggauguguuuguuauaagagagccguucaucucaugcucccacuuggaaugcagaauuuucuuuuugacucagggagccuugcugaaugacaagcauucuaaugggaccgucaaagacagaagcccucacagaacauuaaugaguugucccgugggugaggcuccuuccccauacaacucgagguuugagucuguugcuuggucggcaagugcuugucaugauggcacuaguugguugacaauuggaauuucuggcccagacaauggggcuguggcuguauugaaauacaauggcauaauaacagacacuaucaagaguuggaggaacaacauaaugagaacucaagagucugaaugugcauguguaaauggcucuugcuuuacuguuaugacugauggaccaaguaaugggcaggcuucauacaaaaucuucagaauagaaaaagggaaaguaguuaaaucagccgaauuaaaugccccuaauuaucacuaugaggagugcuccuguuauccugaugcuggagaaaucacaugugugugcagggauaacuggcauggcucaaaucggccauggguaucuuucaaucaaaauuuggaguaucgaauaggauauauaugcaguggaguuuucggagacaauccacgccccaaugaugggacaggcaguugugguccgguguccccuaaaggggcauauggaauaaaaggguucucauuuaaauacggcaaugguguuuggaucgggagaaccaaaagcacuaauuccaggagcggcuuugaaaugauuugggauccaaauggauggacugguacggacaguaauuuuucaguaaagcaagauauuguagcuauaaccgauuggucaggauauagcgggaguuuuguccagcauccagaacugacaggauuagauugcauaagaccuuguuucugggucgagcuaaucagagggcggcccaaagagagcacaauuuggacuagugggagcagcauauccuuuugugguguaaauagugacacuguggguuggucuuggccagacggugcugaguugccauucaccauugacaaguag

SEQ ID NO: 58166 - RNA, 1350 nt, Artificial Sequence
  derived and/or modified CDS sequence (wt) from neuraminidase__InfluenzaA__BAK23415
augaauccaaaucagaagauaauaaccaucggaucagucuguaugauaauuggaauaguuagcuuaauguuacaaauugggaacaugaucucaauaugggucggucauucaauucagacagguaaucaaugccaugcugaaccaaucagcaauacuaaauuuccuacugagaaagcugcugcuucagugacauuagcgggcaauucaucucuuugucccauuagcggaugggcuguauacaguaaggacaacaguauaaggaucgguuccaggggggauguguuuguuauaagagagccguucaucucaugcucccacuuggaaugcagaacuuucuuuuugacucagggagccuugcugaaugacaagcacuccaaugggacugucaaggacagaagcccucacagaacauuaaugaguuguccugugggugaggcucccuccccauauaacucaagguuugagucuguugcuuggucagcaagugcuugccaugauggcaccaguugguugacaauuggaauuucugguccagacaauggggcuguggcuguauugaaguacaauggcauaauaacagacaccaucaagaguuggaggaacaacauacugagaacucaagagucugaaugugcauguauaaauggcucuugcuuuacuguaaugacugauggaccaaguagugggcaggcaucauauaaaaucuucaaaauggaaaaggggaaggugguuaaaucagucgaauuggaugccccuaauuaucacuaugaggagugcuccuguuauccugaugccggcgaaaucacaugugugugcagagauaauuggcauggaucaaauaggccauggguaucuuucaaucaaaauuuggaguaucaaauaggauauauaugcaguggaguuuucggagacaauccacgcccaaaugauggaacagguaguugugguccgguguccccuaacggggccuaugggguaaaaggguuuucauuuaaauacggcaaugguguuuggaucgggagaaccaaaagcacuaauuccaggagcggcuuugaaaugauuugggacccaaauggguggacuggaacggacaguaguuuuucgguaaagcaagauaucguagcaauaacugauuggucuggauauagugggaguuuuguccagcauccagaacugacaggauuagauugcauaagaccuuguuucuggguugaguuaaucagagggcggccuaaagagagcacaauuuggaccaguggaagcagcauaucuuuuugugguguaaauagugacacuguuaguuggucuuggccagacggugcugaguugccauucaccauugacaaguag

SEQ ID NO: 58167 - RNA, 1350 nt, Artificial Sequence
  derived and/or modified CDS sequence (wt) from neuraminidase__InfluenzaA__BAK23416
augaauccaaaucagaagauaauaaccaucggaucaaucuguaugguaauuggaauaguuagcuuaauguuacaaauugggaacaugaucucaauaugggucagucauucaauucagacagggaaucaaugccaagcugaaccaaucagcaauacuaaauuucuuacugagaaagcuguggcuucaguaacauuagcgggcaauucaucucuuugucccauuagcggaugggcuguauacaguaaggacaacaguauaaggaucgguuccaggggggauguguuuguuauaagagagccguucaucucaugcucccacuuggaaugcagaacuuucuuuuugacucagggagccuugcugaaugacaagcacuccaaugggacugucaaagacagaagcccucacagaacauuaaugaguuguccugugggugaggcucccuccccauauaacucaagguuugagucuguugcuuggucagcaagugcuugccaugauggcaccaguugguugacaauuggaauuucugguccagacaauggggcuguggcuguauugaaauacaauggcauaauaacagacaccaucaagaguuggaggaacaacauacugagaacucaagagucugaaugugcauguguaaauggcucuugcuuuacuguaaugacugauggaccaaguagugggcaggcaucauauaagaucuucaaaauggaaaaggggaaaguaguuaaaucagucgaauuggaugcuccuaauuaucacuaugaggagugcuccuguuauccugaugccggcgaaaucacaugugugugcagggauaauuggcauggcucaaauaggccauggguaucuuucaaucaaaauuuggaguaucaaauaggauauauaugcaguggaguuuucggagacaauccacgccccaaugauggaacagguaguugugguccggcguccccuaacggggcauaugggguaaaaggguuuucauuuaaauacggcaaugguguuuggaucgggagaaccaaaagcacuaauuccaggagcggcuuugaaaugauuugggacccaaauggguggacuggaacggacaguagcuuuucggugaagcaagauaucguagcaauaacugauuggucaggauauagcgggaguuuuguccagcauccagaacugacaggauuagauugcauaagaccuuguuucuggguugaguuaaucagagggcggccuaaagagagcacaauuuggaccaguggaagcagcauaucuuuuugugguguaaauagugacacuguuaguuggucuuggccagacggugcugaguugccauucaccauugacaaguag

SEQ ID NO: 58168 - RNA, 1350 nt, Artificial Sequence
  derived and/or modified CDS sequence (wt) from neuraminidase__InfluenzaA__BAK23417
augaauccaaaucagaagauaauaaccaucggaucaaucuguaugguaauuggaauaguuagcuuaauguuacagauugggaacaugaucucaauaugggucagucauucaauucagacagggaaucaaugccaaucugaaccgaucagcaauacuaaauuucuuacugagaaagcuguggcuucaguaacauuagcgggcaauucaucucuuugucccauuagcggaugggcuguauacaguaaggacaacaguauaaggaucgguuccaggggggauguguuuguuauaagagagccguucaucucaugcucccacuuggaaugcagaacuuucuuuuugacucagggagccuugcugaaugacaagcacuccaaugggacugucaaagacagaagcccucacagaacauuaaugaguuguccugugggugaggcucccuccccauauaacucaagguuugagucuguugcuuggucagcuagugcuugccaugauggcaucaguugguugacaauuggaauuucugguccagacaauggggcuguggcuguauugaaauacaauggcauaauaacagacaccaucaagaguuggaggaacaacauacuaagaacucaagaaucugaaugugcauguguaaauggcucuugcuuuacuguaaugacugauggaccaaguagugggcaggcaucauauaagaucuucaaaauggaaaaagggaaagugguuaaaucagucgaauuggaugcuccuaauuaucacuaugaggagugcuccuguuauccugaugccggcgaaaucacauguguguguagggauaauuggcauggcucaaauaggccauggguaucuuucaaucaaaaucuggaguaucaaauaggauauauaugcaguggaguuuucggagacaauccacgccccaaugauggaacagguaguugugguccgguguccccuaacggggcauaugggguaaaaggguuuucauuuaaauacggcaaugguguuuggaucgggagaaccaaaagcacuaauuccaggagcggcuuugaaaugauuugggacccaaauggguggacuggaacggacaguagcuuuucggugaagcaagauaucguagcaauaacugauuggucaggauauagugggaguuuuguccagcauccagaacugacaggauuagauugcauaagaccuuguuucuggguugaguuaaucagagggcggccuaaagagagcacaauuuggaccaguggaagcagcauauccuuuugugguguaaacggugacacuguuaguuggucuuggccagacggugcugaguugccauucaccauugacaaguag

SEQ ID NO: 58169 - RNA, 1350 nt, Artificial Sequence
  derived and/or modified CDS sequence (wt) from neuraminidase__InfluenzaA__BAK23418
augaauccaaaucagacgauaauaaccaucggaucaaucuguaugguaauuggaauaguuagcuuaauguuacaaauugggaacaugaucucaauaugggucagucauucaauucagacagggaaucaaugccaagcugaaccaaucagcaauacuaaauuucuuacugagaaagcuguggcuucaguaacauuagcgggcaauucaucucuuugucccauuagcggaugggcuguauacaguaaagacaacaguauaaggaucgguuccaggggggauguguuuguuauaagagagccguucaucucaugcucccacuuggaaugcagaacuuucuuuuugacucagggagccuugcugaaugacaagcacuccaaugggacugucaaagacagaagcccucacagaacauuaaugaguuguccugugggugaggcucccuccccauauaacucaagguuugagucuguugcuuggucagcaagugcuugccaugauggcaccaguugguugacaauuggaauuucugguccagacaauggggcuguggcuguauugaaauacaauggcauaauaacagacaccaucaagaguuggaggaacaacauacugagaacucaagagucugaaugugcauguguaaauggcucuugcuucacuguaaugacugauggaccaaguagugggcaggcaucauauaagaucuucaaaauggaaaaggggaaagugguuaaaucagucgaauuggaugcuccuaauuaucacuaugaggagugcuccuguuauccugaugccggcgaaaucacaugugugugcagggauaauuggcauggcucaaauaggccauggguaucuuucaaucaaaauuuggaguaucaaauaggauauauaugcaguggaguuuucggagacaauccacgccccaaugauggaacagguaguugcgguccgguuuccccuaacggggcauaugggguaaaaggguuuucauuuaaauauggcaaugguguuuggaucgggagaaccaaaagcacuaauuccaggagcggcuuugaaaugauuugggacccaaauggguggacuggaacggacaguagcuuuucggugaagcaagauaucguagcaauaacugauuggucaggauauagcgggaguuuuguccagcauccagaacugacaggauuagauugcauaagaccuuguuucuggguugaguuaaucagagggcggccuaaagagagcacaauuuggacuaguggaagcagcauaucuuuuugugguguaaauagugacacuguuaguuggucuuggccagacggugcugaguugccauucaccauugacaaguag

SEQ ID NO: 58170 - RNA, 1350 nt, Artificial Sequence
  derived and/or modified CDS sequence (wt) from neuraminidase__InfluenzaA__BAK23420
augaauccaaaucagaagauaauaaccaucggaucaaucuguaugguaauuggaauaguuagcuuaauguuacaaauugggaacaugaucucaauaugggucagucauucaauucagacagggaaucaaugccaagcugaaccaaucagcaauacuaaauuucuuacugagaaagcuguggcuucaguaacauuagcgggcaauucaucucuuugucccauuagcggaugggcuguauacaguaaggacaacaguauaaggaucgguuccaggggggauguguuuguuauaagagagccguucaucucaugcucccacuuggaaugcagaacuuucuuuuugacucagggagccuugcugaaugacaagcacuccaaugggacugucaaagacagaagcccucacagaacauuaaugaguuguccugugggugaggcucccuccccauauaacucaagguuugagucuguugcuuggucagcaagugcuugccaugauggcaccaguugguugacaauuggaauuucugguccagacaauggggcuguggcuguauugaaauacaauggcauaauaacagacaccaucaagaguuggaggaacaacauacugagaacucaagagucugaaugugcauguguaaauggcucuugcuuuacuguaaugacugauggaccaaguagugggcaggcaucauauaagaucuucaaaauggaaaaggggaaagugguuaaaucagucgaauuggaugcuccuaauuaucacuaugaggagugcuccuguuauccugaugccggcgaaaucacaugugugugcagggauaauuggcauggcucaaauaggccauggguaucuuucaaucaaaauuuggaguaucaaauaggauauauaugcaguggaguuuucggagacaauccacgccccaaugauggaacagguaguugugguccgguguccccuaacggggcauaugggguaaaaggguuuucauuuaaauacggcaaugguguuuggaucgggagaaccaaaagcacuaauuccaggagcggcuuugaaaugauuugggacccaaauggguggacuggaacggacaguagcuuuucggugaagcaagauaucguagcaauaacugauuggucaggauauagcgggaguuuuguccagcauccagaacugacaggauuagauugcauaagaccuuguuucuggguugaguuaaucagagggcggccuaaagagagcacaauuuggaccaguggaagcagcauaucuuuuugugguguaaauagugacacuguuaguuggucuuggccagacggugcugaguugccauucaccauugacaaguag

SEQ ID NO: 58171 - RNA, 1350 nt, Artificial Sequence; identical to SEQ ID NO: 58170
  derived and/or modified CDS sequence (wt) from neuraminidase__InfluenzaA__BAK23421

SEQ ID NO: 58172 - RNA, 1350 nt, Artificial Sequence
  derived and/or modified CDS sequence (wt) from neuraminidase__InfluenzaA__BAK23422
augaauccaaaucagaagauaauaaccaucggaucagucuguaugguaauuggaauaguuagcuuaauguuacaaauugggaacaugaucucaauaugggucggucauucaauucagacagggaaucaaugccaugcugaaccaaucagcaauacuaaauuuccuacugagaaagcugcugcuucagugacauuagcgggcaauucaucucuuugucccauuagcggaugggcuguauacaguaaggacaacaguauaaggaucgguuccaggggggauguguuuguuauaagagagccguucaucucaugcucccacuuggaaugcagaacuuucuuuuugacucagggagccuugcugaaugacaagcacuccaaugggacugucaaagacagaagcccucacagaacguuaaugaguuguccugugggugaggcucccuccccauauaacucaagguuugagucuguugcuuggucagcaagugcuugccaugauggcaccaguugguugacaauuggaauuucugguccagacaauggggcuguggcuguauugaaguacaauggcauaauaacagacaccaucaagaguuggaggaacaacauacugagaacucaagagucugaaugugcauguguaaauggcucuugcuuuacuguaaugacugauggaccaaguagugggcaggcaucauauaagaucuucaaaauggaaaaggggaaagugguuaaaucagucgaauuggaugcuccuaauuaucacuaugaggagugcuccuguuauccugaugccggcgaaaucacaugugugugcagggauaauuggcauggcucaaauaggccauggguaucuuucaaucaaaauuuggaguaucaaauaggauauauaugcaguggaguuuucggagacaauccacgccccaaugauggaacagguaguugugguccgguguccccuaacggggcauaugggguaaaaggguuuucauuuaaauacggcaaugguguuuggaucgggagaaccaaaagcacuaauuccaggagcggcuuugaaaugauuugggacccaaauggguggacuggaacggacaguagcuuuucggugaagcaagauaucguagcaauaacugauuggucaggauauagcgggaguuuuguccagcauccagaacugacaggauuagauugcauaagaccuuguuucuggguugaguuaaucagagggcggccuaaagagagcacaauuuggaccaguggaagcagcauaucuuuuugugguguaaauagugacacuguuaguuggucuuggccagacggugcugaguugccauucaccauugacaaguag

SEQ ID NO: 58173 - RNA, 1350 nt, Artificial Sequence
  derived and/or modified CDS sequence (wt) from neuraminidase__InfluenzaA__BAK23423
augaauccaaaucagaagauaauaaccaucggaucaaucuguaugguaauuggaauaguuagcuuaauguuacagauugggaacaugaucucaauaugggucagucauucaauucagacagggaaucaaugccaagcugaaccgaucagcacuacuaaauuucuuacugagaaagcuguggcuucaguaacauuagcgggcaauucaucucuuugucccauuagcggaugggcuguauacaguaaggacaacaguauaaggaucggucccaggggggauguguuuguuauaagagagccguucaucucaugcucccacuuggaaugcagaacuuucuuuuugacucagggagccuugcugaaugacaagcacuccaaugggacugucaaagacagaagcccucacagaacauuaaugaguuguccugugggugaggcucccuccccauauaacucaagguuugagucuguugcuuggucagcuagugcuugccaugauggcaucaguugguugacaauuggaauuucugguccagacaauggggcuguggcuguauugaaauacaauggcauaauaacagacaccaucaagaguuggaggaacaacauacuaagaacucaagaaucugaaugugcauguguaaauggcucuugcuuuacuguaaugacugauggaccaaguagugggcaggcaucauauaagaucuucaaaauggaaaaagggaaagugguuaaaucagucgaauuggaugcuccuaauuaucacuaugaggagugcuccuguuauccugaugccggcgaaaucacauguguguguagggauaauuggcauggcucaaauaggccauggguaucuuucaaucaaaaucuggaguaucaaauaggauauauaugcaguggaguuuucggagacaauccacgccccaaugauggaacagguaguugugguccgguguccccuaacggggcauaugggguaaaaggguuuucauuuaaauacggaaaugguguuuggaucgggagaaccaaaagcacuaauuccaggagcggcuuugaaaugauuugggacccaaauggguggacuggaacggacaguagcuuuucggugaagcaagauaucguagcaauaacugauuggucaggauauagugggaguuuuguccagcauccagaacugacaggauuagauugcauaagaccuuguuucuggguugaguuaaucagagggcggccuaaagagagcacaauuuggaccaguggaagcagcauauccuuuugugguguaaauagugacacuguuaguuggucuuggccagacggugcugaguugccauucaccauugacaaguag

SEQ ID NO: 58174 - RNA, 1350 nt, Artificial Sequence
  derived and/or modified CDS sequence (wt) from neuraminidase__InfluenzaA__BAK23424
augaauccaaaucagaagauaauaaccaucggaucaaucuguaugguaauuggaauaguuagcuuaauguuacaaauugggaacaugaucucaauaugggucagccauucaauucagacaggaaaucaaugccaaggugaaccaaucagcaacacuaaauuucuuacugagaaagcuguggcuucaguaacauuagcgggcaauucaucucuuuguccuauuagcggaugggcuguauacaguaaggacaacaguauaaggaucggcuccaggggagauguguuuguuauaagagagccguucaucucaugcucccacuuggaaugcagaacuuucuuuuugacucagggagccuuacugaaugacaagcacuccaaugggacugucaaagacagaagcccucacagaacauuaaugaguuguccugugggugaggcucccuccccauauaacucaagguuugagucuguugcuuggucagcaagugcuugccaugauggcaccaguugguugacaauuggaaucucugguccagacaauggagcuguggcuguauugaaauacaauggcauaauaacagacaccaucaagaguuggaggaacaacauacugagaacucaagagucugaaugugcauguguaaauggcucuugcuuuacuguaaugacugauggaccaaguagugggcaggcaucauauaagaucuucaaaauggaaaaggggaaagugguuaaaucagucgaauuggaugcuccuaauuaucacuaugaggaaugcuccuguuauccugaugccggcgaaaucacaugugugugcagggauaauuggcaugguucaaauaggccauggguaucuuucaaucaaaauuuggaguaucaaauaggauauauaugcaguggaguuuucggagacaauccacgccccaaugauggaacagguaguugugguccaguguucucuaauggggcauaugggguaaaaggguuuucguuuaaauacggcaaugguguuuggaucgggagaaccaaaagcacuaauucuaggagcggcuuugaaaugauuugggaccccaauggguggacuggaacggacaguagcuuuucggggaagcaagauaucguagcaauaacugauuggucaggauauagcgggaguuuuguccagcauccagaacugacaggauuagauugcauaagaccuuguuucuggguugaguuaaucagagggcggccuaaagagagcacaauuuggaccaguggaagcagcauaucuuuuugugguguaaauagugacacuguuaguuggucuuggccagacggugcugaguugccauucaccauugacaaguag

SEQ ID NO: 58175 - RNA, 1350 nt, Artificial Sequence
  derived and/or modified CDS sequence (wt) from neuraminidase__InfluenzaA__BAK23425
augaauccaaaucagaagauaauaaccaucggaucaaucuguaugguaauuggaauaguuagcuuaauguuacagauugggaacaugaucucaauaugggucagucauucaauucagacagggaaucaaugccaagcugaaccgaucagcaauacuaaauuucuuacugagaaagcuguggcuucaguaacauuagcgggcaauucaucucuuugucccauuagcggaugggcgguauacaguaaggacaacaguauaaggaucgguuccaggggggauguguuuguuauaagagagccguucaucucaugcucccacuuggaaugcagaacuuucuuuuugacucagggagccuugcugaaugacaagcacuccaaugggacugucaaagacagaagcccucacagaacauuaaugaguuguccugugggugaggcucccuccccauauaacucaagguuugagucuguugcuuggucagcuagugccugccaugauggcaucaguugguugacaauuggaauuucugguccagacaauggggcuguggcuguauugaaauacaauggcauaauaacagacaccaucaagaguuggaggaacaacauauuaagaacucaagaaucugaaugugcauguguaaauggcucuugcuuuacuguaaugacugauggaccaaguagugggcaggcaucauauaagaucuucaaaauggaaaaagggaaagugguuaaaucagucgaauuggaugcuccuaauuaucacuaugaggagugcuccuguuauccugaugccggcgaaaucacauguguguguagggauaauuggcauggcucaaauaggccauggguaucuuucaaucaaaaucuggaguaucaaauaggauauauaugcaguggaguuuucggagacaauccacgccccaaugauggaacagguaguugugguccgguguccccuaacggggcauaugggguaaaaggguuuucauuuaaauacggcaaugguguuuggaucgggagaaccaaaagcacuaauuccaggagcggcuuugaaaugauuugggacccaaauggguggauuggaacggacaguagcuuuucggugaagcaagauaucguagcaauaacugauuggucgggauauagugggaguuuuguccagcauccagaacugacaggauuagauugcauaaggccuuguuucuggguugaguuaaucagagggcggccuaaagagagcacaauuuggaccaguggaagcagcauauccuuuugugguguaaauagugacacuguuaguuggucuuggccagacggugcugaguugccauucaccauugacaaguag

SEQ ID NO: 58176 - RNA, 1350 nt, Artificial Sequence
  derived and/or modified CDS sequence (wt) from neuraminidase__InfluenzaA__BAK23426
augaauccaaaucagaagauaauaaccaucggaucaaucuguaugguaauuggaauaguuagcuuaauguuacaaauugggaacaugaucucaauaugggucagucauucaauucagacagggaaucaaugccaagcugaaccaaucagcaauacuaaauuuuuuacugagaaagcuguggcuucaguaacauuagcgggcaauucaucucuuugccccauuagcggaugggcuguauacaguaaggacaacaguauaaggaucgguuccaggggggauguguuuauuauaagagagccguucaucucaugcucccacuuggaaugcagaacuuucuuuuugacucagggagccuugcugaaugacaagcacuccaaugggacugucaaagacagaagcccucacagaacauuaaugaguuguccugugggugaggcucccuccccguauaacucaagguuugagucuguugcuuggucagcaagugcuugccaugauggcaccaguugguugacaauuggaauuucugguccagacaauggggcuguggcuguauugaaauacaauggcauaauaacagacaccaucaagaguuggaggaacaacauacugagaacucaagagucugaaugugcauguguaaauggcucuugcuuuacuguaaugacugauggaccaaguagugggcaggcaucauauaagaucuucaaaauggaaaaggggaaagugguuaaaucagucgaauuggaugcuccuaauuaucacuaugaggagugcuccuguuauccugaugccggcgaaaucacaugugugugcagggauaauuggcauggcucaaauaggccauggguaucuuucaaucaaaauuuggaguaucaaauaggauauauaugcaguggaguuuucggagacaauccacgccccaaugauggaacagguaguugugguccgguguccccuaacggggcauaugggguaaaaggguuuucauuuaaauacggcaaugguguuuggaucgggagaaccaaaagcacuaauuccaggagcggcuuugaaaugauuugggacccaaauggguggacuggaacggacaguagcuuuucggugaagcaagauaucguagcaauaacugauuggucaggauauagcgggaguuuuguccagcauccagaacugacaggauuagauugcauaagaccuuguuucuggguugaguuaaucagagggcggccuaaagagagcacaauuuggaccaguggaagcagcauaucuuuuugugguguaaauagugacacuguuaguuggucuuggccagacggugcugaguugccauucaccauugacaaguag

SEQ ID NO: 58177 - RNA, 1350 nt, Artificial Sequence; identical to SEQ ID NO: 58175
  derived and/or modified CDS sequence (wt) from neuraminidase__InfluenzaA__BAK23427

SEQ ID NO: 58178 - RNA, 1350 nt, Artificial Sequence
  derived and/or modified CDS sequence (wt) from neuraminidase__InfluenzaA__BAK23428
augaauccaaaucagaagauaauaaccaucggaucaaucuguaugguaauuggaauaguuagcuuaauguugcaaauugggaacaugaucucaauaugggucagucauucaauucagacagggaaucaaugccaagcugaaccaaucagcaauacuaaauuucuuacugagaaagcuguggcuucaguaacauuagcgggcaauucaucucuuugucccauuagcggaugggcuguauacaguaaggacaacaguauaaggaucgguuccaggggggauguguuuguuauaagagagccguucaucucaugcucccacuuggaaugcagaacuuucuuuuugacucagggagccuugcugaaugacaagcacuccaaugggacugucaaagacagaagcccucacagaacauuaaugaguuguccugugggugaggcucccuccccauauaacucaagguuugagucuguugcuuggucagcaagugcuugccaugauggcaccaguugguugacaauuggaauuucugguccagacaauggggcuguggcuguauugaaauacaauggcauaauaacagacaccaucaagaguuggaggaacaacauacugagaacucaagagucugaaugugcauguguaaauggcucuugcuuuacuguaaugacugauggaccaaguagugggcaggcaucauauaagaucuucaaaauggaaaaggggaaagugguuaaaucagucgaauuggaugcuccuaauuaucacuaugaggagugcuccuguuauccugaugccggcgaaaucacaugugugugcagggauaauuggcauggcucaaauaggccauggguaucuuucaaucaaaauuuggaguaucaaauaggauauauaugcaguggaguuuucggagacaauccacgccccaaugauggaacagguaguugugguccgguguccccuaacggggcauaugggguaaaaggguuuucauuuaaauacggcaaugguguuuggaucgggagaaccaaaagcacuaauuccaggagcggcuuugaaaugauuugggacccaaauggguggacuggaacggacaguagcguuucggugaagcaagauaucguagcaauaacugauuggucaggauauagcggaaguuuuguccagcauccagaacugacaggauuagauugcauaagaccuuguuucaggguugaguuaaucagagggcggccuaaagagagcacaauuuggaccaguggaagcagcauaucuuuuugugguguaaauagugacacuguuaguuggucuuggccagacggugcugaguugccauucaccauugacaaguag

SEQ ID NO: 58179 - RNA, 1350 nt, Artificial Sequence; identical to SEQ ID NO: 58175
  derived and/or modified CDS sequence (wt) from neuraminidase__InfluenzaA__BAK23429

SEQ ID NO: 58180 - RNA, 1350 nt, Artificial Sequence
  derived and/or modified CDS sequence (wt) from neuraminidase__InfluenzaA__BAK23430
augaauccaaaucagaagauaauaaccaucggaucaaucuguaugguaauuggaauaguuagcuuaauguuacagauugggaacaugaucucaauaugggucagucauucaauucagacagggaaucaaugccaagcugaaccgaucagcaauacuaaauuucuuacugagaaagcuguggcuucaguaacauuagcgggcaauucaucucuuugucccauuagcggaugggcgguauacaguaaggacaacaguauaaggaucgguuccaggggggauguguuuguuauaagagagccguucaucucaugcucccacuuggaaugcagaacuuucuuuuugacucagggagccuugcugaaugacaagcacuccaaugggacugucaaagacagaagcccucacagaacauuaaugaguuguccugugggugaggcucccuccccauauaacucaagguuugagucuguugcuuggucagcuagugccugccaugauggcaucaguugguugacaauuggaauuucugguccagacaauggggcuguggcuguauugaaauacaauggcauaauaacagacaccaucaagaguuggaggaacaacauauuaagaacucaagaaucugaaugugcauguguaaauggcucuugcuuuacuguaaugacugauggaccaaguagugggcaggcaucauauaagaucuucaaaauggaaaaagggaaagugguuaaaucagucgaauuggaugcuccuaauuaucacuaugaggagugcuccuguuauccugaugccggcgaaaucacauguguguguagggauaauuggcauggcucaaauaggccauggguaucuuucaaucaaaaucuggaguaucaaauaggauauauaugcaguggaguguucggagacaauccacgccccaaugauggaacagguaguugugguccgguguccccuaacggggcauaugggguaaaaggguuuucauuuaaauacggcaaugguguuuggaucgggagaaccaaaagcacuaauuccaggagcggcuuugaaaugauuugggacccaaauggguggauuggaacggacaguagcuuuucggugaagcaagauaucguagcaauaacugauuggucgggauauagugggaguuuuguccagcauccagaacugacaggauuagauugcaugaggccuuguuucuggguugaguuaaucagagggcggccuaaagagagcacaauuuggaccaguggaagcagcauauccuuuugugguguaaauagugacacuguuaguuggucuuggccagacggugcugaguugccauucaccauugacaaguag

SEQ ID NO: 58181 - RNA, 1350 nt, Artificial Sequence
  derived and/or modified CDS sequence (wt) from neuraminidase__InfluenzaA__BAK23431
augaauccaaaucagaagauaauaaccaucggaucaaucuguaugguaauuggaauaguuagcuuaauguuacaaauugggaacaugaucucaauaugggucagucauucaauucagacagggaaucaaugccaagcugaaccaaucagcaauacuaaauuucuuacugagaaagcuguggcuucaguaacauuagcgggcaauucaucucuuugucccauuagcggaugggcuguauacaguaaggacaacaguauaaggaucgguuccaggggggauguguuuguuauaagagagccguucaucucaugcucccacuuggaaugcagaacuuucuuuuugacucagggagccuugcugaaugacaagcacuccaaugggacugucaaagacagaagcccucacagaacauuaaugaguuguccugugggugaggcucccuccccauauaacucaagguuugagucuguugcuuggucagcaagugcuugccaugauggcaccaguugguugacaauuggaauuucugguccagacaauggggcuguggcuguauugaaauacaauggcauaauaacagacaccaucaagaguuggaggaacaacauacugagaacucaagagucugaaugugcauguguaaauggcucuugcuuuacuguaaugacugauggaccaaguagugggcaggcaucauauaagaucuucaaaauggaaaaggggaaagugguuaaaucagucgaauuggaugcuccuaauuaucacuaugaggagugcuccuguuauccugaugccggcgaaaucacaugugugugcagggauaauuggcauggcucaaauaggccauggguaucuuucaaucaaaauuuggaguaucaaauaggauauauaugcaguggaguuuucggagacaauccacgccccaaugauggaacagguaguugugguccgguguccccuaacggggcauaugggguaaaaggguuuucauuuaaauacggcaacgguguuuggaucgggagaaccaaaagcacuaauuccaggagcggcuuugaaaugauuuggggcccaaauggguggacuggaacggacaguagcuuuucggugaagcaagauaucguagcaauaacugauuggucaggauauagcgggaguuuuguccagcauccagaacugacaggauuagauugcauaagaccuuguuucuggguugaguuaaucagagggcggccuaaagagagcacaauuuggaccaguggaagcagcauaucuuuuugugguguaaauagugacacuguuaguuggucuuggccagacggugcugaguugccauucaccauugacaaguag

SEQ ID NO: 58182 - RNA, 1350 nt, Artificial Sequence; identical to SEQ ID NO: 58175
  derived and/or modified CDS sequence (wt) from neuraminidase__InfluenzaA__BAK23432

SEQ ID NO: 58183 - RNA, 1350 nt, Artificial Sequence; identical to SEQ ID NO: 58175
  derived and/or modified CDS sequence (wt) from neuraminidase__InfluenzaA__BAK23433

SEQ ID NO: 58184 - RNA, 1410 nt, Artificial Sequence
  derived and/or modified CDS sequence (wt) from neuraminidase__InfluenzaA__BAM65748
augaauccaaaucaaaagauaauaacgauuggaucuguuucucuaacuauuuccacaauaugcuucuucaugcaaauugccaucuuaauaacuacuguaacauugcauuucaagcaauaugaauucaacucccccccaaacaaccaagugaugcugugugaaccaacaauaauagaaagaaacauaacagagauaguguaucugaccaacacuaccauagagaaggaaauaugccccaaacuagcagaauacagaaauuggucaaagccgcaaugugacauuacaggauuugcaccuuuuucuaaggacaauucgauuaggcuuuccgcugguggggacauuugggugacaagagaaccuuaugugucaugcgauccugacaaguguuuucaauuugcccuuggacagggaacaacacuaaacaacgugcauucaaaugacacaguacaugauaggaccccuuaccggacccuauugaugaaugaguuagguguuccauuucaucuggggaccaagcaagugugcauagcaugguccagcucaaguugucacgauggaaaagcauggcugcauguuuguguaacgggagaugauaaaaaugcaacugcuaguuucauuuacaaugggaggcuaguagauaguauuguuucaugguccaaaaaaauacucaggacccaggagucagaauguguuuguaucaauggaacuuguacaguaguaaugacugaugggagugcuucaggaaaagcugauacuaaaauacuauucauugaggaggggaaaaucguucauacuagcacauuaucaggaagugcucagcaugucgaggagugcuccugcuauccucgauauccuggugucagaugugucuguagagacaacuggaaaggcuccaauaggcccaucguagauauaaacauaaaggauuauagcauuguuuccaguuaugugugcucaggacuuguuggagacacacccagaaaaaccgacagcuccagcaguagccauugcuuagauccuaacaaugaagaagguggucauggagugaaaggcugggccuuugacgauggaaaugacguguggaugggaagaacaaucagcgagaagucacgcuuaggauaugaaacauucaaagucauuggaggcugguccaacccuaauuccaaaucacagauaaauaggcaagucauaguugacauggguaauagguccgguuauucugguauuuucucuguugaaggcaaaagcugcaucaaucggugcuuuuauguggaguugauaaggggaagaaaagaugaaacugaagucuuguggaccucaaacaguauuguuguguuuuguggcaccucagguacauauggaacaggcucauggccugauggggcggacaucaaacucaugucuauauaa

SEQ ID NO: 58185 - RNA, 1350 nt, Artificial Sequence
  derived and/or modified CDS sequence (wt) from neuraminidase__InfluenzaA__BAM85817
augaauccaaaucagaagauaauaaccaucggaucaaucuguaugguaacuggaauaguuagcuuaauguuacaaauugggaacaugaucucaauaugggucagucauucaauucacacagggaaucaacaccaaucugaaccaaucagcaauacuaauuuucuuacugagaaagcuguggcuucaguaaaauuagcgggcaauucaucucuuugccccauuaacggaugggcuguauacaguaaggacaacaguauaaggaucgguuccaagggggauguguuuguuauaagagagccguucaucucaugcucccacuuggaaugcagaacuuucuuuuugacucagggagccuugcugaaugacaagcacuccaaugggacugucaaagacagaagcccucacagaacauuaaugaguuguccugugggugaggcucccuccccauauaacucaagguuugagucuguugcuuggucagcaagugcuugccaugauggcaccaguugguugacgauuggaauuucuggcccagacaauggggcuguggcuguauugaaauacaauggcauaauaacagacacuaucaagaguuggaggaacaacauacugagaacucaagagucugaaugugcauguguaaauggcucuugcuuuacuguaaugacugacggaccaaguaauggucaggcaucacauaagaucuucaaaauggaaaaagggaaagugguuaaaucagucgaauuggaugcuccuaauuaucacuaugaggaaugcuccuguuauccuaaugccggagaaaucacaugugugugcagggauaauuggcauggcucaaaucggccauggguaucuuucaaucaaaauuuggaguaucaaauaggauauauaugcaguggaguuuucggagacaauccacgccccaaugauggaacagguaguugugguccgguguccucuaacggggcauaugggguaaaaggguuuucauuuaaauacggcaauggugucuggaucgggagaaccaaaagcacuaauuccaggagcggcuuugaaaugauuugggauccaaauggguggacugaaacggacaguagcuuuucagugaaacaagauaucguagcaauaacugauuggucaggauauagcgggaguuuuguccagcauccagaacugacaggacuagauugcauaagaccuuguuucuggguugaguugaucagagggcggcccaaagagagcacaauuuggacuagugggagcagcauaucuuuuugugguguaaauagugacacuguggguuggucuuggccagacggugcugaguugccauucaccauugacaaguag

SEQ ID NO: 58186 - RNA, 1350 nt, Artificial Sequence
  derived and/or modified CDS sequence (wt) from neuraminidase__InfluenzaA__BAM85818
augaauccaaaucagaagauaauaaccauuggaucaaucuguaugguaauuggaauaguuagcuuaauguuacagauugggaacaugaucucaauaugggucagucauucaauucaaacagggaaucaacaccaagcugaaccaaucagaaauacuaauuuucuuacugagaacgcuguggcuucaguaacauuagcgggcaauucaucucuuugccccauuagaggaugggcuguacacaguaaagacaacaguauaaggauugguuccaagggggauguguuuguaauuagagagccguucaucucaugcucccauuuggaaugcagaacuuucuuuuugacucagggagccuuacugaaugacaagcacuccaacgggacugucaaagacagaagcccucacagaacacuaaugaguuguccugugggugaggcucccuccccauauaacucaagguuugagucuguugcuuggucagcaagugcuugccaugauggcaccaguugguugacaauuggaauuucugguccagacaauggggcuguggcuguauugaaauacaauggcauaauaacagacaccaucaagaguuggaggaacaacauacugagaacucaagagucugaaugugcauguguaaauggcucuugcuuuacuguaaugacugacggaccaaguaauggacaggcaucauauaagaucuucaaaauggaaaaagggaaaguaguuaaaucagucgaauugaaugcuccuaauuaucacuaugaggaaugcuccuguuauccugaugcuggcgaaaucauaugugugugcagggauaauuggcauggcucaaauaggccauggguaucuuucaaucagaauuuggaguaucaaauaggauauauaugcaguggaguuuucggagacaauccacgccccaaugauggaacagguaguugugguccaguguccccuaacggggcauaugggauaaaaggguuuucauuuaaauacggcaaugguguuuggaucgggagaaccaaaagcacuaauuccaggagcggcuuugaaaugauuugggauccaaauggguggacuggaacggacaguaacuuuucggugaaacaagauauaguagcaauaacugauuggucaggauauagcgggaguuuuguccagcauccagaacugacaggauuagauugcauaagaccuugcuucuggguugaguuaaucagagggcggcccaaagagagcacaauuuggacuagugggagcagcauaucuuuuugugguguaaauagugacacugugaguuggucuuggccagacggugcugaguugccauucaccauugacaaguag

SEQ ID NO: 58187 - RNA, 1350 nt, Artificial Sequence
  derived and/or modified CDS sequence (wt) from neuraminidase__InfluenzaA__BAM85819
augaauccaaaucaaaagauaauaaccauugggucaaucuguaugguaauuggaauaguuagcuuaauguugcaaauugggaacaugaucucaauaugggucagucauucaauucagacagggaaucaaaaccaaguugagccaaucaucaauacuaauuuucuuacugagaaagcuguggcuucaauaacauuagcgggcaauucaucucuuugcccuauuagaggaugggcuauacacaguaaggacaacaguauaaggauugguuccaagggggauguguuuguuauuagagagccauucaucucaugcucucacuuggaaugcagaacuuucuuuuugacucagggagccuugcugaaugacaagcacuccaacgggacugucaaagacagaagcccucacagaacauuaaugaguuguccugugggugaggcucccuccccauauaacucaagguuugagucuguugcuuggucagcaagugcuugccaugauggcaccaguugguugacaauuggaauuucuggcccggacaauggggcuguggcuguauugaaauacaauggcauaauaacagacaccaucaagagcuggaggaacaacauauugagaacucaagaguccgaaugugcaugcguaaauggcucuugcuuuacuguaaugacugacggaccaagugaugggcaggcaucauauaagaucuucaaaauggaaaaagggaaaguaauuaaaucagucgaauuggaugcuccuaauuaccacuaugaggaaugcuccuguuauccugaugccggugaaaucacaugugugugcagagauaauuggcauggcucaaaucggccauggguguccuucaaucaaaaucuggaguaucaaauaggguauauaugcaguggaguuuucggagacaauccacguccuaacgauggaacagguaguugugguccggugucccauaauggggcauaugggguaaaaggguuuucauuuaaauacggcaaugguguuuggaucgggagaaccaaaagcccuaauuccaggagcggcuuugaaaugauuugggauccaaauggguggagugaaacggacaguagcuucucggugaaacaagauauaguagcaauaaccgauuggucaggauauagcgggaguuuuguccagcauccagaacugacagguuuagauugcauaagaccuuguuucuggguugaguuaaucagagggcggcccaaagagaguacaguuuggacuagugggagcagcauauccuuuugugguguaaguagugacacugugaguuggucuuggccagacggugcugaguugccauucaccauugacaaguaa

SEQ ID NO: 58188 - RNA, 1350 nt, Artificial Sequence
  derived and/or modified CDS sequence (wt) from neuraminidase__InfluenzaA__BAM85820
augaauccaaaucagaagauaauaaccaucggaucaaucuguaugguaauuggaauaguuagcuuaauguuacaaauugggaacaugaucucaauaugggucagucauucaauucagacagggaaucaacaccaagcugaaccaaucagcaauacuaauuuucuuacugagaaagcuguggcuucaguaacauuagcgggcaauucaucucuuugccccauuagaggaugggcuguacacaguaaggacaacaguauaaggaucgguuccaagggggauguguuuguuauuagagagccguucaucucaugcucccacuuggaaugcagaacuuucuuuuugacucagggagccuugcugaaugacaagcacuccaacgggacugucaaagacagaagcccucacagaacauuaaugaguuguccugugggugaggcucccuccccauauaacucaagguuugagucuguugcuuggucagcaagugcuugccaugauggcaccaguugguugacaauuggaauuucuggcccagacaauggggcuguggcuguauugaaauacaauggcauaauaacagacacuaucaagaguuggaggaacaacauacugagaacucaagagucugaaugugcauguguaaauggcucuugcuuuacuguaaugacugauggaccaaguaaugggcaggcaucauauaagaucuucaaaauggaaaaagggaaagugguuaaaucagucgaauuggaugcuccuaauuaucacuaugaggagugcuccuguuauccugaugccggcgaaaucacaugugugugcagggauaauuggcauggcucaaauaggccauggguaucuuucaaucaaaauuuggaguaucaaauaggauauauaugcaguggaguuuucggagacaauccacgccccaaugauggaacagguaguugugguccgguguccccuaacggggcauaugggguaaaaggguuuucauuuaaauacggcaaugguguuuggaucgggagaaccaaaagcacuaauuccaggagcggcuuugaaaugauuugggauccaaauggguggacuggaacggacaguagcuuuucggugaaacaagauauaguagcaauaacugauuggucaggauauagcgggaguuuuguccagcauccagaacugacaggauuagauugcauaagaccuuguuucuggguugaguuaaucagagggcggcccaaagagagcacaauuuggacuagugggagcagcauaucuuuuugugguguaaauagugacacugugaguuggucuuggccagacggugcugaguugccauucaccauugacaaguag

SEQ ID NO: 58189 - RNA, 1350 nt, Artificial Sequence
  derived and/or modified CDS sequence (wt) from neuraminidase__InfluenzaA__BAM85821
augaauccaaaucagaagauaauaaccaucggaucaaucuguaugguaacuggaauaguuagcuuaauguuacaaauugggaacaugaucucaauaugggucagucauucaauucacacagggaaucaacaccaagcugaaccaaucagcaauacuaauuuucuuacugagaaagcuguggcuucaguaaaauuagcgggcaauucaucucuuugccccauuaacggaugggcuguauacaguaaggacaacaguauaaggaucgguuccaagggggauguguuuguuauaagagagccguucaucucaugcucccacuuggaaugcagaacuuucuuuuugacucagggagccuugcugaaugacaagcacuccaaugggacugucaaagacagaagcccucacagaacauuaaugaguuguccugugggugaggcucccuccccauauaacucaagguuugagucuguugcuuggucagcaagugcuugccaugauggcaccaguugguugacaauuggaauuucuggcccagacaauggggcuguggcuguauugaaauacaauggcauaauaacagacacuaucaagaguuggaggaacaacauacugagaacucaagagucugaaugugcauguguaaauggcucuugcuuuacuguaaugacugacggaccaaguaauggucaggcaucacauaagaucuucaaaauggaaaaagggaaagugguuaaaucagucgaauuggaugcuccuaauuaucacuaugaggaaugcuccuguuauccugaugccggcgaaaucacaugugugugcagggauaauuggcauggcucaaaucggccauggguaucuuucaaucaaaauuuggaguaucaaauaggauauauaugcaguggaguuuucggagacaauccacgccccaaugauggaacagguaguugugguccgguguccucuaacggggcauaugggguaaaaggguuuucauuuaaauacggcaauggugucuggaucgggagaaccaaaagcacuaauucuaggagcggcuuugaaaugauuugggauccaaauggguggacugaaacggacaguagcuuuucagugaaacaagauaucguagcaauaacugauuggucaggauauagcgggaguuuuguccagcauccagaacugacaggacuagauugcauaagaccuuguuucuggguugaguugaucagagggcggcccaaagagagcacaauuuggacuagugggagcagcauaucuuuuugugguguaaauagugacacuguggguuggucuuggccagacggugcugaguugccauucaccauugacaaguag

SEQ ID NO: 58190 - RNA, 1350 nt, Artificial Sequence
  derived and/or modified CDS sequence (wt) from neuraminidase__InfluenzaA__BAM85822
augaauccaaaucagaagauaauaaccaucggaucaaucuguaugguaacuggaauaguuagcuuaauguuacaaauugggaacaugaucucaauaugggucagucauucaauucacacagggaaucaacaccaaucugaaccaaucagcaauacuaauuuucuuacugagaaagcuguggcuucaguaaaauuagcgggcaauucaucucuuugccccauuaacggaugggcuguauacaguaaggacaacaguauaaggaucgguuccaagggggauguguuuguuauaagagagccguucaucucaugcucccacuuggaaugcagaacuuucuuuuugacucagggagccuugcugaaugacaagcacuccaaugggacugucaaagacagaagcccucacagaacauuaaugaguuguccugugggugaggcucccuccccauauaacucaagguuugagucugucgcuuggucagcaagugcuugccaugauggcaccaguugguugacaauugguauuucuggcccagacaauggggcuguggcuguagugaaguacaauggcauaauaacagacacuaucaagaguuggaggaacaacauacugagaacucaagagucugagugugcauguguaaauggcucuugcuuuacuguaaugacugacggaccaaguaauagucaggcaucacauaagaucuucaaaauggaaaaagggaaagugguuaaaucagucgaauuggaugcuccuaauuaucacuaugaggaaugcuccuguuauccugaugccggcgaaaucacaugugugugcagggauaauuggcauggcucaaaucggccaugggugucuuucaaucaaaauuuggaguaucaaauaggauauauaugcaguggaguuuucggagacaauccacgccccaaugauggaacagguaguugugguccgguguccucuaacggggcauaugggguaaaagguuuuucauuuaaauacggcaauggugucuggaucgggagaaccaaaagcacuaauuccaggagcggcuuugaaaugauuugggauccaaauggguggacugaaacggacaguagcuuuucagugaaacaagauaucguagcaauaacugauuggucaggauauagcgggaguuuuguccagcauccagaacugacaggacuagauugcauaagaccuuguuucuggguugaguugaucagagggcggcccaaagagagcacaauuuggacuagugggagcagcauaucauuuugugguguaaauagugacacuguggguuggucuuggccagacggugcugaguugccauucaccauugacaaguag

SEQ ID NO: 58191 - RNA, 1410 nt, Artificial Sequence
  derived and/or modified CDS sequence (wt) from neuraminidase__InfluenzaA__BAM85823
augaauccaaaucagaagauaacaaccauuggaucaaucuguaugguaauuggaauaguuagcuugauguugcagauugggaacauaaucucaauauggguuagucauucaauucagacagggaaucaacaccaggcuggaccaugcaaucaaagcauuauuacuuaugaaaacaacaccuggguaaaucagacauaugucaacaucagcaauaccaauuuucuuacugagaaaacuguggcuucaguaacauuagcgggcaauucaucucuuugccccauuaguggaugggcuguauacaguaaggacaacgguauaagaaucgguuccaagggggauguguuuguuauaagagagccguucaucucaugcucccacuuggaaugcagaacuuucuuuuugacucagggagccuugcugaaugacaagcauucuaaugggaccgucaaagacagaagcccucacagaacauuaaugaguuguccugugggugaggcuccuuccccauauaacucgagguuugagucuguugcuuggucagcaagugcuugucaugauggcauuaauugguugacaauuggaauuucuggcccagacaauggggcuguggcuguauugaaauacaaugguauaauaacagacacuaucaagaguuggaggaacaacauacugagaacucaagagucugaaugugcauguguaaauggcucuugcuuuacuauaaugacugauggaccaaguaacgggcaggcuucauauaaaaucuucagaauagaaaaagggaaaguaguuaaaucagucgaauugaacgccccuaauuaucacuaugaggagugcuccuguuauccugaugcuggcgaaaucacaugugugugcagggauaauuggcauggcucaaaucggccauggguaucuuucaaucagaauuuggaguaucaaauaggauauauaugcaguggaauuuucggagacaauccacgccccaaugaugggacaggcaguugugguccgguguccccuaacggggcauauggaauaaagggguuuucauuuaaauacggcaaugguguuuggaucgggagaaccaaaagcacuaauuccaggagcggcuuugaaaugauuugggauccaaauggguggacuggaacggacaguaauuuuucggugaagcaagauaucguagcuauaacugauuggucaggauauagcgggaguuuuguccagcauccagaacugacaggauuagauugcauaagaccuuguuucuggguugagcuaaucagagggcggcccaaagagagcacaauuuggacuagugggagcagcauauccuuuugugguguaaacagugacacuguggguuggucuuggccagacggugcugaguugccauucaccauugacaaguag

SEQ ID NO: 58192 - RNA, 1350 nt, Artificial Sequence
  derived and/or modified CDS sequence (wt) from neuraminidase__InfluenzaA__BAM85824
augaauccaaaucagaagauaauaaccauuggaucaaucuguaugguaauuggaauagucagcuuacuguuacaaauugggaacaugaucucaauauggaucagucauucaauucagacaggaaaucaacaccaagcugaaucaaucagcaauacuaacccucuuacugaaaaagcuguggcuucaguaacauuagcgggcaauucaucucuuugccccauuagaggaugggcuguacacaguaaggacaacaguauaaggaucgguuccaagggggauguguuuguuauuagagagccguucaucucaugcucccacuuggaaugcagaacuuucuuuuugacucagggagccuugcugaaugacaagcacuccaacgggacugucaaagacagaagcccucacagaacauugaugaguuguccugugggugaggcucccuccccauauaacucaagguuugagucuguugcuuggucagcaagugcuugccaugauggcaccaguugguuaacaauugggauuucuggcccagacaauggggcuguggcuguguugaaauacaauggcauaauaacagacacuaucaagaguuggaggaacaacauacugagaacucaagagucugaaugugcauguguaaauggcucuugcuuuacuguaaugacugauggaccaaguaaugggcaggcaucauauaagaucuucaaaauggaaaaaggaaaagugguuaaaucagucgaauuggaugcuccuaauuaucacuaugaggagugcuccugcuauccugaugccagcgaaaucacaugugugugcagggauaacuggcauggcucaaauaggccauggguaucuuucaaucaaaauuuggaguaucaaauaggauauauaugcaguggaguuuucggagauaauccacgccccaaugauggaacagguaguugugguccgauguucccuaacggggcauaugggauaaaaggguuuucauuuaaauacggcaaugguguuuggaucgggagaaccaaaagcacuaauuccaggagcggcuuugaaaugauuugggauccaaauggguggacuggaacggacaguagcuuuucggugaaacaggauauaguagcaauaacugauuggucaggauauagugggaguuuuguccagcauccagaacugacaggauuagauugcauaagaccuuguuucuggguugaguuaaucagagggcggcccaaagagagcacaauuuggacuagugggagcagcauaucuuuuugugguguaaauagugacacugugaguuggucuuggccagacggugcugaguugccauucaccauugacaaguag

SEQ ID NO: 58193 - RNA, 1350 nt, Artificial Sequence
  derived and/or modified CDS sequence (wt) from neuraminidase__InfluenzaA__BAM85825
augaauccaaaucaaaagauaauaaccauugggucaaucuguaugguaauuggaauaguuagcuuaauguugcaaauugggaacaugaucucaauaugggucagucauucaauucagacagggaaucaaaaccaaguugagccaaucaucaauacuaauuuucuuacugagaaagcuguggcuucaauaacauuagcgggcaauucaucucuuugcccuauuagaggaugggcuauacacaguaaggacaacaguauaaggauugguuccaagggggauguguuuguuauuagagagccauucaucucaugcucccacuuggaaugcagaacuuucuuuuugacucagggagccuugcugaaugacaagcacuccaacgggacugucaaagacagaagcccucacagaacauuaaugaguuguccugugggugaggcucccuccccauauaacucaagguuugagucuguugcuuggucagcaagugcuugccaugauggcaccaguugguugacaauuggaauuucuggcccggacaauggggcuguggcuguauugaaauacaauggcauaauaacagacaccaucaagagcuggaggaacaacauacugagaacucaagaguccgaaugugcaugcguaaauggcucuugcuuuacuguaaugacugacggaccaaguaaugggcaggcaucauauaagaucuucaaaauggaaaaggggaaaguaauuaaaucagucgaauuggaugcuccuaauuaccacuaugaggaaugcuccuguuauccugaugccggcgaaaucacaugugugugcagagauaauuggcauggcucaaaucggccauggguguccuucaaucaaaaucuggaguaucaaauaggauauauaugcaguggaguuuucggagacaauccacgccccaaugauggaacagguaguugugguccggugucccauaauggggcauaugggguaaaaggguuuucauuuaaauacggcaaugguguuuggaucgggagaaccaaaagcccuaauuccaggagcggcuuugaaaugauuugggauccaaauggguggagugaaacggacaguagcuucucggugaaacaagauauaguagcaauaacugauuggucaggauauagcgggaguuuuguccagcauccagaacugacagguuuagauugcauaagaccuuguuucuggguugaguuaaucagagggcggcccaaagagaguacaguuuggacuagugggagcagcauauccuuuugugguguaaauagugacacugugaguuggucuuggccagacggugcugaguugccauucaccauugacaaguaa

SEQ ID NO: 58194 - RNA, 1350 nt, Artificial Sequence
  derived and/or modified CDS sequence (wt) from neuraminidase__InfluenzaA__BAM85826
augaauccaaaucagaagauaauaaccaucggaucaaucuguaugguaauuggaauaguuagcuuaauguuacaaauugggaauaugaucucaauaugggucagucauucaauucagacagggaaucaacgccaagcugaaccaaucagcaauacuaaauuucuuacugagaaagcuguggcuucaguaacauuagcgggcaauucaucucuuugccccauuagcggaugggcuguauacaguaaggacaacaguauaaggaucgguuccaggggggauguguuuguuauaagagagccguucaucucaugcucccacuuggaaugcagaacuuucuuuuugacucagggagccuugcugaaugacaagcacuccaaugggacugucaaagacagaagcccucacagaacauuaaugaguuguccugugggugaggcucccuccccauauaacucaagguuugagucuguugcuuggucagcaagugcuugccaugauggcaccaguugguugacaauuggaauuucugguccagacaauggggcuguggcuguauugaaauacaauggcauaauaacagacaccaucaagaguuggaggaacaacauacugagaacccaagagucugaaugugcauguguaaacggcucuugcuuuacuguaaugacugauggaccaaguaaugggcaggcaucauauaagaucuucaaaauggaaaaagggaaagugguuaaaucagucgaauuggaugcuccuaauuaucacuaugaggagugcuccuguuauccugaugccggcgaaaucacaugugugugcagggauaauuggcauggcucaaauaggccauggguaucuuucaaucaaaauuuggaguaucaaauaggauauauaugcaguggaguuuucggagacaauccacgccccaaugauggaacagguaguugugguccggugucccuuaacggggcauaugggguaaaaggguuuucauucaaauacggcaaugguguuuggauugggagaaccaaaagcacuaauuccaggagcggcuuugaaaugauuugggauccaaauggguggacuggaacggacaguagcuuuucggugaagcaagauaucguagcaauaacugauuggucaggauauagcgggaguuuuguccagcauccagaauugacaggauuagauugcauaagaccuuguuucuggguugaguuaaucagagggcggccuaaagagagcacaauuuggaccagugggagcagcauaucuuuuugugguguaaauagugacacuguuaguuggucuuggccagacggugcugaauugccauucaccauugacaaguag

SEQ ID NO: 58195 - RNA, 1350 nt, Artificial Sequence
  derived and/or modified CDS sequence (wt) from neuraminidase__InfluenzaA__BAM85827
augaauccaaaucagaagauaauaaccauuggaucaaucuguaugguaauuggaguaguuagcuuaauguuacaaaccgggaacauaaucucaauaugggucagucauucaauucagaaagggaaucaacaccaagcugaaucaaucagcaauacuaacccucuuacugagaaagcuguagcuucaguaacauuagcgggcaauucaucucuuugccccauuagaggaugggcuguacacaguaaggacaacaauauaaggaucgguucuaagggggauguguuuguuauuagagagccguucaucucaugcucucaccuggaaugcagaacuuuuuucuuaacucagggagccuugcuaaaugacaagcacuccaacgggacugucaaagacagaagcccucacagaacauuaaugaguuguccugugggugaggcucccucuccauauaacucaagauuugagucuguugcuuggucagcuagugcuugccaugauggcaccaguugguugacaauuggaauuucuggcccagacaaugaggcuguggcuguauugaaguacaauggcauaauaacagacacuaucaagaguuggaggaacaacauacugagaacucaagagucugaaugugcauguguaaauggcucuugcuuuacuguaaugacugauggaccaaguaaugggcaggcaucauauaagaucuucaaaauggaaaaaggaaaaguagucaaaucagucgaauuggaugcuccuaauuaucacuaugaggagugcuccuguuauccugacgccggcgaaaucacaugcguuuguagggauaauuggcauggcucaaaucguccauggguaucuuucaaucaaaauuuggaguaucaaauaggauauauaugcaguggaguuuucggagacaauccacgccccaaugauggaacaggcaguuguggcccgauguccccuaacggggcauaugggguaaaaggguuuucauuuaaauacggcaaugguguuuggaucgggagaaccaaaagcacuaccuccaggagcggcuuugaaaugauuugggauccaaauggguggacuggaacggacaguagcuuuucagugaaacaagauauaguagcaauaacugauuggucaggauauagcgggaguuuuguucagcauccagaacugacaggacuagacugcauaagaccuuguuucuggguugaguuaaucagagggcggcccaaagagaguacaauuuggacuagugggagcagcauauccuuuugugguguagauagugacacugugaguuggucuuggccagacggugcugaguugccauucaccauugacaaguag

SEQ ID NO: 58196 - RNA, 1350 nt, Artificial Sequence
  derived and/or modified CDS sequence (wt) from neuraminidase__InfluenzaA__BAM85828
augaauccaaaucagaagauaauaaccaucggaucaaucuguaugguaauuggaauaguuagcuuaauguuacaaauugggaacaugaucucaauaugggucagucauucaauucagacagggaaucaacgccaagcugaaccaaucagcaauacuaaauuucuuacugagaaagcuguggcuucaguaacauuagcgggcaauucaucucuuugccccauuagcggaugggcuguauacaguaaggacaacaguauaaggaucgguuccaggggggauguguuuguuauaagagagccguucaucucaugcucccacuuggaaugcagaacuuucuuuuugacucagggagccuugcugaaugacaagcacuccaaugggacugucaaagacagaagcccucacagaacauuaaugaguuguccugugggugaggcucccuccccauauaacucaagguuugagucuguugcuuggucagcaagugcuugccaugauggcaccaguugguugacaauuggaauuucugguccagacaauggggcuguggcuguauugaaauacaauggcauaauaacagacaccaucaagaguuggaggaacaacauacugagaacucaagagucugaaugugcauguguaaauggcucuugcuuuacuguaaugacugauggaccaaguaaugggcaggcaucauauaagaucuucaaaauggaaaaagggaaagugguuaaaucagucgaauuggaugcuccuaauuaucacuaugaggagugcuccuguuauccugaugccggcgaaaucacaugugugugcagggauaauuggcauggcucaaauaggccauggguaucuuucaaucaaaauuuggaguaucaaauaggauauauaugcaguggaguuuucggagacaauccacgccccaaugauggaacagguaguugugguccgguguccccuaacggggcauaugggguaaaaggguuuucauuuaaauacggcaauggugucuggaucgggagaaccaaaagcacuaauuccaggagcggcuuugaaaugauuugggauccaaauggguggacuggaacggacaguagcuuuucggugaagcaagauaucguagcaauaacugauuggucaggauauagcgggaguuuuguccagcauccagaacugacaggauuagauugcauaagaccuuguuucuggguugaguuaaucagagggcggccuaaagagagcacaauuuggaccagugggagcagcauaucuuuuugugguguaaauagugacacuguuaguuggucuuggccagacggugcugaguugccauucaccauugacaaguag

SEQ ID NO: 58197 - RNA, 1350 nt, Artificial Sequence
  derived and/or modified CDS sequence (wt) from neuraminidase__InfluenzaA__BAM85829
augaauccaaaucagaagauaauaacuaucggaucaaucuguaugauaauuggaauaguuagcuugauguuacaaauugggaacauaaucucaauaugggucagucauucaauucagacagggaaccaacaccaagcugaaccaaucagcgauacuaauuuucuuacugagaaagcuguggcuucaguaauacuagcgggcaauucaucucuuugccacauuaguggaugggcaguacacaguaaggacaacaguauaaggaucgguuccaagggggauguguuuguuauaagagagccguucaucucaugcucccacuuggagugcagaacuuucuuuuugacucagggagccuugcugaaugacaagcacuccaaugggacugucaaagacagaagcccucacagaacauuaaugaguuguccugugggugaggcucccuccccauauaacucaagguuugagucuguugcuuggucggcaagugcuugccaugauggcaccaguugguugacaauuggaauuucuggcccagacaauggggcuguggcuguauugaaauacaauggcauaauaacagacaccaucaagaguuggaggaacuacauacugagaacucaagagucugaaugugcguguguaaauggcucuugcuuuaccguaaugacugauggaccaaguaaugggcaggcaucauauaagaucuucaaaauagaaaaagggaaagugguuaaaucagucgaauuagaugcuccuaauuaucacuaugaggaguguuccuguuauccugaugccggcgaaaucacaugugugugcagggauaauuggcauggcucaaaucggccauggguaucuuucaaucaaaacuuggaguaucaaauaggauauauaugcagugggguuuucggagacacuccacgccccaaugauggaacaggcaguuguggucccguguccccaaauggggcauaugggguaaaaggguuuucauuuaaauacggcaaugguguuuggaucgggagaaccaaaagcacuaauuccaggagcggcuuugaaaugauuugggauccaaauggguggacuggaacggacagcagcuuuucggugaaacaagaucucguagcaauaacugauuggucaggauauagcgggaguuucguucagcauccagaacugacaggauuagauugcauaagaccuuguuucuggguugagcugaucagagggcggcccaaagagagcacaauuuggacgagugggagcagcauauccuuuugugguguaaauagugacacuguggguuggucuuggccagacggugcugaguugccauucaccauugacaaguag

SEQ ID NO: 58198 - RNA, 1413 nt, Artificial Sequence
  derived and/or modified CDS sequence (wt) from neuraminidase__InfluenzaA__BAM85830
augaacccaaaucagaaaauaauaaccauuggaucaaucuguauggcaaucggaacaaucagucuaauacugcaaauagggaauauuaucucaauauggauuagccacucaauucaaacuggaagucaaaaccauacuggaauaugcaaccaaagaaucauuaccuaugaaaauaauaccuggguaaaucaaacauauguuaauauuagcaacacuaacguuguugcuggaaaggacacaacuucaaugauauuagccggcaauucaucucuuuguccuauccgugggugggcuauauacagcaaggacaacagcauaagaauugguuccaaaggagauguuuuugucauaagagaaccuuuuauaucaugcucucacuuggaaugcagaaccuuuuuucugacccaaggcgcucuauuaaaugacaagcauucaaaugggaccguuaaggacagaagcccuuauagggccuuaaugagcuguccuaucggugaagcuccgucuccguacaauucaagauuugaaucgguugcuuggucagcgagugcaugucaugauggcaugggcuggcuaacaaucggaauuucugguccagaugauggagcaguggcuguauuaaaauacaacggcauaauaacugaaaucauuaaaaguuggaggaagcaaauauuaagaacacaagagucugaaugugucuguguaaacgguucauguuuuaccauaaugaccgaugguccgaguaaugggccggccucguacagaaucuucaaaaucaagaaggggaagauuacuaaaucaauagaguuggaugcaccuaauucucauuacgaggaauguuccuguuacccagacaccggcaaagugaugugugugugcagagacaauuggcaugguucgaaucgaccaugggugucuuuuaaucaaaaccuggauuaucaaauaggauacaucugcagugggguuuucggugacaauccgcgucccaaagauggaaaaggcagcugugauccaguaaauguugauggagcagacggaguaaagggguuuucauacagguaugguaaugguguuuggauaggaaggacuaaaaguaacaguuccagaaagggguuugagaugauuugggauccuaauggguggacagauaccgaugguaauuucuuagugaaacaggauguaguggcaaugacugauuggucaggguauagcggaaguuucguucaacauccugagcuaacaggauuggacuguaugaggccuugcuucuggguugaauuaaucagaggacaacccagagaaaaaacaacaaucuggacuagugggagcagcauuucuuuuuguggcgugaauagugauacuguaaauuggucuuggccagacggugccgaguugccauucaccauugacaaguag

SEQ ID NO: 58199 - RNA, 1413 nt, Artificial Sequence
  derived and/or modified CDS sequence (wt) from neuraminidase__InfluenzaA__BAM85831
augaauccaaaucaaaaaauaauaaccauuggaucaaucaguauagcaaucggaauaauuagucuaauguugcaaauaggaaauauuauuucaauaugggcuagucacucaauccaaacuggaagucaaaaccacacuggaguaugcaaccaaagaaucaucacauaugaaaacagcaccugggugaaucacacauauguuaauauuaacaacacuaauguuauugcuggaaaggacaaaacuucagugacauuggccggcaauucaucucuuuguucuaucaguggaugggcuauauacacaaaagacaacagcauaagaauugguuccaaaggagauguuuuugucauaagagagccuuucauaucauguucucacuuggaaugcagaaccuuuuuucugacccaaggugcucuauuaaaugacaaacauucaaaugggaccgucaaggacagaagucccuauagggcuuuaaugagcuguccucuaggugaagcuccguccccauacaauucaaaguuugaaucaguugcuuggucagcaagcgcaugccaugauggcauaggcugguuaacaaucggaauuucugguccagacaauggagcaguggcuguacuaaaauacaacggcauaauaacugaaaccauaaaaaguuggaaaaagcaaauauuaagaacacaagagucugaaugugucugugugaacgggucauguuucaccauaaugaccgauggcccgaguaauggggccgccucguacaaaaucuucaagaucgaaaagggaaagguuacuaaaucaauagaguugaaugcacccaauuuucauuaugaggaauguuccuguuacccagacacuggcacagugauguguguaugcagggacaacuggcaugguucaaaucgaccuugggugucuuuuaaucaaaaccuggauuaucaaauaggauacaucugcagugggguguucggugacaauccgcgucccagagauggagagggcagcuguaauccagugacugcugauggagcaaacggaguaaagggguuuucauacaaauaugguaaugguguuuggauaggaaggacuaaaaguaacagacuuagaaagggguuugagaugauuugggauccuaauggauggacagauaccgacagugauuucucagugaaacaggauguuguggcaauaacugauuggucaggguacagcggaaguuucguucaacauccugaguuaacaggauugggcuguauaagaccuugcuucuggguugaguuagucagaggacugccuagagaaaauacgacaaucuggacuagugggagcagcauuucuuuuuguggcguaaauagugauacugcaaacuggucuuggccagacggugcugaguugccguucaccauugacaaguag

SEQ ID NO: 58200 - RNA, 1413 nt, Artificial Sequence
  derived and/or modified CDS sequence (wt) from neuraminidase__InfluenzaA__BAM85832
augaacccaaaucaaaaaauaauaaccauuggaucaaucaguauagcaaucggaauaauuagucuaauguugcaaauaggaaauauuauuucaauaugggcuagucacucaauucaaacuggaagucaaaaccacacuggaauaugcaaccaaagaaucaucacauaugaaaacagcaccugggugaaucacacauauguuaauauuaacaacacuaauguuguugcuggaaaggacaaaacuccagugacauuggucggcaacucaucucuuuguucuaucaguggaugggcuauauacacaaaagacaacagcauaagaauuggcuccaaaggagauguuuuugucauaagagaaccuuucauaucauguucucacuuggaaugcaaaaccuuuuuucugacccaaggcgcucuauuaaaugacaaacauucaaaugggaccguaaaggacagaaguccuuauagggccuuaaugagcuguccucuaggugaagcuccguccccauacaauucaaaguucgaaucaguugcauggucagcaagcgcaugccaugauggcauaggcugguuaacaaucggaauuucugguccagacaauggagcuguggcuguacuaaaauacaaaggaauaauaacuggaaccauaaaaaguuggaaaaagcaaauauuaagaacacaagagucugaaugugucuguaugaacgggucauguuucaccauaaugaccgaugguccgaguaauggggccgccucguacaaaauuuucaagaucgaaaaggggaaaguuacuaaaucaauggaguugaaugcacccaauuuucauuaugaggaauguucuuguuacccagacacuggcacagugauguguguaugcagggacaacuggcaugguucaaaucgaccuugggugucuuuuaaucaaaacuuggauuaucaaauaggauacaucugcaguggaguguucggugacaauccgcgucccaaagauagagagggcagcugcaauccagugacuguugauggagcaaacggaguaaaaggguuuucauacaaauaugguaaugguguuuggauaggaaggaccaaaaguaacagaauuagaaagggguuugagaugauuugggauccuaauggauggacaaauaccgacagugauuucucagugaaacaggauauuguagcaauaacugauuggucaggguacagcggaaguuucguccaacauccugaguuaacaggauuggacuguauaagaccuugcuucuggguugaguuagucagagggcugccuagagaaaauacaacaaucuggacuaguggaagcagcauuucuuuuuguggcguuaauggugauauugcaaauuggucuuggccagacggugcugaguugccguucaccauugacaaguag

SEQ ID NO: 58201 - RNA, 1410 nt, Artificial Sequence
  derived and/or modified CDS sequence (wt) from neuraminidase__InfluenzaA__BAM85833
augaauccaaaucagaaaauaauaaccauugggucaaccuguaugguaauuggaauaauaagccuaauauuacaaauugggaacauaaucucaauauggguuagccauucaauucagacugggaaucaaaaccaaccugaaacaugcaaccagagcgucauuaccuaugagaacaaaacuuggguaaaucagacauauguuaacaucagcaauaccaaucuugucauugagcgagauguaauuucaguggcacuacugggcaacuccucucucugucccauuaguggaugggcuaucuacagcaaggacaauggcauaagaauugguuccaagggagauguauuugucauaagagagccguucauuucauguucccacuuggaaugccgaacauuuuuccugacucaaggagccuuguuaaaugacaaacacucaaauggaaccguuaaagacagaagccccuacagaaccuuaaugagcuguccuguuggugaggcucccucuccauacaauucaagauuugagucgguugcuuggucagcaagugcuugccaugauggcaucagcugguugacagugggaauuuccgggccagacaauggggcaguugcgguauugaaauacaauggcauaauaacagacaccgucaaaagcuggagaaacaacauauugaggacacaagaaucugaaugugccugcauaaauggcucuugcuuuacuauaaugaccgauggaccaaguaaugggcaggccucguacaagauuuucaagauagaaaaagggaaaguggucaaaucggucgaguugaaugcccccaauuaccacuacgaggaauguucuuguuauccugaugcuagcgaaauaaugugugugugcagggauaauuggcaugguucaaaucgaccgugggugucuuucaaucgaaaucuggaguaucaaauaggguacauauguagugggguuuuuggagacaacccacgccccaaugauggaacaggcagcuguggcccagugucuucuaauggagccuacggggugaaaggauucucguuuaaguacggcaaagguguuuggauagggagaacuaagagcacuaguuccaggaguggauuugaaaugauuugggauccgaauggauggacagagacagauaguaguuucucaguaaagcaagacauuguagcaauaacugauuggucaggauauagugggaguuuuguucaacacccagaauuaacagggcuggacugcauaaggccuugcuuuuggguugaauuaauaagaggacggccuaaggagaauacaauuuggacuagugggagcagcauuuccuucugugguguaaauagcgacacuguggguuggucuuggccagacggugcugaguugccauucaccauugacaaguag

SEQ ID NO: 58202 - RNA, 1410 nt, Artificial Sequence
  derived and/or modified CDS sequence (wt) from neuraminidase__InfluenzaA__BAM85834
augaauccaaaccagaaaauaauaacaauuggcuccgucucucuaacuguugcaacaguguguuuccucaugcagauugccauccuaacaacaaccgugacacugcauuucaagcaaaaugagugcagcauccccgcgaacaaccaagucaugccaugugagccaaucguaauagagaggaacauaacagagauaguguauuugaauaauacuacuauagaaaaagagauuugucuuaaagcggcagaauacaggaauuggucaaaaccgcaaugucaaauuacaggguuugccccguucuccaaggacaacucaauucggcuuucugcugguggggacauuuggguaacgagagaaccuuaugugucaugcgacccaaguaaauguuaucaauuugcacuugggcaggggaccacgcuggaaaacaaacacucaaauggcacaauacaugauaggaucccucaucggacucuuuugaugaaugaguuggguguuccguuucauuugggaaccaaacaagugugcauagcaugguccagcucaaguugucaugaugggaaagcaugguugcauguuugugucacuggggaugauagaaaugcaacugcuaguuucauuuaugaugggaugcuuguugacaguaucgguuccuggucucaaaauauccucagaacucaagagucagaaugcguuugcaucaaugggacuugugcaguaguaaugacugauggaagcgcaucagggagggcagacacuagaauacuauucauuagagaggggaaaauuguccacauuaguccauugucaggaagugcucagcauauagaggaauguuccuguuauccucgauacccuauuaucagaugugucugcagagacaacuggaaaggaucuaauaggcccguuauagauauaaacauggcagauuauagcauugacuccaguuauguguguucaggacuugucggagacacaccaaggaacgaugauagcucuagcagcagcaacugcagggacccuaauaaugagagagggaauccaggaguaaaagggugggccuuugacaaugggaaugauguuuggaugggaagaacaaucaguaaggauucgcguucaggcuaugagacuuucagggucauugguggcugggccacugcuaauuccaagucacagaccaauagacaagucauaguugacaauaacaauuggucugguuauucugggauuuucucuguugaaagcaaaagcugcaucaauagguguuuuuauguggaguuaauaagagggaggccacaggagaccagaguaugguggaccucaaacaguauugucguauucuguggcacuucagggaccuauggaacaggcucauggccugauggggcgaauaucaauuucaugccuauauaa

SEQ ID NO: 58203 - RNA, 1410 nt, Artificial Sequence
  derived and/or modified CDS sequence (wt) from neuraminidase__InfluenzaA__BAM85835
augaauccaaaucagaagauaauaacaauuggcuccgucucucuaaccauugcaacaguauguuuccucaugcagauugccauccuagcaacgacugugacacugcauuucaagcaaaaugaaugcagcauccccgcgaacaaucaaguagugccaugugaaccaauuauaauagagaggaacauaacagagauaguauauuugaauaauacuaccauagagaaagagaucuguucgaaagcaguagacuacaggaauuggucaaaaccgcaaugucaaauuacaggauuugcuccuuuuuccaaggacaacucaauucgacuuucugcugguggggacauuuggguaacaagagagccuuaugugucaugugacaccaguaaauguuaccaauuugcacuugggcaggggaccacacuggacaacaaacauucaaaugggacaauacaugauagaaucccccaucggacccuuuugaugaaugagcuggguguuccguuucacuugggaaccaaacaaguuugcauagcaugguccagcucaaguugccaugaugggaaagcaugguugcauguuugugucacuggggaugauagaaaugcgacugcuaguuucauuuauaauggaaugcuuguugacaguauugguucauggucucaaaauauccucagaacucaggagucagagugcguuugcaucaaugggucuuguacaguaguaaugacugauggaagugcaucagggaaggccgacacuagaauauuauucgucaaagagggaaaaauuauucacauuagcccauugucaggaagugcucagcauauagaggaauguuccuguuauccccgauacccaaacgucagaugugucugcagggacaacuggaggggcucuaauaggccuguuauagauauaaauauggcagauuauagcaucgauuccaguuaugugugcucaggacuuguuggagacacaccaaggaacgaugauaauucuagcagcagcaacugcagggauccuaauaacgagaggggaaacccaggagugaaagggugggccuuugacaguggagaugauguuuggaugggaagaacaaucaguagagauucgcgaucaggcuaugagaccuuuaaggucauuggugguugggccacugcaaauuccaagucacagaccaguagacaagucauaguugacaauaacaacuggucugguuauucugguguuuucucuguugaacacaaaagcugcaucaauagguguuuuuauguggaguugauaagaggaaggccgcaagagacuagaguaugguggaccucaaacaguauugucguauuuuguggcacuucaggcacuuauggaacaggcucauggccugauggggcgaauaucaauuucaugccuauauaa

SEQ ID NO: 58204 - RNA, 1410 nt, Artificial Sequence
  derived and/or modified CDS sequence (wt) from neuraminidase__InfluenzaA__BAM85836
augaauccaaaucagaagauaauaacaauuggcucuguuucucuaaccauugcaacaauauguuuccucaugcaaauugccauccuagcaacgacuguaacacugcauuucaagcagaauggauguaguauccccucaaacaaucaaguagugccaugugaaccaaucauaguagaaaggaacauaacagaaauaguguauuugaauaauacuacaauagaaaaagagcuuuguccuaaaguauuagaauacagggauuggucgaaaccacagugucagauuacaggauucgcuccuuucuccaaggacaacucaauccggcuuucugcugguggggacauuuggguaacaagagagccauaugugucaugcagccccgauaaauguuaucaauucgcacuugggcagggaaccacguuggacaacagacacucaaauggcacaauacaugauagaauuccucaucgaacucuucugaugaacgaauugggugucccguuucacuugggaaccaaacaagugugcauagcauggucuaguucaagcugccaugacggaagggcuugguuacauguuugugucacuggggaugauagaaaugcaacugcuagcuucauuuaugacgggaugcuuguugacaguauuggcucauggucucaaaacauccucagaacucaggagucagaaugcgucugcaucaauggaacuuguacaguaguaaugacugauggaagugcaucaggaagggcugauacuagaauauuauucguuaaagaggggaaaaucgugcauaucagcccacuaucaggaagugcccagcauauagaggaauguuccuguuauccccgcuauccagacguuagauguguuugcagagacaauuggaaaggcucuaauaggcccauuauagauauaaauauggcagauuauagcauugguucuaguuaugugugcucagggcuuguuggcgacacaccgagaaacgaugauagcucuagcaacagcaauugcagggacccuaauaaugagagaggaaacccaggagugaaaggaugggcuuuugacuauggaaaugauguuuggaugggaagaacaaucagcaaggauucacgcucagguuaugagacuuucagggucauuggugguuggacuacggcuaauuccaaaucccaggugaauagacaagucauaguugacaauaguaacuggucugguuauucuggcauuuucucuguugaaggcaaaagcugcauuaauagguguuuuuauguggaauugauaagagggaggccacaagagacuagaguaugguggaccucaaauaguauugucguguuuuguggcacuucagguaccuauggaacaggcucauggccugauggggcgaauaucaauuucaugccuauauaa

SEQ ID NO: 58205 - RNA, 1410 nt, Artificial Sequence
  derived and/or modified CDS sequence (wt) from neuraminidase__InfluenzaA__BAO79717
augaauccaaaucaaaagauaauaacgauuggcucuguuucucucaccauuuccacaauaugcuucuucaugcaaauugccaucuugauaacuacuguaacauugcauuucaagcaauaugaauucaacucccccccaaacaaccaagugaugcugugugaaccaacaauaauagaaagaaacauaacagagauaguguauuugaccaacaccaccauagagaaggaaauaugccccaaaccagcagaauacagaaauuggucaaaaccgcaauguggcauuacaggauuugcacccuucucuaaggacaauucgauuaggcuuuccgcugguggggacaucugggugacaagagaaccuuaugugucaugcgauccugacaaguguuaucaauuugcccuuggacagggaacaacacuaaacaacgugcauucaaauaacacaguacgugauaggaccccuuaucggacucuauugaugaaugaguuggguguuccuuuccaucugggaaccaagcaagugugcauagcaugguccagcucaaguugucacgauggaaaagcauggcugcauguuuguauaacgggggaugauaaaaaugcaacugcuagcuucauuuacaaugggaggcuuguagauaguguuguuucaugguccaaagauauucucaggacccaggagucagaaugcguuuguaucaauggaacuuguacaguaguaaugacugauggaagugcuucaggaaaagcugauacuaaaauacuauucauugaggaggggaaaaucguucauacuagcacauugucaggaagugcucagcaugucgaagagugcucuugcuauccucgauauccuggugucagaugugucugcagagacaacuggaaaggcuccaaucggcccaucguagauauaaacauaaaggaucauagcauuguuuccaguuauguguguucaggacuuguuggagacacacccagaaaaaacgacagcuccagcaguagccauuguuuggauccuaacaaugaagaagguggucauggagugaaaggcugggccuuugaugauggaaaugacguguggaugggaagaacaaucaacgagacgucacgcuuaggguaugaaaccuucaaagucauugaaggcugguccaacccuaaguccaaauugcagauaaauaggcaagucauaguugacagaggugauagguccgguuauucugguauuuucucuguugaaggcaaaaacugcaucaaucggugcuuuuauguggaguugauuaggggaagaaaagaggaaacugaagucuuguggaccucaaacaguauuguuguguuuuguggcaccucagguacauauggaacaggcucauggccugauggggcugaccucaaucucaugccuauauaa

SEQ ID NO: 58206 - RNA, 1413 nt, Artificial Sequence
  derived and/or modified CDS sequence (wt) from neuraminidase__InfluenzaA__CAA33354
augaauccaaaucagaaaauaauaaccauuggaucaaucuguaugacaaucggaauaauuagucuaauauugcaaauaggaaauauuauuucaauauggguuagccacucaauccaaacuggaagucaaaaccacacuggaauaugcaaccaaagaaucauuacuuaugaaaauagcaccuggguaaaucaaacauaugucaauauuaacaacacuaacguuguugcuggaaaggacacaacuucagugacauuagccggcaauucaucucuuuguccuauccgugggugggcuauauacagcaaagacaacagcauaagaauugguuccaaaggagauguuuuugucauaagagaaccuuuuauaucauguucucacuuggaaugcagaaccuuuuuucugacccaaggugcucuauuaaaugacaagcauucaaaugggaccguuaaggacagaagcccuuauagggccuuaaugagcuguccuauaggugaagcuccgucuccauacaauucaagguuugaaucaguugcuuggucagcaagcgcaugucaugauggcaugggcuggcuaacaaucggaauuucugguccagaugauggagcaguggcuguacuaaaauacaacggcauaauaacugaaaccauaaaaaguuggaggaagcgaauauuaagaacacaagagucugaaugugucuguguaaacgguucauguuuuaccauaaugaccgauggcccgaguaauggaccugccucguacagaaucuucaaaaucgagaaggggaagauuacuaaaucaauagaguuggaugcacccaauucucauuacgaggaauguuccuguuacccagacaccggcacagugaugugugugugcagagacaauuggcaugguucgaaucgaccuugggugucuuuuaaucaaaaccuggauuaucaaauaggauacaucugcagugggguuuucggugacaauccgcgucccaaagauggaaaaggcagcugugauccaguaacuguugauggagcagacggaguaaagggguuuucauacagguaugguaaugguguuuggauaggaaggacuaaaaguaacagcuccagaaagggauuugagaugauuugggauccuaauggauggacagauaccgauaguaauuucuuagugaaacaggauguaguggcaaugacugauuggucaggguacagcggaaguuucguucaacauccugagcuaacaggauuggacuguaugaggccuugcuucuggguugaauuaaucagaggacgaccuagagaaaagacaacaaucuggacuagugggagcagcauuucuuuuuguggcgugaauagugauacugcaaauuggucuuggccagacggugccgaguugccauucaccauugacaaguag

SEQ ID NO: 58207 - RNA, 1404 nt, Artificial Sequence
  derived and/or modified CDS sequence (wt) from neuraminidase__InfluenzaA__CAB95858
augaauccaaaucaaaagauaauagcacuuggcucuguuucuauaacuauugcgacaauauguuuacucaugcagauugccaucuuagcaacgacuaugacacuacauuucaacgaaugcaccaacccaucgaacaaucaagcaaugccaugugaaccaaucauaauagaaaggaacauaacagagauagugcauuugaauaauacuaccauagagaaggaaaguuguccuaaaguagcagaauacaagaauuggucaaaaccgcaaugucaaauuacaggguucgccccuuucuccaaggacaacucaauuaggcuuucugcaggcggggauauuugggugacaagagaaccuuauguaucgugcggucuugguaacuguuaccaauuugcacuugggcagggaaccacuuugaacaacaaacacucaaauggcacaauacaugauaggaguccccauagaacccuuuuaaugaacgaguuggguguuccauuucauuugggaaccaaacaagugugcauagcaugguccagcucaagcugccaugaugggaaagcaugguuacauguuugugucacuggggaugauagaaaugcgacugcuagcaucauuuaugaugggaugcuuaccgacaguauugguucauggucuaagaacauccucagaacucaggagucagaauguguuugcaucaauggaacuuguacaguaguaaugacugauggaagugcaucaggaagggcugauacuaaaauacuauucauuagagaagggaaaauuguccacauuaguccacugucaggaagugcucaacauguggaggaaugcuccuguuacccccgguauccagaaguuagauguguuugcagagacaauuggaagggcuccaauagacccgugcuauauauaaauguggcagauuauaguguugauucuaguuaugugugcucaggacuuguuggcgacacaccaagaaaugacgauagcuccagcagcaguaacugcagggaucccaauaacgagagagggggcccaggagugaaagggugggccuuugacaauggaaaugauguuuggaugggacgaacaaucaagaaagauucgcgcucugguuaugagacuuucagggucguuggugguuggacuacggcuaauuccaagucacaaauaaauaggcaagucauaguugacagugauaacuggucuggguauucugguauauucucuguugaaggaaaaaccugcaucaacagguguuuuuauguggaguugauaagagggagaccacaggagaccagaguaugguggacuucaaauagcaucauuguauuuuguggaacuucagguaccuauggaacaggcucauggccugauggagcgaauaucaauuucaugucuauauaa

SEQ ID NO: 58208 - RNA, 1404 nt, Artificial Sequence
  derived and/or modified CDS sequence (wt) from neuraminidase__InfluenzaA__CAB95859
augaauccaaaucaaaagauaauagcacuuggcucuguuucuauaacuauugcgacaauauguuuacucaugcagauugccaucuuagcaacgacuaugacacuacauuucaaugaauguaccaacccaucgaacaaucaagcagugccaugugaaccaaucauaauagaaaggaacauaacagagauagugcauuugaauaauacuaccauagagaaggaaaguuguccuaaaguagcagaauacaagaauuggucaaaaccgcaaugucaaauuacaggguucgccccuuucuccaaggacaacucaauuaggcuuucugcaggcggggauauuugggugacaagagaaccuuauguaucgugcggucuugguaaauguuaccaauuugcacuugggcagggaaccacuuugaacaacaaacacucaaauggcacaauacaugauaggaguccccauagaacccuuuuaaugaacgaguuggguguuccauuucauuugggaaccaaacaagugugcauagcaugguccagcucaagcugccaugaugggaaggcaugguuacauguuugugucacuggggaugauagaaaugcgacugcuagcaucauuuaugaugggaugcuuaccgacaguauugguucauggucuaagaacauccucagaacucaggagucagaaugcguuugcaucaauggaacuuguacaguaguaaugacugauggaagugcaucaggaagggcugauacuaaaauacuauucauuagagaagggaaaauuguccacauugguccacugucaggaagugcucagcauguggaggaaugcuccuguuacccccgguauccagaaguuagauguguuugcagagacaauuggaagggcuccaauagacccgugcuauauauaaauguggcagauuauaguguugauucuaguuaugugugcucaggacuuguuggcgacacaccaagaaaugacgauagcuccagcagcaguaacugcagggauccuaauaacgagagagggggcccaggagugaaagggugggccuuugacaauggaaaugauguuuggaugggacgaacaaucaagaaagauucgcgcucugguuaugagacuuucagggucguuggugguuggacuacggcuaauuccaagucacaaauaaauaggcaagucauaguugacagugauaacuggucuggguauucugguauauucucuguugaaggaaaaaccugcaucaacagguguuuuuauguggaguugauaagagggagaccacaggagaccagaguaugguggacuucaaauagcaucauuguauuuuguggaacuucagguaccuauggaacaggcucauggccugauggagcgaauaucaauuucaugucuauauaa

SEQ ID NO: 58209 - RNA, 1410 nt, Artificial Sequence; identical to SEQ ID NO: 48725
  derived and/or modified CDS sequence (wt) from neuraminidase__InfluenzaA__CAC19707

SEQ ID NO: 58210 - RNA, 1410 nt, Artificial Sequence
  derived and/or modified CDS sequence (wt) from neuraminidase__InfluenzaA__CAD29959
augaauccaaaucaaaagauaauaacgauuggcucuguuucucucaccauugccacaauaugcuuccuuaugcaaauugccauccuuguaacuacuguaacauugcauuucaagcaauaugaaugcaacucccccccaaacaaccaagugaugcugugugaaccaacaauaauagaaagaaacauaacagagauaguguaucugaccaacaccaccauagagaaggaaauaugccccaaacuagcagaauacagaaauuggucaaagccgcaauguaacauuacaggauuugcaccuuuuucuaaggacaauucgauucggcuuuccgcugguggggacaucugggugacaagagaaccuuaugugucaugcgauccugacaaguguuaucaauuugcccuuggacagggaacaacacuaaacaacgggcauucaaaugacacaguacaugauaggaccccuuaucggacccuauugaugaaugaguuggguguuccauuucauuugggaaccaagcaagugugcauagcaugguccagcucaaguugucacgauggaaaagcauggcugcauguuuguguaacgggggaugaugaaaaugcaacugcuagcuucauuuacaaugggaggcuuguagauaguauugguucaugguccaaaaaaauccucaggacccaggagucggaaugcguuuguaucaauggaacuuguacaguaguaaugacugaugggagugcuucaggaaaagcugauacuaaaauacuauucauugaggaggggaaaaucguucauacuagcccauugucaggaagugcucagcaugucgaggagugcuccuguuauccucgauauccuggugucagaugugucugcagagacaacuggaaaggcuccaauaggcccaucguagauauaaauguaaaggauuauagcauuguuuccaguuaugugugcucaggacuuguuggagacacacccagaaaaaacgacagcuccagcaguagucauugcuugaauccuaacaaugaggaagguggucauggagugaaaggcugggccuuugaugauggaaaugacguguggaugggaagaacgaucagcgagaaguuacgcucaggauaugaaaccuucaaagucauugaaggcugguccaaaccuaacuccaaauugcagauaaauaggcaagucauaguugacagagguaauagguccgguuauucugguauuuucucuguugaaggcaaaagcugcaucaaucggugcuuuuauguggaguugauaaggggaaggaaacaggaaacugaagucuuguggaccucaaacaguauuguuguguuuuguggcaccucagguacauauggaacaggcucauggccugauggggcggacaucaaucucaugccuauauaa

SEQ ID NO: 58211 - RNA, 1410 nt, Artificial Sequence
  derived and/or modified CDS sequence (wt) from neuraminidase__InfluenzaA__CAD29960
augaauccaaaucaaaagauaauaacgauuggcucuguuucucucacuauugccacaauaugcuuccuuaugcaaauugccauccugguaacuacuguaacauugcauuucaagcaauaugaaugcaacccccccccaaacaaccaagugaugcugugugaaccaacaauaauagaaagaaacauaacagagauaguguaucugaccaacaccaccauagagaaggaaauaugccccaaacuagcagaauacagaaauuggucaaagccgcaauguaacauuacaggauuugcaccuuuuucuaaggacaauucgauucggcuuuccgcugguggggacaucugggugacaagagaaccuuaugugucaugcgauccugacaaguguuaucaauuugcccuuggacagggaacaacacuaaacaacgggcauucaaaugacacaguacauguuaggaccccuuaucggacccuauugaugaaugaguuggguguuccauuucauuugggaaccaagcaagugugcauagcaugguccagcucaaguugucacgauggaaaagcauggcugcauguuuguguaacgggggaugaugaaaaugcaacugcuagcuucauuuacaaugggaggcuuguagauaguauugguucaugguccaaaaaaauccucaggacccaggagucggaaugcguuuguaucaauggaacuuguacaguaguaaugacugaugggagugcuucaggaaaagcugauacuaaaauacuauucauugaggaggggaaaaucguucauacuagcccauugucaggaagugcucagcaugucgaggagugcuccuguuacccucgauauccuggugucagaugugucugcagagacaacuggaaaggcuccaauaggcccaucguagauauaaauguaaaggauuauagcauuguuuccaguuaugugugcucaggacuuguuggagacacacccagaaaaaacgacagcuccagcaguagccauugccugaauccuaacaaugaggaagguggucauggagugaaaggcugggccuuugaugauggaaaugacguguggaugggaagaacgaucagcgagaaguuacgcucaggauaugaaaccuucaaagucauugaaggcugguccaaaccuaacuccaaauugcagauaaauaggcaagucauaguugacagagguaauagguccgguuauucugguauuuucucuguugaaggcaaaagcugcaucaaucggugcuuuuauguggaguugauaaggggaaggaaacaggaaacugaagucuuguggaccucaaacaguauuguuguguuuuguggcaccucagguacauauggaacaggcucauggccugauggggcggacaucaaucucaugccuauauaa

SEQ ID NO: 58212 - RNA, 1410 nt, Artificial Sequence
  derived and/or modified CDS sequence (wt) from neuraminidase__InfluenzaA__CAD29961
augaauccaaaucaaaagauaauaacgauuggcucuguuucucucaccauuuccacaauaugcuucuuuaugcaaauugccauccugguaacuacuguaacauugcauuucaagcaauaugaaugcaacucccccccaaacaaccaagugaugcugugugaaccaacaauaauagaaagaaacacaacagagauaguguaucugaccaacaccaccauagagaaggaaauaugccccaaacuagcagaauacagaaauuggucaaagccgcaauguaacauuacaggauuugcaccuuuuucuaaggacaauucgauucggcuuuccgcugguggggacaucugggugacaagagaaccuuaugugucaugcgauccugacaaguguuaucaauuugcccuuggacagggaacaacacuaaacaacgggcauucaaaugacacaguacaugauaggaccccuuaucggaccuuauugaugaaugaguuggguguuccauuucaucuggggaccaagcaagugugcauagcaugguccagcucaaguugucacgauggaaaagcauggcugcauguuuguguaacgggggaugaugaaaaugcaacugcuagcuucauuuacaaugggaggcuuguagauaguauugguucaugguccaaaaaaauccucaggacccaggagucagaaugcguuuguaucaauggaacuuguacaguaguaaugacugaugggagugcuucaggaaaagcugauacuaaaauacuauucauugaggaggggaaaaucguucauacuagcacauugucaggaagugcucagcaugucgaggagugcuccuguuauccucgauauccuggugucagaugugucugcagagacaacuggaaaggcuccaauaggcccaucguagauauaaauauaaaggauuauagcauuguuuccaguuaugugugcucaggacuuguuggagacacacccagaaaaaacgacagcuccagcaguagccauugcuuggauccuaacaaugaggaagguggucauggagugaaaggcugggccuuugaugauggaaaugacguguggaugggaagaacgaucagcgagaaguuacgcucaggauaugaaaccuucaaagucauugaaggcugguccaaaccuaacuccaaauugcagauaaauaggcaagucauaguugacagagguaauagguccgguuauucugguauuuucucuguugaaggcaaaagcugcaucaaucggugcuuuuauguggaguugauaaggggaaggaaacaggaaacugaagucuuguggaccucaaacaguauuguuguguuuuguggcaccucagguacauauggaacaggcucagggccugauggggcggacaucaaucucaugccuauauaa

SEQ ID NO: 58213 - RNA, 1410 nt, Artificial Sequence
  derived and/or modified CDS sequence (wt) from neuraminidase__InfluenzaA__CAD29962
augaauccaaaucaaaagauaauaacgauuggcucuguuucucucaccauuuccacaauaugcuucuuuaugcaaauugccauccugguaacuacuguaacauugcauuucaagcaauaugaaugcaacucccccccaaacaaccaagugaugcugugugaaccaacaauaauagaaagaaacauaacagagauaguguaucugaccaacaccaccauagagaaggaaauaugccccaaacuagcagaauacagaaauuggucaaagccgcaauguaacauuacaggauuugcaccuuuuucuaaggacaauucgauucggcuuuccgcugguggggacaucugggugacaagagaaccuuaugugucaugcgauccugacaaguguuaucaauuugcccuuggacagggaacaacacuaaacaacgggcauucaaaugacacaguacaugauaggaccccuuaucggacccuauugaugaaugaguuggguguuccauuucaucuggggaccaagcaagugugcauagcaugguccagcucaaguugucacgauggaaaagcauggcugcauguuuguguaacgggggaugaugaaaaugcaacugcuagcuucauuuacaaugggaggcuuguagauaguauugguucaugguccaaaaaaauccucaggacccaggagucagaaugcguuuguaucaauggaacuuguacaguaguaaugacugaugggagugcuucaggaaaagcugauacuaaaauacuauucauugaggaggggaaaaucguucauacuagcacauugucaggaagugcucagcaugucgaggagugcuccuguuauccucgauauccuggugucagaugugucugcagagacaacuggaaaggcuccaauaggcccaucguagauauaaauauaaaggauuauagcauuguuuccaguuaugugugcucaggacuuguuggagacacacccagaaaaaacgacagcuccagcaguagccauugcuuggauccuaacaaugaggaagguggucauggagugaaaggcugggccuuugaugauggaaaugacguguggaugggaagaacgaucagcgagaaguuacgcucaggauaugaaaccuucaaagucauugaaggcugguccaaaccuaacuccaaauugcagauaaauaggcaagucauaguugacagagguaauagguccgguuauucugguauuuucucuguugaaggcaaaagcugcaucaaucggugcuuuuauguggaguugauaaggggaaggaaacaggaaacugaagucuuguggaccucaaacaguauuguuguguuuuguggcaccucagguacauauggaacaggcucauggccugauggggcggacaucaaucucaugccuauauaa

SEQ ID NO: 58214 - RNA, 1410 nt, Artificial Sequence; identical to SEQ ID NO: 46296
  derived and/or modified CDS sequence (wt) from neuraminidase__InfluenzaA__CAD29963

SEQ ID NO: 58215 - RNA, 1410 nt, Artificial Sequence
  derived and/or modified CDS sequence (wt) from neuraminidase__InfluenzaA__CAD29964
augaauccaaaucaaaagauaauaacgauuggcucuguuucucucacuauugccacaauaugcuuccuuaugcaaauagccauccugguaacuacuguaacauugcauuucaagcaauaugaaugcaacucccccccaaacaaccaaguaaugcugugugaaccaacaauaauagaaagaaacauaacagagauaguguauuugaccaacaccaccauagagaaggaaauaugccccaaacuagcagaauacagaaauuggucaaagccgcaauguaaaauuacaggauuugcaccuuuuucuaaggauaauucaauucggcuuuccgcugguggggacauuugggugacaagggaaccuuaugugucgugcgauccugacaaguguuaucaauuugcccuuggacagggaacaacacuaaacaacaggcauucaaaugacacaguacaugauaggaccccuuaucgaacccuauugaugaaugaguuggguguuccauuucauuugggaaccaagcaaguguguauagcaugguccagcucaaguugucacgauggaaaagcauggcugcauguuuguguaacugggcaugaugaaaaugcaacugcuagcuucauuuacgaugggagacuuguagauaguauugguucaugguccaaaaaaauccucaggacccaggagucggaaugcguuuguaucaauggaacuuguacaguaguaaugacugaugggagugcuucaggaagagcugauacuaaaauacuauucauugaggaggggaaaaucguucauacuagcaaauugucaggaagugcucagcaugucgaggagugcuccuguuauccucgauauccuggugucagaugugucugcagagacaacuggaaaggcuccaauaggcccaucguagauauaaauguaaaggauuauagcauuguuuccaguuaugugugcucaggacuuguuggagacacacccagaaaaaacgacagcuccagcaguagccauugccuggauccuaacaaugaagaagggggucauggagugaaaggcugggccuuugaugauggaaaugacguguggaugggaagaacgaucagcgagaagucacgcucagguuaugaaaccuucaaggucauugaaggcugguccaaaccuaacuccaaauugcagauaaauaggcaagucauaguugaaagagguaauauguccgguuauucugguauuuucucuguugaaggcaaaagcugcaucaaucggugcuuuuauguggaguugauaaggggaaggaaacaggaaacugaagucugguggaccucaaacaguauuguuguguuuuguggcaccucagguacauauggaacaggcucauggccugauggggcggacaucaaucucaugccuauauaa

SEQ ID NO: 58216 - RNA, 1410 nt, Artificial Sequence; identical to SEQ ID NO: 48483
  derived and/or modified CDS sequence (wt) from neuraminidase__InfluenzaA__CAD29965

SEQ ID NO: 58217 - RNA, 1410 nt, Artificial Sequence
  derived and/or modified CDS sequence (wt) from neuraminidase__InfluenzaA__CAD29966
augaauccaaaucaaaagauaauaacgauuggcucuguuucucucacuauugccacaauaugcuuccuuaugcaaauagcuauccugguaacuacuguaacauugcauuucaagcaauaugaaugcaacucccccccaaacaaccaaguaaugcugugugaaccaacaauaauagaaagaaacauaacagagauaguguaucugaccaacaccaccauagagaaggaaauaugccccaaacuagcagaauacagaaauuggucaaagccgcaauguaaaauuacaggauuugcaccuuuuucuaaggauaauucaauucggcuuuccgcugguggggacauuugggugacaagagaaccuuaugugucaugcgauccugacaaguguuaucaauuugcccuuggacagggaacaacacuaaacaacaggcauucaaaugacacaguacaugauaggaccccuuaucgaacccuauugaugaaugaguuggguguuccauuucauuugggaaccaagcaaguguguauagcaugguccagcucaaguugucacgauggaaaagcauggcugcauguuuguguaacugggcaugaugaaaaugcaacugcuagcuucauuuacgaugggagacuuguagauaguauugguucaugguccaaaaaaauccucaggacccaggagucggaaugcguuuguaucaauggaacuuguacaguaguaaugacugaugggagugcuucaggaagagcugauacuaaaauacuauucauugaggaggggaaaaucguucauacuaguaaauugucaggaagugcucagcaugucgaggagugcuccuguuauccucgauauccuggugucagaugugucugcagagacaacuggaaaggcuccaauaggcccaucguagauauaaauguaaaggauuauagcauuguuuccaguuaugugugcucaggacuuguuggagacacacccagaaaaaacgacagcuccagcaguagccauugccuggauccuaacaaugaagaagggggucauggagugaaaggcugggccuuugaugauggaaaugacguguggaugggaagaacgaucagcgagaagucacgcucagguuaugaaaccuucaaggucauugaaggcugguccaaaccuaacuccaaauugcagauaaauaggcaagucauaguugaaagagguaauauguccgguuauucugguauuuucucuguugaaggcaaaagcugcaucaaucggugcuuuuauguggaguugauaaggggaaggaaacaggaaacugaagucugguggaccucaaacaguauuguuguguuuuguggcaccucagguacauauggaacaggcucauggccugauggggcggacaucaaucucaugccuauauaa

SEQ ID NO: 58218 - RNA, 1410 nt, Artificial Sequence; identical to SEQ ID NO: 46071
  derived and/or modified CDS sequence (wt) from neuraminidase__InfluenzaA__CAD29967

SEQ ID NO: 58219 - RNA, 1410 nt, Artificial Sequence
  derived and/or modified CDS sequence (wt) from neuraminidase__InfluenzaA__CAD29968
augaauccaaaucaaaagauaauaacgauuggcucuguuucucucacuauugccacaauaugcuuccuuaugcaaauugccauccugguaacuacugugacauugcauuucaagcaauaugaaugcaacucucucccaaacaaccaaguaaugcugugugaaccaacaauaauagaaagaaacauaacagagauaguguaucugaccaacaccaccauagagaaggaaauaugccccaaacuagcagaauacagaaauuggucaaagccgcaauguaaaauuacaggauuugcaccuuuuucuaaggacaauucaauucggcuuuccgcugguggggacauuugggugacaagagaaccuuaugugucaugcgauccugacaaguguuaucaauuugcccuuggacagggaacaacacuaaacaacaggcauucaaaugacacaguacaugauaggaccccuuaucgaacccuauugaugaaugaguuggguguuccauuucauuugggaaccaagcaagugugcauagcaugguccagcucaaguugucaugauggaaaagcauggcugcauguuuguguaacugggcacgaugaaaaugcaacugcuagcuucauuuacgaugggaggcuuguagauaguauugguucaugguccaaaaaaauccucaggacccaggagucggaaugcguuuguaucaauggaacuuguacaguaguaaugacugaugggagugcuucaggaagagcugauacuaaaauacuauucauugaggaggggaaaaucauucauauuagccaauugucaggaagugcucagcaugucgaggagugcucauguuauccucgauauccuggugucagaugugucugcagagacaacuggaaaggcuccaauaggcccauuguagauauaaauguaaaggauuauagcauuguuuccaguuaugugugcucaggacuuguuggagacacacccagaaaaaacgacagcuccagcaguagccauugccuaaauccuaacaaugaggaagggggucauggagugaaaggcugggccuuugaugauggaaaugacguguggaugggaagaacgaucagcgagaaauuccgcucagguuaugaaaccuucaaagucauugaaggcugguccaaaccuaacuccaaauugcagauaaauaggcaagucauaguugacagagauaauagguccgguuauucugguauuuucucuguugaaggcaaaagcugcaucaaucggugcuuuuauguggaguugauaaggggaaggaaacaggaaacugaagucugguggaccucaaacaguauuguuguguuuuguggcaccucagguacauauggaacaggcucauggccugauggggcggacaucaaucucaugccuauauaa

SEQ ID NO: 58220 - RNA, 1410 nt, Artificial Sequence; identical to SEQ ID NO: 48725
  derived and/or modified CDS sequence (wt) from neuraminidase__InfluenzaA__CAD29969

SEQ ID NO: 58221 - RNA, 1410 nt, Artificial Sequence
  derived and/or modified CDS sequence (wt) from neuraminidase__InfluenzaA__CAD29970
augaauccaaaucaaaagauaauaacuauuggcucuguuucucucacuauugccacaauaugcuuccuuaugcaaauugccauccugguaacuacuguaacauugcauuucaagcaauaugaaugcaacucccccccaaacaaccaaguaaugcugugugaaccaacaauaauagaaagaaacauaacagagauaguguaucugaccaacaccaccauagagaaggaaauaugccccaaacuagcagaauacagaaauuggucaaagccgcaauguaaaauuacaggauuugcaccuuuuucuaaggacaauucaauucggcuuuccgcugguggggacauuugggugacaagagaaccuuaugugucaugcgauccugacaaguguuaucaauuugcccuuggacagggaacaacacuaaacaacaggcauucaaaugacacaguacaugauaggaccccuuaucgaacccuauugaugaaugaguuggguguuccauuucauuugggaaccaagcaagugugcauagcaugguccagcucaaguugucacgauggaaaagcauggcugcauguuuguguaacugggcaugaugaaaaugcaacugcuagcuucauuuacgaugggaggcuuguagauaguauugguucaugguccaaaaaaauccucaggacccaggagucggagugcguuuguaucaauggaacuuguacaguaguaaugacugaugggagugcuucaggaagagcugauacuaaaauacuauucauugaggaggggaaaaucguucauauuagcccauugucaggaagugcucagcaugucgaggagugcuccuguuauccucgauauccugguaucagaugugucugcagagacaacuggaaaggcuccaauaggcccaucguagauauaaauguaaaggauuauagcauuguuuccaguuaugugugcucaggacuuguuggagacacacccagaaaaaacgacagcuccagcaguagccauugccugaauccuaacaaugaggaagggggucauggagugaaaggcugggccuuugaugauggaaaugacguguggaugggaagaacgaucagcgagaaguuacgcucagguuaugaaaccuucaaagucauugaaggcugguccaaaccuaacuccaaauugcagauaaauaggcaagucauaguugacagagguaauagguccgguuauucugguauuuucucuguugaaggcaaaagcugcaucaaucggugcuuuuauguggaguugauaaggggaaggaaacaggaaacugaagucugguggaccucaaacaguauuguuguguuuuguggcaccucagguacauauggaacaggcucauggccugauggggcggacaucaaucucaugccuauauaa

SEQ ID NO: 58222 - RNA, 1410 nt, Artificial Sequence
  derived and/or modified CDS sequence (wt) from neuraminidase__InfluenzaA__CAD29971
augaauccaaaucaaaaaauaauaacgauuggcucuguuucucucaccauugccacaauaugcuuccuuacgcaaauugccauccugguaacuacuguaacauugcauuucaagcaauaugaaugcaacucccccccaaacaaccaagugaugcugugugaaccaacaauaauagaaagaaacauaacagagauaguguaucugaccaacaccaccauagagaaggaaauaugccccaaacuagcagaauacagaaauuggucaaagccgcaauguaacauuacuggauuugcaccuuuuucuaaggacaauucgauucggcuuuccgcugguggggacaucuggguuacaagagaaccuuaugugucaugcgauccugacaaguguuaucaauuugcccuuggacagggaacaacacuaaacaacgggcauucaaaugacacaguacaugauaggaccccuuaucggacccuauugaugaaugaguuggguguuccauuucauuugggaaccaagcaagugugcauagcaugguccagcucaaguugucacgauggaaaagcauggcugcauguuuguguaacgggggaugauaaaaaugcaacugcuagcuucaucuacaaugggaggcuuguagauaguauagguucaugguccaaaaaaauccucaggacccaggagucggaaugcguuuguaucaauggaacuuguacaguaguaaugacugaugggagugcuucaggaaaagcugauacuaaaauacuauucauugaggaggggaaaaucguucauacuagccuauuaucagggagugcucagcaugucgaggagugcuccuguuauccucgauauccuggugucagaugugucugcagagacaacuggaaaggcuccaauaggcccaucguagacauaaauguaaaggauuauagcauuguuuccaguuaugugugcucaggacuuguuggagacacacccagaaaaaacgacagcuccagcaguagccauugcuuggauccuaacaaugaggaagguggucauggagugaaaggcugggccuuugaugauggaaaugacguguggaugggaagaacgaucagcgagaaguuacgcucaggauaugaaaccuucaaagucauugaaggcugguccaaaccuaacuccaaacugcagauaaauaggcaagucauaguugacagagguaauagguccgguuauucugguauuuucucuguugaaggcaaaagcugcaucaaucggugcuuuuauguggaguugauaaggggaaggaaccaggaaacugaagucuuguggaccucaaacaguauuguuguguuuuguggcaccucagguacauauggaacaggcucauggccugauggggcggacaucaaucucaugccuauauaa

SEQ ID NO: 58223 - RNA, 1410 nt, Artificial Sequence
  derived and/or modified CDS sequence (wt) from neuraminidase__InfluenzaA__CAD29972
augaauccaaaucaaaagauaauaacgauuggcucuguuucucucaccauugccacaauaugcuuccuuaugcaaauugucauccugguaacuacuguaacauugcauuucaagcaauaugaaugcaacucccccccaaacaaccaagugaugcugugugaaccaacaauaauagaaagaaacauaacagagauaguguaucugaccaacaccaccauagagaaggaaauaugccccaaacuagcagaauacagaaauuggucaaagccgcaauguaacauuacuggauuugcaccuuuuucuaaggacaauucgauucggcuuuccgcugguggggacaucuggguuacaagagaaccuuaugugucaugcgauccugacaaguguuaucaauuugcccuuggacagggaacaacacuaaacaacgggcauucaaaugacacaguacaugauaggaccccuuaucggacccuauugaugaaugaguuggguguuccauuccauuugggaaccaagcaagugugcauagcaugguccagcucaaguugucacgauggaaaagcauggcugcauguuuguguaacgggggaugauaaaaaugcaacugcuaguuucauuuacaaugggaggcuuguagauaguauagguucaugguccaaaaaaauccucaggacccaggagucggaaugcguuuguaucaauggaacuugugcaguaguaaugacugaugggagugcuucaggaaaagcugauacuaaaauacuauucauugaggaggggaaaaucggucauacuagccuauugucagggagugcucagcaugucgaggagugcuccuguuauccucgauauccuggugucagaugugucugcagagacaacuggaaaggcuccaauaggcccaucguagauauaaauguaaaggauuauagcauuguuuccaguuaugugugcucaggacuuguuggagacacacccagaaaaaacgacagcuccagcaguagccauugcuuggauccuaacaaugaggaagguggucauggagugaaaggcugggccuuugaugauggaaaugacguguggaugggaagaacgaucagcgagaaguuacgcucaggauaugaaaccuucaaagucauugaaggcugguccaaaccuaacuccaaacugcagauaaauaggcaagucauaguugacagagguaauagguccgguuauucugguauuuucucuguugaaggcaaaagcugcaucaaucggugcuuuuauguggaguugauaaggggaaggaaccaggaaacugaaaucuuguggaccucaaacaguauuguuguguuuuguggcaccucagguacauauggaacaggcucauggccugauggggcggacaucaaucucaugccuauauaa

SEQ ID NO: 58224 - RNA, 1410 nt, Artificial Sequence
  derived and/or modified CDS sequence (wt) from neuraminidase__InfluenzaA__CAD29973
augaauccaaaucaaaagauaauaacuauuggcucuguuucucucacuauugccacaauaugcuuccuuaugcaaauugccauccugguaacuacuguaacauuacauuucaagcaauaugaaugcaacucccccccaaacaaccaaguaaugcugugugaaccaacaauaauagaaagaaacauaacagagauaguguaucugaccaacaccaccauagagaaggaaauaugccccaaacuagcagaauacagaaauuggucaaagccgcaauguaaaauuacaggauuugcaccuuuuucuaaggacaauucaauucggcuuuccgcugguggggacauuugggugacaagagaaccuuaugugucaugcgauccuggcaaguguuaucaauuugcccuuggacagggaacaacacuaaacaacaggcauucaaaugacacaguacaugauaggaccccuuaucgaacccuauugaugaaugaguuggguguuccauuucauuugggaaccaagcaagugugcauagcaugguccagcucaaguugucacgauggaaaagcauggcugcauguuuguguaacugggcaugaugaaaaugcaacugcuagcuucauuuacgaugggaggcuuguagauaguauugguucaugguccaaaaaaauccucaggacccaggagucggaaugcguuuguaucaauggaacuuguacaguaguaaugacugauggaagugcuucaggaagagcugauacuaaaauacuauucauugaagaggggaaaaucguucauauuagcccauugucaggaagugcucagcaugucgaggagugcuccuguuauccucgauauucuggugucagaugugucugcagagacaacuggaaaggcuccaauaggcccaucguagauauaaaugugaaagauuauagcauuguuuccaguuaugugugcucaggacuuguuggagacacacccagaaaaaacgacagcuccagcaguagccauugccugaauccuaacaaugaggaagggggucauggagugaaaggcugggccuuugaugauggaaaugacguguggaugggaagaacgaucagcgagaaguuacgcucagguuaugaaaccuucaaagucauuggaggcugguccaaaccuaacuccaaauugcagauaaauaggcaagucauaguugacagagguaauagguccgguuauucugguauuuucucuguugaaggcaaaagcugcaucaaucggugcuuuuauguggaguugauaaggggaaggaaacaggaaacugaagucugguggaccucaaacaguauuguuguguuuuguggcaccucagguacauauggaacaggcucauggccugauggggcggacaucaaucucaugccuauauaa

SEQ ID NO: 58225 - RNA, 1410 nt, Artificial Sequence
  derived and/or modified CDS sequence (wt) from neuraminidase__InfluenzaA__CAD29974
augaauccaaaucaaaagauaauaacaauuggcucuguuucucucacuauugccacaauaugcuuccuuaugcaaauugccauccugguaacuacuguaacauugcauuucaagcaauaugagugcaacucccccccaaacaaccaaguaaugcugugugaaccaacaauaauagaaagaaacauaacagagauaguguaucugaccaacaccaccauagagaaagaaauaugccccgaacuagcagaauacagaaauuggucaaagccgcaauguaaaauuacaggauuugcaccuuuuucuaaggacaauucaauucggcuuuccgcugguggagacauuugggugacaagagaaccuuaugugucaugcgauccuggcaaguguuaucaauuugcccuuggacagggaacaacacuaaacaacaggcauucaaaugacacaguacaugauaggaccccuuaucgaacccuauugaugaaugaguuggguguuccauuucauuugggaaccaagcaagugugcauagcaugguccagcucaaguugucacgauggaaaagcauggcugcauguuuguguaacugggcaugaugaaaaugcaacugcuagcuucauuuacgaugggaggcuuguagauaguauugguucaugguccaaaaauauccucaggacccaggagucggaaugcguuuguaucaauggaacuuguacaguaguaaugacugauggaagugcuucagaaagagcugauacuaaaauacuauucauugaagaggggaaaaucguucauauuagcccauugucaggaagugcucagcaugucgaggagugcuccuguuauccucgauauccuggugucagaugugucugcagagacaacuggaaaggcuccaauaggcccaucguagauauaaaugugaaagauuauagcauuguuuccaguuaugugugcucaggacuuguuggagacacacccagaaaaaacgacagcuccagcaguagcuauugcuggaauccuaacaaugagaaagggggucauggagugaaaggcugggccuuugaugauggaaaugacguguggaugggaagaacgaucagcgaggaguuacgcucagguuaugaaaccuucaaagucauuggaggcugguccaaaccuaacuccaaauugcagauaaauaggcaagucauaguugacagagguaauagguccgguuauucugguauuuucucuguugaaggcaaaagcugcaucaaucggugcuuuuauguggaguugauaaggggaaggaaacaggaaacugaagucugguggaccucaaacaguauuguuguguuuuguggcaccucagguacauauggaacaggcucauggccugauggggcggacaucaaucucaugccuauauaa

SEQ ID NO: 58226 - RNA, 1410 nt, Artificial Sequence
  derived and/or modified CDS sequence (wt) from neuraminidase__InfluenzaA__CAD29984
augaauccaaaucaaaagauaauaacgauuggcucuguuucucucaccauugccacaauaugcuuccuuaugcaaauugccauccugguaacuacuguaacguugcauuucaagcaauaugaaugcaacucccccccaaacaaccaagugaugcugugugaaccaacaauaauagaaagaaacauaacagagauaguguaucugaccaacaccaccauagagaaggaaauaugccccaaacuagcagaauacagaaauuggucaaagccgcaauguaacauuacaggauuugcaccuuuuucuaaggacaauucgauucggcuuuccgcugguggggacaucugggugacaagagaacauuaugugucaugcgaucgugacaaguguuaucaauuugcccuuggacagggaacaacacuaaacaacgggcauucaaaugacacaguacaugauaggaccccuuaucgaacccuauugaugaaugaguuggguguuccauuucauuugggaaccaagcaagugugcauagcaugguccagcucaaguugucaccauggaaaagcauggcugcauguuuguguaacgggggaugaugaaaaugcaacugcuagcuucauuuacaaugggaggcuuguagauaguaucgguucaugguccaaaaaaauccucaggacccaggagucggaaugcguuuguaucaauggaacuuguacaguaguaaugacugaugggagugcuucaggaaaagcugauacuaaaauacuauucauuaaggaggggaaaaucguucauacuagcucauugucaggaagugcucagcaugucgaggagugcuccuguuauccucgauauccuggugucagaugugucugcagagacaacuggaaaggcuccaauaggcccaucguagauauaaauguaaaggauuauagcauuguuuccaguuaugugugcucaggacuuguuggagacacacccagaaaaaacgacagcuccagcaguagccauugcuuggauccuaacaaugaggaagguggucauggagugaaaggcugggccuuugaugauggaaaugacguguggaugggaagaacgaucagcgagaaguuacgcucaggauaugaaaccuucaaagucauugaaggcugguccaaagcuaacuccaaauugcagauaaauaggcaagucauaguugacagagguaauagguccgguuauucugguauuuucucuguugaaagcaaaagcugcaucaauaggugcuuuuauguggaguugauaaggggaaggaaacaggaaacugaagucuuguggaccucaaacaguauuguuguguuuuguggcaccucagguacauauggaacaggcucauggccugauggggcggacaucaaucucaugccuauauaa

SEQ ID NO: 58227 - RNA, 1410 nt, Artificial Sequence
  derived and/or modified CDS sequence (wt) from neuraminidase__InfluenzaA__CAD29985
augaauccaaaucaaaagauaauaacaauuggcucuguuucucucaccauugccacaauaugcuuccuuaugcaaauugccauccugguaacuacuguaacauugcauuucaagcaguaugaaugcaacucccccccaaacaaccaaguaaugcugugugaaccaacaauaauagaaagaaacauaacagagauaguguaucugaccaacaccaccauagagaaggaaauaugccccaaacuagcagaauacagaaauuggucaaagccgcaauguaacauuacaggauuugcaccuuuuucuaaggacaauucgauucggcuuuccgcugggggggacaucugggugacaagagaaccuuaugugucaugcgauccugacaaguguuaucaauuugcccuugggcagggaacaacacuaaacaacgggcauucaaaugacacaguacaugauaggaccccuuaccggacccuauugaugaaugaguuggguguuccauuucauuugggaaccaagcaagugugcauagcaugguccagcucaaguugucacgauggaaaagcauggcugcauguuuguguaacuggggaugaugaaaaugcaacugcuagcuucauuuacaaugggaggcuuguagauaguauugguucaugguccaaaaaaauacucaggacccaggagucggaaugcguuuguaucaauggaacuuguacaguaguaaugacugaugggagcgcuucaggaaaagcugauacuaaaauacuauucauugaggaggggaaaaucguucauauuagcacauugucaggaagugcucagcaugucgaggagugcuccuguuauccucgauauccuggugucagaugugucugcagagacaacuggaaaggcuccaauaggcccaucguagauauaaauguaaaggauuauagcauuguuuccaguuaugugugcucaggacuuguuggagacacacccagaaaaaacgacagcuucagcaguagccauugccuagauccuaacaaugaggaagguggucauggagugaaaggcugggccuuugaugauggaaaugacguguggaugggaagaacgaucagcgagaaguuacgcucagguuaugaaaccuucaaagucaucgaaggcugguccaaaccuaacuccaaauugcagauaaauaggcaagucauaguugaaagagguaacagguccgguuauucugguauuuucuccguugaaggcaaaagcugcaucaaucggugcuuuuauguggaguugauaaggggaaggaaagaggaaacugaagucugguggaccucaaacaguauuguuguguuuuguggcaccucacguacauauggaacaggcucauggccugauggggcggauaucaaucucaugccuauauaa

SEQ ID NO: 58228 - RNA, 1410 nt, Artificial Sequence
  derived and/or modified CDS sequence (wt) from neuraminidase__InfluenzaA__CAD29988
augaauccaaaucaaaagauaauaacaauuggcucuguuucucucaccauugccacaauaugcuuccuuaugcaaauugccauccugguaacuacuguaacauugcauuucaagcaguaugaaugcaacucccccccaaacaaccaaguaaugcugugugaaccaacaauaauagaaagaaacauaacagagauaguguaccugaccaacaccaccauagagaaggaaauaugccccaaacuagcagaauacagaaauuggucaaagccgcaauguaacauuacaggauuugcaccuuuuucuaaggacaauucgauucggcuuuccgcugguggggacaucugggugacaagagaaccuuaugugucaugcgauccugacaaguguuaucaauuugcccuugggcagggaacaacacuaaacaacgggcauucaaaugacacaguacaugauaggaccccuuaccggacccuauugaugaaugaauuggguguuccauuucauuugggaaccaggcaagugugcauagcaugguccagcucaaguugucacgauggaaaagcauggcugcauguuuguguaacuggggaugaugaaaaugcaacugcuagcuucauuuacaaugggaggcuuguagauaguauugguucaugguccaaaaaaauacucagaacccaggagucggaaugcguuuguaucaauggaacuuguacaguaguaaugacugaugggagugcuucagaaaaagcugauacuaaaauacuauucauugaggaggggaaaaucguucauaucagcacauugucaggaagugcucagcaugucgaggagugcuccuguuauccucgauauccuggugucagaugugucugcagagacaacuggaaaggcuccaauaggcccaucguagauauaaauguaaaggauuauagcauuguuuccaguuaugugugcucaggacuuguuggagacacacccaggaaaaacgacagcuucagcaguagccauugccuagauccuaacaaugaggaagguggucauggagugaaaggcugggccuuugaugauggaaaugacguguggaugggaagaacgaucagcgagaaguuacgcucagguuaugaaaccuucaaagucaucgaaggcugguccaaaccuaacuccaaauuacagauaaauaggcaagucauaguugaaagagguaacagguccgguuauucugguauuuucuccguugaaggcaaaagcugcaucaaucggugcuuuuauguggaguugauaaggggaaggaaagaggaaacugaagucugguggaccucaaacaguauuguuguguuuuguggcaccucagguacauauggaacaggcucauggccugauggggcggauaucaaucucaugccuauauaa

SEQ ID NO: 58229 - RNA, 1410 nt, Artificial Sequence
  derived and/or modified CDS sequence (wt) from neuraminidase__InfluenzaA__CAD29990
augaauccaaaucaaaagauaauaacgauuggcucuguuucucucaccauugccacaauaugcuuccuuaugcaaauugccauccugguaacuacuguaacauugcauuucaagcaauaugaaugcaacucccccccaaacaaccaagugaugcugugugaaccaacaauaauagaaagaaacauaacagagauaguguaucugaccaacaccaccauagagaaggaaauaugccccaaacuagcagaauacagaaauuggucaaagccgcaauguaacauuacaggauuugcaccuuuuucuaaggacaauucgauucggcuuuccgcugguggggacaucugggugacaagagaaccuuaugugucaugcgauccugacaaguguuaucaauuugcccuuggacagggaacaacacuaaacaacggacauucaaaugacacaguacaugguaggaccccuuaucggacccuauugaugaaugaguuggguguuccauuucauuugggaaccaagcaagugugcauagcaugguccagcucaaguugucacgauggaaaagcauggcugcauguuuguguaacgggggaugaugaaaaugcaacugcuagcuucauuuacaaugggaggcuuguagauaguauugguucaugguccaaaaaaauccucaggacccaggagucggaaugcguuuguaucaauggaacuuguacaguaguaaugacugaugggagugcuucaggaaaagcugauacuaaaauacuauucauugaggaggggaaaaucguucauacuagccuauugucaggaagugcucagcaugucgaggagugcuccuguuauccucgauacccuggugucagaugugucugcagagacaacuggaaaggcuccaauaggcccaucguagauauaaauguaaaggauuauagcauuguuuccaguuaugugugcucaggacuuguuggagacacacccagaaaaaacgacaacuccagcaguagccauugcuuggauccuaacaaugaggaagguggucauggagugaaaggcugggccuuugaugauggaaaugacguguggaugggaagaacgaucagcgagaaguuacgcucaggauaugaaaccuucaaagucauugaaggcugguccaaaccuaacuccaaauugcagauaaauaggcaagucauaguugacagagguaauagguccgguuauucugguauuuucucuguugaaggcaaaagcugcaucaaucggugcuuuuauguggaguugauaaggggaaggaaacaggaaacugaagucuuguggaccucaaacaguauuguuguguuuuguggcaccucagguacauauggaacaggcucauggccugauggggcggacaucaaucucaugccuauauaa

SEQ ID NO: 58230 - RNA, 1410 nt, Artificial Sequence
  derived and/or modified CDS sequence (wt) from neuraminidase__InfluenzaA__CAD29991
augaauccaaaucaaaagauaauaacgauuggcucuguuucccucaccauugccacaauaugcuuccuuaugcaaauugccauccugguaacuacuguaacauugcauuucaagcaauaugaaugcaacucccccccaaacaaccaagugaugcugugugaaccaacaauaauagaaagaaacauaacagagauaguguaucugaccaacaccaccauagagaaggaaauaugccccaaacuagcagaauacagaaauuggucaaagccgcaauguaacauuacaggauuugcaccuuuuucuaaggacaauucgauucggcuuuccgcugguggggacaucugggugacaagagaaccuuaugugucaugcgauccugacaaguguuaucaauuugcccuuggacagggaacaacacuaaacaacggacauucaaaugacacaguacaugauaggaccccuuaucggacccuauugaugaaugaguuggguguuccauuucauuugggaaccaagcaagugugcauagcaugguccagcucaaguugucacgauggaaaagcauggcugcauguuuguguaacgggggaugaugaaaaugcaacugcuagcuucauuuacaaugggaggcuuguagauaguauugguucaugguccaaaaaaauccucaggacccaggagucggaaugcguuuguaucaauggaacuuguacaguaguaaugacugaugggagugcgucaggaaaagcugauacuaaaauacuauucaucgaggaggggaaaaucguucauacuagccuauugucaggaagugcucagcaugucgaggagugcuccuguuauccucgauacccuggugucagaugugucugcagagacaacuggaaaggcuccaauaggcccaucguagauauaaauguaaaggauuauagcauuguuuccaguuaugugugcucaggacuuguuggagacacacccagaaaaaacgacagcuccagcaguagccauugcuuggauccuaacaaugaggaagguggucauggagugaaaggcugggccuuugaugauggaaaugacguguggaugggaagaacgaucagcgagaaguuacgcucaggauaugaaaccuucaaagucauugaaggcugguccaaaccuaacuccaaauugcagauaaauaggcaagucauaguugacagagguaauagguccgguuauucugguauuuucucuguugaaggcaaaagcugcaucaaucggugcuuuuauguggaguugauaaggggaaggaaacaggaaacugaagucuuguggaccucaaacaguauuguuguguuuuguggcaccucagguacauauggaacaggcucauggccugauggggcggacaucaaucucaugccuauauaa

SEQ ID NO: 58231 - RNA, 1410 nt, Artificial Sequence
  derived and/or modified CDS sequence (wt) from neuraminidase__InfluenzaA__CAD29992
augaauccaaaucaaaagauaauaacgauuggcucuguuucucucaccauugccacaauaugcuuccuuaugcaaauugccauccugguaacuacuguaacauugcauuucaagcaauaugaaugcaacucccccccaaacaaccaagugaugcugugugaaccaacaauaauagaaagaaacauaacagagauaguguaucugaccaacaccaccauagagaaggaaauaugccccaaacuagcagaauacagaaauuggucaaagccgcaauguaacauuacaggauuugcaccuuuuucuaaggacaauucgauucggcuuuccgcugguggggacaucugggugacaagagaaccuuaugugucaugcgauccugacaaguguuaucaauuugcccuuggacagggaacaacacuaaacaacggacauucaaaugacacaguacaugauaggaccccuuaucggacccuauugaugaaugaguuggguguuccauuucauuugggaaccaagcaagugugcauagcaugguccagcucaaguugucacgauggaaaagcauggcugcauguuuguguaacuggggaugaugaaaaugcaacugcuagcuucauuuacaaugggaggcuuguagauaguauugguucaugguccaaaaaaauccucaggacccaggagucggaaugcguuuguaucaauggaacuuguacaguaguaaugacugaugggagugcuucaggaaaagcugauacuaaaauacuauucauugaggaggggaaaaucguucauacuagccuauugucaggaagugcucagcaugucgaggagugcuccuguuauccucgauacccuggugucagaugugucugcagagacaacuggaaaggcuccaauaggcccaucguagauauaaauguaaaggaucguagcauugucuccaguuaugugugcucaggacuuguuggagacacacccagaaaaaacgacagcuccagcaguagccauugcuuggauccuaacaaugaggaagguggucauggagugaaaggcugggccuuugaugauggaaaugacguguggaugggaagaacgaucagcgagaaguuacgcucaggauaugaaaccuucaaagucauugaaggcugguccaaaccuaacuccaaauugcagauaaauaggcaagucauaguugacagagguaauagguccgguuauucugguauuuucucuguugaaggcaaaagcugcaucaaucggugcuuuuauguggaguugauaaggggaaggaaacaggaaacugaagucuuguggaccucaaacaguauuguuguguuuuguggcaccucagguacauauggaacaggcucauggccugauggggcggacaucaaucucaugccuauauaa

SEQ ID NO: 58232 - RNA, 1410 nt, Artificial Sequence
  derived and/or modified CDS sequence (wt) from neuraminidase__InfluenzaA__CAD29993
augaauccaaaucaaaagauaauaacgauuggcucuguuucucucaccauugccacaacaugcuuccuuaugcaaauugccauccugguaacuacuguaacauugcauuucaagcaauaugaaugcaacucccccccaaacaaccaagugaugcugugugaaccaacaauaauagaaagaaacauaacagagauaguguaucugaccaacaccaccauagagaaggaaauaugccccaaacuagcagaauacagaaauuggucaaagccgcaauguaacauuacaggauuugcaccuuuuucuaaggacaauucgauucggcuuuccgcugguggggacaucugggugacaagagaaccuuaugugucaugcgauccugacaaguguuaucaauuugcccuuggacagggaacaacacuaaacaacgggcauucaaaugacacaguacaugauaggaccccuuaucggacccuauugaugaaugaguuggguguuccauuucauuugggaaccaagcaagugugcauagcaugguccagcucaaguugucacgauggaaaagcauggcugcauguuuguguaacgggggaugaugaaaaugcaacugcuagcuucauuuacaaugggaggcuuguagauaguauugguucaugguccaaaaaaauccucaggacccaggagucggaaugcguuuguaucaauggaacuuguacaguaguaaugacugaugggagugcuucaggaaaagcugauacuaaaauacuauucauugaggaggggaaaaucguucauacuagcccauugucaggaagugcucagcaugucgaggagugcuccuguuauccucgauauccuggugucagaugugucugcagagacaacuggaaaggcuccaauaggcccaucguagauauaaauguaaaggauuauagcauuguuuccaguuaugugugcucaggacuuguuggagacacacccagaaaaaacgacagcuccagcaguagccauugcuuggauccuaacaaugaggaagguggucauggagugaaaggcugggccuuugaugauggaaaugacguguggaugggaagaacgaucagcgagaaguuacgcucaggauaugaaaccuucaaagucauugaaggcugguccaaaccuaacuccaaauugcagauaaauaggcaagucauaguugacagagguaauagguccgguuauucugguauuuucucuguugaaggcaaaagcugcaucaaucggugcuuuuauguggaguugauaaggggaaggaaacaggaaacugaagucuuguggaccucaaacaguauuguuguguuuuguggcaccucagguacauauggaacaggcucauggccugauggggcggacaucaaucucaugccuauauaa

SEQ ID NO: 58233 - RNA, 1410 nt, Artificial Sequence; identical to SEQ ID NO: 53973
  derived and/or modified CDS sequence (wt) from neuraminidase__InfluenzaA__CAD29994

SEQ ID NO: 58234 - RNA, 1413 nt, Artificial Sequence; identical to SEQ ID NO: 48465
  derived and/or modified CDS sequence (wt) from neuraminidase__InfluenzaA__CAD57252

SEQ ID NO: 58235 - RNA, 1413 nt, Artificial Sequence
  derived and/or modified CDS sequence (wt) from neuraminidase__InfluenzaA__CAD57253
augaauccaaaucaaaaaauaauaaccauuggaucaaucaggauagcaaucggaauaauuagccuaauguugcaaauaggaaacauuauuucaauaugggcuagucacucaauccaaacuggaagucaaaaccacacuggaguaugcaaccaaagaaucaucacauaugaaaacagcaccugggugaaucacacauauguuaauauuaacaacaccaauguuauugcuggaaaggacaaaacuucagugacauuggccggcaauucaucucuuuguucuaucaguggaugggcuauauacacaaaagacaacagcauaagaauugguuccaaaggagauguuuuugucauaagagagccuuucauaucauguucucacuuggaaugcagaaccuuuuuucugacccaaggugcucuauuaaaugacaaacauucaaaugggaccguuaaggacagaagucccuauagggcuuuaaugagcuguccucuaggugaagcuccguccccauacaauucaaaguuugaaucaguugcuuggucagcaagcgcaugccaugauggcaugggcugguuaacaaucggaauuucugguccagacaauggagcaguggcuguacuaaaauacaacggcauaauaacugaaaccauaaaaaguuggaaaaagcaaauauuaagaacacaagagucugaaugugucugugugaacgggucauguuucaccauaaugaccgauggcccgaguaauggggccgccucguacaaaaucuucaagaucgaaaagggaaagauuacuaaaucaauagaguugaaugcacccaauuuucauuaugaggaauguuccuguuacccagacacuggcacagugauguguguaugcagggacaacuggcaugguucaaaucgacccugggugucuuuuaaucaaaaccuggauuaucaaauaggauacaucugcagugggguguucggugacaauccgcgucccaaagauggagagggcagcuguaauccagugacuguugauggagcaaacggaguaaagggguuuucauacaaauaugguaaugguguuuggauaggaaggacuaaaaguaacagacuuagaaagggguuugagaugauuugggauccuaauggauggacagauaccgacagugauuucucagugaaacaggauguuguggcaauaacugauuggucaggguacagcggaaguuucguucaacauccugaguuaacaggauuggacuguauaagaccuugcuucuggguugaguuagucagaggacugccaaaagaaaauacaacaaucuggacuagugggagcagcauuucuuuuuguggcguaaauagugauacugcaaacuggucuuggccagacggugcugaguugccguuuaccauugacaaguag

SEQ ID NO: 58236 - RNA, 1413 nt, Artificial Sequence
  derived and/or modified CDS sequence (wt) from neuraminidase__InfluenzaA__CAD57255
augaauccaaaucaaaaaauaauaaccauuggaucaaucaguauagcaaucggaauaauuagccuaauguugcaaauaggaaacauuauuucaauaugggcuagucacucaauccaaacuggaagucaaaaccacacuggaguaugcaaccaaagaaucaucacauaugaaaacagcaccugggugaaucacacauauguuaauauuaacaacaccaauguuauugcuggaaaggacaaaacuucggugacauuggccggcaauucaucucuuuguucuaucaguggaugggcuauauacacaaaagacaacagcauaagaauugguuccaaaggagauguuuuugucauaagagagccuuucauaucauguucucacuuggaaugcagaaccuuuuuucugacccaaggggcucuauuaaaugacaaacauucaaaugggaccguuaaggacagaagucccuauagggcuuuaaugagcuguccucuaggugaagcuccguccccauacaauucaaaguuugaaucaguugcuuggucagcaagcgcaugccaugauggcaugggcugguuaacaaucggaauuucugguccagacaauggagcaguggcuguacuaaaauacaacggcauaauaacugaaaccauaaaaaguuggaaaaagcaaauauuaagaacacaagagucugaaugugucugugugaacgggucauguuucaccauaaugaccgauggcccgaguaauggggccgcuucguacaaaaucuucaagaucgaaaagggaaagguuacuaaaucaauagaguugaaugcacccaauuuucauuaugaggaauguuccuguuacccagacacuggcacagugauguguguaugcagggacaacuggcaugguucaaaucgacccugggugucuuuuaaucaaaaccuggauuaucaaauaggauacaucugcagugggguguucggugacaauccgcgucccaaagauggagagggcagcuguaauccagugacuguugauggagcaaacggaguaaagggguuuucauacaaauaugguaaugguguuuggauaggaaggacuaaaaguaacagacuuagaaagggguuugagaugauuugggauccuaauggauggacagauaccgacagugauuucucagugaaacaggauguuguggcaauaacugauuggucaggguacagcggaaguuucguucaacauccugaguuaacaggauuggacuguauaagaccuugcuucuggguugaguuagucagaggacugccaaaagaaaauacaacaaucuggacuagugggagcagcauuucuuuuuguggcguaaauagugauacugcaaacuggucuuggccagacggugcugaguugccguuuaccauugacaaguag

SEQ ID NO: 58237 - RNA, 1413 nt, Artificial Sequence
  derived and/or modified CDS sequence (wt) from neuraminidase__InfluenzaA__CAD57256
augaauccaaaucaaaaaauaauaaccauuggaucaaucaguguggcaaucggaauaauuagucuaauguugcaaauaggaaauauuauuucaauaugggcuagucacucaauccaaacuggaagucaaaaccacacuggaauaugcaaccaaagaaucaucacauaugaaaacagcaccugggugaaucacacauauguuaauauuaacaacacuaauguuguugcuggaaaggacaaaacuucagugacauuggccggcaauucaucucuuuguucuaucaguggaugggcuauauacacaaaagacaacagcauaagaauugguuccaaaggagauguuuuugucauaagagagccuuucauaucauguucucacuuggaaugcagaaccuuuuuucugacccaaggugcucuauuaaaugacaaacauucaaaugggaccguuaaggacagaaguccuuauagggccuuaaugagcuguccucuaggugaagcuccgucuccauauaauucaaaguuugaaucaguugcuuggucagcaagcgcaugccaugauggcaugggcugguuaacaaucggaauuuccgguccagacaauggagcuguggcuguacuaaaauacaacggcauaauaacugaaaccauaaaaaguuggaaaaagcgaauauuaagaacacaagagucugaaugugucugugugaacgggucauguuuuaccauaaugaccgauggcccgaguaauggggccgcaucguacagaaucuucaaaaucgagaaggggagaguuacuaaaucaauagaguuggaugcacccaauuaucauuacgaggaauguuccuguuacccagacaccggcacagugaugugugugugcagggacaacuggcacgguucaaaucgaccuugggugucuuuuaaucaaaaccuggauuaucaaauaggauacaucugcagugggguguucggugacaauccgcgucccaaagauggagagggcagcuguaauccagugacuguugauggagcagacggaguaaagggguuuucauacaaauaugguaaugguguuuggauaggaaggacuaaaaguaacagacuuagaaagggguuugagaugauuugggauccuaauggauggacagauaccgacagugauuucucagugaaacaggauguuguggcaauaacugauuggucaggguacagcggaaguuucguucaacauccugaguuaacaggguuggacuguauaagaccuugcuucuggguugaguuagucagaggacggccuagagaaaauacaacaaucuggacuagugggagcagcauuucuuuuuguggcguaaauagugauacugcaaacuggucuuggccagacggugcugaguugccauucaccauugacaaguag

SEQ ID NO: 58238 - RNA, 1413 nt, Artificial Sequence
  derived and/or modified CDS sequence (wt) from neuraminidase__InfluenzaA__CAD57257
augaauccaaaucaaaaaauaauaaccauuggaucaaucaguauagcaaucggaauaauuagucuaauguugcaaauaggaaauauuauuucaauaugggcuagucacucaauccaaacuggaagucaaaaccacacuggaauaugcaaccaaagaaucaucacauaugaaaauagcaccugggugaaucacacauauguuaauauuaacaacacuaauguuguugcuggaaaggacaaaacuucagugacauuggccggcaauucaucucuuuguucuaucaguggaugggcuauauacacaaaagacaacagcauaagaauugguuccaaaggagauguuuuugucauaagagagccuuuuauaucauguucucacuuggaaugcagaaccuuuuuucugacccaaggugcucuauuaaaugacaaacauucaaaugggaccguuaaggacagaaguccuuauagggccuuaaugagcuguccucuaggcgaagcuccgucuccauauaauucaaaguuugaaucaguugcuuggucagcaagcgcaugccaugauggcaugggcugguuaacaaucggaauuucugguccagauaauggagcaguggcuguacuaaaauacaacggcauaauaacugaaaccauaaaaaguuggaaaaagcgaauauuaagaacacaagagucugaaugugucugugugaacgggucauguuuuaccauaaugaccgauggcccgaguaauggggccgccucguacaaaaucuucaagaucgagaaggggaagguuacuaaaucaauagaguugaaugcacccaauucucauuaugaggaauguuccuguuacccagacacuggcacagugauguguguaugcagggacaauuggcacgguucaaaucgaccuugggugucuuuuaaucaaaaccuggauuaucaaauaggauacaucugcagugggguguuuggugacaauccgcgucccaaagauggagagggcagcuguaauccagugacuguugauggagcagacggaguaaagggguuuucauacagauaugguaaugguguuuggauaggaaggacuaaaaguaacagacucagaaagggauuugagaugauuugggauccuaauggauggacagauaccgacagugauuucucaaugaaacaggauguuguggcaaugacugauuggucaggguacagcggaaguuucguucaacauccugagcuaacaggauuggacuguauaagaccuugcuucuggguugaauuagucagaggacggccuagagaaaauacaacaaucuggacuagugggagcagcauuucuuuuuguggcguaaauagugauacugcaaacuggucuuggccagacggugcugaguugccauucaccauugacaaguag

SEQ ID NO: 58239 - RNA, 1413 nt, Artificial Sequence
  derived and/or modified CDS sequence (wt) from neuraminidase__InfluenzaA__CAD57258
augaauccaaaucaaaaaauaauaaccauuggaucaaucaguguggcaaucggaauaauuagucuaauauugcaaauaggaaauauuauuucaauaugggcuagccacucaauccaaacuggaagucaaaacuacacuggaauaugcaaccaaagaaucauuacauaugaaaauagcaccuggguaaaucaaacauauguuaauauuaacaacacuaauguuguugcuggaaaggacaaaaccucaaugguauuggccggcaauucaucucuuugcccuauccguggaugggcuauauacacaaaagacaacagcauaagaauugguuccaaaggagauauuuuugucauaagagagccuuuuauaucauguucucauuuggaaugcagaaccuuuuuucugacccaaggugcucuauuaaaugacaagcauucaaaugggaccguuaaggacagaagcccuuauagggccuuaaugagcuguccucugggugaagcuccgucuccauacaauucaagauuugaaucaguugcuuggucagcaagcgcaugccaugauggcuugggcuggcuaacaaucggaauuucugguccagauaauggagcaguggcuguacuaaaauacaacggcauaauaacugaaaccauaaaaaguuggaagaagcaaaucuuaagaacacaagagucugaaugugucugugugaacgguucauguuuuaccauaaugaccgauggcccgaguaauagggccgcaucguacagaaucuucaaaaucgagaaggggagaguuacuaaaucaauagaguuggaugcacccaauuaucauuacgaagaauguuccuguuacccagacaccggcacaguaaugugugugugcagggacaauuggcacgguucaaaucgaccuugggugucuuuuaaucaaaaccuugauuaucaaauaggauacaucugcagugggguguucggugacaauccgcgucccaaagauggagaaggcagcuguaauccagugacuguugauggagcagacggaguaaagggguuuucauacagauaugguaaugguguuuggauaggaaggacuaaaaguaacagacuaagaaagggcuuugagaugauuugggauccuaauggauggacagauaccgacagugauuucucaaugaaacaggaugucguggcaaugacugauuggucaggguacagcggaaguuuuguucaacauccugagcuaacaggauuggacuguaugagaccuugcuucuggguugaauuagucagagggcuaccuagagaaaauacaacaaucuggacuagugggagcagcauuucuuuuuguggcguaaauagcgaaacugcaaacuggucuuggccagacggugcugaguugccauucaccauugacaaguag

SEQ ID NO: 58240 - RNA, 1413 nt, Artificial Sequence
  derived and/or modified CDS sequence (wt) from neuraminidase__InfluenzaA__CAD57259
augaauccaaaucaaaaaauaauaaccauuggaucaaucaguauugcaauuggaauaauuagucugauauugcaaauaggaaauauuauuucaauaugggcuagccacucaauccaaacugaaagucaaaaccacacuggaauaugcaaccaaagaaucauuacauaugaaaauagcaccugggugaaucaaacauauguuaauauuaacaacacuaauguugcugcuggaaaggacaaaaccucaaugacauuggccggcaauucaucucuuugcccuauccguggaugggcuauauacacaaaagacaacagcauaagaauugguuccaaaggagauauuuuugucauaagagagccuuuuauaucauguucucacuuggaaugcagaaccuuuuuucugacccaaggugcucuauuaaaugacaagcauucaaaugggaccguuaaggacagaagcccuuauagggccuuaaugagcuguccucuaggugaagcuccgucuccauacaauucaagauuugaaucaguugcuuggucagcaagcgcaugccaugauggcuugggcuggcuaacaaucggaaucucugguccagauaauggggcaguggcuguacuaaaauacaacggcauaauaacugaaaccauuaaaaguuggaagaagcgaauauuaagaacacaagagucugaaugugucuguaugaacgguucauguuuuaccauaaugaccgauggcccgaguaauggggccgcaucguacagaaucuucaaaaucgagaaggggagaguuacuaaaucaauagaguuggaugcacccaauuaucauuacgaggaauguucauguuacccagaaaccggcacagugaugugugugugcagggacaauuggcacgguucaaaucgaccuugggugucuuuuaaucaaaaccuggauuaucaaauaggauacaucugcagugggguguuuggugacaauccgcgucccaaagauggagaaggcagcuguaauccagugacuguugauggagcagacggaguaaagggguuuucauacagauaugguaaugguguuuggauaggaaggacuaaaaguaacagacucagaaagggauuugagaugauuugggauccuaauggauggacagauaccgacagugauuucucaaugaaacaagauaucguggcaaugacugauuggucaggguacagcggaaguuuuguucaacauccugagcuaacaggauuggacuguaugagaccuugcuucuggguugaauuagucagagggcuaccuagagaaaauacaacaaucuggacuagugggagcagcauuucuuuuuguggcguaaauagcgauacugcaaauuggucuuggccagacggugccgaguugccauucaccauugacaaguag

SEQ ID NO: 58241 - RNA, 1413 nt, Artificial Sequence
  derived and/or modified CDS sequence (wt) from neuraminidase__InfluenzaA__CAD57264
augaauccaaaucaaaaaauaauaaccauuggaucaaucaguguggcaaucggaauaauuagucuaauauugcaaauaggaaauauuauuucaauaugggcuagccacucaauccaaacuggaagucaaaacuacacuggaauaugcaaccaaagaaucauuacauaugaaaauagcaccuggguaaaucaaacauauguuaauauuaacaacacuaauguuguugcuggaaaggacaaaaccucaaugacauuggccggcaauucaucucuuugcccuauccguggaugggcuauauacacaaaagacaacagcauaagaauugguuccaaaggagauguuuuugucauaagagagccuuuuauaucauguucucacuuggaaugcagaaccuuuuuucugacccaaggugcucuauuaaaugacaagcauucaaaugggaccguuaaggacagaagcccuuauagggccuuaaugagcuguccucugggugaagcuccgucuccauacaauucaagauuugaaucaguugcuuggucagcaagcgcaugccaugauggcuugggcuggcuaacaaucggaauuucugguccagauaauggagcaguggcuguacuaaaauacaacgguauaauaacugaaaccauaaaaaguuggaagaagcaaaucuuaagaacacaagagucugaaugugucugugugaacgguucauguuuuaccauaaugaccgauggcccgaguaauggggccgcaucguacagaaucuucaaaaucgagaaggggagaguuacuaaaucaauagaguuggaugcacccaauuaucauuacgaggaauguuccuguuacccagacaccggcacagugaugugugugugcagggacaauuggcaugguucaaaucgaccuugggugucuuuuaaucaaaaccuggauuaucaaauaggauacaucugcagugggguguucggugacaauccgcgucccaaagauggagaaggcagcuguaauccagugacuguugauggagcaaacggaguaaagggguuuucauacagauaugguaaugguguuuggauaggaaggacuaaaaguaacagacucagaaagggauuugagaugauuugggauccuaauggauggacagauaccgacagugauuucucaaugaaacaggaugucguggcaaugacugauuggucaggguacagcggaaguuuuguucaacauccugagcuaacaggauuggacuguaugagaccuugcuucuggguugaauuagucagagggcuaccuagagaaaauacaacaaucuggacuagugggagcagcauuucuuuuuguggcguaaauagcgagacugcaaauuggucuuggccagacggugcugaguugccauucaccauugacaaguag

SEQ ID NO: 58242 - RNA, 1350 nt, Artificial Sequence
  derived and/or modified CDS sequence (wt) from neuraminidase__InfluenzaA__CBW54819
augaauccaaaucagaagauaauaaccaucggaucaaucuguaugguaauuggaauaguuagcuuaauguuacagauugggaacaugaucucaauaugggucagucauucaauucagacggggaaucagugccaagcugaaccgaucagcaauacuaaauuucuuacugagaaagcuguagcuucaguaacauuagcgggcaauucaucucuuugucccauuagcggaugggcuguauacaguaaggacaacaguauaaggaucgguuccaggggggauguguuuguuauaagagagccauucaucucaugcucccacuuggaaugcaggacuuucuuuuugacucagggagccuugcuaaaugacaagcacuccaaugggacugucaaagacagaagcccucacagaacauuaaugaguuguccugugggugaggcucccuccccauauaacucaagguuugagucuguugcuuggucagcuagugcuugccaugauggcaucaguugguugacaauuggaauuucugguccagacaauggggcuguggcuguauugaaauacaauggcauaauaacagacaccaucaagaguuggaggaacaacauacuaagaacucaagaaucugaaugugcauguguaaauggcucuugcuuuacuguaaugacugacggaccaaguagugggcaggcaucauauaagaucuucaaaauggaaaaagggaaagugguuaaaucagucgaauuggaugcuccuaauuaucacuaugaggagugcuccuguuauccugaugccggugaaaucacauguguguguagggauaauuggcauggcucaaauagaccauggguaucuuucaaucaaaaucuggaguaucgaauaggauauauaugcaguggaguuuucggagacaauccacgccccaacgauggaacagguaguugugguccgguguccccuaacggggcauaugggguaaaaggguuuucauuuaaauacggcgaugguguuuggaucgggaggaccaaaagcacuaauuccaggagcggcuuugaaaugguuugggacccaaauggguggacuggaacggacaguagcuuuucggugaagcaagauaucguagcaauaaccgauuggucaggauauagugggaguuuuguccagcauccagaacugacaggauuagauuguauaagaccuuguuucuggguugaguuaaucagagggcggccuaaagagagcacaauuuggaccaguggaagcagcauauccuuuugugguguaaauagugacacuguuaguuggucuuggccagacggugcugaguugccauucaccauugacaaguag

SEQ ID NO: 58243 - RNA, 1350 nt, Artificial Sequence
  derived and/or modified CDS sequence (wt) from neuraminidase__InfluenzaA__CBW54821
augaauccaaaucagaagauaauaaccaucggaucaaucuguauaguaauuggaauaguuagcuuaauguuacagauugggaacaugaucucaauaugggucagucauucaauucagacagggaaucagugccaagcugaaccgaucagcaauacuaaauuucuuacugagaaagcuguagcuucaguaacauuagcgggcaauucaucucuuugucccauuagcggaugggcuguauacaguaaggacaacaguauaaggaucgguuccaggggggauguguuuguuauaagagagccauucaucucaugcucccacuuggaaugcagaacuuucuuuuugacucagggagccuugcuaaaugacaagcacuccaaugggacugucaaagacagaagcccucacagaacauuaaugaguuguccugugggugaggcucccuccccauauaacucaagguuugagucuguugcuuggucagcuagugcuugccaugauggcaucaguugguugacaauuggaauuucugguccagacaauggggcuguggcuguauugaaauacaauggcauaauaacagacaccaucaagaguuggaggaacaacauacuaagaacucaagaaucugaaugugcauguauaaauggcucuugcuuuacuguaaugacugacggaccaaguagugggcaggcaucauauaagaucuucaaaauggaaaaagggaaagugguuaaaucagucgaacuagaugcuccuaauuaucacuaugaggagugcuccuguuauccugaugccggcgaaaucacauguguguguagggauaauuggcauggcucaaauaggccauggguaucuuucaaucaaaaucuggaguaucaaauaggauauauaugcaguggaguuuucggagacaauccacgccccaaugauggaacagguaguugugguccgguguccccuaacggggcauaugggguaaaaggguuuucauuuaaauacggcaaugguguuuggaucgggaggaccaaaagcacuaauuccaggagcggcuuugaaaugauuugggacccaaauggguggacuggaacggacaguagcuuuucagugaagcaagauaucguagcaauaacugauuggucaggauauagugggaguuuuguccagcauccagaacugacaggauuagauugcauaagaccuuguuucuggguugaguuaaucagagggcagccuaaagagagcacaauuuggaccaguggaagcagcauauccuuuugugguguaaauagugacacuguuaguuggucuuggccagacggugcugaguugccauucaccauugacaaguag

SEQ ID NO: 58244 - RNA, 1410 nt, Artificial Sequence
  derived and/or modified CDS sequence (wt) from neuraminidase__InfluenzaA__CCG47912
augaauccaaaucaaaagauaauaacaauugguucuguuucucucacuauugcaacaaugugccucuucaugcagauugccauccuaauaacuacuguaacauugcauuucaagcaauaugaaugcgauuccccugcaaacaaccaaguaaugccgugugaaccaauaauaauagaaaaaaacauaacaaaaauaguguauuugacuaacaccaccauagagaaagagguaugcccaaaauuaggggaauacaggaauuggucaaaaccacaaugcagaaucacaggauuugcaccuuuuuccaaggacaauucaauucggcuuucugcagguggggccauuugggucacgagagaaccuuaugugucaugcgauccuaacaaauguuaucaauuugcauuaggacagggaaccacacuggacaacagacauucaaaugacacaauacaugauagaaccccuuauagaacccuguugaugaaugaguuggguguuccauuucauuugggaaccagacaaguauguauagcaugguccagcucaaguugucacgauggaaaagcauggcugcauguuugugucacugggcaugauaaaaaugcaacugcuaguuucauuuaugacggaaagcuuguagacaguauuaguucauggucucaaaacauacuccggacucaggaaucagaguguguuuguaucaauggaaucugcacaguagugaugacugauggaagugcuucagggaaagcugacaccaaaauacuauucauugaagaagggaaggucauucauauuaguccauuguugggaagugcucagcauguggaagaauguuccuguuacccucgauacccugaugucagguguauuugcagggacaacuggaaagguucaaauaggcccaucguagacauaagaaugaaagauuauagcauugguuccaguuauaugugcucagggcuuguuggcgacacacccagaaacaaugaugggucuaguaauagcaauugccgaaauccuaacaaugagagagggaaucauggggugaaaggcugggccuuugaugauggaaaugacauauggaugggaagaacuaucagcaaggacucacgcuuagguuacgaaaccuuuaagguuguuggugguuggucccaacccaauuccaaauuccagauaaauaggcaagucauuguugacagcgauaauagaucagguuauucugguauuuucucuguugaggggaaaaguugcaucaauaggugcuuuuauguggagcuaauaagaggaaggaggcaggaaacuagaguaugguggacuucgaacaguauuguuguguucuguggcacuucaggcacuuaugggucaggcucauggccugauggggcagacaucaauuucaugccuauauaa

SEQ ID NO: 58245 - RNA, 1353 nt, Artificial Sequence
  derived and/or modified CDS sequence (wt) from neuraminidase__InfluenzaA__AAF74321
augaauccaaaucagaagauaauaaccauuggaucaaucuguaugguaguugggauaaucagcuugauguuacaaauuggaaacauaauaucaguaugggucagccacacaauucaaacuuggcacccaaaccagccugaaccaugcaaucaaagcaucaauuuuuacacugagcaggcugcagcuucagugacauuagcgggcaauuccucucucugcccuauuaguggaugggcuauauacagcaaggacaauaguauaagaauugguuccaaaggggauguguuuguuauaagagaaccauucaucucaugcucccauuuggaaugcagaaccuuuuucuugacccaaggagcccuauugaaugacaagcauucuaaugggaccgucaaagacaggagccccuauagaacuuuaaugagcuguccuguuggugaggcuccuuccccauacaacucaagguuugagucuguugcuuggucggcaagugcuugccaugauggcauuaguuggcuaacaauuggaauuuccgguccggauaauggggcuguggcuguguugaaauacaauggcauaauaacagacaccaucaagaguuggaggaacaacauacugaggacgcaagagucugaaugugcaugugugaaugguucuuguuuuacuguaaugacagauggaccgaguaaugaacaggccucauacaagauuuucaagauagaaaaggggaggguagucaaaucaguugaguugaacgccccuaauuaucauuaccaggaaugcuccuguuacccugaugcuggcgaaaucacaugugugugcagggauaauuggcauggcucgaaccgaccaugggugucuuucaaucagaaucuggaguaccaaauaggauauauaugcagugggguuuucggagacaguccacgccccaaugaugggacaggcaguugugguccagugucucuuaacggagcguauggaguaaaaggguuuucauuuaaauacggcaaugguguuuggaucgggagaaccaaaagcacuaguuccaggagcgguuuugaaaugauuugggauccaaauggguggaccgaaacagacaguagcuucucguugaagcaagacaucauagcaauaacugauuggucaggauacagcgggaguuuuauucaacauccagaacugacaggauuaaauugcaugagaccuugcuucuggguugaacuaaucagagggaggcccaaagagaaaacaaucuggacuagugggagcaguauaucuuucugugguguaaauagugacacuguggguuggucuuggccagacggugcugaguugccauucaccauugacaaguag

SEQ ID NO: 58246 - RNA, 1353 nt, Artificial Sequence
  derived and/or modified CDS sequence (wt) from neuraminidase__InfluenzaA__AAF74322
augaauccaaaucagaagauaauaaccauuggaucaaucugcaugguaguugggauaaucagcuugauguuacaaauuggaaacacaauaucaguaugggucagccacauaauuaaaacuuggcacccaaaccagccugaaccaugcaaucaaagcaucaauuuuuacacugagcaggcugcagcuucagugacauuagcgggcaauuccucucucugcccuauuaguggaugggcuauauacagcaaggacaauaguauaagaauugguuccaaaggggauguguuuguuauaagagaaccauucaucucaugcucccauuuggaaugcagaaccuuuuucuugacccaaggagcccuauugaaugacaagcauucuaaugggaccgucaaagacaggagccccuauagaacuuuaaugagcuguccuguuggugaggccccuuccccauacaacucaagguuugagucuguugcuuggucagcaagugcuugccaugauggcauuaguuggcuaacaauuggaauuuccgguccggauaauggggcuguggcuguguugaaauacaauggcauaauaacagacaccaucaagaguuggaggaacaacacacugaggacgcaagagucugaaugugcaugugugaaugguucuuguuuuacuguaaugacagauggaccgaguaaugaacaggccucauacaagauuuucaagauagaaaaggggaggguagucaaaucaguugaguugaacgccccuaauuaucauuacgaggaaugcuccuguuauccugaugcuggcgaaaucacaugugugugcagggauaauuggcauggcucgaaccgaccaugggugucuuucaaucagaaucuggaguaucaaauaggauauauaugcagugggguuuucggagacaguccacgccccaaugaugggacaggcaguugugguccagugucucuuaacggagcguauggaguaaaaggguuuucauuuaaauacggcaaugguguuuggaucgggagaaccaaaagcacuaguuccaggagcgguuuugaaaugauuugggauccaaauggguggaccgaaacagacaguagcuucucguugaagcaagacaucauagcgauaacugauuggucaggauacagcgggaguuuuauucaacauccagaacugacaggauuaaauugcaugagaccuugcuucuggguugaacuaaucagagggaggcccaaagagaaaacaaucuggacuagugggagcaguauaucuuucugugguguaaauagugacacuguggguuggucuuggccagacggugcugaguugccauucaccauugacaaguag

SEQ ID NO: 58247 - RNA, 1353 nt, Artificial Sequence
  derived and/or modified CDS sequence (wt) from neuraminidase__InfluenzaA__AAF74323
augaauccaaaucagaagauaauaaccauugggucaaucuguaugguaguugggauaaucagcuugauguuacaaauuggaaacauaauaucaguauggaucagccacauaauucaaacuuggcauccaaaccagccugaaccaugcaaucaaagcaucaauuuuuacacugagcaggcugcagcuucagugacauuagcgggcaauuccucucucugcccuauuaguggaugggcuauauacagcaaggacaauaguauaagaauugguuccaaaggggauguguuuguuauaagagaaccauucaucucaugcucccauuuggaaugcagaaccuuuuucuugacccaaggagcccuauugaaugacaagcauucuaaugggaccgucaaagacaggagccccuauagaacuuuaaugagcuguccuguuggugaggcuccuuccccauacaacucaagguuugagucuguugcuuggucagcaagugcuugccaugauggcauuaguuggcuaacaauuggaauuuccgguccggauaaugaggcuguggcuguguugaaauacaauggcauaauaacagacaccaucaggaguuggaggaacaacauacugaggacgcaagagucugaaugugcaugugugaaugguucuuguuuuacuguaaugacagauggaccgaguaaugaacaggccucauacaagauuuucaagauagaaaaggggaggguagucaaaucaguugaguugaacgccccuaauuaucauuacgaggaaugcuccuguuauccugaugcuggcgaaaucacaugugugugcagggauaauuggcauggcucgaaccgaccaugggugucuuucaaucagaaucuggaguaucaaauaggauauauaugcagugggguuuucggagacaguccccgccccaaugaugggacaggcaguugugguccagugucucuuaacggagcguauggaguaaaaggguuuucauuuaaguauggcaaugguguuuggaucgggagaaccaaaagcacuaguuccaggagcgguuuugaaaugauuugggauccaaauggguggaccgaaacagacaguagcuucucguugaagcaagacaucauagcaguaacugauuggucaggauacagcgggaguuuuauccaacacccagaacugacaggauuaaauugcaugagaccuugcuucuggguugaacuaaucagagggaggcccaaagagaaaacaaucuggacuagugggagcaguauaucuuucugugguguaaauagugacacuguggguuggucuuggccagacggugcugaguugccauucaccauugacaaguag

SEQ ID NO: 58248 - RNA, 1353 nt, Artificial Sequence
  derived and/or modified CDS sequence (wt) from neuraminidase__InfluenzaA__AAF74324
augaauccaaaucagaagauaauaaccauuggaucaaucuguaugguaguugggauaaucagcuugauguuacaaauuggaaacauaauaucaguaugggucagccacauaauucaaacuuggcauccaaaccagccugaaccaugcaaucaaagcaucaauuuuuacacugagcaggcugcagcuucagugacauuagcgggcaauuccucucucugcccuauuaguggaugggcuauauacagcaaggacaauaguauaagaauugguuccaaaggggauguguuuguuauaagagaaccauucaucucaugcucccauuuggaaugcagaaccuuuuucuugacccaaggagcccuauugaaugacaagcauucuaaugggaccgucaaagacaggagccccuauagaacuuuaaugagcuguccuguuggugaggcuccuuccccauacaacucaagguuugagucuguugcuuggucagcaagugcuugccaugauggcauuaguuggcuaacaauuggaauuuccgguccggauaauggggcuguggcuguguugaaauacaauggcauaauaacagacaccaucaagaguuggaggaacaacauacugaggacgcaagagucugaaugugcaugugugaaugguucuugcuuuacuguaaugacagauggaccgaguaaugaacaggccucauacaagauuuucaagauagaaaaggggaggguagucaaaucaguugaguugaacgccccuaauuaucauuacgaggaaugcuccuguuauccugaugcuggcgaaaucacaugugugugcagggauaauuggcauggcucgaaccgaccaugggugucuuucaaucagaaucuggaguaucaaauaggauauauaugcagugggguuuucggagacaguccacgccccaaugauggaacaggcaguugugguccagugucucuuaacggagcguauggaguaaaaggguuuucauuuaaauacggcaaugguguuuggaucgggagaaccaaaagcacuaguuccaggagcgguuuugaaaugauuugggauccaaauggguggaccgaaacagacaguagcuucucguugaagcaagacaucauagcaauaacugauuggucaggauacagcgggaguuuuauucaacauccagaacugacaggauuaaauugcaugagaccuugcuucuggguugaacuaaucagagggaggcccaaagagaaaacaaucuggacuagugggagcaguguaucuuucugugguguaaauagugacacuauggguuggucuuggccagacggugcugaguugccauucaccauugacaaguag

SEQ ID NO: 58249 - RNA, 1353 nt, Artificial Sequence
  derived and/or modified CDS sequence (wt) from neuraminidase__InfluenzaA__AAF74325
augaauccaaaucagaagauaauaaccauuggaucaaucugcaugguaguugggauaaucagcuugauguuacaaauuggaaacacaauaucaguaugggucagccacauaauuaaaacuuggcacccaaaccagccugaaccaugcaaccaaagcaucaauuuuuacacugagcaggcugcagcuucagugacauuagcgggcaauuccucucucugcccuauuaguggaugggcuauauacagcaaggacaauaguauaagaauugguuccaaaggggauguguuuguuauaagagaaccauucaucucaugcucccauuuggaaugcagaaccuuuuucuugacccaaggagcccuauugaaugacaagcauucuaaugggaccgucaaagacaggagccccuauagaacuuuaaugagcuguccuguuggugaggccccuuccccauacaacucaagguuugagucuguugcuuggucagcaagugcuugccaugauggcauuaguuggcuaacaauuggaauuuccgguccggauaauggggcuguggcuguguugaaauacaauggcauaauaacagacaccaucaagaguuggaggaacaacacacugaggacgcaagagucugaaugugcaugugugaaugguucuuguuuuacuguaaugacagauggaccgaguaaugaacaggccucauacaagauuuucaagauagaaaaggggaggguagucaaaucaguugaguugaacgccccuaauuaucauuacgaggaaugcuccuguuauccugaugcuggcgaaaucacaugugugugcagggauaauuggcauggcucgaaccgaccaugggugucuuucaaucagaaucuggaguaucaaauaggauauauaugcagugggguuuucggagacaguccacgccccaaugaugggacaggcaguugugguccagugucucuuaacggagcguauggaguaaaaggguuuucauuuaaauacggcaaugguguuuggaucgggagaaccaaaagcacuaguuccaggagcgguuuugaaaugauuugggauccaaauggguggaccgaaacagacaguagcuucucguugaagcaagacaucauagcgauaacugauuggucaggauacagcgggaguuuuauucaacauccagaacugacaggauuaaauugcaugagaccuugcuucuggguugaacuaaucagagggaggcccaaagagaaaacaaucuggacuagugggagcaguauaucuuucugugguguaaauagugacacuguggguuggucuuggccagacggugcugaguugccauacaccauugacaaguag

SEQ ID NO: 58250 - RNA, 1410 nt, Artificial Sequence; identical to SEQ ID NO: 48740
  derived and/or modified CDS sequence (wt) from neuraminidase__InfluenzaA__EPI239900

SEQ ID NO: 58251 - RNA, 1410 nt, Artificial Sequence; identical to SEQ ID NO: 49089
  derived and/or modified CDS sequence (wt) from neuraminidase__InfluenzaA__EPI221062

SEQ ID NO: 58252 - RNA, 1410 nt, Artificial Sequence; identical to SEQ ID NO: 48740
  derived and/or modified CDS sequence (wt) from neuraminidase__InfluenzaA__EPI534079

SEQ ID NO: 58253 - RNA, 1410 nt, Artificial Sequence; identical to SEQ ID NO: 48740
  derived and/or modified CDS sequence (wt) from neuraminidase__InfluenzaA__AGM53851

SEQ ID NO: 58254 - RNA, 1410 nt, Artificial Sequence
  derived and/or modified CDS sequence (wt) from neuraminidase__InfluenzaA__EPI731464
augaauccaaaccaaaagauaauaaccauugguucggucuguaugacaauuggaauggcuaacuuaauauuacaaauuggaaacauaaucucaauauggauuagccacucaauucaacuugggaaucaaaaucagauugaaacaugcaaucaaagcgucauuacuuaugaaaacaacacuuggguaaaucagacauauguuaacaucagcaacaccaacuuugcugcuggacagucagugguuuccgugaaauuggcgggcgguuccucucucugcccuguuaguggaugggcuauauacaguaaagacaacaguguaagaaucgguuccaagggggauguguuugucauaagggaaccauucauaucaugcucccccuuggaaugcagaaccuucuucuugacucaaggggccuugcuaaaugacaaacauuccaauggaaccauuaaagacaggagcccauaucgaacccuaaugagcuguccuauuggugaaguucccucuccauacaacucaagauuugagucagucgcuuggucagcaagugcuugucaugauggcaucaauuggcuaacaauuggaauuucuggcccagacaauggggcaguggcuguguuaaaguacaacggcauaauaacagacacuaucaagaguuggagaaacaauauauugagaacacaagagucugaaugugcauguguaaaugguucuugcuuuacuguaaugaccgauggaccaaguaauggacaggccucauacaagaucuucagaauagaaaagggaaagauagucaaaucagucgaaaugaaugccccuaauuaucacuaugaggaaugcuccuguuauccugauucuagugaaaucacaugugugugcagggauaacuggcauggcucgaaucgaccgugggugucuuucaaccagaaucuggaauaucagauaggauacauaugcagugggauuuucggagacaauccacgcccuaaugauaagacaggcaguugugguccaguaucgucuaauggagcaaauggaguaaaaggguuuucauucaaauacggcaaugguguuuggauagggagaacuaaaagcauuaguucaagaaacgguuuugagaugauuugggauccgaacggauggacugggacagacaauaacuucucaauaaagcaagauaucguaggaauaaaugaguggucaggauauagcgggaguuuuguucagcauccagaacuaacagggcuggauuguauaagaccuugcuucuggguugaacuaaucagagggcgacccaaagagaacacaaucuggacuagcgggagcagcauauccuuuugugguguaaacagugacacuguggguuggucuuggccagacggugcugaguugccauuuaccauugacaaguaa

SEQ ID NO: 58255 - RNA, 1410 nt, Artificial Sequence; identical to SEQ ID NO: 48740
  derived and/or modified CDS sequence (wt) from neuraminidase__InfluenzaA__EPI696973

SEQ ID NO: 58256 - RNA, 1410 nt, Artificial Sequence
  derived and/or modified CDS sequence (wt) from neuraminidase__InfluenzaA__EPI662593
augaauccaaaccaaaagauaauaaccauugguucgaucuguaugacaauuggaauggcuaacuuaauauuacaaauuggaaacauaaucucaauauggguuagccacucaauucaaauuggaaaucaaagccagauugaaacaugcaaucaaagcgucauuacuuaugaaaacaacacuuggguaaaucagacauauguuaacaucagcaacaccaacuuugcugcuggacagucagugguuuccgugaaauuagcgggcaauuccucucucugcccuguuaguggaugggcuauauacaguaaagacaacaguguaagaaucgguuccaagggggauguguuugucauaagggaaccauucauaucaugcucucccuuggaaugcagaaccuucuucuugacucaaggggccuugcuaaaugacaaacauuccaauggaaccauuaaagacaggagcccauaccgaacccuaaugagcuguccuauuggugaaguucccucuccauacaacucaagauuugagucagucgcuuggucagcaagugcuugucaugauggcaucaauuggcuaacaauuggaauuucuggcccagacaguggggcaguggcuguguuaaaguacaauggcauaauaacagacacuaucaagaguuggaggaacaauauauugagaacacaagagucugaaugugcauguguaaaugguucuugcuuuaccauaaugaccgauggaccaagugauggacaggccucauacaaaaucuucagaauagaaaagggaaagauaaucaaaucagucgaaaugaaagccccuaauuaucacuaugaggaaugcuccuguuacccugauucuagugaaaucacaugugugugcagggauaacuggcauggcucgaaucgaccgugggugucuuucaaccagaaucuggaauaucagaugggauacauaugcagugggguuuucggagacaauccacgcccuaaugauaagacaggcaguugugguccaguaucgucuaauggagcaaauggaguaaaaggauuuucauucaaauacggcaaugguguuuggauagggagaacuaaaagcauuaguucaagaaaagguuuugagaugauuugggauccgaauggauggacugggacugacaauaaauucucaauaaagcaagauaucguaggaauaaaugaguggucaggguauagcgggaguuuuguucagcauccagaacuaacagggcuggauuguauaagaccuugcuucuggguugaacuaauaagagggcgacccgaagagaacacaaucuggacuagcgggagcagcauauccuuuugugguguaaacagugacacuguggguuggucuuggccagacggugcugaguugccauuuaccauugacaaguaa

SEQ ID NO: 58257 - RNA, 1410 nt, Artificial Sequence; identical to SEQ ID NO: 58256
  derived and/or modified CDS sequence (wt) from neuraminidase__InfluenzaA__EPI830229

SEQ ID NO: 58258 - RNA, 1410 nt, Artificial Sequence; identical to SEQ ID NO: 55849
  derived and/or modified CDS sequence (wt) from neuraminidase__InfluenzaA__AGU92879

SEQ ID NO: 58259 - RNA, 1410 nt, Artificial Sequence; identical to SEQ ID NO: 55848
  derived and/or modified CDS sequence (wt) from neuraminidase__InfluenzaA__AGU92857

SEQ ID NO: 58260 - RNA, 1410 nt, Artificial Sequence; identical to SEQ ID NO: 55847
  derived and/or modified CDS sequence (wt) from neuraminidase__InfluenzaA__AGU92846

SEQ ID NO: 58261 - RNA, 1410 nt, Artificial Sequence; identical to SEQ ID NO: 55858
  derived and/or modified CDS sequence (wt) from neuraminidase__InfluenzaA__AGU92835

SEQ ID NO: 58262 - RNA, 1410 nt, Artificial Sequence; identical to SEQ ID NO: 55834
  derived and/or modified CDS sequence (wt) from neuraminidase__InfluenzaA__AGU92703

SEQ ID NO: 58263 - RNA, 1410 nt, Artificial Sequence
  derived and/or modified CDS sequence (wt) from neuraminidase__InfluenzaA__EPI643117
augaauccaaaucaaaagauaauaacgauuggcucuguuucucucaccauuuccacaauaugcuucuucaugcaaauugccauuuugauaacuacuguaacauugcauuucaagcaauaugaauucaacucccccccaaacaaccaagugaugcugugugaaccaacaauaauagaaagaaacauaacagaaauaguguauuuaacuaacaccaccauagagaaggaaauaugccccaaaccagcagaauacagaaauuggucaaaaccgcaauguggcauuacaggauuugcaccuuucucuaaggacaauucgauuaggcuuuccgcugguggggacaucugggugacaagagaaccuuaugugucaugcgauccugacaaguguuaucaauuugcccuuggacagggaacaacacuaaacaacgugcauucaaauaacacaguacgugauaggaccccuuaucggacucuauugaugaaugaguuggguguuccuuuccaucuggggaccaagcaagugugcauagcaugguccagcucaaguugucacgauggaaaagcauggcugcauguuuguauaacgggggaugauaaaaaugcaacugcuagcuucauuuacaaugggaggcuuguagauaguguuguuucaugguccaaagauauucucaggacccaggagucagaaugcauuuguaucaauggaacuuguacaguaguaaugacugauggaagugcuucaggaaaagcugauacuaaaauacuauucauugaggaggggaaaaucguucauacuagcacauugucaggaagugcucagcaugucgaagagugcucuugcuauccucgauauccuggugucagaugugucugcagagacaacuggaagggcuccaaucggcccaucguagauauaaacauaaaggaucauagcauuguuuccaguuauguguguucaggacuuguuggagacacacccagaaaaaacgacagcuccagcaguagccauuguuuggauccuaacaaugaagaagguggucauggagugaaaggcugggccuuugaugauggaaaugacguguggaugggaagaacaaucaacgagacgucacgcuuaggguaugaaaccuucaaagucauugaaggcugguccaacccuaaguccaaauugcagacaaauaggcaagucauaguugacagaggugauagguccgguuauucugguauuuucucuguugaaggcaaaagcugcaucaaucggugcuuuuauguggaguugauuaggggaagaaaagaggaaacugaagucuuguggaccucaaacaguauuguuguguuuuguggcaccucagguacauauggaacaggcucauggccugauggggcggaccucaaucucaugccuauauaa

SEQ ID NO: 58264 - RNA, 1410 nt, Artificial Sequence
  derived and/or modified CDS sequence (wt) from neuraminidase__InfluenzaA__EPI675797
augaauccaaaucaaaagauaauaacgauuggcucuguuucucucaccauuuccacaauaugcuucuucaugcaaauugccauuuugauaacuacuguaacauugcauuucaagcaauaugaauucaacucccccccaaacaaccaagugaugcugugugaaccaacaauaauagaaagaaacauaacagaaauaguguauuuaacuaacaccaccauagagaaggaaauaugccccaaaccagcagaauacagaaauuggucaaaaccgcaauguggcauuacaggauuugcaccuuucucuaaggacaauucgauuaggcuuuccgcugguggggacaucugggugacaagagaaccuuaugugucaugcgauccugacaaguguuaucaauuugcccuuggacagggaacaacacuaaacaacgugcauucaaauaacaaaguacgugauaggaccccuuaucggacucuauugaugaaugaguuggguguuccuuuccaucuggggaccaagcaagugugcauagcaugguccagcucaaguugucacgauggaaaagcauggcugcauguuuguauaacgggggaugauaaaaaugcaacugcuagcuucauuuacaaugggaggcuuguagauaguguuguuucaugguccaaagauauucucaggacccaggagucagaaugcauuuguaucaauggaacuuguacaguaguaaugacugauggaagugcuucaggaaaagcugauacuaaaauacuauucauugaggaggggaaaaucguucauacuagcacauugucaggaagugcucagcaugucgaagagugcucuugcuauccucgauauccuggugucagaugugucugcagagacaacuggaagggcuccaaucggcccaucguagauauaaacauaaaggaucauagcauuguuuccaguuauguguguucaggacuuguuggagacacacccagaaaaaacgacagcuccagcaguagccauuguuuggauccuaacaaugaagaagguggucauggagugaaaggcugggccuuugaugauggaaaugacguguggaugggaagaacaaucaacgagacgucacgcuuaggguaugaaaccuucaaagucauugaaggcugguccaacccuaaguccaaauugcagacaaauaggcaagucauaguugacagaggugauagguccgguuauucugguauuuucucuguugaaggcaaaagcugcaucaaucggugcuuuuauguggaguugauuaggggaagaaaagaggaaacugaagucuuguggaccucaaacaguauuguuguguuuuguggcaccucagguacauauggaacaggcucauggccugauggggcggaccucaaucucaugccuauauaa

SEQ ID NO: 58265 - RNA, 1410 nt, Artificial Sequence; identical to SEQ ID NO: 58263
  derived and/or modified CDS sequence (wt) from neuraminidase__InfluenzaA__EPI578429

SEQ ID NO: 58266 - RNA, 1410 nt, Artificial Sequence; identical to SEQ ID NO: 58263
  derived and/or modified CDS sequence (wt) from neuraminidase__InfluenzaA__EPI614405

SEQ ID NO: 58267 - RNA, 1350 nt, Artificial Sequence; identical to SEQ ID NO: 58185
  derived and/or modified CDS sequence (wt) from neuraminidase__InfluenzaA__AAT73329

SEQ ID NO: 58268 - RNA, 1350 nt, Artificial Sequence
  derived and/or modified CDS sequence (wt) from neuraminidase__InfluenzaA__AAW80723
augaauccaaaucagaagauaauaaccaucggaucaaucuguaugguaacuggaauaguuagcuuaauguuacaaauugggaacaugaucucaauaugggucagucauucaauucacacagggaaucaacaccaaucugaaccaaucagcaauacuaauuuucuuacugagaaagcuguggcuucaguaaaauuagcgggcaauucaucucuuugccccauuaacggaugggcuguauacaguaaggacaacaguauaaggaucgguuccaagggggauguguuuguuauaagagagccguucaucucaugcucccacuuggaaugcagaacuuucuuuuugacucagggagccuugcugaaugacaagcacuccaaugggacugucaaagacagaagcccucacagaacauuaaugaguuguccugugggugaggcucccuccccauauaacucaagguuugagucuguugcuuggucagcaagugcuugccaugauggcaccaguugguugacgauuggaauuucuggcccagacaauggggcuguggcuguauugaaauacaauggcauaauaacagacacuaucaagaguuggaggaacaacauacugagaacucaagagucugaaugugcauguguaaauggcucuugcuuuacuguaaugacugacggaccaaguaauggucaggcaucacauaagaucuucaaaauggaaaaagggaaagugguuaaaucagucgaauuggaugcuccuaauuaucacuaugaggaaugcuccuguuauccuaaugccggagaaaucacaugugugugcagggauaauuggcauggcucaaaucggccauggguaucuuucaaucaaaauuuggaguaucaaauaggauauauaugcaguggaguuuucggagacaauccacgccccaaugauggaacagguaguugugguccgguguccucuaacggggcauaugggguaaaaggguuuucauuuaaauacggcaauggugucuggaucgggagaaccaaaagcacuaauuccaggagcggcuuugaaaugauuugggauccaaauggguggacugaaacggacaguagcuuuucagugaaacaagauaucguagcaauaacugauuggucaggauauagcgggaguuuuguccagcauccagaacugacaggacuagauugcauaagaccuuguuucuggguugaguugaucagagggcggcccaaagagagcacaauuuggacuagugggagcagcauaucuuuuugugguguaaauagugacacuguggguuggucuuggccagacggugccgaguugccauucaccauugacaaguag

SEQ ID NO: 58269 - RNA, 1350 nt, Artificial Sequence; identical to SEQ ID NO: 58268
  derived and/or modified CDS sequence (wt) from neuraminidase__InfluenzaA__EF541467

SEQ ID NO: 58270 - RNA, 1398 nt, Artificial Sequence; identical to SEQ ID NO: 57317
  derived and/or modified CDS sequence (wt) from neuraminidase__InfluenzaA__EPI439509

SEQ ID NO: 58271 - RNA, 1410 nt, Artificial Sequence
  derived and/or modified CDS sequence (wt) from neuraminidase__InfluenzaA__EPI482776
augaauacaaaucaaagaauaauaaccauugggacaguuugcaugauaguuggaauaaucagucuauuguuacagauaggaaacauagucucguuauggauuagccauucaauucagaccggaugggaaaaucacacugugaugugcaaccaaagugucauuacauauguaaauaacacaugggugaaccgaacuuaugugaacauuagcaauaucaagauugcuacuauacaggaugugacuucgauuauacuagccggcaauucaucacuuugcccaguaagugggugggcuguauacagcaaagacaauagcauaaggauugguucuaaaggggacauuuuugucauaagagaaccauucauuucaugcucucaauuggaaugcagaaccuuuuuucugacccaaggcgcuuugcugaaugacaaacauucuaauggaaccgucaaggacaggagucccuauagaacccugaugagcugccccaucggugaagccccaucuccguacaacucaagguucgaaucaguugcuuggucagcaagugcaugccaugaugggaugggauggcuaacaaucgggaucucugguccagauaauggagcaguagcuguuuuaaaauacaaugguauaauaacagauacaauaaaaaguuggagaaacaaaauauuaagaacacaagagucggaauguguuuguaugaacgguucuuguuuuacuguguuaacugaugguccaagcaaugggcaagccucguacaaaauauuuaaaguggaaaaaggaaaaauaauuaagucaauugagcuggaugcccccaauuaccacuaugaggaaugcucauguuauccugauacaggcaaaguaauguguguuugcagagacaauuggcaugccucgaaccggccaugggucucuuucaaucagaaucuugacuaccaaauaggauacauaugcaguggaguuuucggcgauaacccgcguuccaaugaugggaagggcaauuguggcccaguacuuucuaauggagcaaauggagugaaaggauucucauauagauaugguaaugguguuuggauaggaagaacuaagaguaucaacuccagaaguggauuugaaaugauuugggauccaaauggguggacugaaacugauaguaguuucucuaugaagcaggacauuauagcauugaaugauuggucaggauacaguggaaguuuuguccaacauccugaauuaacaggaaugaauugcauaaggccuuguuucuggguggaauuaaucagagggcaacccaaggaaagcacaaucugggcuagcggaagcagcaucucuuucuguggcguaaauagugaaaccgcaagcuggucauggccagacggagcugaucugccauucaccauugacaaguag

SEQ ID NO: 58272 - RNA, 1410 nt, Artificial Sequence
  derived and/or modified CDS sequence (wt) from neuraminidase__InfluenzaA__EPI745533
augaauccaaaccaaaagauaauaaccauugguucggucuguauaacaauuggaauggcuaacuuaauauuacaaauuggaaacauaaucucaauauggauuagccacucaauucaacuugggaaucaaaaucagauugaaacaugcaaucaaagcgucauuacuuaugaaaacaacacuuggguaaaucagacauauguuaacaucagcaacaccaacuuugcugcuggacagucagugguuuccgugaaauuagcgggcaauuccucucucugcccuguuaguggaugggcuauauacaguaaagacaacaguauaagaaucgguuccaagggggauguguuugucauaagggaaccauucauaucaugcucccccuuggaaugcagaaccuucuucuugacucaaggggccuugcuaaaugacaaacauuccaauggaaccauuaaagacaggagcccauaucgaacccuaaugagcuguccuauuggugaaguucccucuccauacaacucaagauuugagucagucgcuuggucagcaagugcuugucaugauggcaucaguuggcuaacaauuggaauuucuggcccagacaauggggcaguggcuguguuaaaguacaacggcauaauaacagacacuaucaagaguuggagaaacaauauauugagaacacaagagucugaaugugcauguguaaaugguucuuguuuuacuguaaugaccgauggaccaagugauggacaggccucauacaagaucuucagaauagaaaagggaaagauagucaaaucagucgaaaugaaugccccuaauuaucacuaugaggaaugcuccuguuauccugauucuagugaaaucacaugugugugcagggauaacuggcauggcucgaaucgaccgugggugucuuucaaccagaaucuggaauaucagauaggauacauaugcagugggauuuucggagacaauccacgcccuaaugauaagacaggcaguugugguccaguaucgucuaauggagcaaauggaguaaaaggauuuucauucaaauacggcaaugguguuuggauagggagaacuaaaagcauuaguucaagaaacgguuuugagaugauuugggauccgaacggauggacugggacagacaauaacuucucaauaaagcaagauaucguaggaauaaaugaguggucaggauauagcgggaguuuuguucagcauccagaacuaacagggcuggauuguauaaaaccuugcuucuggguugaacuaaucagagggcgacccaaagagaacacaaucuggacuagcgggagcagcauauccuuuugugguguaaacagugacacuguggguuggucuuggccagacggugcugaguugccauuuaccauugacaaguaa

SEQ ID NO: 58273 - RNA, 1410 nt, Artificial Sequence; identical to SEQ ID NO: 48740
  derived and/or modified CDS sequence (wt) from neuraminidase__InfluenzaA__AEE69012

SEQ ID NO: 58274 - RNA, 1410 nt, Artificial Sequence; identical to SEQ ID NO: 48740
  derived and/or modified CDS sequence (wt) from neuraminidase__InfluenzaA__EPI176609

SEQ ID NO: 58275 - RNA, 1410 nt, Artificial Sequence; identical to SEQ ID NO: 48740
  derived and/or modified CDS sequence (wt) from neuraminidase__InfluenzaA__EPI176472

SEQ ID NO: 58276 - RNA, 1410 nt, Artificial Sequence
  derived and/or modified CDS sequence (wt) from neuraminidase__InfluenzaA__EPI280340
augaauccaaaccaaaagauaauaaccauugguucggucuguauaacaauuggaauggcuaacuuaauauuacaaauuggaaacauaaucucaauauggauuagccacucaauucaacuugggaaucaaaaucagauugaaacaugcaaucaaagcgucauuacuuaugaaaacaacacuuggguaaaucagacauauguuaacaucagcaacaccaacuuugcugccggacagucagugguuuccgugaaauuagcgggcaauuccucucucugcccuguuaguggaugggcuauauacaguaaagacaacaguauaagaaucgguuccaagggggauguguuugucauaagggaaccauucauaucaugcucccccuuggaaugcagaaccuucuucuugacucaaggggccuugcuaaaugacaaacauuccaauggaaccauuaaagacaggagcccauaucgaacccuaaugagcuguccuauuggugaaguucccucuccauacaacucaagauuugagucagucgcuuggucagcaagugcuugucaugauggcaucaguuggcuaacaauuggaauuucuggcccagacaauggggcaguggcuguguuaaaguacaacggcauaauaacagacacuaucaagaguuggagaaacaauauauugagaacacaagagucugaaugugcauguguaaaugguucuuguuuuacuguaaugaccgauggaccaagugauggacaggccucauacaagaucuucagaauagaaaagggaaagauagucaaaucagucgaaaugaaugccccuaauuaucacuaugaggaaugcuccuguuauccugauucuagugaaaucacaugugugugcagggauaacuggcauggcucgaaucgaccgugggugucuuucaaccagaaucuggaauaucagauaggauacauaugcagugggauuuucggagacaauccacgcccuaaugauaagacaggcaguugugguccaguaucgucuaauggagcaaauggaguaaaaggauuuucauucaaauacggcaaugguguuuggauagggagaacuaaaagcauuaguucaagaaacgguuuugagauaauuugggauccgaacggauggacugggacagacaauaacuucucaauaaagcaagauaucguaggaauaaaugaguggucaggauauagcggaaguuuuguucagcauccagaacuaacagggcuggauuguauaagaccuugcuucuggguugaacuaaucagagggcgacccaaagagaacacaaucuggacuagcgggagcagcauauccuuuugugguguaaacagugacacuguggguuggucuuggccagacggugcugaguugccauuuaccauugacaaguaa

SEQ ID NO: 58277 - RNA, 1410 nt, Artificial Sequence; identical to SEQ ID NO: 48749
  derived and/or modified CDS sequence (wt) from neuraminidase__InfluenzaA__EPI240318

SEQ ID NO: 58278 - RNA, 1410 nt, Artificial Sequence; identical to SEQ ID NO: 48749
  derived and/or modified CDS sequence (wt) from neuraminidase__InfluenzaA__EPI183133

SEQ ID NO: 58279 - RNA, 1410 nt, Artificial Sequence; identical to SEQ ID NO: 48749
  derived and/or modified CDS sequence (wt) from neuraminidase__InfluenzaA__EPI369141

SEQ ID NO: 58280 - RNA, 1410 nt, Artificial Sequence
  derived and/or modified CDS sequence (wt) from neuraminidase__InfluenzaA__EPI482787
augaauacaaaucaaagaauaauaaccauugggacagucugucugauaguuggaauaguuagucuauuauugcagauaggaaauauagucucauuauggauaagccauucaauucagacuggaaaaagaagccacccugaaacaugcagccaaaaugucauuacauaugaaaacaacacaugggugaaccaaacuuauguaaacaucagcaauaccaacauuguugauggacagggcguaacuucaauaauacuagccggcaauuccccucuuuguccaauaagugggugggcuauauacagcaaagacaacagcauaagaauugguuccaaaggagacauuuuugucauaagagaaccauucauuucaugcucucacuuggagugcagaacuuuuuuucugacccaaggugcuuugcugaaugacaggcauucuaauggaaccgucaaggacaggaguccuuauagaaccuuaaugagcugcccgauuggugaagcuccaucuccuuauaauucaagguucgaaucaguugcuuggucagcaagugcaugccaugauggaaugggguggcuaacaaucgggauuuccgguccagauaauggagcaguagcuguuuugaaauacaaugguauaauaacagauacaauaaaaaguuggagaaacaaaauacuaagaacacaagaaucagaauguguuuguauaaacgguucauguuucacuauaaugacugauggcccaagcaaugggcaggccucguacaaaauauucaaaauggagaaagggaagauuauuaagucaguugagcuggaugcaccuaacuaccacuaugaggaaugcuccuguuacccugauacaggcaagguggugugugugugcagagacaauuggcaugcuucgaaucgaccauggguuacuuuugaucagaaucuuaauuaucagauuggguacauaugcagugggguuuucggugauaacccgcguucuaaugaugggaaaggcaauuguggcccaguaccuucuaauggagcaaauggagugaaaggauucucauuuagauauggcaaugguguuuggauaggaagaacuaaaaguaucaguucuagaaguggauuugagaugauuugggauccaaauggauggacggaaacugauaguaguuucucuauaaagcaggauaucauagcauuaacugauuggucaggauauaguggaaguuuuguccagcaucccgaauuaacaggaaugaacugcauaaagccuuguuucuggguagaguuaaucagaggacaacccaaggagagcacaaucuggacuaguggaagcagcauuucuuucuguggcguggacagugaaaccguaagcuggucauggccagacggagcugauuugccauucaccauugacaaguag

SEQ ID NO: 58281 - RNA, 1410 nt, Artificial Sequence
  derived and/or modified CDS sequence (wt) from neuraminidase__InfluenzaA__EPI482790
augaauacaaaucaaagaauaauaaccauugguacaguuugucugauaguuggaauaauuagucuauuguuacagauaggaaacaugguuucguuauggaucagccauucaauucagacuggagggaaaaaucacacugagaugugcaaccaaaaugucauuacauauguaaauaacacaugggugaaccgaacuuauguaaacauuagcaauaccaaaauuguuaauguacaggacgugguuucaguaauauuaaccggcaauuccucucuuugcccaauaaguggaugggcuauauacagcaaagacaauagcauaaggauugguucuaaaggggacauuuuugucauaagagaaccauucauuucaugcucucacuuggaaugcagaacuuuuuuucugacccaaggugcuuugcugaaugacaagcauucuaauggaaccgucaaggacaggagucccuauagaaccuuaaugagcugccccgucggugaagcuccaucuccauauaacucaagguucgaaucaguugcuuggucagcaagugcaugccaugaugggaugggauggcuaacaaucggaaucuccgguccagauaauggagcaguagcuguuuuaaaauacaacgguauaauaacagauacaauaaaaaguuggagaaacaaaauauuaagaacacaagagucagaauguguuuguaugaacgguucuuguuuuacuguauuaacugauggcccaagcaaugggcaagcaucguacaaaauauucaagauggaaaaaggaaaaauaauuaaaucaauugagcuggaugcacccaauuaccacuaugaggaaugcuccuguuauccugaugcaggcaaaguaauguguguuugcagagacaacuggcaugccucgaaccggccaugggucucuuucgaucagaaucuugauuaucaaauaggguacauaugcagugggguuuucggugauaacccgcguucuaaugauggaaagggcaauuguggcccaguacauucuaauggagcaaauggagugaaaggauucucauauagauaugguaaugguguuuggauaggaaggacuaaaaguaucaacuccagaaguggguuugaaaugauuugggauccaaauggguggacuggaacugauaguaguuucucuaugaagcaggauauuauagcauuaacugauuggucaggauacaguggaaguuuuguccaacauccugaauuaacaggaaugaauugcauaaggcccuguuucuggguagaauuaaucagagggcaacccaaggaaaacacaaucugggcuagcggaagcagcaucucuuucugugguguaaauggugaaaccgcaagcuggucauggccagacggagcugaucugccauucaccauugacaaguag

SEQ ID NO: 58282 - RNA, 1410 nt, Artificial Sequence
  derived and/or modified CDS sequence (wt) from neuraminidase__InfluenzaA__EPI291797
augaauacaaaucaaagaauaauaaccauugggacaguuuguaugauaguuggaauaaucagucuauuguuacagauaggaaacauagucucguuauggauuagccauucaauucagaccggaugggaaaaucacacugagaugugcaaccaaagugucauuacauauguaaauaacacaugggugaaccgaacuuaugugaacauuagcaauaccaacauugcuacuauacaggaugugacuucgauuauacuagccggcaauuccucacuuugcccaguaaguggaugggcuauauacagcaaagacaauagcauaaggauugguucuaaaggggacauuuuugucauaagagaaccauucauuucaugcucucaauuggaaugcagaaccuuuuuucugacccaaggcgcuuugcugaaugacaagcauucuaauggaaccgucaaggacaggagucccuauagaacccugaugagcugccccaucggugaagcuccaucuccguacaacucaagguucgaaucaguugcuuggucagcaagugcaugccaugaugggaugggauggcuaacaaucgggaucucugguccagauaauggagcaguagcuguuuuaaaauacaacgguauaauaacagauacaauaaaaaguuggagaaacaaaauauuaagaacacaagagucggaauguguuuguaugaacgguucuuguuuuacuguauuaacugauggcccaagcaaugggcaagccucguacaaaauauuuaaaguggaaaaaggaaaaauaauuaagucaauugagcuggaugcccccaauuaccacuaugaggaaugcucauguuauccugauacaggcaaaguaauguguguuugcagagacaauuggcaugccucgaaccggccaugggucucuuucaaucagaaucuugacuaucaaauaggauacauaugcaguggaguuuucggugauaacccgcguucuaaugaugggaagggcaauuguggcccaguacuuucuaauggagcaaauggagugaaaggauucucauauagauaugguaaugguguuuggauaggaagaacuaagaguaucaacuccagaaguggguuugagaugauuugggauccaaauggguggacugaaacugauaguaguuucucuaugaagcaggacauuauagcauuaacugauuggucaggauacaguggaaguuuuguccaacauccugaauuaacaggaaugaauugcauaaggccuuguuucuggguggaauuaaucagagggcaacccaaggaaagcacaaucugggcuagcggaagcagcaucucuuucuguggcguaaauagugaaaccgcaagcuggucauggccagacggagcugaucugccauucaccauugacaaguag

SEQ ID NO: 58283 - RNA, 1410 nt, Artificial Sequence; identical to SEQ ID NO: 58282
  derived and/or modified CDS sequence (wt) from neuraminidase__InfluenzaA__EPI482798

SEQ ID NO: 58284 - RNA, 1410 nt, Artificial Sequence
  derived and/or modified CDS sequence (wt) from neuraminidase__InfluenzaA__EPI638969
augaauacaaaccaaagaauaauaaccauugggacaguuugcaugauaguuggaaugaucagucuauuguuacaaauaggaagcauagucucguuauggauuagccauucaauucagaccggaugggaaaaucacacuggggugugcaaccaaagugucauuacauauguaaauaacacaugggugaaccgaacuuaugugaacauuagcaauaucaagauugcuacuauacaggaugugacuccgauuauacuagccggcaauucaucacuuugcccaguaaaugggugggcuguauacagcaaagacaauagcauaaggauugguucuaaaggggacauuuuugucauaagagaaccauucauuucaugcucucaauuggaaugcagaaccuucuuucugacccaaggugcuuugcugaaugacaaacauucuaauggaaccgucaaggacaggagucccuauagaacccugaugagcugccccaucggugaagccccaucuccguacaacucaagguucgaaucaguugcuuggucagcaagugcaugccaugaugggaugggauggcuaacaaucgggaucucugguccagauaauggagcaguagcuguuuuaaaauacaacgguauaauaacagauacaauaaaaaguuggagaaacaaaauauuaagaacacaagagucggaguguguuuguaugaacgguucuuguuuuacuguauugacugauggcccaagcaaugggcaagccucguacaaaauauuuaaaguggaaaaaggaaaaauaauuaagucaauugagcuggaugcccccaauuaccacuaugaagaaugcucauguuauccugauacaggcaaaguaauguguguuugcagagacaauuggcaugccucgaaccggccaugggucucuuucaaucagaaucuugacuaucaaauaggauacauaugcaguggaguuuucggugauaacccucguucuaccgaugggaagggcaauuguggcccaguacuuucuaauggagcaaauggagugaaaggauucucauauagguaugguaaugguguuuggauaggaagaacuaagaguaucaacuccagaaguggauuugaaaugauuugggauccaaauggguggacugaaacugauaguaguuucucuaugaagcaggacauuauagcauugaaugauuauucaggauacaguggaaguuuuguccaacauccugaauuaacaggaaugaauugcauaaggccuuguuucuggguggaguuaaucagagggcaacccaaggaaagcacaaucugggcuagcggaagcagcaucucuuucuguggcguaaauagugaaaccgcaagcuggucauggccagacggagcugaucugccauucgccauugacaaguag

SEQ ID NO: 58285 - RNA, 1410 nt, Artificial Sequence
  derived and/or modified CDS sequence (wt) from neuraminidase__InfluenzaA__ABI19012
augaauacaaaucaaagaauaauaaccauugggacaguuugucugauaguuggaauaauuagucuauuguuacagauaggaaacauggucucguuauggauuagccauucaauucagaccggagggaaaaaucacacugagaugugcaaccaaaaugucauuacauauguaaauaacacaugggugaaccgaacuuauguaaacauuagcaauaccaaaauuguuaauguacaggacgugguuucaguaauacuaaccggcaauuccucucuuugcccaauaagugggugggcuauauacagcaaagacaauagcauaaggauugguucuaaaggggacauuuuugucauaagagaaccauucauuucaugcucucacuuggaaugcagaacuuuuuuucugacccaaggcgcuuugcugaaugacaagcauucuaauggaaccgucaaggacaggagucccuauagaaccuuaaugagcugccccaucggugaagcuccaucuccguauaacucaagguucgaaucaguugcuuggucagcaagugcaugccaugaugggaugggauggcuaacaaucgggaucuccgguccagauaauggagcaguagcuguuuuaaaauacaacgguauaauaacagacacaauaaaaaguuggagaaacaaaauauuaagaacacaagagucagaauguguuuguaugaacgguucuuguuuuacuguauuaacugauggcccaagcaaugggcaagccucguacaaaauauucaaaauggaaaaaggaaaaauaauuaaaucaauugagcuggaugcacccaauuaccacuaugaggaaugcuccuguuauccugaugcaggcaaaguaauguguguuugcagagacaacuggcaugccucgaaccggccaugggucucuuucgaucagaaucuugacuaucagauaggguacauaugcagugggguuuucggugauaacccgcguucuaaugauggaaagggcaauuguggcccaguacauucuaauggagcaaauggagugaaaggauucucauauagauaugguaaugguguuuggauaggaagaacuaaaaguaucaacuccagaaguggguuugagaugauuugggauccaaauggguggacuggaacugauaguaguuucucuaugaagcaggauauuauagcauuaacugauuggucaggauacaguggaaguuuuguccggcauccugaauuaacaggaaugaauugcauaaggccuuguuucuggguagaauuaaucagagggcaacccaaggaaaacacaaucugggcuagcggaagcagcaucucuuucuguggcguaaauggugaaaccgcaagcuggucauggccagacggagcugaucugccauucaccauugacaaguag

SEQ ID NO: 58286 - RNA, 1410 nt, Artificial Sequence
  derived and/or modified CDS sequence (wt) from neuraminidase__InfluenzaA__EPI687791
augaauccaaaccaaaagauaauaaccauugguucgaucuguaugacaauuggaauggcuaacuuaauauuacaaauuggaaacauaaucucaauauggguuagccacucaauucaaauuggaaaucaaagccagauugaaacaugcaaucaaagcgucauuacuuaugaaaacaacacuuggguaaaucagacauauguuaacaucagcaacaccaacuuugcugcuagacagucagugguuuccgugaaauuagcgggcaauuccucucucugcccuguuaguggaugggcuauauacaguaaagacaacaguguaagaaucgguuccaagggggauguguuugucauaagggaaccauucauaucaugcucucccuuggaaugcagaaccuucuucuugacucaaggggccuugcuaaaugacaaacauuccaauggaaccauuaaagacaggagcccauaucgaacccuaaugagcuguccuauuggugaaguucccucuccauacaacucaagauuugagucagucgcuuggucagcaagugcuugucaugauggcaucaauuggcuaacaauuggaauuucuggcccagacaguggggcaguggcuguguuaaaguacaauggcauaauaacagacacuaucaagaguuggaggaacaauauauugagaacacaagagucugaaugugcauguguaaaugguucuugcuuuaccauaaugaccgauggaccaagugauggacaggccucauacaaaaucuucagaauagaaaagggaaagauaaucaaaucagucgaaaugaaagccccuaauuaucacuaugaggaaugcuccuguuacccugauucuagugaaaucacaugugugugcagggauaacuggcauggcucgaaucgaccgugggugucuuucaaccagaaucuggaauaucagaugggauacauaugcagugggguuuucggagacaauccacgcccuaaugauaagacaggcaguugugguccaguaucgucuaauggagcaaauggaguaaaaggauuuucauucaaauacggcaaugguguuuggauagggagaacuaaaagcauuaguucaagaaaagguuuugagaugauuugggauccgaauggauggacugggacugacaauaaauucucaauaaagcaagauaucguaggaauaaaugaguggucaggguauagcgggaguuuuguucagcauccagaacuaacagggcuggauuguauaagaccuugcuucuggguugaacuaauaagagggcgacccgaagagaacacaaucuggacuagcgggagcagcauauccuuuugugguguaaacagugacacuguggguuggucuuggccagacggugcugaguugccauuuaccauugacaaguaa

SEQ ID NO: 58287 - RNA, 1410 nt, Artificial Sequence
  derived and/or modified CDS sequence (wt) from neuraminidase__InfluenzaA__EPI841266
augaauccaaaccaaaagauaauaaccauugguucgaucuguaugacaauuggaauggcuaacuuaauauuacaaauuggaaacauaaucucaauauggguuagccacucaauucaaauuggaaaucaaagccagauugaaacaugcaaucaaagcgucauuacuuaugaaaacaacacuuggguaaaucagacauauguuaacaucagcaacaccaacuuugcugcuagacagucagugguuuccgugaaauuagcgggcaauuccucucucugcccuguuaguggaugggcuauauacaguaaagacaacaguguaagaaucgguuccaagggggauguguuugucauaagggaaccauucauaucaugcucucccuuggaaugcagaaccuucuucuugacucaaggggccuugcuaaaugacaaacauuccaauggaaccauuaaagacaggagcccauaucgaacccuaaugagcuguccuauuggugaaguucccucuccauacaacucaagauuugagucagucgcuuggucagcaagugcuugucaugauggcaucaauuggcuaacaauuggaauuucuggcccagacaguggggcaguggcuguguuaaaguacaauggcauaauaacagacacuaucaagaguuggaggaacaauauauugagaacacaagagucugaaugugcauguguaaaugguucuugcuuuaccauaaugaccgauggaccaagugauggacaggccucauacaaaaucuucagaauagaagagggaaagauaaucaaaucagucgaaaugaaagccccuaauuaucacuaugaggaaugcuccuguuacccugauucuagugaaaucacaugugugugcagggauaacuggcauggcucgaaucgaccgugggugucuuucaaccagaaucuggaauaucagaugggauacauaugcagugggguuuucggagacaauccacgcccuaaugauaagacaggcaguugugguccaguaucgucuaauggagcaaauggaguaaaaggauuuucauucaaauacggcaaugguguuuggauagggagaacuaaaagcauuaguucaagaaaagguuuugagaugauuugggauccgaauggauggacugggacugacaauaaauucucaauaaagcaagauaucguaggaauaaaugaguggucaggguauagcgggaguuuuguucagcauccagaacuaacagggcuggauuguauaagaccuugcuucuggguugaacuaauaagagggcgacccgaagagaacacaaucuggacuagcgggagcagcauauccuuuugugguguaaacagugacacuguggguuggucuuggccagacggugcugaguugccauuuaccauugacaaguaa

SEQ ID NO: 58288 - RNA, 1410 nt, Artificial Sequence
  derived and/or modified CDS sequence (wt) from neuraminidase__InfluenzaA__EPI291844
augaauacaaaccaaagaauaauaaccauugggacaguuugucugauaguuggaauaauuagucuauuguuacagauaggaaccaugguuucguuauggaucagccacucaauucagacuggagggaaaaaucacacugagaugugcaaccaaaaugucauuacauauguaaauaacacaugggugaaccgaacuuauguaaacauuagcaauaccaaaauuguuaauguacaggacgugguuucaguaauauugaccggcaauuccucucuuugcccaauaagugggugggcuauauacagcaaagacaauagcauaaggauugguucuaaaggggacauuuuugucauaagagaaccauucauuucaugcucucacuuggaaugcagaacuuuuuuucugacccaaggcgcuuugcugaaugacaagcauucuaauggaacugucaaggacaggagucccuauagaaccuuaaugagcugccccaucggugaagcuccaucuccauauaacucaagguucgaaucaguugcuuggucagcaagugcaugccaugaugggaugggauggcuaacaaucggaaucuccgguccagauaauggagcaguagcuguuuuaaaauacaacgguauaauaacagauacaauaaaaaguuggagaaacaaaauauuaagaacacaagagucagaauguguuuguaugaacgguucuuguuuuacuguauuaacugauggcccaagcaaugggcaagcaucguacaaaauauucaagauggaaaagggaaaaauaauuaaaucaauugagcuggaugcaccuaauuaccacuaugaggaaugcuccuguuauccugaugcaggcaaaguaauguguguuugcagagacaacuggcaugcuucgaaccggccaugggucucuuuugaucagaaucuugauuaucaaauaggguacauaugcagugggguuuucggugauaacccgcguucuaaugauggaaagggcaauuguggcccaguacauucuaauggagcaaauggagugaaaggauucucauauaaauaugguaaugguguuuggauaggaaggacuaaaaguaucaacuccagaaguggguuugaaaugauuugggauccaaauggguggacuggaacugauaguaguuucucuaugaagcaggauauuauagcauuaacugauuggucaggauacaguggaaguuuuguccaacauccugaauuaacaggaaugaauugcauaaggcccuguuucuggguagaauuaaucagagggcaacccaaggaaaacacaaucugggcuaguggaagcagcaucucuuucugugguguaaauggugaaaccgcaagcuggucauggccagacggagcugaucugccauucaccauugacaaguag

SEQ ID NO: 58289 - RNA, 1410 nt, Artificial Sequence
  derived and/or modified CDS sequence (wt) from neuraminidase__InfluenzaA__EPI558120
augaauacaaaucaaagaauaauaaccauugggacaguuugcaugauaguuggaauuaucagucuauuguuacagauaggaaacauagucucauuauggauuagccauucaauucagaccggaugggaaaaucacacugagaugugcaaccaaagugucauuacauauguaaauaacacauggaugaaccgaacuuaugugaacauuagcaauaucaaaauugcuacuauacaggauguaacuucgauuguacuagccggcaauucaucacuuugcccaguaagugggugggcuguauacagcaaagacaauagcauaaggauuggcucuaaaggggacauuuuugucauaagagaaccauucauuucaugcucucaauuggaaugcagaaccuuuuuucugacccaaggcgcuuugcugaaugacaaacauucuaauggaaccgucaaggacaggagucccuauagaacccugaugagcugccccaucggugaagccccaucuccguacaacucaagguucgaaucaguugcuuggucagcaagugcaugccaugaugggaugggauggcuaacaaucgggaucucuggcccagauaauggagcaguagcuguuuuaaaauacaacgguauaauaacagauacaauaaaaaguuggagaaacaaaauauuaaggacacaagagucggaauguguuuguauaaaugguucuuguuuuacuguguuaacugaugguccaagcaauggucaagccucguacaaaauauuuaaaguggaaaaaggaaaaauaauuaagucaauugagcuggacgcccccaauuaccacuaugaggaaugcucauguuauccugauacaggcaaaguaauguguauuugcagagacaauuggcaugccucgaaccggccaugggucucuuucgaucagaaucuugacuaucaaauaggauacauaugcaguggaguuuucggugauaacccgcguuccaaugaugggaagggcaauugcggcccaguacuuucuaauggagcaaauggagugaaaggauucucauauagauaugguaaugguguuuggauaggacgaacuaagaguaucaacuccagaaguggauuugaaaugauuugggauccaaauggguggacugaaacugauaguaguuucucuaugaagcaggacauuauagcauugaaugauuggucaggauacaguggaaguuuuguccaacauccugaauuaacaggaaugaauugcauaaggccuuguuucuggguggaauuaaucagaggacaacccaaggaaagcacaaucugggcuagcggaagcagcaucucuuucuguggcguaaauagugaaaccgcaagcuggucauggccagacggagcugaucugccauucaccauugacaaguag

SEQ ID NO: 58290 - RNA, 1410 nt, Artificial Sequence
  derived and/or modified CDS sequence (wt) from neuraminidase__InfluenzaA__EPI564138
augaauccaaaucaaaagauaauaacgauuggcucuguuucucucaccaucuccacaauaugcuucuucaugcaaauugccaucuugauaacuacuguaacauugcauuucaagcaauaugaauucaacucccccccaaacaaccaagugaugcugugugaaccaacaauaauagaaagaaacauaacagagauaguguauuugaccaacaccaccauagagaaggaaauaugccccaaaccagcagaauacagaaauuggucaaaaccgcaauguggcauuacaggauuugcaccuuucucuaaggacaauucgauuaggcuuuccgcugguggggacaucugggugacaagagaaccuuaugugucaugcgauccugacaaguguuaucaauuugcccuuggacagggaacaacacuaaacaacgugcauucaaauaacacaguacgugauaggaccccuuaucggacucuauugaugaaugaguuggguguuccuuuccaucuggggaccaagcaagugugcauagcaugguccagcucaaguugucacgauggaaaagcauggcugcauguuuguauaacgggggaugauaaaaaugcaacugcuagcuucauuuacaaugggaggcuuguagauaguguuguuucgugguccaaagauauucucaggacccaggagucagaaugcguuuguaucaauggaacuuguacaguaguaaugacugauggaagugcuucaggaaaagcugauacuaaaauacuauucauugaggaggggaaaaucguccauacuagcaaauugucaggaagugcucagcaugucgaagagugcucuugcuauccucgauauccuggugucagaugugucugcagagacaacuggaaaggcuccaaucggcccaucguagauauaaacauaaaggaucauagcauuguuuccaguuauguguguucaggacuuguuggagacacacccagaaaaaacgacagcuccagcaguagccauuguuuggauccuaacaaugaagaagguggucauggagugaaaggcugggccuuugaugauggaaaugacguauggauggggagaacaaucaacgagacgucacgcuuaggguaugaaaccuucaaagucguugaaggcugguccaacccuaaguccaaauugcagauaaauaggcaagucauaguugacagaggugauagguccgguuauucugguauuuucucuguugaaggcaaaagcugcaucaaucggugcuuuuauguggaguugauuaggggaagaaaagaggaaacugaagucuuguggaccucaaacaguauuguuguguuuuguggcaccucagguacauauggaacaggcucauggccugauggggcggaccucaaucucaugccuauauaa

SEQ ID NO: 58291 - RNA, 1410 nt, Artificial Sequence
  derived and/or modified CDS sequence (wt) from neuraminidase__InfluenzaA__ANM92825
augaauccaaaccaaaagauaauaaccauugguucgaucuguaugacaauuggaauggcuaacuuaauauuacaaauuggaaacauaaucucaauauggguuagccacucaauucaaauuggaaaucaaagccagauugaaacaugcaaucaaagcgucauuacuuaugaaaacaacacuuggguaaaucagacauauguuaacaucagcaacaccaauuuugcugcuggacagucagugguuuccgugaaauuagcgggcaauuccucucucugcccuguuaguggaugggcuauauacaguaaagacaacaguguaagaaucgguuccaagggggauguguuugucauaagggaaccauucauaucaugcucucccuuggaaugcagaaccuucuucuugacucaaggggccuugcuaaaugacaaacauuccaauggaacaauuaaagacaggagcccauaucgaacccuaaugagcuguccuauuggugaaguucccucuccauacaacucaagauuugagucagucgcuuggucagcaagugcuugucaugauggcaucaauuggcuaacaauuggaauuucuggcccagacaguggggcaguggcuguguuaaaguacaauggcauaauaacagacacuaucaagaguuggaggaacaauauauugagaacacaagagucugaaugugcauguguaaaugguucuugcuuuaccauaaugaccgauggaccaagugauggacaggccucauacaaaaucuucagaauagaaaagggaaagauaaucaaaucagucgaaaugaaagccccuaauuaucacuaugaggaaugcuccuguuacccugauucuagugaaaucacaugugugugcagggauaacuggcauggcucgaaucgaccgugggugucuuucaaccagaaucuggaauaucagaugggauacauaugcagugggguuuucggagacaauccacgcccuaaugauaagacaggcaauugugguccaguaucgucuaauggagcaaauggaguaaaaggauuuucauucaaauacggcaaugguguuuggauagggagaacuaaaagcauuaguucaagaaaagguuuugagaugauuugggauccgaauggauggacugggacugacaauaaauucucaauaaagcaagauaucguaggaauaaaugaguggucaggguauagcgggaguuuuguucagcauccagaacuaacagggcuggauuguauaagaccuugcuucuggguugaacuaauaagagggcgacccgaagagaacacaaucuggacuagcgggagcagcauauccuuuugugguguaaacagugacacuguggguuggucuuggccagacggugcugaguugccauuuaccauugacaaguaa

SEQ ID NO: 58292 - RNA, 1410 nt, Artificial Sequence
  derived and/or modified CDS sequence (wt) from neuraminidase__InfluenzaA__EPI291694
augaauacaaaccaaagaauaauaaccaucggaacagucugucugauaguuggaauaguuagucuauuauugcagauaggaaauauagucucguuauggauaagccauucaauucagacuggagaaaaaaaccacucugagguaugcaaccaaaauaucauuacauaugaaaacaaaacaugggugaaccaaacuuauguaaacauuagcaauaccaacauugcugagggacagggcgugacuucaauaauacuagccggcaauuccucucuuugcccaguaagugggugggcuauauacagcaaagacaauagcauaaggauugguuccaaaggagacauuuuugucauaagagaaccauucauuucaugcucucacuuggagugcagaaccuuuuuucugacccaaggugcuuugcuaaaugacaggcauucuaauggaaccgucaaggacaggagcccuuacagaaccuuaaugagcugccugaccggugaagcuccaucuccguacaauucaagauuugaaucaguugcuuggucagcaagugcaugccaugauggaaugggauggcuaacaaucgggauuuccgguccagauaauggagcaguggcuguuuugaaauacaaugguauaauaacagauacaauaaaaaguuggagaaacaaaauacuaagaacacaagagucagaauguguuuguauaaacgguucauguuuuacuauaaugacugauggcccaagcaaugggcaagccucguacaaaauauucaaaauggagaaagggaagauuauuaagucaguugagcuggaugcaccuaauuaccacuaugaggaaugcuccuguuacccugauacaggcaaaguggugugugugugcagagacaauuggcaugcuucaaaucgaccgugggucucuuucgaucagaaucuugauuaucagauaggguacauaugcagugggguuuucggugauaacccgcguucuaaugaugggaaagguaauuguggcccaguaccuucuaauggagcaaauggagugaagggauucucauuuagauaugguaaugguguuuggauaggaagaacuaaaaguaucaucucuagaaguggauuugagaugauuugggacccaaauggauggacggaaacugauaguaguuucucuauaaagcaggauauuauagcauuaacugauuggucaggauacaguggaaguuuuguccaacauccugaauuaacaggaaugaacugcauaaggccuuguuuuuggguagaguuaaucagaggacaacccaaggagaguacaaucuggacuagugggagcagcauuucuuucuguggcguggacagugaaacugcaagcuggucauggccagacggggcugaucugccauucaccauugacaaguag

SEQ ID NO: 58293 - RNA, 1410 nt, Artificial Sequence; identical to SEQ ID NO: 49226
  derived and/or modified CDS sequence (wt) from neuraminidase__InfluenzaA__EPI241027

SEQ ID NO: 58294 - RNA, 1410 nt, Artificial Sequence; identical to SEQ ID NO: 48750
  derived and/or modified CDS sequence (wt) from neuraminidase__InfluenzaA__EPI177405

SEQ ID NO: 58295 - RNA, 1410 nt, Artificial Sequence; identical to SEQ ID NO: 49024
  derived and/or modified CDS sequence (wt) from neuraminidase__InfluenzaA__EPI242475

SEQ ID NO: 58296 - RNA, 1410 nt, Artificial Sequence
  derived and/or modified CDS sequence (wt) from neuraminidase__InfluenzaA__EPI590131
augaaugcaaaucaaagaauaauaaccauugggacaguuugucugauaauuggaauaauuagucuauuguuacagauagggaacaugguuucguuguggaucagccauucaauucagacuggagggaaaaaucacacugagaugugcaaucaaaaugucaucacauauguaaacaacacaugggugaaccgaacuuauguaaacaucagcaauaccaaaauuguuaauguacaagacgugguuucgguaauauuaaccggcaauuccucucuuugcucaauaaguggcugggcuauauacagcaaagacaauagcauaaggauugguucuaaaggagacauuuuugucauaagagaaccauucauuucaugcucucacuuggaaugcagaacuuuuuuccugacccaaggcgcuuugcugaaugacaagcauucuaaugggaccgucaaggacaggagucccuauagaacuuuaaugagcugucccauuggugaagcuccaucuccauauaacucaagauucgaaucaguugcuuggucagcaagugcaugccaugaugggauaggauggcugacaaucggaaucuccgguccagauaauggagcaguagcuguuuuaaaauacaacgguauaauaacagauacaauaaaaaguuggagaaacaaaauauuaagaacacaagagucugaauguguuuguaugaacgguucuugcuuugcuguauuaacugauggcccaagcaaugggcaagcaucguacaaaauauucaaagugaaacaagggaaaauaauuaaaucaauugagcuggaugcacccaauuaccacuaugaggaaugcuccuguuauccugaugcaggcaaaguaauguguguuugcagagacaacuggcaugccucgaaucggccaugggucucuuucgaucaggaucuuaacuaucaaauaggguacauaugcagugggguuuucggugauaacccgcguucuaaugauggaaagggcaauuguggcccuguacauucuaauggagcaaauggagugaaaggauucucauauagauaugguaaugguguuuggauaggaaggacuaaaaguauccacuccagaaguggguuugaaaugauuugggauccaaauggguggacugggacugauaguaguuucucuaugaagcaggauauuauagcauuaacugauuggucaggauacagugggaguuuuguccaacauccugaauuaacaggaaugaauugcauaaggcccuguuucuggguagaauuaaucagagggcaacccaaagaaaacaccaucugggcuagcggaagcagcaucuccuucugugguguaaauggugaaaccgcaagcuggucauggccagacggagcugaucugccauucaccauugacaaguag

SEQ ID NO: 58297 - RNA, 1410 nt, Artificial Sequence
  derived and/or modified CDS sequence (wt) from neuraminidase__InfluenzaA__EPI68596
augaauacaaaucaaagaauaauaaccauugggacagucugucugauaguuggaauaguuagucuauuauugcagauaggaaauauagucucguuauggauaagccauucaauucagacuggagaaaaaaaccacucugagauaugcagccaaaaugucauuacauaugaaaacaacacaugggugaaccaaacuuauguaaacauuagcaauaccaacauugcugauggacagggcgugacuucaauaauacuagccggcaauuccucucuuugcccaauaagugggugggcuauauacagcaaagacaauagcauaaggauugguuccaaaggagacauuuuugucauaagagaaccauucauuucaugcucucacuuggagugcagaaccuuuuuucugacccaaggugcuuugcuaaaugacaggcauucuaauggaaccgucaaggacaggagcccuuaccgaaccuuaaugagcugcccgaucggugaagcuccaucuccguauaauucaagauucgaaucaguugcuuggucagcaagugcaugccaugauggaaugggauggcuaacaaucgggauuuccgguccagauaauggagcaguggcuguuuugaaauacaaugguauaauaacagauacaauaaaaaguuggagaaacaaaauacuaagaacacaagagucagaauguguuuguauaaacgguucauguuuuacuauaaugacugauggcccaagcaaugggcaggccucguacaaaauauucaaaauggagaaagggaagauuauuaagucaguugagcuggaugcaccuaauuaccacuaugaggaaugcuccuguuacccugauacaggcaaaguggugugugugugcagagacaauuggcaugcuucaaaucgaccgugggucucuuucgaucagaaucuugauuaucagauaggguacauaugcagugggguuuucggugauaacccgcguucuaaugaugggaaaggcaauuguggcccaguacuuucuaauggagcaaauggagugaaaggauucucauuuagauauggcaaugguguuuggauaggaagaacuaaaaguaucagcucuagaaguggauuugagaugauuugggauccaaauggauggacggaaacugauaguaguuucucuauaaagcaggauauuauagcauuaacugauuggucaggauacaguggaaguuuuguccaacauccugaauuaacaggaaugaacugcauaaggccuuguuucuggguagaguuaaucagaggacaacccaaggagagcacaaucuggacuaguggaagcagcauuucuuucuguggcguggacagugaaaccgcaagcuggucauggccagacggagcugaucugccauucaccauugacaaguag

SEQ ID NO: 58298 - RNA, 1365 nt, Artificial Sequence
  derived and/or modified CDS sequence (wt) from neuraminidase__InfluenzaA__EPI115409
augaauccaaaucagaaaauaauaaccauuggaucaaucugucugguagucggacuaauuagccuaauauugcaaauagggaauauaaucucaauauggauuagccauucaauucaaacuggaagucaaaaccauacuggaauaugcaaccaaaacaucauuaccuauaaaaauagcaccuggguaaaggacacaacuucagugauauuaaccggcaauucaucucuuugucccauccgugggugggcuauauacagcaaagacaauagcauaagaauugguuccaaaggagacguuuuugucauaagagagcccuuuauuucauguucucacuuggaaugcaggaccuuuuuucugacccaaggugccuuacugaaugacaagcauucaagugggacuguuaaggacagaagcccuuauagggccuuaaugagcugcccugucggugaagcuccguccccguacaauucaagauuugaaucgguugcuuggucagcaagugcaugucaugauggcaugggcuggcuaacaaucggaauuucagguccagauaauggagcaguggcuguauuaaaauacaacggcauaauaacugaaaccauaaaaaguuggaggaagaaaauauugaggacacaagagucugaaugugccuguguaaaugguucauguuuuacuauaaugacugauggcccgagugaugggcuggccucguacaaaauuuucaagaucgaaaaggggaagguuacuaaaucgauagaguugaaugcaccuaauucucacuaugaggaauguuccuguuacccugauaccggcaaagugaugugugugugcagagacaauuggcaugguucgaaccggccaugggugucuuucgaucaaaaccuggauuaucaaauaggauacaucugcagugggguuuucggugacaacccgcgucccgaagauggaacaggcagcugugguccaguguauguugauggagcaaacggaguaaagggauuuucauauagguaugguaaugguguuuggauaggaaggaccaaaagucacaguuccagacauggguuugagaugauuugggauccuaauggauggacagagacugauaguaaguucucugugaggcaagauguuguggcaaugacugauuggucaggguauagcggaaguuucguucaacauccugagcugacagggcuagacuguaugaggccgugcuucuggguugaauuaaucaggggacgaccuaaagaaaaaacaaucuggacuagugcgagcagcauuucuuuuuguggcgugaauagugauacuguagauuggucuuggccagacggugcugaguugccauucagcauugacaaguag

SEQ ID NO: 58299 - RNA, 1365 nt, Artificial Sequence; identical to SEQ ID NO: 48706
  derived and/or modified CDS sequence (wt) from neuraminidase__InfluenzaA__ABD77678/m1

SEQ ID NO: 58300 - RNA, 1410 nt, Artificial Sequence; identical to SEQ ID NO: 48749
  derived and/or modified CDS sequence (wt) from neuraminidase__InfluenzaA__EPI185224

SEQ ID NO: 58301 - RNA, 1410 nt, Artificial Sequence
  derived and/or modified CDS sequence (wt) from neuraminidase__InfluenzaA__EPI697745
augaauccaaaccaaaagauaauaaccauugguucgaucuguaugacaauuggaauggcuaacuuaauauuacaaauuggaaacauaaucucaauauggguuagccacucaauucaaauuggaaaucaaagccagauugaaacaugcaaucaaagcgucauuacuuaugaaaacaacacuuggguaaaucagacauauguuaacaucagcaacaccaacuuugcugcuggacagucagugguuuccgugaaauuagcgggcaauuccucucucugcccuguuaguggaugggcuauauacaguaaagacaacaguguaagaaucgguuccaagggggauguguuugucauaagggaaccauucauaucaugcucucccuuggaaugcagaaccuucuucuugacucaaggggccuugcuaaaugacaaacauuccaauggaaccauuaaagacaggagcccauaucgaacccuaaugagcuguccuauuggugaaguucccucuccauacaacucaagauuugagucagucgcuuggucagcaagugcuugucaugauggcaucaauuggcuaacaauuggaauuucuggcccagacaguggggcaguggcuguguuaaaguacaauggcauaauaacagacacuaucaagaguuggaggaacaauauauugagaacacaagagucugaaugugcauguguaaaugguucuugcuuuaccauaaugaccgauggaccaagugauggacaggccucauacaaaaucuucagaauagaaaagggaaagauaaucaaaucagucgaaaugaaagccccuaauuaucacuaugaggaaugcuccuguuacccugauucuagugaaaucacaugugugugcagggauaacuggcauggcucgaaucgaccgugggugucuuucaaccagaaucuggaauaucagaugggauacauaugcagugggguuuucggagacaauccacgcccuaaugauaagacaggcaguugugguccaguaucgucuaauggagcaaauggaguaaaaggauuuucauucaaauacggcaaugguguuuggauagggagaacuaaaagcauuaguucaagaaaagguuuugagaugauuugggauccgaauggauggacugggacugacaauaaauucucaauaaagcaagauaucguaggaauaaaugaguggucaggguauagcgggaguuuuguucagcauccagaacuaacagggcuggauuguauaagaccuugcuucuggguugaacuaauaagagggcgacccgaagagaacacaaucuggacuagcgggagcagcauauccuuuugugguguaaacagugacacuguggguuggucuuggccagacggugcugaguugccauuuaccauugacaaguaa

SEQ ID NO: 58302 - RNA, 1410 nt, Artificial Sequence; identical to SEQ ID NO: 58301
  derived and/or modified CDS sequence (wt) from neuraminidase__InfluenzaA__EPI768524

SEQ ID NO: 58303 - RNA, 1410 nt, Artificial Sequence
  derived and/or modified CDS sequence (wt) from neuraminidase__InfluenzaA__EPI726929
augaauccaaaccaaaagauaauaaccauugguucgaucaguaugacaauuggaauggcuaacuuaauauuacaaauuggaaacauaaucucaauauggguuagccacucaauucaaauuggaaaucaaagccagauugaaacaugcaaucaaagcgucauuacuuaugaaaacaacacuuggguaaaucagacauauguuaacaucagcaacaccaacuuugcugcuggacagucagugguuuccgugaaauuagcgggcaauuccucucucugcccuguuaguggaugggcuauauacaguaaagacaacaguguaagaaucgguuccaagggggauguguuugucauaagggaaccauucauaucaugcucucccuuggaaugcagaaccuucuucuugacucaaggggccuugcuaaaugacaaacauuccaauggaaccauuaaagacaggagcccauaucgaacccuaaugagcuguccuauuggugaaguucccucuccauacaacucaagauuugagucagucgcuuggucagcaagugcuugucaugauggcaucaauuggcuaacaauuggaauuucuggcccagacaguggggcaguggcuguguuaaaguacaauggcauaauaacagacacuaucaagaguuggaggaacaauauauugagaacacaagagucugaaugugcauguguaaaugguucuugcuuuaccauaaugaccgauggaccaagugauggacaggccucauacaaaaucuucagaauagaaaagggaaagauaaucaaaucagucgaaaugaaagccccuaauuaucacuaugaggaaugcuccuguuacccugauucuagugaaaucacaugugugugcagggauaacuggcauggcucgaaucgaccgugggugucuuucaaccagaaucuggaauaucagaugggauacauaugcagugggguuuucggagacaauccacgcccuaaugauaagacaggcaguugugguccaguaucgucuaauggagcaaauggaguaaaaggauuuucauucaaauacggcaaugguguuuggauagggagaacuaaaagcauuaguucaagaaaagguuuugagaugauuugggauccgaauggauggacugggacugacaauaaauucucaauaaagcaagauaucguaggaauaaaugaguggucaggguauagcgggaguuuuguucagcauccagaacuaacagggcuggauuguauaagaccuugcuucuggguugaacuaauaagagggcgacccgaagagaacacaaucuggacuagcgggagcagcauauccuuuugugguguaaacagugacacuguggguuggucuuggccagacggugcugaguugccauuuaccauugacaaguaa

SEQ ID NO: 58304 - RNA, 1410 nt, Artificial Sequence; identical to SEQ ID NO: 58303
  derived and/or modified CDS sequence (wt) from neuraminidase__InfluenzaA__EPI813816

SEQ ID NO: 58305 - RNA, 1410 nt, Artificial Sequence
  derived and/or modified CDS sequence (wt) from neuraminidase__InfluenzaA__EPI466627
augaauccaaaccaaaagauaauaaccauugguucggucuguaugacaauuggaauggcuaacuuaauauuacaaauuggaaacauaaucucaauauggguuagccacucaauucaacuugggaaucaaagucagauugaaacaugcaaucaaagcgucauuacuuaugaaaacaacacuuggguaaaucagacauauguuaacaucagcaacaccaacuuugcugcuggacagucagugguuuccgugaaauuagcgggcaauuccucucucugcccuguuaguggaugggcuauauacaguaaagacaacaguguaagaaucgguuccaagggggauguguuugucauaagggaaccauucauaucaugcucccccuuggaaugcagaaccuucuucuugacucaaggggccuugcuaaaugacaaacauuccaauggaaccauuaaagacaggagcccauaucgaacccuaaugagcuguccuauuggugaaguucccucuccauacaacucaagauuugagucagucgcuuggucagcaagugcuugucaugauggcaucaauuggcuaacaauuggaauuucuggcccagacaguggggcaguggcuguguuaaaguacaauggcauaauaacagacacuaucaaaaguuggagaaacaauauauugagaacacaagagucugaaugugcauguguaaaugguucuugcuuuaccauaaugaccgauggaccaagugauggacaggccucauacaagaucuucagaauagaaaagggaaagauagucaaaucagucgaaaugaaugccccuaauuaucacuaugaggaaugcuccuguuauccugauucuagugaaaucacaugugugugcagggauaacuggcauggcucgaaucgaccgugggugucuuucaaccagaaucuggaauaucagauaggauacauaugcagugggguuuucggagacaauccacgcccuaaugauaagacaggcaguugugguccaguaucgucuaauggagcaaauggaguaaaaggauuuucauucaaauacggcaaugguguuuggauagggagaacuaaaagcauuaguucaagaaaagguuuugagaugauuugggauccgaauggauggacugggacagacaauaacuucucaauaaagcaagauaucguagggauaaaugaguggucaggauauagcgggaguuuuguucagcauccagaacuaacagggcuggauuguauaagaccuugcuucuggguugaacuaaucagagggcgacccgaagagaacacaaucuggacuagcgggagcagcauauccuuuugugguguaaacagugacacuguggguuggucuuggccagacggugcugaguugccauuuaccauugacaaguaa

SEQ ID NO: 58306 - RNA, 1410 nt, Artificial Sequence
  derived and/or modified CDS sequence (wt) from neuraminidase__InfluenzaA__EPI541965
augaauccaaaccaaaagauaauaaccauugguucggucuguaugacaauuggaauggcuaacuuaauauuacaaauuggaaacauaaucucaauauggguuagccacucaauucaacuugggaaucaaagucagauugaaacaugcaaucaaagcgucauuacuuaugaaaacaacacuuggguaaaucagacauauguuaacaucagcaacaccaacuuugcugcuggacagccagugguuuccgugaaauuagcgggcaauuccucucucugcccuguuaguggaugggcuauauacaguaaagacaacaguguaagaaucgguuccaagggggauguguuugucauaagggaaccauucauaucaugcucccccuuggaaugcagaaccuucuucuuggcucaaggggccuugcuaaaugacaaacauuccaauggaaccauuaaagacaggagcccauaucgaacccuaaugagcuguccuauuggugaaguucccucuccauacaacucaagauuugagucagucgcuuggucagcaagugcuugucaugauggcaucaauuggcuaacaauuggaauuucuggcccagacaguggggcaguggcuguguuaaaguacaauggcauaauaacagacacuaucaaaaguuggagaaacaauauauugagaacacaagagucugaaugugcauguguaaaugguucuugcuuuaccauaaugaccgauggaccaagugauggacaggccucauacaagaucuucagaauagaaaagggaaagauagucaaaucagucgaaaugaaugccccuaauuaucacuaugaggaaugcuccuguuauccugauucuagugaaaucacaugugugugcagggauaacuggcauggcucgaaucgaccgugggugucuuucaaccagaaucuggaauaucagauaggauacauaugcagugggguuuucggagacaauccacgcccuaaugauaagacaggcaguugugguccaguaucgucuaauggagcaaauggaguaaaaggauuuucauucaaauacggcaaugguguuuggauagggagaacuaaaagcauuaguucaagaaaagguuuugagaugauuugggauccgaauggauggacugggacagacaauaacuucucaauaaagcaagauaucguagggauaaaugaguggucaggauauagcgggaguuuuguucagcauccagaacuaacagggcuggauuguauaagaccuugcuucuggguugaacuaaucagagggcgacccgaagagaacacaaucuggacuagcgggagcagcauauccuuuugugguguaaacagugacacuguggguuggucuuggccagacggugcugaguugccauuuaccauugacaaguaa

SEQ ID NO: 58307 - RNA, 1410 nt, Artificial Sequence
  derived and/or modified CDS sequence (wt) from neuraminidase__InfluenzaA__EPI652004
augaauccaaaccaaaagauaauaaccauugguucggucuguaugacaauuggaauggcuaacuuaauauuacaaauuggaaacauaaucucaauauggguuagccacucaauucaaauugggaaucaaagucagauugaaacaugcaaucaaagcgucauuacuuaugaaaacaacacuuggguaaaucagacauauguuaacaucagcaacaccaacuuugcugcuggacagucagugguuuccgugaaauuagcgggcaauuccucucucugcccuguuaguggaugggcuauauacaguaaagacaacaguguaagaaucgguuccaagggggauguguuugucauaagggaaccauucauaucaugcucccccuuggaaugcagaaccuucuucuuggcucaaggggccuugcuaaaugacaaacauuccaauggaaccauuaaagacaggagcccauaucgaacccuaaugagcuguccuauuggugaaguucccucuccauacaacucaagauuugagucagucgcuuggucagcaagugcuugucaugauggcaucaauuggcuaacaauuggaauuucuggcccagacaguggggcaguggcuguguuaaaguacaauggcauaauaacagacacuaucaaaaguuggagaaacaauauauugagaacacaagagucugaaugugcauguguaaaugguucuugcuuuaccauaaugaccgauggaccaagugauggacaggccucauacaagaucuucagaauagaaaagggaaagauagucaaaucagucgaaaugaaugccccuaauuaucacuaugaggaaugcuccuguuauccugauucuagugaaaucacaugugugugcagggauaacuggcauggcucgaaucgaccgugggugucuuucaaccagaaucuggaauaucagauaggauacauaugcagugggguuuucggagacaauccacgcccuaaugauaagacaggcaguugugguccaguaucgucuaauggagcaaauggaguaaaaggauuuucauucaaauacggcaaugguguuuggauagggagaacuaaaagcauuaguucaagaaaagguuuugagaugauuugggauccgaauggauggacugggacagacaauaacuucucaauaaagcaagauaucguagggauaaaugaguggucaggauauagcgggaguuuuguucagcauccagaacuaacagggcuggauuguauaagaccuugcuucuggguugaacuaaucagagggcgacccgaagagaacacaaucuggacuagcgggagcagcauauccuuuugugguguaaacagugacacuguggguuggucuuggccagacggugcugaguugccauuuaccauugacaaguaa

SEQ ID NO: 58308 - RNA, 1410 nt, Artificial Sequence
  derived and/or modified CDS sequence (wt) from neuraminidase__InfluenzaA__EPI62526
augaauacaaaucaaagaauaauaaccauugggacagucugucugauaguuggaauaguuagucuauuauugcagauaggaaauauagucucguuauggauaagccauucaauucagacuggagaaaaaaaccacccugagauaugcagccaaaaugucauuacauaugaaaacaacacaugggugaaccaaacuuauguaaacauuagcaauaccaacauuguugauggacaaggcgugacuucaauaauacuagccggcaauuccucucuuugcccaauaagugggugggcuauauacagcaaagacaauagcauaaggauugguuccaaaggagacauuuuugucauaagagaaccauucauuucaugcucucacuuggagugcagaaccuuuuuucugacccaaggugcuuugcugaaugacaggcauucuaauggaaccgucaaggacaggaguccuuauagaaccuuaaugagcugcccgauuggugaagcuccaucuccguauaauucaagguucgaaucaguugcuuggucagcaagugcaugccaugauggaaugggauggcuaacaaucgggauuuccgguccagauaauggagcaguggcuguuuugaaauacaaugguauaauaacagauacaauaaaaaguuggagaaacaaaauacuaagaacacaagagucagaauguguuuguauaaacgguucauguuuuacuauaaugacugauggcccaagcaaugggcaggccucguacaaaauauucaaaauggagaaagggaagauuauuaagucaguugagcuggaugcaccuaauuaccacuaugaggaaugcuccuguuacccugauacaggcaaaguggugugugugugcagagacaauuggcaugcuucgaaucgaccaugggucucuuucgaucagaaucuugauuaucagauaggguacauaugcagugggguuuucggugauaacccgcguucuaaugaugggaaaggcaauuguggcccaguacuuucuaauggagcaaauggagugaaaggauucucauuuagauauggcaaugguguuuggauaggaagaacuaaaaguaucagcucuagaaguggauuugagaugauuugggauccaaauggauggacggaaacugauaguaguuucucuauaaagcaggauauuauagcauuaacugauuggucaggauacaguggaaguuuuguccaacaucccgaauuaacaggaaugaacugcauaaggccuuguuucuggguagaguuaaucagaggacaacccaaggagagcacaaucuggacuaguggaagcagcauuucuuucuguggcguggacagugaaaccgcaagcuggucauggccagacggagcugaucugccauucaccauugacaaguag

SEQ ID NO: 58309 - RNA, 1410 nt, Artificial Sequence; identical to SEQ ID NO: 48749
  derived and/or modified CDS sequence (wt) from neuraminidase__InfluenzaA__EPI189183

SEQ ID NO: 58310 - RNA, 1410 nt, Artificial Sequence; identical to SEQ ID NO: 48740
  derived and/or modified CDS sequence (wt) from neuraminidase__InfluenzaA__EPI180576

SEQ ID NO: 58311 - RNA, 1410 nt, Artificial Sequence
  derived and/or modified CDS sequence (wt) from neuraminidase__InfluenzaA__EPI346918
augaauacaaaucaaagaauaauaaccauugggacaguuuguaugauaguugguauaaucagucuauuguuacagauaggaaacauagucucguuauggauuagccauucaauucagaccggaugggaaaaucacacugagaugugcaaccaaaaugucauuacauauguaaauaacacaugggugaaccgaacuuaugugaacguuagcaauaccaacauugcuacuauacaggaugugacuucgauuguacuagccggcaauuccucacuuugcccaguaaguggaugggcuauauacagcaaagacaauagcauaagaauugguucuaaaggggacauuuuugucauaagagaaccauucauuucaugcucucaauuggaaugcagaaccuuuuuucugacccaaggugcuuugcugaaugacaagcauucuaauggaaccgucaaggacaggagucccuauagaacccugaugagcugccccaucggugaagcuccaucuccauacaacucaagguucgaaucaguugcuuggucagcaagugcaugccaugaugggaugggauggcuaacaaucgggaucucugguccagauaauggagcaguagcuguuuuaaaauacaaugguauaauaacagauacaauaaaaaguuggagaaacaaaauauuaagaacacaagagucggaauguguuuguaugaaugguucuuguuuuacuguauuaacugaugggccaagcaaugggcaagccucguacaaaauauuuaaaguggaaaaagggagaauaauuaagucaauugagcuggaugcccccaauuaccacuaugaggaaugcucauguuauccugauacaggcaaaguaauguguguuugcagagacaauuggcaugccucgaaccggcccugggucucuuucaaucagaaucuugacuaucaaauaggguacauaugcaguggaguuuucggugauaacccacguucuaaugaugggaagggcaauuguggcccaguacuuucuaauggagcaaauggagugaaaggauucucauauagauauggcaaugguguuuggauaggaagaacuaagaguaucaacuccagaagaggguuugagaucauuugggauccaaauggguggacugaaacugauaguaguuucucuaugaagcaggacauuauagcauuaacugauuggucaggauacaguggaaguuuuguccaacauccugaauuaacaggaaugaauugcauaaggccuuguuucuggguggaauuaaucagagggcaacccaaggaaagcacaaucugggcuagcggaagcagcaucucuuucuguggcguaaauagugaaaccgcaagcuggucauggccagacggagcugaucugccauucaccauugacaaguag

SEQ ID NO: 58312 - RNA, 1410 nt, Artificial Sequence; identical to SEQ ID NO: 49328
  derived and/or modified CDS sequence (wt) from neuraminidase__InfluenzaA__EPI240976

SEQ ID NO: 58313 - RNA, 1410 nt, Artificial Sequence; identical to SEQ ID NO: 46119
  derived and/or modified CDS sequence (wt) from neuraminidase__InfluenzaA__EPI3165

SEQ ID NO: 58314 - RNA, 1410 nt, Artificial Sequence; identical to SEQ ID NO: 58033
  derived and/or modified CDS sequence (wt) from neuraminidase__InfluenzaA__EPI957

SEQ ID NO: 58315 - RNA, 1410 nt, Artificial Sequence
  derived and/or modified CDS sequence (wt) from neuraminidase__InfluenzaA__EPI507593
augaauccaaaucaaaagauaauaacgauuggcucuguuucucucaccauuuccacaauaugcuucuucaugcaaauugccaucuugauaacuacuguaacauugcauuucaagcaauaugaauucaacucccccccaaacaaccaagugaugcugugugaaccaacaauaauagaaagaaacauaacagagauaguguaucugaccaacaccaccauagagaaggaaauaugccccaaaccagcagaauacagaaauuggucaaaaccgcaauguggcauuacaggauuugcaccuuucucuaaggacaauucgauuaggcuuuccgcugguggggacaucugggugacaagagaaccuuaugugucaugcgauccugacaaguguuaucaauuugcccuuggacagggaacaacacuaaacaacgugcauucaaacaacacaguacgugauaggaccccuuaucggacucuauugaugaaugaguuggguguuccuuuucaucuggggaccaagcaagugugcauagcaugguccagcucaaguugucacgauggaaaagcauggcugcauguuuguauaacgggggaugauaaaaaugcaacugcuagcuucauuuacaaugggaggcuuguagauaguguuguuucaugguccaaagaaauucucaggacccaggagucagaaugcguuuguaucaauggaacuuguacaguaguaaugacugauggaagugcuucaggaaaagcugauacuaaaauacuauucauugaggaggggaaaaucguucauacuagcacauugucaggaagugcucagcaugucgaggagugcucuugcuauccucgauauccuggugucagaugugucugcagagacaacuggaaaggcuccaaucggcccaucguagauauaaauauaaaggaucauagcauuguuuccaguuauguguguucaggacuuguuggagacacacccagaaaaaacgacagcuccagcaguagccauuguuuggauccuaacaaugaagaagguggucauggagugaaaggcugggccuuugaugauggaaaugacguguggaugggaagaacaaucaacgagacgucacguuuaggguaugaaaccuucaaagucauugaaggcugguccaacccuaaguccaaauugcagauaaauaggcaagucauaguugacagaggugauagguccgguuauucugguauuuucucuguugaaggcaaaagcugcaucaaucggugcuuuuauguggaguugauuaggggaagaaaagaggaaacugaagucuuguggaccucaaacaguauuguuguguuuuguggcaccucagguacauauggaacaggcucauggccugauggggcggaccucaaucucaugccuauauaa

SEQ ID NO: 58316 - RNA, 1410 nt, Artificial Sequence; identical to SEQ ID NO: 58315
  derived and/or modified CDS sequence (wt) from neuraminidase__InfluenzaA__EPI461954

SEQ ID NO: 58317 - RNA, 1410 nt, Artificial Sequence; identical to SEQ ID NO: 58315
  derived and/or modified CDS sequence (wt) from neuraminidase__InfluenzaA__EPI461954

SEQ ID NO: 58318 - RNA, 1410 nt, Artificial Sequence
  derived and/or modified CDS sequence (wt) from neuraminidase__InfluenzaA__EPI668104
augaauccaaaucaaaagauaauaacgauuggcucuguuucucucaccauuuccacaauaugcuucuucaugcaaauugccaucuugauaacuacuguaacauugcauuucaagcaauaugaauucaacucccccccaaacaaccaagugaugcugugugaaccaacaauaauagaaagaaacauaacagagauaguguauuugaccaacaccaccauagagaaggaaauaugccccaaaccagcagaauacagaaauuggucaaaaccgcaauguggcauuacaggauuugcaccuuucucuaaggacaauucgauuaggcuuuccgcugguggggacaucugggugacaagagaaccuuaugugucaugcgauccugacaaguguuaucaauuugcccuuggacagggaacaacacuaaacaacgugcauucaaauaacacaguacgugauaggaccccuuaucggacucuauugaugaaugaguuggguguuccuuucuaucuggggaccaagcaagugugcauagcaugguccagcucaaguugucacgauggaaaagcauggcugcauguuuguauaacgggggaugauaaaaaugcaacugcuagcuucauuuacaaugggaggcuuguagauaguguuguuucaugguccaaagauauucucaggacccaggagucagaaugcguuuguaucaauggaacuuguacaguaguaaugacugauggaaaugcuucaggaaaagcugauacuaaaauacuauucauugaggaggggaaaaucguucauacuagcaaauugucaggaagugcucagcaugucgaagagugcucuugcuauccucgauauccuggugucagaugugucugcagagacaacuggaaaggauccaaucggcccaucguagauauaaacauaaaggaucauagcauuguuuccaguuauguguguucaggacuuguuggagacacacccagaaaaaacgacagcuccagcaguagccauuguuuggauccuaacaaugaagaagguggucauggagugaaaggcugggccuuugaugauggaaaugacguguggauggggagaacaaucaacgagacgucacgcuuaggguaugaaaccuucaaagucguugaaggcugguccaacccuaaguccaaauugcagauaaauaggcaagucauaguugacagaggugauagguccgguuauucugguauuuucucuguugaaggcaaaagcugcaucaaucggugcuuuuauguggaguugauuaggggaagaaaagaggaaacugaagucuuguggaccucaaacaguauuguuguguuuuguggcaccucagguacauauggaacaggcucauggccugauggggcggaccucaaucucaugccuauauaa

SEQ ID NO: 58319 - RNA, 1410 nt, Artificial Sequence
  derived and/or modified CDS sequence (wt) from neuraminidase__InfluenzaA__EPI578445
augaauccaaaucaaaagauaauaacgauuggcucuguuucucucaccauuuccacaauaugcuucuucaugcaaauugccaucuugauaacuacuguaacauugcauuucaagcaauaugaauucaacucccccccaaacaaccaagugaugcugugugaaccaacaauaauagaaagaaacauaacagagauaguguauuugaccaacaccaccauagagaaggaaauaugccccaaaccagcagaauacagaaauuggucaaaaccgcaauguggcauuacaggauuugcaccuuucucuaaggacaauucgauuaggcuuuccgcugguggggacaucugggugacaagagaaccuuaugugucaugcgauccugacaaguguuaucaauuugcccuuggacagggaacaacacuaaacaacgugcauucaaauaacacaguacgugauaggaccccuuaucggacucuauugaugaaugaguuggguguuccuuuccaucuggggaccaagcaagugugcauagcaugguccagcucaaguugucacgauggaaaagcauggcugcauguuuguauaacgggggaugauaaaaaugcaacugcuagcuucauuuacaaugggaggcuuguagauaguguuguuucaugguccaaagauauucucaggacccaggagucagaaugcguuuguaucaauggaacuuguacaguaguaaugacugauggaaaugcuucaggaaaagcugauacuaaaauacuauucauugaggaggggaaaaucguucauacuagcaaauugucaggaagugcucagcaugucgaagagugcucuugcuauccucgauauccuggugucagaugugucugcagagacaacuggaaaggauccaaucggcccaucguagauauaaacauaaaggaucauagcauuguuuccaguuauguguguucaggacuuguuggagacacacccagaaaaaacgacagcuccagcaguagccauuguuuggauccuaacaaugaagaagguggucauggagugaaaggcugggccuuugaugauggaaaugacguguggauggggagaacaaucaacgagacgucacgcuuaggguaugaaaccuucaaagucguugaaggcugguccaacccuaaguccaaauugcagauaaauaggcaagucauaguugacagaggugauagguccgguuauucugguauuuucucuguugaaggcaaaagcugcaucaaucggugcuuuuauguggaguugauuaggggaagaaaagaggaaacugaagucuuguggaccucaaacaguauuguuguguuuuguggcaccucagguacauauggaacaggcucauggccugauggggcggaccucaaucucaugccuauauaa

SEQ ID NO: 58320 - RNA, 1410 nt, Artificial Sequence; identical to SEQ ID NO: 58319
  derived and/or modified CDS sequence (wt) from neuraminidase__InfluenzaA__EPI551883

SEQ ID NO: 58321 - RNA, 1410 nt, Artificial Sequence
  derived and/or modified CDS sequence (wt) from neuraminidase__InfluenzaA__EPI344388
augaauccaaaucaaaagauaauaacaauuggcucuguuucucucaucauugccacaauauguuuccuuaugcaaauugcuauccuaguaacuacuguaacauuacauuucaagcagcaugacuacaacucccccccaaacaaccaagcaaugcugugugaaccaacaauaauagaaagaaacacaacagagauuguguauuugaccaacaccaccauagagaaagaaauaugccccaaacuagcagaauauagaaacuggucaaagccgcaauguaacauuacaggauuugcaccuuuuucuaaggacaauucaauucggcuuucugcugguggggacaucugggugacaagagaaccuuaugugucaugcgauccugacaaguguuaucaauuugcccuugggcagggaacaacauuaaacaacggacauucaaauaacacuguacaugauaggaccccuuaucgaacccuauugaugaaugaauuggguguuccauuucauuuaggaaccaggcaagugugcauggcaugguccagcucaaguugucacgauggaaaagcauggcugcauguuuguauaacugggaaugauaacaaugcaacagcuagcuucauuuacaaugggaggcuuguagauaguauugguucaugguccaaaaauauacucagaacccaggagucggaaugcgucuguaucaauggaaccuguacaguaguaaugacugaugggagcgcuucaggaaaagcugauacuaaaauacuauucguugaggaggggaagaucguucauauuagcacauugucaggaagugcucagcauguugaggagugcuccuguuauccucgauuuccuggugucagaugugucugcagagacaacuggaaaggcuccaauaggcccaucguagauauaaauguaaagaauuauagcauuguuuccaguuauguaugcucaggacuuguuggagacacacccagaaaaagugacagcgucagcaguaguuauugccuagauccuaacaaugagaaagguggucauggggugaaaggcugggccuuugaugauggaaaugacguguggaugggaaggacaaucaacgagacguuacgcuuagguuaugaaaccuucaaaguaauugaaggcugguccaaagcuaacuccaaauuacagacaaauaggcaagucauaguugaaaaaggugacagguccgguuauucugguauuuucuccguugaagguaaaagcugcaucaaucggugcuuuuauguggaguugauaaggggaaggaaagaggaaacuaaagucugguggaccucaaacaguauuguuguguuuuguggcaccucagguacauauggaacaggcucauggccugauggagcggauaucaaucucaugccuauauaa

SEQ ID NO: 58322 - RNA, 1410 nt, Artificial Sequence
  derived and/or modified CDS sequence (wt) from neuraminidase__InfluenzaA__EPI347601
augaauccaaaucaaaagauaauaacaauuggcucuguuucucucaucauugccacaauauguuuccuuaugcaaauugcuauccuaguaacuacuguaacauuacauuucaagcagcaugacuacaacucccccccaaacaaccaagcaaugcugugugaaccaacaauaauagaaagaaacacaacagagauuguguauuugaccaacaccaccauagagaaagaaauaugccccaaacuagcagaauauagaaacuggucaaagccgcaauguaacauuacaggauuugcaccuuuuucuaaggacaauucaauucggcuuucugcugguggggacaucugggugacaagagaaccuuaugugucaugcgauccugacaaguguuaucaauuugcccuugggcagggaacaacauuaaacaacggacauucaaauaacacuguacaugauaggaccccuuaucgaacccuauugaugaaugaauuggguguuccauuucauuuaggaaccaggcaagugugcauggcaugguccagcucaaguugucacgauggaaaagcauggcugcauguuuguauaacugggaaugauaacaaugcaacagcuagcuucauuuacaaugggaggcuuguagauaguauugguucaugguccaaaaauauacucagaacccaggagucagaaugcgucuguaucaauggaaccuguacaguaguaaugacugaugggagcgcuucaggaaaagcugauacuaaaauacuauucguugaggaggggaagaucguucauauuagcacauugucaggaagugcucagcauguugaggagugcuccuguuauccucgauuuccuggugucagaugugucugcagagacaacuggaaaggcuccaauaggcccaucguagauauaaauguaaagaauuauagcauuguuuccaguuauguaugcucaggacuuguuggagacacacccagaaaaagugacagcgucagcaguaguuauugccuagauccuaacaaugagaaagguggucauggggugaaaggcugggccuuugaugauggaaaugacguguggaugggaaggacaaucaacgagacguuacgcuuagguuaugaaaccuucaaaguaauugaaggcugguccaaagcuaacuccaaauuacagacaaauaggcaagucauaguugaaaaaggugacagguccgguuauucugguauuuucuccguugaagguaaaagcugcaucaaucggugcuuuuauguggaguugauaaggggaaggaaagaggaaacuaaagucugguggaccucaaacaguauuguuguguuuuguggcaccucagguacauauggaacaggcucauggccugauggagcggauaucaaucucaugccuauauaa

SEQ ID NO: 58323 - RNA, 1410 nt, Artificial Sequence
  derived and/or modified CDS sequence (wt) from neuraminidase__InfluenzaA__EPI642512
augaauccaaaucaaaagauaauaacaauuggcucuauuucucucaucauugccacaauaugcuuccuuaugcaaauugccauccuggugauuacuguaacacugcauuucaagcaacauaacugcgacuccuccccaaacaaccaaguaauguuuugugaaccaacaauaauagaaagaaacaaaacggagauuguguaucugaucaacaccacuguagagaaggaaauaugccccaaaccaacagaauacagaaauuggucaaagccucaauguaacauuacaggauuugcaccuuuuucuaaggacaauucgauucggcuuucugcugguggggacaucugggugacaagagaaccuuaugugucaugcgaucccgacaaguguuaucaauuugcccuugggcagggaacaacacuaaacaacgggcauucaaaugacacuguacaugauaggaccccuuaccgaacccuauugaugaaugaauuggguguuccauuucauuugggaaccaggcaagugugcauagcaugguccaguucaaguugucacgaugggaaagcauggcugcauguuuguauaacuggagaugauggaaaugcaaccgcuagcuucauuuacaaugggaggcuaguagauaguauugguucaugguccaaaaauauacuaagaacccaggagucggaaugcguuuguauuaauggaacuuguacaguagucaugacugauggaagcgcguccggaaaagcugauacuaaaauauuauucauugaggaggggaaaaucauucauauuagcacguugucaggaagugcgcagcacgucgaggagugcucuuguuauccucgauauccuggugucagaugcgucugcagagacaacuggaaaggcuccaauagacccauaguugauauaaauguaaaggauuauagcauuguuuccaguuauguaugcucuggacuuguuggagacacacccagaaaaaacgacagcuucagcaguagucauugccuagauccuaacaaugaggaagguggucauggggugaaaggcugggccuuugaugauggaaaugacguguggaugggaagaacgaucagcgagaagucacgcuuaggcuaugaaaccuucaaagucgucaaaggaugguccgaacccaacuccaaauuacagacaaauaggcaaguuauaguugguagagguaacagguccgguuauucugguauuuucuccauugaaggcaaaaacuguaucaauaggugcuuuuauguggaguugauaaggggaaggaaagaggaaacuaaagucugguggaccucaaacaguauuguuguguuuugugguaccucagguacguauggaacaggcucauggccugauggggcggauaucaaucucaugccuauauaa

SEQ ID NO: 58324 - RNA, 1410 nt, Artificial Sequence
  derived and/or modified CDS sequence (wt) from neuraminidase__InfluenzaA__AIE52540
augaauccaaaucaaaagauaauaacaauuggcucuguuucucucauuauugccacaauaugcuuccucaugcaaauugccauccugguaacgacuguaacauugcauuucaagcaacaugacuacaacucccccccaaacaaccaaguaaugcugugugaaccaacaauaauagaaagaaacacaacagagauuguguaucugaccaacaucaccauagagaaggaaauaugccccaagcuagcagaauacagaaauuggucaaagccgcaauguaacauuacaggauuugcaccuuuuucuaaggacaauucuauccggcuuuccgcugguggggacaucugggugacaagagaaccuuaugugucaugcgauccugacaaguguuaucaauuugcucuuggacagggaacaacauugaacaacaggcauucaaauaacacuguacaugauagguccccuuaccgaacccuauugaugaaugaauuggguguuccauuucauuugggaaccaggcaagugugcauagcaugguccagcucaagcugucacgaugggaaagcauggcugcauguuuguaucaccggggaugacaacaaugcaacugcuaguuucauuuacaaugggaggcuuguagauaguauugguucaugguccaaaaauauacucagaacccaggaaucggaaugcguuuguaucaaugggacuuguacaguaguaaugacugaugggagugcuucagggaaagcugauacuaaaauacuauucauugaggaggggaagaucguucauauuagcacauugucaggaagugcucagcaugucgaggagugcuccuguuauccucgauauccuggugucagaugugucugcagagacaacuggaaaggcuccaauaggcccaucguagauauaaauaugaaggauuauagcauugcuuccaguuauguaugcucaggacuuguuggagacacacccagaaaaaacgacagcuucagcaguagccauugucuagauccuaacaaugagaaagguggucauggggugaaaggcugggccuuugaugauggaaaugacguguggaugggaaggacgaucagcgaggaguuucgcuuagguuaugaaaccuucaaggucaucaaaggcugguccaacccuaauuccaaauuacagacaaauaggcaagucauaguugaaaaagguaacagguccgguuacucugguguuuucuccauugaagacaaaagcugcaucaaucggugcuuuuauguggaguugauaaggggaagaaaagaggaaaccaaagucugguggaccucaaacaguauuguuguguuuuguggcacuucagguacauauggaacaggcucauggccugauggggcggauaucaaucucaugccuauauaa

SEQ ID NO: 58325 - RNA, 1410 nt, Artificial Sequence; identical to SEQ ID NO: 58324
  derived and/or modified CDS sequence (wt) from neuraminidase__InfluenzaA__EPI465399

SEQ ID NO: 58326 - RNA, 1410 nt, Artificial Sequence; identical to SEQ ID NO: 58324
  derived and/or modified CDS sequence (wt) from neuraminidase__InfluenzaA__EPI328899

SEQ ID NO: 58327 - RNA, 1410 nt, Artificial Sequence; identical to SEQ ID NO: 58324
  derived and/or modified CDS sequence (wt) from neuraminidase__InfluenzaA__EPI328901

SEQ ID NO: 58328 - RNA, 1410 nt, Artificial Sequence
  derived and/or modified CDS sequence (wt) from neuraminidase__InfluenzaA__EPI574645
augaauccaaaucaaaagauaauaacgauuggcucugucucucucaccauuuccacaauaugcuucuucaugcaaauugccaucuugauaacuacuguaacauugcauuucaagcaauaugaauucaacucccccccaaacaaccaaguggugcugugugaaccaacaauaauagaaagaaacauaacagagauaguguaucugaccaacaccaccauagagaaggaaauaugccccaaaccagcagaauacagaaauuggucaaaaccgcaauguggcauuacaggauuugcaccuuucucuaaggacaauucgauuaggcuuuccgcugguggggacaucugggugacaagagaaccuuaugugucaugcgauccugacaaguguuaucaauuugcccuuggacagggaacaacacuaaacaacgggcauucaaauaacacaguacgugauaggaccccuuaucggacucuauugaugaaugaguuggguguuccuuuucaucuggggaccaagcaagugugcauagcaugguccagcucaaguugucacgauggaaaagcauggcugcauguuuguauaacgggggaugauaaaaaugcaacugcuagcuucauuuacaaugggaggcuuguagauaguguuguuucaugguccaaagacauucucaggacccaggagucagaaugcguuuguaucaauggaacuuguacaguaguaaugacugauggaagugcuucaggaaaagcugauacuaaaauacuauucauugaggagggaaaaaucauucauacuagcacauugucaggaagugcucagcaugucgaagagugcucuugcuauccucgauauccuggugucagaugugucugcagagacaacuggaaaggcuccaaucggcccaucguagauauaaacauaaaggaucauagcauuguuuccaguuauguguguucaggacuuguuggagacacaccuagaaaaaacgacagcuccagcaguagccauuguuuggauccuaacaaugaagaagguggucauggagugaaaggcugggccuuugaugauggaaaugacguguggaugggaagaacaaucaacgagacgucacgcuuaggguaugaaaccuucaaagucauugaaggcugguccaaccccaaguccaaauugcagauaaauaggcaagucauaguugacagaggugauagguccgguuauucugguauuuucucuguugaaggcaaaagcugcaucaaucggugcuuuuauguggaguugauuaggggaagaaaagaggaaaaugaagucuuguggaccucaaacaguauuguuguguuuuguggcaccucagguacauauggaacaggcucauggccugauggggcggaccucaaucucaugccuauauaa

SEQ ID NO: 58329 - RNA, 1410 nt, Artificial Sequence
  derived and/or modified CDS sequence (wt) from neuraminidase__InfluenzaA__EPI563214
augaauccaaaucaaaagauaauaacgauuggcucuguuucucucaccauuuccacaauaugcuucuucaugcaaauugccaucuugauaacuacuguaacauugcauuucaagcaauaugaauucaacucccccccaaacaaccaagugaugcugugugaaccaacaauaauagaaagaaacauaacagagauaguguauuugaccaacaccaccauagagaaggaaauaugccccaaaccagcagaauacagaaauuggucaaaaccgcaauguagcauuacaggauuugcaccuuucucuaaggacaauucgauuaggcuuuccgcugguggggacaucugggugacaagagaaccuuaugugucaugcgauccugacaaguguuaucaauuugcccuuggacagggaacaacacuaaacaacgugcauucaaauaacacaguacgugauaggaccccuuaucggacucuauugaugaaugaguuggguguuccuuuccaucuggggaccaagcaagugugcauagcaugguccagcucaaguugucacgauggaaaagcauggcugcauguuuguauaacgggggaugauaaaaaugcaacugcuagcuucauuuacaaugggaggcuuguagauaguguuguuucaugguccaaagauauucucaggacccaggagucagaaugcguuuguaucaauggaacuuguacaguaguaaugacugauggaagugcuucaggaaaagcugauacuaaaauacuauucauugaggaggggaaaaucguuuauacuagcaaauugucaggaagugcucagcaugucgaagagugcucuugcuauccucgauauccuggugucagaugugucugcagagacaacuggaaaggcuccaaucggcccaucguagauauaaacauaaaggaucauagcauuguuuccaguuauguguguucaggacuuguuggagacacacccagaaaaaacgacagcuccagcaguagccauuguuuggauccuaacaaugaagaagguggucauggagugaaaggcugggccuuugaugauggaaaugacguguggauggggagaacaaucaacgagacgucacgcuuaggguaugaaaccuucaaagucguugaaggcugguccaaccccaaguccaaauugcagauaaauaggcaagucauaguugacagaggugauagguccgguuauucugguauuuucucuguugaaggcaaaagcugcaucaaucggugcuuuuauguggaguugauuaggggaagaaaagaggaaacugaagucuuguggaccucaaacaguauuguuguguuuuguggcaccucagguacauauggaacaggcucauggccugauggggcggaccucaaucucaugccuauauaa

SEQ ID NO: 58330 - RNA, 1410 nt, Artificial Sequence; identical to SEQ ID NO: 58329
  derived and/or modified CDS sequence (wt) from neuraminidase__InfluenzaA__EPI553998

SEQ ID NO: 58331 - RNA, 1410 nt, Artificial Sequence
  derived and/or modified CDS sequence (wt) from neuraminidase__InfluenzaA__EPI551568
augaauccaaaucaaaagauaauaacgauuggcucuguuucucucaccauuuccacaauaugcuucuucaugcaaauugccaucuugauaacuacuguaacauugcauuucaagcaauaugaauucaacucccccccaaacaaccaagugaugcugugugaaccaacaauaauagaaagaaacauaacagagauaguguauuugaccaacaccaccauagagaaggaaauaugccccaaaccagcagaauacagaaauuggucaaaaccgcaauguagcauuacaggauuugcaccuuucucuaaggacaauucgauuaggcuuuccgcugguggggacaucugggugacaagagaaccuuaugugucaugcgauccugacaaguguuaucaauuugcccuuggacagggaacaacacuaaacaacgugcauucaaauaacauaguacgugauaggaccccuuaucggacucuauugaugaaugaguuggguguuccuuuccaucuggggaccaagcaagugugcauagcaugguccagcucaaguugucacgauggaaaagcauggcugcauguuuguauaacgggggaugauaaaaaugcaacugcuagcuucauuuacaaugggaggcuuguagauaguguuguuucaugguccaaagauauucucaggacccaggagucagaaugcguuuguaucaauggaacuuguacaguaguaaugacugauggaagugcuucaggaaaagcugauacuaaaauacuauucauugaggaggggaaaaucguuuauacuagcaaauugucaggaagugcucagcaugucgaagagugcucuugcuauccucgauauccuggugucagaugugucugcagagacaacuggaaaggcuccaaucggcccaucguagauauaaacauaaaggaucauagcauuguuuccaguuauguguguucaggacuuguuggagacacacccagaaaaaacgacagcuccagcaguagccauuguuuggauccuaacaaugaagaagguggucauggagugaaaggcugggccuuugaugauggaaaugacguguggauggggagaacaaucaacgagacgucacgcuuaggguaugaaaccuucaaagucguugaaggcugguccaaccccaaguccaaauugcagauaaauaggcaagucauaguugacagaggugauagguccgguuauucugguauuuucucuguugaaggcaaaagcugcaucaaucggugcuuuuauguggaguugauuaggggaagaaaagaggaaacugaagucuuguggaccucaaacaguauuguuguguuuuguggcaccucagguacauauggaacaggcucauggccugauggggcggaccucaaucucaugccuauauaa

SEQ ID NO: 58332 - RNA, 1410 nt, Artificial Sequence
  derived and/or modified CDS sequence (wt) from neuraminidase__InfluenzaA__EPI629737
augaauccaaaucaaaagauaauagcgauuggcucuguuucucucaccauuuccacaauaugcuucuucaugcaaauugccaucuugauaacuacuguaacauugcauuucaagcaauaugaauucaacucccccccaaacaaccaagugaugcugugugaaccaacaauaauagaaagaaacauaacagagauaguguauuugaccaacaccaccauagagaaggaaauaugccccaaaccagcagaauacagaaauuggucaaaaccgcaauguagcauuacaggauuugcaccuuucucuaaggacaauucgauuaggcuuuccgcugguggggacaucugggugacaagagaaccuuaugugucaugcgauccugacaaguguuaucaauuugcccuuggacagggaacaacacuaaacaacgugcauucaaauaacacaguacgugauaggaccccuuaucggacucuauugaugaaugaguuggguguuccuuuccaucuggggaccaagcaagugugcauagcaugguccagcucaaguugucacgauggaaaagcauggcugcauguuuguauaacgggggaugauaaaaaugcaacugcuagcuucauuuacaaugggaggcuuguagauaguguuguuucaugguccaaagauauucucaggacccaggagucagaaugcguuuguaucaauggaacuuguacaguaguaaugacugauggaagugcuucaggaaaagcugauacuaaaauacuauucauugaggaggggaaaaucguuuauacuagcaaauugucaggaagugcucagcaugucgaagagugcucuugcuauccucgauauccuggugucagaugugucugcagagacaacuggaaaggcuccaaucggcccaucguagauauaaacauaaaggaucauagcauuguuuccaguuauguguguucaggacuuguuggagacacacccagaaaaaacgacagcuccagcaguagccauuguuuggauccuaacaaugaagaagguggucauggagugaaaggcugggccuuugaugauggaaaugacguguggauggggagaacaaucaacgagacgucacgcuuaggguaugaaaccuucaaagucguugaaggcugguccaaccccaaguccaaauugcagauaaauaggcaagucauaguugacagaggugauagguccgguuauucugguauuuucucuguugaaggcaaaagcugcaucaaucggugcuuuuauguggaguugauuaggggaagaaaagaggaaacugaagucuuguggaccucaaacaguauuguuguguuuuguggcaccucagguacauauggaacaggcucauggccugauggggcggaccucaaucucaugccuauauaa

SEQ ID NO: 58333 - RNA, 1410 nt, Artificial Sequence; identical to SEQ ID NO: 58329
  derived and/or modified CDS sequence (wt) from neuraminidase__InfluenzaA__EPI631886

SEQ ID NO: 58334 - RNA, 1410 nt, Artificial Sequence; identical to SEQ ID NO: 58329
  derived and/or modified CDS sequence (wt) from neuraminidase__InfluenzaA__EPI577025

SEQ ID NO: 58335 - RNA, 1410 nt, Artificial Sequence; identical to SEQ ID NO: 55883
  derived and/or modified CDS sequence (wt) from neuraminidase__InfluenzaA__EPI404926

SEQ ID NO: 58336 - RNA, 1410 nt, Artificial Sequence; identical to SEQ ID NO: 55883
  derived and/or modified CDS sequence (wt) from neuraminidase__InfluenzaA__EPI492687

SEQ ID NO: 58337 - RNA, 1410 nt, Artificial Sequence
  derived and/or modified CDS sequence (wt) from neuraminidase__InfluenzaA__EPI530648
augaauccaaaucaaaagauaauaacgauuggcucuguuucucucaccauuuccacaauaugcuuuuucaugcaaauugccauuuugauaacuacuguaacauugcauuucaagcaauaugaauucaacucccccccaaacaaccaagugaugcugugugaaccaacaauaauagaaagaaacauaacagagauaguguauuuaaccaacaccaccauagagaaggaaauaugccccaaaccagcagaauacagaaauuggucaaaaccgcaauguggcauuacaggauuugcaccuuucucuaaggacaauucgaucaggcuuuccgcugguggggacaucugggugacaagagaaccuuaugugucaugcgauccugacaaguguuaucaauuugcccuuggacagggaacaacacuaaacaacgugcauucaaauaacacaguacgugauaggaccccuuaucggacucuauugaugaaugaguuggguguuccuuuccaucuggggaccaagcaagugugcauagcaugguccagcucaaguugucacgauggaaaagcauggcugcauguuuguauaacgggggaugauaaaaaugcaacugcuagcuucauuuacaaugggaggcuuguagauaguguuguuucaugguccaaagauauucucaggacccaggagucagaaugcguuuguaucaauggaacuuguacaguaguaaugacugauggaagugcuucaggaaaagcugauacuaaaauacuauucauugaggaggggaaaaucguucauacuagcacauugucaggaagugcucagcaugucgaagagugcucuugcuauccucgauauccuggugucagaugugucugcagagacaacuggaagggcuccaaucggcccaucguagauauaaacauaaaggaucauagcauuguuuccaguuauguguguucaggacuuguuggagacacacccagaaaaaacgacagcuccagcaguagccauuguuuggauccuaacaaugaagaagguggucauggagugaaaggcugggccuuugaugauggaaaugacguguggaugggaagaacaaucaacgagacgucacgcuuaggguaugaaaccuucaaagucauugaaggcugguccaacccuaaguccaaauugcagacaaauaggcaagucauaguugacagaggugauagguccgguuauucugguauuuucucuguugaaggcaaaagcugcauaaaucggugcuuuuauguggaguugauuaggggaagaaaagaggaaacugaagucuuguggaccucaaacaguauuguuguguuuuguggcaccucagguacauauggaacaggcucauggccugauggggcggaccucaaucucaugccuauauaa

SEQ ID NO: 58338 - RNA, 1410 nt, Artificial Sequence; identical to SEQ ID NO: 58319
  derived and/or modified CDS sequence (wt) from neuraminidase__InfluenzaA__EPI684314

SEQ ID NO: 58339 - RNA, 1410 nt, Artificial Sequence
  derived and/or modified CDS sequence (wt) from neuraminidase__InfluenzaA__EPI614459
augaauccaaaucaaaagauaauaacgauuggcucuguuucucucaccauuuccacaauaugcuuuuucaugcaaauugccauuuugauaacuacuguaacauugcauuucaagcaauauaaauucaacucccccccaaacaaccaagugaugcugugugaaccaacaauaauagaaagaaacauaacagagauaguguauuuaaccaacaccaccauagagaaggaaauaugccccaaaccagcagaauacagaaauuggucaaaaccgcaauguggcauuacaggauuugcaccuuucucuaaggacaauucgauuaggcuuuccgcugguggggacaucugggugacaagagaaccuuaugugucaugcgauccugacaaguguuaucaauuugcccuuggacagggaacaacacuaaacaacgugcauucaaauaacacaguacgugauaggaccccuuaucggacucuauugaugaaugaguuggguguuccuuuccaucuggggaccaagcaagugugcauagcaugguccagcucaaguugucacgauggaaaagcauggcugcauguuuguauaacgggggaugauaaaaaugcaacugcuagcuucauuuacaaugggaggcuuguagauaguguuguuucaugguccaaagauauucucaggacccaggagucagaaugcguuuguaucaauggaacuuguacaguaguaaugacugauggaagugcuucaggaaaagcugauacuaaaauacuauucauugaggaggggaaaaucguucauacuagcacauugucaggaagugcucagcaugucgaagagugcucuugcuauccucgauauccuggugucagaugugucugcagagacaacuggaagggcuccaaucggcccaucguagauauaaacauaaaggaucauagcauuguuuccaguuauguguguucaggacuuguuggagacacacccagaaaaaacgacagcuccagcaguagccauuguuuggauccuaacaaugaagaagguggucauggagugaaaggcugggccuuugaugauggaaaugacguguggaugggaagaacaaucaacgagacgucacgcuuaggguaugaaaccuucaaagucauugaaggcugguccaacccuaaguccaaauugcagacaaauaggcaagucauaguugacagaggugauagguccgguuauucugguauuuucucuguugaaggcaaaagcugcauaaaucggugcuuuuauguggaguugauuaggggaagaaaagaggaaacugaagucuuguggaccucaaacaguauuguuguguuuuguggcaccucagguacauauggaacaggcucauggccugauggggcggaccucaaucucaugccuauauaa

SEQ ID NO: 58340 - RNA, 1410 nt, Artificial Sequence; identical to SEQ ID NO: 58339
  derived and/or modified CDS sequence (wt) from neuraminidase__InfluenzaA__EPI541466

SEQ ID NO: 58341 - RNA, 1410 nt, Artificial Sequence; identical to SEQ ID NO: 58339
  derived and/or modified CDS sequence (wt) from neuraminidase__InfluenzaA__EPI696968

SEQ ID NO: 58342 - RNA, 1410 nt, Artificial Sequence; identical to SEQ ID NO: 58339
  derived and/or modified CDS sequence (wt) from neuraminidase__InfluenzaA__EPI674598

SEQ ID NO: 58343 - RNA, 1410 nt, Artificial Sequence
  derived and/or modified CDS sequence (wt) from neuraminidase__InfluenzaA__EPI530678
augaauccaaaucaaaagauaauaacgauuggcucuguuucucucaccauuuccacaauaugcuuuuucaugcaaauugccauuuugauaacuacuguaacauugcauuucaagcaauaugaauucaacucccccccaaacaaccaagugaugcugugugaaccaacaauaauagaaagaaacauaacagagauaguguauuuaaccaacaccaccauagagaaggaaauaugccccaaaccagcagaauacagaaauuggucaaaaccgcaauguggcauuacaggauuugcaccuuucucuaaggacaauucgauuaggcuuuccgcugguggggacaucugggugacaagagaaccuuaugugucaugcgauccugacaaguguuaucaauuugcccuuggacagggaacaacacuaaacaacgugcauucaaauaacacaguacgugauaggaccccuuaucggacucuauugaugaaugaguuggguguuccuuuccaucuggggaccaagcaagugugcauagcaugguccagcucaaguugucacgauggaaaagcauggcugcauguuuguauaacgggggaugauaaaaaugcaacugcuagcuucauuuacaaugggaggcuuguagauaguguuguuucaugguccaaagauauucucaggacccaggagucagaaugcguuuguaucaauggaacuuguacaguaguaaugacugauggaagugcuucaggaaaagcugauacuaaaauacuauucauugaggaggggaaaaucguucauacuagcacauugucaggaagcgcucagcaugucgaagagugcucuugcuauccucgauauccuggugucagaugugucugcagagacaacuggaagggcuccaaucggcccaucguagauauaaacauaaaggaucauagcauuguuuccaguuauguguguucaggacuuguuggagacacacccagaaaaaacgacagcuccagcaguagccauuguuuggauccuaacaaugaagaagguggucauggagugaaaggcugggccuuugaugauggaaaugacguguggaugggaagaacaaucaacgagacgucacgcuuaggguaugaaaccuucaaagucauugaaggcugguccaacccuaaguccaaauugcagacaaauaggcaagucauaguugacagaggugauagguccgguuauucugguauuuucucuguugaaggcaaaagcugcauaaaucggugcuuuuauguggaguugauuaggggaagaaaagaggaaacugaagucuuguggaccucaaacaguauuguuguguuuuguggcaccucagguacauauggaacaggcucauggccugauggggcggaccucaaucucaugccuauauaa

SEQ ID NO: 58344 - RNA, 1410 nt, Artificial Sequence
  derived and/or modified CDS sequence (wt) from neuraminidase__InfluenzaA__EPI530680
augaauccaaaucaaaagauaauaacgauuggcucuguuucucucaccauuuccacaauaugcuuuuucaugcaaauugccauuuugauaacuacuguaacauugcauuucaagcaauaugaauucaacucccccccaaacaaccaagugaugcugugugaaccaacaauaauagaaagaaacauaacagagauaguguauuuaaccaacaccaccauagagaaggaaauaugccccaaaccagcagaauacagaaauuggucaaaaccgcaauguggcauuacaggauuugcaccuuucucuaaggacaauucgauuaggcuuuccgcugguggggacaucugggugacaagagaaccuuaugugucaugcgauccugacaaguguuaucaauuugcccuuggacagggaacaacacuaaacaacgugcauucaaauaacacaguacgugauaggaccccuuaucggacucuauugaugaaugaguuggguguuccuuuccaucuggggaccaagcaagugugcauagcaugguccagcucaaguugucacgauggaaaagcauggcugcauguuuguauaacgggggaugauaaaaaugcaacugcuagcuucauuuacaaugggaggcuuguagauaguguuguuucaugguccaaagauauucucaggacccaggagucagaaugcguuuguaucaauggaacuuguacaguaguaaugacugauggaagugcuucaggaaaagcugauacuaaaauacuauucauugaggaggggaaaaucguucauacuagcacauugucaggaagcgcucagcaugucgaagagugcucuugcuauccucgauauccuggugucagaugugucugcagagacaacuggaagggcuccaaucggcccaucguagauauaaacauaaaggaucauagcauuguuuccaguuauguguguucaggacuuguuggagacacacccagaaaaaacgacagcuccagcaguagccauuguuuggauccuaacaaugaagaagguggucauggagugaaaggcugggccuuugaugauggaaauggcguguggaugggaagaacaaucaacgagacgucacgcuuaggguaugaaaccuucaaagucauugaaggcugguccaacccuaaguccaaauugcagacaaauaggcaagucauaguugacagaggugauagguccgguuauucugguauuuucucuguugaaggcaaaagcugcauaaaucggugcuuuuauguggaguugauuaggggaagaaaagaggaaacugaagucuuguggaccucaaacaguauuguuguguuuuguggcaccucagguacauauggaacaggcucauggccugauggggcggaccucaaucucaugccuauauaa

SEQ ID NO: 58345 - RNA, 1410 nt, Artificial Sequence; identical to SEQ ID NO: 46050
  derived and/or modified CDS sequence (wt) from neuraminidase__InfluenzaA__EPI7603

SEQ ID NO: 58346 - RNA, 1410 nt, Artificial Sequence; identical to SEQ ID NO: 58337
  derived and/or modified CDS sequence (wt) from neuraminidase__InfluenzaA__EPI814527

SEQ ID NO: 58347 - RNA, 1410 nt, Artificial Sequence; identical to SEQ ID NO: 58337
  derived and/or modified CDS sequence (wt) from neuraminidase__InfluenzaA__EPI674737

SEQ ID NO: 58348 - RNA, 1410 nt, Artificial Sequence; identical to SEQ ID NO: 58337
  derived and/or modified CDS sequence (wt) from neuraminidase__InfluenzaA__EPI614443

SEQ ID NO: 58349 - RNA, 1410 nt, Artificial Sequence; identical to SEQ ID NO: 58337
  derived and/or modified CDS sequence (wt) from neuraminidase__InfluenzaA__EPI551812

SEQ ID NO: 58350 - RNA, 1410 nt, Artificial Sequence; identical to SEQ ID NO: 58337
  derived and/or modified CDS sequence (wt) from neuraminidase__InfluenzaA__EPI696961

SEQ ID NO: 58351 - RNA, 1410 nt, Artificial Sequence; identical to SEQ ID NO: 58337
  derived and/or modified CDS sequence (wt) from neuraminidase__InfluenzaA__EPI740789

SEQ ID NO: 58352 - RNA, 1410 nt, Artificial Sequence
  derived and/or modified CDS sequence (wt) from neuraminidase__InfluenzaA__EPI377498
augaauccaaaucaaaagauaauaacgauuggcucuguuucucucaccauuuccacaauaugcuucuucaugcaaauugccaucuugauaacuacuguaacauugcauuucaagcaauaugaauucaacucccccccaaacaaccaagugaugcugugugaaccaacaauaauagaaagaaacauaacagagauaguguaucugaccaacaccaccauagagaaggaaauaugccccaaaccagcagaauacagaaauuggucaaaaccgcaauguggcauuacaggauuugcaccuuucucuaaggacaauucgauuaggcuuuccgcugguggggacaucugggugacaagagaaccuuaugugucaugcgauccugacaaguguuaucaauuugcccuuggacagggaacaacacuaaacaacgugcauucaaauaacacaguacaugauaggaccccuuaucggacucuauugaugaaugaguuggguguuccuuuucaucuggggaccaagcaagugugcauagcaugguccagcucaaguugucacgauggaaaagcauggcugcauguuuguauaacgggggaugauaaaaaugcaacugcuagcuucauuuacaaugggaggcuuguagauaguguuguuucaugguccaaagaaauucucaggacccaggagucagaaugcguuuguaucaauggaacuuguacaguaguaaugacugauggaagugcuucaggaaaagcugauacuaaaauacuauucauugaggaggggaaaaucguucauacuagcacauugucaggaagugcucagcaugucgaagagugcucuugcuauccucgauauccuggugucagaugugucugcagagacaacuggaaaggcuccaauaggcccaucguagauauaaacauaaaggaucauagcauuguuuccaguuauguguguucaggacuuguuggagacacacccagaaaaaacgacagcuccagcaguagccauuguuuggauccuaacaaugaagaagguggucauggagugaaaggcugggccuuugaugauggaaaugacguguggaugggaagaacaaucaacgagacgucacgcuuaggguaugaaaccuucaaagucauugaaggcugguccaacccuaaguccaaauugcagauaaauaggcaagucauaguugacagaggugauagguccgguuauucugguauuuucucuguugaaggcaaaagcugcaucaaucggugcuuuuauguggaguugauuaggggaagaaaagaggaaacugaagucuuguggaccucaaacaguauuguuguguuuuguggcaccucagguacauauggaacaggcucauggccugauggggcggaccucaaucucaugccuauauaa

SEQ ID NO: 58353 - RNA, 1410 nt, Artificial Sequence; identical to SEQ ID NO: 58352
  derived and/or modified CDS sequence (wt) from neuraminidase__InfluenzaA__EPI377498

SEQ ID NO: 58354 - RNA, 1410 nt, Artificial Sequence; identical to SEQ ID NO: 58352
  derived and/or modified CDS sequence (wt) from neuraminidase__InfluenzaA__EPI391246

SEQ ID NO: 58355 - RNA, 1410 nt, Artificial Sequence; identical to SEQ ID NO: 58352
  derived and/or modified CDS sequence (wt) from neuraminidase__InfluenzaA__EPI407122

SEQ ID NO: 58356 - RNA, 1410 nt, Artificial Sequence; identical to SEQ ID NO: 58352
  derived and/or modified CDS sequence (wt) from neuraminidase__InfluenzaA__EPI407125

SEQ ID NO: 58357 - RNA, 1410 nt, Artificial Sequence; identical to SEQ ID NO: 58319
  derived and/or modified CDS sequence (wt) from neuraminidase__InfluenzaA__EPI562038

SEQ ID NO: 58358 - RNA, 1410 nt, Artificial Sequence; identical to SEQ ID NO: 58319
  derived and/or modified CDS sequence (wt) from neuraminidase__InfluenzaA__EPI562038

SEQ ID NO: 58359 - RNA, 1410 nt, Artificial Sequence; identical to SEQ ID NO: 54629
  derived and/or modified CDS sequence (wt) from neuraminidase__InfluenzaA__EU716525

SEQ ID NO: 58360 - RNA, 1350 nt, Artificial Sequence
  derived and/or modified CDS sequence (wt) from neuraminidase__InfluenzaA__EPI232422
augaauccaaaucagaagauaauaaccaucggaucaaucuguaugguaauuggaauaguuagcuuaauguuacaaauugggaacaugaucucaauaugggucagucauucaauucagacagggaaucaacgccaagcugaaccaaucagcaauacuaaauuucuuacugagaaagcuguggcuucaguaacauuagcgggcaauucaucucuuugccccauuagcggaugggcuguauacaguaaggacaacaguauaaggaucgguuccaggggggauguguuuguuauaagagagccguucaucucaugcucccacuuggaaugcagaacuuucuuuuugacucagggagccuugcugaaugacaagcacuccaaugggacugucaaagacagaagcccucacagaacauuaaugaguuguccugugggugaggcucccuccccauauaacucaagguuugagucuguugcuuggucagcaagugcuugccaugauggcaccaguugguugacaauuggaauuucugguccagacaauggggcuguggcuguauugaaauacaauggcauaauaacagacaccaucaagaguuggaggaacaacauacugagaacucaagagucugaaugugcauguguaaauggcucuugcuuuacuguaaugacugauggaccaaguagugggcaggcaucauauaagaucuucaaaauggaaaaagggaaagugguuaaaucagucgaauuggaugcuccuaauuaucacuaugaggagugcuccuguuauccugaugccggcgaaaucacaugugugugcagggauaauuggcauggcucaaauaggccauggguaucuuucaaucaaaauuuggaguaucaaauaggauauauaugcaguggaguuuucggagacaauccacgccccaaugauggaacagguaguugugguccgguguccccuaacggggcauaugggguaaaaggguuuucauuuaaauacggcaaugguguuuggaucgggagaaccaaaagcacuaauuccaggagcggcuuugaaaugauuugggauccaaauggguggacuggaacggacaguagcuuuucggugaagcaagauaucguagcaauaacugauuggucaggauauagcgggaguuuuguccagcauccagaacugacaggauuagauugcauaagaccuuguuucuggguugaguuaaucagagggcggccuaaagagagcacaauuuggaccagugggagcagcauaucuuuuugugguguaaauagugacacuguuaguuggucuuggccagacggugcugaguugccauucaccauugacaaguag

SEQ ID NO: 58361 - RNA, 1350 nt, Artificial Sequence
  derived and/or modified CDS sequence (wt) from neuraminidase__InfluenzaA__EPI227593
augaauccaaaucagaagauaauaaccaucggaucaaucuguaugguaauuggaauaguuagcuuaauguuacaaauugggaacaugaucucaauaugggucagucauucaauucagacagggaaucaacgccaagcugaaccaaucagcaauacuaaauuucuuacugagaaagcuguggcuucaguaacauuagcgggcaauucaucucuuugccccauuagcggaugggcuguauacaguaaggacaacaguauaaggaucgguuccaggggggauguguuuguuauaagagagccguucaucucaugcucccacuuggaaugcagaacuuucuuuuugacucagggagccuugcugaaugacaagcacuccaaugggacugucaaagacagaagcccucacagaacauuaaugaguuguccugugggugaggcucccuccccauauaacucaagguuugagucuguugcuuggucagcaagugcuugccaugauggcaccaguugguugacaauuggaauuucugguccagacaauggggcuguggcuguauugaaauacaauggcauaauaacagauaccaucaagaguuggaggaacaacauacugagaacucaagagucugaaugugcauguguaaauggcucuugcuuuacuguaaugacugauggaccaaguaaugggcaggcaucauauaagaucuucaaaauggaaaaagggaaagugguuaaaucagucgaauuggaugcuccuaauuaucacuaugaggagugcuccuguuauccugaugccggcgaaaucacaugugugugcagggauaauuggcauggcucaaauaggccauggguaucuuucaaucaaaauuuggaguaucaaauaggauauauaugcaguggaguuuucggagacaauccacgccccaaugauggaacagguaguugugguccgguguccccuaacggggcauaugggguaaaaggguuuucauuuaaauacggcaauggugucuggaucgggagaaccaaaagcacuaauuccaggagcggcuuugaaaugauuugggauccaaauggguggacuggaacggacaguagcuuuucggugaagcaagauaucguagcaauaacugauuggucaggauauagcgggaguuuuguccagcauccagaacugacaggauuagauugcauaagaccuuguuucuggguugaguuaaucagagggcggccuaaagagagcacaauuuggaccagugggagcagcauaucuuuuugugguguaaauagugacacuguuaguuggucuuggccagacggugcugaguugccauucaccauugacaaguag

SEQ ID NO: 58362 - RNA, 1350 nt, Artificial Sequence
  derived and/or modified CDS sequence (wt) from neuraminidase__InfluenzaA__EPI435658
augaauccaaaucagaagauaguaaccauuggaucaaucuguaugguaauuggaauaauuagcuugauguuacagauugggaacauaaucucaauaugggucagucauucaauucaaacagggaaucaacaccaaacugaaccaaucagaaauacuaauuuucuuacugagaacgcuguagcuucaguaacauuagcuggcaauucaucucuuugccccauuagaggaugggcuguacacaguaaagacaacaguauaaggauuggguccaagggggauguguuuguaauuagagagccguucaucucaugcucccaucuggaaugcagaacuuucuuuuugacucagggagcuuuacugaaugacaagcacuccaacgggacugucaaagauaggagcccucacagaacgcuaaugaguuguccuauaggugaggcucccuccccauauaacucgagguuugagucuguugcuuggucggcaagugcuugccaugauggcaccaguugguugauaauuggaauuucugguccagacaauggggcuguggcgguauugaaauacaauggcauaauaacagacacuaucaagaguuggaggaauaacauacugaggacccaagagucugaaugugcauguguaaauggcucuugcuuuacugugaugacagauggaccaaguaaugggcaggcaucauauaagauuuucaaaauagaaaaagggaaaguaguuaagucagucgaauugaaugcuccuaauuaucacuaugaggaaugcuccuguuauccugaugcuggcgaaaucauaugugugugcagggauaauuggcauggcucaaacaggccauggguaucuuucaaucagaauuuggaguaucaaauaggauauauuugcaguggaguuuucggagacaauccacggccaaaugacgggacagguaguugugguccaguguccccuaacggggcauaugggguaaaaggguucucauuuaaauacggcaauggugucuggaucgggaggaccaaaagcacucauuccaggagcggcuuugaaaugauuugggauccaaacggguggacuggaacggacagugaauuuucgaugaaacaagauauaguagcaauaacugauuggucaggauauagcgggaguuuuguccagcacccagaacugacaggauuagauugcauaagaccuugcuucuggguugaguuaaucagagggcggcccaaagagagcacaauuuggacuagugggagcagcauaucuuuuugugguguaaauagugacacugugaguuggucuuggccagacggugcugaguugccauucaccauugacaaguag

SEQ ID NO: 58363 - RNA, 1350 nt, Artificial Sequence; identical to SEQ ID NO: 58362
  derived and/or modified CDS sequence (wt) from neuraminidase__InfluenzaA__EPI492513

SEQ ID NO: 58364 - RNA, 1350 nt, Artificial Sequence
  derived and/or modified CDS sequence (wt) from neuraminidase__InfluenzaA__EPI165066
augaauccaaaucagaagauaauaaccaucggaucaaucuguaugguaacuggaauaguuagcuuaauguuacaaguugggagcaugaucucaauaugggucagucauucaauucacacagggaaucagcaccaagcugagccaaucagcaauacuaauuuucuuacugagaaagcuguggcuucaguaaaauuagcgggcaauucaucucuuugccccauuaacggaugggcuguauacaguaaggacaacaguauaaggaucgguuccaagggggauguguuuguuauaagagagccguucaucucaugcucccacuuggaaugcagaacuuucuuuuugacucagggagccuugcugaaugacaaacacuccaaugggacugucaaagacagaagcccucacagaacauuaaugaguuguccuaugggugaggcucccuccccauacaacucaagguuugagucuguugcuuggucagcaagugcuugccaugauggcaccaguugguugacaauuggaauuucuggcccagacaauggggcuguggcuguauugaaauacaauggcauaauaacagacacuaucaagaguuggaggaacaacauacugagaacucaagagucugaaugugcauguguaaauggcucuugcuuuacuguaaugacugauggaccaaguaauggucaggcaucacauaagaucuucaaaauggaaaaaggaaaagugauuaaaucagucgaauuggaugcuccuaauuaucacuaugaggaaugcuccuguuauccugaugccggcgaaaucacgugugugugcagggauaauuggcauggcucaaaucggccauggguaucuuucaaucaaaacuuggaguaucaaauaggauauauaugcagugggguuuucggagacaauccacgccccaaugauggaacagguaguugugguccgguguccucuaacggggcauaugggguaaaaggguuuucauuuaaauacggcaauggugucuggaucgggagaaccaaaagcacuaauuccaggagcggcuuugaaaugauuugggauccaaauggguggacugaaacggacaguagauuuucagugaaacaagauaucguagcaauaacugauuggucaggauauagcgggaguuuuguccagcauccagaacugacaggacuagauugcauaagaccuuguuucuggguugaguugaucagagggcggcccaaagagagcacaauuuggacuagugggagcagcauaucuuuuugugguguaaauagugacacuguggguuggucuuggccagacggugcugaguugccauucaccauugacaaguag

SEQ ID NO: 58365 - RNA, 1350 nt, Artificial Sequence
  derived and/or modified CDS sequence (wt) from neuraminidase__InfluenzaA__EPI531308
augaauccaaaucagaagaucauaaccaucggaucaaucuguaugguaacuggaguaguuagcuuaauguuacaaguugggaacaugaucucgauauggaucagucauucaauucacacagggaaucaacaccaagcugagccaaucagcaauacuaauuuccauacugagaaagcuguggucucagcuaaauuagcgggcaacucaucucuuugccccauuaacggaugggcuguauacagcaaggacaacagcauaaggaucgguuccaaaggggauguguuuguuauaagagagccauucaucucaugcucucacuuggaaugcagaacuuucuuuuugacucaaggagcuuugcugaaugauaaacacuccaaugggacugccaaagacagaagcccucacaggacauuaaugaguuguccugugggugaggcucccuccccguauaacucaagguuugagucuguugcuuggucagcaagugcuugccaugauggcaccaguugguugacaauuggaauuucuggcccagacaauggggcuguggcgguauugaaauacaauggcauaauaacagacacuaucaagaguuggaggaacaacguacugagaacucaagagucugaaugugcauguguaaaugguuauugcuuuacuguaaugacagauggaccaaguaauggucaggcaucacauaagaucuucaaaauggaaaaagggaaaguaauuaaaucagucgaauuggaugcuccuaauuaucacuaugaggaaugcuccuguuauccugaugccggcgaaaucacauguguaugcagggauaauuggcaugguucaaaucgaccauggauaucuuucaaccaaaacuuggaguaucaaauaggauauauaugcagugggguuuucggagacaauccacgccccaaugauggaaaagguaguugugguccgguguccucuaacggggcauaugggguaaaaggguuuucauuuaaauacggcaauggugucuggaucgggagaaccaaaagcacuaauuccaggagcggcuuugaaaugauuugggauccaaauggguggacugaaacagacaguagcuucucagugaaacaagauauuguagcaauaacugauuggucaggguacagcgggaguuuuguccagcauccagaacugacaggacuagauugcauaagaccuuguuucuggguugaguugaucagagggcggcccaaagagggcacaaucuggacuagugggagcagcauaucuuucuguggugugaguggugacacuguggguuggucuuggccagacggugcugaguugccauucaccauugacaaguag

SEQ ID NO: 58366 - RNA, 1350 nt, Artificial Sequence
  derived and/or modified CDS sequence (wt) from neuraminidase__InfluenzaA__EPI433308
augaauccaaaccaaaagauaauaaccauugggucaaucuguaugguaauuggaauaguuagcuuaauguuacaaauugggaacuugaucucaauaugggucagucauucaauucagagagggaaucuaaaccaaguugaaccaaucagcaauacuaguuuuccuacugagaaggcuguggcuucaguaacauuagcgggcaauucaucucuuugcccuauuagagguugggcuguacacaguaaagacaacaguauaaggauugguuccaagggggauguguuuguuauuagagagccauucaucucaugcucccauuuggaaugcagaacuuucuuuuugacucagggagccuugcugaaugacaagcacuccaacgggacugucaaagacagaagcccucacagaacauuaaugaguuguccugugggugaggcucccuccccauauaacucaagguuugagucuguugcuuggucagcaagugcuugccaugauggcaccaguugguugacaauuggaauuucuggcccagacaauggggcuguugcuguagugaaauacaauggcauaauaacagacaccaucaagaguugggggaacaacauacugagaacucaagagucugaaugugcauguguaaauggcucuugcuuuacuguaaugacugacggaccaaguaaugggcaggcaucauauaagaucuucaaaauggaaaaaggaaaaguaauuaaaucagucgaauuggaugcuccuaauuaccacuaugaggaaugcuccuguuacccugaugccggcgaaaucacaugugugugcagggauaauuggcaugguucaaaucggccauggguguccuucaaucaaaaucuggaguaucaaauaggauauauaugcaguggaguuuucggagacaauccacgccccaaugauggaacagguaguugugguccgguguccccuaauggggcauaugggguaaagggguuuucauuuaaauacggcaauggcguuuggaucggaagaaccaaaagcccuaauuccaggagcggcuuugaaaugauuugggauccaaauggauggagugaaacggacaguagcuucucggugaaacaagauauauuagcaguaacugauuggucaggauauagcgggaguuuuguccagcauccagaacugacagguuuagauugcauaagaccuuguuucuggguugaguuaaucagagggcggccugaagagaguacaaucuggacuagugggagcagcauauccuuuugugguguaaauagugacacugugaguuggucuuggccagacggugcugaguugccauucaccauugacaaguaa

SEQ ID NO: 58367 - RNA, 1350 nt, Artificial Sequence
  derived and/or modified CDS sequence (wt) from neuraminidase__InfluenzaA__EPI114974
augaauccaaaucagaagauaauaaccaucggaucaaucuguaugguaauuggaauaguuagcuuaauguuacaaauugggaacaugaucucaauaugggucagucauucaauucagacagggaaucaacgccaagcugaaccaaucagcaauacuaaauuucuuacugagaaagcuguggcuucaguaacauuagcgggcaauucaucucuuugccccauuagcggaugggcuguauacaguaaggacaacaguauaaggaucgguuccaggggggauguguuuguuauaagagagccguucaucucaugcucccacuuggaaugcagaacuuucuuuuugacucagggagccuugcugaaugacaagcacuccaaugggacugucaaagacagaagcccucacagaacauuaaugaguuguccugugggugaggcucccuccccauauaacucaagguuugagucuguugcuuggucagcaagugcuugccaugauggcaccaguugguugaccauuggaauuucugguccagacaauggggcuguggcuguauugaaauacaauggcauaauaacagacaccaucaagaguuggaggaacaacauacugagaacccaagagucugaaugugcauguguaaauggcucuugcuuuacuguaaugacugauggaccaaguaaugggcaggcaucauauaagaucuucaaaauggaaaaagggaaagugguuaaaucaaucgaauuggaugcuccuaauuaucacuaugaggagugcuccuguuauccugaugccggcgaaaucacaugugugugcagggauaauuggcauggcucaaauaggccauggguaucuuucaaucaaaauuuggaguaucaaauaggauauauaugcaguggaguuuucggagacaauccacgccccaaugauggaacagguaguugugguccgguguccccuaacggggcauaugggguaaaaggguuuucauuuaaauacggcaaugguguuuggauugggagaaccaaaagcacuaauuccaggagcggcuuugaaaugauuugggauccaaauggguggacuggaacggacaguagcuuuucggugaagcaagauaucguagcaauaacugauuggucaggauauagcgggaguuuuguccagcauccagaacugacaggauuagauugcauaagaccuuguuucuggguugaguuaaucagagggcggccuaaagagagcaccauuuggaccagugggagcagcauaucuuuuugugguguaaauagugacacuguuaguuggucuuggccagacggugcugaguugccauucaccauugacaaguag

SEQ ID NO: 58368 - RNA, 1350 nt, Artificial Sequence
  derived and/or modified CDS sequence (wt) from neuraminidase__InfluenzaA__EPI622495
augaauccaaaucagaagauaacaaccaucggaucaaucuguaugguaauuggaauaguuagcuuaauguuacaaauugggaacauggucucaauauggguuagucauucaauucagacuaggaaucaacgccaagcugaaccgaucagcaacacuagaucucuuacugagaaagcuguggcuucaguaacauuagcgggcaauucaucucuuugccccauuagcggaugggcuguauacaguaaggacaacagcauaaggaucgguuccaagggggauguguuuguuauaagagagccguucaucucaugcucacacuuggaaugcagaacuuucuuuuugacucagggagcuuugcuaaaugacaagcacuccaaugggacagucaaagacagaagcccucacagaacauuaaugaguugcccugugggugaggcucccuccccuuauaacucaagguuugagucuguugcuuggucagcaagugcuugccaugauggcaccaguugguugacaauuggaauuucuggcccagauaauggggccguggcaguagugaaauacaauggcauaauaacagacacuaucaagaguuggagaaacaacauacugagaacucaagagucugaauguguauguguaaauggcucuugcuuuacuguaaugacugauggaccaaguaauaagcaggcaucauauaagauuuucaaaauggaaaaaggaaaagugguuaaaucaaucgaauuggaugcuccuaauuaucacuaugaggagugcuccuguuauccugaugccggcgaaaucacaugugugugcagagauaauuggcauggcucaaauaggccaugguuaucuuucaaucaaaauuuggaguaucaaauaggguauauaugcaguggaguuuucggagacaauccacgccccaaugauggaacagguaguugugguccgguguccucuaacggggcauaugggguaaaaggguuuucauuuaaauacggcaaugguguuuggaucgggagaaccaaaagcacuaauuccaggagcgguuuugaaaugauuugggauccaaauggguggacuggaacggacagcagcuuuucgaugaagcaagauaucguggcaauaacugauuggucaggauauagcgggaguuuuguccagcauccagaacugacaggauuagauugcauaagaccuuguuuuuggguugaguuggucagagggcggcccaaagagggcacaaucuggacuagugggagcagcauauccuuuugugguguaaauagugacacugugaguuggucuuggccagacggugcugaguugccauucaccauugacaaguag

SEQ ID NO: 58369 - RNA, 1350 nt, Artificial Sequence
  derived and/or modified CDS sequence (wt) from neuraminidase__InfluenzaA__EPI349847
augaauccaaaucagaagauaacaaccaucggaucaaucuguaugguaauuggaauaguuagcuuaauguuacaaauugggaacauggucucaauauggguuagucauucaauucagacuaggaaucaacgccaagcugaaccgaucagcaacacuagaucucuuacugagaaagcuguggcuucaguaacauuagcgggcaauucaucucuuugccccauuagcggaugggcuguauacaguaaggacaacagcauaaggaucgguuccaagggggauguguuuguuauaagagagccguucaucucaugcucacacuuggaaugcagaacuuucuuuuugacucagggagcuuugcuaaaugacaagcacuccaaugggacagucaaagacagaagcccucacagaacauuaaugaguugcccugugggugaggcucccuccccuuauaacucaagguuugagucuguugcuuggucagcaagugcuugccaugauggcaccaguugguugacaauuggaauuucuggcccagauaauggggccguggcaguagugaaauacaauggcauaauaacagacacuaucaagaguuggagaaacaacauacugagaacucaagagucugaauguguauguguaaauggcucuugcuuuacuguaaugacugauggaccaaguaauaagcaggcaucauauaagauuuucaaaauggaaaaaggaaaagugguuaaaucaaucgaauuggaugcuccuaauuaucacuaugaggagugcuccuguuauccugaugccggcgaaaucacaugugugugcagagauaauuggcauggcucaaauaggccaugguuaucuuucaaucaaaauuuggaguaucaaauaggguauauaugcaguggaguuuucggagacaauccacgccccaaugauggaacagguaguugugguccggugucccauaacggggcauaugggguaaaaggguuuucauuuaaauacggcaaugguguuuggaucgggagaaccaaaagcacuaauuccaggagcgguuuugaaaugauuugggauccaaauggguggacuggaacggacagcagcuuuucgaugaagcaagauaucguggcaauaacugauuggucaggauauagcgggaguuuuguccagcauccagaacugacaggauuagauugcauaagaccuuguuuuuggguugaguuggucagagggcggcccaaagagggcacaaucuggacuagugggagcagcauauccuuuugugguguaaauagugacacugugaguuggucuuggccagacggugcugaguugccauucaccauugacaaguaa

SEQ ID NO: 58370 - RNA, 1350 nt, Artificial Sequence
  derived and/or modified CDS sequence (wt) from neuraminidase__InfluenzaA__EPI174804
augaauccaaaucagaagauaauaaccaucggaucaaucuguaugguaauuggaauaguuagcuuaauguuacaaauugggaacauggucucaauaugggucagucauucaauucagacuaggaaucaacgccaagcugaaccgaucagcaacacuaaaucucuuacugagaaagcuguggcuucaguaacauuagcgggcaauucaucucuuugccccauuagcggaugggcuguauacaguaaggacaacagcauaaggaucgguuccaagggggauguguuuguuauaagagagccguucaucucaugcucacacuuggaaugcagaacuuucuuuuugacucagggagcuuugcuaaaugacaagcacuccaaugggacaaucaaagacagaaguccucacagaacauuaaugaguuguccugugggugaggcucccuccccuuauaacucaagguuugagucugucgcuuggucagcaagugcuugccaugauggcaccaguugguugacaauuggaauuucuggcccagauaauggggcuguggcuguauugaaauacaauggcauaauaacagacacuaucaagaguuggagaaacaacauacugagaacucaagagucugaaugugcauguguaaauggcucuugcuuugcuguaaugacugauggaccaaguaauaggcaggcaucauauaagauuuucaaaauggaaaaaggaaaagugguuaaaucaaucgaauuggaugcuccuaauuaucacuaugaggagugcuccuguuauccugaugccggcgaaaucacaugugugugcagagauaauuggcauggcucaaauaggccaugguuaucuuucaaucaaaauuuggaguaucaaauaggguauauaugcaguggaguuuuuggagacaauccacgccccaaugauggaacagguaguugugguccgguguccucuaacggggcauaugggguaaaaggguuuucauuuaaauacggcaaugguguuuggaucgggagaaccaaaagcacuaauuccaggagcgguuuugaaaugauuugggauccaaauggguggacugaaacggacagcagcuuuucgaugaagcaagauaucguagcaauaacugauuggucaggauauagcgggaguuuuguucagcauccagaacugacaggauuagauugcauaagaccuuguuucuggguugaguuggucagagggcggcccaaagagagcacaaucuggacuagugggagcagcauaucuuuuugugguguaaauagugacacugugaguuggucuuggccagacggugcugaguugccauucaccauugacaaguag

SEQ ID NO: 58371 - RNA, 1350 nt, Artificial Sequence
  derived and/or modified CDS sequence (wt) from neuraminidase__InfluenzaA__EPI492441
augaauccaaaucaaaagauaauggccauuggaucagucuguaugguaauuggaauaguuagcuuaauguuacagauugggaacacaaucucaauaugggucagucauucauuucaaacaagaguccaacaccaagcugaaccaaucagaaacacuaacuuucuuacugagaacgcuguggcuucaguaacauuagcgggcaauucgucucuuugccccauuagggggugggcuguacacagcaaggacaacaguauaagaauugguuccaagggggauguguuuguaauuagagagccguucaucucaugcucucauuuggagugcagaacuuucuuuuugacccagggagccuuacuaaaugacaagcacuccaacaggacugucaaagacaggagcccucacagaacacuaaugaguugcccugugggugagguucccuccccauacaacucaagauuugagucuguugcuuggucagcaagugcuugccaugauggcaccaguugguugacaauuggaauuucaggaccagacaauggggcuguggcuguauugaaauacaauggcauaauaacagacaccaucaagaguuggaggaacaacauacugagaacucaagaguccgaaugugcauguguaaaugguuuuugcuuuacugugaugaccgauggaccaaguaauggacaggcaucauauaagaucuucaaaaugaaaaaagggaaaguaguuaaaucagucgaguugaaugcuccuaauuaucacuaugaggaaugcuccuguuauccugaugcgggagaaaucaugugugugugcagggauaacuggcaugguucaaauagaccaugggugucuuucaaucagaauuuggaguaucagauaggguauauaugcaguggaguuuucggagacaauccacgcccaaaugauggaacagguaguuguggcccaguuuccccuaacggggcauaugggauaaaaggguucucauuuaaauacggcaauggcguuuggaucgggagaaccaaaagcacuaauuccagaagcggcuuugaaaugguuugggauccaaauggguggacugauacggacagugacuuuucgauaaaacaagauauaguagcaauaacugauuggucaggauauagcgggaguuuuguccagcauccagaacugacaggauuagauugcauaagaccuugcuucuggguugaguuaaucagagggcgucccaaagaaagcacaauuuggacuagugggagcagcauauccuuuugugguguaaauagugaaacugugaguuggucuuggccagacggugcugaguugccauucaccauugacaaguag

SEQ ID NO: 58372 - RNA, 1350 nt, Artificial Sequence
  derived and/or modified CDS sequence (wt) from neuraminidase__InfluenzaA__EPI164142
augaauccaaaucagaagauaauaaccauugggucaaucuguaugguaauuggaauaguuagcuuaauguuacaaauugggaacaugaucucaauaugggucagucauucaauucaaacagggaaucaacaccaagcugaaccaaucagaaaugcuaauuuucuuacugagaacgcuguggcuucaguaacauuagcgggcaauucaucucuuugucccguuagaggaugggcuguacacaguaaagacaacaguauaaggauugguuccaagggggauguguuuguuauuagagagccguucaucucaugcucccacuuggaaugcagaacuuucuuuuugacucagggagccuuacugaaugacaagcacuccaaugggacugucaaagacagaagcccucacagaacauuaaugaguuguccugugggugaggcucccuccccauauaacucaagguuugagucuguugcuuggucagcaagugcuugccaugauggcaccaguugguugacaauuggaauuucuggcccagacaauggggcuguggcuguauugaaauacaauggcauaauaacagacaccaucaagaguuggaggaacaacauacugaggacucaagagucugaaugugcauguguaaauggcucuugcuuuacuguaaugacugauggaccaaguaaugggcaggcaucauauaagaucuucaaaauggaaaaagggaaaguggucaaaucagucgaauugaaugcuccuaauuaucacuaugaggaaugcuccuguuauccugaugcuggcgaaaucacaugugugugcagggauaauuggcauggcucaaauaggccauggguaucuuucaaucagaauuuggaguaucaaauaggauauauaugcaguggaguuuucggagacaauccacgccccaaugauggaacagguaguugugguccaguguccccuaacggggcauaugggauaaaaggguuuucauuuaaauacggcaaugguguuuggaucggaagaaccaaaagcacuaauuccaggagcggcuuugaaaugauuugggauccaaauggguggacugaaacggacaguaacuuuucggugaaacaagauauaguagcaauaacugauuggucaggauauagcgggaguuuuguccagcauccagaacugacaggauuagauugcauaagaccuugcuucuggguugaguuaaucagagggcggcccaaagagagcacaauuuggacuagugggagcagcauaucuuuuugugguguaaauagugacacugugaguuggucuuggccagacggugcugaguugccauucaccauugacaaguaa

SEQ ID NO: 58373 - RNA, 1350 nt, Artificial Sequence
  derived and/or modified CDS sequence (wt) from neuraminidase__InfluenzaA__EPI827076
augaauccaaaucagaagauaguaaccauuggaucaaucuguaugguaauuggaauaauuagcuugauguuacagauugggaacauaauaucaauaugggucagucauucaauucaaacagggaaucaacaccaaacugaaccaaucagaaauacuaauuuucuuacugagaacgcuguagcuucaguaacauuagcuggcaauucaucucuuugccccauuaaaggaugggcuguacacaguaaagacaacaguauaaggauuggguccaagggggauguguuuguaauuagagagccguucauaucaugcucccaucuggaaugcagaacuuucuuuuugacucagggagcuuuacugaaugacaagcacuccaacgggacugucaaagauaggagcccucacagaacgcuaaugaguugcccuauaggugaggcucccuccccauauaacucaagguuugagucuguugcuuggucggcaagugcuugccaugauggcaccaguugguugauaauuggaauuucugguccagacaauggggcuguggcgguauugaaauacaauggcauaauaacagacacuaucaagaguuggaggaauaacauacugaggacccaagagucugaaugugcauguguaaauggcucuugcuuugcuguuaugacagauggaccaaguaaugggcaggcaucauauaagauuuucaaaauagaaaaagggaaaguaguuaagucagucgaauugaaugccccuaauuaucacuaugaggaaugcuccuguuauccugaugcuggcgaaaucauaugugugugcagggauaauuggcauggcucaaacaggccauggguaucuuucaaucagaauuuggaguaucaaauaggauauauuugcaguggaguuuucggugacaauccacggccaaaugacgguacagguaguugugguccaguguccucuaacggggcauaugggguaaaaggguucucauuuaaauauggcaauggugucuggaucgggaggaccaaaagcacucauuccaggagcggcuuugaaaugauuugggauccaaacggguggacuggaacggacagugaauuuucgaugaaacaagauauaguagcaauaacugauuggucaggauauagcgggaguuuuguccagcacccagaacugacaggauuagauugcauaagaccuugcuucuggguugaguuaaucagagggcggcccaaagagagcacaauuuggacuagugggagcagcauaucuuuuugugguguaaauagugacacugugaguuggucuuggccagacggugcugaguugccauucaccauugacaaguag

SEQ ID NO: 58374 - RNA, 1350 nt, Artificial Sequence; identical to SEQ ID NO: 48591
  derived and/or modified CDS sequence (wt) from neuraminidase__InfluenzaA__EPI168491

SEQ ID NO: 58375 - RNA, 1350 nt, Artificial Sequence
  derived and/or modified CDS sequence (wt) from neuraminidase__InfluenzaA__EPI827078
augaauccaaaucagaagauaauaaccaucggaucaaucuguaugguaauugggauagcuagcuuaauguuacaaauuggaaacauaaucucaauauggaucagucauucaauucagacagggaaccaaugucaaaaugaaucaaucagcaacacuaaauuucuugcugagaaagcuguggcuucaguaacauuagcgggcaauucaucucuuugucccguuagcggaugggcuguguacaguaaagauaacagcauaaggaucgguuccaagggggauguguuuguuauaagagagccauucaucucaugcucccacuuggaaugcagaacuuucuuuuuaacccagggagccuuacugaaugacaagcacuccaauggaacugucaaagacagaagcccucacagaacauuaaugaguuguccggugggugaggcucccuccccauacaacucaagguuugagucuguugcuuggucagcaagcgcuugccaugauggcaccaguugguugacaauuggaauuucugguccagacaguggggcuguggcuguauugaaauacaauggcauaauaacagacaccaucaagagcuggaggaacaacauaaugagaacucaagagucugaaugugcauguguaaauggcucuugcuuuacuauaaugacugauggaccaaguaguggccaggcaucauauaagaucuucaaaauggaaaagggaaaagugauuaaaucagucgaauuggaugcuccuaauuaucacuaugaggagugcuccuguuauccugaugccggcgaaaucacaugugugugcagggauaauuggcauggaucaaacaggccauggauaucuuucaaucaaaauuuggaguaucaaauaggauauauaugcaguggaguuuucggagacaauccacgccccaaugauggaacggguaguugugguccgguguucccuaacggggcauaugggguaaaaggguuuucauuuaaauacggcaaugguguuuggaucgggagaaccaaaagcacuaauuccaggagcggcuuugaaaugauuugggacccaaauggguggacuggaacggacaguagcuuuucagugaagcaagauaucguagcaauaacugaauggucaggauauagcgggaguuuuguccagcauccagaacugacaggauuagauugcauaagaccuuguuucuggguugaguuaaucagagggcggccuaaagagagcacaauuuggaccaguggaagcagcauaucuuuuugugggguaaauggugacacuguuaguuggucuuggccagacggugcugaguugccauucaccauugacaaguag

SEQ ID NO: 58376 - RNA, 1350 nt, Artificial Sequence
  derived and/or modified CDS sequence (wt) from neuraminidase__InfluenzaA__EPI594521
augaauccaaaucagaagauaauaaccaucggaucaaucugugugggaauuggaauagucagcuuaauguuacaaauugggaacauggucucaauaugggucaaucauucaauucagacagagaaucagugccaagcugaaucaaucagcaauacuaaauuucucacugagaaggcuguggcuccaguaacauuaauggguaauucaucucuuugccccauuagcggaugggcuguacacaguaaggacaauagcauaaggaucgguuccaagggggauguguuuguuauaagagagccguucaucucaugcucccacuuggaaugcagaacuuucuuuuugacucagggagccuugcugaaugacaagcacuccaaugggacugucaaagacagaagcccucacagagcauuaaugaguuguccugugggugaagcucccucuccauauaacucaagguuugagucuguugcuuggucagcaagugccugccaugauggcaccgguugguuaacaauuggaauuucuggcccagacaauggggcuguggcuguauugaaauacaauggcauaauaacagacacuaucaaaaguuggaggaacaacauacugagaacucaagagucugaaugugcauguguaaauggcucuugcuuuacuguaaugacugauggaccaaguaaugggcaggcaucauauaaaaucuucaaauuggaaaaagggaaagugguuaaaucaguugaauuggaugcuccuaauuaucacuaugaggaaugcuccuguuauccugaugccggcgaaaucacuugugugugcagggauaauuggcaugguucaaauagaccauggguaucuuucaaccaaaauuuagaguaccaaauaggauauauaugcaguggaguuuucggagacaauccacggcccaaugauggaacagggagcugugguccggugucccccaauggggcauauggggugaaaggauuuucauuuaaauacgguaaugguguuuggaucgggagaaccaaaagcacuaauuccaggaguggcuuugaaaugauuugggauccgaauggguggacugaaacggacagcagcuucucggugaagcaagacaucguggcaauaacugauuggucaggauauagcgggaguuuuguccagcauccagaacugacaggauuagauugcauaagaccuuguuucuggguugaguuaauaagagggcggcccaaagagagcacaaucuggacuagugggagcagcauauccuuuugugguguaaauagugacacuguagguuggucuuggccagacggugcugaggugccauucaccauugacaaguag

SEQ ID NO: 58377 - RNA, 1410 nt, Artificial Sequence
  derived and/or modified CDS sequence (wt) from neuraminidase__InfluenzaA__EPI5787
augaauccaaaucagaagauaauaaccauuggaucaaucuguaugguaguugggauaauuagcuugauguuacaaauugggaacauaaucucaauaugggucagucauucaauucagacagggaaucaacaccaagcugaaccaugcaaucaaagcauuauuacuuaugaaaacaacaccuggguaaaucaaacauaugucaacaucagcaauaccaauuuucuuacugaaaaagcuguggcuucaguaacauuagcgggcaauucaucucuuugccccauuagcggaugggcuguacacaguaaggacaacgguauaagaaucgguuccaagggggauguguuuguuauaagagagccguucaucucaugcucccacuuggaaugcagaacuuucuuuuugacucagggagccuugcugaaugacaagcacuccaaugggaccgucaaagacagaagcccucacagaacauugaugaguuguccugugggugaggcucccuccccauauaacucaagguuugagucuguugcuuggucggcaagugcuugccaugauggcaccaguugguugacaauuggaauuucuggcccagacaauggggcuguggcuguauugaaauacaacggcauaauaacagacacuaucaagaguuggaggaacaacauacugagaacucaagagucugaaugugcauguguaaauggcucuugcuuuacuguaaugacugacggaccaaguaaugggcaggccucauauaagaucuucaaaauggaaaaagggaaaguaguuaaaucagucgaauugaaugccccuaauuaucacuaugaggagugcuccuguuauccugaugcuggcgaaaucacaugugugugcagggauaauuggcauggcucaaaucggccauggguaucuuucaaucaaaauuuggaguaucaaauaggauauauaugcaguggaguuuucggagacaauccacgccccaaugauggaacaggcaguugugguccgguguccccuaacggggcauauggaguaaaaggguuuucauuuaaauacggcaaugguguuuggaucgggagaaccaaaagcacuaauuccaggagcggcuuugaaaugauuugggauccaaauggguggacuggaacggacaguagcuucucggugaaacaagauaucguagcaauaacugauuggucaggauauagcgggaguuuuguccagcauccagaacugacaggauuagauugcauaagaccuuguuucuggguugagcuaaucagagggcggcccaaagagagcacaauuuggacuagugggagcagcauaucuuuuugugguguaaauagugacacuguggguuggucuuggccagacgaugccgaguugccauucaccauugacaaguag

SEQ ID NO: 58378 - RNA, 1410 nt, Artificial Sequence; identical to SEQ ID NO: 58377
  derived and/or modified CDS sequence (wt) from neuraminidase__InfluenzaA__EPI5787

SEQ ID NO: 58379 - RNA, 1350 nt, Artificial Sequence
  derived and/or modified CDS sequence (wt) from neuraminidase__InfluenzaA__EPI267031
augaauccaaaucagaagauaguaaccauuggaucaaucuguaugguaauuggaauaguuagcuugauguuacagauugggaacaugaucucaauaugggucagucauucaauucaaacagggaaucaacaccaaacugaaccaaucagaaauacuaauuuucuuacugagaacacuguggcuucaguaacauuagcuggcaauucaucucuuugccccauuagaggaugggcuguacacaguaaagacaacaguauaaggauuggguccaaaggggauguguuuguaauuagagagccguucaucucaugcucccaucuggaaugcagaacuuucuuuuugacucagggagcuuuacuaaaugacaagcacuccaacgggacugucaaagacaggagcccucacagaacgcuaaugaguuguccuauaggugaggcucccuccccauauaacucgagguuugagucuguugcuuggucggcaagugcuugccaugauggcaccaguugguugacaauuggaauuucugguccagacaauggggcuguggcgguauugaaauacaauggcauaauaacagacacuaucaagaguuggaggaauaacauacugaggacccaagagucugaaugugcauguguaaauggcucuugcuuuacugugaugacagauggaccaaguaauggacaggcaucauauaagauuuucaaaauggaaaaagggaaaguaguuaagucagucgaauugaaugcuccuaauuaucacuaugaggaaugcuccuguuauccugaugcuggcgaaaucauaugugugugcagggauaauuggcauggcucaaacaggccauggguaucuuucaaucagaauuuggaguaucaaauaggauauauuugcaguggaguuuucggagacaauccacgaccaaaugaugggaaagguaguugugguccaguguccccuaacggggcauaugggguaaaaggguuuucauuuaaauacggcaauggugucuggaucgggaggaccaaaagcacucauuccaggagcggcuuugaaaugauuugggauccaaauggguggacuggaacggacagugaauuuucgaugaaacaagauauaguagcaauaacugauuggucaggauauagcgggaguuuuguccagcacccagaacugacaggauuagauugcauaagaccuugcuucugggucgaguuaaucagagggcggcccaaggagagcacaauuuggacuagugggagcagcauaucuuuuugugguguaaauagugacacugugaguuggucuuggccagacggugcugaguugccauucaccauugacaaguag

SEQ ID NO: 58380 - RNA, 1350 nt, Artificial Sequence; identical to SEQ ID NO: 54657
  derived and/or modified CDS sequence (wt) from neuraminidase__InfluenzaA__EPI376539

SEQ ID NO: 58381 - RNA, 1350 nt, Artificial Sequence
  derived and/or modified CDS sequence (wt) from neuraminidase__InfluenzaA__EPI124069
augaauccaaaucagaagauaauaaccauuggaucaaucuguaugguaauuggaauaguuagcuuaauguuacaaauugggaacaugaucucaauaugggucagucauucaauucagacagggaaucaacaccaagcugaaucaaucagcaauacuaacccucuuacugagaaagcuguggcuucaguaacauuagcgggcaauucaucucuuugccccauuagaggaugggcuguacacaguaaggacaacaauauaaggaucgguuccaagggggauguguuuguuauuagagagccguucaucucaugcucccaccuggaaugcagaacuuucuucuugacucagggagccuugcugaaugacaagcacuccaacgggacugucaaagacagaagcccucacagaacauuaaugaguuguccugugggugaggcucccucuccauauaacucaagguuugagucuguugcuuggucagcaagugcuugccaugauggcaccaguugguugacaauuggaauuucuggcccagacaaugaggcuguggcuguauugaaauacaauggcauaauaacagacacuaucaagaguuggaggaacaacauacugagaacucaagagucugaaugugcauguguaaauggcucuugcuuuacuguaaugacugauggaccaagugaugggcaggcaucauauaagaucuucaaaauggaaaaaggaaaaguggucaaaucagucgaauuggaugcuccuaauuaucacuaugaggaaugcuccuguuauccugaugccggcgaaaucacauguguuugcagggauaauuggcauggcucaaauaggccauggguaucuuucaaucaaaauuuggaguaucaaauaggauauauaugcaguggaguuuucggagacaauccacgccccaaugauggaacagguaguuguggcccgauguccccuaacggggcauaugggguaaaaggguuuucauuuaaauacggcaaugguguuuggaucgggagaaccaaaagcacuaauuccaggagcggcuuugaaaugauuugggauccaaauggguggacuggaacggacaguagcuuuucagugaaacaagauauaguagcaauaacugauuggucaggauauagcgggaguuuuguccagcauccagaacugacaggauuagauugcauaagaccuuguuucuggguugaguuaaucagagggcggcccaaagagagcacaauuuggacuagugggagcagcauaucuuuuugugguguaaauagugacacugugaguuggucuuggccagacggugcugaguugccauucaccauugacaaguag

SEQ ID NO: 58382 - RNA, 1350 nt, Artificial Sequence
  derived and/or modified CDS sequence (wt) from neuraminidase__InfluenzaA__EPI342499
augaauccaaaucagaaaauaauaaccauuggaucaaucuguaugguaauuggaauaguuagcuuaauguuacaaauugggaacaugaucucaauauggaucagucauucaauucagaaagggaaucaacaccgaacugaaucaaucagcaauacuaacccucuuacugagaaagcuguggcuucaguaacauuaacgggcaauucaucucuuugccccauuagaggaugggcuguacacaguaaggacaacaauauaaggaucgguuccaagggggauguguuuguuauuagagagccguucaucucaugcucccaucuggaauguagaacuuucuucuugacacagggagccuuacugaaugacaagcacuccaacggaacugucaaagacagaagcccucacagaacauuaaugaguuguccuuugggugaggcucccucuccauauaacucaagguuugagucuguugcuuggucagcaagugcuugccaugauggcaccgguugguugacaauuggaauuucuggcccagacaaugaggcuguggcuguauugaaauacaauggcauaauaacagacacuaucaagaguuggaggaacaacauacugagaacucaagagucugaaugugcauguguaaauggcucuugcuuuacuguaaugacugauggaccaaguaaugggcaggcaucauacaagaucuucaaaaugagaaaaggaaaaguagucaaaucagucgaauuggaugcuccuaauuaucauuaugaggagugcuccuguuauccugauacuggcgaaaucacauguguuugcagggauaauuggcauggcucaaauaggccauggauauccuuuaaucaaaauuuggaguaucaaauagguuauauaugcaguggaauuuucggagacaauccacgccccaaugauggaacagguaguuguggcccaauguccccuaacggggcauaugggguaaaaggguuuucauuuaaauacggcaaugguguuuggaucgggagaaccaaaagcacuaacuccaggagcggcuuugaaaugauuugggauccaaauggguggaccgaaacggacaguagcuucucagugaaacaggacauaguagcaauaacugauuggucaggauauagcgggaguuuuguccagcacccagaacugacaggacuagauugcauaagaccauguuucuggguugaguuaaucagagggcggcccaaagagagcacaauuuggacuagugggaguagcauaucuuuuugugguguaaauagugacacugugagcuggucuuggccagacggugcugaguugccauucaccauugacaaguag

SEQ ID NO: 58383 - RNA, 1350 nt, Artificial Sequence
  derived and/or modified CDS sequence (wt) from neuraminidase__InfluenzaA__EPI103069
augaauccaaaucaaaagauaauaaccaucggaucaaucuguaugguaauuggaauaguuagcuuaauguuacaaauugggaacaugaucucaauaugggucagucauucaauucagacagggaaucaacgccaagcugaaccaaucagcaauacuaaauuucuuacugagaaagcuguggcuucaguuacauuagcgggcaauucaucucuuugccccauuagcggaugggcuguauacaguaaggacaacaguauaaggaucgguuccaggggggauguguuuguuauaagagagccguucaucucaugcucccacuuggaauguagaacuuucuuuuugacucagggagccuugcugaaugacaagcacuccaaugggacuaucaaagacagaagcccucacagaacauuaaugaguuguccugugggugaggcucccuccccauauaacucaagguuugagucuguugcuuggucagcaagugcuugccaugauggcaccaguugguugacaauuggaauuucugguccagacaauggggcuguggcuguauugaaauacaauggcauaauaacagacaccaucaagaguuggaggaacaacauacugagaacucaagagucugaaugugcauguguaaauggcucuugcuuuacuguaaugacugauggaccaaguagugggcaggcaucauauaagaucuucaaaauggaaaaaggaaaagugguuaaaucagucgaauuggaugcuccuaauuaucacuaugaggagugcuccuguuauccugaugccggcgaaaucacaugugugugcagggauaauuggcauggcucaaauaggccauggguaucuuucaaucaaaauuuggaguaucaaauaggauauauaugcaguggaguuuucggagacaauccacgccccaaugauggaacagguaguugugguccgguguccccuaacggggcauaugggguaaaaggguuuucauuuaaauacggcaaugguguuuggaucgggaggaccaaaagcacuaauuccaggagcggcuuugaaaugauuugggauccaaauggguggacuggaacggacaguagcuuuucggugaagcaagauaucguagcaauaacugauuggucaggauauagcgggaguuuuguccagcauccagaacugacaggauuagauugcauaagaccuuguuucuggguugaguuaaucagagggcggccuaaagagagcacaauuuggaccagugggagcagcauaucuuuuugugguguaaauagugacacuguuaguuggucuuggccagacggugcugaguugccauucaccauugacaaguag

SEQ ID NO: 58384 - RNA, 1350 nt, Artificial Sequence; identical to SEQ ID NO: 58360
  derived and/or modified CDS sequence (wt) from neuraminidase__InfluenzaA__EPI227595

SEQ ID NO: 58385 - RNA, 1410 nt, Artificial Sequence
  derived and/or modified CDS sequence (wt) from neuraminidase__InfluenzaA__EPI569385
augaauccaaaucagaaaauaauaacaauuggcucugucucucugaccauugcaacaguauguuuccucaugcagauugccaucuuagcaacgacugugacauugcauuucaagcaaaaugaaugcagcauccccccaaacaaucaaguggugccaugugaaccaaucauaauagaaaagaacauaacagagauaguguauuugaauaacacuaccauagaaaaagaaguuuguccugaaguaccagaauacaggaauuggucgaaaccgcagugucagauuacaggguucgcuccuuucuccaaggacaacucgauucggcuuucugcugguggggacauuuggguaacaagagaaccuuaugugucaugcagucccggcaaauguuaucaguuugcacuugggcaggggaccacgcugaacaacaaacacucaaacgguacaauacaugauaggaucccacaccgaacccuuuuaaugagugaauuggguguuccguuucauuugggaaccaaacaagugugcauagcaugguccagcucaaguugccaugaugggaaagcaugguugcaugucugugucacuggggaugauagaaaugcaacugcuaguuucauuuaugaugggaugcuugcugacaguauugguucauggucucaaaauauccucaggacucaggagucagaauguguuugcaucaauggaacuuguacaguaguaaugacugauggaagugcaucaggaagggccgauacuagaauacuauucauuaaagaagggaaaauuguccauauuagcccauugucaggaagugcucagcauauagaggaauguuccuguuauccccgauauccagauguuagauguguuugcagagauaacuggaagggcucuaauagacccgucauagauauaaauauggcagauuacagcauugauuccaguuauguauguucagggcuuguuggugacacaccuaggaacgaugauagcucuagcagcagcaacugcagggauccuaacaaugagagagggaacccaggggugaaagggugggcauuugacaaugggaaugauguuuggaugggaagaacaaucagcgaagauucgcgcucagguuaugagaccuucagagucaccgaugguuggaccacggccaauucuaaaucacaggucaauagacaaauuauaguugacaauaauaacugguccgguuauucugguauuuucucuguugaaggcaaaagcugcaucaauagguguuuuuauguggaguuaauaagagggaggccacaggagaccagggugugguggacuucgaauaguaucgucguauuuugugguacuucugguacuuauggaacaggcucauggccugauggagcgaauaucaacuucaugccuauauaa

SEQ ID NO: 58386 - RNA, 1380 nt, Artificial Sequence
  derived and/or modified CDS sequence (wt) from neuraminidase__InfluenzaA__EPI736916
augaauccaaaucaaaagauaacaugcauuucagcaacaggaguaacacuaucgguaguaagccugcuaauaggaaucgccaauuugggccuaaacaucggacuacacuacaaagugagugauucaacaacuauaagcauuccaaacaugaaugagaccaacccaacaacaacaaacaucacuaacauuauagugaauaagaacgaagaaagaacauuucucaacuugaccaagccgcuaugugaagucaacucauggcacauucuaucgaaagacaaugcaauaagaauaggugaggaugcucauauacuggucacaagggaaccuuacuuguccugugauccacaaggaugcaggauguuugcucugagucaaggcacaacacucagagggcgacaugcaaauggaaccauacaugauaggagcccauuucgagcucuuauaaguugggaaaugggucaggcacccaguccauauaauacuagggucgaaugcauaggauggucaagcacgucaugccaugauggcauaucaaggaugucaauaugcauaucaggaccaaauaacaaugcaucggcaguggugugguacagggggagaccaguaacagaaaucccaucaugggcagggaacauucuuaggacucaagaaucagaaugugugugccauaaaggaaucugcccaguggucaugacagaugguccagcaaacaacaaggcagcaacuaagauaaucuacuucaaagagggaaagguacagaaaauugaagaacugcaagggaacgcucaacacaucgaagaguguucaugcuacggagcagcagggaugaucaaauguguaugcagagacaauuggaagggggcaaauagaccaauaaucacuauagaucccgaaaugaugacccacacaagcaaauacuuguguucaaaaaucuuaaccgacacaagucguccuaaugaccccaccaaugggaacugcgaugcgccaauaacaggagggagcccagacccagggguaaaaggguuugcauuccuagacggggagaauucauggcuuggaaggacaauuagcaaagacuccagaucaggcuacgaaauguuaaaggucccaaaugcagaaaccgacacucaaucagggccaaccucauaccagcugauugucaacaaccaaaauuggucaggguacucaggggcauucauagacuacugggcaaacaaggaaugcuucaauccuuguuuuuauguggagcuaaucagagggagacccaaagagagugauguacuguggacuuccaauagcaugguagcucucuguggauccagggagcgauugggaucaugguccuggcaugauggugcagaaaucaucuacuuuaaguag

SEQ ID NO: 58387 - RNA, 1380 nt, Artificial Sequence; identical to SEQ ID NO: 58006
  derived and/or modified CDS sequence (wt) from neuraminidase__InfluenzaA__EPI593891

SEQ ID NO: 58388 - RNA, 1380 nt, Artificial Sequence
  derived and/or modified CDS sequence (wt) from neuraminidase__InfluenzaA__EPI691380
augaauccaaaucaaaagauagucugcauuucggucacaggaguaacacuaucaguaguaagccugcuaauaggaaucaccaauuugggccuaaauaucggacuacacuacaaagugagugauucaacaacuauaaacauuccaaacaugaaugagaccaacccaacaacaacaaacaucacuaacauuauaaugaauaagaacgaagaaagaacauuucucaaauugaccaagccgcuaugugaagucaacucauggcacauucuaucgaaagacaaugcaauaagaauaggugaggaugcucauauacuggucacaagggaaccuuaccuguccugugauccacaaggcugcaggauguuugcucugagucagggcacaacacucagagggcaacaugcgaauggaaccauacaugauaggagcccauuucgagcucuuauaaguugggaaaugggucaggcacccaguccauacaauacuagggucgaaugcauaggauggucaagcacgucaugccaugauggcauaucaaggaugucaauaugcauaucaggaccgaauaacaaugcaucggcaguggugugguaccgggggagaccaguaacagaaaucccaucaugggcagggaacauucuuaggacucaagaaucagaaugugugugccauaaaggaaucugcccaguggucaugacagaugguccagcaaacaacaaggcagcaacuaagauaaucuacuucaaagagggaaagauacaaaaaacugaagaacugcaagggaacgcucaacacaucgaagaauguucaugcuacggagcagcagggaugaucaaauguguaugcagagacaauuggaagggggcaaauagaccaauaaucacuauagaucccgaaaugaugacccacacaagcaaauacuuguguucgaaaaucuuaaccgacacaagucguccuaaugaccccaccaaugggaacugugaugcgccaauaacaggagggagcccagacccaggaguaaaaggguuugcauuccuagacggggagaauucauggcuuggacggacaauuagcaaagacuccagaucaggcuacgaaauguuaaaggucccaaaugcagaaaucgacauucaaucagggccaaucucauaccagcugguugucaauaaccaaaauuggucaggguacucaggggcauucauagacuacugggcaaacaaggagugcuucaauccuuguuuuuauguggagcuaaucagggggagacccaaagagagugguguacuguggacuuccaauagcaugguagcucucuguggauccagggagcgauugggaucaugguccuggcaugauggugcagaaaucaucuacuuuaaguag

SEQ ID NO: 58389 - RNA, 1413 nt, Artificial Sequence
  derived and/or modified CDS sequence (wt) from neuraminidase__InfluenzaA__EPI533584
augaauccaaaucaaaagauaacaugcauuucagcaacaggaaugacacuaucgguaguaaguaugcuaauaggaauugccaauuugggcuuaaauaucggacuccacuauaaagugagugauucgacaaauauaaacauuccaaacaugaaugaaaccagcccaacaacaacaauaauaaauaaucacccucagaauaauuucacaaacaucacuaacauuauagugacuaagaacgaggaaggacaucuucucaaccugaccaagccgcuaugugaagucaacucauggcauauucuaucgaaagacaaugcaauaagaauaggugaggaugcucauauaauagucacaagggaaccuuacuuguccugcgauccacagggcuguaggauguuugcucugagccaaggaacaacacucagagggaaacaugcgaauggaaccauacaugacaggagcccguuccgagcucuugugaguugggaaaugggucaggcgcccaguccauacaauacuagggucgagugcauaggauggucaagcacgucgugccacgacggcauaucaaggaugucaauaugcauaucaggaccgaauaacaaugcaucggcaguagugugguauggggggagaccaguaacagagauccccucaugggcagggaacauucuuaggacucaagaaucggagugugugugccauggaggaauaugcccaguggucaugacagaugguccggcaaacaacagggcagaaacuaaaauaaucuauuucaaagaaggaaagauaaagaaaaucgaagaacugaagggggacgcucaacacaucgaagaguguucauguuauggagcaucagagaugaucaaguguauaugcagggacaauuggaaaggggcaaacagaccaguaauaacuauagaucccgagaugaugacccacacaagcaaguacuuguguucaaaaauccuaaccgauacaagccgucccaaugaccccaccaaugggaaaugcgaagcgccaauaacaggagggagcccagacccugggguaaaaggguuugcauuccuagacggugagaacucauggcuuggaaggacuauuagcaaagacuccaggucaggcuaugaaauguuaaaaguuccaaaugcagagaccgacacucaaucgggggcaaucucccaccagauuauugucaacaaccagaauuggucaggguacucuggggcauucauugacuacugggcaaacaaggaaugcuucaauccuuguuucuauguggaacuaaucagagggagacccaaagagaguaguguacuguggacuucaaauagcauuguagcucucuguggauccaaggagcgauugggaucaugguccuggcaugauggugcugaaaucaucuacuuuaaguag

SEQ ID NO: 58390 - RNA, 1380 nt, Artificial Sequence; identical to SEQ ID NO: 58010
  derived and/or modified CDS sequence (wt) from neuraminidase__InfluenzaA__EPI641400

SEQ ID NO: 58391 - RNA, 1380 nt, Artificial Sequence; identical to SEQ ID NO: 58010
  derived and/or modified CDS sequence (wt) from neuraminidase__InfluenzaA__EPI587620

SEQ ID NO: 58392 - RNA, 1410 nt, Artificial Sequence
  derived and/or modified CDS sequence (wt) from neuraminidase__InfluenzaA__EPI569392
augaauccaaaucagaaaauaguaaccauuggcucccuuucguuaggguugguuguauucaauguucuacugcaugccgugagcaucauauuaacaguguuagcccuggggaagagugaaaacaauggaaucugcaauggaacuguagugagggaauacaaugaaacaguuagaauagagaaagugacucaaugguacaauacuagcguagucgaauauguaccgcauuggaaugagggaacuuauauaaauaacaccgaaccaauaugugaugucaagggcuuugcaccuuuuuccaaggacaacgggauaagaguuggcuccaggggacauauuuuugucauaagagagccuuucgucucuuguucaccaguagggugcaggacuuucuuccucacucagggaucucuacucaaugacaaacacucaaauggaacagugaaggauagaagcccauucagaacucucaugagugucgaagugggccaaucacccaauguauaucaagccagguuugaagcuguggcauggucagcaacagccugucaugaugguaagaaguggauggcgauugguguaacagggccagauucuaaagcaguagcaguaguucauuacggaggggugccuacugacguuguuaacuccugggcaggagauauauuaagaacucaggagucaucuuguacuugcauucaagguaauuguuauuggguaaugacugacgguccugccaauagacaggcgcaguauagaauauacaaagcaaaucaaggcaaaauaauuggccgaaaagacguuagcuuuaguggaggacauauugaggaauguucuuguuauccaaaugaugguaaaguggaaugcguguguagagacaacuggacgggaacuaacagaccugugcuaauuauuucgccugaucucucuuacaggguuggguauuuaugugcaggguugcccagugacacuccaagaggggaagauacucaauuugucgguucaugcacuagucccaugggaaaucagggauauggcguaaaaggguucggguuucgacagggaacugauguguggguggggcggacaauuagucgaaccuccagaucaggauuugaaauaauaaggauaaagaaugguuggacgcaaacaagcaaagaacagauuagaagacaggugguuguugauaacucgaauuggucgggauacagugggucuuucacuuuaccaguagaauugucugggagggaauguuugguucccuguuuuugggucgaaaugaucagagguaggccagaagagagaacaaucuggaccucuaguagcuccauuguaauguguggaguugauuaugaaauugccgacuggucauggcacgauggagcuauucuucccuuugacaucgauaaguaa

SEQ ID NO: 58393 - RNA, 1368 nt, Artificial Sequence
  derived and/or modified CDS sequence (wt) from neuraminidase__InfluenzaA__EPI459857
augaauccaaaucagaagauuauaaccauuggaucaauuuguaugguaauaggaacagucagcuuaauuguacaaguuggaaacauaaucuuaauauggguaaaccauucaauccagacaugcauuacuuaugaaaacaacaccuggguaaaucagacauaugucagcaauaccaauuuucuuacugggcaagcuguggcuucaguaacuuuagcaggcaauuccucucuuugccccauuaguggaugggccauauacaguaaggacaaugguauaagaauugguuccaagggggauguauuuguuauaagagaaccauuuaucucguguucucacuuggaaugcaggaccuucuucuuaacccagggagcuuuguugaaugauaagcauucuaauggaaccaucaaagacagaaguccuuacagaaccuugaugaguugccccgugggugaggcuccuuccccauauaacucaagguuugagucuguugcuuggucagcaagugcuugucaugauggcauuaauugguugacaaucggaauuucuggcccagacaaugaggcuguugcuguauugaaauacaaugguguaauaacagacaccaucaagaguuggaggaacaauauacugagaacucaggaaucugaaugugcguguguaaaugguucuugcuuuaccguaaugacagacggaccaaguaaugggcaggcgucauacaagaucuuuaagauagaaaaagggaaaguaguuagaucaguugaauuggaugcaccuaauuaccacuacgaggaaugcuccuguuauccugaugcuggagaaaucaccugugugugcagggauaauuggcauggcucgaaucgaccauggguaucuuucaaucaaaauuuagaguaccaaacaggauacauauguagugggguuuucggagacaguccacgcccuaaugaugggacaggcaguugugguccgguguccucuaacggggcauuuggugugaaaggguuuucauuuaaauacggcaaugguguuuggaucgggagaaccaaaaccacuaauuccagaagcggcuuugaaaugauuugggauccaaauggguggaccgaaacugacaguagcuuuucaaugaagcaagauaucauagcuauaacugauuggucuggauauagugggaguuuuguccaacauccggaacuaacaggauuaaauugcaugagaccguguuucuggguugagcuaaucagaggacagcccagagagaacacaauuuggacuagcggaagcaguauauccuuuugugguguaaauagugaaacuguggguuggucuuggccagacggugcugaguugccauucaccauugacaaguaa

SEQ ID NO: 58394 - RNA, 1416 nt, Artificial Sequence
  derived and/or modified CDS sequence (wt) from neuraminidase__InfluenzaA__EPI242204
augaauccuaaucaaaaacuauuugcauuaucaggaguggcaauagcacuuaguguauugaaccuauugauaggaauuucaaauguuggacugaaugugucucuacacuuaaaaggagagggggucaaacaagagaacaauuugacgugcacaaccauuacccaaaacaacacuacuguaguggaaaacacauacgucaauaacacaacaauaaucaacaaggggacaaauuugaaggcuccaaacuauuugcugcugaauaaaagucuaugcaguguggaaggaugggucgugauagccaaagacaaugcaauaagauucggagaaagugaacaaaucaucguuacuagggagccauaugugucaugcgauccaucaggaugcaagauguaugcccuacaccaaggaacuaccauaaggaacaaacacucaaauggaaccauacaugacagaacgacuuuccguggucucauauccaccccauugggcaccccaccgacagugaguaacagugauuucauauguguuggguggucgaguacaagcugccaugacggaguuggcagaaugacuaucugcauacaggggaacaaugacaaugcuacagcgacgguguauuacaacaggagacuuacuacuacuauuaaaacuugggccaagaauauucugaggacucaggagucagagugcguaugccacaacggcacaugugcaguuguaaugacugaugggcccgccagcagucaagccuauacaaaaauaauguacuuucauaaagggcuaauaauaaaggaagaaccacucaggggaucagccaggcauauugaggaaugcucuuguuauggacacgaucagaaaguaaguuguguaugcagggauaacuggcaaggcgcaaauagacccauuauagagauugauaugagcacacuagagcacacaaguagauacgugugcacuggaguucuaacagauaccaguagaccuggggacaaaccuaauggugauuguuccaauccaauaacuggaaguccuggugcaccgggagugaaaggguucggguucuuaaauggggacaacacauggcuagggaggacuaucagucccagaucuaggaguggguucgagaugcugaaaauacccaaugcagaaaccgacccaaauucuagaauaauagagcggcaggagaucgucgacaacaguaacuggucagguuauucuggaagcuucaucgacuauugggaugaggcuaaugaauguuacaaccccugcuuuuauguagaguuaauuagagggaggccugaggaggcaaaauacgucugguggacgagcaacagucuaauugccuuguguggaagcccagucucaguuggguccgguucuuuccccgauggggcucagauccaauacuuuucguaa

SEQ ID NO: 58395 - RNA, 1416 nt, Artificial Sequence
  derived and/or modified CDS sequence (wt) from neuraminidase__InfluenzaA__EPI408029
augaauccuaaucaaaaacuauuugcauuaucaggaguggcaauagcacuuaguguauugaaccuauugauaggaauuucaaauguuggacugaauaugucucuacacuuaaaaggagagggggucaaacaagagaacaauuugacgugcacaaccauuacccaaaacaacacuacuguaguggaaaacacauacgucaauaacacaacaauaaucaacaaggggacaaaucugaaggcuccaaacuauuugcugcugaauaaaagucuaugcaguguggaaggaugggucgugauagccaaagacaaugcaauaagauucggagaaagugaacaaaucaucguuacuagggagccauaugugucaugcgauccaucaggaugcaagauguaugcccuacaccaaggaacuaccauaaggaacaaacacucaaauggaaccauacaugacagaacgacuuuccguggucucuuauccaccccauugggcaccccaccgacagugaguaacagugauuucauauguguuggguggucgaguacaagcugccaugacggaguugguagaaugacuaucugcauacaggggaauaaugacaaugcuacagcgacgguguauuacaacaggagacuuacuacuacuauuaaaacuugggccaagaauauucugaggacucaggagucagagugcguaugccacaacggcacaugugcaguuguaaugacugaugggcccgccagcagucaagccuauacaaaaauaauguacuuucauaaagggcuaauaauaaaggaagaaccacucaggggaucagccaggcauauugaggaaugcucuuguuauggacacgaucagaaaguaaguuguguaugcagggauaacuggcaaggcgcaaauagacccauuauagagauugauaugagcacacuagagcacacaaguagauacgugugcacuggaguucuaacagauaccaguagaccuggggacaaaccuaauggugauuguuccaauccaauaacuggaaguccuggugcaccgggagugaaaggguucggguucuuaaauggggacaacacauggcuagggaggacuaucagucccagaucuaggaguggguucgagaugcugaaaauacccaaugcagaaaccgacccaaauucuagaauaauagagcggcaggagaucgucgacaacaguaaccggucagguuauucuggaagcuucaucgacuauugggaugaggcuaaugaauguuacaaccccugcuuuuauguagaguuaauuagagggaggccugaggaggcaaaauacgucugguggacgagcaacagucuaauugccuuguguggaagcccagucucaguuggguccgguucuuuccccgauggggcucagauccaauacuuuucguaa

SEQ ID NO: 58396 - RNA, 1398 nt, Artificial Sequence; identical to SEQ ID NO: 57317
  derived and/or modified CDS sequence (wt) from neuraminidase__InfluenzaA__EPI439509

SEQ ID NO: 58397 - RNA, 1350 nt, Artificial Sequence
  derived and/or modified CDS sequence (wt) from neuraminidase__InfluenzaA__EPI164223
augaauccaaaucagaagauaauaaccauugggucaaucuguaugguaauuggaauaguuagcuuaauguuacaaauugggaacaugaucucaauaugggucagucauucaauucaaacagggaaucaacaccaagcugaaccaaucagaaaugcuaauuuucuuacugagaacgcuguggcuucaguaacauuagcgggcaauucaucucuuugccccguuagaggaugggcuguacacaguaaagacaacaguauaaggauugguuccaagggggauguguuuguuauuagagagccguucaucucaugcucccacuuggaaugcagaacuuucuuuuugacucagggagccuuacugaaugacaagcacuccaaugggacugucaaagacagaagcccucacagaacauuaaugaguuguccugugggugaggcucccuccccauauaacucaagguuugagucuguugcuuggucagcaagugcuugccaugauggcaccaguugguugacaauuggaauuucuggcccagacaauggggcuguggcuguauugaaauacaauggcauaauaacagacacuaucaagaguuggaggaacaacauacugagaacucaagagucugaaugugcauguguaaauggcucuugcuuuacuguaaugacugauggaccaaguaaugggcaggcaucauauaagaucuucaaaauggaaaaagggaaagugguuaaaucagucgaauugaaugcuccuaauuaucacuaugaggaaugcuccuguuauccugaugcuggcgaaaucacaugugugugcagggauaauuggcauggcucgaauaggccauggguaucuuucaaucagaauuuggaguaucaaauaggauauauaugcaguggaguuuucggagacaauccacgccccaaugauggaacagguaguugugguccaguguccccuaacggggcauaugggauaaaaggguuuucauuuaaauacggcaaugguguuuggaucggaagaaccaaaagcacuaauuccaggagcggcuuugaaaugauuugggauccaaauggguggacugaaacggacaguaacuuuucggugaaacaagauauaguagcaauaacugauuggucaggauauagcgggaguuuuguccagcauccagaacugacaggauuagauugcauaagaccuugcuucuggguugaguuaaucagagggcggcccaaagagagcacaauuuggacuagugggagcagcauaucuuuuugugguguaaauagugacacugugaguuggucuuggccagacggugcugaguugccauucaccauugacaaguag

SEQ ID NO: 58398 - RNA, 1398 nt, Artificial Sequence; identical to SEQ ID NO: 57317
  derived and/or modified CDS sequence (wt) from neuraminidase__InfluenzaA__EPI486493

SEQ ID NO: 58399 - RNA, 1398 nt, Artificial Sequence
  derived and/or modified CDS sequence (wt) from neuraminidase__InfluenzaA__EPI740737
augaauccaaaucagaagauucuaugcacuucagccacugcuaucacaauaagcgcaaucgcaguacucauuggaauagcaaaccuaggauugaacauaggacugcauuuaaaaccgggcugcaauugcucacacucacaaccugaaacaaccaacacaagccaaacaauaauaaacaacuauuauaaugaaacaaacaucaccaacauccaaauagaagaaagaacaagcaggaauuucaauaacuuaacuaaagggcucuguacuauaaauucauggcacauauaugggaaagacaaugcaguaagaauuggagaaagcucggauguuuuagucacaagagaacccuauguuucaugcgacccagaugaaugcagguucuaugcucucagccaaggaacaacaaucagagggaaacacucaaacggaacaauacacgauaggucccaguaucgcgcccugauaagcuggccacuaucaucaccgcccacagugcacaacagcaggguggaaugcauuggguggucaaguacuaguugccaugaugguaaauccaggaugucaauauguauaucaggaccaaacaacaaugcaucugcaguaguaugguacaacagaaggccuguugcagaaauuaacacaugggcccgaaacauacuaagaacacaggaaucugaauguguaugccacaacggcguaugcccaguaguguucaccgaugggccugccacuggaccugcagacacaagaauauacuauuuuaaagaggggaaaauauugaaaugggagucucugacuggaacugcuaagcauauugaagaaugcucauguuacggggaacgaacagggauuaccugcacaugcagggacaauuggcagggcucaaauagaccagugguucagauagacccaguagcaaugacacacacuagucaauauauaugcaguccuguucuuacagacaguccccgaccgaaugacccaaauauaggcaaguguaaugacccuuauccagguaacaauaacaauggagucaagggauucucauaccuggauggggcuaacacuuggcuagggaggacaauaaguacagccucgaggucuggauacgagauguuaaaagugccaaaugcauugacagaugauagaucaaagcccauucaaggucagacaauuguauuaaacgcugacuggagugguuacaguggguccuucauggacuauugggcugaaggggacugcuaucgagcguguuuuuauguggaguugauacguggaagacccaaggaggauaaagugugguggaccagcaauaguauaguaucgauguguuccaguacagaauuccugggacaauggaacuggccugauggggcuaaaauagaguacuuccucuaa

SEQ ID NO: 58400 - RNA, 1398 nt, Artificial Sequence
  derived and/or modified CDS sequence (wt) from neuraminidase__InfluenzaA__EPI730494
augaauccaaaccagaagauucuaugcacuucagccacugccaucacaauaggcgcaaucgcaguacucauuggaauagcaaaccuaggauugaacauaggacugcaucuaaaaccgggcugcaauugcucacacucacaaccugaaauaaccaacacaagccaaacaauaauaaacaacuauuauagugaaacaaacaucaccaacauccaaauggaagagagaacaagcaagaauuucaauaacuuaacuaaagggcucuguacuauaaauucauggcacauauaugggaaagacaaugcaguaagaauuggagagagcucggauguuuuagucacaagagaacccuaugugucaugcgacccagaugaaugcagguucuaugcucucagccaaggaacaacaaucagagggaaacacucaaacggaacaauacacgauaggucccaguaucgugcccugauaagcuggccacuaucaucaccgcccacaguguacaacagcaggguggaaugcauuggguggucaagcacuaguugccaugauggcaaauccaggaugucaauauguauaucaggaccaaacaacaaugcaucugcuguaguaugguacaacagaaggccuguugcagaaauuaacacaugggcccgaaacauacuaagaacacaggagucugaauguguaugccacaacggcguaugcccaguaguguucacugauggaucugccacuggaccugcagacacaagaauauacuauuuuaaagaggggaaaauauugaagugggagucucugacuggaacugcuaagcauauugaagaaugcucauguuacggggaacgaacaggaauuaccugcacaugcagggacaauuggcagggcucaaauaggccagugauucagauagacccaguagcaaugacacacacuagucaauauauaugcaguccuguucuuacagacaauccccgaccaaaugacccaaauauagguaaguguaaugacccuuauccagguaauaauaacaauggaaucaagggauucucauaccuggauggggcuaacacuuggcuagggaggacaauaagcacagccucgaggucuggauacgagauguuaaaagugccaaaugcauugacagaugauagaucaaagccuauucaaggucagacaauuguguuaaacgcugacuggagugguuacaguggaucuuucauggacuauugggcugaaggggacugcuaucgagcguguuuuuauguggaguugauacguggaagacccaaggaggauaaagugugguggaccagcaauaguauaguaucgauguguuccaguacagaauuccugggacaauggaacuggccugauggggcuaaaauagaguacuuccucuaa

SEQ ID NO: 58401 - RNA, 1398 nt, Artificial Sequence
  derived and/or modified CDS sequence (wt) from neuraminidase__InfluenzaA__EPI712925
augaauccaaaucagaagauucuaugcacuucagccacugcuaucacaauaggcgcaaucgcaguacucauuggaauagcaaaccuaggauugaacauaggacugcauuuaaaaccgggcugcaauugcucacacucacaaccugaaacaaccaacacaagccaaacaauaauaaacaacuauuauaaugaaacaaacaucaccaacauccaaauagaagaaagaacaagcaggaauuucaauaacuuaacuaaagggcucuguacuauaaauucauggcacauauaugggaaagacaaugcaguaagaauuggagaaagcucggauguuuuagucacaagagaacccuauguuucaugcgacccagaugaaugcagguucuaugcucucagccaaggaacaacaaucagagggaaacacucaaacggaacaauacacgauaggucccaguaucgcgcccugauaagcuggccacuaucaucaccgcccacagugcacaacagcaggguggaaugcauuggguggucaaguacuaguugccaugaugguaaauccaggaugucaauauguauaucaggaccaaacaacaaugcaucugcaguaguaugguacaacagaaggccuguugcagaaauuaacacaugggcccgaaacauacuaagaacacaggaaucugaauguguaugccacaacggcguaugcccaguaguguucaccgaugggccugccacuggaccugcagacacaagaauauacuauuuuaaagaggggaaaauauugaaaugggagucucugacuggaacugcuaagcauauugaagaaugcucauguuacggggaacgaacagggauuaccugcacaugcagggacaauuggcagggcucaaauagaccagugguucagauagacccaguagcaaugacacacacuagucaauauauaugcaguccuguucuuacagacaguccccgaccgaaugacccaaauauagguaaguguaaugacccuuauccagguaacaauaacaauggagucaagggauucucauaccuggauggggcuaacacuuggcuagggaggacaauaaguacagccucgaggucuggauacgagauguuaaaagugccaaaugcauugacagaugauagaucaaagcccauucaaggucagacaauuguauuaaacgcugacuggagugguuacaguggguccuucauggacuauugggcugaaggggacugcuaucgagcguguuuuuauguggaguugauacguggaagacccaaggaggauaaagugugguggaccagcaauaguauaguaucgauguguuccaguacagaauuccugggacaauggaacuggccugauggggcuaaaauagaguacuuccucuaa

SEQ ID NO: 58402 - RNA, 1398 nt, Artificial Sequence
  derived and/or modified CDS sequence (wt) from neuraminidase__InfluenzaA__EPI448938
augaauccaaaucagaagauucuaugcacuucagccacugcuaucauaauaggcgcaaucgcaguacucauuggaauggcaaaccuaggauugaacauaggacugcaucuaaaaccgggcugcaauugcucacacucacaaccugaaacaaccaacacaagccaaacaauaauaaacaacuauuauaaugaaacaaacaucaccaacauccaaauggaagagagaacaagcaggaauuucaauaacuuaacuaaagggcucuguacuauaaauucauggcacauauaugggaaagacaaugcaguaagaauuggagagagcucggauguuuuagucacaagagaacccuauguuucaugcgacccagaugaaugcagguucuaugcucucagccaaggaacaacaaucagagggaaacacucaaacggaacaauacacgauaggucccaguaucgcgcccugauaagcuggccacuaucaucaccgcccacaguguacaacagcaggguggaaugcauuggguggucaaguacuaguugccaugauggcaaauccaggaugucaauauguauaucaggaccaaacaacaaugcaucugcaguaguaugguacaacagaaggccuguugcagaaauuaacacaugggcccgaaacauacuaagaacacaggaaucugaauguguaugccacaacggcguaugcccaguaguguucaccgaugggucugccacuggaccugcagacacaagaauauacuauuuuaaagaggggaaaauauugaaaugggagucucugacuggaacugcuaagcauauugaagaaugcucauguuacggggaacgaacaggaauuaccugcacaugcagggacaauuggcagggcucaaauagaccagugauucagauagacccaguagcaaugacacacacuagucaauauauaugcaguccuguucuuacagacaauccccgaccgaaugacccaaauauagguaaguguaaugacccuuauccagguaauaauaacaauggagucaagggauucucauaccuggauggggcuaacacuuggcuagggaggacaauaagcacagccucgaggucuggauacgagauguuaaaagugccaaaugcauugacagaugauagaucaaagcccauucaaggucagacaauuguauuaaacgcugacuggagugguuacaguggaucuuucauggacuauugggcugaaggggacugcuaucgagcguguuuuuauguggaguugauacguggaagacccaaggaggauaaagugugguggaccagcaauaguauaguaucgauguguuccaguacagaauuccugggacaauggaacuggccugauggggcuaaaauagaguacuuccucuaa

SEQ ID NO: 58403 - RNA, 1410 nt, Artificial Sequence
  derived and/or modified CDS sequence (wt) from neuraminidase__InfluenzaA__EPI445995
augaauccaaaucaaaagauaauagcacuuggcuccgcuucucuaacuauugcgauaauaugucuacucauucagauugccaucuuagcaacgacuaugacacuacauuucaugcagaaugaacacacuaacuccacgagaaauaaaguaguaccaugugagucaaucauaauagaaaggaacauaacagagauaguacauuugaaugguacuaucauagagaaggagaguugucccaaagcaguagaauacaagaauuggucaaaaccucaaugucaaauuacaggguuugccccuuucuccaaggacaacucaauuaggcuuucugcugguggggauauuugggugacaagagaaccuuaugugucgugcagucucaguaaauguuaucaauuugcacuugggcagggaaccacuuugaacaacagacacucaaauggcacaacacaugauagaaguccauauagaacccuucuaaugagugaauugggugucccauuucauuugggaaccaaacaagugugcauagcaugguccagcucaagcugccaugaugguagggcauggcuacauguuugugucacuggagaugauaagaaugcgacugcuaguguuauuuauggcgggaugcuuacugacaguauugguucauggucuaaaaacauccucagaacucaggagucagaaugcguuugcaucaauggaacuuguacaguaguaaugacugauggaagugcaucaggaagggcugauaccagaauacuauucauuagagaagggaagauuguccacauuagcccacugucaggaagugcucagcauguggaggaaugcucuuguuauccucgauacccagaaguuagauguguuugcagagacaauuggaaaggcuccaauagaccuguauuauacauaaauguggcagauuauaguauugauuccaguuaugugugcucaggacuuguuggcgacacaccaagaaaugaagacaguuccagcagcaguaacugcagggauccuaauaaugagagaggaggcccaggagugaaagggugggcguuugacaauggagaugauguuuggaugggaagaacaaucaaaaaggacucgcgcgcagguuaugaaacuuucagggucguugacgguuggaccuuggcuaauuccaagucacagacaaauaggcaagucauaguugacagugauaacuggucuggguauucuggaauguucucuguugaaggcaagaccugcaucaacagguguuuuuauguggaauugauaagagggagaccacaggagaccagagugugguggacuucaaauagcaucauuguauucuguggaacuucagguaccuauggaacaggcucauggccugauggagcggauaucaauuucaugucuauauaa

SEQ ID NO: 58404 - RNA, 1410 nt, Artificial Sequence
  derived and/or modified CDS sequence (wt) from neuraminidase__InfluenzaA__EPI470861
augaauccaaaucagaagauaauagcaauuggcucuguuucucuaacuauugcgacaauaugccuccucaugcagauugcuaucuuagcaacgacuaugacacuacauuucaagcagaaugaaugcaucaacuccucgaauaaucaaguagugccaugugaaccaaucauaauagaaaggaacauaacagagauagugcauuugaauaguacuaccuuagagaaggaaauuuguccuaaaguagcagacuacaggaauuggucaaaaccacaaugucaaaucacaggguucgcuccuuucuccaaggacaauucaauuaggcucuccgcagguggagauauuugggugacaagagaaccuuauguaucgugcggucuugguaaauguuaucaauuugcacuugggcagggaaccacuuuggagaacaaacacucaaacggcacagcacaugauagaacuccucauagaacccuuuuaaugaaugaguuggguguuccguuucauuuggcaaccaaacaagugugcauagcaugguccagcucaagcugccaugaugggaaagcaugguuacauguuugugucacuggggaugauagaaaugcaacggcuagcaucauuuaugaugggauacuuguugacaguauugguucauggucuaaaaacauccucagaacucaggagucagaaugcguuugcaucaauggaaccugugcaguaguaaugacugauggaagugcaucaggaagggcugacacuagaauacuauuuauuagagaggggaaaauugcacacauuagcccauugucaggaagugcucagcauguggaggaaugcuccuguuacccccgauauccagaaguuagauguguuugcagagacaauuggaagggauccaauaggcccguucuauauauaaauauggcaaauuauaguauugauuccaguuaugugugcucaggacuuguuggcgacacaccaagaaaugaugauaggucuagcagcagcaacugcagagauccuaauaacgagagaggggccccaggaguaaaagggugggccuuugacaauggaaaugacauuuggaugggaagaacaaucaaaaaggauucgcgcucagguuaugagacuuucagggucauuggugguuggaccacugcuaauuccaagucacagauaaauagacaagucauaguugacagugauaacucgucuggguauucugguaucuucucuguugaaggcaaaagcugcaucaacagguguuuuuacguggaguugauaagaggaagaccaaaggagacuagggugugguggacuucaaauagcaucauuguauuuuguggaacuucagguaccuauggaacaggcucauggccugauggggcgaauaucaauuucaugccuauauaa

SEQ ID NO: 58405 - RNA, 1401 nt, Artificial Sequence
  derived and/or modified CDS sequence (wt) from neuraminidase__InfluenzaA__EPI498036
augaauccaaaccagaagauaauagcaauuggcucuguuucucugaucauugcgauaauaugucuccucaugcagauugccaucuuaacaacgacuaugacacugcauuucaggcagaaugaaugcaguaacccaucgaauaaucaagugaugccaugugaaccaaucauauuagagaggaacacagugcacuugaauagcacuaucauagagagggaaauuugucccaaaguagcagacuacaagaauuggucaaaaccacaaugucaaauuacaggguucgcuccuuucucaaaggacaacucaauuaggcuuucugcagguggggauaucugggugacaagagaaccuuaugucucaugcagucucgacaaauguuaucaauuugcacuugggcagggaaccacccugaaaaacaagcacucaaauggcacuacucaugauagaaccccucacagaacucuuuuaaugaaugaguuaggugucccauuucauuugggaaccaaacaagugugcauagcauggucuaguucaagcugcuaugauggaaaagcaugguuacauauuuguguuacuggggaugacaaaaaugcuacugcuaguaucaucuaugaugggaugcuuguugacaguauugguucaugguccaaaaacauccucagaacucaggagucagaaugcguuuguaucaauggaacuugugcagugguaaugacugauggaagugcaucaggaaaggcagacacuaggguauuauucauaagagaagggaaaauuauaaauauuagcccauugucaggaagugcucagcacguugaggaaugcucuuguuauccucgguauccugaaguuagaugugucugcagagacaauuggaagggcuccaauaggcccauucuauauauaaauauggcugauuauagcauugaguccaguuaugugugcucaggacuuguuggcgacacaccaagaaaugaugauagcuccagcaguagcaacugcagagauccuaauaacgaaagaggggccccaggagugaaagggugggccuuugaugaugggaaugauguuuggaugggacggacaaucaaaaaugguucacgcucagguuaugagacuuuuagggucgucaaugguuggaccauggcuaauucaaagucacagauaaauaggcaagucauaguugacagugacgacuggucuggauauucuggcaucuucucuguugaaggcaaaaaaugcaucaacagguguuuuuauguggaguugauaagagggagaccacaggaacccagagugugguggaccucaaauagcaucauuguauucuguggaaccucagguacauauggaacaggcucauggccugauggagcgaauaucaacuucaugccaguauaa

SEQ ID NO: 58406 - RNA, 1410 nt, Artificial Sequence
  derived and/or modified CDS sequence (wt) from neuraminidase__InfluenzaA__EPI470902
augaauccaaaucagaagauaguagcaauugguuccgccucccuaacuauugcgacaaugugccuccucaugcagauugcccucuuugcuacaacuaugacacuacauuucaagcagacgggaugcacaaacuccucugacaaucaagcagugccauguggaccaaucauaauagaaaggaacauaacagaaauagugcauuugaauagcaccacuuuagaaaaggaaacuuguccuaaaucagcaggguacaggaauuggucuaaaccacaaugucaaaucacaggauucgcuccuuucuccaaggacaauucaauuaggcucgccgcagcuggagauauuugggugacaagagaaccuuaugugucaugcggucuugguaaauguuaucaauuugcacuugggcaggggaccaccuuggacaacaaacacucaaacggcacaacacaugauagaacuccucauagaacccuuuuaaugaaugaguuggguguuccguuucauuuggcaaccaaacaaguguguauagcaugguccagcucaagcugccaugauggaaaagcaugguuacauguuugugucacuggggaugauaagaaugcaaccgcuaguaucauuuaugaugggauacuuguugacagcauugcuucauggucuaaaaacauccucagaacucaggagucagaaugcguuuguauuaauggaaccuguacgguaguaaugacagauggaagugcaucaggaagggcugacaccagaauacuauuuauuagagaggggaaaaucguacacauuagcccauugucaggaagugcucagcauguugaggaaugcuccuguuacccccgauauccagaaguuagauguguuugcagagacaauuggaagggauccaauagacccguucuauuuauaaauauggcagauuauaguauugauuccaguuauguguguucagggcuuguuggcgacacaccaagaaaugaugauagaucuagcagcagcaacugcagagauccuaauaacgaaagaggagccccaggagugaaagggugggccuucgacaguggaaaugauauuuggaugggaagaacgaucgaaaaggauucgcgcucagguuaugagacuuucagggucauuggugguuggagcacagcuaauuccaagucacagauaaauagacaagucauaguugaucgugauaacucgucuggguauucugguauuuucucuguugaaggcaaaaguugcaucaacagguguuuuuauguagaguugauaagaggaagaccaaaagagaauagagugugguggacuucaaacagcaucauuguauuuuguggaacuucagguacuuauggaacaggcucauggccugauggggcgaauaucaaucucaugccgauauaa

SEQ ID NO: 58407 - RNA, 1401 nt, Artificial Sequence
  derived and/or modified CDS sequence (wt) from neuraminidase__InfluenzaA__EPI838241
augaauccaaaccagaagauaacagcaauuggcucugucucucuaaucauugcgauaauaugucuccucaugcagauugccaucuuaacaacgacuaugacacuacauuucaggcagaaugaaugcagcaacucaucgaauaaucaggugaugccaugugaaccaaucauaauagagaggaacacagugcauuuaaauagcacuaccauagagagggaaauuuguccuaaaguagcagaauacaagaauuggucaaaaccacaaugucaaauuacaggguucgccccuuuuucaaaagacaacucaauuaggcucucugcaaguggggauaucugggugacaagagaacccuaugucucaugcagucucgacaaauguuaucaauuugcacuugggcagggaaccacccugaaaaacaagcacucaaauggcacugcacaugauagaaccccucacagaacucuuuuaaugaaugaguuaggugucccauuucauuugggaaccaaacaagugugcauagcauggucuaguucaagcugcuaugauggaaaagcaugguugcauguuuguguuacuggggaugauaaaaaugcuacugcuaguaucaucuaugaugggaugcuugucgacaguauugguucaugguccaaaaacauccucagaacucaggagucagaaugcguuugcaucaauggaacuugugcagugguaaugacugauggaagugcaucaggaaaggccgacacuagaguauuauuuauaagagaagggaaaauuauaaauauuagcccauugucaggaagugcucagcacguugaggaaugcucuuguuacccucgguauccugaaguuaggugugucugcagagacaauuggaagggcuccaauaggcccauucuauauauaaauauggcugauuauagcauugaguccaguuaugugugcucuggacuuguuggcgacacaccaagaaaugaugauagcuccagcagcagcaacugcagagacccuaauaacgaaagaggggccccaggagugaaagggugggccuuugacgacgggaaugauguuuggaugggacgaacaaucaaaaaugguucacgcucagguuaugagaccuuuagggucgucaaugguuggaccauggcuaauucaaagucacagauaaauaggcaagucauaguugagagugaugacuggucuggguauucuggcaucuucucuguugaaggcaaaaaaugcaucaacagguguuuuuauguggaguugauaagagggagaccacaggaacccagagugugguggaccucaaauagcaucauuguguucuguggaaccucugguacauauggaacaggcucauggccugauggagcgaauaucaacuucaugccuauauaa

SEQ ID NO: 58408 - RNA, 1401 nt, Artificial Sequence; identical to SEQ ID NO: 58407
  derived and/or modified CDS sequence (wt) from neuraminidase__InfluenzaA__EPI680525

SEQ ID NO: 58409 - RNA, 1401 nt, Artificial Sequence; identical to SEQ ID NO: 58015
  derived and/or modified CDS sequence (wt) from neuraminidase__InfluenzaA__EPI690481

SEQ ID NO: 58410 - RNA, 1755 nt, Artificial Sequence
  derived and/or modified CDS sequence (wt) from hemagglutinin__InfluenzaB__ABL76276
augaaggcaauaauuguacuacucaugguaguaacauccaaugcagaucgaaucugcacugggauaacaucgucaaacucaccucauguggucaaaacagcuacucaaggggaggucaaugugacuggugugauaccacugacaacaacaccaacaaaaucucauuuugcaaaucucaaaggaacaaagaccagagggaaacuaugcccaaccugucucaacugcacagaucuggauguggccuuaggcagaccaauguguguggggaucacaccuucggcaaaagcuucaauacuccacgaagucagaccuguuacauccggaugcuuuccuauaaugcacgacagaacaaaaaucagacagcuacccaaucuucucagaggauaugaaaaaaucagauuaucaacccaaaacguuaucaacgcagaaaaggcaccaggaggacccuacagacuuggaaccucaggaucuugcccuaacgcuaccaguagaagcggauuuuucgcaacaauggcuugggcugucccaagggacaacaacaaaacagcaacgaauccacuaacaguagaaguaccacacaucuguacaaaagaagaagaccaaauuacuguuuggggguuccauucugauaacaaaacccaaaugaaaaaccucuauggagacucaaauccucaaaaguucaccucaucugcuaauggaguaaccacacauuauguuucucagauuggcggcuucccggaucaaacagaagacggagggcuaccacaaagcggcagaauuguuguugauuacauggugcaaaaaccugggaaaacaggaacaauugucuaucaaagagguauuuuguugccucaaaagguguggugcgcgaguggcaggagcaaaguaauaaaaggguccuugccuuuaauuggugaagcagauugccuucacgaaaaauacgguggauuaaacaaaagcaagccuuacuacacaggagaacaugcaaaagccauaggaaauugcccaauaugggugaaaacaccuuugaagcuugccaauggaaccaaauauagaccuccugcaaaacuauuaaaggaaagggguuucuucggagcuauugcugguuucuuagaaggaggaugggaaggaaugauugcagguuggcacggauacacaucucacggagcacauggaguggcaguggcagcagaccuuaagaguacgcaagaagccauaaacaagauaacaaaaaaucucaauucuuugagugagcuagaaguaaagaaucuucaaagacuaaguggugccauggaugaacuccacaacgaaauacucgagcuggaugagaaaguggaugaucucagagcugacacaauaagcucacaaauagaacuugcagucuugcuuuccaacgaaggaauaauaaacagugaagaugagcaucuauuggcacuugagagaaaacuaaagaaaaugcugggucccucugcuguagacauagggaauggaugcuucgaaaccaaacacaagugcaaccagaccugcuuagacaggauagcugcuggcaccuuuaaugcaggagaauuuucucuucccacuuuugauucacugaauauuacugcugcaucuuuaaaugaugauggauuggauaaccauacuauacugcucuacuacucaacugcugcuucuaguuuggcuguaacauugaugauagcuauuuuuauuguuuauaugaucuccagagacaauguuucuugcuccaucugucuauaa

SEQ ID NO: 58411 - RNA, 1755 nt, Artificial Sequence
  derived and/or modified CDS sequence (wt) from hemagglutinin__InfluenzaB__ABL76287
augaaggcaauaauuguacuacucaugguaguaacauccaaugcagaucgaaucugcacugggauaacaucgucaaacucaccucauguggucaaaacagcuacucaaggggaggucaaugugacuggugugauaccacugacaacaacaccaacaaaaucucauuuugcaaaucucaaaggaacaaagaccagagggaaacuaugcccaaccugucucaacugcacagaucuggauguggccuuaggcagaccaaugugugugggggucacaccuucagcaaaagcuucaauacuccacgaagucagaccuguuacauccggaugcuuuccuauaaugcacgacagaacaaaaaucagacagcuacccaaucuucucagaggauaugaaaaaaucagauuaucaacccaaaacguuaucaacgcagaaaaggcaccaggaggacccuacagacuuggaaccucaggaucuugcccuaacgcuaccaguagaagcggauuuuucgcaacaauggcuugggcuguuccaagggacaacaacaaaacagcaacgaauccacuaacaauagaaguaccacacaucuguacaaaagaagaagaccaaauuacuguuuggggguuccauucugauaacaaaauccaaaugaaaaaccucuauggagacucaaauccucaaaaguucaccucaucugcuaauggaguaaccacacauuauguuucucagauuggcggcuucccggaucaaacagaagacggagggcuaccacaaagcggcagaauuguuguugauuacauggugcaaaaaccugggaaaacaggaacaauugucuaucaaagagguauuuuguugccucaaaagguguggugcgcgaguggcaggagcaaaguaauaaaaggguccuugccuuuaauuggugaagcagauugccuucacgaaaaauaugguggauuaaacaaaagcaagccuuacuacacaggagaacaugcaaaagccauaggaaauugcccaauaugggugaaaacaccuuugaagcuugccaauggaaccaaauauagaccuccugcaaaacuauuaaaggaaagggguuucuucggagcuauugcugguuucuuagaagggggaugggaaggaaugauugcagguuggcacggauacacaucucacggagcacauggaguggcaguggcagcagaccuuaagaguacgcaagaagccauaaacaagauaacaaaaaaucucaauucuuugagugagcuagaaguaaagaaucuucaaagacuaaguggugccauggaugaacuccacaacgaaauacucgagcuggaugagaaaguggaugaucucagagcugacacaauaagcucacaaauagaacuugcagucuugcuuuccaacgaaggaauaauaaacagugaagaugagcaucuauuggcacuugagagaaaacuaaagaaaaugcugggucccucugcuguagacauagggaauggaugcuucgaaaccaaacacaagugcaaccagaccugcuuagacaggauagcugcuggcaccuuuaaugcaggagaauuuucucuucccacuuuugauucacugaauauuacugcugcaucuuuaaaugaugauggauuggauaaccauacuauacugcucuacuacucaacugcugcuucuaguuuggcuguaacauugaugauagcuauuuuuauuguuuauaugaucuccagagacaauguuucuugcuccaucugucuauaa

SEQ ID NO: 58412 - RNA, 1755 nt, Artificial Sequence
  derived and/or modified CDS sequence (wt) from hemagglutinin__InfluenzaB__ABL76298
augaaggcaauaauuguacuacucaugguaguaacauccaaugcagaucgaaucugcacugggauaacaucgucaaacucaccucauguggucaaaacagcuacucaaggggaggucaaugugacuggugugauaccacugacaacaacaccaacaaaaucucauuuugcaaaucucaaaggaacaaagaccagagggaaacuaugcccaaccugucucaacugcacagaucuggauguggccuuaggcagaccaaugugugugggggucacaccuucggcaaaagcuucaauacuccacgaagucagaccuguuacauccggaugcuuuccuauaaugcacgacagaacaaaaaucagacagcuacccaaucuucucagaggauaugaaaaaaucagauuaucaacccaaaacguuaucaacgcagaaaaggcaccaggaggacccuacagacuuggaaccucaggaucuugcccuaacgcuaccaguagaagcggauuuuucgcaacaauggcuugggcugucccaagggacaacaacaaaacagcaacgaauccacuaacaguagaaguaccacacaucuguacaaaagaagaagaccaaauuacuguuuggggguuccauucugauaacaaaacccaaaugaaaaaccucuauggagacucaaauccucaaaaauucaccucaucugcuaauggaguaaccacacauuauguuucucagauuggcggcuucccggaccaaacagaagacggagggcuaccacaaagcggcagaauuguuguugauuacauggugcaaaaaccugggaaaacaggaacaauugucuaucaaagagguauuuuguugccucaaaagguguggugcgcgaguggcaggagcaaaguaauaaaaggguccuugccuuuaauuggugaagcagauugccuucacgaaaaauacgguggauuaaacaaaagcaagccuuacuacacaggagaacaugcaaaagccauaggaaauugcccaauaugggugaaaacaccuuugaagcuugccaauggaaccaaauauagaccuccugcaaaacuauuaaaggaaagggguuucuucggagcuauugcugguuucuuagaaggaggaugggaaggaaugauugcagguuggcacggauacacaucucacggagcacauggaguggcaguggcagcagaccuuaagaguacgcaagaagccauaaacaagauaacaaaaaaucucaauucuuuaagugagcuagaaguaaagaaucuucaaagacuaaguggugccauggaugaacuccacaacgaaauacucgagcuggaugagaaaguggaugaucucagagcugacacaauaagcucacaaauagaacuugcagucuugcuuuccaacgaaggaauaauaaacagugaagaugagcaucuauuggcacuugagagaaaacuaaagaaaaugcugggucccucugcuguagacauagggaauggaugcuucgaaaccaaacacaagugcaaccagaccugcuuggacaggauagcugcuggcaccuuuaaugcaggagaauuuucucuucccacuuuugauucacugaauauuacugcugcaucuuuaaaugaugauggguuggauaaucauacuauacugcucuacuacucaacugcugcuucuaguuuggcuguaacauugaugauagcuauuuuuauuguuuauauggucuccagagacaauguuucuugcuccaucugucuauaa

SEQ ID NO: 58413 - RNA, 1755 nt, Artificial Sequence
  derived and/or modified CDS sequence (wt) from hemagglutinin__InfluenzaB__ABL76309
augaaggcaauaauuguacuacucaugguaguaacauccaaugcagaucgaaucugcacugggauaacaucgucaaacucaccucauguggucaaaacagcuacucaaggggaggucaaugugacuggugugauaccacugacaacaacaccaacaaaaucucauuuugcaaaucucaaaggaacaaagaccagagggaaacuaugcccaaccugucucaacugcacagaucuggauguggccuuaggcagaccaaugugugugggggucacaccuucggcaaaagcuucaauacuccacgaagucagaccuguuacauccggaugcuuuccuauaaugcacgacagaacaaaaaucagacagcuacccaaucuucucagaggauaugaaaaaaucagauuaucaacccaaaacguuaucaacgcagaaaaggcaccaggaggacccuacagacuuggaaccucaggaucuugcccuaacgcuaccaguagaaguggauuuuucgcaacaauggcuugggcuguuccaagggacaacaacaaaacagcaacgaauccacuaacaguagaaguaccacacaucuguacaaaagaagaagaccaaauuacuguuuggggguuccauucugauaacaaaacccaaaugaaaaaccucuauggagacucaaauccucaaaaguucaccucaucugcuaauggaguaaccacacauuauguuucucagauuggcggcuucccggaucaaacagaagacggagggcuaccacaaagcggcagaauuguuguugauuacauggugcaaagaccugggaaaacaggaacaauugucuaucaaagagguauuuuguugccucaaaagguguggugcgcgaguggcaggagcaaaguaauaaaaggguccuugccuuuaauuggugaagcagauugccuucacgaaaaauacgguggauuaaacaaaagcaagccuuacuacacaggagaacaugcaaaagccauaggaaauugcccaauaugggugaaaacaccuuugaagcuugccaauggaaccaaauauagaccuccugcaaaacuauuaaaggaaagggguuucuucggagcuauugcugguuucuuagaagggggaugggaaggaaugauugcagguuggcacggauacacaucucacggagcacauggaguggcaguggcagcagaccuuaagaguacgcaagaagccauaaacaagauaacaaaaaaucucaauucuuugagugagcuagaaguaaagaaucuucaaagacuaaguggugccauggaugaacuccacaacgaaauacucgagcuggaugagaaaguggaugaucucagagcugacacaauaagcucacaaauagaacuugcagucuugcuuuccaacgaaggaauaauaaacagugaagaugagcaucuauuggcacuugagagaaaacuaaagaaaaugcugggucccucugcuguagacauagggaauggaugcuucgaaaccaaacacaagugcaaccagaccugcuuagacaggauagcugcuggcaccuuuaaugcagaagaauuuucucuucccacuuuugauucacugaauauuacugcugcaucuuuaaaugaugauggauuggauaaccauacuauacugcucuacuacucaacugcugcuucuaguuuggcuguaacauugaugauagcuauuuuuauuguuuauaugaucuccagagacaauguuucuugcuccaucugucuauaa

SEQ ID NO: 58414 - RNA, 1755 nt, Artificial Sequence
  derived and/or modified CDS sequence (wt) from hemagglutinin__InfluenzaB__ABL76331
augaaggcaauaauuguacuacucaugguaguaacauccaaugcagaucgaaucugcacugggauaacaucgucaaacucaccucauguggucaaaacagcuacucaaggggaggucaaugugacuggugugauaccacugacaacaacaccaacaaaaucucauuuugcgaaucucaaaggaacaaagaccagagggaaacuaugcccaaccugucucaacugcacagaucuggauguggccuuaggcagaccaauguguguggggaucacaccuucagcaaaagcuucaauacuccacgaagucagaccuguuacauccggaugcuuuccuauaaugcacgacagaacaaaaaucagacagcuacccaaucuucucagaggguaugaaaaaaucagauuaucaacccaaaacguuaucaacgcagaaaaggcaccaggaggacccuacagacuuggaaccucaggaucuugcccuaacgcuaccaguagaagcggauuuuucgcaacaauggcuugggcuguuccaagggacaacaacaaaacagcaacgaauccacuaacaauagaaguaccacacaucuguacaaaagaagaagaccaaauuacuguuuggggguuccauucugauaacaaaacccaaaugaaaaaccucuauggagacucaaauccucaaaaguucaccucaucugcuaauggaguaaccacacauuauguuucucagauuggcggcuucccggaucaaacagaagacggagggcuaccacaaaguggcagaauuguuguugauuacauggugcaaaaaccugggaaaacaggaacaauugucuaucaaagagguauuuuguugccucaaaagguguggugcgcgaguggcaggagcaaaguaauaaaaggguccuugccuuuaauuggugaagcagauugccuucacgaaaaauaugguggauuaaacaaaagcaagccuuacuacacaggagaacaugcaaaagccauaggaaauugcccaauaugggugaaaacaccuuugaagcuugccaauggaaccaaauauagaccuccugcaaaacuauuaaaggaaagggguuucuucggagcuauugcugguuucuuagaagggggaugggaaggaaugauugcagguuggcacggauacacaucucacggagcacauggaguggcaguggcagcagaccuuaagaguacgcaagaagccauaaacaagauaacaaaaaaucucaauucuuugagugagcuagaaguaaagaaucuucaaagacuaaguggugccauggaugaacuccacaacgaaauacucgagcuggaugagaaaguggaugaucucagagcugacacaauaagcucacaaauagaacuugcagucuugcuuuccaacgaaggaauaauaaacagugaagaugagcaucuauuggcacuugagagaaaacuaaagaaaaugcugggucccucugcuguagacauagggaauggaugcuucgaaaccaaacacaagugcaaccagaccugcuuagacaggauagcugcuggcaccuuuaaugcaggagaauuuucucuucccacuuuugauucacugaauauuacugcugcaucuuuaaaugaugauggauuggauaaccauacuauacugcucuacuacucaacugcugcuucuaguuuggcuguaacauugaugauagcuauuuuuauuguuuauaugaucuccagagacaauguuucuugcucuaucugucuauaa

SEQ ID NO: 58415 - RNA, 1755 nt, Artificial Sequence
  derived and/or modified CDS sequence (wt) from hemagglutinin__InfluenzaB__ABL76342
augaaggcaauaauuguacuacucaugguaguaacauccaaugcagaucgaaucugcacugggauaacaucgucaaacucaccucauguggucaaaacagcuacucaaggggaggucaaugugacuggugugauaccacugacaacaacaccaacaaaaucucauuuugcaaaucucaaaggaacaaagaccagagggaaacuaugcccaaccugucucaacugcacagaucuggauguggccuuaggcagaccaaugugugugggggucacaccuucggcaaaagcuucaauacuccacgaagucagaccuguuacauccggaugcuuuccuauaaugcacgacagaacaaaaaucagacagcuacccaaucuucucagaggauaugaaaaaaucagauuaucaacccaaaacguuaucaacgcagaaaaggcaccaggaggacccuacagacuuggaaccucaggaucuugcccuaacgcuaccaguagaagcggauuuuucgcaacaauggcuugggcuguuccaagggacaacaacaaaacagcaacgaauccacuaacaguagaaguaccacacaucuguacaaaagaagaagaccaaauuacuguuuggggguuccauucugauaacaaaacccaaaugaaaaaccucuauggagacucaaauccucaaaaguucaccucaucugcuaauggaguaaccacacauuauguuucucagauuggcgacuucccggaucaaacagaagacggagggcuaccacaaagcggcagaauuguuguugauuacauggugcaaaaaccugggaaaacaggaacaauugucuaucaaagagguauuuuguugccucaaaagguguggugcgcgaguggcaggagcaaaguaauaagaggguccuugccuuuaauuggugaagcagauugccuucacgaaaaauacgguggauuaaacaaaagcaagccuuacuacacaggagaacaugcaaaagccauaggaaauugcccaauaugggugaaaacaccuuugaagcuugccaauggaaccaaauauagaccuccugcaaaacuauuaaaggaaagggguuucuucggagcuauugcugguuucuuagaagggggaugggaaggaaugauugcagguuggcacggauacacaucucacggagcacauggaguggcaguggcagcagaccuuaagaguacgcaagaagccauaaacaagauaacaaaaaaucucaauucuuugagugagcuagaaguaaagaaucuucaaagacuaaguggugccauggaugaacuccacaacgaaauacucgagcuggaugagaaaguggaugaucucagagcugacacaauaagcucacaaauagaacuugcagucuugcuuuccaacgaaggaauaauaaacagugaagaugagcaucuauuggcacuugagagaaaacuaaagaaaaugcugggucccucugcuguagacauagggaauggaugcuucgaaaccaaacacaagugcaaccagaccugcuuagacaggauagcugcuggcacuuuuaaugcaggagauuuuucucuucccacuuuugauucacugaauauuacugcugcaucuuuaaaugaugauggauuggauaaccauacuauacugcucuacuacucaacugcugcuucuaguuuggcuguaacauugaugauagcuauuuuuauuguuuauaugaucuccagagacaauguuucuugcuccaucugucuauaa

SEQ ID NO: 58416 - RNA, 1755 nt, Artificial Sequence
  derived and/or modified CDS sequence (wt) from hemagglutinin__InfluenzaB__ABL76353
augaaggcaauaauuguacuacucaugguaguaacauccaaugcagaucgaaucugcacugggauaacaucgucaaacucaccucauguggucaaaacagcuacucaaggggaggucaaugugacuggugugauaccacugacaacaacaccaacaaaaucucauuuugcaaaucucaaaggaacaaagaccagagggaaacuaugcccaaccugucucaacugcacagaucuggauguggccuuaggcagaccaaugugugugggggucacaccuucggcaaaagcuucaauacuccacgaagucagaccuguuacauccggaugcuuuccuauaaugcacgacagaacaaaaaucagacagcuacccaaucuucucagaggauaugaaaaaaucagauuaucaacccaaaacguuaucaacgcagaaaaggcaccaggaggacccuacagacuuggaaccucaggaucuugcccuaacgcuaccaguagaagcggauuuuucgcaacaauggcuugggcuguuccaagggacaacaacaaaacagcaacgaauccacuaacaguagaaguaccacacaucuguacaaaagaagaagaccaaauuacuguuuggggguuccauucugauaacaaaacccaaaugaaaaaccucuauggagacucaaauccucaaaaguucaccucaucugcuaauggaguaaccacacauuauguuucucagauuggcggcuucccggaucaaacagaagacggagggcuaccacaaagcggcagaauuguuguugauuacauggugcaaaaaccugggaaaacaggaacaauugucuaucaaagagguauuuuguugccucaaaagguguggugcgcgaguggcaggagcaaaguaauaagaggguccuugccuuuaauuggugaagcagauugccuucacgaaaaauacgguggauuaaacaaaagcaagccuuacuacacaggagaacaugcaaaagccauaggaaauugcccaauaugggugaaaacaccuuugaagcuugccaauggaaccaaauauagaccuccugcaaaacuauuaaaggaaagggguuucuucggagcuauugcugguuucuuagaagggggaugggaaggaaugauugcagguuggcacggauacacaucucacggagcacauggaguggcaguggcagcagaccuuaagaguacgcaagaagccauaaacaagauaacaaaaaaucucaauucuuugagugagcuagaaguaaagaaucuucaaagacuaaguggugccauggaugaacuccacaacgaaauacucgagcuggaugagaaaguggaugaucucagagcugacacaauaagcucacaaauagaacuugcagucuugcuuuccaacgaaggaauaauaaacagugaagaugagcaucuauuggcacuugagagaaaacuaaagaaaaugcugggucccucugcuguagacauagggaauggaugcuucgaaaccaaacacaagugcaaccagaccugcuuagacaggauagcugcuggcacuuuuaaugcaggagauuuuucucuucccacuuuugauucacugaauauuacugcugcaucuuuaaaugaugauggauuggauaaccauacuauacugcucuacuacucaacugcugcuucuaguuuggcuguaacauugaugauagcuauuuuuauuguuuauaugaucuccagagacaauguuucuugcuccaucugucuauaa

SEQ ID NO: 58417 - RNA, 1755 nt, Artificial Sequence
  derived and/or modified CDS sequence (wt) from hemagglutinin__InfluenzaB__ABL76375
augaaggcaauaauuguacuacucaugguaguaacauccaaugcagaucgaaucugcacugggauaacaucgucaaacucaccucauguggucaaaacagcuacucaaggggaggucaaugugacuggugcgauaccacugacaacaacaccaacaaaaucucauuuugcaaaucucaaaggaacaaagaccagagggaaacuaugcccaaccugucucaacugcacagaucuggauguggccuugggcagaccaauguguguggggaucacaccuucggcaaaagcuucaauacuccacgaagucagaccuguuacauccggaugcuuuccuauaaugcacgacagaacaaaaaucagacagcuacccaaucuucucagaggauaugaaaaaaucagauuaucaacccaaaacguuaucaacgcagaaaaggcaccaggaggacccuacagacuuggaacuucaggaucuugcccuaacgcuaccaguaaaagcggauuuuucgcaacaauggcuugggcugucccaagggacaacaacaaaacagcaacgaauccacuaacaguagaaguaccacacaucuguacaaaagaagaagaccaaauuacuguuuggggguuccauucugauaacaaaacccaaaugaaaaaccucuauggagacucaaauccucaaaaguucaccucaucugcuaauggaauaaccacacauuauguuucucagauugggggcuucccggaccaaacagaagacggagggcuaccacaaagcggcagaauuguuguugauuacauggugcaaaaaccugggaaaacaggaacaauugucuaucaaagagggauuuuguugccucaaaagguguggugcgcgaguggcaggagcaaaguaauaaaaggguccuugccuuuaauuggugaagcagauugccuucacgaaaaauacgguggauuaaacaaaagcaagccuuacuacacaggagaacaugcaaaagccauagggaauugcccaauaugggugaaaacaccuuugaagcuugccaauggaaccaaauauagaccuccugcaaaacuauuaaaggaaagggguuucuucggagcuauugcugguuucuuagaaggaggaugggaaggaaugauugcagguuggcacggauacacaucucacggagcacacggaguggcaguggcagcagaccuuaagaguacgcaagaagccauaaacaagauaacaaaaaaucucaauucuuugagugagcuagaaguaaagaaccuucaaagacuaaguggugccauggaugaacuccauaacgaaauacucgagcuggaugagaaaguggaugaucucagagcugacacaauaaguucacaaauagaacuugcagucuugcuuuccaacgaaggaauaauaaacagugaagaugagcaucuauuggcacuugagagaaaacuaaagaaaaugcugggucccucugcuguagacauagggaauggaugcuucgaaaccaaacacaagugcaaccagaccugcuuagacaggauagcugcuggcaccuuuaaugcaggagaauuuucucuucccacuuuugauucacugaacauuacugcugcaucuuuaaaugaugauggauuggauaaccauacuauacugcucuacuacucaacugcugcuucuaguuuggcuguaacauugaugauagcuauuuuuauuguuuauaugaucuccagagacaauguuucuugcuccaucugucuauaa

SEQ ID NO: 58418 - RNA, 1755 nt, Artificial Sequence
  derived and/or modified CDS sequence (wt) from hemagglutinin__InfluenzaB__ABL76386
augaaggcaauaauuguacuacucaugguaguaacauccaaugcagaucgaaucugcacugggauaacaucgucaaacucaccucauguggucaaaacagcuacucaaggggaggucaaugugacuggugcgauaccacugacaacaacaccaacaaaaucucauuuugcaaaucucaaaggaacaaagaccagagggaaacuaugcccaaccugucucaacugcacagaucuggauguggccuugggcagaccaauguguguggggaucacaccuucggcaaaagcuucaauacuccacgaagucagaccuguuacauccggaugcuuuccuauaaugcacgacagaacaaaaaucagacagcuacccaaucuucucagaggauaugaaaaaaucagauuaucaacccaaaacguuaucaacgcagaaaaggcaccaggaggacccuacagacuuggaacuucaggaucuugcccuaacgcuaccaguaaaagcggauuuuucgcaacaauggcuugggcugucccaagggacaacaacaaaacagcaacgaauccacuaacaguagaaguaccacacaucuguacaaaagaagaagaccaaauuacuguuuggggguuccauucugauaacaaaacccaaaugaaaaaccucuauggagacucaaauccucaaaaguucaccucaucugcuaauggaauaaccacacauuauguuucucagauugggggcuucccggaccaaacagaagacggagggcuaccacaaagcggcagaauuguuguugauuacauggugcaaaaaccugggaaaacaggaacaauugucuaucaaagagggauuuuguugccucaaaagguguggugcgcgaguggcaggagcaaaguaauaaaaggguccuugccuuuaauuggugaagcagauugccuucacgaaaaauacgguggauuaaacaaaagcaagccuuacuacacaggagaacaugcaaaagccauagggaauugcccaauaugggugaaaacaccuuugaagcuugccaauggaaccaaauauagaccuccugcaaaacuauuaaaggaaagggguuucuucggagcuauugcugguuucuuagaaggaggaugggaaggaaugauugcagguuggcacggauacacaucucacggagcacacggaguggcaguggcagcagaccuuaagaguacgcaagaagccauaaacaagauaacaaaaaaucucaauucuuugagugagcuagaaguaaagaaccuucaaagacuaaguggugccauggaugaacuccauaacgaaauacucgagcuggaugagaaaguggaugaucucagagcugacacaauaagcucacaaauagaacuugcagucuugcuuuccaacgaaggaauaauaaacagugaagaugagcaucuauuggcacuugagagaaaacuaaagaaaaugcugggucccucugcuguagacauagggaauggaugcuucgaaaccaaacacaagugcaaccagaccugcuuagacaggauagcugcuggcaccuuuaaugcaggagaauuuucucuucccacuuuugauucacugaacauuacugcugcaucuuuaaaugaugauggauuggauaaccauacuauacugcucuacuacucaacugcugcuucuaguuuggcuguaacauugaugauagcuauuuuuauuguuuauaugaucuccagagacaauguuucuugcuccaucugucuauaa

SEQ ID NO: 58419 - RNA, 1755 nt, Artificial Sequence
  derived and/or modified CDS sequence (wt) from hemagglutinin__InfluenzaB__ABL76408
augaaggcaauaauuguacuacucaugguaguaacauccaaugcagaucgaaucugcacugggauaacaucgucaaacucaccucauguggucaaaacagcuacucaaggggaggucaaugugacuggugcgauaccacugacaacaacaccaacaaaaucucauuuugcaaaucucaaaggaacaaagaccagagggaaacuaugcccaaccuguuucaacugcaccgaucuggauguggccuugggcagaccaauguguguggggaucacaccuucggcaaaagcuucaauacuccacgaagucagaccuguuacauccggaugcuuuccuauaaugcacgacagaacaaaaaucagacagcuacccaaucuucucagaggauaugaaaaaaucagauuaucaacccaaaacguuaucgacgcagaaaaggcaccaggaggacccuacagacuuggaacuucaggaucuugcccuaacgcuaccaguaaaagcggauuuuucgcaacaauggcuugggcugucccaaggggcaacaacaaaacagcaacgaauccacuaacaguagaaguaccacacaucuguacaaaagaagaagaccaaauuacuguuuggggguuccauucugauaacaaaacccaaaugaaaaaccucuauggagacucaaauccucaaaaguucaccucaucugcuaauggaauaaccacacauuauguuucucagauugggggcuucccggaccaaacagaagacggagggcuaccacaaagcggcagaauuguuguugauuacauggugcaaaaaccugggaaaacaggaacaauugucuaucaaagagggauuuuguugccucaaaagguguggugcgcgaguggcaggagcaaaguaauaaaaggguccuugccuuuaauuggugaagcugauugccuucacgaaaaauacgguggauuaaacaaaagcaagccuuacuacacaggagaacaugcaaaagccauagggaauugcccaauaugggugaaaacaccuuugaagcuugccaauggaaccaaauauagaccuccugcaaaacuauuaaaggaaagggguuucuuuggagcuauugcugguuucuuagaaggaggaugggaaggaaugauugcagguuggcacggauacacaucucacggagcacacggaguggcaguggcagcagaccuuaagaguacgcaagaagccauaaacaagauaacaaaaaaucucaauucuuugagugagcuagaaguaaagaaccuucaaagacugaguggugccauggaugaacuccauaacgaaauacucgagcuggaugagaaaguggaugaucucagagcugacacaauaaguucacaaauagaacuugcagucuugcuuuccaaugaaggaauaauaaacagugaagaugagcaucuauuggcacuugagagaaaacuaaagaaaaugcugggucccucugcuguagacauagggaauggaugcuucgaaaccaaacacaagugcaaccagaccugcuuagacaggauagcugcuggcaccuuuaaugcaggagaauuuucucuucccacuuuugauucacugaacauuacugcugcaucuuuaaaugaugauggauuggauaaccauacuauacugcucuacuacucaacugcugcuucuaguuuggcuguaacauugaugauagcuauuuuuauuguuuauaugaucuccagagacaauguuucuugcuccaucugucuauaa

SEQ ID NO: 58420 - RNA, 1755 nt, Artificial Sequence
  derived and/or modified CDS sequence (wt) from hemagglutinin__InfluenzaB__ABL76419
augaaggcaauaauuguacuacucaugguaguaacauccaaugcagaucgaaucugcacugggauaacaucgucaaacucaccucauguggucaaaacagcuacucaaggggaggucaaugugacuggugcgauaccacugacaacaacaccaacaaaaucucauuuugcaaaucucaaaggaacaaagaccagagggaaacuaugcccaaccuguuucaacugcaccgaucuggauguggccuugggcagaccaauguguguggggaucacaccuucggcaaaagcuucaauacuccacgaaaucagaccuguuacauccggaugcuuuccuauaaugcacgacagaacaaaaaucagacagcuacccaaucuucucagaggauaugaaaaaaucagauuaucaacccaaaacguuaucgacgcagaaaaggcaccaggaggacccuacagacuuggaacuucaggaucuugcccuaacgcuaccaguaaaagcggauuuuucgcaacaauggcuugggcugucccaaggggcaacaacaaaacagcaacgaauccacuaacaguagaaguaccacacaucuguacaaaagaagaagaccaaauuacuguuuggggguuccauucugauaacaaaacccaaaugaaaaaccucuauggagacucaaauccucaaaaguucaccucaucugcuaauggaauaaccacacauuauguuucucagauugggggcuucccggaccaaacagaagacggagggcuaccacaaagcggcagaauuguuguugauuacauggugcaaaaaccugggaaaacaggaacaauugucuaucaaagagggauuuuguugccucaaaagguguggugcgcgaguggcaggagcaaaguaauaaaaggguccuugccuuuaauuggugaagcugauugccuucacgaaaaauaugguggauuaaacaaaagcaagccuuacuacacaggagaacaugcaaaagccauagggaauugcccaauaugggugaaaacaccuuugaagcuugccaauggaaccaaauauagaccuccugcaaaacuauuaaaggaaagggguuucuuuggagcuauugcugguuucuuagaaggaggaugggaaggaaugauugcagguuggcacggauacacaucucacggagcacacggaguggcaguggcagcagaccuuaagaguacgcaagaagccauaaacaagauaacaaaaaaucucaauucuuugagugagcuagaaguaaagaaccuucaaagacuaaguggugccauggaugaacuccauaacgaaauacucgagcuggaugagaaaguggaugaucucagagcugacacaauaaguucacaaauagaacuugcagucuugcuuuccaaugaaggaauaauaaacagugaagaugagcaucuauuggcacuugagagaaaacuaaagaaaaugcugggucccucugcuguagacauaggaaauggaugcuucgaaaccaaacacaagugcaaccagaccugcuuagacaggauagcugcuggcaccuuuaaugcaggagaauuuucucuucccacuuuugauucacugaacauuacugcugcaucuuuaaaugaugauggauuggauaaccauacuauacugcucuacuacucaacugcugcuucuaguuuggcuguaacauugaugauagcuauuuuuauuguuuauaugaucuccagagacaauguuucuugcuccaucugucuauaa

SEQ ID NO: 58421 - RNA, 1758 nt, Artificial Sequence
  derived and/or modified CDS sequence (wt) from hemagglutinin__InfluenzaB__ABL76441
augaaggcaauaauuguacuacucaugguaguaacauccaaugcagaucgaaucugcacugggauaacaucgucaaacucaccccauguggucaaaacugcuacucaaggggaggucaaugugacuggugugauaccacugacaacaacacccaccaaaucucauuuugcaaaucucaaaggaacaaaaaccagagggaaacuaugcccaaaaugccucaacugcacagaucuggacguggccuugggcagaccaaaaugcacggggaacauacccucggcaaaaguuucaauacuccaugaagucagaccuguuacaucugggugcuuuccuauaaugcacgacagaacaaaaauuagacagcugcccaaccuucucagaggauacgaacauaucagguuaucaacucauaacguuaucaaugcagaaaaggcaccaggaggacccuacaaaauuggaaccucagggucuugcccuaacguuaccaauggaaacggauuuuucgcaacaauggcuugggccgucccaaaaaacgacaacaacaaaacagcaacaaauucauuaacaauagaaguaccauacauuuguacagaaggagaagaccaaauuaccguuuggggguuccacucugauaacgaaacccaaauggcaaaacucuauggggacucaaagccccagaaguucaccucaucugccaacggagugaccacacauuauguuucacagauugguggcuucccaaaucaaacagaagacggaggacuaccacaaagugguagaauuguuguugauuacauggugcaaaaaucugggaaaccaggaacaauuaccuaucaaagagguauuuuauugccucaaaaaguguggugcgcaaguggcaggagcaagguaauaaaaggauccuugccuuuaauuggagaagcagauugccuccacgaaaaauacgguggauuaaacaaaagcaagccuuacuacacaggggaacaugcaaaggccauaggaaauugcccaauaugggugaaaacacccuugaagcuggccaauggaaccaaauauagaccuccugcaaaacuauuaaaggaaagggguuucuucggagcuauugcugguuucuuagaaggaggaugggaaggaaugauugcagguuggcacggauacacaucccauggggcacauggaguagcaguggcagcagaccuuaagagcacucaagaagccauaaacaagauaacaaaaaaccucaacucuuugagugagcuggaaguaaagaaucuucaaagacuaagcggugccauggaugaacuccacaacgaaauacuagaacuagacgagaaaguggaugaucucagagcugauacaauaagcucacaaauagaacucgcaguccugcuuuccaaugaaggaauaauaaacagugaagaugagcaucucuuggcgcuugaaagaaagcugaagaaaaugcugggccccucugcuguagagauagggaauggaugcuucgaaaccaaacacaagugcaaccagaccugucucgacagaauagcugcugguaccuuugaugcaggagaauuuucucuccccacuuuugauucacugaauauuacugcugcaucuuuaaaugacgaugaauuggauaaucauacuauacugcuuuacuacucaacugcugccuccaguuuggcuguaacauugaugauagcuaucuuuguuguuuauauggucuccagagacaauguuucuugcuccaucugucuauaa

SEQ ID NO: 58422 - RNA, 1758 nt, Artificial Sequence
  derived and/or modified CDS sequence (wt) from hemagglutinin__InfluenzaB__ABL76463
augaaggcaauaauuguacuacucaugguaguaacauccaaugcagaucgaaucugcacugggauaacaucgucaaacucaccccauguggucaaaacugcuacucaaggggaggucaaugugacuggugugauaccacugacaacaacacccaccaaaucucauuuugcaaaucucaaaggaacaaaaaccagagggaaacuaugcccaaaaugccucaacugcacagaucuggacguggccuugggcagaccaaaaugcacggggaacauacccucggcaaaaguuucaauacuccaugaagucagaccuguuacaucugggugcuuuccuauaaugcacgacagaacaaaaauuagacagcugcccaaccuucucagaggauacgaacauaucagguuaucaacucauaacguuaucaaugcagaaaaggcaccaggaggacccuacaaaauuggaaccucagggucuugcccuaacguuaccaauggaaacggauuuuucgcaacaauggcuugggccgucccaaaaaacgacaacaacaaaacagcaacaaauucauuaacaauagaaguaccauacauuuguacagaaggagaagaccaaauuaccguuuggggguuccacucugauaacgaaacccaaauggcaaaacucuauggggacucaaagccccagaaguucaccucaucugccaacggagugaccacacauuacguuucacagauugguggcuucccaaaucaaacagaagacggaggacuaccacaaagugguagaauuguuguugauuacauggugcaaaaaucugggaaaacaggaacaauuaccuaucaaagagguauuuuauugccucaaaaaguguggugcgcaaguggcaggagcaagguaauaaaaggauccuugccuuuaauuggagaagcagauugccuccacgaaaaauacgguggauuaaacaaaagcaagccuuacuacacaggggaacaugcaaaggccauaggaaauugcccaauaugggugaaaacacccuugaagcuggccaauggaaccaaauauagaccuccugcaaaacuauuaaaggaaagggguuucuucggagcuauugcugguuucuuagaaggaggaugggaaggaaugauugcagguuggcacggauacacaucccauggggcacauggaguagcaguggcagcagaccucaagaguacucaagaagccauaaacaagauaacaaaaaaucucaacucuuugagugagcuggaaguaaagaaucuucaaagacuaagcggugccauggaugaacuccacaacgaaauacuagaacuagacgagaaagugaaugaucucagagcugauacaauaagcucacaaauagaacucgcagucuugcuuuccaaugaaggaauaauaaacagugaagaugagcaucucuuggcgcuugaaagaaagcugaagaaaaugcugggccccucugcuguagagauagggaauggaugcuucgaaaccaaacacaagugcaaccagacuugucucgacagaauagcugcugguaccuuugaugcaggagaauuuucucuccccacuuuugauucacugaauauuacugcugcaucuuuaaaugacgauggauuggauaaucauacuauacugcuuuacuacucaacugcugccuccaguuuggcuguaacauugaugauagcuaucuuuguuguuuauauggucuccagagacaauguuucuugcuccaucugucuauaa

SEQ ID NO: 58423 - RNA, 1758 nt, Artificial Sequence
  derived and/or modified CDS sequence (wt) from hemagglutinin__InfluenzaB__ABL76474
augaaggcaauaauuguacuacucaugguaguaacauccaaugcagaucgaaucugcacugggauaacaucgucaaacucaccccauguggucaaaacugcuacucaaggggaggucaaugugacuggugugauaccacugacaacaacacccaccaaaucucauuuugcaaaucucaaaggaacaaaaaccagagggaaacuaugcccaaaaugccucaacugcacagaucuggacguggccuugggcagaccaaaaugcacggggaacauacccucggcaaaaguuucaauacuccaugaagucagaccuguuacaucugggugcuuuccuauaaugcacgacagaacaaaaauuagacagcugcccaaccuucucagaggauacgaacauaucagguuaucaacucauaacguuaucaaugcagaaaaggcaccaggaggacccuacaaaauuggaaccucagggucuugcccuaacguuaccaauggaaacggauuuuucgcaacaauggcuugggccgucccaaaaaacgacaacaacaaaacagcaacaaauucauuaacaauagaaguaccauacauuuguacagaaggagaagaccaaauuaccguuuggggguuccacucugauaacgaaacccaaauggcaaaacucuauggggacucaaagccccagaaguucaccucaucugccaacggagugaccacacauuauguuucacagauugguggcuucccaaaucaaacagaagacggaggacuaccacaaagugguagaauuguuguugauuacauggugcaaaaaucugggaaaacaggaacaauuaccuaucaaagagguauuuuauugccucaaaaaguguggugcgcaaguggcaggagcaagguaauaaaaggauccuugccuuuaauuggagaagcagauugccuccacgaaaaauacgguggauuaaacaaaagcaagccuuacuacacaggggaacaugcaaaggccauaggaaauugcccaauaugggugaaaacacccuugaagcuggccaauggaaccaaauauagaccuccugcaaaacuauuaaaggaaagggguuucuucggagcuauugcugguuucuuagaaggaggaugggaaggaaugauugcagguuggcacggauacacaucccauggggcacauggaguagcaguggcagcagaccuuaagagcacucaagaagccauaaacaagauaacaaaaaaccucaacucuuugagugagcuggaaguaaagaaucuucaaagacuaagcggugccauggaugaacuccacaacgaaauacuagaacuagacgagaaaguggaugaucucagagcugauacaauaagcucacaaauagaacucgcaguccugcuuuccaaugaaggaauaauaaacagugaagaugagcaucucuuggcgcuugaaagaaagcugaagaaaaugcugggccccucugcuguagagauagggaauggaugcuucgaaaccaaacacaagugcaaccagaccugucucgacagaauagcugcugguaccuuugaugcaggagaauuuucucuccccacuuuugauucacugaauauuacugcugcaucuuuaaaugacgaugaauuggauaaucauacuauacugcuuuacuacucaacugcugccuccaguuuggcuguaacauugaugauagcuaucuuuguuguuuauauggucuccagagacaauguuucuugcuccaucugucuauaa

SEQ ID NO: 58424 - RNA, 1758 nt, Artificial Sequence
  derived and/or modified CDS sequence (wt) from hemagglutinin__InfluenzaB__ABL76485
augaaggcaauaauuguacuacucaugguaguaacauccaaugcagaucgaaucugcacugggauaacaucgucaaacucaccccauguggucaaaacugcuacucaaggggaggucaaugugacuggugugauaccacugacaacaacacccaccaaaucucauuuugcaaaucucaaaggaacaaaaaccagagggaaacuaugcccaaaaugccucaacugcacagaucuggacguggccuugggcagaccaaaaugcacggggaacauacccucggcagaaguuucaauacuccaugaagucagaccuguuacaucugggugcuuuccuauaaugcacgacagaacaaaaauuagacagcugcccaaccuucucagaggauacgaacauaucagguuaucaacucauaacguuaucaaugcagaaaaggcaccaggaggacccuacaaaauuggaaccucagggucuugcccuaacguuaccaauggaaacggauuuuucguaacaauggcuugggccgucccaaaaaacgacaacaacaaaacagcaacaaauucauuaacaauagaaguaccauacauuuguacagaaggagaagaccaaauuaccguuuggggguuccacucugauaacgaaacccaaauggcaaaacucuauggggacucaaagccccagaaguucaccucaucugccaacggagugaccacacauuacguuucacagauugguggcuucccaaaucaaacagaagacggaggacuaccacaaagugguagaauuguuguugauuacauggugcaaaaaucugggaaaacaggaacaauuaccuaucaaagagguauuuuauugccucaaaaaguguggugcgcaaguggcaggagcaagguaauaaaaggauccuugccuuuaauuggagaagcagauugccuccacgaaaaauacgguggauuaaacaaaagcaagccuuacuacacaggggaacaugcaaaggccauaggaaauugcccaauaugggugaaaacacccuugaagcuggccaauggaaccaaauauagaccuccugcaaaacuauuaaaggaaagggguuucuucggagcuauugcugguuucuuagaaggaggaugggaaggaaugauugcagguuggcacggauacacaucccauggggcacauggaguagcaguggcagcagaccuuaagagcacucaagaagccauaaacaagauaacaaaaaaucucaacucuuugagugagcuggaaguaaagaaucuucaaagacuaagcggugccauggaugaacuccacaacgaaauacuagaacuagacgagaaaguggaugaucucagagcugauacaauaagcucacaaauagaacucgcaguccugcuuuccaaugaaggaauaauaaacagugaaaaugagcaucucuuggcgcuugaaagaaagcugaagaaaaugcugggccccucugcuguagagauagggaauggaugcuucgaaaccaaacacaagugcaaccagaccugucucgacagaauagcugcugguaccuuugaugcaggagaauuuucucuccccacuuuugauucacugaauauuacugcugcaucuuuaaaugacgauggauuggauaaucauacuauacugcuuuacuacucaacugcugccuccaguuuggcuguaacauugaugauagcuaucuuuguuguuuauauggucuccagagacaauguuucuugcuccaucugucuauaa

SEQ ID NO: 58425 - RNA, 1758 nt, Artificial Sequence
  derived and/or modified CDS sequence (wt) from hemagglutinin__InfluenzaB__ABL76507
augaaggcaauaauuguacuacucaugguaguaacauccaaugcagaucgaaucugcacugggauaacaucgucaaacucaccccauguggucaaaacugcuacucaaggggaggucaaugugacuggugugauaccacugacaacaacacccaccaaaucucauuuugcaaaucucaaaggaacaaaaaccagagggaaacuaugcccaaaaugccucaacugcacagaucuggacguggccuugggcagaccaaaaugcacggggaacauacccucggcagaaguuucaauacuccaugaagucagaccuguuacaucugggugcuuuccuauaaugcacgacagaacaaaaauuagacagcugcccaaccuucucagaggauacgaacauaucagguuaucaacucauaacguuaucaaugcagaaaaggcaccaggaggacccuacaaaauuggaaccucagggucuugcccuaacguuaccaauggaaacggauuuuucgcaacaauggcuugggccgucccaaaaaacgacaacaacaaaacagcaacaaauucauuaacaauagaaguaccauacauuuguacagaaggagaagaccaaauuaccguuuggggguuccacucugauaacgaaauccaaauggcaaaacucuauggggacucaaagccccagaaguucaccucaucugccaacggagugaccacacauuacguuucacagauugguggcuucccaaaucaaacagaagacggaggacuaccacaaagugguagaauuguuguugauuacauggugcaaaaaucugggaaaacaggaacaauuaccuaucaaagagguauuuuauugccucaaaaaguguggugcgcaaguggcaggagcaagguaauaaaaggauccuugccuuuaauuggagaagcagauugccuccacgaaaaauacgguggauuaaacaaaagcaagccuuacuacacaggggaacaugcaaaggccauaggaaauugcccaauaugggugaaaacacccuugaagcuggccaauggaaccaaauauagaccuccugcaaaacuauuaaaggaaagggguuucuucggagcuauugcugguuucuuagaaggaggaugggaaggaaugauugcagguuggcacggauacacaucccauggggcacauggaguagcaguggcagcagaccuuaagagcacucaagaagccauaaacaagauaacaaaaaaucucaacucuuugagugagcuggaaguaaagaaucuucaaagacuaagcggugccauggaugaacuccacaacgaaauacuagaacuagacgagaaaguggaugaucucagagcugauacaauaagcucacaaauagaacucgcaguccugcuuuccaaugaaggaauaauaaacagugaagaugagcaucucuuggcgcuugaaagaaagcugaagaaaaugcugggccccucugcuguagagauagggaauggaugcuucgaaaccaaacacaagugcaaccagaccugucucgacagaauagcugcugguaccuuugaugcaggagaauuuucucuccccacuuuugauucacugaauauuacugcugcaucuuuaaaugacgauggauuggauaaucauacuauacugcuuuacuacucaacugcugccuccaguuuggcuguaacauugaugauagcuaucuuuguuguuuauauggucuccagagacaauguuucuugcuccaucugucuauaa

SEQ ID NO: 58426 - RNA, 1758 nt, Artificial Sequence
  derived and/or modified CDS sequence (wt) from hemagglutinin__InfluenzaB__ABL76518
augaaggcaauaauuguacuacucaugguaguaacauccaaugcagaucgaaucugcacugggauaacaucgucaaacucaccccauguggucaaaacugcuacucaaggggaggucaaugugacuggugugauaccacugacaacaacacccaccaaaucucauuuugcaaaucucaaaggaacaaaaaccagagggaaacuaugcccaaaaugccucaacugcacagaucuggacguggccuugggcagaccaaaaugcacggggaacauacccucggcagaaguuucaauacuccaugaagucagaccuguuacaucugggugcuuuccuauaaugcacgacagaacaaaaauuagacagcugcccaaccuucucagaggauacgaacauaucagguuaucaacucauaacguuaucaaugcagaaaaggcaccaggaggacccuacaaaauuggaaccucagggucuugcccuaacguuaccaauggaaacggauuuuucgcaacaauggcuugggccgucccaaaaaacgacaacaacaaaacagcaacaaauucauuaacaauagaaguaccauacauuuguacagaaggagaagaccaaauuaccguuuggggguuccacucugauaacgaaaaccaaauggcaaaacucuauggggacucaaagccccagaaguucaccucaucugccaacggagugaccacacauuacguuucacagauugguggcuucccaaaucaaacagaagacggaggacuaccacaaagugguagaauuguuguugauuacauggugcaaaaaucugggaaaacaggaacaauuaccuaucaaagagguauuuuauugccucaaaaaguguggugcgcaaguggcaggagcaagguaauaaaaggauccuugccuuuaauuggagaagcagauugccuccacgaaaaauacgguggauuaaacaaaagcaagccuuacuacacaggggaacaugcaaaggccauaggaaauugcccaauaugggugaaaacacccuugaagcuggccaauggaaccaaauauagaccuccugcaaaacuauuaaaggaaagggguuucuucggagcuauugcugguuucuuagaaggaggaugggaaggaaugauugcagguuggcacggauacacaucccauggggcacauggaguagcaguggcagcagaccuuaagagcacucaagaagccauaaacaagauaacaaaaaaucucaacucuuugagugagcuggaaguaaagaaucuucaaagacuaagcggugccauggaugaacuccacaacgaaauacuagaacuagacgagaaaguggaugaucucagagcugauacaauaagcucacaaauagaacucgcaguccugcuuuccaaugaaggaauaauaaacagugaagaugagcaucucuuggcgcuugaaagaaagcugaagaaaaugcugggccccucugcuguagagauagggaauggaugcuucgaaaccaaacacaagugcaaccagaccugucucgacagaauagcugcugguaccuuugaugcaggagaauuuucucuccccacuuuugauucacugaauauuacugcugcaucuuuaaaugacgauggauuggauaaucauacuauacugcuuuacuacucaacugcugccuccaguuuggcuguaacauugaugauagcuaucuuuguuguuuauauggucuccagagacaauguuucuugcuccaucugucuauaa

SEQ ID NO: 58427 - RNA, 1758 nt, Artificial Sequence
  derived and/or modified CDS sequence (wt) from hemagglutinin__InfluenzaB__ABL76529
augaaggcaauaauuguacuacucaugguaguaacauccaaugcagaucgaaucugcacugggauaacaucgucaaacucaccccauguggucaaaacugcuacucaaggggaggucaaugugacuggugugauaccacugacaacaacacccaccaaaucucauuuugcaaaucucaaaggaacaaaaaccagagggaaacuaugcccaaaaugccucaacugcacagaucuggacguggccuugggcagaccaaaaugcacggggaacauacccucggcagaaguuucaauacuccaugaagucagaccuguuacaucugggugcuuuccuauaaugcacgacagaacaaaaauuagacagcugcccaaccuucucagaggauacgaacauaucagguuaucaacucauaacguuaucaaugcagaaaaggcaccaggaggacccuacaaaauuggaaccucagggucuugcccuaacguuaccaauggaaacggauuuuucguaacaauggcuugggccgucccaaaaaacgacaacaacaaaacagcaacaaauucauuaacaauagaaguaccauacauuuguacagaaggagaagaccaaauuaccguuuggggguuccacucugauaacgaaacccaaauggcaaaacucuauggggacucaaagccccagaaguucaccucaucugccaacggagugaccacacauuacguuucacagauugguggcuucccaaaucaaacagaagacggaggacuaccacaaagugguagaauuguuguugauuacauggugcaaaaaucugggaaaacaggaacaauuaccuaucaaagagguauuuuauugccucaaaaaguguggugcgcaaguggcaggagcaagguaauaaaaggauccuugccuuuaauuggagaagcagauugccuccacgaaaaauacgguggauuaaacaaaagcaagccuuacuacacaggggaacaugcaaaggccauaggaaauugcccaauaugggugaaaacacccuugaagcuggccaauggaaccaaauauagaccuccugcaaaacuauuaaaggaaagggguuucuucggagcuauugcugguuucuuagaaggaggaugggaaggaaugauugcagguuggcacggauacacaucccauggggcacauggaguagcaguggcagcagaccuuaagagcacucaagaagccauaaacaagauaacaaaaaaucucaacucuuugagugagcuggaaguaaagaaucuucaaagacuaagcggugccauggaugaacuccacaacgaaauacuagaacuagacgagaaaguggaugaucucagagcugauacaauaagcucacaaauagaacucgcaguccugcuuuccaaugaaggaauaauaaacagugaagaugagcaucucuuggcgcuugaaagaaagcugaagaaaaugcugggccccucugcuguagagauagggaauggaugcuucgaaaccaaacacaagugcaaccagaccugucucgacagaauagcugcugguaccuuugaugcaggagaauuuucucuccccacuuuugauucacugaauauuacugcugcaucuuuaaaugacgauggauuggauaaucauacuauacugcuuuacuacucaacugcugccuccaguuuggcuguaacauugaugauagcuaucuuuguuguuuauauggucuccagagacaauguuucuugcuccaucugucuauaa

SEQ ID NO: 58428 - RNA, 1758 nt, Artificial Sequence
  derived and/or modified CDS sequence (wt) from hemagglutinin__InfluenzaB__ABL76540
augaaggcaauaauuguacuacucaugguaguaacauccaaugcagaucgaaucugcacugggauaacaucgucaaacucaccccauguggucaaaacugcuacucaaggggaggucaaugugacuggugugauaccacugacaacaacacccaccaaaucucauuuugcaaaucucaaaggaacaaaaaccagagggaaacuaugcccaaaaugccucaacugcacagaucuggacguggccuugggcagaccaaaaugcacggggaacauacccucggcagaaguuucaauacuccaugaagucaaaccuguuacaucugggugcuuuccuauaaugcacgacagaacaaaaauuagacagcugcccaaccuucucagaggauacgaacauaucagguuaucaacucauaacguuaucaaugcagaaaaggcaccaggaggacccuacaaaauuggaaccucagggucuugcccuaacguuaccaauggaaacggauuuuucgcaacaauggcuugggccgucccaaaaaacgacaacaacaaaacagcaacaaauucauuaacaauagaaguaccauacauuuguacagaaggagaagaccaaauuaccguuuggggguuccacucugauaacgaaacccaaauggcaaaacucuauggggacucaaagccccagaaguucaccucaucugccaacggagugaccacacauuacguuucacagauugguggcuucccaaaucaaacagaagacggaggacuaccacaaagugguagaauuguuguugauuacauggugcaaaaaucugggaaaacaggaacaauuaccuaucaaagagguauuuuauugccucaaaaaguguggugcgcaaguggcaggagcaagguaauaaaaggauccuugccuuuaauuggagaagcagauugccuccacgaaaaauacgguggauuaaacaaaagcaagccuuacuacacaggggaacaugcaaaggccauaggaaauugcccaauaugggugaaaacacccuugaagcuggccaauggaaccaaauauagaccuccugcaaaacuauuaaaggaaagggguuucuucggagcuauugcugguuucuuagaaggaggaugggaaggaaugauugcagguuggcacggauacacaucccauggggcacauggaguagcaguggcagcagaccuuaagagcacucaagaagccauaaacaagauaacaaaaaaucucaacucuuugagugagcuggaaguaaagaaucuucaaagacuaagcggugccauggaugaacuccacaacgaaauacuagaacuagacgagaaaguggaugaucucagagcugauacaauaagcucacaaauagaacucgcaguccugcuuuccaaugaaggaauaauaaacagugaagaugagcaucucuuggcgcuugaaagaaagcugaagaaaaugcugggccccucugcuguagagauagggaauggaugcuucgaaaccaaacacaagugcaaccagaccugucucgacagaauagcugcugguaccuuugaugcaggagaauuuucucuccccacuuuugauucacugaauauuacugcugcaucuuuaaaugacgauggauuggauaaucauacuauacugcuuuacuacucaacugcugccuccaguuuggcuguaacauugaugauagcuaucuuuguuguuuauauggucuccagagacaauguuucuugcuccaucugucuauaa

SEQ ID NO: 58429 - RNA, 1758 nt, Artificial Sequence
  derived and/or modified CDS sequence (wt) from hemagglutinin__InfluenzaB__ABL76551
augaaggcaauaauuguacuacucaugguaguaacauccaaugcagaucgaaucugcacugggauaacaucgucaaacucaccccauguggucaaaacugcuacucaaggggaggucaaugugacuggugugauaccacugacaacaacacccaccaaaucucauuuugcaaaucucaaaggaacaaaaaccagagggaaacuaugcccaaaaugccucaacugcacagaucuggacguggccuugggcagaccaaaaugcacggggaacauacccucggcagaaguuucaauacuccaugaagucagaccuguuacaucugggugcuuuccuauaaugcacgacagaacaaaaauuagacagcugcccaaccuucucagaggauacgaacauaucagguuaucaacucauaacguuaucaaugcagaaaaggcaccaggaggacccuacaaaauuggaaccucagggucuugcccuaacguuaccaauggaaacggauuuuucgcaacaauggcuugggccgucccaaaaaacgacaacaacaaaacagcaacaaauucauuaacaauagaaguaccauacauuuguacagaaggagaagaccaaauuaccguuuggggguuccacucugauaacgaaacccaaauggcaaaacucuauggggacucaaagccccagaaguucaccucaucugccaacggagugaccacacauuacguuucacagauugguggcuucccaaaucaaacagaagacggaggacuaccacaaagugguagaauuguuguugauuacauggugcaaaaaucugggaaaacaggaacaauuaccuaucaaagagguauuuuauugccucaaaaaguguggugcgcaaguggcaggagcaagguaauaaaaggauccuugccuuuaauuggagaagcagauugccuccacgaaaaauacgguggauuaaacaaaagcaagccuuacuacacaggggaacaugcaaaggccauaggaaauugcccaauaugggugaaaacacccuugaagcuggccaauggaaccaaauauagaccuccugcaaaacuauuaaaggaaagggguuucuucggagcuauugcugguuuccuagaaggaggaugggaaggaaugauugcagguuggcacggauacacaucccauggggcacauggaguagcaguggcagcagaccuuaagagcacucaagaagccauaaacaagauaacaaaaaaucucaacucuuugagugagcuggaaguaaagaaucuucaaagacuaagcggugccauggaugaacuccacaacgaaauacuagaacuagacgagaaaguggaugaucucagagcugauacaauaagcucacaaauagaacucgcaguccugcuuuccaaugaaggaauaauaaacagugaagaugagcaucucuuggcgcuugaaagaaagcugaagaaaaugcugggccccucugcuguagagauagggaauggaugcuucgaaaccaaacacaagugcaaccagaccugucucgacagaauagcugcugguaccuuugaugcaggagaauuuucucuccccacuuuugauucacugaauauuacugcugcaucuuuaaaugacgauggauuggauaaucauacuauacugcuuuacuacucaacugcugccuccaguuuggcuguaacauugaugauggcuaucuuuguuguuuauauggucuccagagacaauguuucuugcuccaucugucuauaa

SEQ ID NO: 58430 - RNA, 1758 nt, Artificial Sequence
  derived and/or modified CDS sequence (wt) from hemagglutinin__InfluenzaB__ABL76562
augaaggcaauaauuguacuacucaugguaguaacauccaaugcagaucgaaucugcacuaggauaacaucgucaaacucaccccauguggucaaaacugcuacucaaggggaggucaaugugacuggugugauaccacugacaacaacacccaccaaaucucauuuugcaaaucucaaaggaacaaaaaccagagggaaacuaugcccaaaaugccucaacugcacagaucuggacguggccuugggcagaccaaaaugcacggggaacauacccucggcagaaguuucaauacuccaugaagucagaccuguuacaucugggugcuuuccuauaaugcacgacagaacaaaaauuagacagcugcccaaccuucucagaggauacgaacauaucagguuaucaacucauaacguuaucaaugcagaaaaggcaccaggaggacccuacaaaauuggaaccucagggucuugcccuaacguuaccaauggaaacggauuuuucgcaacaauggcuugggccgucccaaaaaacgacaacaacaaaacagcaacaaauucauuaacaauagaaguaccauacauuuguacagaaggagaagaccaaauuaccguuuggggguuccacucugauaacgaaacccaaauggcaaaacucuauggggacucaaagccccagaaguucaccucaucugccaacggagugaccacacauuacguuucacagauugguggcuucccaaaucaaacagaagacggaggacuaccacaaagugguagaauuguuguugauuacauggugcaaaaaucugggaaaacaggaacaauuaccuaucaaagagguauuuuauugccucaaaaaguguggugcgcaaguggcaggagcaagguaauaaaaggauccuugccuuuaauuggagaagcagauugccuccacgaaaaauacgguggauuaaacaaaagcaagccuuacuacacaggggaacaugcaaaggccauaggaaauugcccaauaugggugaaaacacccuugaagcuggccaauggaaccaaauauagaccuccugcaaaacuauuaaaggaaagggguuucuucggagcuauugcugguuucuuagaaggaggaugggaaggaaugauugcagguuggcacggauacacaucccauggggcacauggaguagcaguggcagcagaccuuaagagcacucaagaagccauaaacaagauaacaaaaaaucucaacucuuugagugagcuggaaguaaagaaucuucaaagacuaagcggugccauggaugaacuccacaacgaaauacuagaacuagacgagaaaguggaugaucucagagcugauacaauaagcucacaaauagaacucgcaguccugcuuuccaaugaaggaauaauaaacagugaagaugagcaucucuuggcgcuugaaagaaagcugaagaaaaugcugggccccucugcuguagagauagggaauggaugcuucgaaaccaaacacaagugcaaccagaccugucucgacagaauagcugcugguaccuuugauguaggagaauuuucucuccccacuuuugauucacugaauauuacugcugcaucuuuaaaugacgauggauuggauaaucauacuauacugcuuuacuacucaacugcugccuccaguuuggcuguaacauugaugauagcuaucuuuguuguuuauauggucuccagagacaauguuucuugcuccaucugucuauag

SEQ ID NO: 58431 - RNA, 1758 nt, Artificial Sequence
  derived and/or modified CDS sequence (wt) from hemagglutinin__InfluenzaB__ABL76573
augaaggcaauaauuguacuacucaugguaguaacauccaaugcagaucgaaucugcacugggauaacaucgucaaacucaccccauguggucaaaacugcuacucaaggggaggucaaugugacuggugugauaccacugacaacaacacccaccaaaucucauuuugcaaaucucaaaggaacaaaaaccagagggaaacuaugcccaaaaugccucaacugcacagaucuggacguggccuugggcagaccaaaaugcacggggaacauacccucggcagaaguuucaauacuccaugaagucagaccuguuacaucugggugcuuuccuauaaugcacgacagaacaaaaauuagacagcugcccaaccuucucagaggauacgaacauaucagguuaucaacucauaacguuaucaaugcagaaaaggcaccaggaggacccuacaaaauuggaaccucagggucuugcccuaacguuaccaauggaaacggauuuuucgcaacaauggcuugggccgucccaaaaaacgacaacaacaaaacagcaacaaauucauuaacaauagaaguaccauacauuuguacagaaggagaagaccaaauuaccguuuggggguuccacucugauaacgaaacccaaauggcaaaacucuauggggacucaaagccccagaaguucaccucaucugccaacggagugaccacacauuacguuucacagauugguggcuucccaaaucaaacagaagacggaggacuaccacaaagugguagaauuguuguugauuacauggugcaaaaaucugggaaaacaggaacaauuaccuaucaaagagguauuuuauugccucaaaaaguguggugcgcaaguggcaggagcaagguaauaaaaggauccuugccuuuaauuggagaagcagauugccuccacgaaaaauacgguggauuaaacaaaagcaagccuuacuacacaggggaacaugcaaaggccauaggaaauugcccaauaugggugaaaacacccuugaagcuggccaauggaaccaaauauagaccuccugcaaaacuauuaaaggaaagggguuucuucggagcuauugcugguuucuuagaaggaggaugggaaggaaugauugcagguuggcacggauacacaucccauggggcacauggaguagcaguggcagcagaccuuaagagcacucaagaagccauaaacaagauaacaaaaaaucucaacucuuugagugagcuggaaguaaagaaucuucaaagacuaagcggugccauggaugaacuccacaacgaaauacuagaacuagacgagaaaguggaugaucucagagcugauacaauaagcucacaaauagaacucgcaguccugcuuuccaaugaaggaauaauaaacagugaagaugagcaucucuuggcgcuugaaagaaagcugaagaaaaugcugggccccucugcuguagagauagggaauggaugcuucgaaaccaaacacaagugcaaccagaccugucucgacagaauagcugcugguaccuuugaugcaggagaauuuucucuccccacuuuugauucacugaauauuacugcugcaucuuuaaaugacgauggauuggauaaucauacuauacugcuuuacuacucaacugcugccuccaguuuggcuguaacauugaugauagcuaucuuuguuguuuauauggucuccagagacaauguuucuugcuccaucugucuauaa

SEQ ID NO: 58432 - RNA, 1758 nt, Artificial Sequence
  derived and/or modified CDS sequence (wt) from hemagglutinin__InfluenzaB__ABL76584
augaaggcaauaauuguacuacucaugguaguaacauccaaugcagaucgaaucugcacugggauaacaucgucaaacucaccccauguggucaaaacugcuacucaaggggaggucaaugugacuggugugauaccacugacaacaacacccaccaaaucucauuuugcaaaucucaaaggaacaaaaaccagagggaaacuaugcccaaaaugccucaacugcacagaucuggacguggccuugggcagaccaaaaugcacggggaacauacccucggcagaaguuucaauacuccaugaagucagaccuguuacaucugggugcuuuccuauaaugcacgacagaacaaaaauuagacagcugcccaaccuucucagaggauacgaacauaucagguuaucaacucauaacguuaucaaugcagaaaaggcaccaggaggacccuacaaaauuggaaccucagggucuugcccuaacguuaccaauggaaacggauuuuucgcaacaauggcuugggccgucccaaaaaacgacaacaacaaaacagcaacaaauucauuaacaauagaaguaccauacauuuguacagaaggagaagaccaaauuaccguuuggggguuccacucugauaacgaaacccaaauggcaaaacucuauggggacucaaagccccagaaguucaccucaucugccaacggagugaccacacauuacguuucacagauugguggcuucccaaaucaaacagaagacggaggacuaccacaaagugguagaauuguuguugauuacauggugcaaaaaucugggaaaacaggaacaauuaccuaucaaagagguauuuuauugccucaaaaaguguggugcgcaaguggcaggagcaagguaauaaaaggauccuugccuuuaauuggagaagcagauugccuccacgaaaaauacgguggauuaaacaaaagcaagccuuacuacacaggggaacaugcaaaggccauaggaaauugcccaauaugggugaaaacacccuugaagcuggccaauggaaccaaauauagaccuccugcaaaacuauuaaaggaaagggguuucuucggagcuauugcugguuucuuagaaggaggaugggaaggaaugauugcagguuggcacggauacacaucccauggggcacauggaguagcaguggcagcagaccuuaagagcacucaagaagccauaaacaagauaacaaaaaaucucaacucuuugagugagcuggaaguaaagaaucuucaaagacuaagcggugccauggaugaacuccacaacgaaauacuagaacuagacgagaaaguggaugaucucagagcugauacaauaagcucacaaauagaacucgcaguccugcuuuccaaugaaggaauaauaaacagugaagaugagcaucucuuggcgcuugaaagaaagcugaagaaaaugcugggccccucugcuguagagauagggaauggaugcuucgaaaccaaacacaagugcaaccagaccugucucgacagaauagcugcugguaccuuugaugcaggagaauuuucucuccccacuuuugauucacugaauauuacugcugcaucuuuaaaugacgauggauuggauaaucauacuauacugcuuuacuacucaacugcugccuccaguuuggcuguaacacugaugauagcuaucuuuguuguuuauauggucuccagagacaauguuucuugcuccaucugucuauaa

SEQ ID NO: 58433 - RNA, 1758 nt, Artificial Sequence; identical to SEQ ID NO: 58431
  derived and/or modified CDS sequence (wt) from hemagglutinin__InfluenzaB__ABL76595

SEQ ID NO: 58434 - RNA, 1758 nt, Artificial Sequence
  derived and/or modified CDS sequence (wt) from hemagglutinin__InfluenzaB__ABL76606
augaaggcaauaauuguacuacucaugguaguaacauccaaugcagaucgaaucugcacugggauaacaucgucaaacucaccccauguggucaaaacugcuacucaaggggaggucaaugugacuggugugauaccacugacaacaacacccaccaaaucucauuuugcaaaucucaaaggaacaaaaaccagagggaaacuaugcccaaaaugccucaacugcacagaucuggacguggccuugggcagaccaaaaugcacggggaacauacccucggcagaaguuucaauacuccaugaagucagaccuguuacaucugggugcuuuccuauaaugcacgacagaacaaaaauuagacagcugcccaaccuucucagaggauacgaacauaucagguuaucaacucauaacguuaucaaugcagaaaaggcaccaggaggacccuacaaaauuggaaccucagggucuugcccuaacguuaccaauggaaacggauuuuucgcaacaauggcuugggccgucccaaaaaacgacaacaacaaaacagcaacaaauucauuaacaauagaaguaccauacauuuguacagaaggagaagaccaaauuaccguuuggggguuccacucugauaacgaaacccaaauggcaaaacucuauggggacucaaagccccagaaguucaccucaucugccaacggagugaccacacauuacguuucacagauugguggcuucccaaaucaaacagaagacggaggacuaccacaaagugguagaauuguuguugauuacauggugcaaaaaucugggaaaacaggaacaauuaccuaccaaagagguauuuuauugccucaaaaaguguggugcgcaaguggcaggagcaagguaauaaaaggauccuugccuuuaauuggagaagcagauugccuccacgaaaaauacgguggauuaaacaaaagcaagccuuacuacacaggggaacaugcaaaggccauaggaaauugcccaauaugggugaaaacacccuugaagcuggccaauggaaccaaauauagaccuccugcaaaacuauuaaaggaaagggguuucuucggagcuauugcugguuucuuagaaggaggaugggaaggaaugauugcagguuggcacggauacacaucccauggggcacauggaguagcaguggcagcagaccuuaagagcacucaagaagccauaaacaagauaacaaaaaaucucaacucuuugagugagcuggaaguaaagaaucuucaaagacuaagcggugccauggaugaacuccacaacgaaauacuagaacuagacgagaaaguggaugaucucagagcugauacaauaagcucacaaauagaacucgcaguccugcuuuccaaugaaggaauaauaaacagugaagaugagcaucucuuggcgcuugaaagaaagcugaagaaaaugcugggccccucugcuguagagauagggaauggaugcuucgaaaccaaacacaagugcaaccagaccugucucgacagaauagcugcugguaccuuugaugcaggagaauuuucucuccccacuuuugauucacugaauauuacugcugcaucuuuaaaugacgauggauuggauaaucauacuauacugcuuuacuacucaacugcugccuccaguuuggcuguaacauugaugauagcuaucuuuguuguuuauauggucuccagagacaauguuucuugcuccaucugucuauaa

SEQ ID NO: 58435 - RNA, 1758 nt, Artificial Sequence
  derived and/or modified CDS sequence (wt) from hemagglutinin__InfluenzaB__ABL76617
augaaggcaauaauuguacuacucaugguaguaacauccaaugcagaucgaaucugcacugggauaacaucgucaaacucaccccauguggucaaaacugcuacucaaggggaggucaaugugacuggugugauaccacugacaacaacacccaccaaaucucauuuugcaaaucucaaaggaacagaaaccagagggaaacuaugcccaaaaugccucaacugcacagaucuggacguggccuugggcagaccaaaaugcacggggaacauacccucggcaaaaguuucaauacuccaugaagucagaccuguuacaucggggugcuuuccuauaaugcacgacagaacaaaaauuagacagcugcccaaccuucucagaggauacgaacauaucagguuaucaacucauaacguuaucaaugcagaaaaggcaccaggaggacccuacaaaauuggaaccucagggucuugcccuaacguuaccaauggaaacggauuuuucgcaacaauggcuugggccgucccaaaaaacgacaacaacaaaacagcaacaaauucauuaacaauagaaguaccauacauuuguacagaaggagaagaccaaauuaccguuuggggguuccacucugauaacgaaacccaaauggcaaaacucuauggggacucaaagccccagaaguucaccucaucugccaacggagugaccacacauuacguuucacagauugguggcuucccaaaucaaacagaagacggaggacuaccacaaagugguagaauuguuguugauuacauggugcaaaaaucugggaaaacaggaacaauuaccuaucaaagagguauuuuauugccucaaaaaguguggugcgcaaguggcaggagcaagguaauaaaaggauccuugccuuuaauuggagaagcagauugccuccacgaaaaauacgguggauuaaacaaaagcaagccuuacuacacaggggaacaugcaaaggccauaggaaauugcccaauaugggugaaaacacccuugaagcuggccaauggaaccaaauauagaccuccugcaaaacuauuaaaggaaagggguuucuucggagcuauugcugguuucuuagaaggaggaugggaaggaaugauugcagguuggcacggauacacaucccauggggcacauggaguagcaguggcagcagaccuuaagagcacucaagaagccauaaacaagauaacaaaaaaucucaacucuuugagugagcuggaaguaaagaaucuucaaagacuaagcggugccauggaugaacuccacaacgaaauacuagaacuagacgagaaaguggaugaucucagagcugauacgauaagcucacaaauagaacucgcaguccugcuuuccaaugaaggaauaauaaacagugaagaugagcaucucuuggcgcuugaaagaaagcugaagaaaaugcugggccccucugcuguagagauagggaauggaugcuucgaaaccaaacacaagugcaaccagaccugucucgacagaauagcugcugguaccuuugaugcaggagaauuuucucuccccacuuuugauucacugaauauuacugcugcaucuuuaaaugacgauggauuggauaaucauacuauacugcuuuacuacucaacugcugccuccaguuuggcuguaacauugaugauagcuaucuuuguuguuuauauggucuccagagacaauguuucuugcuccaucugucuauaa

SEQ ID NO: 58436 - RNA, 1755 nt, Artificial Sequence
  derived and/or modified CDS sequence (wt) from hemagglutinin__InfluenzaB__ABL76628
augaaggcaauaauuguacuacucaugguaguaacauccaaugcagaucgaaucugcacugggauaacaucuucaaacucaccucauguggucaaaacagcuacucaaggggaggucaaugugacuggugugauaccacugacaacaacaccaacaaaaucuuauuuugcaaaucucaaaggaacaaggaccagagggaaacuaugcccagacugucucaacuguacagaucuggauguggccuugggcaggccaauguguguggggaccacaccuucugcgaaagcuucaauacuccacgaagucagaccuguuacauccgggugcuuuccuauaaugcacgacagaacaaaaaucaggcaacuagccaaucuucucagaggauaugaaaauaucagguuaucaacccaaaacguuaucgaugcagaaaaggcaccaggaggacccuacagacuuggaaccucaggaucuugcccuaacgcuaccaguaaaagcggauuuuucgcaacaauggcuugggcugucccaaaggacaacaacaaaaaugcaacgaacccacuaacaguagaaguaccacacauuuguacagaaggggaagaccaaauuacuguuuggggguuccauucagauaacaaaacccaaaugaagaaccucuauggagacucaaauccucaaaaguucaccucaucugcuaauggaguaaccacacauuauguuucucagauuggcggcuucccagaucaaacagaagacggaggacuaccacaaagcggcagaauuguuguugauuacaugaugcaaaaaccugggaaaacaggaacaauugucuaucaaagagguguuuuguugccucaaaagguguggugcgcgaguggcaggagcaaaguaauaaaaggguccuugccuuuaauuggugaagcagauugccuucaugaaaaauacgguggauuaaacaaaagcaagccuuacuacacaggagaacaugcaaaagccauaggaaauugcccaauaugggugaaaacaccuuugaagcuugccaauggaaccaaauauagaccuccugcaaaacuauuaaaggaaagggguuucuucggagcuauugcugguuuccuagaaggaggaugggaaggaaugauugcagguuggcacggauacacaucucacggagcacauggaguggcaguggcggcagaccuuaagaguacacaagaagcuauaaacaagauaacaaaaaaucucaauucuuugagugagcuagaaguaaagaaucuucaaagacuaaguggugccauggaugaacuccacaacgaaauacucgagcuggaugagaaaguggaugaucucagagcugacacuauaagcucacaaauagaacuugcagucuugcuuuccaacgaaggaauaauaaacagugaagacgagcaucuauuggcacuugagagaaaacuaaagaaaaugcugggucccucugcuguagacauaggaaauggaugcuucgaaaccaaacacaaaugcaaccagaccugcuuagacaggauagcugcuggcaccuuuaaugcaggagaauuuucucuccccacuuuugauucauugaacauuacugcugcaucuuuaaaugaugauggauuggauaaccauacuauacugcucuauuacucaacugcugcuucuaguuuggcuguaacauugaugcuagcuauuuuuauuguuuauauggucuccagagacaacguuucaugcuccaucugucuauaa

SEQ ID NO: 58437 - RNA, 1755 nt, Artificial Sequence
  derived and/or modified CDS sequence (wt) from hemagglutinin__InfluenzaB__ABL76639
augaaggcaauaauuguacuacucaugguaguaacauccaaugcagaucgaaucugcacugggauaacaucuucaaacucaccucauguggucaaaacagcuacucaaggggaggucaaugugacuggugugauaccacugacaacaacaccaacaaaaucuuauuuugcaaaucucaaaggaacaaggaccagagggaaacuaugcccagacugucucaacuguacagaucuggauguggccuugggcaggccaauguguguggggaccacaccuucugcgaaagcuucaauacuccaugaagucagaccuguuacauccgggugcuuuccuauaaugcacgacagaacaaaaaucaggcaacuagccaaucuucucagaggauaugaaaauaucagguuaucaacccaaaacguuaucgaugcagaaaaggcaccaggaggacccuacagacuuggaaccucaggaucuugcccuaacgcuaccaguaaaagcggauuuuucgcaacaauggcuugggcugucccaaaggacaacaacaaaaaugcaacgaacccacuaacaguagaaguaccauacauuuguacagaaggggaagaccaaauuacuguuuggggguuccauucagauaacaaaacccaaaugaagaaccucuauggagacucaaauccucaaaaguucaccucaucugcuaauggaguaaccacacauuauguuucucagauuggcggcuucccagaucaaacagaagacggaggacuaccacaaagcggcagaauuguuguugauuacaugaugcaaaaaccugggaaagcaggaacaauugucuaucaaagagguguuuuguugccucaaaagguguggugcgcgaguggcaggagcaaaguaauaaaaggguccuugccuuuaauuggugaagcagauugccuucaugaaaaauacgguggauuaaacaaaagcaagccuuacuacacaggagaacaugcaaaagccauaggaaauugcccaauaugggugaaaacaccuuugaagcuugccaauggaaccaaauauagaccuccugcaaaacuauuaaaggaaagggguuucuucggagcuauugcugguuuccuagaaggaggaugggaaggaaugaucgcagguuggcacggauacacaucucacggagcacauggaguggcaguggcggcagaccuuaagaguacacaagaagcuauaaacaagauaacaaaaaaucucaauucuuugagugagcuagaaguaaagaaucuucaaagacuaaguggugccauggaugaacuccacaacgaaauacucgagcuggaugagaaaguggaugaucucagagcugacacuauaagcucacaaauagaacuugcagucuugcuuuccaacgaaggaauaauaaacagugaagacgagcaucuauuggcacuugagagaaaacuaaagaaaaugcugggucccucugcuguagacauaggaaauggaugcuucgaaaccaaacacaaaugcaaccagaccugcuuagacaggauagcugcuggcaccuuuaaugcaggagaauuuucucuccccacuuuugauucauugaacauuacugcugcaucuuuaaaugaugauggauuggauaaccauacuauacugcucuauuacucaacugcugcuucuaguuuggcuguaacauugaugcuagcuauuuuuauuguuuauauggucuccagagacaacguuucaugcuccaucugucuauaa

SEQ ID NO: 58438 - RNA, 1755 nt, Artificial Sequence
  derived and/or modified CDS sequence (wt) from hemagglutinin__InfluenzaB__ABL76683
augaaggcaauaauuguacuacucaugguaguaacauccaaugcagaucgaaucugcacugggauaacaucuucaaacucaccucauguggucaaaacagcuacucaaggggaggucaaugugacuggugugauaccacugacaacaacaccaacaaaaucguauuuugcaaaucucaaaggaacaaggaccagagggaaacuaugcccagacugucucaacuguacagaucuggauguggccuugggcaggccaauguguguggggaccacaccuucugcgaaagcuucaauacuccacgaagucagaccuguuacauccgggugcuuuccuauaaugcacgacagaacaaaaaucaggcaacuagccaaucuucucagaggauaugaaaauaucagguuaucaacccaaaacguuaucgaugcagaaaaggcaccaggaggacccuacagacuuggaaccucaggaucuugcccuaacgcuaccaguaaaagcggauuuuucgcaacaauggcuugggcugucccaaaggacaacaacaaaaaugcaacgaacccacuaacaguagaaguaccauacauuuguacagaaggggaagaccaaauuacuguuuggggguuccauucagauaacaaaacccaaaugaagaaccucuauggagacucaaauccucaaaaguucaccucaucugcuaauggaguaaccacacauuauguuucucagauuggcggcuucccagaucaaacagaagacggaggacuaccacaaagcggcagaauuguuguugauuacaugaugcaaaaaccugggaaaacaggaacaauugucuaucaaagagguguuuuguugccucaaaagguguggugcgcgaguggcaggagcaaaguaauaaaaggguccuugccuuuaauuggugaagcagauugccuucaugaaaaauacgguggauuaaacaaaagcaagccuuacuacacaggagaacaugcaaaagccauaggaaauugcccaauaugggugaaaacaccuuugaagcuugccaauggaaccaaauauagaccuccugcaaaacuauuaaaggaaagggguuucuucggagcuauugcugguuuccuagaaggaggaugggaaggaaugauugcagguuggcacggauacacaucucacggagcacauggaguggcaguggcggcagaccuuaagaguacacaagaagcuauaaacaagauaacaaaaaaucucaauucuuugagugagcuagaaguaaagaaucuucaaagacuaaguggugccauggaugaacuccacaacgaaauacucgagcuggaugagaaaguggaugaucucagagcugacacuauaagcucacaaauagaacuugcagucuugcuuuccaacgaaggaauaauaaacagugaagacgagcaucuauuggcacuugagagaaaacuaaagaaaaugcugggucccucugcuguagacauaggaaauggaugcuucgaaaccaaacacaaaugcaaccagaccugcuuagacaggauagcugcuggcaccuuuaaugcaggagaauuuucucuccccacuuuugauucauugaacauuacugcugcaucuuuaaaugaugauggauuggauaaccauacuauacugcucuauuacucaacugcugcuucuaguuuggcuguaacauugaugcuagcuauuuuuauuguuuauauggucuccagagacaacguuucaugcuccaucugucuauaa

SEQ ID NO: 58439 - RNA, 1752 nt, Artificial Sequence
  derived and/or modified CDS sequence (wt) from hemagglutinin__InfluenzaB__ABL76694
augaaggcaauaauuguacuacucaugguaguaacauccaacgcagaucgaaucugcacugggauaacaucuucaaacucaccucauguggucaaaacagcuacucaaggggaagucaaugugacuggugugauaccacugacaacaacaccaacaaaaucucauuuugcaaaucuaaaaggaacaaagaccagagggaaacuaugcccaaacugucucaacugcacagaucuggauguggccuugggcagaccaauguguguggggaccacaccuucggcaaaagcuucaauacuccacgaagucagaccuguuacauccgggugcuuuccuauaaugcacgacagaacaaaaaucagacagcuacccaaucuucucagaggauaugaaaauaucagauuaucaacccaaaacguuaucaacgcagaaagagcaccaggaggacccuacagacuuggaaccucaggaucuugcccuaacguuaccaguagagacggauucuucgcaacaauggcuugggcugucccaagggacaacaaaacagcaacgaauccacuaacaguagaaguaccauacauuuguacaaaaggagaagaccaaauuacuguuuggggguuccauucugauaacaaaacccaaaugaaaaaccucuauggagacucaaauccucaaaaguucaccucaucugccaauggaguaaccacacauuauguuucucagauugguggcuucccaaaucaaacagaagacggagggcuaccacaaagcggcagaauuguuguugauuacauggugcaaaaaccugggaaaacaggaacaauugucuaucaaagagguguuuuguugccucaaaagguguggugcgcaaguggcaggagcaagguaauaaaaggguccuugccuuuaauuggugaagcagauugccuucacgaaaaauacgguggauuaaacaaaagcaagccuuacuacacaggagaacaugcaaaagccauaggaaauugcccaauaugggugaaaacaccuuugaagcuugccaauggaaccaaauauagaccuccugcaaaacuauuaaaggaaagggguuucuucggagcuauugcugguuucuuagaaggaggaugggaaggaaugauugcagguuggcacggauacacaucucauggagcacauggaguggcaguggcagcagaccuuaagaguacgcaagaagccauaaacaagauaacaaaaaaucucaauucuuugagugagcuagaaguaaagaaucuucaaagacuaaguggugccauggaugaacuccacaacgaaauacucgagcuggaugagaaaguggaugaucucagagcugacacaauaagcucgcaaauagagcuugcagucuugcuuuccaacgaaggaauaauaaacagugaagaugagcaucuauuggcacuugagagaaaacuaaagaaaaugcugggucccucugcuguagacauagggaauggaugcuucgaaaccaaacacaagugcaaccagaccugcuuagacaggauagcugcuggcaccuuuaaugcaggagaauuuucucuucccacuuuugauucacugaauauuacugcugcaucuuuaaaugaugauggauuggauaaucauacuauacugcucuacuacucaacugcugcuucuaguuuggcuguaacauugaugauagcuauuuuuauuguuuauauggucuccagagacaauguuucuugcuccaucugucuauaa

SEQ ID NO: 58440 - RNA, 1758 nt, Artificial Sequence
  derived and/or modified CDS sequence (wt) from hemagglutinin__InfluenzaB__ABL76716
augaaggcaauaauuguacuacucaugguaguaacauccaaugcagaucgaaucugcacugggauaacaucgucaaacucaccacauguugucaaaacugcuacucaaggggaggucaaugugacugguguaauaccacugacaacaacacccaccaaaucucauuuugcaaaucucaaaggaacagaaaccagagggaaacuaugcccaaaaugccucaacugcacagaucuggacguggccuugggcagaccaaaaugcacggggaacauacccucggcaagaguuucaauacuccaugaagucagaccuguuacaucugggugcuuuccuauaaugcacgacagaacaaaaauuagacagcugccuaaccuucucagaggauacgaacauaucagguuaucaacucauaacguuaucaaugcagaaaaugcaccaggaggacccuacaaaauuggaaccucagggucuugcccuaacguuaccaauggaaacggauuuuucgcaacaauggcuugggccgucccaaaaaacgacaacaacaaaacagcaacaaauucauuaacaauagaaguaccauacauuuguacagaaggagaagaccaaauuaccguuuggggguuccacucugauaacgagacccaaauggcaaagcucuauggggacucaaagccccagaaguucaccucaucugccaacggagugaccacacauuacguuucacagauugguggcuucccaaaucaaacagaagacggaggacuaccacaaagugguagaauuguuguugauuacauggugcaaaaaucugggaaaacaggaacaauuaccuaucaaagagguauuuuauugccucaaaagguguggugcgcaaguggcaggagcaagguaauaaaaggauccuugccuuuaauuggagaagcagauugccuccacgaaaaauacgguggauuaaacaaaagcaagccuuacuacacaggggaacaugcaaaggccauaggaaauugcccaauaugggugaaaacacccuugaagcuggucaauggaaccaaauauagaccuccugcaaaacuauuaaaggaaagggguuucuucggagcuauugcugguuucuuagaaggaggaugggaaggaaugauugcagguuggcacggauacacaucccauggggcacauggaguagcgguggcagcagaccuuaagagcacucaagaggccauaaacaagauaacaaaaaaucucaacucuuugagugagcuggaaguaaagaaucuucaaagacuaagcggugccauggaugaacuccacaacgaaauacuagaacuagacgagaaaguggaugaucucagagcugauacaauaagcucacaaauagaacucgcaguccugcuuuccaaugaaggaauaauaaacagugaagaugagcaucucuuggcgcuugaaagaaagcugaagaaaaugcugggccccucugcuguagagauagggaauggaugcuuugaaaccaaacacaagugcaaccagaccugucucgacagaauagcugcugguaccuuugaugcaggagaauuuucucuccccaccuuugauucacugaauauuacugcugcaucuuuaaaugacgauggauuggauaaucauacuauacugcuuuacuacucaacugcugccuccaguuuggcuguaacauugaugauagcuaucuuuguuguuuauauggucuccagagacaauguuucuugcuccaucugucuauaa

SEQ ID NO: 58441 - RNA, 1755 nt, Artificial Sequence
  derived and/or modified CDS sequence (wt) from hemagglutinin__InfluenzaB__ABL76760
augaaggcaauaauuguacuacucaugguaguaacauccaaugcagaucgaaucugcacugggauaacaucgucaaacucaccucauguggucaaaacagcuacucaaggggaggucaaugugacuggugugauaccacugacaacaacaccaacaaaaucucauuuugcaaaucucaaaggaacaaagaccagagggaaacuaugcccaaccugucucaacugcacagaucuggauguggccuuaggcagaccaaugugugugggggucacaccuucagcaaaagcuucaauacuccacgaagucagaccuguuacauccggaugcuuuccuauaaugcacgacagaacaaaaaucagacagcuacccaaucuucucagaggauaugaaaaaaucagauuaucaacccaaaacguuaucaacgcagaaaaggcaccaggaggacccuacagacuuggaaccucaggaucuugcccuaacgcuaccaguagaagcggauuuuucgcaacgauggcuugggcuguuccaagggacaacaacaaaacagcaacgaauccacuaacaauagaaguaccacacaucuguacaaaagaagaagaccaaauuacuguuuggggguuccauucugauaacaaaacccaaaugaaaaaccucuauggagacucaaauccucaaaaguucaccucaucugcuaauggaguaaccacacauuauguuucucagauuggcggcuucccggaucaaacagaagacggagggcuaccacaaagcggcagaauuguuguugauuacauggugcaaaaaccugggaaaacaggaacaauugucuaucaaagagguauuuuguugccucaaaagguguggugcgcgaguggcaggagcaaaguaauaaaaggguccuugccuuuaauuggugaagcagauugccuucacgaaaaauaugguggauuaaacaaaagcaagccuuacuacacaggagaacaugcaaaagccauaggaaauugcccaauaugggugaaaacaccuuugaagcuugccaauggaaccaaauauagaccuccugcaaaacuauuaaaggaaagggguuucuucggagcuauugcugguuucuuagaagggggaugggaaggaaugauugcagguuggcacggauacacaucucacggagcacauggaguggcaguggcagcagaccuuaagaguacgcaagaagccauaaacaagauaacaaaaaaucucaauucuuugagugagcuagaaguaaagaaucuucaaagacuaaguggugccauggaugaacuccacaacgaaauacucgagcuggaugagaaaguggaugaucucagagcugacacaauaagcucacaaauagaacuugcagucuugcuuuccaacgaaggaauaauaaacagugaagaugagcaucuauuggcacuugagagaaaacuaaagaaaaugcugggucccucugcuguagacauagggaauggaugcuucgaaaccaaacacaagugcaaccagaccugcuuagacaggauagcugcuggcaccuuugaugcaggagaauuuucucuucccacuuuugauucacugaauauuacugcugcaucuuuaaaugaugauggauuggauaaccauacuauacugcucuacuacucaacugcugcuucuaguuuggcuguaacauugaugauagcuauuuuuauuguuuauaugaucuccagagacaauguuucuugcuccaucugucuauaa

SEQ ID NO: 58442 - RNA, 1755 nt, Artificial Sequence
  derived and/or modified CDS sequence (wt) from hemagglutinin__InfluenzaB__ABL76771
augaaggcaauaauuguacuacucaugguaguaacauccaaugcagaucgaaucugcacugggauaacaucgucaaacucaccucauguggucaaaacagcuacucaaggggaggucaaugugacuggugugauaccacugacaacaacaccaacaaaaucucauuuugcaaaucucaaaggaacaaagaccagagggaaacuaugcccaaccugucucaacugcacagaucuggauguggccuuaggcagaccaaugugugugggggucacaccuucagcaaaagcuucaauacuccacgaagucagaccuguuacauccggaugcuuuccuauaaugcacgacagaacaaaaaucagacagcuacccaaucuucucagaggauaugaaaaaaucagauuaucaacccaaaacguuaucaacgcagaaaaggcaccaggaggacccuacagacuuggaaccucaggaucuugcccuaacgcuaccaguagaagcggauuuuucgcaacaauggcuugggcuguuccaagggacaacaacaaaacagcaacgaauccacuaacaauagaaguaccacacaucuguacaaaagaagaagaccaaauuacuguuuggggguuccauucugaugacaaaacccaaaugaaaaaccucuauggagacucaaauccucaaaaguucaccucaucugcuaauggaguaaccacacauuauguuucucagauuggcggcuucccggaucaaacagaagacggagggcuaccacaaagcggcagaauuguuguugauuacauggugcaaaaaccugggaaaacaggaacaauugucuaucaaagagguauuuuguugccucaaaagguguggugcgcgaguggcaggagcaaaguaauaaaaggguccuugccuuuaauuggugaagcagauugccuucacgaaaaauaugguggauuaaacaaaagcaagccuuacuacacaggagaacaugcaaaagccauaggaaauugcccaauaugggugaaaacaccuuugaagcuugccaauggaaccaaauauagaccuccugcaaaacuauuaaaggaaagggguuucuucggagcuauugcugguuucuuagaagggggaugggaaggaaugauugcagguuggcacggauacacaucucacggagcacauggaguggcaguggcagcagaccuuaagaguacgcaagaagccauaaacaagauaacaaaaaaucucaauucuuugagugagcuagaaguaaagaaucuucaaagacuaaguggugccauggaugaacuccacaacgaaauacucgagcuggaugagaaaguggaugaucucagagcugacacaauaagcucacaaauagaacuugcagucuugcuuuccaacgaaggaauaauaaacagugaagaugagcaucuauuggcacuugagagaaaacuaaagaaaauacugggucccucugcuguagacauagggaauggaugcuucgaaaccaaacacaagugcaaccagaccugcuuagacaggauagcugcuggcaccuuugaugcaggagaauuuucucuucccacuuuugauucacugaauauuacugcugcaucuuuaaaugaugauggauuggauaaccauacuauacugcucuacuacucaacugcugcuucuaguuuggcuguaacauugaugauagcuauuuuuauuguuuauaugaucuccagagacaauguuucuugcuccaucugucuauaa

SEQ ID NO: 58443 - RNA, 1755 nt, Artificial Sequence
  derived and/or modified CDS sequence (wt) from hemagglutinin__InfluenzaB__ABL76782
augaaggcaauaauuguacuacucaugguaguaacauccaaugcagaucgaaucugcacugggauaacaucgucaaacucaccucauguggucaaaacagccacucaaggggaggucaaugugacuggugugauaccacugacaacaacaccaacaaaaucccauuuugcaaaucucaaaggaacaaagaccagagggaaacuaugcccaaccugucucaacugcacagaucuggauguggccuuaggcaguccaauguguguggggaucacaccuucggcaaaagcuucaauacuccacgaagucagaccuguuacauccggaugcuuuccuauaaugcacgacagaacaaaaaucagacagcuacccaaucuucucagaggauaugaaaaaaucagauuaucaacucaaaacguuaucaacauagaaaaggcaccaggaggacccuacagacuuggaaccucaggaucuugcccuaacgcuaccaguagaagcggauuuuucgcaacaauggcuugggcugucccaagggacaacaacaaaacagcaacgaauccacuaacaguagaaguaccacacaucuguacaaaagaagaagaccaaauuacuguuuggggguuccauucugauaacaaagcccaaaugaaaaaccucuauggagacucaaauccucaaaaguucacaucaucugcuaauggaguaaccacacauuauguuucucagauuggcggcuucccggaucaaacagaagacggagggcuaccacaaagcggcagaauuguuguugauuacauggugcaaaaaccugggaaaacaggaacaauugucuaucaaagagguauuuuguugccucaaaagguguggugcgcgaguggcaggagcaaaguaauaaaaggguccuugccuuuaauuggugaagcagauugccuucacgaaaaauacgguggauuaaacaaaagcaagccuuacuacacaggagaacaugcaaaagccauaggaaauugcccaauaugggugaaaacaccuuugaagcuugccaauggaaccaaauauagaccuccugcaaaacuauuaaaggaaagggguuucuucggggcuauugcugguuucuuagaaggaggaugggaaggaaugauugcagguuggcacggauacacaucucauggagcacauggaguggcaguggcagcagaccuuaagaguacgcaagaagccauaaacaagauaacaaaaaaucucaauucuuugagugagcuagaaguaaagaaucuucaaagacuaaguggugccauggaugaacuccacaacgaaauucucgagcuggaugagaaaguggaugaucucagagcugacacaauaagcucacaaauagaacuugcggucuugcuuuccaacgaaggaauaauaaacagugaagaugagcaucuauuggcacuugagagaaaacuaaagaaaaugcugggucccucugcuguagacauagggaauggaugcuucgaaaccaaacacaaaugcaaccagaccugcuuagacaggauagcugcuggcaccuuuaaugcaggagaauuuucucuucccacuuuugauucacugaauauuacugcugcaucuuuaaaugaugauggauuggauaaucauacuauacugcucuacuacucaacugcugcuucuaguuuggcuguaacauugaugauagcuauuuuuauuguuuauaugaucuccagagacaauguuucuugcuccaucugucuauaa

SEQ ID NO: 58444 - RNA, 1755 nt, Artificial Sequence
  derived and/or modified CDS sequence (wt) from hemagglutinin__InfluenzaB__ABL76793
augaaggcaauaauuguacuacucaugguaguaacauccaaugcagaucgaaucugcacugggauaacaucgucaaacucaccucauguggucaaaacagcuacucaaggggaggucaaugugacuggugcgauaccacugacaacaacaccaacaaaaucucauuuugcaaaucucaaaggaacaaagaccagagggaaacuaugcccaaccugucucaacugcacagaucuggauguggccuugggcagaccaauguguguggggaucacaccuucggcaaaagcuucaauacuccacgaagucagaccuguuacauccggaugcuuuccuauaaugcacgacagaacaaaaaucagacagcuacccaaucuucucagaggauaugaaaaaaucagauuaucaacccaaaacguuaucaacgcagaaaaggcaccaggaggacccuacagacuuggaacuucaggaucuugcccuaacgcuaccaguaaaagcggauuuuucgcaacaauggcuugggcugucccaagggacaacaacaaaacagcaacgaauccacuaacaguagaaguaccacacaucuguacaaaagaagaagaccaaauuacuguuuggggguuccauucugauaacaaaacccaaaugaaaaaccucuauggagacucaaauccucaaaaguucaccucaucugcuaaugggauaaccacacauuauguuucucagauuggcggcuucccggaccaaacagaagacggagggcuaccacaaagcggcagaauuguuguugauuacauggugcaaaaaccugggaaaacaggaacaauugucuaucaaagagggauuuuguugccucaaaagguguggugcgcgaguggcaggagcaaaguaauaaaaggguccuugccuuuaauuggugaagcagauugccuucacgaaaaauacgguggauuaaacaaaagcaagccuuacuacacaggagaacaugcaaaagccauaggaaauugcccaauaugggugaaaacaccuuugaagcuugccaauggaaccaaauauagaccuccugcaaaacuauuaaaggaaagggguuucuucggagcuauugcugguuucuuagaaggaggaugggaaggaaugauugcagguuggcacggauacacaucucacggagcacauggaguggcaguggcagcagaccuuaagaguacgcaagaagccauaaacaagauaacaaaaaaucucaauucuuugagugagcuagaaguaaagaaccuucaaagacuaaguggugccauggaugaacuccauaacgaaauacucgagcuggaugagaaaguggaugaucucagagcugacacaauaagcucacaaauagaacuugcagucuugcuuuccaacgaaggaauaauaaacagugaagaugagcaucuauuggcacuugagagaaaacuaaagaaaaugcugggucccucugcuguagacauagggaauggaugcuucgaaaccaaacacaagugcaaccagaccugcuuagacaggauagcugcuggcaccuuuaaugcaggagaauuuucucuucccacuuuugauucacugaacauuacugcugcaucuuuaaaugaugauggauuggauaaccauacuauacugcucuacuacucaacugcugcuucuaguuuggcuguaacauugaugauagcuauuuuuauuguuuauaugaucuccagagacaauguuucuugcuccaucugucuauaa

SEQ ID NO: 58445 - RNA, 1755 nt, Artificial Sequence
  derived and/or modified CDS sequence (wt) from hemagglutinin__InfluenzaB__ABL76815
augaaggcaauaauuguacuacucaugguaguaacauccaaugcagaucgaaucugcacugggauaacaucaucaaacucaccucauguggucaaaacagcuacucaaggggaggucaaugugacuggugcgauaccacugacaacaacaccaacaaaaucucauuuugcaaaucucaaaggaacaaagaccagagggaaacuaugcccaaccugucucaacugcacagauuuggauguggccuugggcagaccaauguguguggggaucacaccuucggcaaaagcuucaauacuccacgaagucagaccuguuacauccggaugcuuuccuauaaugcacgacagaacaaaaaucagacagcuacccaaucuucucagaggauaugaaaaaaucagauuaucaacacaaaacguuaucaacgcagaaaaggcaccaggaggacccuacagacuuggaacuucaggaucuugcccuaacgcuaccaguaaaagcggauuuuucgcaacaauggcuugggcugucccaagggacaacaacaaaacagcaacgaauccacuaacaguagaaguaccacacaucuguacaaaagaagaagaccaaauuacuguuuggggguuccauucugauaacaaaacccaaaugaaaaaccucuauggagacucaaauccccaaaaguucaccucaucugcuaauggaauaaccacacauuauguuucucagaucggcggcuucccggaccaaacagaagacggagggcuaccacaaagcggcagaauuguuguugauuacauggugcaaaaaccugggaaaacaggaacaauugucuaucaaagagggauuuuguugccucaaaagguguggugcgcgaguggcaggagcaaaguaauaaaaggguccuugccuuuaauuggugaagcagauugccuucacgaaaaauacgguggauuaaacaaaagcaagccuuacuacacaggagaacaugcaaaagccauagggaauugcccaauaugggugaaaacaccuuugaagcuugccaauggaaccaaauauagaccuccugcaaaacuauuaaaggaaagggguuucuucggagcuauugcugguuucuuagaaggaggaugggaaggaaugauugcagguuggcacggauacacaucucacggagcacacggaguggcaguggcagcagaccuuaagaguacgcaagaagccauaaacaagauaacaaaaaaucucaauucuuugagugagcuagaaguaaagaaccuucaaagacuaaguggugccauggaugaacuccauaacgaaauacucgagcuggaugagaaaguggaugaucucagagcugacacaauaagcucacaaauagaacuugcagucuugcuuuccaacgaaggaauaauaaacagugaagaugagcaucuauuggcacuugagagaaaacuaaagaaaaugcugggucccucugcuguagacauagggaauggaugcuucgaaaccaaacacaagugcaaccagaccugcuuagacaggauagcugcuggcaccuuuaaugcaggagaauuuucucuucccacuuuugauucacugaacauuacugcugcaucuuuaaaugaugauggauuggauaaccauacuauacugcucuacuacucaacugcugcuucuaguuuggcuguaacauugaugauagcuauuuuuauuguuuauaugaucuccagagacaauguuucuugcuccaucugucuauaa

SEQ ID NO: 58446 - RNA, 1758 nt, Artificial Sequence
  derived and/or modified CDS sequence (wt) from hemagglutinin__InfluenzaB__ABL76826
augaaggcaauaauuguacuacucaugguaguaacauccaaugcagaccgaaucugcacugggauaacaucgucaaacucaccccauguggucaaaacugcuacucaaggggaggucaaugugacuggugugauaccacugacaacaacacccaccaaaucucauuuugcaaaucucaaaggaacaaaaaccagagggaaacuaugcccagaaugccucaacugcacagaucuggacguggccuugggcagaccaaaaugcacggggaacauacccucggcaaaaguuucaauacuccaugaagucagaccuguuacaucugggugcuuuccuauaaugcacgacagaacaaaaauuagacagcugcccaaccuucucagaggauacgaacauaucagguuaucaacucauaacguuaucaaugcagaaaaggcaccaggaggacccuacaaaauuggaaccucagggucuugcccuaacguuaccaauggaaacggauuuuucgcaacaauggcuugggccgucccaaaaaacgacaacaacaaaacagcaacaaauucauuaacaauagaaguaccauacauuuguacagaaggagaagaccaaauuaccguuuggggguuccacucugauaacgaaacccaaauggcaaaacucuauggggacucaaagccccagaaguucaccucaucugccaacggagugaccacacauuacguuucacagauugguggcuucccaaaucaaacagaagacggaggacuaccacaaagugguagaauuguuguugauuacauggugcaaaaaucugggaaaacaggaacaauuaccuaucaaagagguauuuuauugccucaaaaaguguggugcgcaaguggcaggagcaagguaauaaaaggauccuugccuuuaauuggagaagcagauugccuccacgaaaaauacgguggauuaaacaaaagcaagccuuacuacacaggggaacaugcaaaggccauaggaaauugcccaauaugggugaaaacacccuugaagcuggccaauggaaccaaauauagaccuccugcaaaacuauuaaaggaaagggguuucuucggagcuauugcugguuucuuagaaggaggaugggaaggaaugauugcagguuggcacggauacacaucccauggggcacauggaguagcaguggcagcagaccuuaagagcacucaagaagccauaaacaagauaacaaaaaaucucaacucuuugagugagcuggaaguaaagaaucuucaaagacuaagcggugccauggaugaacuccacaacgaaauacuagaacuagacgagaaaguggaugaucucagagcugauacaauaagcucacaaauagaacuugcaguccugcuuuccaaugaaggaauaauaaacagugaagaugagcaucucuuggcgcuugaaagaaagcugaagaaaaugcugggccccucugcuguagagauagggaauggaugcuucgaaaccaaacacaagugcaaccagaccugucucgacagaauagcugcugguaccuuugaugcaggagaauuuucucuccccacuuuugauucacugaauauuacugcugcaucuuuaaaugacgauggauuggauaaucauacuauacugcuuuacuacucaacugcugccuccaguuuggcuguaacauugaugauagcuaucuuuguuguuuauauggucuccagagacaauguuucuugcuccaucugucuauaa

SEQ ID NO: 58447 - RNA, 1758 nt, Artificial Sequence
  derived and/or modified CDS sequence (wt) from hemagglutinin__InfluenzaB__ABL76837
augaaggcaauaauuguacuacucaugguaguaacauccaaugcagaucgaaucugcacugggauaacaucgucaaacucaccccauguggucaaaacugcuacucaaggggaggucaaugugacuggugugauaccacugacaacaacacccaccaaaucucauuuugcaaaucucaaaggaacaaaaaccagagggaaacuaugcccaaaaugccucaacugcacagaucuggacguggccuugggcagaccaaaaugcacggggaacauacccucggcagaaguuucaauacuccaugaagucagaccuguuacaucugggugcuuuccuauaaugcacgacagaacaaaaguuagacagcugcccaaccuucucagaggauacgaacauaucagguuaucaacucauaacguuaucaaugcagaaaaggcaccaggaggacccuacaaaauuggaaccucagggucuugcccuaacguuaccaauggaaacggauuuuucgcaacaauggcuugggccgucccaaaaaacgacaacaacaaaacagcaacaaauucauuaacaguagaaguaccauacauuuguacagaaggagaagaccaaauuaccguuuggggguuccacucugauagcgaaacccaaauggcaaaacucuauggggacucaaagccccagaaguucaccucaucuuccaacggagugaccacacauuacguuucacagauugguggcuucccaaaucaaacggaagacggaggacuaccacaaagugguagaauuguuguugauuacauggugcaaaaaucugggaaaacaggaacaauuaccuaucaaagagguauuuuauugccucaaaaaguguggugcgcaaguggcaggagcaagguaauaaaaggauccuugccuuuaauuggagaagcagauugccuccacgaaagauacgguggauuaaacaaaagcaagccuuacuacacaggggaacaugcaaaggccauaggaaauugcccaauaugggugaaaacacccuugaagcuggccaauggaaccaaauauagaccuccugcaaaacuauuaaaggaaagggguuucuucggagcuauugcugguuucuuagaaggaggaugggaaggaaugauugcagguuggcacggauacacaucccauggggcacauggaguagcaguggcagcagaccuuaagagcacucaagaagccauaaacaagauaacaaaaaaucucaacucuuugagugagcuggaaguaaagaaucuucaaagacuaagcggugccauggaugaacuccacaacgaaauacuagaacuagacgagaaaguggaugaucucagagcugauacaauaagcucacaaauagaacucgcaguccugcuuuccaaugaaggaauaauaaacagugaagaugagcaucucuuggcgcuugaaagaaagcugaagaaaaugcugggccccucugcuguagagauagguaauggaugcuucgaaaccaaacacaagugcaaccagaccugucucgacagaauagcugcugguaccuuugaugcaggagaauuuucucuccccacuuuugauucacugaauauuacugcugcaucuuuaaaugacgauggauuggauaaucauacuauacugcuuuacuacucaacugcugccuccaguuuggcuguaacauugaugauagcuaucuuuguuguuuauauggucuccagagacaauguuucuugcuccaucugucuauaa

SEQ ID NO: 58448 - RNA, 1755 nt, Artificial Sequence
  derived and/or modified CDS sequence (wt) from hemagglutinin__InfluenzaB__ABL76848
augaaggcaauaauuguacuacucaugguaguaacauccaaugcagaucgaaucugcacugggauaacaucgucaaacucaucucauguggucaaaacagcuacucaaggggaggucaaugugacuggugcgauaccacugacaacaacaccaacaaaaucucauuuugcaaaucucaaaggaacaaagaccagagggaaacuaugcccgaccugucucaacugcacagauuuggauguggccuugggcagaccaauguguguggggaucacaccuccggcaaaagcuucaauacuccacgaagucagaccuguuacauccggaugcuuuccuauaaugcacgacagaacaaaaaucagacagcuacccaaucuucucagaggauaugaaaaaaucagauuaucaacccaaaacguuaucaacgcagaaaaggcaccaggaggacccuacagacuuggaacuucaggaucuugcccuaacgcuaccaguaagagcggauuuuucgcaacaauggcuugggcugucccaagggacaacaacaaaacagcaacaaauccacuaacaguagaaguaccacacaucuguacaaaagaagaagaccaaauuacuguuuggggguuccauucugauaacaaaacccaaaugaaaaaccucuauggagacucaaauccucaaaaguucaccucaucugcuaauggaauaaccacacauuauguuucucagauuggcggcuucccggaccaaacagaagacggagggcuaccacaaagcggcagaauuguuguugauuacauggugcaaaaaccugggaaaacagggacaauugucuaucaaagagggauuuuguugccucaaaaaguguggugcgcgaguggcaggaguaaaguaauaaaaggguccuugccuuuaauuggugaagcagauugccuucacgaaaaauacgguggauuaaacaaaagcaagccuuacuacacaggagaacaugcaaaagccauagggaauugcccaauaugggugaaaacaccuuugaagcuugccaauggaaccaaauauagaccuccugcaaaacuauuaaaggaaagggguuucuucggagcuauugcugguuucuuagaaggaggaugggaaggaaugauugcagguuggcacggauacacaucucacggagcacacggaguggcaguggcagcagaccuuaagaguacgcaagaagccauaaacaagauaacaaaaaaucucaauucuuugagugagcuagaaguaaagaaccuucaaagacuaaguggugccauggaugaacuccauaacgaaauacucgagcuggaugagaaaguggaugaucucagagcugacacaauaagcucacaaauagaacuugcagucuugcuuuccaacgaaggaauaauaaacagugaagaugagcaucuauuggcacuugagagaaaacuaaagaaaaugcugggucccucugcuguagacauagggaauggaugcuucgaaaccaaacacaagugcaaccagaccugcuuagacaggauagcugcuggcaccuuuaaugcaggagaauuuucucuucccacuuuugauucacugaacauuacugcugcaucuuuaaaugaugauggauuggauaaccauacuauacugcucuacuacucaacugcugcuucuaguuuggcuguaacauugaugauagcuauuuuuauuguuuauaugaucuccagagacaauguuucuugcuccaucugucuauaa

SEQ ID NO: 58449 - RNA, 1755 nt, Artificial Sequence
  derived and/or modified CDS sequence (wt) from hemagglutinin__InfluenzaB__ABL76859
augaaggcaauaauuguacuacucaugguaguaacauccaaugcagaucgaaucugcacugggauaacaucgucaaacucaccucauguggucaaaacagcuacucaaggggaggucaaugugacuggugcgauaccacugacaacaacaccaacaaaaucucauuuugcaaaucucaaaggaacaaagaccagagggaaacuaugcccaaccugucucaacugcacagauuuggauguggccuugggcagaccaauguguguggggaucacaccuucggcaaaagcuucaauacuccacgaagucagaccuguuacauccggaugcuuuccuauaaugcacgacagaacaaaaaucagacagcuacccaaucuucucagaggauaugaaaaaaucagauuaucaacacaaaacguuaucaacgcagaaaaggcaccaggaggacccuacagacuuggaacuucaggaucuugcccuaacgcuaccaguaaaagcggauuuuucgcaacaauggcuugggcugucccaagggacaacaacaaaacagcaacgaauccacuaacaguagaaguaccacacaucuguacaaaagaagaagaccaaauuacuguuuggggguuccauucugauaacaaaacccaaaugaaaaaccucuauggagacucaaauccccaaaaguucaccucaucugcuaauggaauaaccacacauuauguuucucagaucggcggcuucccggaccaaacagaagacggagggcuaccacaaagcggcagaauuguuguugauuacauggugcaaaaaccugggaaaacaggaacaauugucuaucaaagagggauuuuguugccucaaaagguguggugcgcgaguggcaggagcaaaguaauaaaaggguccuugccuuuaauuggugaagcagauugccuucacgaaaaauacgguggauuaaacaaaagcaagccuuacuacacaggagaacaugcaaaagccauagggaauugcccaauaugggugaaaacaccuuugaagcuugccaauggaaccaaauauagaccuccugcaaaacuauuaaaggaaagggguuucuucggagcuauugcugguuucuuagaaggaggaugggaaggaaugauugcagguuggcacggauacacaucucacggagcacacggaguggcaguggcagcagaccuuaagaguacgcaagaagccauaaacaagauaacaaaaaaucucaauucuuugagugagcuagaaguaaagaaccuucaaagacuaaguggugccauggaugaacuccauaacgaaauacucgagcuggaugagaaaguggaugaucucagagcugacacaauaagcucacaaauagaacuugcagucuugcuuuccaacgaaggaauaauaaacagugaagaugagcaucuauuggcacuugagagaaaacuaaagaaaaugcugggucccucugcuguagacauagggaauggaugcuucgaaaccaaacacaagugcaaccagaccugcuuagacaggauagcugcuggcaccuuuaaugcaggagaauuuucucuucccacuuuugauucacugaacauuacugcugcaucuuuaaaugaugauggauuggauaaccauacuauacugcucuacuacucaacugcugcuucuaguuuggcuguaacauugaugauagcuauuuuuauuguuuauaugaucuccagagacaauguuucuugcuccaucugucuauaa

SEQ ID NO: 58450 - RNA, 1755 nt, Artificial Sequence
  derived and/or modified CDS sequence (wt) from hemagglutinin__InfluenzaB__ABL76881
augaaggcaauaauuguacuacuaaugguaguaacauccaaugcagaucgaaucugcacugggauaacaucuucaaacucaccucauguggucaaaacagcuacucaaggggaggucaaugugacuggugugauaccacugacaacaacaccaacaaaaucucauuuugcaaaucucaaaggaacaaggaccagagggaaacuaugcccagacugucucaacugcacagaucuggauguggccuugggcagaccaauguguguggggaccacaccuucggcaaaagcuucaauacuccacgaagucagaccuguuacauccgggugcuuuccuauaaugcacgacagaacaaaaaucagacaacuacccaaucuucucagaggauaugaaaauaucagguuaucaacccaaaacguuaucgaugcagaaaaggcaucaggaggacccuacagacuuggaaccucaggaucuugcccuaacgcuaccaguaaaagcggauuuuucgcaacaauggcuugggcugucccaaaggacaacaacaaaaaugcaacgaacccacuaacaguagaaguaccauacauuuguacagaaggggaagaccaaauuacuguuuggggguuccauucagauaacgaaacccaaaugaaaaaccucuauggagacucaaauccucaaaaguucaccucaucugcuaauggaguaaccacacauuauguuucucagauuggcggcuucccagaucaaaaagaagacggaggacuaccacaaagcggcagaauuguuguugauuacauggugcaaaaaccugggaaaacaggaacaauugucuaucaaagagguguuuuguugccucaaaagguguggugcgcgaguggcagaagcaaaguaauaaaaggguccuugccuuuaauuggugaagcagauugccuucaugaaaaauacgguggguuaaacaaaagcaagccuuacuacacaggagaacaugcaaaagccauaggaaauugcccaauaugggugaaaacaccuuugaagcuugccaauggaaccaaauauagaccuccugcaaaacuauuaaaggaaagggguuucuucggagcuauugcugguuuccuagaaggaggaugggaaggaaugauugcagguuggcacggauacacaucucacggagcacauggaguggcaguggcggcagaccuuaagaguacgcaagaagcuauaaacaagauaacaaaaaaucucaauucuuugagugagcuagaaguaaagaaucuucaaagacuaaguggugccauggaugaacuccacaacgaaauacucgagcuggaugagaaaguggaugaucucagagcugacacuauaagcucgcaaauagaacuugcagucuugcuuuccaacgaaggaauaauaaacagugaagaugagcaucuauuggcacuugagagaaaacuaaagaaaaugcugggucccucugcuguagacauaggaaauggaugcuucgaaaccaaacacaagugcaaccagaccugcuuagacaggauagcugcuggcaccuuuaaugcaggagaauuuucucuccccacuuuugauucacugaacauuacugcugcaucuuuaaaugaugauggauuggauaaccauacuauacugcucuauuacucaacugcugcuucuaguuuggcuguaacauugaugcuagcuauuuuuauuguuuauauggucuccagagacaacguuucaugcuccaucugucuauaa

SEQ ID NO: 58451 - RNA, 1755 nt, Artificial Sequence
  derived and/or modified CDS sequence (wt) from hemagglutinin__InfluenzaB__ABL76892
augaaggcaauaauuguacuacucaugguaguaacauccaacgcagaucgaaucugcacugggauaacaucuucaaacucaccucauguggucaaaacagcuacucaaggggaggucaaugugacuggugugauaccacugacaacaacaccaacaaaaucucauuuugcaaaucucaaaggaacaaggaccagagggaaacuaugcccagacugucucaacugcacagaucuggauguggccuugggcagaccaauguguguggggaccacaccuucggcaaaagcuucaauacuccacgaagucagaccuguuacauccgggugcuuuccuauaaugcacgacagaacaaaaaucagacaacuacccaaucuucucagaggauaugaaaauaucagguuaucaacccaaaacguuaucgaugcagaaaaggcaccaggaggacccuacagacuuggaaccucaggaucuugcccuaacgcuaccaguaaaagcggauuuuucgcaacaauggcuugggcugucccaaaggacaacaacaaaaaugcaacgaacccacuaacaguagaaguaccauacguuuguacagaaggggaagaccaaauuacuguuuggggguuccauucagauaacaaaacccaaaugaaaaaccucuauggagacucaaauccucaaaaguucaccucaucugcuaauggaguaaccacacauuauguuucucagauuggcggcuucccagaucaaacagaagacggaggacuaccacaaagcggcagaauuguuguugauuacauggugcaaaaaccugggaaaacaggaacaauugucuaucaaagagguguuuuguugccucaaaagguguggugcgcgaguggcaggagcaaaguaauaaaaggguccuugccuuuaauuggugaagcagauugccuucaugaaaaauacgguggguuaaacaaaagcaagccuuacuacacaggagaacaugcaaaagccauaggaaauugcccaauaugggugaaaacaccuuugaagcuugccaauggaaccaaauauagaccuccugcaaaacuauuaaaggaaagggguuucuucggagcuauugcugguuuccuagaaggaggaugggaaggaaugauugcagguuggcacggauacacaucucacggagcacauggaguggcaguggcggcagaccuuaagaguacgcaagaagcuauaaacaagauaacaaaaaaucucaauucuuugagugagcuagaaguaaagaaucuucaaagacuaaguggugccauggaugaacuccacaacgaaauacucgagcuggaugagaaaguggaugaucucagagcugacacuauaagcucgcagauagaacuugcagucuugcuuuccaacgaaggaauaauaaacagugaagaugagcaucuauuggcacuugagagaaaacuaaagaaaaugcugggucccucugcuguagacauaggaaauggaugcuucgaaaccaaacacaagugcaaccagaccugcuuagacaggauagcugcgggcaccuuuaaugcaggagaauuuucucuccccacuuuugauucacugaacauuacugcugcaucuuuaaaugaugauggauuggauaaccauacuauacugcucuauuacucaacugcugcuucuaguuuggcuguaacauugaugcuagcuauuuuuauuguuuauauggucuccagagacaacguuucaugcuccaucugucuauaa

SEQ ID NO: 58452 - RNA, 1755 nt, Artificial Sequence
  derived and/or modified CDS sequence (wt) from hemagglutinin__InfluenzaB__ABL76903
augaaggcaauaauuguacuacucaugguaguaacauccaaugcagaucgaaucugcacugggauaacaucuucaaacucaccucauguggucaaaacagcuacucaaggggaggucaaugugacuggugugauaccacugacaacaacaccaacaaaaucuuauuuugcaaaucucaaaggaacaaggaccagagggaaacuaugcccagacugucuuaacuguacagaucuggauguggccuugggcagaccaauguguguggggaccacaccuucugcgaaagcuucaauacuccacgaagucagaccuguuacauccgggugcuuuccuauaaugcacgacagaacaaaaaucaggcaacuacccaaucuucucagaggauaugaaaauaucagguuaucaacccaaagcguuaucgaugcagaaaaggcaccaggagggcccuacagacuuggaaccucaggaucuugcccuaaugcuaccaguaaaagcggauuuuucgcaacaauggcuugggcugucccaaaggacaacaacaaaaaugcaacgaacccacuaacaguagaaguaccauacauuuguacagaaggggaagaccaaauuacuguuuggggguuccauucagaugacaaaacccaaaugaagaaccucuauggagacucaaauccucaaaaguucaccucaucugcuaauggaguaaccacacauuauguuucucagauuggcggcuucccagaucaaacagaagacggaggacuaccacaaagcggcagaauuguuguugauuacaugauucaaaaaccugggaaaacaggaacaauugucuaucaaagagguguuuuguugccucaaaagguguggugcgcgaguggcaggagcaaaguaauaaaaggguccuugccuuuaauuggugaagcagauugccuucaugaaaaauacgguggauuaaacaaaagcaagccuuacuacacaggagaacaugcaaaagccauaggaaauugcccaauaugggugaaaacaccuuugaagcuugccaauggaaccaaauauagaccuccugcaaaacuauuaaaggaaagggguuucuucggagcuauugcugguuuccuagaaggaggaugggaaggaaugauugcagguuggcacggauacacaucucacggagcacauggaguggcaguggcggcagaccuuaagaguacacaagaagcuauaaacaagauaacaaaaaaucucaauucuuugagugagcuagaaguaaagaaucuucaaagacuaaguggugccauggaugaacuccacaacgaaauacucgagcuggaugagaaaguggaugaccucagagcugacacuauaagcgcacaaauagaacuugcagucuugcuuuccaacgaaggaauaauaaacagugaagacgagcauuuauuggcacuugagagaaaacuaaagaaaaugcugggucccucugcuguagacauaggaaauggaugcuucgaaaccaaacacaagugcaaccagaccugcuuggacaggauagcugcuggcaccuuuaaugcaggagaauuuucucuccccacuuuugacucauugaacauuacugcugcaucuuuaaaugaugauggauuggauaaccauacuauacugcucuauuacucaacugcugcuucuaguuuggcuguaacauugaugcuagcuauuuuuauuguuuauauggucuccagagacaacguuucaugcuccaucugucuauaa

SEQ ID NO: 58453 - RNA, 1758 nt, Artificial Sequence
  derived and/or modified CDS sequence (wt) from hemagglutinin__InfluenzaB__ABL76914
augaaggcaauaauuguacuacucaugguaguaacauccaaugcagaucgaaucugcacugggauaacaucgucaaacucaccccauguggucaaaacugcuacucaaggggaggucaaugugacuggugugauaccacugacaacaacacccaccaaaucucauuuugcaaaucucaaaggaacaaaaaccagagggaaacuaugcccaaaaugccucaacugcacagaucuggacguggccuugggcagaccaaaaugcacggggaacauacccucggcagaaguuucaauacuccaugaagucagaccuguuacaucugggugcuuuccuauaaugcacgacagaacaaaaauuagacagcugcccaaccuucucagaggauacgaacauaucagguuaucaacucauaacguuaucaaugcagaaaaggcaccaggaggacccuacaaaauuggaaccucagggucuugcccuaacguuaccaauggaaacggauuuuucgcaacaauggcuugggccgucccaaaaaacgacaacaacaaaacagcaacaaauucauuaacaauagaaguaccauacauuuguacagaaggagaagaccaaauuaccguuuggggguuccacucugauaacgaagcccaaauggcaaaacucuauggggacucaaagccccagaaguucaccucaucuuccaacggagugaccacacauuacguuucacagauugguggcuucccaaaucaaacggaagacggaggacuaccacaaagugguagaauuguuguugauuacauggugcaaaaaucugggaaaacaggaacaauuaccuaucaaagagguauuuuauugccucaaaaaguguggugcgcaaguggcaggagcaagguaauaaaaggauccuugccuuuaauuggagaagcagauugccuccacgaaagauacgguggauuaaacaaaagcaagccuuacuacacaggggaacaugcaaaggccauaggaaauugcccaauaugggugaaaacacccuugaagcuggccaauggaaccaaauauagaccuccugcaaaacuauuaaaggaaagggguuucuucggagcuauugcugguuucuuagaaggaggaugggaaggaaugauugcagguuggcacggauacacaucccauggggcacauggaguagcaguggcagcagaccuuaagagcacucaagaagccauaaacaagauaacaaaaaaucucaacucuuugagugagcuggaaguaaagaaucuucaaagacuaagcggugccauggaugaacuccacaacgaaauacuagaacuagacgagaaaguggaugaucucagagcugauacaauaagcucacaaauagaacucgcaguccugcuuuccaaugaaggaauaauaaacagugaagaugagcaucucuuggcgcuugaaagaaagcugaagaaaaugcugggccccucugcuguagagauagggaauggaugcuucgaaaccaaacacaagugcaaccagaccugucucgacagaauagcugcugguaccuuugaugcaggagaauuuucucuccccacuuuugauucacugaauauuacugcugcaucuuuaaaugacgauggauuggauaaucauacuauacugcuuuacuacucaacugcugccuccaguuuggcuguaacauugaugauagcuaucuuuguuguuuauauggucuccagagacaauguuucuugcuccaucugucuauaa

SEQ ID NO: 58454 - RNA, 1755 nt, Artificial Sequence
  derived and/or modified CDS sequence (wt) from hemagglutinin__InfluenzaB__ABL76936
augaaggcaauaauuguacuacucaugguaguaacauccaaugcagaucgaaucugcacugggauaacaucgucaaacucaccucauguagucaaaacagcuacucaaggggaggucaaugugacuggugugauaccacugacaacaacaccaacaaaaucucauuuugcaaaucucaaaggaacaaagaccagagggaaacuaugcccaaccugucucaacugcacagaucuggauguggccuugggcagaccaauguguguggggaccacaccuucggcaaaagcuucaauacuccacgaagucagaccuguuacauccggaugcuuuccuauaaugcacgacagaacaaaaaucagacagcuacccaaucuucucagaggauaugaaaaaaucagauuaucaacccaaaacguuaucaacgcagaaaaggcaccaggaggacccuacagacuuggaaccucaggaucuugcccuaacgcuaccaguagaagcggauuuuucgcaacaauggcuugggcugucccaagggacaacaacaaaacagcaacgaauccacuaacaguagaaguaccauacauuuguacaaaagaagaagaccaaauuacuguuuggggguuccauucugaugacaaaacccaaaugaaaaaccucuauggagacucaaauccucaaaaguucaccucaucugcuaauggaguaaccacacauuauguuucucagauuggcggcuucccggaucaaacagaagacggagggcuaccacaaagcggcagaauuguuguugauuacauggugcaaaaaccugggaaaacaggaacaauugucuaucaaagagguguuuuguugccucaaaagguguggugcgcgaguggcaggagcaaaguaauaaaaggguccuugccuuuaauuggugaagcagauugccuucacgaaaaauacgguggauuaaacaaaagcaagccuuacuacacaggagaacaugcaaaagccauaggaaauugcccaauaugggugaaaacaccuuugaaacuugccaauggaaccaaauauagaccuccugcaaaacuauuaaaggaaagggguuucuucggagcuauugcugguuucuuagaaggaggaugggaaggaaugauugcagguuggcacggauacacaucucacggagcacauggaguggcaguggcagcagaccuuaagaguacgcaagaagccauaaacaagauaacaaaaaaucucaauucuuugagugagcuagaaguaaagaaucuucaaagacuaaguggugccauggaugaacuccacaacgaaauacucgagcuggaugagaaaguggaugaucucagagcugacacaauaagcucacaaauagaacuugcagucuugcuuuccaacgaaggaauaauaaacagugaagaugagcaucuauuggcacuugagagaaaacuaaagaaaaugcugggucccucugcuguagacauagggaauggaugcuucgaaaccaaacacaagugcaaccagaccugcuuagacaggauagcugcuggcaccuuuaaugcaggagaauuuucucuucccacuuuugauucacugaauauuacugcugcaucuuuaaaugaugauggauuggauaaccauacuauacugcucuacuacucaacugcugcuucuaguuuggcuguaacauugaugauagcuauuuuuauuguuuauauggucuccagagacaauguuucuugcuccaucugucuauaa

SEQ ID NO: 58455 - RNA, 1755 nt, Artificial Sequence
  derived and/or modified CDS sequence (wt) from hemagglutinin__InfluenzaB__ABL76947
augaaggcaauaauuguacuacucaugguaguaacauccaaugcagaucgaaucugcacugggauaacaucgucaaacucaccucauguggucaaaacagcuacucaaggggaggucaaugugacuggugcgauaccacugacaacaacaccaacaaaaucucauuuugcaaaucucaaaggaacaaagaccagagggaaacuaugcccaaccugucucaacugcacagaucuggauguggccuugggcagaccaauguguguggggaucacaccuucggcaaaagcuucaauacuccacgaagucagaccuguuacauccggaugcuuuccuauaaugcacgacagaacaaaaaucagacagcuacccaaucuucucagaggauaugaaaaaaucagauuaucaacccaaaacguuaucaacgcagaaaaggcaccaggaggacccuacagacuuggaacuucaggaucuugcccuaacgcuaccaguagaagcggauuuuucgcaacaauggcuugggcugucccaagggacaacaacaaaacagcaacgaauccacuaacaguagaaguaccacacaucuguacaaaagaagaagaccaaauuacuguuuggggguuccauucugaugacaaaacccaaaugaaaaaccucuauggagacucaaauccucaaaaguucaccucaucuacuaauggaauaaccacacauuauguuucucagauuggcggcuucccggaccaaacagaagacggagggcuaccacaaagcggcagaauuguuguugauuacauggugcaaaaaccugggaaaacaggaacaauugucuaucaaagagggauuuuguugccucaaaagguguggugcgcgaguggcaggagcaaaguaauaaaaggguccuugccuuuaauuggugaagcagauugccuucacgaaaaauacgguggauuaaacaaaagcaagccuuacuacacaggagaacaugcaaaagccauaggaaauugcccaauaugggugaaaacaccuuugaagcuugccaauggaaccaaauauagaccuccugcaaaacuauuaaaggaaagggguuucuucggagcuauugcugguuucuuagaaggaggaugggaaggaaugauugcagguuggcacggauacacaucucacggagcacauggaguggcaguggcagcagaccuuaagaguacgcaagaagccauaaacaagauaacaaaaaaucucaauucuuugagugagcuagaaguaaagaaccuucaaagacuaaguggugccauggaugaacuccauaacgaaauacucgagcuggaugagaaaguggaugaucucagagcugacacaauaagcucacaaauagaacuugcaguuuugcuuuccaacgaaggaauaauaaacagugaagaugagcaucuauuggcacuugagagaaaacuaaagaaaaugcugggucccucugcuguagacauagggaauggaugcuucgaaaccaaacacaagugcaaccagaccugcuuagacaggauagcugcuggcaccuuuaaugcaggagaauuuucucuucccacuuuugauucacugaacauuacugcugcaucuuuaaaugaugauggauuggauaaccauacuauacugcucuacuacucaacugcugcuucuaguuuggcuguaacauugaugauagcuauuuuuauuguuuauaugaucuccagagacaauguuucuugcuccaucugucuauaa

SEQ ID NO: 58456 - RNA, 1758 nt, Artificial Sequence
  derived and/or modified CDS sequence (wt) from hemagglutinin__InfluenzaB__ABL76958
augaaggcaauaauuguacuacucaugguaguaacauccaaugcagaucgaaucugcacugggauaacaucgucaaacucgccccauguggucaaaacugcuacucaaggggaagucaaugugacuggugugauaccacugacaacaacacccaccaaaucucauuuugcaaaucucaaaggaacaaaaaccagagggaaacuaugcccaaaaugucucaacugcacagaucuggacguggccuugggcagaccaaaaugcacggggaacauaccuucggcaaaaguuucaauacuccaugaagucagaccuguuacaucugggugcuuuccuauaaugcacgacagaacaaaaauuagacagcugcccaaucuucucagaggauacgaacauaucagguuaucaacccauaacguuaucaaugcagaaaaggcaccaggaggacccuacaaaauuggaaccucagggucuugcccuaacguuaccaauggaaacggauucuucgcaacaauggcuugggcugucccaaaaaacgacaacaacaaaacagcaacaaauucauuaacaauagaagugccauacauuuguacagaaggagaagaccaaauuaccguuuggggauuccacucugauaacgaagcccaaauggcaaaacucuauggagacucaaagccucagaaguucaccucaucugccaacggugugaccacacauuacguuucacagauugguggcuucccaaaucaaacagaagacggaggacuaccacaaagugguagaauuguuguugauuacauggugcaaaaaucuggaaaaacaggaacaauuaccuaucaaagagguauuuuauugccucaaaaaguguggugcgcaaguggcaggagcaagguaauaaaaggauccuugccuuuaauuggagaagcagauugccuccacgaaaaauacgguggauuaaacaaaagcaagccuuacuacacaggggaacaugcaaaagccauaggaaauugcccaauaugggugaaaacacccuugaagcuggccaauggaaccaaauauagaccuccugcaaaacuauuaaaggaaagggguuucuucggagcuauugcugguuucuuagaaggaggaugggaaggaaugauugcagguuggcacggauacacaucccauggagcacauggaguagcaguggcagcagaccuuaagaguacucaagaagccauaaacaagauaacaaagaaucucaacucuuugagugaacuggaaguaaagaaucuucaaagacuaagcggugccauggaugaacuccacaacgaaauacuagaacuagaugagaaaguggaugaucucagagcugauacaauaagcucgcaaauagaacucgcagucuugcuuuccaaugaaggaauaauaaacagugaggaugagcaucucuuggcgcuugaaagaaaacugaagaaaaugcugggccccucugcuguagagauagggaauggaugcuucgaaaccaaacacaagugcaaccagaccugccucgacagaauagcugcuggcaccuuuaaugcaggagaauuuucucuccccaccuuugauucacuaaauauuacugcugcaucuuuaaaugacgauggauuggauaaucauacuauacugcuuuacuacucaacugcugcuuccaguuuggcuguaacauugaugauagcuaucuuuguuguuuauauggucuccagagacaauauuucuugcuccaucugucuauaa

SEQ ID NO: 58457 - RNA, 1758 nt, Artificial Sequence
  derived and/or modified CDS sequence (wt) from hemagglutinin__InfluenzaB__ABL76969
augaaggcaauaauuguacuacucaugguaguaacauccaaugcagaucgaaucugcacugggauaacaucgucaaacucaccccauguggucaaaacugcuacucaaggggaggucaaugugacuggugugauaccacugacaacaacacccaccaaaucucauuuugcaaaucucaaaggaacaagaaccagagggaaacuaugcccaaaaugccucaacugcacagaucuggacguggccuugggcagaccaaaaugcacggggaacauaccuucggcaaaaguuucaauacuccaugaagucagaccuguuacaucugggugcuuuccuauaaugcacgacagaacaaaaauuagacagcugcccaaucuucucagaggauacgaacauaucagguuaucaauucauaacguuaucaaugcagaaaaggcaccaggaggacccuacaaaauuggaaccucagggucuugcccuaacguuaccaauggaaacggauucuucgcaacaauggcuugggccgucccaaaaaacgacaacaacaaaacagcaacaaauucauuaacaauagaaguaccauacauuuguacagaaggagaagaccaaauuaccguuuggggguuccacucugauaacgaagcccaaauggcaaaacucuauggggacucaaagccccagaaguucaccucaucugccaacggagugaccacacauuacguuucacagauugguggcuucccaaaucaaacagaagacggaggacuaccacaaagugguagaauuguuguugauuacauggugcaaaaaucugggaaaacaggaacaauuaccuaucaaagagguauuuuauugccucaaaaaguguggugcgcaaguggcaggagcaagguaauaaaaggauccuugccuuuaauuggagaagcagauugccuccacgaaaaauacgguggauuaaacaaaagcaagccuuacuacacaggggaacaugcaaaagccauaggaaauugcccaauaugggugaaaacacccuugaagcuggccaauggaaccaaauauagaccuccugcaaaacuauuaaaggaaagggguuucuucggagcuauugcugguuucuuagaaggaggaugggaaggaaugauugcagguuggcacggauacacaucccauggagcacauggaguagcaguggcagcagaccuuaagaguacucaagaagccauaaacaagauaacaaaaaaucucaacucuuugagugagcuggaaguaaagaaucuucaaagacuaagcggugccauggaugaacuccacaacgaaauacuagaacuagacgaaaaaguggaugaucucagagcugauacaauaagcucgcaaauagaacucgcagucuugcuuuccaaugaaggaauaauaaacagugaagaugagcaucucuuggcgcuugaaagaaaacugaagaaaaugcugggccccucugcuguagagauagggaauggaugcuucgaaaccaaacacaagugcaaccagaccugucucgacagaauagcugcuggcaccuuugaugcaggagaauuuucucuccccacuuuugauucacugaauauuacugcugcaucuuuaaaugacgauggauuggauaaucauacuauacugcuuuacuacucaacugcugcuuccaguuuggcuguaacauugaugauagcuaucuuuguuguuuauauggucuccagagacaauguuucuugcuccaucugucuauaa

SEQ ID NO: 58458 - RNA, 1755 nt, Artificial Sequence
  derived and/or modified CDS sequence (wt) from hemagglutinin__InfluenzaB__ABL76980
augaaggcaauaauuguacuacucaugguaguaacauccaaugcagaucgaaucugcacugggauaacaucgucaaacucaccucauguggucaaaacagcuacucaaggggaggucaaugugacuggugugauaccacugacaacaacaccaacaaaaucucauuuugcaaaucucaaaggaacaaagaccagagggaaacuaugcccaaccugucucaacugcacagaucuggauguggccuugggcagaccaauguguguggggaucacaccuucggcaaaagcuucaauacuccacgaagucagaccuguuacauccggaugcuuuccuauaaugcacgacagaacaaaaaucagacagcuacccaaucuucucagaggauaugaaaaaaucagauuaucaacccaaaacguuaucaacgcagaaaaggcaccaggaggacccuacagacuuggaaccucaggaucuugcccuaacgcuaccaguaaaagcggauuuuucgcaacaauggcuugggcugucccaagggacaacaacaaaacagcaacgaauccacuaacuguagaaguaccauacaucuguacaaaagaagaagaccaaauuacuguuuggggguuccauucugauaacaaaacccaaaugaaaaaccucuauggagacucagauccucaaaaguucaccucaucugcuaauggaguaaccacacauuauguuucucagauuggcggcuucccggaucaaacagaagacggagggcuaccacaaagcggcagaauuguuguugauuacauggugcaaaaaccugggaaaacaggaacaauugucuaucaaagagguauuuuguugccucaaaagguguggugcgcgaguggcaggagcaaaguaauaaaaggguccuugccuuuaauuggugaagcagauugccuucacgaaaaauacgguggauuaaacaaaagcaagccuuauuacacaggagaacaugcaaaagccauaggaaauugcccaauaugggugaaaacaccuuugaagcuugccaauggaaccaaauauagaccuccugcaaaacuauuaaaggaaagggguuucuucggagcuauugcugguuucuuagaaggaggaugggaaggaaugauugcagguuggcacggauacacaucucacggagcacauggaguggcaguggcagcagaccuuaagaguacgcaagaagccauaaacaagauaacaaaaaaucucaauucuuugagugagcuagaaguaaagaaucuucaaagacuaaguggugcuauggaugaacuccacaacgaaauacucgaguuggaugagaaaguggaugaucucagagcugacacaauaagcucacaaauagaacuugcagucuugcuuuccaacgaaggaauaauaaacagugaagaugagcaucuauuggcacuugagagaaaacuaaagaaaaugcugggucccucugcuguagacauagggaauggaugcuucgaaaccaaacacaagugcaaccagaccugcuuagacaggauagcugcuggcaccuuuaaugcaggagaauuuucucuucccacuuuugauucacugaauauuacugcugcaucuuuaaaugaugauggauuggauaaccauacuauacugcucuacuacucaacugcugcuucuaguuuggcuguaacauugaugauagcuauuuuuauuguuuauaugaucuccagagacaauguuucuugcuccaucugucuauaa

SEQ ID NO: 58459 - RNA, 1752 nt, Artificial Sequence
  derived and/or modified CDS sequence (wt) from hemagglutinin__InfluenzaB__ABL76991
augaaggcaauaauuguacuacucaugguaguaacauccaacgcagaucgaaucugcacugggauaacaucuucaaacucaccucauguggucaaaacagcuacucaaggggaagucaaugugacuggugugauaccacugacaacaacaccaacaaaaucucauuuugcaaaucucaaaggaacaaagaccagagggaaacuaugcccaaacugucucaacugcacagaucuggauguggccuugggcagaccaauguguauagggaucacaccuucggcaaaagcuucaauacuccacgaagucagaccuguuacauccgggugcuuuccuauaaugcacgacagaacaaaaaucagacagcuacccaaucuucucagaggauaugaacauaucagauuaucaacccauaacguuaucaacgcagaaagggcaccaggaggacccuacagacuuggaaccucaggaucuugcccuaacguuaccaguagaagcggauucuucgcaacaauggcuugggcugucccaagggacaacaaaacagcaacgaacccacuaacaguagaaguaccauacauuuguacaaaaggagaagaccaaauuacuguuuggggguuccauucugauaacaaaauccaaaugaaaaaccucuauggagacucaaauccucaaaaguucaccucaucugccaauggaauaaccacacauuauguuucucagauugguggcuucccaaaucaaacagaagacggagggcuaccacaaagcggcagaauuguuguugauuacauggugcaaaaaccugggaaaacaggaacaauugucuaucaaagagguguuuuguugccucaaaagguguggugugcaaguggcaggagcaagguaauaaaaggguccuugccuuuaauuggugaagcagauugccuucacgaaaaauacgguggauuaaacaaaagcaagccuuacuacacaggagaacaugcaaaagccauaggaaauugcccaauaugggugaaaacaccuuuaaagcuugccaauggaaccaaauauagaccucccgcaaaacuauuaaaggaaaaggguuucuucggagcuauugcugguuucuuagaaggaggaugggaaggaaugauugcagguuggcacggauacacaucucauggagcacaugggguggcaguggcagcagaccuuaagaguacgcaagaagccauaaacaagauaacaaaaaaucucaauucuuugagugagcuagaaguaaagaaucuucaaagacuaaguggugccauggaugaacuccacaacgaaauacucgagcuggaugagaaaguggaugaucucagagcugacacaauaagcucgcaaauagagcuugcagucuugcuuuccaaugaaggaauaauaaacagugaagaugagcaucuauuggcacuugagagaaaacuaaagaaaaugcugggucccucugcuguagacauagggaauggaugcuucgaaaccaaacacaagugcaaccagaccugcuuagacaggauagcugcuggcaccuuuaaugcaggagaauuuucucuucccacuuuugauucacugaauauuacugcugcaucuuuaaaugaugauggauuggauaaucauacuauacugcucuacuacucaacugcggcuucuaguuuggcuguaacauugaugauagcuauuuuuauuguuuauauggucuccagagacaauguuucuugcuccaucugucuauag

SEQ ID NO: 58460 - RNA, 1755 nt, Artificial Sequence
  derived and/or modified CDS sequence (wt) from hemagglutinin__InfluenzaB__ABL77002
augaaggcaauaauuguacuacucaugguaguaacauccaaugcagaucgaaucugcacugggauaacaucgucaaacucaccucauguggucaaaacagcuacucaaggggaggucaaugugacuggugugauaccacugacaacaacaccaacaaaaucucauuuugcaaaucucaaaggaacaaagaccagagggaaacuaugcccaaccugucucaacugcacagaucuggauguggccuuaggcagaccaaugugugugggggucacaccuucagcaaaagcuucaauacuccacgaagucagaccuguuacauccggaugcuuuccuauaaugcacgacagaacaaaaaucagacagcuacccaaucuucucagaggauaugaaaaaaucagauuaucaacccaaaacguuaucaacgcagaaaaggcaccaggaggacccuacagacuuggaaccucaggaucuugcccuaacgcuaccaguagaagcggauuuuucgcaacaauggcuugggcuguuccaagggacaacaacaaaacagcaacgaauccacuaacaauagaaguaccacacaucuguacaaaagaagaagaccaaauuacuauuuggggguuccauucugaugacaaaacccaaaugaaaaaccucuauggagacucaaauccucaaaaguucaccucaucugcuaauggaguaaccacacauuauguuucucagauuggcggcuucccggaucaaacagaagacggagggcuaccacaaagcggcagaauuguuguugauuacauggugcaaaaaccugggaaaacaggaacaauugucuaucaaagagguauuuuguugccucaaaagguguggugcgcgaguggcaggagcaaaguaauaaaaggguccuugccuuuaauuggugaagcagauugccuucacgaaaaauaugguggauuaaacaaaagcaagccuuacuacacaggagaacaugcaaaagccauaggaaauugcccaauaugggugaaaacaccuuugaagcuugccaauggaaccaaauauagaccuccugcaaaacuauuaaaggaaagggguuucuucggagcuauugcugguuucuuagaagggggaugggaaggaaugauugcagguuggcacggauacacaucucacggagcacauggaguggcaguggcagcagaccuuaagaguacgcaagaagccauaaacaagauaacaaaaaaucucaauucuuugagugagcuagaaguaaagaaucuucaaagacuaaguggugccauggaugaacuccacaacgaaauacucgagcuggaugagaaaguggaugaucucagagcugacacaauaagcucacaaauagaacuugcagucuugcuuuccaacgaaggaauaauaaacagugaagaugagcaucuauuggcacuugagagaaaacuaaagaaaaugcugggucccucugcuguagacauagggaauggaugcuucgaaaccaaacacaagugcaaccagaccugcuuagacaggauagcugcuggcaccuuugaugcaggagaauuuucucuucccacuuuugauucacugaauauuacugcugcaucuuuaaaugaugauggauuggauaaccauacuauacugcucuacuacucaacugcugcuucuaguuuagcuguaacauugaugauagcuauuuuuauuguuuauaugaucuccagagacaauguuucuugcuccaucugucuauaa

SEQ ID NO: 58461 - RNA, 1755 nt, Artificial Sequence
  derived and/or modified CDS sequence (wt) from hemagglutinin__InfluenzaB__ABL77013
augaaggcaauaauuguacuacucaugguaguaacauccaaugcagaucgaaucugcacugggauaacaucgucaaacucaccucauguggucaaaacagcuacucaaggggaggucaaugugacuggugugauaccacugacaacaacaccaacaaaaucuuauuuugcaaaucucaaaggaacaaagaccagagggaaacuaugcccaaccugucucaacugcacagaucuggauguggccuugggcagaccaauguguguggggaucacaccuucggcaaaagcuucaauacuccacgaagucagaccuguuacauccggaugcuuuccuauaaugcacgacagaacaaaaaucagacagcuacccaaucuucucagaggauaugaaaaaaucagauuaucaacccaaaacguuaucaacgcagaaaaggcaccaggaggacccuacagacuuggaaccucaggaucuugcccuaacgcuaccaguaaaagcggauuuuucgcaacaauggcuugggcugucccaagggacaacaacaaaacagcaacgaauccacuaacuguagaaguaccauacaucuguacaaaagaagaagaccaaauuacuguuuggggguuccauucugauaacaaaaaccaaaugaaaaaccucuauggagacucagauccucaaaaguucaccucaucugcuaauggaguaaccacacauuauguuucucagauuggcggcuucccggaucaaacagaagacggagggcuaccacaaagcggcagaauuguuguugauuacauggugcaaaaaccugggaaaacaggaacaauugucuaucaaagagguauuuuguugccucaaaagguguggugcgcgaguggcaggagcaaaguaauaaaaggguccuugccuuuaauuggugaagcagauugccuucacgaaaaauacgguggauuaaacaaaagcaagccuuauuacacaggagaacaugcaaaagccauaggaaauugcccaauaugggugaaaacaccuuugaagcuugccaauggaaccaaauauagaccuccugcaaaacuauuaaaggaaagggguuucuucggagcuauugcugguuucuuagaaggaggaugggaaggaaugauugcagguuggcacggauacacaucucacggagcacauggaguggcaguggcagcagaccuuaagaguacgcaagaagccauaaacaagauaacaaaaaaucucaauucuuugagugagcuagaaguaaagaaucuucaaagacuaaguggugcuauggaugaacuccacaacgaaauacucgaguuggaugagaaaguggaugaucucagagcugacacaauaagcucacaaauagaacuugcagucuugcuuuccaacgaaggaauaauaaacagugaagaugagcaucuauuggcacuugagagaaaacuaaagaaaaugcugggucccucugcuguagacauagggaauggaugcuucgaaaccaaacacaagugcaaccagaccugcuuagacaggauagcugcuggcaccuuuaaugcaggagaauuuucucuucccacuuuugauucacugaauauuacugcugcaucuuuaaaugaugauggauuggauaaccauacuauacugcucuacuacucaacugcugcuucuaguuuggcuguaacauugaugauagcuauuuuuauuguuuauaugaucuccagagacaauguuucuugcuccaucugucuauaa

SEQ ID NO: 58462 - RNA, 1755 nt, Artificial Sequence
  derived and/or modified CDS sequence (wt) from hemagglutinin__InfluenzaB__ABL77024
augaaggcaauaauuguacuacucaugguaguaacauccaaugcagaucgaaucugcacugggauaacaucgucaaacucaccucauguggucaaaacagcuacucaaggggaggucaaugugacuggugcgauaccacugacaacaacaccaacaaaaucucauuuugcaaaucucaaaggaacaaagaccagggggaaacuaugcccaaccugucucaacugcacagaucuggauguggccuugggcagaccaauguguguggggaucacaccuucggcaaaagcuucaauacuccacgaagucagaccuguuacauccggaugcuuuccuauaaugcacgacagaacaaaaaucagacagcuacccaaucuucucagaggauaugaaaaaaucagauuaucaacccaaaacguuaucaacgcagaaaaggcaccaggaggacccuacagacuuggaacuucaggaucuugcccuaacgcuaccaguaaaagcggauuuuucgcaacaauggcuugggcugucccaagggacaacaacaaaacagcaacgaauccacuaacaguagaaguaccacacaucuguacaaaagaagaagaccaaauuacuguuuggggguuccauucugaugacaaaacccaaaugaaaaaccucuauggagacucaaauccucaaaaguucaccucaucugcuaauggaauaaccacacauuauguuucucagauuggcggcuucccggaccaaacagaagacggagggcuaccacaaagcggcagaauuguuguugauuacauggugcaaaaaccugggaaaacaggaacaauugucuaucaaagagggauuuuguugccucaaaagguguggugcgcaaguggcaggagcaaaguaauaaaaggguccuugccuuuaauuggugaagcagauugccuucacgaaaaauacgguggauuaaacaaaagcaagccuuacuacacaggagaacaugcaaaagccauaggaaauugcccaauaugggugaaaacaccuuugaagcuugccaauggaaccaaauauagaccuccugcaaaacuauuaaaggaaagggguuucuucggagcuauugcugguuucuuagaaggaggaugggaaggaaugauugcagguuggcacggauacacaucucacggagcacauggaguggcaguggcagcagaccuuaagaguacgcaagaagccauaaacaagauaacaaaaaaucucaauucuuugagugagcuagaaguaaagaaccuucaaagacuaaguggugccauggaugaacuccauaacgaaauacucgagcuggaugagaaaguggaugaucucagagcugacacaauaagcucacaaauagaacuugcagucuugcuuuccaacgaaggaauaauaaacagugaagaugagcaucuauuggcacuugagagaaaacuaaagaaaaugcugggucccucugcuguagacauagggaauggaugcuucgaaaccaaacacaagugcaaccagaccugcuuagacaggauagcugcuggcaccuuuaaugcaggagaauuuucucuucccacuuuugauucacugaacauuacugcugcaucuuuaaaugaugauggauuggauaaccauacuauacugcucuacuacucaacugcugcuucuaguuuggcuguaacauugaugauagcuauuuuuauuguuuauaugaucuccagagacaauguuucuugcuccaucugucuauaa

SEQ ID NO: 58463 - RNA, 1755 nt, Artificial Sequence
  derived and/or modified CDS sequence (wt) from hemagglutinin__InfluenzaB__ABL77035
augaaggcaauaauuguacuacucaugguaguaacauccaaugcagaucgaaucugcacugggauaacaucaucaaacucaccucauguggucaaaacagcuacucaaggggaggucaaugugacuggugcgauaccacugacaacaacaccaacaaaaucucauuuugcaaaucucaaaggaacaaagaccagagggaaacuaugcccaaccugucucaacugcacagaucuggauguggccuugggcagaccaauguguguggggaucacaccuucggcaaaagcuucaauacuccacgaagucagaccuguuacaucuggaugcuuuccuauaaugcacgacagaacaaaaaucagacagcuacccaaucuucucagaggauaugaaaaaaucagauuaucaacccaaaacguuaucaacgcagaaaaggcaccaggaggacccuacagacuuggaacuucaggaucuugcccuaacgcuaccaguagaagcggauuuuucgcaacaauggcuugggcugucccaagggacaacaacaaaacagcaacgaauccacuaacaguagaaguaccacacaucuguacaaaagaagaagaccaaauuacuguuuggggguuccauucugaugacaaaacccaaaugaaaaaccucuauggagacucaaauccucaaaaguucaccucaucugcuaauggaguaaccacacauuauguuucucagauuggcggcuucccggaucaaacagaagacggagggcuaccacaaagcggcagaauuguuguugauuacauggugcaaaaaccugggaaaacaggaacaauugucuaucaaagagggauuuuguugccucaaaagguguggugcgcgaguggcaggagcaaaguaauaaaaggguccuugccuuuaauuggugaagcagauugccuucacgaaaaauacgguggauuaaacaaaagcaagccuuacuacacaggagaacaugcaaaagccauaggaaauugcccaauaugggugaaaacaccuuugaagcuugccaauggaaccaaauauagaccuccugcaaaacuauuaaaggaaagggguuucuucggagcuauugcugguuucuuagaaggaggaugggaaggaaugauugcagguuggcacggauacacaucucacggagcacauggaguggcaguggcagcagaccuuaagaguacgcaagaagccauaaacaagauaacaaaaaaucucaauucuuugagugagcuagaaguaaagaaucuucaaagacuaaguggugccauggaugaacuccauaacgaaauacucgaacuggaugagaaaguggaugaucucagagcugacacaauaagcucacagauagaacuugcagucuugcuuuccaacgaaggaauaauaaacagugaagaugagcaucuauuggcacuugagagaaaacuaaagaaaaugcugggucccucugcuguggacauagggaauggaugcuucgaaaccaaacacaagugcaaccagaccugcuuagacaggauagcugcuggcaccuuuaaugcaggagaauuuucucuucccacuuuugauucacugaacauuacugcugcaucuuuaaaugaugauggauuggauaaccauacuauacugcucuacuauucaacugcugcuucuaguuuggcuguaacauugaugauagcuaucuuuauuguuuauaugaucuccagagacaauguuucuugcuccaucugucuauaa

SEQ ID NO: 58464 - RNA, 1755 nt, Artificial Sequence
  derived and/or modified CDS sequence (wt) from hemagglutinin__InfluenzaB__ABL77046
augaaggcaauaauuguacuacucaugguaguaacauccaaugcagaucgaaucugcacugggauaacaucgucaaacucaccucauguggucaaaacagcuacucaaggggaggucaaugugacuggugcgauaccauugacaacaacaccaacaaaaucucauuuugcaaaucucaaaggaacaaagaccagagggaaacuaugcccaaccugucucaacugcacagaucuggauguggccuugggcagaccaauguguguggggaucacaccuucggcaaaagcuucaauacuccacgaagucagaccuguuacauccggaugcuuuccuauaaugcacgacagaacaaaaaucagacagcuacccaaucuucucagaggauaugaaaaaaucagauuaucaacccaaaacguuaucaacgcagaaaaggcaccaggaggacccuacagacuuggaacuucaggaucuugcccuaacgcuaccaguaaaagcggauuuuucgcaacaauggcuugggcugucccaagggacaacaacaaaacagcaacgaauccacuaacaguagaaguaccacacaucuguacaaaagaagaagaccaaauuacuguuuggggguuccauucugaugacaaaacccaaaugaaaaaccucuauggagacucaaauccucaaaaguucaccucaucugcuaauggaauaaccacacauuauguuucucagauuggcggcuucccggaccaaacagaagacggagggcuaccacaaagcggcagaauuguuguugauuacauggugcaaaaaccugggaaaacaggaacaauugucuaucaaagagggaucuuguugccucaaaagguguggugcgcgaguggcaggagcaaaguaauaaaaggguccuugccuuuaauuggugaagcagauugccuucacgaaaaauacgguggauuaaacaaaagcaagccuuacuacacaggagaacaugcaaaagccauaggaaauugcccaauaugggugaaaacaccuuugaagcuugccaauggaaccaaauauagaccuccugcaaaacuauuaaaggaaagggguuucuucggagcuauugcugguuucuuagaaggaggaugggaaggaaugauugcagguuggcacggauacacaucucacggagcacacggaguggcaguggcagcagaccuuaagaguacgcaagaagccauaaacaagauaacaaaaaaucucaauucuuugagugaguuagaaguaaagaaccuucaaagacuaaguggugccauggaugaacuccauaacgaaauacucgagcuggaugagaaaguggaugaucucagagcugacacaauaagcucacaaauagaacuugcagucuugcuuuccaacgaaggaauaauaaacagugaagaugagcaucuauuggcacuugagagaaaacuaaagaagaugcugggucccucugcuauagacauagggaauggaugcuucgaaaccaaacacaagugcaaccagaccugcuuagacaggauagcugcuggcaccuuuaaugcaggagaauuuucucuucccacuuuugauucacugaacauuacugcugcaucuuuaaaugaugauggauuggauaaccauacuauacugcucuacuacucaacugcugcuucuaguuuggcuguaacauugaugauagcuauuuuuauuguuuauaugaucuccagagacaauguuucuugcuccaucugucuauaa

SEQ ID NO: 58465 - RNA, 1755 nt, Artificial Sequence
  derived and/or modified CDS sequence (wt) from hemagglutinin__InfluenzaB__ABL77057
augaaggcaauaauuguacuacucaugguaguaacauccaaagcagaucgaaucugcacugggauaacaucgucaaacucaccucauguggucaaaacagcuacucaaggggaggucaaugugacuggugcgauaccacugacaacaacaccaacaaaaucucauuuugcaaaucucaaaggaacaaagaccagagggaaacuaugcccaaccugucucaacugcacagaucuggauguggccuugggcagaccaauguguguggggaucacaccuucggcaaaagcuucaauacuccacgaagucaaaccuguuacauccggaugcuuuccuauaaugcacgacagaacaaaaaucagacagcuacccaaucuucucagaggauaugaaaaaaucagauuaucaacccaaaacguuaucaacgcagaaaaggcaccaggaggacccuacagacuuggaacuucaggaucuugcccuaacgcuaccaguaaaagcggauuuuucgcaacaauggcuugggcugucccaagggacaacaacaaaacagcaacgaauccacuaacaguagaaguaccacacaucuguacaaaagaagaagaccaaauuacuguuuggggguuccauucugauaacaaaccccaaaugaaaaaccucuauggagacucaaauccucaaaaguucaccucaucugcuaauggaauaaccacacauuauguuucucagauuggcggcuucccggaacaaacagaagacggagggcuaccacaaagcggcagaauuguuguugauuacauggugcaaaaaccugggaaaacaggaacaauugucuaucaaagagggauuuuguugccucaaaagguguggugcgcgaguggcaggagcaaaguaauaaaaggguccuugccuuuaauuggugaagcagauugccuccacgaaaaauacgguggauuaaacaaaagcaagccuuacuacacaggagaacaugcaaaagccauaggaaauugcccaauaugggugaaaacaccuuugaagcuugccaauggaaccaaauauagaccuccugcaaaacuauuaaaggaaagggguuucuucggagcuauugcugguuucuuagaaggaggaugggaaggaaugauugcagguuggcacggauacacaucucacggagcacauggaguggcaguggcagcagaccuuaagaguacgcaagaagccauaaacaagauaacaaaaaaucucaauucuuugagugagcuagaaguaaagaaccuucaaagacuaaguggugccauggaugaacuccauaacgaaauacucgagcuggaugagaaaguggaugaucucagagcugacacaauaagcucacaaauagaacuugcagucuugcuuuccaacgaaggaauaauaaacagugaagaugagcaucuauuggcacuugagagaaaacuaaagaaaaugcugggucccucugcuguagacauagggaauggaugcuucgaaaccaaacacaagugcaaccagaccugcuuagacaggauagcugcuggcaccuuuaaugcaggagaauuuucucuucccacuuuugauucacuaaacauuacugcugcaucuuugaaugaugauggauuggauaaccauacuauacugcucuacuacucaacugcugcuuccaguuuggcuguaacauugaugauagcuauuuuuauuguuuauaugaucuccagagacaauguuucuugcuccaucugucuauaa

SEQ ID NO: 58466 - RNA, 1758 nt, Artificial Sequence
  derived and/or modified CDS sequence (wt) from hemagglutinin__InfluenzaB__ABL77068
augaaggcaauaauuguacuacucaugguaguaacauccaaugcagaucgaaucugcacuggaauaacaucgucaaacucaccccauguggucaaaacugcuacucaaggggaagucaaugugacuggugugauaccacugacaacaacacccaccaaaucucauuuugcaaaucucaaaggaacaaaaaccagagggaaacuaugcccaaaaugucucaacugcacagaucuggacguggccuugggcagaccaaaaugcacggggaacauaccuucggcaaaaguuucaauacuccaugaaguaagaccuguuacaucugggugcuuuccuauaaugcacgacagaacaaaaauuagacagcugcccaaucuucucagaggauacgaacguaucagguuaucaaaccauaacguuaucaaugcagaaaaagcaccaggaggacccuacaaaauuggaaccucagggucuugcccuaacguuaccaauggaaacggauucuucgcaacaauggcuugggcugucccaaaaaacgaaaacaacaaaacagcaacaaauucacuaacaauagaaguaccauacauuuguacagaaggagaagaccaaauuaccguuuggggguuccacucugauaacgaaaaccaaauggcaaaacucuauggagacucaaagccucagaaguucacuucaucugccaacggagugaccacacauuacguuucacagauugguggcuucccaaaucaaacagaagacggaggacuaccacaaagugguagaauuguuguugauuacauggugcaaaaaucuggaaaaacaggaacaauuaccuaucaaagagguauuuuauugccucaaaaaguguggugcgcaaguggcaggagcaagguaauaaaaggauccuugccuuuaauuggagaagcagauugccuccacgaaaaauacgguggauuaaacaaaagcaagccuuacuauacaggggaacaugcaaaagccauaggaaauugcccaauaugggugaaaacacccuugaagcuggccaauggaaccaaauauagaccuccugcaaaacuauuaaaggaaagggguuucuucggagcuauugcugguuucuuagaaggaggaugggaaggaaugauugcagguuggcacggauacacaucccauggagcacauggaguagcaguggcagcagaccuuaagaguacucaagaagccauaaauaagaucacaaaaaaucucaacucuuugagugagcuggaaguaaagaaucuucaaagacuaagcggagccauggaugaacuccacaacgaaauacuagaacuagaugagaaaguggaugaucucagagcugauacaauaagcucgcaaauagaacucgcagucuugcuuuccaaugaaggaauaauaaacagugaagaugagcaucucuuggcgcuugaaagaaaacugaagaaaaugcugggccccucugcuguagagauagggaauggaugcuucgaaaccaaacacaagugcaaccagaccugccucgacagaauagcugcuggcaccuuuaaugcaggagaauuuucucuccccaccuuugauucacuaaauauuacugcugcaucuuuaaaugacgauggauuggauaaucauacuauacugcuuuacuacucaacugcugcuuccaguuuggcuguaacauugaugauagcuaucuuuguuguuuauauggucuccagagacaauguuucuuguuccaucugucuauaa

SEQ ID NO: 58467 - RNA, 1758 nt, Artificial Sequence
  derived and/or modified CDS sequence (wt) from hemagglutinin__InfluenzaB__ABL77090
augaaggcaauaauuguacuacucaugguaguaacauccaaugcagaucgaaucugcacuggaauaacaucgucaaacucaccccauguggucaaaacugcuacucaaggggaagucaaugugacuggugugauaccacugacaacaacacucaccaaaucucauuuugcaaaucucaaaggaacaaaaaccagagggaaacuaugcccaaaaugucucaacugcacagaucuggacguggccuugggcagaccaaaaugcacggggaacauaccuucggcaaaaguuucaauacuccaugaaguaagaccuguuacaucugggugcuuuccuauaaugcacgacagaacaaaaauuagacagcugcccaaucuucucagaggauacgaacguaucagguuaucaaaccauaacguuaucaaugcagaaaaagcaccaggaggacccuacaaaauuggaaccucagggucuugcccuaacguuaccaauggaaacggauucuucgcaacaauggcuugggcugucccaaaaaacgaaaacaacaaaacagcaacaaauucacuaacaauagaaguaccauacauuuguacagaaggagaagaccaaauuaccguuuggggguuccacucugauaacgaaauccaaaugguaaaacucuauggagacucaaagccucagaaguucacuucaucugccaacggagugaccacacauuacguuucacagauugguggcuucccaaaucaaauagaagacggaggacuaccacaaagugguagaauuguuguugauuacauggugcaaaaaucuggaaaaacaggaacaauuaccuaucaaagagguauuuuauugccucaaaaaguguggugcgcaaguggcaggagcaagauaauaaaaggauccuugccuuuaauuggagaagcagauugccuccacgaaaaauacgguggauuaaacaaaagcaagccuuacuauacaggggaacaugcaaaagccauaggaaauugcccaauaugggugaaaacacccuugaagcuggccaauggaaccaaauauagaccuccugcaaaacuauuaaaggaaagggguuucuucggagcuauugcugguuucuuagaaggaggaugggaaggaaugauugcagguuggcacggauacacaucccauggagcacauggaguagcaguggcagcagaccuuaagaguacucaagaagccauaaacaagaucacaaaaaaucucaacucuuugagugagcuggaaguaaagaaucuucaaagacuaagcggagccauggaugaacuccacaacgaaauacuagaacuagaugagaaaguggaugaucucagagcugauacaauaagcucgcaaauagaacucgcagucuugcuuuccaaugaaggaauaauaaacagugaagaugagcaucucuuggcgcuugaaagaaaacugaagaaaaugcugggccccucugcuguagagauagggaauggaugcuucgaaaccaaacacaagugcaaccagaccugccucgacagaauagcugcuggcaccuuuaaugcaggagaauuuucucuccccaccuuugauucacuaaauauuacugcugcaucuuuaaaugacgauggauuggauaaucauacuauacugcuuuacuacucaacugcugcuuccaguuuggcuguaacauugaugauagcuaucuuuguuguuuauauggucuccagagacaauguuucuuguuccaucugucuauaa

SEQ ID NO: 58468 - RNA, 1755 nt, Artificial Sequence
  derived and/or modified CDS sequence (wt) from hemagglutinin__InfluenzaB__ABL77101
augaaggcaauaauuguacuacucaugguaguaacauccaaagcagaucgaaucugcacugggauaacaucgucaaacucaccucauguggucaaaacagcuacucaaggggaggucaaugugacuggugcgauaccacugacaacaacaccaacaaaaucucauuuugcaaaucucaaaggaacaaagaccagagggaaacuaugcccaaccugucucaacugcacagaucuggauguggccuugggcagaccaauguguguggggaucacaccuucggcaaaagcuucaauacuccacgaagucaaaccuguuacauccggaugcuuuccuauaaugcacgacagaacaaaaaucagacagcuacccaaucuucucagaggauaugaaaaaaucagauuaucaacccaaaacguuaucaacgcagaaaaggcaccaggaggacccuacagacuuggaacuucaggaucuugcccuaacgcuaccaguaaaagcggauuuuucgcaacaauggcuugggcugucccaagggacaacaacaaaacagcaacgaauccacuaacaguagaaguaccacacaucuguacaaaagaagaagaccaaauuacuguuuggggguuccauucugaugacaaaacccaaaugaaaaaccucuauggagacucaaauccucaaaaguucaccucaucugcuaauggaauaaccacacauuauguuucucagauuggcggcuucccggaacaaacagaagacggagggcuaccacaaagcggcagaauuguuguugauuacauggugcaaaaaccugggaaaacaggaacaauugucuaucaaagagggaucuuguugccucaaaagguguggugcgcgaguggcaggagcaaaguaauaaaaggguccuugccuuuaauuggugaagcagauugccuccacgaaaaauacgguggauuaaacaaaagcaagccuuacuacacaggagaacaugcaaaagccauaggaaauugcccaauaugggugaaaacaccuuugaagcuugccaauggaaccaaauauagaccuccugcaaaacuauuaaaggaaagggguuucuucggagcuauugcugguuucuuagaaggaggaugggaaggaaugauugcagguuggcacggauacacaucucacggagcacauggaguggcaguggcagcagaccuuaagaguacgcaagaagccauaaacaagauaacaaaaaaucucaauucuuugagugagcuagaaguaaagaaccuucaaagacuaaguggugccauggaugaacuccauaacgaaauacucgagcuggaugagaaaguggaugaucucagagcugacacaauaagcucacaaauagaacuugcagucuugcuuuccaacgaaggaauaauaaacagugaagaugagcaucuauuggcacuugagagaaaacuaaagaaaaugcugggucccucugcuguagacauagggaauggaugcuucgaaaccaaacacaagugcaaccagaccugcuuagacaggauagcugcuggcaccuuuaaugcaggagaauuuucucuucccacuuuugauucacuaaacauuacugcugcaucuuugaaugaugauggauuggauaaccauacuauacugcucuacuacucaacugcugcuuccaguuuggcuguaacauugaugauagcuauuuuuauuguuuauaugaucuccagagacaauguuucuugcuccaucugucuauaa

SEQ ID NO: 58469 - RNA, 1758 nt, Artificial Sequence
  derived and/or modified CDS sequence (wt) from hemagglutinin__InfluenzaB__ABL77134
augaaggcaauaauuguacuacucaugguaguaacauccaaugcagaucgaaucugcacuggaauaacaucgucaaacucaccccauguggucaaaacugcuacucaaggggaagucaaugugacuggugugauaccacugacaacaacacccaccaaaucucauuuugcaaaucucaaaggaacaaaaaccagagggaaacuaugcccaaaaugucucaacugcacagaucuggacguggccuugggcagaccaaaaugcacggggaacauaccuucggcaaaaguuucaauacuccaugaaguaagaccuguuacaucugggugcuuuccuauaaugcacgacagaacaaaaauuagacagcugccuaaucuucucagaggauacgaacguaucagguuaucaaaccauaacguuaucaaugcagaaaaagcaccaggaggacccuacaaaauuggaaccucagggucuugcccuaacguuaccaauggaaacggauucuucgcaacaauggcuugggcugucccaaaaaacgaaaacaacaaaacagcaacaaauucauuaacaauagaaguaccauacauuuguacagaaggagaagaccaaauuaccguuuggggguuucacucugauaacgaagcccaaauggcaaaacucuauggagacucaaagccucagaaguucacuucaucugccaacggagugaccacacauuacguuucacagauugguggcuucccaaaucaaacagaagacggaggacuaccacaaagugguagaauuguuguugauuacauggugcaaaaaucuggaaaaacaggaacaauuaccuaucaaagagguauuuuauugccucaaaaaguguggugcgcaaguggcaggagcaagguaauaaaaggauccuugccuuuaauuggagaagcagauugccuccacgaaaaauacgguggauuaaacaaaagcaagccuuacuauacaggggaacaugcaaaagccauaggaaauugcccaauaugggugaaaacacccuugaagcuggccaauggaaccaaauauagaccuccugcaaaacuauuaaaggaaagggguuucuucggagcuauugcugguuucuuagaaggaggaugggaaggaaugauugcagguuggcacggauacacaucccauggagcacauggaguagcaguggcagcagaccuuaagaguacucaagaagccauaaacaagaucacaaaaaaucucaacucuuugagugagcuggaaguaaagaaucuucaaagacuaagcggagccauggaugaacuccacaacgaaauacuagaacuagaugagaaaguggaugaucucagagcugauacaauaagcucgcaaauagaacucgcagucuugcuuucuaaugaaggaauaauaaacagugaagaugagcaucucuuggcgcuugaaagaaaacugaagaaaaugcugggccccucugcuguagagauagggaauggaugcuucgaaaccaaacacaagugcaaccagaccugccucgacagaauagcugcuggcaccuuuaaugcaggagaauuuucucuccccaccuuugauucacuaaauauuacugcugcaucuuuaaaugacgauggauuggauaaucauacuauacugcuuuacuacgcaacugcugcuuccaguuuggcuguaacauugaugauagcuaucuuuguuguuuauauggucuccagagacaauguuucuuguuccaucugucuauaa

SEQ ID NO: 58470 - RNA, 1758 nt, Artificial Sequence
  derived and/or modified CDS sequence (wt) from hemagglutinin__InfluenzaB__ABL77145
augaaggcaauaauuguacuacucaugguaguaacauccaaugcagaucgaaucugcacuggaauaacaucgucaaacucaccccauguggucaaaacugcuacucaaggggaagucaaugugacuggugugauaccacugacaacaacacccaccaaaucucauuuugcaaaucucaaaggaacaaaaaccagagggaaacuaugcccaaaaugucucaacugcacagaucuggacguggccuugggcagaccaaaaugcacggggaacauaccuucggcaaaaguuucaauacuccaugaaguaagaccuguuacaucugggugcuuuccuauaaugcacgacagaacaaaaauuagacagcugcccaaucuucucagaggauacgaacguaucagguuaucaaaccauaacguuaucaaugcagaagaagcaccaggaggacccuacaaaauuggaaccucagggucuugcccuaacguuaccaauggaaacggauucuucgcaacaauggcuugggcugucccaaaaaacgaaaacaacaaaacagcaacaaauucauuaacaauagaaguaccauacauuuguacagaaggagaagaccaaauuaccguuuggggguuccacucugauagcgaaacccaaauggcaaaacucuauggagacucaaagccucagaaauucacuucaucugccaacggagugaccacacauuacguuucacagauugguggcuucccaaaucaaacagaagacggaggacuaccacaaagugguagaauuguuguugauuacauggugcaaaaaucuggaaaaacaggaacaauuaccuaucaaagagguauuuuauugccucaaaaaguguggugcgcaaguggcaggagcaagguaauaaaaggauccuugccuuuaauuggagaagcagauugccuccacgaaaaauacgguggauuaaacaaaagcaagccuuacuauacaggggaacaugcaaaagccauaggaaauugcccaauaugggugaaaacacccuugaagcuggccaauggaaccaaauauagaccuccugcaaaacuauuaaaggaaagggguuucuucggagcuauugcugguuucuuagaaggaggaugggaaggaaugauugcagguuggcacggauacacaucccauggagcacauggaguagcaguggcagcagaccuuaagaguacucaagaagccauaaacaagaucacaaaaaaucucaacucuuugagugagcuggaaguaaagaaucuucaaagacuaagcggagccauggaugaacuccacaacgaaauacuagaacuagaugagaaaguggaugaucucagagcugauacaauaagcucgcaaauagaacucgcagucuugcuuuccaaugaaggaauaauaaacagugaagaugagcaucucuuggcgcuugaaagaaaacugaagaaaaugcugggccccucugcuguagagauagggaauggaugcuucgaaaccaaacauaagugcaaccagaccugccucgacagaauagcugcuggcaccuuuaaugcaggagaauuuucucuccccaccuuugauucacuaaauauuacugcugcaucuuuaaaugacgauggauuggauaaucauacuauacugcuuuacuacucaacugcugcuuccaguuuggcuguaacauugaugauagcuaucuuuguuguuuauauggucuccagagacaauguuucuuguuccaucugucuauaa

SEQ ID NO: 58471 - RNA, 1755 nt, Artificial Sequence
  derived and/or modified CDS sequence (wt) from hemagglutinin__InfluenzaB__ABL77156
augaaggcaauaauuguacuacucaugguaguaacauccaaugcagaucgaaucugcacugggauaacaucuucaaacucaccucauguggucaaaacagcuacucaaggggaggucaaugugacuggugugauaccacugacaacaacaccaacaaaaucuuauuuugcaaaucucaaaggaacaaggaccagagggaaacuaugcccagacugucucaacuguacagaucuggauguggccuugggcagaccaauguguguggggaccacaccuucggcaaaagcuucaauacuccacgaagucagaccuguuacauccgggugcuuuccuauaaugcacgacagaacaaaaaucagacaacuacccaaucuucucagaggauaugaaaauaucagguuaucaacccaaaacguuaucgaugcagaaaaggcaccaggaggacccuacagacuuggaaccucaggaucuugcccuaacgcuaccaguaaaagcggauuuuucgcaacaauggcuugggcugucccaaaggacaacaacaaaaaugcaacgaacccacuaacaguagaaguaccauacguuuguacagaaggggaagaccaaauuacuguuuggggguuccauucagaugacaaaacccaaaugaagaaccucuauggagacucaaauccucaaaaguucaccucaucugcuaauggaguaaccacacauuauguuucucagauuggcggcuucccagaucaaacagaagacggaggacuaccacaaagcggcagaauuguuguugauuacauggugcaaaaaccugggaaaacaggaacaauugucuaucaaagagguguuuuguugccucaaaagguguggugcgcgaguggcaggagcaaaguaauaaaaggguccuugccuuuaauuggugaagcagauugccuucaugaaaaauacgguggauuaaacaaaagcaagccuuacuacacaggagaacaugcaaaagccauaggaaauugcccaauaugggugaaaacaccuuugaagcuugccaauggaaccaaauauaggccuccugcaaaacuauuaaaggaaagggguuucuucggagcuauugcugguuuccuagaaggaggaugggaaggaaugauugcagguuggcacggauacacaucucacggagcacauggaguggcaguggcggcagaccuuaagaguacgcaagaagcuauaaacaagauaacaaaaaaucucaauucuuugagugagcuagaaguaaagaaucuucaaagacuaaguggugccauggaugaacuccacaacgaaauacucgagcuggaugagaaaguggaugaucucagagcugacacuauaagcucgcaaauagaacuugcagucuugcuuuccaacgaaggaauaauaaacagugaagaugaacaucuauuggcacuugagagaaaacuaaagaaaaugcugggucccucugcuguagacauaggaaauggaugcuucgaaaccaaacacaagugcaaccagaccugcuuagacaggauagcugcuggcaccuuuaaugcaggagaauuuucucuccccacuuuugauucacugaacaucacugcugcaucuuuaaaugaugauggauuggauaaccauacuauacugcucuauuacucaacugcugcuucuaguuuggcuguaacauugaugcuagcuauuuuuauuguuuauauggucuccagagacaacguuucaugcuccaucugucuauaa

SEQ ID NO: 58472 - RNA, 1758 nt, Artificial Sequence
  derived and/or modified CDS sequence (wt) from hemagglutinin__InfluenzaB__ABL77178
augaaggcaauaauuguacuacucaugguaguaacauccaaugcagaucgaaucugcacuggaauaacaucgucaaacucaccccauguggucaaaacugcuacucaaggggaagucaaugugacuggugugauaccacugacaacaacacccaccaaaucucauuuugcaaaucucaaaggaacaaaaaccagagggaaacuaugcccaaaaugucucaacugcacagaucuggacguggccuugggcagaccaaaaugcacggggaacauaccuucggcaaaaguuucaauacuccaugaaguaagaccuguuacaucugggugcuuuccuauaaugcacgacagaacaaaaauuagacagcugcccaaucuucucagaggauacgaacguaucagguuaucaaaccauaacguuaucaaugcagaaaaagcaccaggaggacccuacaaaauuggaaccucagggucuugcccuaacguuaccaauggaaacggauucuucgcaacaauggcuugggcugucccaaaaaacgaaaacaacaaaacagcaacaaauucauuaacaauagaaguaccauacauuuguacagaaggagaagaccaaauuaccguuuggggguuccacucugauagcgaaacccaaauggcaaaacucuauggagacucaaagccucagaaguucacuucaucugccaacggagugaccacacauuacguuucacagauugguggcuucccaaaucaaacagaagacggaggacuaccacaaagugguagaauuguuguugauuacauggugcaaaaaucuggaaaaacaggaacaauuaccuaucaaagagguauuuuauugccucaaaaaguguggugcgcaaguggcaggagcaagguaauaaaaggauccuugccuuuaauuggagaagcagauugccuccacgaaaaauacgguggauuaaacaaaagcaagccuuacuauacaggggaacaugcaaaagccauaggaaauugcccaauaugggugaaaacacccuugaagcuggccaauggaaccaaauauagaccuccugcaaaacuauuaaaggaaagggguuucuucggagcuauugcugguuucuuagaaggaggaugggaaggaaugauugcagguuggcacggauacacaucccauggagcacauggaguagcaguggcagcagaccuuaagaguacucaagaagccauaaacaagaucacaaaaaaucucaacucuuugagugagcuggaaguaaagaaucuucaaagacuaagcggagccauggaugaacuccacaacgaaauacuagaacuagaugagaaaguggaugaucucagagcugauacaauaagcucgcaaauagaacucgcagucuugcuuuccaaugaaggaauaauaaacagugaagaugagcaucucuuggcgcuugaaagaaaacugaagaaaaugcugggccccucugcuguagagauagggaauggaugcuucgaaaccaaacacaagugcaaccagaccugccucgauagaauagcugcuggcaccuuuaaugcaggagaauuuucucuccccaccuuugauucacuaaauauuacugcugcaucuuuaaaugacgauggauuggauaaucauacuauacugcuuuacuacucaacugcugcuuccaguuuggcuguaacauugaugauagcuaucuuuguuguuuauauggucuccagagacaauguuucuuguuccaucugucuauaa

SEQ ID NO: 58473 - RNA, 1755 nt, Artificial Sequence
  derived and/or modified CDS sequence (wt) from hemagglutinin__InfluenzaB__ABL77189
augaaggcaauaauuguacuacucaugguaguaacauccaaugcagaucgaaucugcacugggauaacaucuucaaacucaccucauguggucaaaacagcuacucaaggggaagucaaugugacuggugugauaccacugacaacaacaccaacaaaaucuuauuuugcaaaucucaaaggaacaaggaccagagggaaacuaugcccagacugucucaacuguacagaucuggauguggccuugggcauaccaauguguguggggaccacaccuucggcaaaagcuucaauacuccacgaagucagaccuguuacauccgggugcuuuccuauaaugcacgacagaacaaaaaucagacaacuacccaaucuucucagaggauaugaaaauaucagguuaucaacccaaaacguuaucgaugcagaaaaggcaccaggaggacccuacagacuuggaaccucaggaucuugcccuaacgcuaccaguaaaagcggauuuuucgcaacaauggcuugggcugucccaaaggacaacaacaaaaaugcaacgaacccacuaacaguagaaguaccauacguuuguacagaaggggaagaccaaauuacuguuuggggguuccauucagauaacaaaauccaaaugaagaaccucuauggagacucaaauccucaaaaguucaccucaucugcuaauggaguaaccacacauuauguuucucagauuggcggcuucccagaucaaacagaagacggaggacuaccacaaagcggcagaauuguuguugauuacauggugcaaaaaccugggaaaacaggaacaauugucuaucaaagagguguuuuguugccucaaaagguguggugcgcgaguggcaggagcaaaguaauaaaaggguccuugccuuuaauuggugaagcagauugccuucaugaaaaauacgguggauuaaacaaaagcaagccuuacuacacaggagaacaugcaaaagccauaggaaauugcccaauaugggugaaaacaccuuugaagcuugccaauggaaccaaauauagaccuccugcaaaacuauuaaaggaaagggguuucuucggagcuauugcugguuuccuagaaggaggaugggaaggaaugauugcagguuggcacggauacacaucucacggagcacauggaguggcaguggcggcagaccuuaagaguacgcaagaagcuauaaacaagauaacaaaaaaucucaauucuuugagugagcuagaaguaaagaaucuucaaagacuaaguggugccauggaugaacuccacaacgaaauacucgagcuggaugagaaaguggaugaucucagagcugacacuauaagcucgcaaauagaacuugcagucuugcuuuccaacgaagggauaauaaacagugaagaugagcaucuauuggcacuugagagaaaacuaaagaaaaugcugggucccucugcuguagacauaggaaauggaugcuucgaaaccaaacacaagugcaaccagaccugcuuagacaggauagcugcuggcaccuuuaaugcaggagaauuuucucuccccacuuuugauucacugaacauuacugcugcaucuuuaaaugaugauggauuggauaaccauacuauacugcucuauuacucaacugcugcuucuaguuuggcuguaacauugaugcuagcuauuuuuauuguuuauauggucuccagagacaacguuucaugcuccaucugucuauaa

SEQ ID NO: 58474 - RNA, 1758 nt, Artificial Sequence
  derived and/or modified CDS sequence (wt) from hemagglutinin__InfluenzaB__ABL77200
augaaggcaauaauuguacuacucaugguaguaacauccaaugcagaucgaaucugcacugggauaacaucgucaaacucaccccauguggucaaaacugcuacucaaggggaggucaaugugacuggugugauaccacugacaacaacacccaccaaaucucauuuugcaaaucucaaaggaacaaaaaccagagggaaacuaugcccaaaaugccucaacugcacagaucuggacguggccuugggcagaccaaaaugcauggggaacauacccucggcaaaaguuucaauacuccaugaagucagaccuguuacaucugggugcuuuccuauaaugcacgacagaacaaaaauuagacagcugcccaaccuucucagaggauacgaacauaucagguuaucaacucauaacguuaucaaugcagaaaaggcaccaggaggacccuacaaaauuggaaccucagggucuugcccuaacguuaccaauggaaacggauuuuucgcaacaauggcuugggccgucccaaaaaacgacaacaacaaaacagcaacaaauucauuaacaauagaaguaccauacauuuguacagaaggagaagaccaaauuaccguuuggggguuccacucugauaacgaaacccaaauggcaaaacucuauggggacucaaagccccagaaauucaccucaucugccaacggagugaccacacauuacguuucacagauugguggcuucccaaaucaaacagaagacggaggacuaccacaaagugguagaauuguuguugauuacauggugcaaaaaucugggaaagcaggaacaauuaccuaucaaagagguauuuuauugccucaaaagguguggugcgcaaguggcaggagcaagguaauaaaaggauccuugccuuuaauuggagaagcagauugccuccacgaaaaauacgguggauuaaacaaaagcaagccuuacuacacaggggaacaugcaaaggccauaggaaauugcccaauaugggugaaaacacccuugaagcuggccaauggaaccaaauauagaccuccugcaaaacuauuaaaggaaagggguuucuucggagcuauugcugguuucuuagaaggaggaugggaaggaaugauugcagguuggcacggauacacaucccauggggcacauggaguagcaguggcagcagaccuuaagagcacucaagaagccauaaacaagauaacaaaaaaucucaacucuuugagugagcuggaaguaaagaaucuucaaagacuaagcggugccauggaugaacuccacaacgaaauacuagaacuagacgggaaaguggaugaucucagagcugauacaauaagcucacaaauagaacucgcaguccugcuuuccaaugaaggaauaauaaacagugaagaugagcaucucuuggcgcuugaaagaaagcugaagaaaaugcugggccccucugcuguagagauagggaauggaugcuucgaaaccaaacacaagugcaaccaaaccugucucgacagaauagcugcugguaccuuugaugcaggagaauuuucucuccccacuuuugauucacugaauauuacugcugcaucuuuaaaugacgauggauuggauaaucauacuauacugcuuuacuacucaacugcugccuccaguuuggcuguaacauugaugauagcuaucuuuguuguuuauauggucuccagagacaauguuucuugcuccaucugucuauaa

SEQ ID NO: 58475 - RNA, 1755 nt, Artificial Sequence
  derived and/or modified CDS sequence (wt) from hemagglutinin__InfluenzaB__ABL77222
augaaggcaauaauuguacuacucaugguaguaacauccaaugcagaucgaaucugcacugggauaacaucuucaaacucaccucauguggucaaaacagcuacucaaggggaggucaaugugacuggugugauaccacugacaacaacaccaacaaaaucuuauuuugcaaaucucaaaggaacaaggaccagagggaaacuaugcccagacugucucaacuguacagaucuggauguggccuugggcaggccaauguguguggggaccacaccuucugcgaaagcuucaauacuccacgaagucagaccuguuacauccgggugcuuuccuauaaugcacgacagaacaaaaaucaggcaacuagccaaucuucucagaggauaugaaaauaucagguuaucaacccaaaacguuaucgaugcagaaaaggcaccaggaggacccuacagacuuggaaccucaggaucuugcccuaacgcuaccaguaaaagcggauuuuucgcaacaauggcuugggcugucccaaaggacaacaacaaaaaugcaacgaacccacuaacaguagaaguaccauacauuuguacagaaggggaagaccaaauuacuguuuggggguuccauucagauagcaaaacccaaaugaagaaccucuauggagacucaaauccucaaaaguucaccucaucugcuaauggaguaaccacacauuauguuucucagauuggcggcuucccagaucaaacagaagacggaggacuaccacaaagcggcagaauuguuguugauuacaugaugcaaaaaccugggaaaacaggaacaauugucuaucaaagagguguuuuguugccucaaaagguguggugcgcgaguggcaggagcaaaguaauaaaaggguccuugccuuuaauuggugaagcagauugccuucaugaaaaauacgguggauuaaacaaaagcaagccuuacuacacaggagaacaugcaaaagccauaggaaauugcccaauaugggugaaaacaccuuugaagcuugccaauggaaccaaauauagaccuccugcaaaacuauuaaaggaaagggguuucuucggagcuauugcugguuuccuagaaggaggaugggaaggaaugauugcagguuggcacggauacacaucucacggagcacauggaguggcaguggcggcagaccuuaagaguacacaagaagcuauaaacaagauaacaaaaaaucucaauucuuugagugagcuagaaguaaagaaucuucaaagacuaaguggugccauggaugaacuccacaacgaaauacucgagcuggaugagaaaguggaugaucucagagcugacacuauaagcucacaaauagaacuugcagucuugcuuuccaacgaaggaauaauaaacagugaagacgagcaucuauuggcacuugagagaaaacuaaagaaaaugcugggucccucugcuguagacauaggaaauggaugcuucgaaaccaaacacaaaugcaaccagaccugcuuagacaggauagcugcuggcaccuuuaaugcaggagaauuuucucuccccacuuuugauucauugaacauuacugcugcaucuuuaaaugaugauggauuggauaaccauacuauacugcucuauuacucaacugcugcuucuaguuuggcuguaacauugaugcuagcuauuuuuauuguuuauauggucuccagagacaacguuucaugcuccaucugucuauaa

SEQ ID NO: 58476 - RNA, 1758 nt, Artificial Sequence
  derived and/or modified CDS sequence (wt) from hemagglutinin__InfluenzaB__ABL77233
augaaggcaauaauuguacuacucaugguaguaacauccaaugcagaucgaaucugcacugggauaacaucgucaaacucaccccauguggucaaaacugcuacucaaggggaggucaaugugacuggugugauaccacugacaacaacacccaccaaaucucauuuugcaaaucucaaaggaacaaaaaccagagggaaacuaugcccaaaaugccucaacugcacagaucuggacguggccuugggcagaccaaaaugcacggggaacauacccucggcagaaguuucaauacuccaugaagucagaccuguuaccucugggugcuuuccuauaaugcacgacagaacaaaaauuagacagcugcccaaccuucucagaggauacgaacauaucagauuaucaacucauaacguuaucaaugcagaaaaggcaccaggaggacccuacaaaauuggaaccucagggucuugcccuaauguuaccaauggaaacggauuuuucgcaacaauggcuugggccgucccaaaaaacgacaacaacaaaacagcaacaaauucauuaacaauagaaguaccauacauuuguacagaaggagaagaccaaauuaccauuuggggguuccacucugauaacgaagcccaaauggcaaaacucuauggggacucaaagccccagaaguucaccucaucugccaacggagugaccacacauuacguuucacagauugguggcuucccaaaucaaacagaagacggaggacuaccacaaagugguagaauuguuguugauuacauggugcaaaaaucuaggaaaacaggaacaauuaccuaucaaagagguauuuuauugccucaaaaaguguggugcgcaaguggcaggagcaagguaauaaaaggauccuugcccuuaauuggagaagcagauugccuccacgaaaaauacgguggauuaaacaaaagcaagccuuacuacacaggggaacaugcaaaggccauaggaaauugcccaauaugggugaaaacacccuugaagcuggccaauggaaccaaauauagaccuccugcaaaacuauuaaaggaaagggguuucuucggagcuauugcugguuucuuagaaggaggaugggaaggaaugauugcagguuggcacggauacacaucccauggggcacauggaguagcaguggcagcagaccuuaagagcacucaagaagccauaaacaagauaacaaaaaaucucaacucuuugagugagcuggaaguaaagaaucuucaaagacuaagcggugccauggaugaacuccacaacgaaauacuagaacuagacgagaaaguggaugaucucagagcugauacaauaagcucacaaauagaacucgcaguccugcuuuccaaugaaggaauaauaaacagugaagaugagcaucucuuggcgcuugaaagaaagcugaagaaaaugcugggccccucugcuguagagauagggaauggaugcuucgaaaccaaacacaagugcaaccagaccugucuugacagaauagcugcugguaccuuugaugcaggagaauuuucucuccccacuuuugauucacugaauauuacugcugcaucuuuaaaugacgauggauuggauaaucauacuauacugcuuuacuacucaacugcugccuccaguuuggcuguaacauugaugauagcuaucuuuguuguuuauauggucuccagagacaauguuucuugcuccaucugucuauaa

SEQ ID NO: 58477 - RNA, 1758 nt, Artificial Sequence
  derived and/or modified CDS sequence (wt) from hemagglutinin__InfluenzaB__ABL77244
augaaggcaauaauuguacuacucaugguaguaacauccaaugcagaucgaaucugcacugggauaacaucgucaaacucaccccauguggucaaaacugcuacucaaggggaagucaaugugacuggugugauaccacugacaacaacacccaccaaaucucauuuugcaaaucucaaaggaacaaaaaccagagggaaacuaugcccaaagugucucaacugcacagaucuggacguggccuugggcagaccaaagugcacggggaccauaccuucggcaaaagcuucaauacuccacgaagucaaaccuguuacaucugggugcuuuccuauaaugcacgacagaacaaaaauuagacagcuacccaaucuucucagaggauacgaacauaucagguuaucaacccauaacguuaucaacgcagaaacggcaccaggaggacccuacaaaguuggaaccucagggucuugcccuaacguuaccaauggaaacggauucuucgcaacaauggcuugggcugucccaaaaaacgacaacaacaaaacagcaacaaauccauuaacaguagaaguaccauacauuuguacagaaggagaagaccaaauuacuguuuggggguuccacucugauaacgaagcccaaaugguaaaacucuauggagacucaaagccucagaaguucaccucaucugccaacggagugaccacacauuacguuucacagauugguggcuucccaaaucaagcagaagacggagggcuaccacaaagcgguagaauuguuguugauuacauggugcaaaaaucuggaaaaacaggaacaauuaccuaccaaagagguauuuuauugccucaaaaaguguggugcgcaaguggcaggagcaagguaauaaaaggguccuugccuuuaauuggcgaagcagauugccuccacgaaaaauacgguggauuaaacaaaagcaagccuuacuacacaggggaacaugcaaaagccauaggaaauugcccaauaugggugaaaacacccuugaagcuggccaauggaaccaaauauagaccuccugcaaaacuauuaaaggaaaaggguuucuucggagcuauugcugguuucuuagaaggaggaugggaaggaaugauugcagguuggcacggauacacaucccauggagcacauggaguagcaguggcagcagaccuuaagaguacgcaagaagccauaaacaagauaacaaaaaaucucaauucuuugagugagcuggaaguaaagaaucuucaaagacuaagcggugccauggaugaacuccacaacaaaauacucgaacuggaugagaaaguggaugaucucagagcugauacaauaagcucgcaaauagagcucgcagucuugcuuuccaacgaaggaauaauaaacagugaagaugagcaucucuuggcgcuugaaagaaaacugaagaaaaugcugggccccucugcuguagagauagggaauggaugcuucgaaaccaaacacaagugcaaccagaccugccucgacagaauagcugcuggcaccuuuaaugcaggagaauuuucucuccccaccuuugauucacuaaauauuacugcugcaucuuuaaaugaugauggauuggauaaucauacuauacugcuuuacuacucaacugcugcuuccaguuuggcuguaacauugaugauagcuaucuuuauuguuuauauggucuccagagacaauguuucuugcuccaucugucuauaa

SEQ ID NO: 58478 - RNA, 1752 nt, Artificial Sequence
  derived and/or modified CDS sequence (wt) from hemagglutinin__InfluenzaB__ABL77255
augaaggcaauaauuguacuacucaugguaguaacauccaacgcagaucgaaucugcacugggauaacaucuucaaacucaccucauguggucaaaacagcuacucaaggggaaguuaaugugacuggugugauaccacugacaacaacaccaacaaaaucucauuuugcaaaucucaaaggaacaaagaccagagggaaacuaugcccaaacugucucaacugcacagaucuggauguggccuugggcagaccaauguguauggggaccauaccuucggcaaaagcuucaauacuccacgaagucagaccuguuacauccgggugcuuuccuauaaugcacgacagaacaaaaaucagacagcuacccaaucuucucagaggauaugaaaauaucagauuaucaacccauaacguuaucaacgcagaaagggcaccaggaggacccuacagacuuggaaccucaggaucuugcccuaacguuaccaguagaaacggauucuucgcaacaauggcuugggcugucccaagggacaacaaaacagcaacgaauccacuaacaguagaaguaccauacauuugcacaaaaggagaagaccaaauuacuguuuggggguuccauucugaugacaaaacccaaaugaaaaaccucuauggagacucaaauccucaaaaguucaccucaucugccaauggaguaaccacacauuauguuucucagauuggugacuucccaaaucaaacagaagacggagggcuaccacaaagcggcagaauuguuguugauuacauggugcaaaaaccugggaaaacaggaacaauugucuaucaaagagguguuuuguugccucaaaagguguggugcgcaaguggcaggagcaagguaauaaaaggguccuugccuuuaauuggugaagcagauugccuucacgaaaaauacgguggauuaaacaaaagcaagccuuacuacacaggagaacaugcaaaagccauaggaaauugcccaauaugggugaaaacaccuuugaagcuugccaauggaaccaaauauagaccuccugcaaaacuauuaaaggaaagggguuucuucggagcuauugcugguuucuuagagggaggaugggaaggaaugauugcagguuggcacggauacacaucucauggagcacauggaguggcaguggcagcagaccuuaagagcacgcaagaagccauaaacaagauaacaaaaaaucucaauucuuugagugagcuagaaguaaagaaucuucaaagacuaaguggugccauggaugaacuccacaacgaaauacucgagcuggaugagaaaguggaugaucucagagcugacacaauaagcucgcaaauagagcuugcagucuugcuuuccaacgaaggaauaauaaacagugaagaugagcaucuauuggcacuugagagaaaacuaaagaaaaugcugggucccucugcuguagacauagggaauggaugcuucgaaaccaaacacaagugcaaccagaccugcuuagacaggauagcugcuggcaccuuuaaugcaggagaauuuucucuucccacuuuugauucacugaauauuacugcugcaucuuuaaaugaugauggauuggauaaucauacuauacugcucuacuacucaacugcugcuucuaguuuggccguaacauugaugauagcuauuuuuauuguuuauauggucuccagagacaauguuucuugcuccaucugucuauaa

SEQ ID NO: 58479 - RNA, 1752 nt, Artificial Sequence
  derived and/or modified CDS sequence (wt) from hemagglutinin__InfluenzaB__ABL77266
augaaggcaauaauuguacuacucaugguaguaacauccaacgcagaucgaaucugcacugggauaacaucuucaaacucaccucauguggucaaaacagcuacucaaggggaagucaaugugacuggugugauaccacugacaacaacaccaacaaaaucucauuuugcaaaucuaaaaggaacaaagaccagagggaaacuaugcccaaacugucucaacugcacagaucuggauguggccuugggcagaccaauguguguggggaccacaccuucggcaaaagcuucaauacuccacgaagucagaccuguuacauccgggugcuuuccuauaaugcacgacagaacaaaaaucagacagcuacccaaucuucucagaggauaugaaaauaucagauuaucaacccaaaacguuaucaaugcagaaagagcaccaggaggacccuacagacuuggaaccucaggaucuugcccuaacguuaccaguagagacggauucuucgcaacaauggcuugggcugucccaagggacaacaaaacagcaacgaauccacuaacaguagaaguaccauacauuuguacaaaaggagaagaccaaauuacuguuuggggguuccauucugauagcaaaacccaaaugaaaaaccucuauggagacucaaauccucaaaaguucaccucaucugccaauggaguaaccacacauuauguuucucagauugguggcuucccaaaucaaacagaagacggagggcuaccacaaagcggcagaauuguuguugauuacauggugcaaaaaccugggaaaacaggaacaauugucuaucaaagagguguuuuguugccucaaaagguguggugcgcaaguggcaggagcaagguaauaaaaggguccuugccuuuaauuggugaagcagauugccuucacgaaaaauacgguggauuaaacaaaagcaagccuuacuacacaggagaacaugcaaaagccauaggaaauugcccaauaugggugaaaacaccuuugaagcuugccaauggaaccaaauauagaccuccugcaaaacuauuaaaggaaagggguuucuucggagcuauugcugguuucuuagaaggaggaugggaaggaaugauugcagguuggcacggauacacaucucauggagcacauggaguggcaguggcagcagaccuuaagaguacgcaagaagccauaaacaagauaacaaaaaaucucaauucuuugagugagcuagaaguaaagaaucuucaaagacuaaguggugccauggaugaacuccacaacgaaauacucgagcuggaugagaaaguggaugaucucagagcugacacaauaagcucgcaaauagagcuugcagucuugcuuuccaacgaaggaauaauaaacagugaagaugagcaucuauuggcacuugagagaaaacuaaagaaaaugcugggucccucugcuguagacauagggaauggaugcuucgaaaccaaacacaagugcaaccagaccugcuuagacaggauagcugcuggcaccuuuaaugcaggagaauuuucucuucccacuuuugauucacugaauauuacugcugcaucuuuaaaugaugauggauuggauaaucauacuauacugcucuacuacucaacugcugcuucuaguuuggcuguaacauugaugauagcuauuuuuauuguuuauauggucuccagagacaauguuucuugcuccaucugucuauaa

SEQ ID NO: 58480 - RNA, 1752 nt, Artificial Sequence
  derived and/or modified CDS sequence (wt) from hemagglutinin__InfluenzaB__ABL77277
augaaggcaauaauuguacuacucaugguaguaacauccaacgcagaucgaaucugcacugggauaacaucuucaaacucaccucauguggucaaaacagcuacucaaggggaagucaaugugacuggugugauaccacugacaacaacaccaacaaaaucucauuuugcaaaucuaaaaggaacaaagaccagagggaaacuaugcccaaacugucucaacugcacagaucuggauguggccuugggcagaccaauguguguggggaacacaccuucggcaaaagcuucaauacuccacgaagucagaccuguuacauccgggugcuuuccuauaaugcacgacagaacaaaaaucagacagcuacccaaucuucucagaggauaugaaaauaucagauuaucaacccaaaacguuaucaacgcagaaagagcaccaggaggacccuacagacuuggaaccucaggaucuugcccuaacguuaccaauagagacggauucuucgcaacaauggcuugggcugucccaagggacaacaaaacagcaacgaauccacuaacaguagaaguaccauacauuuguacaaaaggagaagaccaaauuacuguuuggggguuccauucugauaacaaaauccaaaugaaaaaccucuauggagacucaaauccucaaaaguucaccucaucugccaauggaguaaccacacauuauguuucucagauugguggcuucccaaaucaaacagaagacggagggcuaccacaaagcggcagaauuguuguugauuacauggugcaaaaaccugggaaaacaggaacaauugucuaucaaagagguguuuuguugccucaaaagguguggugcgcaaguggcaggagcaagguaauaaaaggguccuugccuuuaauuggugaagcagauugccuucacgaaaaauacgguggauuaaacaaaagcaagccuuacuacacaggagaacaugcaaaagccauaggaaauugcccaauaugggugaaaacaccuuugaagcuugcuaauggaaccaaauauagaccuccugcaaaacuauuaaaggaaagagguuucuucggagcuauugcugguuucuuagaaggaggaugggaaggaaugauugcagguuggcacggauacacaucucauggagcacauggaguggcaguggcagcagaccuuaagaguacgcaagaagccauaaacaagauaacaaaaaaucucaauucuuugagugagcuagaaguaaagaaucuucaaagacuaaguggugccauggaugaacuccacaacgaaauacucgagcuggaugagaaaguggacgaucucagagcugacacaauaagcucgcaaauagagcuugcagucuugcuuucuaacgaaggaauaauaaacagugaagaugagcaucuauuggcacuugagagaaaacuaaagaaaaugcugggucccucugcuguagacauagggaauggaugcuucgaaaccaaacacaagugcaaccagacaugcuuagacaggauagcugcuggcaccuuuaaugcaggagaauuuucucuucccacuuuugauucacugaauauuacugcugcaucuuuaaaugaugauggauuggauaaucauacuauacugcucuacuacucaacugcugcuucuaguuuggcuguaacauugaugauagcuauuuuuauuguuuauauggucuccagagacaauguuucuugcuccaucugucuauaa

SEQ ID NO: 58481 - RNA, 1752 nt, Artificial Sequence
  derived and/or modified CDS sequence (wt) from hemagglutinin__InfluenzaB__ABL77288
augaaggcaauaauuguacuacucaugguaguaacauccaacgcagaucgaaucugcacugggauaacaucuucaaacucaccucauguggucaaaacagcuacucaaggggaggucaaugugacuggugugauaccacugacaacaacaccaacaaaaucucauuuugcaaaucucaaaggaacaaagaccagagggaaacuaugcccaaacugucucaacugcacagaucuggauguggccuugggcagaccaauguguguggggaccacaccuucggcaaaagcuucaauacuccacgaagucagaccuguuacauccgggugcuuuccuauaaugcacgacagaacaaaaaucagacagcuacccaaucuccucagaggauaugaacauaucagauuaucaacccaaaacguuaucaacgcagaaaaggcaccaggaggacccuacaaacuuggaaccucaggaucuugcccuaacgcuaccaguagaagcggauucuucgcaacaauggcuugggcugucccaagggacaacaaaacagcaacgaauccacuaacaguagaaguaccauacauuuguacaaaaggagaagaccaaauuacuguuuggggguuccauucugauaccaaaacccaaaugaaaaaccucuauggagacucaaauccucaaaaguucaccucaucugcuaauggaguaaccacacauuauguuucucagauugguggcuucccagaucaaacagaagacggagggcuaccacaaagcggcagaauuguuguugauuacauggugcaaaaaccugggaaaacaggaacaauugucuaucaaagagguguuuuguugccucaaaagguguggugcgcgaguggcaggagcaaaguaauaaaaggguccuugccuuuaauuggugaagcagauugccuucacgaaaaauacgguggauuaaacaaaagcaagccuuacuacacaggagaacaugcaaaagccauaggaaauugcccaauaugggugaaaacaccuuugaagcuugccaauggaaccaaauauagaccuccugcaaaacuauuaaaggaaagggguuucuucggagcuauugcugguuucuuagaaggaggaugggaaggaaugauugcagguuggcacggauacacaucucacggagcacauggaguggcaguggcagcagaccuuaagaguacgcaagaagccauaaacaagauaacaaaaaaucucaauucuuugagugagcuagaaguaaagaaucuucaaagacuaaguggugccauggaugaacuccacaacgaaauacucgagcuggaugagaaaguggaugaucucagagcugacacaauaagcucgcaaauagaacuugcagucuugcuuuccaacgaaggaauaauaaacagugaagaugagcaucuauuggcacuugagagaaaacuaaagaaaaugcugggucccucugcuguagacauagggaauggaugcuucgaaaccaaacacaagugcaaccagaccugcuuagacaggauagcugcuggcaccuuuaaugcaggagaauuuucucuucccacuuuugauucacugaauauuacugcugcaucuuuaaaugaugauggauuggauaaccauacuauacugcucuacuacucaacugcugcuucuaguuuggcuguaacauugaugauagcuauuuuuauuguuuauauggucuccagagacaauguuucuugcuccaucugucuauaa

SEQ ID NO: 58482 - RNA, 1752 nt, Artificial Sequence
  derived and/or modified CDS sequence (wt) from hemagglutinin__InfluenzaB__ABL77299
augaaggcaauaauuguacuacucaugguaguaacauccaacgcagaucgaaucugcacugggauaacaucuucaaacucaccucauguggucaaaacagcuacucaaggggaagucaaugugacuggugugauaccacugacaacaacaccaacaaaaucucauuuugcaaaucucaaaggaacaaagaccagagggaaacuaugcccaaacugucucaacugcacagaucuggauguggccuugggcagaccaauguguauagggaacauaccuucggcaaaagcuucaauacuccacgaagucagaccuguuacauccgggugcuuuccuauaaugcacgacagaacaaaaaucagacagcuacccaaucuucucagaggauaugaacauaucagauuaucaacccauaacguuaucaacgcagaaagggcaccaggaggacccuacagacuuggaaccucaggaucuugcccuaacguuaccaguagaagcggauucuucgcaacaauggcuugggcugucccaagggacaacaaaacagcaacgaacccacuaacaguagaaguaccauacauuuguacaaaaggagaagaccaaauuacuguuuggggguuccauucugauaacgaaacccaaaugaaaaaccucuauggagacucaaauccucaaaaguucaccucaucugccaauggaauaaccacacauuauguuucucagauugguggcuucccaaaucaaacagaagacggagggcuaccacaaagcggcagaauuguuguugauuacauggugcaaaaaccugggaaaacaggaacaauugucuaucaaagagguguuuuguugccucaaaagguguggugugcaaguggcaggagcaagguaauaaaaggguccuugccuuuaauuggugaagcagauugccuucacgaaaaauacgguggauuaaacaaaaguaagccuuacuacacaggagaacaugcaaaagccauaggaaauugcccaauaugggugaaaacaccuuugaagcuugccaauggaaccaaauauagaccucccgcaaaacuauuaaaggaaagggguuucuucggagcuauugcugguuucuuagaaggaggaugggaaggaaugauugcagguuggcacggauacacaucucauggagcacaugggguggcaguggcagcagaccuuaagaguacgcaagaagccauaaacaagauaacaaaaaaucucaauucuuugagugagcuagaaguaaagaaucuucaaagacuaaguggugccauggaugaacuccacaacgaaauacucgagcuggaugagaaaguggaugaucucagagcugacacgauaagcucgcaaauagagcuugcagucuugcuuuccaaugaaggaauaauaaacagugaagaugagcaucuauuggcacuugagagaaaacuaaagaaaaugcugggucccucugcuguagacauagggaauggaugcuucgaaaccaaacacaagugcaaccagaccugcuuagacaggauagcugcuggcaccuuuaaugcaggagaauuuucucuucccacuuuugauucacugaauauuacugcugcaucuuuaaaugaugauggauuggauaaucauacuauacugcucuacuacucaacugcugcuucuaguuuggcuguaacauugaugauagcuauuuuuauuguuuauauggucuccagagacaauguuucuugcuccaucugucuauag

SEQ ID NO: 58483 - RNA, 1752 nt, Artificial Sequence
  derived and/or modified CDS sequence (wt) from hemagglutinin__InfluenzaB__ABL77310
augaaggcaauaauuguacuacucaugguaguaacauccaacgcagaucgaaucugcacugggauaacaucuucaaacucaccucauguggucaaaacagcuacucaaggggaagucaaugugacuggugugauaccacugacaacaacaccaacaaaaucucauuuugcaaaucucaaaggaacaaagaccagagggaaacuaugcccaaacugucucaacuguacagaucuggauguggccuugggcagaccaauguguauagguaccauaccuucagcaaaagcuucaauacuccacgaagucagaccuguuacauccgggugcuuuccuauaaugcacgacagaacaaaaaucagacagcuacccaaucuucucagaggauaugaacauaucagauuaucaacccauaacguuaucaacgcagaaagggcaccaggaggacccuacagacuuggaaccucaggaucuugcccuaacguuaccaguagaagcggauucuucgcaacaauggcuugggcugucccaagggacaacaaaacagcaacgaacccacuaacaguagaaguaccauacauuuguacaaaaggagaagaccaaauuacuguuuggggguuccauucugauaacaaaaaccaaaugaaaaaccucuauggagacucaaauccucaaaaguucaccucaucugccaauggaguaaccacacauuauguuucucagauugguggcuucccaaaucaaacagaagacggagggcuaccacaaagcggcagaauuguuguugauuacauggugcaaaaaccugggaaaacaggaacaauugucuaucaaagagguguuuuguugccucaaaaggugugguguguaaguggcaggagcaagguaauaaaaggguccuugccuuuaauuggugaagcagauugccuucacgaaaaauacgguggauuaaacaaaagcaagccuuacuacacaggagaacaugcaaaagccauaggaaauugcccaauaugggugaaaacaccuuugaagcuugccaauggaaccaaauauagaccucccgcaaaacuauuaaaggaaagggguuucuucggagcuauugcugguuucuuggaaggaggaugggaaggaaugauugcagguuggcacggauacacaucucauggagcacaugggguggcaguggcagcagaccuuaagaguacgcaagaagccauaaacaagauaacaaaaaaucucaauucuuugagugagcuagaaguaaagaaucuucaaagacuaaguggugccauggaugaacuccacaacgaaauacucgagcuggaugagaaaguggaugaucucagagcugacacaauaagcucgcaaauagagcuugcagucuugcuuuccaaugaaggaauaauaaacagugaagaugagcaucuauuagcacuugaaagaaaacuaaagaaaaugcugggucccucugcuguagacauagggaauggaugcuucgaaaccaaacacaagugcaaccagaccugcuuagacaggauagcugcuggcaccuuuaaugcaggagaauuuucucuucccacuuuugauucacugaauauuacugccgcaucuuuaaaugaugauggauuggauaaucauacuauacugcucuacuacucaacugcugcuucuaguuuggcuguaacauugaugauagcuauuuuuauuguuuauauggucuccagagacaauguuucuuguuccaucugucuauag

SEQ ID NO: 58484 - RNA, 1758 nt, Artificial Sequence
  derived and/or modified CDS sequence (wt) from hemagglutinin__InfluenzaB__ABL77321
augaaggcaauaauuguacuacucaugguaguaacauccaaugcagaucgaaucugcacugggauaacaucgucaaacucaccccauguggucaaaacugcuacucaaggggaagucaaugugacuggugugauaccacugacaacaacacccaccaaaucucauuuugcaaaucucaaaggaacaaaaaccagagggaaacuaugcccaaagugucucaacugcacagaucuggacguggccuugggcagaccaaaaugcacggggaccauaccuucggcaaaaguuucaauacuccacgaagucaaaccuguuacaucugggugcuuuccuauaaugcacgacagaacaaaaauuagacagcugcccaaucuucucagaggauacgaacauaucagguuaucaacccauaacguuaucaacgcagaaaaggcaccaggaggacccuacaaaauuggaaccucagggucuugcccuaacauuaccaauggaaacggauucuucgcaacaauggcuugggcugucccaaaaaacgacaacaacaaaacagcaacaaauucauuaacaguagaaguaccauacauuuguacagaaggagaagaccaaauuaccguuuggggguuccacucugauaacgaaacccaaauggcaaaacucuauggagacucaaaaccucagaaguucaccucaucugccaacggagugaccacacauuacguuucacagauugguggcuucccaaaucaagcagaagacggagggcuaccacaaagugguagaauuguuguugauuacauggugcaaaaaucuggaaaaacaggaacaauuaccuaccaaagagguauuuuauugccucaaaaaguguggugcgcaaguggcaggagcaagguaauaaaaggauccuugccuuuaauuggcgaagcagauugccuccacgaaaaauacgguggauuaaacaaaagcaagccuuacuacacaggggaacaugcaaaagccauaggaaauugcccaauaugggugaaaacacccuugaaucuggccaauggaaccaaauauagaccuccugcaaaacuauuaaaagaaagggguuucuucggagcuauugcugguuucuuagaaggaggaugggaaggaaugauugcagguuggcacggauacacaucccauggagcacauggaguagcaguggcagcagaccuuaagaguacacaagaagccauaaacaagauaacaaaaaaucucaacucuuugagugagcuugaaguaaagaaucuucaaagacuaagcggugccauggaugaacuccacaacgaaauacucgaacuggaugagaaaguggaugaucucagagcugacacaauaagcucgcaaauagagcucgcagucuugcuuuccaaugaaggaauaauaaacagcgaagaugagcaucucuuggcacuugaaagaaaacugaagaaaaugcugggccccucugcuguagagauagggaauggaugcuucgaaaccaaacacaagugcaaccagaccugccucgacagaauagcugcuggcaccuuuaaugcaggagaauuuucucuccccaccuuugauucauuaaauauuacugcugcaucuuuaaaugaugauggauuggauaaucauacuauacugcuuuacuacucaacugcugcuuccaguuuggcuguaacauugaugauagcuaucuuuauuguuuauauggucuccagagacaauguuucuugcuccaucugucuauaa

SEQ ID NO: 58485 - RNA, 1755 nt, Artificial Sequence
  derived and/or modified CDS sequence (wt) from hemagglutinin__InfluenzaB__ABL77332
augaaggcaauaauuguacuacucaugguaguaacauccaaugcagaucgaaucugcacugggauaacaucuucaaacucaccucauguggucaaaacagcuacucaaggggaggucaaugugacuggugugauaccacugacaacaacaccaacaaaaucucauuuugcaaaucucaaaggaacaaagaccagagggaaacuaugcccaaacugucucaacugcacagaucuggauguggccuugggcagaccaauguguguggggaccacaccuucggcaaaagcuucaauacuccacgaagucagaccuguuacauccgggugcuuuccuauaaugcacgacagaacaaaaaucagacagcuacccaaucuucucagaggauaugaaaauaucagauuaucaacccaaaacguuaucaacgcagaaaaggcaccaggaggacccuacaaacuuggaaccucaggaucuugcccuaacgcuaccaguagaagcggauuuuucgcaacaauggcuugggcugucccaagggacaacaacaaaacagcaacgaauccacuaacaguagaaguaccauacauuuguacaaaaggagaagaccaaauuacuguuuggggguuccauucugaugacaaaacccaaaugaaaaaccucuauggagacucaaauccucaaaaguucaccucaucugcuaauggaguaaccacacauuauguuucucaaauuggcggcuucccagaucaaacagaagacggagggcuaccacaaagcggcagaauuguuguugauuacauggugcaaaaaccugggaaaacaggaacaauugucuaucaaagagguguuuuguugccucaaaagguguggugcgcgaguggcaggagcaaaguaauaaaaggguccuugccuuuaauuggugaagcagauugccuucacgaaaaauacgguggauuaaacaaaagcaagccuuacuacacaggagaacaugcaaaagccauaggaaauugcccaauaugggugaaaacaccuuugaagcuugccaauggaaccaaauauagaccuccugcaaaacuauuaaaggaaagggguuucuucggagcuauugcugguuucuuagaaggaggaugggaaggaaugauugcagguuggcacggauacacaucucacggagcacauggaguggcaguggcagcagaccuuaagaguacgcaagaagccauaaacaagauaacgaaaaaucucaauucuuugagugagcuagaaguaaagaaucuucaaagacuaaguggugccauggaugaacuccacaacgaaauacucgagcuggaugagaaaguggaugaucucagagcugacacaauaagcucgcaaauagaacuugcagucuugcuuuccaacgaaggaauaauaaacagugaagaugagcaucuauuggcacuugagagaaaacuaaagaaaaugcugggucccucugcuguagacauagggaauggaugcuucgaaaccaaacacaagugcaaccagaccugcuuagacaggauagcugcuggcaccuuuaaugcaggagaauuuucucuucccacuuuugauucacugaauauuacugcugcaucuuuaaaugaugauggauuggauaaccaugcuauacugcucuacuacucaacugcugcuucuaguuuggcuguaacauugaugauagcuauuuuuauuguuuauauggucuccagagacaauguuucuugcuccaucugucuauaa

SEQ ID NO: 58486 - RNA, 1755 nt, Artificial Sequence
  derived and/or modified CDS sequence (wt) from hemagglutinin__InfluenzaB__ABL77343
augaaggcaauaauuguacuacucaugguaguaacauccaaugcagaucgaaucugcacugggauaacaucuucaaacucaccucaugugguuaaaacagcuacucaaggggaggucaaugugacuggugugauaccacugacaacaacaccaacaaaaucucauuuugcaaaucucaaaggaacaaagaccagagggaaacuaugcccaaacugucucaacugcacagaucuggauguggccuugggcagaccaauguguguggggaccacaccuucggcaaaagcuucaauacuccacgaggucagaccuguuacauccgggugcuuuccuauaaugcacgacagaacaaaaaucagacagcugcccaaucuucucagaggauaugaaaauaucagauuaucaacccaaaacguuaucaaugcagaaaaggcaccaggaggacccuacagacuuggaaccucaggaucuugcccuaacgcuaccaguagaagcggauuuuucgcaacaauggcuugggcugucccaagggacaacaacaaaacagcaacgaauccacuaacaguagaaguaccauacauuuguacaaaaggagaagaccaaauuacuguuuggggguuccauucugauaacaaaauccaaaugaaaaaccucuauggagacucaaauccucaaaaguucaccucaucugcuaauggaguaaccacacauuauguuucucagauuggcggcuucccagaucaaacagaagacggagggcuaccacaaagcggcagaauuguuguugacuacauggugcaaaaaccugggaaaacaggaacaauugucuaucaaagagguguuuuguugccucaaaagguguggugcgcgaguggcaggagcaaaguaguaaaaggguccuugccuuuaauuggugaagcagauugccuucacgaaaaauacgguggauuaaacaaaagcaagccuuacuacacaggagaacaugcaaaagccauaggaaauugcccaauaugggugaaaacaccuuugaagcuugccaauggaaccaaauauagaccuccugcaaaacuauuaaaggaaagggguuucuucggagcuauugcugguuucuuagaaggaggaugggaaggaaugauugcagguuggcacggauacacaucucacggagcacauggaguggcaguagcagcagaccuuaagaguacgcaagaagccauaaacaagauaacaaaaaaucucaauucuuugagugagcuagaaguaaagaaucuucaaagacuaaguggugccauggaugaacuccacaacgaaauacucgagcuggaugagaaaguggaugaucucagagcugacacuauaaguucgcaaauagaacuugcagucuugcuuuccaacgaaggaauaauaaacagugaagaugagcaucuauuggcacuugagagaaaacuaaagaaaaugcugggucccucugcuguagacauagggaauggaugcuucgaaaccaaacacaagugcaaccagaccugcuuagacaggauagcugcuggcaccuuuaaugcaggagaauuuucucuccccacuuuugauucacugaauauuacugcugcaucuuuaaaugaugauggauuggacaaccacacuauacugcucuacuacucaacugcugcuucuaguuuggcuguaacauugaugauagcuauuuuuauuguuuauauggucuccagagacaauguuucuugcuccaucugucuauaa

SEQ ID NO: 58487 - RNA, 1755 nt, Artificial Sequence
  derived and/or modified CDS sequence (wt) from hemagglutinin__InfluenzaB__ABL77365
augaaggcaauaauuguacuacucaugguaguaacauccaaugcagaucgaaucugcacugggauaacaucuucaaacucaccucauguggucaaaacagcuacucaaggggaggucaaugugacuggugugauaccacugacaacaacaccaacaaaaucucauuuugcaaaucucaaaggaacaaagaccagagggaaacuaugcccaaacugucucaacugcacagaucuggauguggcuuugggcagaccaauguguguggggaccacaccuucggcaaaagcuucaauacuccacgaagucagaccuguuacauccgggugcuuuccuauaaugcacgacagaacaaaaaucagacagcuacccaaucuucucagaggauaugaaaauaucagauuaucaacccaaaacguuaucaaugcagaaaaggcaccaggaggacccuacagacuuggaaccucaggaucuugcccuaacgcuaccaguagaagcggauuuuucgcaacaauggcuugggcugucccaagggacaacaacaaaacagcaacgaauccacuaacaguagaaguaccauacguuuguacagaaggagaagaccaaauuacuguuuggggguuccauucugauaacaaaacccaaaugaaaaaccucuauggagacucaaauccucaaaaguucaccucaucugcuaauggaguaaccacacauuauguuucucagauuggcggcuucccagaucaagcagaagacggagggcuaccacaaagcggcagaauuguuguugauuacauggugcaaaaaccugggaaaacaggaacaauugucuaucaaagagguguuuuguugccucaaaagguguggugcgcgaguggcaggagcaaaguaauaaaaggguccuugccuuuaauuggugaagcagauugccuucacgaaaaauacgguggauuaaacaaaagcaagccuuacuacacaggagaacaugcaaaagccauaggaaauugcccaauaugggugaaaacaccuuugaagcuugccaauggaaccaaauauagaccuccugcaaaacuauuaaaggaaagggguuucuucggagcuauugcugguuucuuagaaggaggaugggaaggaaugauugcagguuggcacggauacacaucucacggagcacauggaguggcaguggcagcagaccuuaagaguacgcaagaagccauaaacaagauaacaaaaaaucucaauucuuugagugagcuagaaguaaagaaucuucaaagacuaaguggugccauggaugaacuccacaacgaaauacucgagcuggaugagaaaguggaugaucucagagcugacacuauaagcucgcaaauagaacuugcagucuugcuuuccaacgaaggaauaauaaacagugaagaugagcaucuauuggcacuugagagaaaacuaaagaaaaugcugggucccucugcuguagacauagggaauggaugcuucgaaaccaaacacaagugcaaccagaccugcuuagacaggauagcugcuggcaccuuuaaugcaggagaauuuucucuccccacuuuugauucacugaauauuacugcugcaucuuuaaaugaugauggauuggauaaccauacuauacugcuuuacuacucaacugcugcuucuaguuuggcuguaacauugaugauagcuauuuuuauuguuuauauggucuccagagacaauguuucaugcuccaucugucuauaa

SEQ ID NO: 58488 - RNA, 1755 nt, Artificial Sequence
  derived and/or modified CDS sequence (wt) from hemagglutinin__InfluenzaB__ABL84340
augaaggcaauaauuguacuacucaugguaguaacauccaaugcagaucgaaucugcacugggauaacaucgucaaauucaccucauguggucaaaacagcuacucaaggggaagucaaugugacuggugugauaccacugacaacaacaccaacaaaaucucauuuugcaaaucucaaaggaacaaagaccagagggaaacuaugcccaaccugucucaacugcacagaucuggauguggccuugggcagaccaauguguguggggaucacaccuucggcaaaagcuucaauacuccacgaagucagaccuguuacauccggaugcuuuccuauaaugcacgacagaacaaaaaucagacagcuacccaaucuucucagaggauaugaaaaaaucagauuaucaacccaaaacguuaucaacgcagaaaaggcaccaggaggacccuacagacuuggaaccucaggaucuugcccuaacacuaccaguaaaagcggauuuuucgcaacaauggcuugggcugucccaagggacaacaacaaaacagcaacgaauccacuaacaguagaaguaccacacaucuguacaaaagaagaagaccaaauuacuguuuggggguuccauucugauaacaaaacccaaaugaaaaaccucuauggagacucaaauccucaaaaguucaccucaucugcuaauggaguaaccacacauuauguuucucagauuggcggcuucccggaucaaacagaagacggagggcuaccacaaagcggcagaauuguuguugauuacauggugcaaaaaccugggaaaacaggaacaauugucuaucaaagagguauuuuauugccucaaaagguguggugcgcgaguggcaggagcaagguaauaaaaggguccuugcccuuaauuggugaagcagauugccuucacgaaaaauacgguggauuaaacaaaagcaagccuuacuacacaggagagcaugcaaaagccauaggaaauugcccaauauggguaaaaacaccuuugaagcuugccaauggaaccaaauauagaccuccugcaaaacuauuaaaggaaagggguuucuucggagcuauugcuggcuucuuagaaggaggaugggaaggaaugauugcagguuggcacggauacacaucucacggagcacauggaguggcaguggcagcagaccuuaagaguacgcaagaagccauaaacaagauaacaaaaaaucucaauucuuugagugagcuagaaguaaagaaucuucaaagacuaaguggugccauggaugaacuccacaacgaaauacucgagcuggaugaaaaaguggaugaucucagagcugacacaauaagcucacaaauagaacuugcagucuugcuuuccaacgaaggaauaauaaacagugaagaugagcaucuauuggcacuugagagaaaacuaaagaaaaugcugggucccucugcuguagacauagggaauggaugcuucgaaaccaaacacaagugcaaccagaccugcuuagacaggauagcugcuggcaccuuuaaugcaggagaauuuucucuucccacuuuugauucacugaauauuacugcugcaucuuuaaauggugauggauuggauaaccauacuauacugcucuacuacucaacugcugcuucuaguuuggcuguaacauuaaugauagcuauuuuuauuguuuauaugaucuccagagacaauguuucuugcuccaucugucuauaa

SEQ ID NO: 58489 - RNA, 1755 nt, Artificial Sequence; identical to SEQ ID NO: 58410
  derived and/or modified CDS sequence (wt) from hemagglutinin__InfluenzaB__ABN50382

SEQ ID NO: 58490 - RNA, 1755 nt, Artificial Sequence; identical to SEQ ID NO: 58410
  derived and/or modified CDS sequence (wt) from hemagglutinin__InfluenzaB__ABN50393

SEQ ID NO: 58491 - RNA, 1755 nt, Artificial Sequence
  derived and/or modified CDS sequence (wt) from hemagglutinin__InfluenzaB__ABN50404
augaaggcaauaauuguacuacucaugguaguaacauccaaugcagaucgaaucugcacugggauaacaucgucaaacucaccucauguggucaaaacagcuacucaaggggaggucaaugugacuggugugauaccacugacaacaacaccaacaaaaucucauuuugcaaaucucaaaggaacaaagaccagagggaaacuaugcccaaccugucucaacugcacagaucuggauguggccuuaggcagaccaaugugugugggggucacaccuucggcaaaagcuucaauacuccacgaagucagaccuguuacauccggaugcuuuccuauaaugcacgacagaacaaaaaucagacagcuacccaaucuucucagaggauaugaaaaaaucagauuaucaacccaaaacguuaucaacgcagaaaaggcaccaggaggacccuacagacuuggaaccucaggaucuugcccuaacgcuaccaguagaagcggauuuuucgcaacaauggcuugggcugucccaagggacaacaacaaaacagcaacgaauccacuaacaguagaaguaccacacaucuguacaaaagaagaagaccaaauuacuguuuggggguuccauucugauaacaaaacccaaaugaaaaaccucuauggagacucaaauccucaaaaguucaccucaucugcuaauggaguaaccacacauuauguuucucagauuggcggcuucccggaucaaacagaagacggagggcuaccacaaagcggcagaauuguuguugauuacauggugcaaaaaccugggaaaacaggaacaauugucuaucaaagagguauuuuguugccucaaaagguguggugcgcgaguggcaggagcaaaguaauaaaaggguccuugccuuuaauuggugaagcagauugccuucacgaaaaauacgguggauuaaacaaaagcaagccuuacuacacaggagaacaugcaaaagccauaggaaauugcccaauaugggugaaaacaccuuugaagcuugccaauggaaccaaauauagaccuccugcaaaacuauuaaaggaaagggguuucuucggagcuauugcugguuucuuagaaggaggaugggaaggaaugauugcagguuggcacggauacacaucucacggagcacauggaguggcaguggcagcagaccuuaagaguacgcaagaagccauaaacaagauaacaaaaaaucucaauucuuugagugagcuagaaguaaagaaucuucaaagacuaaguggugccauggaugaacuccacaacgaaauacucgagcuggaugagaaaguggaugaucucagagcugacacaauaagcucacaaauagaacuugcagucuugcuuuccaacgaaggaauaauaaacagugaagaugagcaucuauuggcacuugagagaaaacuaaagaaaaugcugggucccucugcuguagacauagggaauggaugcuucgaaaccaaacacaagugcaaccagaccugcuuagacaggauagcugcuggcaccuuuaaugcaggagaauuuucucuucccacuuuugauucacugaauauuacugcugcaucuuuaaaugaugauggauuggauaaccauacuauacugcucuacuacucaacugcugcuucuaguuuggcuguaacauugaugauagcuauuuuuauuguuuauaugaucuccagagacaauguuucuugcuccaucugucuauaa

SEQ ID NO: 58492 - RNA, 1755 nt, Artificial Sequence
  derived and/or modified CDS sequence (wt) from hemagglutinin__InfluenzaB__ABN50415
augaaggcaauaauuguacuacucaugguaguaacauccaaugcagaucgaaucugcacugggauaacaucgucaaacucaccucauguggucaaaacagcuacucaaggggaggucaaugugacuggugcgauaccacugacaacaacaccaacaaaaucucauuuugcaaaucucaaaggaacaaagaccagagggaaacuaugcccaaccuguuucaacugcaccgaucuggauguggccuugggcagaccaauguguguggggaucacaccuucggcaaaagcuucaauacuccacgaagucagaccuguuacauccggaugcuuuccuauaaugcacgacagaacaaaaaucagacagcuacccaaucuucucagaggauaugaaaaaaucagauuaucaacccaaaacguuaucgaugcagaaaaggcaccaggaggacccuacagacuuggaacuucaggaucuugcccuaacgcuaccaguaaaagcggauuuuucgcaacaauggcuugggcugucccaaggggcaacaacaaaacagcaacgaauccacuaacaguagaaguaccacacaucuguacaaaagaagaagaccaaauuacuguuuggggguuccauucugauaacaaaacucaaaugaaaaaccucuauggagacucaaauccucaaaaguucaccucaucugcuaauggaauaaccacacauuauguuucucagauugggggcuucccggaccaaacagaagacggagggcuaccacaaagcggcagaauuguuguugauuacauggugcaaaaaccugggaaaacaggaacaauugucuaucaaagagggauuuuguugccucaaaagguguggugcgcgaguggcaggagcaaaguaauaaaaggguccuugccuuuaauuggugaagcugauugccuucacgaaaaauacgguggauuaaacaaaagcaagccuuacuacacaggagaacaugcaaaagccauagggaauugcccaauaugggugaaaacaccuuugaagcuugccaauggaaccaaauauagaccuccugcaaaacuauuaaaggaaagggguuucuuuggagcuauugcugguuucuuagaaggaggaugggaaggaaugauugcagguuggcacggauacacaucucacggagcacacggaguggcaguggcagcagaccuuaagaguacgcaagaagccauaaacaagauaacaaaaaaucucaauucuuugagugagcuagaaguaaagaaccuucaaagacuaaguggugccauggaugaacuccauaacgaaauacucgagcuggaugagaaaguggaugaucucagagcugacacaauaaguucacaaauagaacuugcagucuugcuuuccaaugaaggaauaauaaacagugaagaugagcaucuauuggcacuugagagaaaacuaaagaaaaugcugggucccucugcuguagacauagggaauggaugcuucgaaaccaaacacaagugcaaccagaccugcuuagacaggauagcugcuggcaccuuuaaugcaggagaauuuucucuucccacuuuugauucacugaacauuacugcugcaucuuuaaaugaugauggauuggauaaccauacuauacugcucuacuacucaacugcugcuucuaguuuggcuguaacauugaugauagcuauuuuuauuguuuauaugaucuccagagacaauguuucuugcuccaucugucuauaa

SEQ ID NO: 58493 - RNA, 1755 nt, Artificial Sequence
  derived and/or modified CDS sequence (wt) from hemagglutinin__InfluenzaB__ABN50426
augaaggcaauaauuguacuacucaugguaguaacauccaaugcagaucgaaucugcacugggauaacaucgucaaacucaccucauguggucaaaacagcuacucaaggggaggucaaugugacuggugcgauaccacugacaacaacaccaacaaaaucucauuuugcaaaucucaaaggaacaaagaccagagggaaacuaugcccaaccuguuucaacugcaccgaucuggauguggccuugggcagaccaauguguguggggaucacaccuucggcaaaagcuucaauacuccacgaagucagaccuguuacauccggaugcuuuccuauaaugcacgacagaacaaaaaucagacagcuacccaaucuucucagaggauaugaaaaaaucagauuaucaacccaaaacguuaucgaugcagaaaaggcaccaggaggacccuacagacuuggaacuucaggaucuugcccuaacgcuaccaguaaaagcggauuuuucgcaacaauggcuugggcugucccaaggggcaacaacaaaacagcaacgaauccacuaacaguagaaguaccacacaucuguacaaaagaagaagaccaaauuacuguuuggggguuccauucugauaacaaaacucaaaugaaaaaccucuauggagacucaaauccucaaaaguucaccucaucugcuaauggaauaaccacacauuauguuucucagauugggggcuucccggaccaaacagaagacggagggcuaccacaaagcggcagaauuguuguugauuacauggugcaaaaaccugggaaaacaggaacaauugucuaucaaagagggauuuuguugccucaaaagguguggugcgcgaguggcaggagcaaaguaauaaaaggguccuugccuuuaauuggugaagcugauugccuucacgaaaaauacgguggauuaaacaaaagcaagccuuacuacacaggagaacaugcaaaagccauagggaauugcccaauaugggugaaaacaccuuugaagcuugccaauggaaccaaauauagaccuccugcaaaacuauuaaaggaaagggguuucuuuggagcuauugcugguuucuuagaaggaggaugggaaggaaugauugcagguuggcacggauacacaucucacggagcacacggaguggcaguggcagcagaccuuaagaguacgcaagaagccauaaacaagauaacaaaaaaucucaauucuuugagugagcuagaaguaaagaaccuucaaagacuaaguggugccauggaugaacuccauaacgaaauacucgagcuggaugagaaaguggaugaucucagagcugacacaauaaguucacaaauagaacuugcagucuugcuuuccaaugaaggaauaauaaacagugaagaugagcaucuauuggcacuugagagaaaacuaaagaaaaugcugggucccucugcuguagacauagggaauggaugcuucgaaaccaaacacaagugcaaccagaccugcuuagacaggauagcugcuggcaccuuuaaugcaggagaauuuucucuucccacuuuugauucacugaacauuacugcugcaucuuuaaaugaugauggauuggauaaccauacuauacugcucuacuacucaacugcugcuucuaguuuggcuguaacauugaugauagcuauuuucauuguuuauaugaucuccagagacaauguuucuugcuccaucugucuauaa

SEQ ID NO: 58494 - RNA, 1755 nt, Artificial Sequence
  derived and/or modified CDS sequence (wt) from hemagglutinin__InfluenzaB__ABN50437
augaaggcaauaauuguacuacucaugguaguaacauccaaugcagaucgaaucugcacugggauaacaucuucaaacucaccucauguggucaaaacagcuacucaaggggaggucaaugugacuggugugauaccacugacaacaacaccaacaaaaucuuauuuugcaaaucucaaaggaacaaggaccagagggaaacuaugcccagacugucucaacuguacagaucuggauguggccuugggcagaccaauguguguggggaccacaccuucggcgaaagcuucaauacuccacgaagucagaccuguuacauccgggugcuuuccuauaaugcacgacagaacaaaaaucaggcaacuacccaaucuucucagaggauaugaaaauaucagguuaucaacccaaaacguuaucgaugcagaaaaggcaccaggagggcccuacagacuuggaaccucaggaucuugcccuaacgcuaccaguaaaagcggauuuuucgcaacaauggcuugggcugucccaaaggacaacaacaaaaaugcaacgaacccacuaacaguagaaguaccauacauuuguacagaaggggaagaccaaauuacuguuuggggguuccauucagauaacaaaacccaaaugaagaaccucuauggagacccaaauccucaaaaguucaccucaucugcuaauggaguaaccacacauuauguuucucagauuggcggcuucccagaucaaacagaagacggaggacuaccacaaagcggcagaauuguuguugauuacaugaugcaaaaaccugggaaaacaggaacaauugucuaccaaagagguguuuuguugccucaaaagguguggugcgcgaguggcaagagcaaaguaauaaaaggguccuugccucuaauuggugaagcagauugccuucaugaaaaauacgguggauuaaacaaaagcaagccuuacuacacaggagaacaugcaaaagccauaggaaauugcccaauaugggugaaaacaccuuugaagcuugccaauggaaccaaauauagaccuccugcaaaacuauuaaaggaaagggguuucuucggagcuauugcugguuuccuagaaggaggaugggaaggaaugauugcaggcuggcacggauacacaucucacggagcacauggaguggcaguggcggcagaccuuaagaguacgcaagaagcuauaaacaagauaacaaaaaaucucaauucuuugagugagcuagaaguaaagaaucuucaaagacuaaguggugccauggaugaacuccacaacgaaauacucgagcuggaugagaaaguggaugaucucagagcugacacuauaagcucgcaaauagaacuugcagucuugcuuuccaaugaaggaauaauaaacagugaagaugagcaucuacuggcacuugagagaaaacuaaagaaaaugcugggucccucugcuguagauauaggaaauggaugcuucgaaaccaaacacaagugcaaccagaccugcuuagacaggauagcugcuggcaccuuuaaugcaggagaauuuucucuccccacuuuugauucacugaacauuacugcugcaucuuugaaugaugauggauuggauaaccauacuauacugcucuauuacucaacugcugcuuccaguuuggcuguaacauugaugcuagcuauuuuuauuguuuauauggucuccagagacaacguuucaugcuccaucugucuauaa

SEQ ID NO: 58495 - RNA, 1758 nt, Artificial Sequence
  derived and/or modified CDS sequence (wt) from hemagglutinin__InfluenzaB__ABN50459
augaaggcacuaauuguacuacucaugguaguaacauccaaugcagaucgaaucugcacugggauaacaucgucaaacucaccccauguggucaaaacugcuacucaaggggaggucaaugugacuggugugauaccacugacaacaacacccaccaaaucucauuuugcaaaucucaaaggaacaaaaaccagagggaaacuaugcccaaaaugccucaacugcacagaucuggacguggccuugggcagaccaaaaugcacggggaacauacccucggcagaaguuucaauacuccaugaagucagaccuguuaccucugggugcuuuccuauaaugcacgacagaacaaaaauuagacagcugcccaaccuucucagaggauacgaacauaucagauuaucaacucauaacguuaucaaugcagaaaaggcaccaggaggacccuacaaaauuggaaccucagggucuugcccuaauguuaccaauggaaacggauuuuucgcaacaauggcuugggccgucccaaaaaacgacaacaacaaaacagcaacaaauucauuaacaauagaaguaccauacauuuguacagaaggagaagaccaaauuaccauuuggggguuccacucugauaacgaaauccaaauggcaaaacucuauggggacucaaagccccagaaguucaccucaucugccaacggagugaccacacauuacguuucacagauugguggcuucccaaaucaaacagaagacggaggacuaccacaaagugguagaauuguuguugauuacauggugcagaaaucugggaaaacaggaacaauuaccuaucaaagagguauuuuauugccucaaaaaguguggugcgcaaguggcaggagcaagguaauaaaaggauccuugcccuuaauuggagaagcagauugccuccacgaaaaauacgguggauuaaacaaaagcaagccuuacuacacaggggaacaugcaaaggccauaggaaauugcccaauaugggugaaaacacccuugaagcuggccaauggaaccaaauauagaccuccugcaaaacuauuaaaggaaagggguuucuucggagcuauugcugguuucuuagaaggaggaugggaaggaaugauugcagguuggcacggauacacaucccauggggcacauggaguagcaguggcagcagaccuuaagagcacucaagaagccauaaacaagauaacaaaaaaucucaacucuuugagugagcuggaaguaaagaaucuucaaagacuaagcggugccauggaugaacuccacaacgaaauacuagaacuagacgagaaaguggaugaucucagagcugauacaauaagcucacaaauagaacucgcaguccugcuuuccaaugaaggaauaauaaacagugaagaugagcaucucuuggcgcuugaaagaaagcugaagaaaaugcugggccccucugcuguagagauagggaauggaugcuucgaaaccaaacacaagugcaaccagaccugucuugacagaauagcugcugguaccuuugaugcaggagaauuuucucuccccacuuuugauucacugaauauuacugcugcaucuuuaaaugacgauggauuggauaaucauacuauacugcuuuacuacucaacugcugccuccaguuuggcuguaacauugaugauagcuaucuuuguuguuuauauggucuccagagacaauguuucuugcuccaucugucuauga

SEQ ID NO: 58496 - RNA, 1758 nt, Artificial Sequence
  derived and/or modified CDS sequence (wt) from hemagglutinin__InfluenzaB__ABN50470
augaaggcaauaauuguacuacucaugguaguaacauccaaugcagaucgaaucugcacuggaauaacaucgucaaacucaccccauguggucaaaacugcuacucaaggggaagucaaugugacuggugugauaccacugacaacaacacccaccaaaucucauuuugcaaaucucaaaggaacaaaaaccagagggaaacuaugcccaaaaugucucaacugcacagaucuggacguggccuugggcagaccaaaaugcacggggaacauaccuucggcaaaaguuucaauacuccaugaaguaagaccuguuacaucugggugcuuuccuauaaugcacgacagaacaaaaauuagacagcugcccaaucuucucagaggauacgaacguaucagguuaucaaaccauaacguuaucaaugcagaaaaagcaccaggaggacccuacaaaauuggaaccucagggucuugcccuaacguuaccaauggaaacggauucuucgcaacaauggcuugggcugucccaaaaaacgaaaacaacaaaacagcaacaaauucauuaacaauagaaguaccauacauuuguacagaaggagaagaccaaauuaccguuuggggguuccacucugauaacgaaauccaaauggcaaaacucuauggagacucaaagccucagaaauucacuucaucugccaacggagugaccacacauuacguuucacagauugguggcuucccaaaucaaacagaagacggaggacuaccacaaagugguagaauuguuguugauuacauggugcaaaaaucuggaaaaacaggaacaauuaccuaucaaagagguauuuuauugccucaaaaaguguggugcgcaaguggcaggagcaagguaauaaaaggauccuugccuuuaauuggagaagcagauugccuccacgaaaaauacgguggauuaaacaaaagcaagccuuacuauacaggggaacaugcaaaagccauaggaaauugcccaauaugggugaaaacacccuugaagcuggccaauggaaccaaauauagaccuccugcaaaacuauuaaaggaaagggguuucuucggagcuauugcugguuucuuagaaggaggaugggaaggaaugauugcagguuggcacggauacacaucccauggagcacauggaguagcaguggcagcagaccuuaagaguacucaagaagccauaaacaagaucacaaaaaaucucaacucuuugagugagcuggaaguaaagaaucuucaaagacuaagcggagccauggaugaacuccacaacgaaauacuagaacuagaugagaaaguggaugaucucagagcugauacaauaagcucgcaaauagaacucgcagucuugcuuuccaaugaaggaauaauaaacagugaagaugagcaucucuuggcgcuugaaagaaaacugaagaaaaugcugggccccucugcuguagagauagggaauggaugcuucgaaaccaaacacaagugcaaccagaccugccucgacagaauagcugcuggcaccuuuaaugcaggagaauuuucucuccccaccuuugauucacuaaauauuacugcugcaucuuuaaaugacgauggauuggauaaucauacuauacugcuuuacuacucaacugcugcuuccaguuuggcuguaacauugaugauagcuaucuuuguuguuuauauggucuccagagacaauguuucuuguuccaucugucuauaa

SEQ ID NO: 58497 - RNA, 1755 nt, Artificial Sequence
  derived and/or modified CDS sequence (wt) from hemagglutinin__InfluenzaB__ABN50481
augaaggcaauaauuguacuacuccugguaguaacauccaaugcagaucgaaucugcacugggauaacaucgucaaacucaccucauguggucaaaacagcuacucaaggggaggucaaugugacuggugcgauaccacugacaacaacaccaacaaaaucucauuuugcaaaucucaaaggaacaaagaccagagggaaacuaugcccaaccuguuucaacugcaccgaucuggauguggccuugggcagaccaauguguguggggaucacaccuucggcaaaagcuucaauacuccacgaagucagaccuguuacauccggaugcuuuccuauaaugcacgacagaacaaaaaucagacagcuacccaaucuucucagaggauaugaaaaaaucagauuaucaacccaaaacguuaucgacgcagaaaaggcaccaggaggacccuacagacuuggaacuucaggaucuugcccuaacgcuaccaguaaaagcggauuuuucgcaacaauggcuugggcugucccaagggacaacaacaaaacagcaacgaauccacuaacaguagaaguaccacacaucuguacaaaagaagaagaccaaauuacuguuuggggguuccauucugauaacaaaacccaaaugaaaaaccucuauggagacucaaauccucaaaaguucaccucaucugcuaauggaauaaccacacauuauguuucucagauugggggcuucccggaccaaacagaagacggagggcuaccacaaagcggcagaauuguuguugauuacauggugcaaaaaccugggaaaacaggaacaauugucuaucaaagagggauuuuguugccucaaaagguguggugcgcgaguggcaggagcaaaguaauaaaaggguccuugccuuuaauuggugaagcugauugccuucacgaaaaauacgguggauuaaacaaaagcaagccuuacuacacaggagaacaugcaaaagccauagggaauugcccaauaugggugaaaacaccuuugaagcuugccaauggaaccaaauauagaccuccugcaaaacuauuaaaggaaagggguuucuuuggagcuauugcugguuucuuagaaggaggaugggaaggaaugauugcagguuggcacggauacacaucucacggagcacacggaguggcaguggcagcagaccuuaagaguacgcaagaagccauaaacaagauaacaaaaaaucucaauucuuugagugagcuagaaguaaagaaccuucaaagacuaaguggugccauggaugaacuccauaacgaaauacucgagcuggaugagaaaguggaugaucucagagcugacacaauaaguucacaaauagaacuugcagucuugcuuuccaaugaaggaauaauaaacagugaagaugagcaucuauuggcacuugagagaaaacuaaagaaaaugcugggucccucugcuguagacauagggaauggaugcuucgaaaccaaacacaagugcaaccagaccugcuuagacaggauagcugcuggcaccuuuaaugcaggagaauuuucucuucccacuuuugauucacugaacauuacugcugcaucuuuaaaugaugauggauuggauaaccauacuauacugcucuacuacucaacugcugcuucuaguuuggcuguaacauugaugauagcuauuuuuauuguuuauaugaucuccagagacaauguuucuugcuccaucugucuauaa

SEQ ID NO: 58498 - RNA, 1755 nt, Artificial Sequence
  derived and/or modified CDS sequence (wt) from hemagglutinin__InfluenzaB__ABN50503
augaaggcaauaauuguacuacucaugguaguaacauccaaugcagaucgaaucugcacugggauaacaucgucaaacucaccucauguggucaaaacagcuacucaaggggaggucaaugugacuggugugauaccacugacaacaacaccaacaaaaucucauuuugcaaaucucaaaggaacaaagaccagagggaaacuaugcccaaccugucucaacugcacagaucuggauguggccuuaggcagaccaaugugugugggggucacaccuucggcaaaagcuucaauacuccacgaagucaggccuguuacauccggaugcuuuccuauaaugcacgacagaacaaaaaucagacagcuacccaaucuucucagaggauaugaaaaaaucagauuaucaacccaaaacguuaucaacgcagaaaaggcaccaggaggacccuacagacuuggaaccucaggaucuugcccuaacgcuaccaguagaagcggauuuuucgcaacaauggcuugggcugucccaaaggacaacaacaaaacagcaacgaauccacuaacaguagaaguaccacacaucuguacaaaagaagaagaccaaauuacuguuuggggguuccauucugaugacaaaacccaaaugaaaaaccucuauggagacucaaauccucaaaaguucaccucaucugcuaauggaguaaccacacauuauguuucucagauuggcggcuucccggaucaaacagaagacggagggcuaccacaaagcggcagaauuguuguugauuacauggugcaaaaaccugggaaaacaggaacaauugucuaucaaagagguauuuuguugccucaaaagguguggugcgcgaguggcaggagcaaaguaauaaaaggguccuugccuuuaauuggugaagcagauugccuucacgaaaaauacgguggauuaaacaaaagcaagccuuacuacacaggagaacaugcaaaagccauaggaaauugcccaauaugggugaaaacaccuuugaagcuugccaauggaaccaaauauagaccuccugcaaaacuauuaaaggaaagggguuucuucggagcuauugcugguuucuuagaaggaggaugggaaggaaugauugcagguuggcacggauacacaucucacggagcacauggaguggcaguggcagcagaccuuaagaguacgcaagaagccauaaacaagauaacaaaaaaucucaauucuuugagugagcuagaaguaaagaaucuucaaagacuaaguggugccauggaugaacuccacaacgaaauacucgagcuggaugagaaaguggaugaucucagagcugacacaauaagcucacaaauagaacuugcagucuugcuuuccaacgaaggaauaauaaacagugaagaugagcaucuauuggcacuugagagaaaacuaaagaaaaugcugggucccucugcuguagacauagggaauggaugcuucgaaaccaaacacaagugcaaccagaccugcuuagacaggauagcugcuggcaccuuuaaugcaggagaauuuucucuucccacuuuugauucacugaauauuacugcugcaucuuuaaaugaugauggauuggauaaccauacuauacugcucuacuacucaacugcugcuucuaguuuggcuguaacauugaugauagcuauuuuuauuguuuauaugaucuccagagacaauguuucuugcuccaucugucuauag

SEQ ID NO: 58499 - RNA, 1755 nt, Artificial Sequence
  derived and/or modified CDS sequence (wt) from hemagglutinin__InfluenzaB__ABN50514
augaaggcaauaauuguacuacucaugguagcaacauccaaugcagaucgaaucugcacugggauaacaucuucaaacucaccucauguggucaaaacagccacucaaggggaggucaaugugacuggugugauaccacugacaacaacaccaacaaaaucuuauuuugcaaaucucaaaggaacaaggaccagagggaaacuaugcccagacugucucaacuguacagaucuggauguggccuugggcagaccaauguguguggggaccacaccuucggcaaaagcuucaauacuccacgaagucagaccuguuacauccgggugcuuuccuauaaugcacgacagaacaaaaaucagacaacuacccaaucuucucagaggauaugaaaauauaagguuaucaacccaaaacguuaucgaugcagaaaaggcaccaggaggacccuacagacuuggaaccucaggaucuugcccuaacgcuaccaguaaaagcggauuuuucgcaacaauggcuugggcugucccaaaggacaacaacaaaaaugcaacgaacccacuaacaguagaaguaccauacguuuguacagaaggggaagaccaaauuacuguuuggggguuccauucagauaacaaaccccaaaugaagaaccucuauggagacucaaauccucaaaaguucaccucaucugcuaauggaguaaccacacauuauguuucucagauuggcggcuucccagaucaaacagaagacggaggacuaccacaaagcggcagaauuguuguugauuacauggugcaaaaaccugggaaaacaggaacaauugucuaucaaagagguguuuuguugccucaaaagguguggugcgcgaguggcaggagcaaaguaauaaaaggguccuugccuuuaauuggugaagcagauugccuucaugaaaaauacgguggauuaaacaaaagcaagccuuacuacacaggagaacaugcaaaagccauaggaaauugcccaauaugggugaaaacaccuuugaagcuugccaauggaaccaaauauagaccuccugcaaaacuauuaaaggaaagggguuucuucggagcuauugcugguuuccuagaaggaggaugggaaggaaugauugcagguuggcacggauacacaucucacggagcacauggaguggcaguggcggcagaccuuaagaguacgcaagaagcuauaaacaagauaacaaaaaaucucaauucuuugagugagcuagaaguaaagaaucuucaaagacuaaguggugccauggaugaacuccacgacgaaauacucgagcuggaugagaaaguggaugaucucagagcugacacuauaagcucgcaaauagaacuugcagucuugcuuuccaacgaaggaauaauaaacagugaagaugagcaucuauuggcacuugagagaaaacuaaagaaaaugcugggucccucugcuguagacauaggaaauggaugcuucgaaaccaaacacaagugcaaccagaccugcuuagacaggauagcugcuggcaccuuuaaugcaggagaauuuucucuccccacuuuugauucacugaacauuacugcugcaucuuuaaaugaugauggauuggauaaccauacuauacugcucuauuacucaacugcugcuucuaguuuggcuguaacauugaugcuagcuauuuuuauuguuuauauggucuccagagacaacguuucaugcuccaucugucuauaa

SEQ ID NO: 58500 - RNA, 1755 nt, Artificial Sequence
  derived and/or modified CDS sequence (wt) from hemagglutinin__InfluenzaB__ABN50525
augaaggcaauaauuguacuacucaugguaguaacauccaaugcagaucgaaucugcacugggauaacaucuucaaacucaccucauguggucaaaacagcuacucaaggggaggucaaugugacuggugugauaccacugacaacaacaccaacaaaaucuuauuuugcaaaucucaaaggaacaaggaccagagggaaacuaugcccagacugucucaacuguacagaucuggauguggccuugggcagaccaauguguguggggaccacaccuucagcaaaagcuucaauacuccacgaagucagaccuguuacauccgggugcuuuccuauaaugcacgacagaacaaaaaucagacaacuacccaaucuucucagaggauaugaaaauaucagguuaucaacccaaaacguuaucgaugcagaaaaggcaccaggaggacccuacagacuuggaaccucaggaucuugcccuaacgcuaccaguaaaagcggauuuuucucaacaauggcuugggcugucccaaaggacaacaacaaaaaugcaacgaacccacuaacaguagaaguaccauacguuuguacagaaggggaagaccaaauuacuguuuggggguuccauucagauaacaaaacccaaaugaagaaccucuauggagacucaaauccucaaaaguucaccucaucugcuaauggaguaaccacacauuauguuucucagauuggcggcuucccagaucaaacagaagacggaggacuaccacaaagcggcagaauuguuguugauuacauggugcaaaaaccugggaaaacaggaacaauugucuaucaaagagguguuuuguugccucaaaagguguggugcgcgaguggcaggagcaaaguaauaaaaggguccuugccuuuaauuggugaagcagauugccuucaugaaaaauacgguggauuaaacaaaagcaagccuuacuacacaggagaacaugcaaaagccauaggaaauugcccaauaugggugaaaacaccuuugaagcuugccaauggaaccaaauauagaccuccugcaaaacuauuaaaggaaagggguuucuucggagcuauugcugguuuccuagaaggaggaugggaaggaaugauugcagguuggcacggauacacaucucacggagcacauggaguggcaguggcggcagaccuuaagaguacgcaagaagcuauaaacaagauaacaaaaaaucucaauucuuugagugagcuagaaguaaagaaucuucaaagacuaaguggugccauggaugaacuccacaacgaaauacucgagcuggaugagaaaguggaugaucucagagcugacacuauaagcucgcaaauagaacuugcagucuugcuuuccaacgaaggaauaauaaacagugaagaugagcaucuauuggcacuugagagaaaacuaaagaaaaugcugggucccucugcuguagacauaggaaauggaugcuucgaaaccaaacacaagugcaaccagaccugcuuagacaggauagcugcuggcaccuuuaaugcaggagaauuuucucuccccacuuuugauucacugaacauuacugcugcaucuuuaaaugaugauggauuggauaaccauacuauacugcucuauuacucaacugcugcuucuaguuuggcuguaacauugaugcuagcuauuuuuauuguuuauauggucuccagagacaacguuucaugcuccaucugucuauaa

SEQ ID NO: 58501 - RNA, 1758 nt, Artificial Sequence
  derived and/or modified CDS sequence (wt) from hemagglutinin__InfluenzaB__ABN50536
augaaggcaauaauuguacuacucaugguaguaacauccaaugcagaucgaaucugcacuggaauaacaucgucaaacucaccccauguggucaaaacugcuacucaaggggaagucaaugugacuggugugauaccacugacaacaacacccaccaaaucucauuuugcaaaucucaaaggaacaaaaaccagagggaaacuaugcccaaaaugucucaacugcacagaucuggacguggccuugggcagaccaaaaugcacggggaacauaccuucggcaaaaguuucaauacuccaugaaguaagaccuguuacaucugggugcuuuccuauaaugcacgacagaacaaaaauuagacagcugcccaaucuucucagaggauacgaacguaucagguuaucaaaccauaacguuaucaaugcagaagaagcaccaggaggacccuacaaaauuggaaccucagggucuugcccuaacguuaccaauggaaacggauucuucgcaacaauggcuugggcugucccaaaaaacgaaaacaacaaaacagcaacaaauucauuaacaauagaaguaccauacauuuguacagaaggagaagaccaaauuaccguuuggggguuccacucugauaacgaaauccaaauggcaaaacucuauggagacucaaagccucagaaauucacuucaucugccaacggagugaccacacauuacguuucacagauugguggcuucccaaaucaaacagaagacggaggacuaccacaaagugguagaauuguuguugauuacauggugcaaaaaucuggaaaaacaggaacaauuaccuaucaaagagguauuuuauugccucaaaaaguguggugcgcaaguggcaggagcaagguaauaaaaggauccuugccuuuaauuggagaagcagauugccuccacgaaaaauacgguggauuaaacaaaagcaagccuuacuauacaggggaacaugcaaaagccauaggaaauugcccaauaugggugaaaacacccuugaagcuggccaauggaaccaaauauagaccuccugcaaaacuauuaaaggaaagggguuucuucggagcuauugcugguuucuuagaaggaggaugggaaggaaugauugcagguuggcacggauacacaucccauggagcacauggaguagcaguggcagcagaccuuaagaguacucaagaagccauaaacaagaucacaaaaaaucucaacucuuugagugagcuggaaguaaagaaucuucaaagacuaagcggagccauggaugaacuccacaacgaaauacuagaacuagaugagaaaguggaugaucucagagcugauacaauaagcucgcaaauagaacucgcagucuugcuuuccaaugaaggaauaauaaacagugaagaugagcaucucuuggcgcuugaaagaaaacugaagaaaaugcugggccccucugcuguagagauagggaauggaugcuucgaaaccaaacauaagugcaaccagaccugccucgacagaauagcugcuggcaccuuuaaugcaggagaauuuucucuccccaccuuugauucacuaaauauuacugcugcaucuuuaaaugacgauggauuggauaaucauacuauacugcuuuacuacucaacugcugcuuccaguuuggcuguaacauugaugauagcuaucuuuguuguuuauauggucuccagagacaauguuucuuguuccaucugucuauaa

SEQ ID NO: 58502 - RNA, 1758 nt, Artificial Sequence
  derived and/or modified CDS sequence (wt) from hemagglutinin__InfluenzaB__ABN50547
augaaggcaauaauuguacuacucaugguaguaacauccaaugcagaucgaaucugcacugggauaacaucgucaaacucaccccauguggucaaaacugcuacucaaggggaggucaaugugacuggugugauaccacugacaacaacacccaccaaaucucauuuugcaaaucucaaaggaacaaaaacuagagggaaacuaugcccaaaaugccucaacugcacagaucuggacguggccuugggcagaccaaaaugcacggggaacauacccucggcaaaaguuucaauacuccaugaagucagaccuguuacaucugggugcuuuccuauaaugcacgacagaacaaaaauuagacagcugcccaaucuucucagaggauacgaacauaucagguuaucaacucauaacguuaucaaugcagaaaaggcaccaggaggacccuacaaaaucggaaccucagggucuugcccuaacguuaccaauggaaacggauuuuucgcaacaauggcuugggccgucccaaaaaacgacaacaacaaaacagcaacaaauucauuaacaauagaaguaccauacauuuguacagaaggagaagaccaacuuaccguuuggggguuccacucugauaacgaaaaccaaauggcaaaacucuauggggacucaaagccccagaaguucaccucaucugccaacggagugaccacacauuacguuucacagauugguggcuucccaaaucaaacagaagacggaggacuaccacaaagugguagaauuguuguugauuacauggugcaaaaaucugggaaaacaggaacaauuaccuaucaaagagguauuuuauugccucaaaaaguguggugcgcaaguggcaggagcaagguaauaaaaggauccuugccuuuaauuggagaagcagauugccuccacgaaaaauacgguggauuaaacaaaagcaagccuuacuacacaggggaacaugcaaaggccauaggaaauugcccaauaugggugaaaacacccuugaagcuggccaauggaaccaaauauagaccuccugcaaaacuauuaaaggaaagggguuucuucggagcuauugcugguuucuuagaaggaggaugggaaggaaugauugcagguuggcacggauacacaucccauggggcacauggaguagcaguggcagcagaccuuaagaguacucaagaagccauaaacaagauaacaaaaaaucucaacucuuugagugagcuggaaguaaagaaucuucaaagacuaagcggugccauggaugaacuccacaacgaaauacuagaacuagacgagaaaguggaugaucucagagcugauacaauaagcucacaaauagaacucgcagucuugcuuuccaaugaaggaauaauaaacagugaagaugagcaucucuuggcgcuugaaagaaagcugaagaaaaugcugggccccucugcuguagagauagggaauggaugcuucgaaaccaaacacaagugcaaccagaccugucucgacagaauagcugcugguaccuuugaugcaggagaauuuucucuccccacuuuugauucacugaauauuacugcugcaucuuuaaaugacgauggauuggauaaucauacuauacugcuuuacuacucaacugcugccuccaguuuggcuguaacauugaugauagcuaucuuuguuguuuauauggucuccagagacaauguuucuugcuccaucugucuauaa

SEQ ID NO: 58503 - RNA, 1758 nt, Artificial Sequence
  derived and/or modified CDS sequence (wt) from hemagglutinin__InfluenzaB__ABN50558
augaaggcaauaauuguacuacucaugguaguaacauccaaugcagaucgaaucugcacugggauaacaucgucaaacucaccccauguggucaaaacugcuacucaaggggaggucaaugugacuggugugauaccacugacaacaacacccaccaaaucucauuuugcaaaucucaaaggaacaaaaaccagagggaaacugugcccaaaaugccucaacugcacagaucuggacguggccuugggcagaccaaaaugcacggggaacauacccucggcaaaaguuucaauacuccaugaagucagaccuguuacaucugggugcuuuccuauaaugcacgacagaacaaaaauuagacagcugcccaaucuucucagaggauacgaacauaucagguuaucaacucauaacguuaucaaugcagaaaaggcaccaggaggacccuacaaaauuggaaccucagggucuugcccuaacguuaccaauggaaacggauuuuucgcaacaauggcuugggcagucccaaaaaacgacaacaacaaaacagcaacaaauucauuaacaauagaaguaccauacauuuguacagaaggagaagaccaaauuaccguuuggggguuccacucugauaaagaaacccaaauggcaaaacucuauggggacucaaagccccagaaguucaccucaucugccaacggagugaccacacauuacguuucacagauugguggcuucccaaaucaaacagaagacggaggacuaccacaaagugguagaauuguuguugauuacaugaugcaaaaaucugggaaaacaggaacaauuaccuaucaaagagguauuuuauugccucaaaaaguguggugcgcaaguggcaggagcaagguaauaaaaggauccuugccuuuaauuggagaagcagauugccuccacgaaaaauacgguggauuaaacaaaagcaagccuuacuacacaggggaacaugcaaaggccauaggaaauugcccaauaugggugaaaacacccuugaagcuggccaauggaaccaaauauagaccuccugcaaaacuauuaaaggaaagggguuucuucggagcuauugcugguuucuuagaaggaggaugggaaggaaugauugcagguuggcacggauacacaucccauggggcacauggaguagcaguggcagcagaccuuaagaguacucaagaagccauaaacaagauaacaaaaaaucucaacucuuugagugagcuggaaguaaagaaucuucaaagacuaagcggugccauggaugaacuccacaacgaaauacuagaacuagaugagaaaguggaugaucucagagcugauacaauaagcucacaaauagaacucgcagucuugcuuuccaaugaaggaauaauaaacagugaagaugagcaucucuuggcgcuugaaagaaaacugaagaaaaugcugggccccucugcuguagagauagggaauggaugcuucgaaaccaaacacaagugcaaccagaccugucucgacagaauagcugcugguaccuuugaugcaggagaauuuucucuccccacuuuugauucacugaauauuacugcugcaucuuuaaaugacgauggauuggauaaucauacuauacugcuuuacuacucaacugcugccuccaguuuggcuguaacauugaugauagcuaucuuuguuguuuauauggucuccagagacaauguuucuugcuccaucugucuauaa

SEQ ID NO: 58504 - RNA, 1755 nt, Artificial Sequence
  derived and/or modified CDS sequence (wt) from hemagglutinin__InfluenzaB__ABN50569
augaaggcaauaauuguacuacucaugguaguaacauccaaugcagaucgaaucugcacugggauaacaucgucaaacucaccucauguggucaaaacagcuacucaaggggaggucaaugugacuggugcgauaccacugacaacuacaccaacaaaaucucauuuugcaaaucucaaaggaacaaagaccagagggaaacuaugcccaaccuguuucaacugcaccgaucuggauguggccuugggcagaccaauguguguggggaucacaccuucggcaaaagcuucaauacuccacgaagucagaccuguuacauccggaugcuuuccuauaaugcacgacagaacaaaaaucagacagcuacccaaucuucucagaggauaugaaaaaaucagauuaucgacccaaaacguuaucgacgcagaaaaggcaccaggaggacccuacagacuuggaacuucaggaucuugcccuaacgcuaccaguaaaagcggauuuuucgcaacaauggcuugggcugucccaagaggcaacaacaaaacagcaacgaauccacuaacaguagaaguaccacacaucuguacaaaagaagaagaccaaauuacuguuuggggguuccauucugauaacaaaacccaaaugaaaaaccucuauggagacucaaauccucaaaaguucacuucaucugcuaauggaauaaccacacauuauguuucucagauuggggguuucccggaccaaacagaagacggagggcuaccacaaagcggcagaauuguuguugauuacauggugcaaaaaccugggaaaacaggaacaauugucuaucaaagagggauuuuguugccucaaaagguguggugcgcgaguggcaggagcaaaguaauaaaaggguccuugccuuuaauuggugaagcugauugccuucacgaaaaauacgguggauuaaacaaaagcaagccuuacuacacaggagaacaugcaaaagccauagggaauugcccaauaugggugaaaacaccuuugaagcuugccaauggaaccaaauauagaccuccugcaaaacuauuaaaggaaagggguuucuuuggagcuauugcugguuucuuagaaggaggaugggaaggaaugauugcagguuggcacggauacacaucucacggagcacacggaguggcaguggcagcagaccuuaagaguacgcaagaagccauaaacaagauaacaaaaaaucucaauucuuugagugagcuagaaguaaagaaccuucaaagacuaaguggugccauggaugaacuccauaacgaaauacucgagcuggaugagaaaguggaugaucucagagcugacacaauaaguucacaaauagaacuugcagucuugcuuuccaaugaaggaauaauaaacagugaagaugagcaucuauuggcacuugagagaaaacuaaagaaaaugcugggucccucugcuguagacauagggaauggaugcuucgaaaccaaacacaagugcaaccagaccugcuuagacaggauagcugcuggcaccuuuaaugcaggagaauuuucucuucccacuuuugauucacugaacauuacugcugcaucuuuaaaugaugauggauuggauaaccauacuauacugcucuacuacucaacugcugcuucuaguuuggcuguaacauugaugauagcuauuuuuauuguuuauaugaucuccagagacaauguuucuugcuccaucugucuauaa

SEQ ID NO: 58505 - RNA, 1758 nt, Artificial Sequence
  derived and/or modified CDS sequence (wt) from hemagglutinin__InfluenzaB__ABN50580
augaaggcaauaauuguacuacucaugguaguaacauccaaugcagaucgaaucugcacugggauaacaucgucaaacucaccccauguggucaaaacugcuacucaaggggaggucaaugugacuggugugauaccacugacaacaacacccaccaaaucucauuuugcaaaucucaaaggaacaaaaaccagagggaaacuaugcccaaaaugccucaacugcacagaucuggacguggccuugggcagaccaaaaugcacggggaacauacccucggcagaaguuucaauacuccaugaagucagaccuguuacaucugggugcuuuccuauaaugcacgacagaacaaaaauuagacagcugcccaaccuucucagaggauacgaacauaucagguuaucaacucauaacguuaucaaugcagaaaaggcaccaggaggacccuacaaaauuggaaccucagggucuugcccuaacguuaccaauggaaacggauuuuucgcaacaauggcuugggccgucccaaaaaacgacaacaacaaaacagcaacaaauucauuaacaauagaaguaccauacauuuguacagaaggagaagaccaaauuaccguuuggggguuccacucugauaacgaaacccaaauggcaaaacucuauggggacucaaagccccagaaguucaccucaucugccaacggagugaccacacauuacguuucacagauugguggcuucccaaaucaaacagaagacggaggacuaccacaaagugguagaauuguuguugauuacauggugcaaaaaucugggaaaacaggaacaauuaccuaucaaagagguauuuuauugccucaaaaaguguggugcgcaaguggcaggagcaagguaauaaaaggauccuugccuuuaauuggagaagcagauugccuccacgaaaaauacgguggauuaaacaaaagcaagccuuacuacacaggggaacaugcaaaggccauaggaaauugcccaauaugggugaaaacacccuugaagcuggccaauggaaccaaauauagaccuccugcaaaacuauuaaaggaaagggguuucuucggagcuauugcugguuucuuagaaggaggaugggaaggaaugauugcagguuggcacggauacacaucccauggggcacauggaguagcaguggcagcagaccuuaagagcacucaagaagccauaaacaagauaacaaaaaaucucaacucuuugagugagcuggaaguaaagaaucuucaaagacuaagcggugccauggaugaacuccacaacgaaauacuagaacuagacgagaaaguggaugaucucagggcugauacaauaagcucacaaauagaacucgcaguccugcuuuccaaugaaggaauaauaaacagugaagaugagcaucucuuggcgcuugaaagaaagcugaagaaaaugcugggccccucugcuguagagauagggaauggaugcuucgaaaccaaacacaagugcaaccagaccugucucgacagaauagcugcugguaccuuugaugcaggagaauuuucucuccccacuuuugauucacugaauauuacugcugcaucuuuaaaugacgauggauuggauaaucauacuauacugcuuuacuacucaacugcugccuccaguuuggcuguaacauugaugauagcuaucuuuguuguuuauauggucuccagagacaauguuucuugcuccaucugucuauaa

SEQ ID NO: 58506 - RNA, 1758 nt, Artificial Sequence
  derived and/or modified CDS sequence (wt) from hemagglutinin__InfluenzaB__ABN50591
augaaggcaauaauuguacuacucaugguaguaacauccaaugcagaucgaaucugcacuggaauaacaucgucaaacucaccccauguggucaaaacugcuacucaaggggaagucaaugugacuggugugauaccacugacaacaacacccaccaaaucucauuuugcaaaucucaaaggaacaaaaaccagagggaaacuaugcccaaaaugucucaacugcacagaucuggacguggccuugggcagaccaaaaugcacggggaacauaccuucggcaaaaguuucaauacuccaugaaguaagaccuguuacaucugggugcuuuccuauaaugcacgacagaacaaaaauuagacagcugcccaaucuucucagaggauacgaacguaucagguuaucaaaccauaacguuaucaaugcagaaaaagcaccaggaggacccuacaaaauuggaaccucagggucuugcccuaacguuaccaauggaaacggauucuucgcaacaauggcuugggcugucccaaaaaacgaaaacaacaaaacagcaacaaauucauuaacaauagaaguaccauacauuuguacagaaggagaagaccaaauuaccguuuggggguuccacucugauaacgaagcccaaauggcaaaacucuauggagacucaaagccucagaaauucacuucaucugccaacggagugaccacacauuacguuucacagauugguggcuucccaaaucaaacagaagacggaggacuaccacaaagugguagaauuguuguugauuacauggugcaaaaaucuggaaaaacaggaacaauuaccuaucaaagagguauuuuauugccucaaaaaguguggugcgcaaguggcaggagcaagguaauaaaaggauccuugccuuuaauuggagaagcagauugccuccacgaaaaauacgguggauuaaacaaaagcaagccuuacuauacaggggaacaugcaaaagccauaggaaauugcccaauaugggugaaaacacccuugaagcuggccaauggaaccaaauauagaccuccugcaaaacuauuaaaggaaagggguuucuucggagcuauugcugguuucuuagaaggaggaugggaaggaaugauugcagguuggcacggauacacaucccauggagcacauggaguagcaguggcagcagaccuuaagaguacucaagaagccauaaacaagaucacaaaaaaucucaacucuuugagugagcuggaaguaaagaaucuucaaagacuaagcggagccauggaugaacuccacaacgaaauacuagaacuagaugagaaaguggaugaucucagagcugauacaauaagcucgcaaauagaacucgcagucuugcuuuccaaugaaggaauaauaaacagugaagaugagcaucucuuggcgcuugaaagaaaacugaagaaaaugcugggccccucugcuguagagauagggaauggaugcuucgaaaccaaacacaagugcaaccagaccugccucgacagaauagcugcuggcaccuuuaaugcaggagaauuuucucuccccaccuuugauucacuaaauauuacugcugcaucuuuaaaugacgauggauuggauaaucauacuauacugcuuuacuacucaacugcugcuuccaguuuggcuguaacauugaugauagcuaucuuuguuguuuauauggucuccagagacaauguuucuuguuccaucugucuauaa

SEQ ID NO: 58507 - RNA, 1758 nt, Artificial Sequence
  derived and/or modified CDS sequence (wt) from hemagglutinin__InfluenzaB__ABN50602
augaaggcaauaauuguacuacucaugguaguaacauccaaugcagaccgaaucugcacugggauaacaucgucaaacucaccccauguggucaaaacugcuacucaaggggaagucaaugugacugguguaauaccacugacaacaacacccaccaaaucucauuuugcaaaucucaaaggaacaaaaaccagagggaaacuaugcccaaagugucucaacugcacagaucuggacguggccuugggcagaccaaagugcauggggaccauaccuucggcaaaagcuucaauacuccacgaagucaaaccuguuacaucugggugcuuuccuauaaugcacgacagaacaaaaauuagacagcuacccaaucuucucagaggauacgaaaauaucagguuaucaacccacaacguuaucaacgcagaaacggcaccaggaggacccuacaaaauuggaaccucaggaucuugcccuaacauuaccaauggaaacggauucuucgcaacaauggcuugggcugucccaaaaaacgacaacaacaaaacagcaacaaauccauuaacaguagaaguaccauacauuuguacagaaggagaagaccaaauuacuguuuggggguuccacucugauaacgaaacccaaaugguaaaacucuauggagacucaaagccucagaaguucaccucaucugccaacggagugaccgcacauuacguuucacagauugguggcuucccaaaucaagcagaagacggagggcuaccacaaagcgguagaauuguuguugauuacauggugcagaaaucuggaaaaacaggaacaauuaccuaccaaagagguauuuuauugccucaaaaaguguggugcgcaaguggcaggagcaagguaauaaaaggguccuugccuuuaauuggcgaagcagauugccuccacgaaaaauacgguggauuaaacaaaagcaagccuuacuacacaggggagcaugcaaaagccauaggaaauugcccaauaugggugaaaacacccuugaagcuggccaauggaaccaaauauagaccuccugcaaaacuauuaaaggaaagggguuucuucggagcuauugcugguuucuuggaaggaggaugggaaggaaugauugcagguuggcacggauacacaucccauggagcacauggaguagcaguggcagcagaccuuaaaaguacgcaagaagccauaaacaagauaacaaaaaaccucaauucuuugagugagcuagaaguaaagaaucuucaaagacuaagcggugccauggaugaacuccacaacgaaauacucgaacuggaugagaaaguggaugaucucagagcugauacaauaagcucgcaaauagagcuugcagucuugcuuuccaacgaaggaauaauaaacagugaagaugagcaucucuuggcgcuugaaagaaaacugaagaaaaugcugggccccucugcuguagacauagggaauggaugcuucgaaaccaaacacaagugcaaccagaccugccucgacagaauagcugcuggcaccuuuaaugcaggagaguuuucucuucccaccuuugauucacuaaauauuacugcugcaucuuuaaaugaugauggguuggauaaucauacuauacugcuuuacuacucaacugcugcuuccaguuuggcuguaacauugaugauagcuaucuuuauuguuuauauggucuccagagacaauguuucuugcuccaucugucuauaa

SEQ ID NO: 58508 - RNA, 1752 nt, Artificial Sequence
  derived and/or modified CDS sequence (wt) from hemagglutinin__InfluenzaB__ABN50624
augaaggcaauaauuguacuacucaugguaguaacauccaacgcagaucgaaucugcacugggauaacaucuucaaacucaccucauguggucaaaacagcuacucaaggggaagucaaugugacuggugugauaccacugacaacaacaccaacaaaaucucauuuugcaaaucucaaaggaacaaagaccagagggaaacuaugcccaaacugucucaacugcacagaucuggauguggccuugggcagaccaauguguauagggaccauaccuucggcaaaagcuucaauacuccacgaagucagaccuguuacauccgggugcuuuccuauaaugcacgacagaacaaaaaucagacaacuacccaaucuucucagaggauaugaaaauaucagauuaucaacccauaacguuaucaacgcagaaagggcaccaggaggacccuacagacuuggaaccucaggaucuugcccuaacguuaccaguaaaagcggauucuucgcaacaauggcuugggcugucccaagggacaacaaaacagcaacgaacccacuaacaguagaaguaccauacauuuguacaaaaggagaagaccaaauuacuguuuggggguuccauucugauaacaaaaaccaaaugaaaaaccucuauggagacucaaauccucaaaaguucaccucaucugucaauggaguaaccacacauuauguuucucagauugguggcuucccaaaucaaacagaagacggagggcuaccacaaagcggcagaauuguuguugauuacauggugcaaaaaccugggaaaacaggaacaauugucuaucaaagagguguuuuguugccucaaaagguguggugugcaaguggcaggagcaagguaauaaaaggguccuugccuuuaauuggugaagcagauugccuucacgaaaaauacgguggauuaaacaaaagcaagccuuacuacacaggagaacaugcaaaagccauaggaaauugcccaauaugggugaaaacaccuuugaagcuugccaauggaaccaaauauagaccucccgcaaaacuauuaaaggaaagggguuucuucggagcuauugcugguuucuuagaaggaggaugggaaggaaugauugcagguuggcacggauacacaucucauggagcacaugggguggcaguggcagcagaccuuaagaguacgcaagaagccauaaacaagauaacaaaaaaucucaauucuuugagugagcuagaaguaaagaaucuucaaagacuaaguggugccauggaugaacuccacaacgaaauacucgagcuggaugagaaaguggaugaucucagagcugacacaauaagcucgcaaauagagcuugcagucuugcuuuccaaugaaggaauaauaaacagugaagaugagcaucuauuggcacuugagagaaaacuaaagaaaaugcugggucccucugcuguagacauagggaauggaugcuucgaaaccaaacacaagugcaaccagaccugcuuagacaggauagcugcuggcaccuuuaaugcaggagaauuuucucuucccacuuuugauucacugaauauuacugcugcaucuuuaaaugaugauggauuggauaaucauacuauacugcucuacuacucaacugcugcuucuaguuuggcuguaacauugaugauagcuauuuuuauuguuuauauggucuccagagacaauguuucuugcuccaucugucuauag

SEQ ID NO: 58509 - RNA, 1752 nt, Artificial Sequence
  derived and/or modified CDS sequence (wt) from hemagglutinin__InfluenzaB__ABN50635
augaaggcaauaauuguacuacucaugguaguaacauccaacgcagaucgaaucugcacugggauaacaucuucaaacucaccucauguggucaaaacagcuacucaaggggaagucaaugugacuggugugauaccacugacaacaacaccaacaaaaucucauuuugcaaaucucaaaggaacaaagaccagagggaaacuaugcccaaacugucucaacugcacagaucuggauguggccuugggcagaccaauguguauagggaccauaccuucggcaaaagcuucaauacuccacgaagucagaccuguuacauccgggugcuuuccuauaaugcacgacagaacaaaaaucagacagcuacccaaucuucucagaggauaugaacauaucagauuaucaacccauaacguuaucaacgcagaaagggcaccaggaggacccuacagacuuggaaccucaggaucuugcccuaacguuaccaguagaagcggauucuucgcaacaauggcuugggcugucccaagggacaacaaaacagcaacgaacccacuaacaguagaaguaccauacauuuguacaaaaggagaagaccaaauuacuguuuggggguuccauucugauagcaaaacucaaaugaaaaaccucuauggagacucaaauccucaaaaguucaccucaucugccaauggaguaaccacacauuauguuucucagauugguggcuucccaaaucaaacagaagacggagggcuaccacaaagcggcagaauuguuguugauuacauggugcaaaaaccugggaaaacaggaacaauugucuaucaaagagguguuuuguugccucaaaagguguggugugcaaguggcaggagcaagguaauaaaaggguccuugccuuuaauuggugaagcagauugccuucacgaaaaauacgguggauuaaacaaaagcaagccuuacuacacaggagaacaugcaaaagccauaggaaauugcccaauaugggugaaaacaccuuugaagcuugccaauggaaccaaauauagaccucccgcaaaacuauuaaaggaaagggguuucuucggagcuauugcugguuucuuagaaggaggaugggaaggaaugauugcagguuggcacggauacacaucucauggagcacaugggguggcaguggcagcagaccuuaagaguacgcaagaagccauaaacaagauaacaaaaaaucucaauucuuugagugagcuagaaguaaagaaucuucaaagacuaaguggugccauggaugaacuccacaacgaaauacucgagcuggaugagaaaguggaugaccucagagcugacacaauaagcucgcaaauagagcuugcagucuugcuuuccaaugaaggaauaauaaacagugaagaugagcaucuauuggcacuugagagaaaacuaaagaaaaugcugggucccucugcuguagacauagggaauggaugcuucgaaaccaaacacaagugcaaccagaccugcuuagacaggauagcugcuggcaccuuuaaugcaggagaauuuucucuucccacuuuugauucacugaauauuacugcugcaucuuuaaaugaugauggauuggauaaucauacuauacugcucuacuacucaacugcugcuucuaguuuggcuguaacauugaugauagcuauuuuuauuguuuauauggucuccagagacaauguuucuugcuccaucugucuauag

SEQ ID NO: 58510 - RNA, 1752 nt, Artificial Sequence
  derived and/or modified CDS sequence (wt) from hemagglutinin__InfluenzaB__ABN50646
augaaggcaauaauuguacuacucaugguaguaacauccaacgcagaucgaaucugcacugggauaacaucuucaaacucaccucauguggucaaaacagcuacucaaggggaagucaaugugacuggugugauaccacugacaacaacaccaacaaaaucucauuuugcaaaucucaaaggaacaaagaccagagggaaacuaugcccaaacugucucaacuguacagaucuggauguggccuugggcagaccaauguguauagggaccauaccuucagcaaaagcuucaauacuccacgaagucagaccuguuacauccgggugcuuuccuauaaugcacgacagaacaaaaaucagacagcuacccaaucuucucagaggauaugaacauaucagauuaucaacccauaacguuaucaacgcagaaagggcaccaggaggacccuacagacuuggaaccucaggaucuugcccuaacguuaccaguagaagcggauucuucgcaacaauggcuugggcugucccaagggacaacaaaacagcaacgaacccacuaacaguagaaguaccauacauuuguacaaaaggagaagaccaaauuacuguuuggggguuccauucugauaacaaaaaccaaaugaaaaaccucuauggagacucaaauccucaaaaguucaccucaucugccaauggaguaaccacacauuauguuucucagauugguggcuucccaaaucaaacagaagacggagggcuaccacaaagcggcagaauuguuguugauuacauggugcaaaaaccugggaaaacaggaacaauugucuaucaaagagguguuuuguugccucaaaagguguggugugcaaguggcaggagcaagguaauaaaaggguccuugccuuuaauuggugaagcagauugccuucacgaaaaauacgguggauuaaacaaaagcaagccuuacuacacaggagaacaugcaaaagccauaggaaauugcccaauaugggugaaaacaccuuugaagcuugccaauggaaccaaauauagaccucccgcaaaacuauuaaaggaaagggguuucuucggagcuauugcugguuucuuagaaggaggaugggaaggaaugauugcagguuggcacggauacacaucucauggagcacaugggguggcaguggcagcagaccuuaagaguacgcaagaagccauaaacaagauaacaaaaaaucucaauucuuugagugagcuagaaguaaagaaucuccaaagacuaaguggugccauggaugaacuccacaacgaaauacucgagcuggaugagaaaguggaugaucucagagcugacacaauaagcucgcaaauagagcuugcagucuugcuuuccaaugaaggaauaauaaacagugaagaugagcaucuauuagcacuugaaagaaaacuaaagaaaaugcugggucccucugcuguagacauagggaauggaugcuucgaaaccaaacacaagugcaaccagaccugcuuagacagaauagcugcuggcaccuuuaaugcaggagaauuuucucuucccacuuuugauucacugaauauuacugcugcaucuuuaaaugaugauggauuggauaaucauacuauacugcucuacuacucaacugcugcuucuaguuuggcuguaacauugaugauagcuauuuuuauuguuuauauggucuccagagacaauguuucuuguuccaucugucuauag

SEQ ID NO: 58511 - RNA, 1752 nt, Artificial Sequence
  derived and/or modified CDS sequence (wt) from hemagglutinin__InfluenzaB__ABN50657
augaaggcaauaauuguacuacucaugguaguaacauccaaugcagaucgaaucugcacugggauaacaucuucaaacucaccucauguagucaaaacagcuacucaaggagaggucaaugugacuggugugauaccacugacgacaacaccaacaaaaucucauuuugcaaaucucaaaggaacaaagaccagagggaaacuaugcccaaacugucucaacugcacagaucuggauguggccuugggcagaccaauguguguggggaucacaccuucggcaaaagcuucaauacuccacgaagucagaccuguuacaucugggugcuuuccuauaaugcaugacagaacaaaaaucagacagcuacccaaucuucucagaggauaugaaaacaucagacuaucaacccaaaacguuaucaacgcagaaaaggcaccaggaggacccuacagacuuggaaccucaggaucuugcccuaacguuaccaguagaaccggauucuucgcaacaauggcuugggcugucccaagggacaacaaaacagcaacgaauccacuaacaguagaaguaccauacauuuguacgaaaggagaagaccaaauuacuguuuggggguuccauucugauaacaaaacccaaaugaaaaaccucuauggagauucaaauccucaaaaguucaccucaucugccaauggaguaaccacacauuauguuucucagauugguggcuucccagaucaaacagaagacggaggacuaccacaaagcggcagaauuguuguugauuacauggugcaaaaaccugggaaaacaggaacaauugucuaucaaagagguauuuuguugccucaaaagguguggugcgcaaguggcaggagcaagguaauaaaaggguccuugccuuuaauuggugaagcagauugccuucacgaaaaauacgguggauuaaacaaaagcaagccuuacuacacaggagaacaugcaaaagccauaggaaauugcccaauaugggugaaaacaccuuugaagcuugccaauggaaccaaauauagaccuccugcaaaacuauuaaaggaaagggguuucuucggagcuauugcugguuucuuagaaggaggaugggaaggaaugauugcagguuggcacggauacacaucucacggggcacauggaguggcaguggcagcagaccuuaagaguacgcaagaagccauaaacaagauaacaaaaaaucucaauucuuugagugagcuagaaguaaagaaccuucaaagacuaaguggugccauggaugaacuccacaacgaaauacucgagcuggaugagaaaguggaugaucucagagcugacacaauaagcucgcaaauagagcuugcagucuuacuuuccaacgaaggaauaauaaacagugaagaugagcaucuauuggcacuugagagaaaacuaaagaaaaugcugggucccucugcuguagacauagggaauggaugcuucgaaaccaaacacaagugcaaccagaccugcuuagacaggauagcugcuggcaccuucaaugcaggagaauuuucucuucccacuuuugauucacugaauauuacugcugcaucuuuaaaugaugauggauuggauaaucauacuauacugcucuacuacucaacugcugcuucuaguuuggcuguaacauugaugauagcuauuuuuauuguuuauauggucuccagagacaauguuucuugcuccaucugucuauaa

SEQ ID NO: 58512 - RNA, 1755 nt, Artificial Sequence
  derived and/or modified CDS sequence (wt) from hemagglutinin__InfluenzaB__ABN50679
augaaggcaauaauuguacuacucaugguaguaacauccaaugcagaucgaaucugcacugggauaacaucuucaaacucaccucauguggucaaaacagcuacucaaggggaggucaaugugacuggugugauaccacugacaacaacaccaacaaaaucucauuuugcaaaucucaaaggaacaaagaccagagggaaacuaugcccaaacugucucaacugcacagaucuggauguggccuugggcagaccaauguguguggggaccacaccuucggcaaaagcuucaauacuccacgaagucagaccuguuacauccgggugcuuuccuauaaugcacgacagaacaaaaaucagacagcuacccaaucuucucagaggauaugaaaauaucagauuaucaacccaaaacguuaucaacgcagaaaaggcaccaggaggacccuacagacuuggaaccucaggaucuugcccuaacgcuaccaguagaagcggauuuuucgcaacaauggcuugggcugucccaagggacaacaacaaaacagcaacgaacccacuaacaguagaaguaccauacauuugcacaaaaggagaagaccaaauuacuguuuggggguuccauucugaugacaaaacccaaaugaaaaaccucuauggagacucaaauccucaaaaguuuaccucaucugcuaauggaguaaccacacauuauguuucucagauuggcggcuucccagaucaaacagaagacggagggcuaccacaaagcggcagaauuguuguugauuacauggugcaaaaaccugggaagacaggaacaauugucuaucagagagguguuuugcugccucaaaagguguggugcgcuaguggcaggagcaaaguaauaaaaggguccuugccuuuaauuggugaagcagauugccuucacgaaaaauacgguggauuaaacaaaagcaagccuuacuacacaggagaacaugcaaaagccauaggaaauugcccaauaugggugaaaacaccuuugaagcuugccaauggaaccaaauauagaccuccugcaaaacuauuaaaggaaagggguuucuucggagcuauugcugguuucuuagaaggaggaugggaaggaaugauugcagguuggcacggauacacaucucacggagcacauggaguggcaguggcagcagaccuuaagagcacgcaagaagccauaaacaagauaacaaaaaaucucaauucuuugagugagcuagaaguaaagaaucuucaaagacuaaguggugccauggaugaacuccacaacgaaauacucgagcuggaugagaaaguggaugaucucagagcugauacaauaagcucgcaaauagaacuugcagucuugcuuuccaacgaaggaauaauaaacagugaagaugagcaucuauuggcacuugagagaaaacuaaagaaaaugcugggucccucugcuguagacauagggaauggaugcuucgaaaccaaacacaagugcaaccagaccugcuuagacaggauagcugcuggcaccuuuaaugcaggagaauuuucucuucccacuuuugauucacugaauauuacugcugcaucuuuaaaugaugauggauuggauaaccauacuauacugcucuacuacucaacugcugcuucuaguuuggcgguaacauugaugauagcuauuuuuauuguuuauauggucuccagagacaauguuucuugcuccaucugucuauaa

SEQ ID NO: 58513 - RNA, 1755 nt, Artificial Sequence
  derived and/or modified CDS sequence (wt) from hemagglutinin__InfluenzaB__ABN50690
augaaggcaauaauuguacuacucaugguaguaacauccaaugcagaucgaaucugcacugggauaacaucuucaaacucaccucauguggucaaaacagcuacucaaggggaggucaaugugacuggugugauaccacugacaacaacaccaacaaaaucucauuuugcaaaucucaaaggaacaaagaccagagggaaacuaugcccaaacugucucaacugcacagaucuggauguggccuugggcagaccaauguguguggggaccacaccuucggcaaaagcuucaauacuccacgaagucagaccuguuacauccgggugcuuuccuauaaugcacgacagaacaaaaaucagacagcuacccaaucuucucagaggauaugaaaauaucagauuaucaacccaaaacguuaucaaugcagaaaaggcaccaggaggacccuacagacuuggaaccucaggaucuugcccuaacgcuaccaguagaagcggauuuuucgcaacaauggcuugggcugucccaagggacaacaacaaaacagcaacgaauccacuaacaguagaaguaccauacguuuguacagaaggagaagaccaaauuacuguuuggggguuccauucugauaacaaaacccaaaugaaaaaccucuauggagacucaaauccucaaaaguucaccucaucugcuaauggaguaaccacacauuauguuucucagauuggcggcuucccagaucaaacagaagacggagggcuaccacaaagcggcagaauuguuguugauuacauggugcaaaaaccugggaaaacaggaacaauugucuaucaaagagguguuuuguugccucaaaagguguggugcgcgaguggcaggagcaaaguaauaaaaggguccuugccuuuaauuggugaagcagauugccuucacgaaaaauacgguggauuaaacaaaagcaagccuuacuacacaggagaacaugcaaaagccauaggaaauugcccaauaugggugaaaacaccuuugaagcuugccaauggaaccaaauauagaccuccugcaaaacuauuaaaggaaagggguuucuucggagcuauugcugguuucuuagaaggaggaugggaaggaaugauugcagguuggcacggauacacaucucacggagcacauggaguggcaguggcagcagaccuuaagaguacgcaagaagccauaaacaagauaacaaaaaaucucaauucuuugagugagcuagaaguaaagaaucuucaaagacuaaguggugccauggaugaacuccacaacgaaauacucgagcuggaugagaaaguggaugaucucagagcugacacuauaagcucgcaaauagaacuugcagucuugcuuuccaacgaaggaauaauaaacagugaagaugagcaucuauuggcacuugagagaaaacuaaagaaaaugcugggucccucugcuguagacauagggaauggaugcuucgaaaccaaacacaagugcaaccagaccugcuuagacaggauagcugcuggcaccuuuaaugcaggagaauuuucucuccccacuuuugauucacugaauauuacugcugcaucuuuaaaugaugauggauuggauaaccauacuauacugcuuuacuacucaacugcugcuucuaguuuggcuguaacauugaugauagcuauuuuuauuguuuauauggucuccagagacaauguuucaugcuccaucugucuauaa

SEQ ID NO: 58514 - RNA, 1752 nt, Artificial Sequence
  derived and/or modified CDS sequence (wt) from hemagglutinin__InfluenzaB__ABN50701
augaaggcaauaauuguacuacucaugguaguaacauccaaugcagaucgaaucugcacugggauaacaucuucaaacucaccucauguagucaaaacagcuacucaaggggaggucaaugugacuggugugauaccacugacgacaacaccaacaaaaucucauuuugcaaaucucaaaggaacaaagaccagagggaaacuaugcccaaacugucucaacugcacagaucuggauguggccuugggcagaccaauguguguggggaucacaccuucggcaaaagcuucaauacuccacgaagucagaccuguuacauccgggugcuuuccuauaaugcaugacagaacaaaaaucagacagcuacccaaucuucucagaggauaugaaaacaucagacuaucaacccaaaacguuaucaacgcagaaaaggcaccaggaggacccuacagacuuggaaccucaggaucuugcccuaacguuaccaguagaaccggauucuucgcaacaauggcuugggcugucccaagggacaacaaaacagcaacgaauccacuaacaguagaaguaccauacauuuguacgaaaggagaagaccaaauuacuguuuggggguuccauucugauaacaaagcccaaaugaaaaaccucuauggagacucaaauccucaaaaguucaccucaucugccaauggaguaaccacacauuauguuucucagauugguggcuucccagaucaaacagaagacggaggacuaccacaaagcggcagaauuguuguugauuacauggugcaaaaaccugggaaaacaggaacaauugucuaucaaagagguauuuuguugccucaaaagguguggugcgcaaguggcaggagcaagguaauaaaaggguccuugccuuuaauuggugaagcagauugccuucacgaaaaauacgguggauuaaacaaaagcaagccuuacuacacaggagaacaugcaaaagccauaggaaauugcccaauaugggugaaaacaccuuugaagcuugccaauggaaccaaauauagaccuccugcaaaacuauuaaaggaaagggguuucuucggagcuauugcugguuucuuagaaggaggaugggaaggaaugauugcagguuggcacggauacacaucucacggggcacauggaguggcaguggcagcagaccuuaagaguacgcaagaagccauaaacaagauaacaaaaaaucucaauucuuugagugagcuagaaguaaagaaccuucaaagacuaaguggugccauggaugaacuccacaaugaaauacucgagcuggaugagaaaguggaugaucucagagcugacacaauaagcucgcaaauagagcuugcagucuuacuuuccaacgaaggaauaauaaacagugaagaugagcaucuauuggcacuugagagaaaacuaaagaaaaugcugggucccucugcuguagacauagggaauggaugcuucgaaacaaaacacaagugcaaccagaccugcuuagacaggauagcugcuggcaccuuuaaugcaggagaauuuucucuucccacuuuugauucacugaauauuacugcugcaucuuuaaaugaugauggauuggauaaucauacuauacugcucuacuacucaacugcugcuucuaguuuggcuguaacauugaugauagcuauuuuuauuguuuauauggucuccagagacaauguuucuugcuccaucugucuauaa

SEQ ID NO: 58515 - RNA, 1755 nt, Artificial Sequence
  derived and/or modified CDS sequence (wt) from hemagglutinin__InfluenzaB__ABN50712
augaaggcaauaauuguacuacucaugguaguaacauccaaugcagaucgaaucugcacugggauaacaucuucaaacucaccucauguggucaaaacagcuacucaaggggaggucaaugugacuggugugauaccacugacaacaacaccaacaaaaucucauuuugcaaaucucaaaggaacaaagaccagagggaaacuaugcccaaacugucucaacugcacagaucuggauguggccuugggcagaccaauguguguggggaccacaccuucggcaaaagcuucaauacuccacgaagucagaccuguuacauccgggugcuuuccuauaaugcacgacagaacaaaaaucagacagcuacccaaucuucucagaggauaugaaaauaucagauuaucaacccaaaacguuaucaaugcagaaaaggcaccaggaggacccuacagacuuggaaccucaggaucuugcccuaacgcuaccaguagaagcggauuuuucgcaacaauggcuugggcugucccaagggacaacaacaaaacagcaacgaauccacuaacaguagaaguaccauacguuuguacagaaggagaagaccaaauuacuguuuggggguuccauucugauaacaaaacccaaaugaaaaaccucuauggagacucaaauccucaaaaguucaccucaucugcuaauggaguaaccacacauuauguuucucagauuggcggcuucccagaucaaacagaagacggagggcuaccacaaagcggcagaauuguuguugauuacauggugcaaaaaccugggaaaacaggaacaauugucuaucaaagagguguuuuguugccucaaaagguguggugcgcgaguggcaggagcaaaguaauaaaaggguccuugccuuuaauuggugaagcagauugccuucacgaaaaauacgguggauuaaacaaaagcaagccuuacuacacaggagaacaugcaaaagccauaggaaauugcccaauaugggugaaaacaccuuugaagcuugccaauggaaccaaauauagaccuccugcaaaacuauuaaaggaaagggguuucuucggagcuauugcugguuucuuagaaggaggaugggaaggaaugauugcagguuggcacggauacacaucucacggagcacauggaguggcaguggcagcagaccuuaagaguacgcaagaagccauaaacaagauaacaaaaaaucucaauucuuugagugagcuagaaguaaagaaucuucaaagacuaaguggugccauggaugaacuccacaacgaaauacucgagcuggaugagaaaguggaugaucucagagcugacacuauaagcucgcaaauagaacuugcagucuugcuuuccaacgaaggaauaauaaacagugaagaugagcaucuauuggcacuugagagaaaacuaaagaaaaugcugggucccucugcuguagacauagggaauggaugcuucgaaaccaaacacaagugcaaccagaccugcuuagacaggauagcugcuggcaccuuuaaugcaggagaauuuucucuccccacuuuugauucacugaauauuacugcugcaucuuuaaaugaugauggauuggauaaccauacuauacugcucuacuacucaacugcugcuucuaguuuggcuguaacauugaugauagcuauuuuuauuguuuauauggucuccagagacaauguuucaugcuccaucugucuauaa

SEQ ID NO: 58516 - RNA, 1755 nt, Artificial Sequence
  derived and/or modified CDS sequence (wt) from hemagglutinin__InfluenzaB__ABN50723
augaaggcaauaauuguacuacucaugguaguaacauccaaugcagaucgaaucugcacugggauaacaucgucaaacucaccucauguggucaaaacagcuacucaaggggaggucaaugugacuggugugauaccacugacaacaacaccaacaaaaucucauuuugcaaaucucagaggaacaaagaccagagggaaacuaugcccaaccugucucaacugcacagaucuggauguggccuugggcagaccaauguguguggggaccacaccuucggcaaaagcuucaauacuccacgaagucagaccuguuacauccggaugcuuuccuauaaugcacgacagaacaaaaaucagacagcuacccaaucuucucagaggauaugaaaaaaucagauuaucaacccaaaacguuaucaacgcagaaaaggcaccaggaggacccuacagacuuggaaccucaggaucuugcccuaacgcuaccaguagaagcggauuuuucgcaacaauggcuugggcugucccaagggacaacaacaaaacagcaacgaauccacuaacaguagaaguaccauacaucuguacaaaagaagaagaccaaauuacuguuuggggguuccauucugauaacaaaacccaaaugaaaaaccucuauggagacucaaauccucaaaaguucaccucaucugcuaauggaguaaccacacauuauguuucucagauuggcggcuucccggaucaaacagaagacggagggcuaccacaaagcggcagaauuguuguugauuacauggugcaaaaaccugggaaaacaggaacaauugucuaucaaagagguauuuuguugccucaaaagguguggugcgcgaguggcaggagcaaaguaauaaaaggguccuugccuuuaauuggugaagcagauugccuucacgaaaaauacgguggauuaaacaaaagcaagccuuacuacacaggagaacaugcaaaagccauaggaaauugcccaauaugggugaaaacaccuuugaagcuugccaauggaaccaaauauagaccuccugcaaaacuauuaaaggaaagggguuucuucggagcuauugcugguuucuuagaaggaggaugggaaggaaugauugcagguuggcacggauacacaucucacggagcacauggaguggcaguggcagcagaccuuaagaguacgcaagaagccauaaacaagauaacaaaaaaucucaauucuuugagugagcuagaaguaaagaaucuucaaagacuaaguggugccauggaugaacuccacaacgaaauacucgagcuggaugagaaaguggaugaucucagagcugacacaauaagcucacaaauagaacuugcagucuugcuuuccaacgaaggaauaauaaacagugaagaugagcaucuauuggcacuugagagaaaacuaaagaaaaugcugggucccucugcuguagacauagggaauggaugcuucgaaaccaaacacaagugcaaccagaccugcuuagacaggauagcugcuggcaccuuuaaugcaggagaauuuucucuucccacuuuugauucacugaauauuacugcugcaucuuuaaaugaugauggauuggauaaccauacuauacugcucuacuacucaacugcugcuucuaguuuggcuguaacauugaugauagcuauuuuuauuguuuauaugaucuccagagacaauguuucuugcuccaucugucuauaa

SEQ ID NO: 58517 - RNA, 1755 nt, Artificial Sequence
  derived and/or modified CDS sequence (wt) from hemagglutinin__InfluenzaB__ABN50734
augaaggcaauaauuguacuacucaugguaguaacauccaaugcagaucgaaucugcacugggauaacaucgucaaacucaccucauguggucaaaacagcuacucaaggggaggucaaugugacuggugcgauaccacugacaacaacaccaacaaaaucucauuuugcaaaucucaaaggaacaaagaccagagggaaacuaugcccaaccugucucaacugcacagaucuggauguggccuugggcagaccaauguguguggggaucacaccuucggcaaaagcuucaauacuccacgaagucagaccuguuacauccggaugcuuuccuauaaugcacgacagaacaaaaaucagacagcuacccaaucuucucagaggauaugaaaaaaucagauuaucaacccaaaacguuaucaacgcagaaaaggcaccaggaggacccuacagacuuggaacuucaggaucuugcccuaacgcuaccaguagaagcggauuuuucacaacaauggcuugggcugucccaagggacaacaacaaaacagcaacgaauccacuaacaguagaaguaccacacaucuguacaaaagaagaagaccaaauuacuguuuggggguuccauucugaugacaaaacccaaaugaaaaaccucuauggagacucaaauccucaaaaguucaccucaucuacuaauggaauaaccacacauuauguuucucagauuggcggcuucccggaccaaacagaagacggagggcuaccacaaagcggcagaauuguuguugauuacauggugcaaaaaccugggaaaacaggaacaauugucuaucaaagagggauuuuguugccucaaaagguguggugcgcgaguggcaggagcaaaguaauaaaaggguccuugccuuuaauuggugaagcagauugccuucacgaaaaauacgguggauuaaacaaaagcaagccuuacuacacaggagaacaugcaaaagccauaggaaauugcccaauaugggugaaaacaccuuugaagcuugccaauggaaccaaauauagaccuccugcaaaacuauuaaaggaaagggguuucuucggagcuauugcugguuucuuagaaggaggaugggaaggaaugauugcagguuggcacggauacacaucucacggagcacauggaguggcaguggcagcagaccuuaagaguacgcaagaagccauaaacaagauaacaaaaaaucucaauucuuugagugagcuagaaguaaagaaccuucaaagacuaaguggugccauggaugaacuccauaacgaaauacucgagcuggaugagaaaguggaugaucucagagcugacacaauaagcucacaaauagaacuugcaguuuugcuuuccaacgaaggaauaauaaacagugaagaugagcaucuauuggcacuugagagaaaacuaaagaaaaugcugggucccucugcuguagacauagggaauggaugcuucgaaaccaaacacaagugcaaccagaccugcuuagacaggauagcugcuggcaccuuuaaugcaggagaauuuucucuucccacuuuugauucacugaacauuacugcugcaucuuuaaaugaugauggauuggauaaccauacuauacugcucuacuacucaacugcugcuucuaguuuggcuguaacauugaugauagcuauuuuuauuguuuauaugaucuccagagacaauguuucuugcuccaucugucuauaa

SEQ ID NO: 58518 - RNA, 1758 nt, Artificial Sequence
  derived and/or modified CDS sequence (wt) from hemagglutinin__InfluenzaB__ABN50745
augaaggcaauaauuguacuacucaugguaguaacauccaaugcagaucgaaucugcacugggauaacaucgucaaacucaccccauguggucaaaacugcuacucaaggggaggucaaugugacuggugugauaccacugacaacaacacccaccaaaucucauuuugcaaaucucaaaggaacaaaaaccagagggaaacuaugcccaaaaugccucaacugcacagaucuggacguggccuugggcagaccaaaaugcacggggaacauacccucggcaaaaguuucaauacuccaugaagucagaccuguuacaucugggugcuuuccuauaaugcacgacagaacaaaaauuagacagcugcccaaucuucucagaggauacgaacauaucagguuaucaacucauaacguuaucaaugcagaaaaggcaccaggaggacccuacaaaauuggaaccucagggucuugcccuaacauuaccaauggaaacggauuuuucgcaacaauggcuugggccgucccaaaaaacgacaacaacaaaacagcaacaaauucauuaacaauagaaguaccauacauuuguacagaaggagaagaccaaauuacuguuuggggguuccacucugauaacgaaacccaaauggcaaaacucuauggggacucaaagccccagaaguucaccucaucugccaacggagugaccacacauuacguuucacagauugguggcuucccaaaucaaacagaagacggaggacuaccacaaagugguagaauuguuguugauuacauggugcaaaaaucugggaaaacaggaacaauuaccuaucaaagagguauuuuauugccucaaaaaguguggugcgcaaguggcaggagcaagguaauaaaaggauccuugccuuuaauuggagaagcagauugccuccacgaaaaauacgguggauuaaacaaaagcaagccuuacuacacaggggaacaugcaaaggccauaggaaauugcccaauaugggugaaaacacccuugaagcuggccaauggaaccaaauauagaccuccugcaaagcuauuaaaggaaagggguuucuucggagcuauugcugguuucuuagaaggaggaugggaaggaaugauugcagguuggcacggauacacaucccauggggcacauggaguagcaguggcagcagaccuuaagaguacucaagaagccauaaacaagauaacaaaaaaucucaacucuuugagugagcuggaaguaaagaaucuucaaagacuaagcggugccauggaugaacuccacaacgaaauacuagaacuagacgagaaaguggaugaucucagagcugauacaauaagcucacaaauagaacucgcagucuugcuuuccaaugaaggaauaauaaacagugaagaugagcaucucuuggcgcuugaaagaaagcugaagaaaaugcugggccccucugcuguagagauagggaauggaugcuucgaaaccaaacacaagugcaaccaaaccugucucgacagaauagcugcugguaccuuuaaugcaggagaauuuucucuccccacuuuugauucacugaauauuacugcugcaucuuuaaaugacgauggauuggauaaucauacuauacugcuuuacuacucaacugcugccuccaguuuggcuguaacauugaugauagcuaucuuuguuguuuauauggucuccagagacaauguuucuugcuccaucugucuauaa

SEQ ID NO: 58519 - RNA, 1752 nt, Artificial Sequence
  derived and/or modified CDS sequence (wt) from hemagglutinin__InfluenzaB__ABN51184
augaaggcaauaauuguacuacucaugguaguaacauccaacgcagaucgaaucugcacugggauaacaucuucaaacucaccucauguggucaaaacagcuacucaaggggaagucaaugugacuggugugauaccacugacaacaacaccaacaaaaucucauuuugcaaaucucaaaggaacaaagaccagagggaaacuaugcccaaacugucucaacugcacagaucuggauguggccuugggcagaccaauguguauagggaccauaccuucggcaaaagcuucaauacuccacgaagucaggccuguuacauccgggugcuuuccuauaaugcacgacagaacaaaaaucagacagcuacccaaucuucucagaggauaugaaaauaucagauuaucaacccauaacguuaucaacgcagaaagggcaccaggaggacccuacagacuuggaaccucaggaucuugcccuaacguuaccaguaaaagcggauucuucgcaacaauggcuugggcugucccaagggacaacaaaacagcaacgaacccacuaacaguagaaguaccauacauuuguacaaaaggagaagaccaaauuacuguuuggggguuccauucugauaacaaaauccaaaugaaaaaccucuauggagacucaaauccucaaaaauucacuucaucugccaauggaguaaccacacauuauguuucucagauugguggcuucccaaaucaaacagaggacggagggcuaccacaaagcggcagaauuguuguugauuacauggugcaaaaaccugggaaaacaggaacaauugucuaucaaagagguguuuuguuaccucaaaagguguggugugcaaguggcaggagcaagguaauaaaaggguccuugccuuuaauuggugaagcagauugccuucacgaaaaauacgguggauuaaacaaaagcaagccuuacuacacaggagaacaugcaaaagccauaggaaauugcccaauaugggugaaaacaccuuugaagcuugccaauggaaccaaauauagaccucccgcaaaacuauuaaaggaaagggguuucuucggagcuauugcugguuucuuagaaggaggaugggaaggaaugauugcagguuggcacggauacacaucucauggagcacaugggguggcaguggcagcagaccuuaagaguacgcaagaagccauaaacaagauaacaaaaaaucucaauucuuugagugagcuagaaguaaagaaucuucaaagacuaaguggugccauggaugaacuccacaacgaaauacucgagcuggaugagaaaguggaugaucucagagcugacacaauaagcucgcaaauagagcuugcagucuugcuuuccaaugaaggaauaauaaacagugaagaugagcaucuauuggcacuugagagaaaacuaaagaaaaugcugggucccucugcuguagacauagggaauggaugcuucgaaaccaaacacaagugcaaccagaccugcuuagacaggauagcugcuggcaccuuuaaugcaggagaauuuucucuucccacuuuugauucacugaauauuacugcugcaucuuuaaaugaugauggauuggauaaucauacuauacugcucuacuacucaacugcugcuucuaguuuggcuguaacauugaugauagcuauuuuuauuguuuauauggucuccagagacaauguuucuugcuccaucugucuauag

SEQ ID NO: 58520 - RNA, 1752 nt, Artificial Sequence
  derived and/or modified CDS sequence (wt) from hemagglutinin__InfluenzaB__ABN51195
augaaggcaauaauuguacuacucaugguaguaacauccaacgcagaucgaaucugcacugggauaacaucuucaaacucaccucauguggucaaaacagcuacucaaggggaagucaaugugacuggugugauaccacugacaacaacaccaacaaaaucucauuuugcaaaucucaaaggaacaaagaccagagggaaacuaugcccaaacugucucaacugcacagaucuggauguggccuugggcagaccaauguguauagggaccauaccuucggcaaaagcuucaauacuccacgaagucaggccuguuacauccgggugcuuuccuauaaugcacgacagaacaaaaaucagacagcuacccaaucuucucagaggauaugaaaauaucagauuaucaacccauaacguuaucaacgcagaaagggcaccaggaggacccuacagacuuggaaccucaggaucuugcccuaacguuaccaguagaagcggauucuucgcaacaauggcuugggcugucccaagggacaacaaaacagcaacgaacccacuaacaguagaaguaccauacauuuguacaaaaggagaagaccaaauuacuguuuggggguuccauuuugauaacaaaauccaaaugaaaaaccucuauggagacucaaauccucaaaaauucaccucaucugccaauggaguaaccacacauuauguuucucagauugguggcuucccaaaucaaacagaagacggagggcuaccacaaagcggcagaauuguuguugauuacauggugcaaaaaccugggaaaacaggaacaauugucuaucaaagagguguuuuauuaccucaaaagguguggugugcaaguggcaggagcaagguaauaaaaggguccuugccuuuaauuggugaagcagauugccuucacgaaaaauacgguggauuaaacaaaagcaagccuuacuacacaggagaacaugcaaaagccauaggaaauugcccaauaugggugaaaacaccuuugaagcuugccaauggaaccaaauauagaccucccgcaaaacuauuaaaggaaagggguuucuucggagcuauugcugguuucuuagaaggaggaugggaaggaaugauugcagguuggcacggauacacaucucauggagcacaugggguggcaguggcagcagaccuuaagaguacgcaagaagccauaaacaagauaacaaaaaaucucaauucuuugagugagcuagaaguaaagaaucuucaaagacuaaguggugccauggaugaacuccacaacgaaauacucgagcuggaugagaaaguggaugaucucagagcugacacaauaagcucgcaaauagagcuugcagucuugcuuuccaaugaaggaauaauaaacagugaagaugagcaucuauuggcacuugagagaaaacuaaagaaaaugcugggucccucugcuguagacauagggaauggaugcuucgaaaccaaacacaagugcaaccagaccugcuuagacaggauagcugcuggcaccuuuaaugcaggagaauuuucucuucccacuuuugauucacugaauauuacugcugcaucuuuaaaugaugauggauuggauaaucauacuauacugcucuacuacucaacugcugcuucuaguuuggcuguaacauugaugauagcuauuuuuauuguuuauauggucuccagagacaauguuucuugcuccaucugucuauag

SEQ ID NO: 58521 - RNA, 1758 nt, Artificial Sequence
  derived and/or modified CDS sequence (wt) from hemagglutinin__InfluenzaB__ABN58661
augaaggcaauaauuguacuacucaugguaguaacauccaaugcagaucgaaucugcacugggauaacaucgucaaacucaccccauguggucaaaacugcuacucaaggggaagucaaugugacuggugugauaccacugacaacaacacccaccaaaucucauuuugcaaaucucaaaggaacaaaaaccagagggaaacuaugcccaaaaugucucaacugcacagaucuggacguggccuugggcagaccaaaaugcacggggaccauaccuucggcaaaaguuucaauacuccaugaagucaaaccuguuacaucugggugcuuuccuauaaugcacgacagaacaaaaauuagacagcugcccaaucuucucagaggauacgaacauaucagguuaucaacccauaacguuaucaacgcagaaaaggcaccaggaggacccuacaaaauuggaaccucagggucuugcccuaacguuaccaauggaaacggauucuucgcaacaauggcuugggcugucccaaaaaacgacaacaacaaaacagcaacaaauucauuaacaguagaaguaccauacauuuguacagaaggagaagaccaaauuaccguuuggggguuccacucugauaacgaaacccaaauggcaaaacucuauggagacucaaagccucagaaguucaccucaucugccaacggagugaccacacauuacguuucacagauugguggcuucccaaaucaagcagaagacggagggcuaccacaaagugguagaauuguuguugauuacauggugcaaaaaucuggaaaaacaggaacaauuaccuaucaaagagguauuuuauugccucaaaaaguguggugcgcaaguggcaggagcaagguaauaaaaggauccuugccuuuaauuggagaagcagauugccuccacgaaaaauaugguggauuaaacaaaagcaagccuuacuacacaggggaacaugcaaaagccauaggaaauugcccaauaugggugaaaacacccuugaagcuggccaauggaaccaaauauagaccuccugcaaaacuauuaaaggaaagggguuucuucggagcuauugcugguuucuuagaaggaggaugggaaggaaugauugcagguuggcacggauacacaucccauggagcacauggaguagcaguggcagcagaccuuaagaguacucaagaagccauaaacaagauaacaaaaaaucucaacucuuugagugagcuggaaguaaagaaucuucaaagacuaagcggugccauggaugaacuccacaacgaaauacucgaacuggaugagaaaguggaugaucucagagcugauacaauaagcucgcaaauagaacucgcagucuugcuuuccaaugaaggaauaauaaacagugaagaugagcaucucuuggcgcuugaaagaaaacugaagaaaaugcugggccccucugcuguagagauagggaauggaugcuucgaaaccaaacacaagugcaaccagaccugccucgacagaauagcugcuggcaccuuuaaugcaggagaauuuucucuccccaccuuugauucacuaaauauuacugcugcaucuuuaaaugaugauggauuggauaaucauacuauacugcuuuacuacucaacugcugcuuccaguuuggcuguaacauugaugauagcuaucuuuauuguuuauauggucuccagagacaauguuucuugcuccaucugucuauaa

SEQ ID NO: 58522 - RNA, 1755 nt, Artificial Sequence
  derived and/or modified CDS sequence (wt) from hemagglutinin__InfluenzaB__ABN59445
augaaggcaauaauuguacuacucaugguaguaacauccaaugcagaucgaaucugcacugggauaacaucgucaaacucaccucauguggucaaaacagcuacucaaggggaggucaaugugacuggugugauaccacugacaacaacaccaacaaaaucucauuuugcaaaucucaaaggaacaaagaccagagggaaacuaugcccaaccugucucaacugcacagaucuggauguggccuuaggcagaccaauguguguggggaucacaccuucggcaaaagcuucaauacuccacgaagucagaccuguuacauccggaugcuuuccuauaaugcacgacagaacaaaaaucagacagcuacccaaucuucucagaggauaugaaaaaaucagauuaucaacccaaaacguuaucaacgcagaaaaggcaccaggaggacccuacagacuuggaaccucaggaucuugcccuaacgcuaccaguagaagcggauuuuucgcaacaauggcuugggcugucccaagggacaacaacaaaacagcaacgaauccacuaacaguagaaguaccacacaucuguacaaaagaagaagaccaaauuacuguuuggggguuccauucugauaacaaaacccaaaugaaaaaccucuauggagacucaaauccucaaaaguucaccucaucugcuaauggaguaaccacacauuauguuucucagauuggcggcuucccggaucaaacagaagacggagggcuaccacaaagcggcagaauuguuguugauuacauggugcaaaaaccugggaaaacaggaacaauugucuaucaaagagguauuuuguugccucaaaagguguggugcgcgaguggcaggagcaaaguaauaaaaggguccuugccuuuaauuggugaagcagauugccuucacgaaaaauacgguggauuaaacaaaagcaagccuuacuacacaggagaacaugcaaaagccauaggaaauugcccaauaugggugaaaacaccuuugaagcuugccaauggaaccaaauauagaccuccugcaaaacuauuaaaggaaagggguuucuucggagcuauugcugguuucuuagaaggaggaugggaaggaaugauugcagguuggcacggauauacaucucacggagcacauggaguggcaguggcagcagaccuuaagaguacgcaagaagccauaaacaagauaacaaaaaaucucaauucuuugagugagcuagaaguaaagaaucuucaaagacuaaguggugccauggaugaacuccacaacgaaauacucgagcuggaugagaaaguggaugaucucagagcugacacaauaagcucacaaauagaacuugcagucuugcuuuccaacgaaggaauaauaaacagugaagaugagcaucuauuggcacuugagagaaaacuaaagaaaaugcugggucccucugcuguagacauagggaauggaugcuucgaaaccaaacacaagugcaaccagaccugcuuagacaggauagcugcuggcaccuuuaaugcaggagaauuuucucuucccacuuuugauucacugaauauuacugcugcaucuuuaaaugaugauggauuggauaaccauacuauacugcucuacuacucaacugcugcuucuaguuuggcuguaacauugaugauagcuauuuuuauuguuuauaugaucuccagagacaauguuucuugcuccaucugucuauaa

SEQ ID NO: 58523 - RNA, 1755 nt, Artificial Sequence
  derived and/or modified CDS sequence (wt) from hemagglutinin__InfluenzaB__ABO72377
augaaggcaauaauuguacuacucaugguaguaacauccaaugcagaucgaaucugcacugggauaacaucgucaaacucaccucauguggucaaaacagcuacucaaggggaggucaaugugacuggugcgauaccacugacaacaacaccaacaaaaucucauuuugcaaaucucaaaggaacaaagaccagagggaaacuaugcccaaccuguuucaacugcaccgaucuggauguggccuugggcagaccaauguguguggggaucacaccuucggcaaaagcuucaauacuccacgaagucagaccuguuacauccggaugcuuuccuauaaugcacgacagaacaaaaaucagacagcuacccaaucuucucagaggauaugaaaaaaucagauuaucaacccaaaacguuaucgacgcagaaaaggcaccaggaggacccuacagacuuggaacuucaggaucuugcccuaacgcuaccaguaaaagcggauuuuucgcaacaauggcuugggcugucccaagggacaacaacaaaacagcaacgaauccacuaacaguagaaguaccacacaucuguacaaaagaagaagaccaaauuacuguuuggggguuccauucugauaacaaaacccaaaugaaaaaccucuauggagacucaaauccucaaaaguucaccucaucugcuaauggaauaaccacacauuauguuucucagauugggggcuucccggaccaaacagaagacggagggcuaccacaaagcggcagaauuguuguugauuacauggugcaaaaaccugggaaaacaggaacaauugucuaucaaagagggauuuuguugccucaaaagguguggugcgcgaguggcaggagcaaaguaauaaaaggguccuugccuuuaauuggugaagcugauugccuucacgaaaaauacgguggauuaaacaaaagcaagccuuacuacacaggagaacaugcaaaagccauagggaauugcccaauaugggugaaaacaccuuugaagcuugccaauggaaccaaauauagaccuccugcaaaacuauuaaaggaaagggguuucuuuggagcuauugcugguuucuuagaaggaggaugggaaggaaugauugcagguuggcacggauacacaucucacggagcacacggaguggcaguggcagcagaccuuaagaguacgcaagaagccauaaacaagauaacaaaaaaucucaauucuuugagugagcuagaaguaaagaaccuucaaagacuaaguggugccauggaugaacuccauaacgaaauacucgagcuggaugagaaaguggaugaucucagagcugacacaauaaguucacaaauagaacuugcagucuugcuuuccaaugaaggaauaauaaacagugaagaugagcaucuauuggcacuugagagaaaacuaaagaaaaugcugggucccucugcuguagacauagggaauggaugcuuugaaaccaaacacaagugcaaccagaccugcuuagacaggauagcugcuggcaccuuuaaugcaggagaauuuucucuucccacuuuugauucacugaacauuacugcugcaucuuuaaaugaugauggauuggauaaccauacuauacugcucuacuacucaacugcugcuucuaguuuggcuguaacauugaugauagcuauuuuuauuguuuauaugaucuccagagacaauguuucuugcuccaucugucuauaa

SEQ ID NO: 58524 - RNA, 1755 nt, Artificial Sequence
  derived and/or modified CDS sequence (wt) from hemagglutinin__InfluenzaB__ABR15973
augaaggcaauaauuguacuacucaugguaguaacauccaaugcagaucgaaucugcacugggauaacaucgucaaacucaccucauguggucaaaacagcuacucaaggggaggucaaugugacuggugcgauaccacugacaacaacaccaacaaaaucucauuuugcaaaucucaaaggaacaaagaccagagggaaacuaugcccaaccugucucaacugcacagaucuggauguggccuugggcagaccaauguguguggggaucacaccuucggcaaaagcuucaauacuccacgaagucagaccugucacauccggaugcuuuccuauaaugcacgacagaacaaaaaucagacagcuacccaaucuucucagaggauaugaaaaaaucagauuaucaacccaaaacguuaucaacgcagaaaaggcaccaggaggacccuacagacuuggaacuucaggaucuugcccuaacgcuaccaguaaaagcggauuuuucgcaacaauggcuugggcugucccaagggacaacaacaaaacagcaacgaauccacuaacaguagaaguaccacacaucuguacaaaagaagaagaccaaauuacuguuuggggguuccauucugauaacaaaacccaaaugaaaaaccucuauggagacucaaauccucaaaaguucaccucaucugcuaauggaauaaccacacauuauguuucucagauugggggcuucccggaccaaacagaggacggagggcuaccacaaagcggcagaauuguuguugauuacauggugcaaaaaccugggaaaacaggaacaauugucuaucaaagagggauuuuguugccucaaaagguguggugcgcgaguggcaggagcaaaguaauaaaaggguccuugccuuuaauuggugaagcugauugccuucacgaaaaauacgguggauuaaacaaaagcaagccuuacuacacaggagaacaugcaaaagccauagggaauugcccaauaugggugaaaacaccuuugaagcuugccaauggaaccaaauauagaccuccugcaaaacuauuaaaggaaagggguuucuucggagcuauugcugguuucuuagaaggaggaugggaaggaaugauugcagguuggcacggauacacaucucacggagcacacggaguggcaguggcagcagaccuuaagaguacgcaagaagccauaaacaagauaacaaaaaaucucaauucuuugagugagcuagaaguaaagaaccuucaaagacuaaguggugccauggaugaacuccauaacgaaauacucgagcuggaugagaaaguggaugaucucagagcugacacaauaaguucacaaauagaacuugcagucuugcuuuccaacgaaggaauaauaaacagugaagaugagcaucuauuggcacuugagagaaaacuaaagaaaaugcugggucccucugcuguagacauagggaauggaugcuucgaaaccaaacacaagugcaaccagaccugcuuagacaggauagcugcuggcaccuuuaaugcaggagaauuuucucuucccacuuuugauucacugaacauuacugcugcaucuuuaaaugaugauggauuggauaaccauacuauacugcucuacuacucaacugcugcuucuaguuuggcuguaacauugaugauagcuauuuuuauuguuuauaugaucuccagagacaauguuucuugcuccauuugucuauaa

SEQ ID NO: 58525 - RNA, 1752 nt, Artificial Sequence
  derived and/or modified CDS sequence (wt) from hemagglutinin__InfluenzaB__ABR15995
augaaggcaauaauuguacuacucaugguaguaacauccaacgcagaucgaaucugcacugggauaacaucuucaaacucaccucauguggucaaaacagcuacucaaggggaagucaaugugacuggugugauaccacugacaacaacaccaacaaaaucucauuuugcaaaucucaaaggaacaaagaccagagggaaacuaugcccaaacugucucaacugcacagaucuggauguggccuugggcagaccaauguguauagggaucacaccuucggcaaaagcuucaauacuccacgaagucagaccuguuacauccgggugcuuuccuauaaugcacgacagaacaaaaaucagacagcuacccaaucuucucagaggauaugaacauaucagauuaucaacccauaacguuaucaacgcagaaagggcaccaggaggacccuacagacuuggaaccucaggaucuugcccuaacguuaccaguagaagcggauucuucgcaacaauggcuugggcugucccaagggacaacaaaacagcaacgaacccacuaacaguagaaguaccauacauuuguacaaaaggagaagaccaaauuacuguuuggggguuccauucugauuacaaaacccaaaugaaaaaccucuauggagacucaaauccucaaaaguucaccucaucugccaauggaauaaccacacauuauguuucucagauugguggcuucccaaaucaaacagaagacggagggcuaccacaaagcggcagaauuguuguugauuacauggugcaaaaaccugggaaaacaggaacaauugucuaucaaagagguguuuuguugccucaaaagguguggugugcaaguggcaggagcaagguaauaaaaggguccuugccuuuaauuggugaagcagauugccuucacgaaaaauacgguggauuaaacaaaagcaagccuuacuacacaggagaacaugcaaaagccauaggaaauugcccaauaugggugaaaacaccuuugaagcuugccaauggaaccaaauauagaccucccgcaaaacuauuaaaggaaagggguuucuucggagcuauugcugguuucuuagaaggaggaugggaaggaaugauugcagguuggcacggauacacaucucauggagcacaugggguggcaguggcagcagaccuuaagaguacgcaagaagccauaaacaagauaacaaaaaaucucaauucuuugagugagcuagaaguaaagaaucuucaaagacuaaguggugccauggaugaacuccacaacgaaauacucgagcuggaugagaaaguggaugaucucagagcugacacaauaagcucgcaaauagagcuugcagucuugcuuuccaaugaaggaauaauaaacagugaagaugagcaucuauuggcacuugagagaaaacuaaagaaaaugcugggucccucugcuguagacauagggaauggaugcuucgaaaccaaacacaagugcaaccagaccugcuuagacaggauagcugcuggcaccuuuaaugcaggagaauuuucucuucccacuuuugauucacugaauauuacugcugcaucuuuaaaugaugauggauuggauaaucauacuauacugcucuacuacucaacugcggcuucuaguuuggcuguaacauugaugauagcuauuuuuauuguuuauauggucuccagagacaauguuucuugcuccaucugucuauag

SEQ ID NO: 58526 - RNA, 1758 nt, Artificial Sequence
  derived and/or modified CDS sequence (wt) from hemagglutinin__InfluenzaB__ABR16017
augaaggcaauaauuguacuacucaugguaguaacauccaaugcagaucgaaucugcacugggauaacaucgucaaacucaccacauguugucaaaacugcuacucaaggggaggucaaugugacugguguaauaccacugacaacaacacccaccaaaucucauuuugcaaaucucaaaggaacagaaaccagagggaaacuaugcccaaaaugccucaacugcacagaucuggacguggccuugggcagaccaaaaugcacggggaacauacccucggcaagaguuucaauacuccaugaagucagaccuguuacaucugggugcuucccuauaaugcacgacagaacaaaaauuagacagcugccuaaccuucucagaggauacgaacauaucagguuaucaacucauaacguuaucaaugcagaaaaugcaccaggaggacccuacaaaauuggaaccucagggucuugcccuaacguuaccaauggaaacggauuuuucgcaacaauggcuugggccgucccaaaaaacgacaacaacaaaacagcaacaaauucauuaacaauagaaguaccauacauuuguacagaaggagaagaccaaauuaccguuuggggguuccacucugauaacgagacccaaauggcaaagcucuauggggacucaaagccccagaaguucaccucaucugccaacggagugaccacacauuacguuucacagauugguggcuucccaaaucaaacagaagacggaggacuaccacaaagugguagaauuguuguugauuacauggugcaaaaaucugggaaaacaggaacaauuaccuaucaaagagguauuuuauugccucaaaagguguggugcgcaaguggcaggagcaagguaauaaaaggauccuugccuuuaauuggagaagcagauugucuccacgaaaaauacgguggauuaaauaaaagcaagccuuacuacacaggggaacaugcaaaggccauaggaaauugcccaauaugggugaaaacacccuugaaguuggccaauggaaccaaauauagaccuccugcaaaacuauuaaaggaaagggguuucuucggagcuauugcugguuucuuagaaggaggaugggaaggaaugauugcagguuggcacggauacacaucccauggggcacauggaguagcgguggcagcagaccuuaagagcacucaagaggccauaaacaagauaacaaaaaaucucaacucuuugagugagcuggaaguaaagaaucuucaaagacuaagcggugccauggaugaacuccacaacgaaauacuagaauuagacgagaaaguggaugaucucagagcugauacaauaagcucacaaauagaacucgcaguccugcuuuccaaugaaggaauaauaaacagugaagaugagcaucucuuggcgcuugaaagaaagcugaagaaaaugcugggccccucugcuguagagauagggaauggaugcuuugaaaccaaacacaagugcaaccagaccugucucgacagaauagcugcugguaccuuugaugcaggagaauuuucucuccccaccuuugauucacugaauauuacugcugcaucuuuaaaugacgauggauuggauaaucauacuauacugcuuuauuacucaacugcugccuccaguuuggcuguaacauugaugauagcuaucuuuguuguuuauauggucuccagagacaauguuucuugcuccaucugucuauaa

SEQ ID NO: 58527 - RNA, 1758 nt, Artificial Sequence
  derived and/or modified CDS sequence (wt) from hemagglutinin__InfluenzaB__ACA64899
augaaggcaauaauuguacuacucaugguaguaacauccaaugcagaucgaaucugcacugggauaacaucgucaaacucaccacauguugucaaaacugcuacucaaggggaggucaaugugacugguguaauaccacugacaacaacacccaccaaaucucauuuugcaaaucucaaaggaacagaaaccagagggaaacuaugcccaaaaugccucaacugcacagaucuggacguggccuugggcagaccaaaaugcacggggaacauacccucggcaagaguuucaauacuccaugaagucagaccuguuacaucugggugcuucccuauaaugcacgacagaacaaaaauuagacagcugccuaaccuucucagaggauacgaacauaucagguuaucaacucauaacguuaucaaugcagaaaaugcaccaggaggacccuacaaaauuggaaccucagggucuugcccuaacguuaccaauggaaacggauuuuuugcaacaauggcuugggccgucccaaaaaacgacaacaacaaaacagcaacaaauucauuaacaauagaaguaccauacauuuguacagaaggagaagaccaaauuaccguuuggggguuccacucugauaacgagacccaaauggcaaaacucuauggggacucaaagccccagaaguucaccucaucugccaacggagugaccacacauuacguuucacagauugguggcuucccaaaucaaacagaagacggaggacuaccacaaagugguagaauuguuguugauuacauggugcaaaaaucugggaaaacaggaacaauuaccuaucaaagagguauuuuauugccucaaaagguguggugcgcaaguggcaggagcaagguaauaaaaggauccuugccuuuaauuggagaagcagauugucuccacgaaaaauacgguggauuaaacaaaagcaagccuuacuacacaggggaacaugcaaaggccauaggaaauugcccaauaugggugaaaacacccuugaaguuggccaauggaaccaaauauagaccuccugcaaaacuauuaaaggaaagggguuucuucggagcuauugcugguuucuuagaaggaggaugggaaggaaugauugcagguuggcacggauacacaucccauggggcacauggaguagcgguggcagcagaccuuaagagcacucaagaggccauaaacaagauaacaaaaaaucucaacucuuugagugagcuggaaguaaagaaucuucaaagacuaagcggugccauggaugaacuccacaacgaaauacuagaauuagacgagaaaguggaugaucucagagcugauacaauaagcucacaaauagaacucgcaguccugcuuuccaaugaaggaauaauaaacagugaagaugagcaucucuuggcgcuugaaagaaagcugaagaaaaugcugggccccucugcuguagagauagggaauggaugcuuugaaaccaaacacaagugcaaccagaccugucucgacagaauagcugcugguaccuuugaugcaggagaauuuucucuccccaccuuugauucacugaauauuacugcugcaucuuuaaaugacgauggauuggauaaucauacuauacugcuuuacuacucaacugcugccuccaguuuggcuguaacauugaugauagcuaucuuuguuguuuauauggucuccagagacaauguuucuugcuccaucugucuauaa

SEQ ID NO: 58528 - RNA, 1758 nt, Artificial Sequence
  derived and/or modified CDS sequence (wt) from hemagglutinin__InfluenzaB__ACA64932
augaaggcaauaauuguacuacucaugguaguaacauccaaugcagaucgaaucugcacugggauaacaucgucaaacucaccacauguugucaaaacugcuacucaaggggaggucaaugugacugguguaauaccacugacaacaacacccaccaaaucucauuuuucaaaucucaaaggaacagaaaccagagggaaacuaugcccaaaaugccucaacugcacagaucuggacguggccuugggcagaccaaaaugcacggggaacauacccucggcaagaguuucaauacuccaugaagucagaccuguuacaucugggugcuuuccuauaaugcacgacagaacaaaaauuagacagcugccuaaccuucucagaggauacgaacauaucagguuaucaacucauaacguuaucaaugcagaaaaugcaccaggaggacccuacaaaauuggaaccucagggucuugcccuaacguuaccaauggaaacggauuuuuugcaacaauggcuugggccgucccaaaaaacgacaucaacaaaacagcaacaaauucauuaacaauagaaguaccauacauuuguacagaaggagaagaccaaauuaccguuuggggguuccacucugauaacgagacccaaauggcaaagcucuauggggacucaaagccccagaaguucaccucaucugccaacggagugaccacacauuacguuucacagauugguggcuucccaaaucaaacagaagacggaggacuaccacaaagugguagaauuguuguugauuacauggugcaaaaaucugggaaaacaggaacaauuaccuaucaaagagguauuuuauugccucaaaagguguggugcgcaaguggcaggagcaagguaauaaaaggauccuugccuuugauuggagaagcagauugccuccacgaaaaauacgguggauuaaacaaaagcaagccuuacuacacaggggaacaugcaaaggccauaggaaauugcccaauaugggugaaaacacccuugaagcuggccaauggaaccaaauauagaccuccugcaaaacuauuaaaggaaagggguuucuucggagcuauugcugguuucuuagaaggaggaugggaaggaaugauugcagguuggcacggauacacaucccauggggcacauggaguagcgguggcagcagaccuuaagagcacucaagaggccauaaacaagauaacaaaaaaucucaacucuuugagugagcuggaaguaaagaaucuucaaagacuaagcggugccauggaugaacuccacaacgaaauacuagaacuagacgagaaaguggaugaucucagagcugauacaauaagcucacaaauagaacucgcaguccugcuuuccaaugaaggaauaauaaacagugaagaugagcaucucuuggcgcuugaaagaaaacugaagaaaaugcugggccccucugcuguagagauagggaauggaugcuuugaaaccaaacacaagugcaaccagaccugucucgacaaaauagcugcugguaccuuugaugcaggagaauuuucucuccccaccuuugauucacugaauauuacugcugcaucuuuaaaugacgauggauuggauaaucauacuauacugcuuuacuacucaacugcugccuccaguuuggcuguaacauugaugauagcuaucuuuguuguuuauauggucuccagagacaauguuucuugcuccaucugucuauaa

SEQ ID NO: 58529 - RNA, 1758 nt, Artificial Sequence
  derived and/or modified CDS sequence (wt) from hemagglutinin__InfluenzaB__ACA64943
augaaggcaauaauuguacuacucaugguaguaacauccaaugcagaucgaaucugcacugggauaacaucgucaaacucaccacauguugucaaaacugcuacucaaggggaggucaaugugacugguguaauaccacugacaacaacacccaccaaaucucauuuugcaaaucucaaaggaacagaaaccagagggaaacuaugcccaaaaugccucaacugcacagaucuggacguggccuugggcagaccaaaaugcacggggaacauacccucggcaagaguuucaauacuccaugaagucagaccuguuacaucugggugcuuuccuauaaugcacgacagaacaaaaauuagacagcugccuaaccuucucagaggauacgaacauaucagguuaucaacucauaacguuaucaaugcagaaaaugcaccaggaggacccuacaaaauuggaaccucagggucuugcccuaacguuaccaauggaaacggauuuuucgcaacaauggcuugggccgucccaaaaaacgacaacaacaaaacagcaacaaauucauuaacaauagaaguaccauacauuuguacagaaggagaagaccaaauuaccguuuggggguuccacucugauaacgagacccaaauggcaaagcucuauggggacucaaagccccagaaauucaccucaucugccaacggagugaccacacauuacguuucacagauugguggcuucccaaaucaaacagaagacggaggacuaccacaaagugguagaauuguuguugauuacauggugcaaaaaucugggaaaacaggaacaauuaccuaucaaagagguauuuuauugccucaaaagguguggugcgcaaguggcaggagcaagguaauaaaaggauccuugccuuuaauuggagaagcagauugccuccacgaaaaauacgguggauuaaacaaaagcaagccuuauuacacaggggaacaugcaaaggccauaggaaauugcccaauaugggugaaaacacccuugaagcuggccaauggaaccaaauauagaccuccugcaaaacuauuaaaggaaagggguuucuucggagcuauugcugguuucuuagaaggaggaugggaaggaaugauugcagguuggcacggauacacaucccauggggcacauggaguagcgguggcagcagaccuuaagagcacucaagaggccauaaacaagauaacaaaaaaccucaacucuuugagugagcuggaaguaaagaaucuucaaagacuaagcggugccauggaugaacuccacaacgaaauacuagaacuagacgagaaaguggaugaucucagagcugauacaauaagcucacaaauagaacucgcaguccugcuuuccaaugaaggaauaauaaacagugaagaugagcaucucuuggcgcuugaaagaaagcugaagaaaaugcugggccccucugcuguagagauagggaauggaugcuuugaaaccaaacacaagugcaaccagaccugucucgacagaauagcugcugguaccuuugaugcaggagaauuuucucuccccaccuuugauucacugaauauuacugcugcaucuuuaaaugacgauggauuggauaaucauacuauacugcuuuacuacucaacugcugccuccaguuuggcuguaacauugaugauagcuaucuuuguuguuuauauggucuccagagacaauguuucuugcuccaucugucuauaa

SEQ ID NO: 58530 - RNA, 1758 nt, Artificial Sequence
  derived and/or modified CDS sequence (wt) from hemagglutinin__InfluenzaB__ACA64954
augaaggcaauaauuguacuacucaugguaguaacauccaaugcagaucgaaucugcacugggauaacaucgucaaacucaccacauguugucaaaacugcuacucaaggggaggucaaugugacugguguaauaccacugacaacaacacccaccaaaucucauuuugcaaaucucaaaggaaccgaaaccagagggaaacuaugcccaaaaugccucaacugcacagaucuggacguggccuugggcagaccaaaaugcacggggaacauacccucggcaagaguuucaauacuccaugaagucagaccuguuacaucugggugcuuuccuauaaugcaugacagaacaaaaauuagacagcugccuaaccuucucagaggauacgaacauaucagguuaucaacucauaacguuaucaaugcagaaaaugcaccaggaggacccuacaaaauuggaaccucagggucuugcccuaacguuaccaauggaaacggauuuuucgcaacaauggcuugggccgucccaaaaaacgacaacaacaaaacagcaacaaguucauuaacaauagaaguaccauacauuuguacagaaggagaagaccaaauuaccguuuggggguuccacucugauaacgagacccaaauggcaaagcucuauggggacucaaagccccagaaguucaccucaucugccaacggagugaccacacauuacguuucacagauugguggcuucccaaaucaaacagaagacggaggacuaccacaaagugguagaauuguuguugauuacauggugcaaaaaucugggaaaacaggaacaauuaccuaucaaagagguauuuuauugccucaaaagguguggugcgcaaguggcaggagcaagguaauaaaaggauccuugccuuuaauuggagaagcagauugccuccacgaaaaauacgguggauuaaacaaaagcaagccuuacuacacaggggaacaugcaaaggccauaggaaauugcccaauaugggugaaaacacccuugaagcuggccaauggaaccaaauauagaccuccugcaaaacuauuaaaggaaagggguuucuucggagcuauugcugguuucuuagaaggaggaugggaaggaaugauugcagguuggcacggauacacaucccauggggcacauggaguagcgguggcagcagaccuuaagagcacucaagaggccauaaacaagauaacaaaaaaucucaacucuuugagugagcuggaaguaaagaaucuucaaagacuaagcggugccauggaugaacuccacaacgaaauacuagaacuagacgagaaaguggaugaucucagagcugauacaauaagcucacaaauagaacucgcaguccugcuuuccaaugaaggaauaauaaacagugaagaugagcaucucuuggcgcuugaaagaaagcugaagaaaaugcugggccccucugcuguagagauagggaauggaugcuuugaaaccaaacacaagugcaaccagaccugucucgacagaauagcugcugguaccuuugaugcaggagaauuuucucuccccaccuuugauucacugaauauuacugcugcaucuuuaaaugacgauggauuggauaaucauacuauauugcuuuacuacucaacugcugccuccaguuuggcuguaacauugaugauagcuaucuuuguuguuuauauggucuccagagacaauguuucuugcuccaucugucuauaa

SEQ ID NO: 58531 - RNA, 1758 nt, Artificial Sequence; identical to SEQ ID NO: 58529
  derived and/or modified CDS sequence (wt) from hemagglutinin__InfluenzaB__ACA64965

SEQ ID NO: 58532 - RNA, 1758 nt, Artificial Sequence
  derived and/or modified CDS sequence (wt) from hemagglutinin__InfluenzaB__ACA64998
augaaggcaauaauuguacuacucaugguaguaacauccaaugcagaucgaaucugcacugggauaacaucgucaaacucaccacauguugucaaaacugcuacucaaggggaggucaaugugacugguguaauaccacugacaacaacacccaccaaaucucauuuugcaaaucucaaaggaacagaaaccagagggaaacuaugcccaaaaugcuucaacugcacagaucuggacguggccuugggcagaccaaaaugcacggggaacauacccucggcaagaguuucaauacuccaugaagucagaccuguuacaucugggugcuuuccuauaaugcacgacagaacaaaaauuagacagcugccuaaccuucucagaggauacgaacauaucagguuaucaacucauaacguuaucaaugcagaaaaugcaccaggaggacccuacaaaauuggaaccucagggucuugcccuaacguuaccaauggaaacggauuuuucgcaacaauggcuugggccgucccaaaaaacgacaacaacaaaacagcaacaaauucauuaacaauagaaguaccauacauuuguacagaaggagaagaccaaauuaccguuuggggguuccacucugauaacgagacccaaauggcaaagcucuauggggacucaaagccccagaaguucaccucaucugccaacggagugaccacacauuacguuucacagauugguggcuucccaaaucaaacagaagacggaggacugccacaaagugguagaauuguuguugauuacauggugcaaaaaucugggaaaacaggaacaauuaccuaucaaagagguauuuuauugccucaaaagguguggugcgcaaguggcaggagcaagguaauaaaaggauccuugccuuuaauuggagaagcagauugccuccacgaaaaauacgguggauuaaacaaaagcaagccuuacuacacaggggaacaugcaaaggccauaggaaauugcccaauaugggugaaaacacccuugaagcuggccaauggaaccaaauauagaccuccugcaaaacuauuaaaggaaagggguuucuucggagcuauugcugguuucuuagaaggaggaugggaaggaaugauugcagguuggcacggauacacaucccauggggcacauggaguagcgguggcagcagaccuuaagagcacucaagaggccauaaacaagauaacaaaaaaucucaacucuuugagugagcuggaaguaaagaaucuucaaagacuaagcggugccauggaugaacuccacaacgaaauacuagaacuagacgagaaaguggaugaucucagagcugauacaauaagcucacaaauagaacucgcaguccugcuuuccaaugaaggaauaauaaacagugaagaugagcaucucuuggcgcuugaaagaaagcugaagaaaaugcugggccccucugcuguagagauagggaauggaugcuuugaaaccaaacacaagugcaaccagaccugucucgacagaauagcugcugguaccuuugaugcaggagaauuuucucuccccaccuuugauucacugaauauuacugcugcaucuuuaaaugacgauggauuggauaaucauacuauacugcuuuacuacucaacugcugccuccaguuuggcuguaacauugaugauagcuaucuuuguuguuuauauggucuccagagacaauguuucuugcuccaucugucuauaa

SEQ ID NO: 58533 - RNA, 1758 nt, Artificial Sequence
  derived and/or modified CDS sequence (wt) from hemagglutinin__InfluenzaB__ACA65020
augaaggcaauaauuguacuacucaugguaguaacauccaaugcagaucgaaucugcacugggauaacaucgucaaacucaccacauguugucaaaacugcuacucaaggggaggucaaugugacugguguaauaccacugacaacaacacccaccaaaucucauuuuucaaaucucaaaggaacagaaaccagagggaaacuaugcccaaaaugccucaacugcacagaucuggacguggccuugggcagaccaaaaugcacggggaacauacccucggcaagaguuucaauacuccaugaagucagaccuguuacaucugggugcuuuccuauaaugcacgacagaacaaaaauuagacagcugccuaaccuucucagaggauacgaacauaucagguuaucaacucauaacguuaucaaugcagaaaaugcaccaggaggacccuacaaaauuggaaccucagggucuugcccuaacguuaccaauggaaacggauuuuuugcaacaauggcuugggccgucccaaaaaacgacaacaacaaaacagcaacaaauucauuaacaauagaaguaccauacauuuguacagaaggagaagaccaaauuaccauuuggggguuccacucugauaacgagacccaaauggcaaagcucuauggggacucaaagccccagaaguucaccucaucugccaacggggugaccacacauuacguuucacagauugguggcuucccaaaucaaacagaagacggaggacuaccacaaagugguagaauuguuguugauuacauggugcaaaaaucugggaaaacaggaacaauuaccuaucaaagagguauuuuauugccucaaaagguguggugcgcaaguggcaggagcaagguaauaaaaggauccuugccuuuaauuggagaagcagauugccuccacgaaaaauacgguggauuaaacaaaagcaagccuuacuacacaggggaacaugcaaaggccauaggaaauugcccaauaugggugaaaacacccuugaagcuggccaauggaaccaaauauagaccuccugcaaaacuauuaaaggaaagggguuucuucggagcuauugcugguuucuuagaaggaggaugggaaggaaugauugcagguuggcacggauacacaucccauggggcacauggaguagcgguggcagcagaccuuaagagcacucaagaggccauaaacaagauaacaaaaaaucucaacucuuugagugagcuggaaguaaagaaucuucaaagacuaagcggugccauggaugaacuccacaacgaaauacuagaacuagacgagaaaguggaugaucucagagcugauacaauaagcucacaaauagaacucgcaguccugcuuuccaaugaaggaauaauaaacagugaagaugagcaucucuuggcgcuugaaagaaagcugaagaaaaugcugggccccucugcuguagagguagggaauggaugcuuugaaaccaaacacaagugcaaccagaccugucucgacagaauagcugcugguaccuuugaugcaggagaauuuucucuccccaccuuugauucacugaauauuacugcugcaucuuuaaaugacgauggauuggauaaucauacuauacugcuuuacuacucaacugcugccuccaguuuggcuguaacauugaugauagcuaucuuuguuguuuauauggucuccagagacaauguuucuugcuccaucugucuauaa

SEQ ID NO: 58534 - RNA, 1758 nt, Artificial Sequence; identical to SEQ ID NO: 58532
  derived and/or modified CDS sequence (wt) from hemagglutinin__InfluenzaB__ACA65031

SEQ ID NO: 58535 - RNA, 1758 nt, Artificial Sequence
  derived and/or modified CDS sequence (wt) from hemagglutinin__InfluenzaB__ACA65042
augaaggcaauaauuguacuacucaugguaguaacauccaaugcagaucgaaucugcacugggauaacaucgucaaacucaccacauguugucaaaacugcuacucaaggggaggucaaugugacugguguaauaccacugacaacaacacccaccaaaucucauuuuucaaaucucaaaggaacagaaaccagagggaaacuaugcccaaaaugccucaacugcacagaucuggacguggccuugggcagaccaaaaugcacggggaacauacccucggcaagaguuucaauacuccaugaagucagaccuguuacaucugggugcuuuccuauaaugcacgacagaacaaaaauuagacagcugccuaaccuucucagaggauacgaacauaucagguuaucaacucauaacguuaucaaugcagaaaaugcaccaggaggacccuacaaaauuggaaccucagggucuugcccuaacguuaccaauggaaacggauuuuuugcaacaauggcuugggccgucccaaaaaacgacaacaacaaaacagcaacaaauucauuaacaauagaaguaccauacauuuguacagaaggagaagaccaaauuaccguuuggggguuccacucugauaacgagacccaaauggcaaagcucuauggggacucaaagccccagaaguucaccucaucugccaacggagugaccacacauuacguuucacagauugguggcuucccaaaucaaacagaagacggaggacuaccacaaagugguagaauuauuguugauuacauggugcaaaaaucugggaaaacaggaacaauuaccuaucaaagagguauuuuauugccucaaaagguguggugcgcaaguggcaggagcaagguaauaaaaggauccuugccuuuaauuggagaagcagauugccuccacgaaaaauacgguggauuaaacaaaagcaagccuuacuacacaggggaacaugcaaaggccauaggaaauugcccaauaugggugaaaacacccuugaagcuggccaauggaaccaaauauagaccuccugcaaaacuauuaaaggaaagggguuucuucggagcuauugcugguuucuuagaaggaggaugggaaggaaugauugcagguuggcacggauacacaucccauggggcacauggaguagcgguggcagcagaccuuaagagcacucaagaggccauaaacaagauaacaaaaaaucucaacucuuugagugagcuggaaguaaagaaucuucaaagacuaagcggugccauggaugaacuccacaacgaaauacuagaacuagacgagaaaguggaugaucucagagcugauacaauaagcucacaaauagaacucgcaguccugcuuuccaaugaaggaauaauaaacagugaagaugagcaucucuuggcgcuugaaagaaagcugaagaaaaugcugggccccucugcuguagagauagggaauggaugcuuugaaaccaaacacaagugcaaccagaccugucucgacagaauagcugcugguaccuuugaugcaggagaauuuucucuccccaccuuugauucacugaauauuacugcugcaucuuuaaaugacgauggauuggauaaucauacuauacugcuuuacuacucaacugcugccuccaguuuggcuguaacauugaugauagcuaucuuuguuguuuauauggucuccagagacaauguuucuugcuccaucugucuauaa

SEQ ID NO: 58536 - RNA, 1758 nt, Artificial Sequence
  derived and/or modified CDS sequence (wt) from hemagglutinin__InfluenzaB__ACA65053
augaaggcaauaauuguacuacucaugguaguaacauccaaugcagaucgaaucugcacugggauaacaucgucaaacucaccacauguugucaaaacugcuacucaaggggaggucaaugugacugguguaauaccacugacaacaacacccaccaaaucucauuuugcaaaucucaaaggaacagaaaccagagggaaacuaugcccaaaaugccucaacugcacagaucuggacguggccuugggcagaccaaaaugcacggggaacauacccucggcaagaguuucaauacuccaugaagucagaccuguuacaucugggugcuuuccuauaaugcacgacagaacaaaaauuagacagcugccuaaccuucucagaggauacgaacauaucagguuaucaacucguaacguuaucaaugcagaaaaugcaccaggaggacccuacaaaauuggaaccucagggucuugcccuaacguuaccaauggaaacggauuuuucgcaacaauggcuugggccgucccaaaaaacgacaacaacaaaacagcaacaaauucauuaacaauagaaguaccauacauuuguacagaaggagaagaccaaauuaccguuuggggguuccacucugauaacgagacccaaauggcaaagcucuauggggacucaaagccccagaaguucaccucaucugccaacggagugaccacacauuacguuucacagauugguggcuucccaaaucaaacagaagacggaggacuaccacaaagugguagaauuguuguugauuacauggugcaaaaaucugggaaaacaggaacaauuaccuaucaaagagguauuuuauugccucaaaagguguggugcgcaaguggcaggagcaagguaauaaaaggauccuugccuuuaauuggagaagcagauugccuccacgaaaaauacgguggauuaaacaaaagcaagccuuacuacacaggggaacaugcaaaggccauaggaaauugcccaauaugggugaaaacacccuugaagcuggccaauggaaccaaauauagaccuccugcaaaacuauuaaaggaaagggguuucuucggagcuauugcugguuucuuagaagggggaugggaaggaaugauugcagguuggcacggauacacaucccauggggcacauggaguagcgguggcagcagaccuuaagagcacucaagaggccauaaacaagauaacaaaaaaucucaacucuuuaagugagcuggaagugaagaaucuucaaagacuaagcggugccauggaugaacuccacaacgaaauacuagaacuagacgagaaaguggaugaucucagagcugauacaauaagcucacaaauagaacucgcaguccugcuuuccaaugaaggaauaauaaacagugaagaugagcaucucuuggcgcuugaaagaaagcugaagaaaaugcugggccccucugcuguagagauagggaauggaugcuuugaaaccaaacacaagugcaaccagaccugucucgacagaauagcugcugguaccuuugaugcaggagaauuuucucuccccacuuuugauucacugaauauuacugcugcaucuuuaaaugacgauggauuggauaaucauacuauacugcuuuacuacucaacugcugccuccaguuuggcuguaacauugaugauagcuaucuuuguuguuuauauggucuccagagacaauguuucuugcuccaucugucuauaa

SEQ ID NO: 58537 - RNA, 1758 nt, Artificial Sequence
  derived and/or modified CDS sequence (wt) from hemagglutinin__InfluenzaB__ACA65075
augaaggcaauaauuguacuacucaugguaguaacauccaaugcagaucgaaucugcacugggauaacaucgucgaacucaccacauguugucaaaacugcuacucaaggggaggucaaugugacugguguaauaccacugacaacaacacccaccaaaucucauuuugcaaaucucaaaggaacagaaaccagagggaaacuaugcccaaaaugccucaacugcacagaucuggacguggccuugggcagaccaaaaugcacggggaacauacccucggcaagaguuucaauacuccaugaagucagaccuguuacaucugggugcuuuccuauaaugcacgacagaacaaaaauuagacagcugccuaaccuucucagaggauacgaacauaucagguuaucaacucauaacguuaucaaugcagaaaaugcaccaggaggacccuacaaaauuggaaccucagggucuugcccuaacauuaccaauggaaacggauuuuucgcaacaauggcuugggccgucccaaaaaacgacaacaacaaaacagcaacaaauucauuaacaauagaaguaccauacauuuguacagaaggagaagaccaaauuaccguuuggggguuccacucugauaaugagacccaaauggcaaagcucuauggggacucaaagccccagaaguucaccucaucugccaacggagugaccacacauuacguuucacagauugguggcuucccaaaucaaacagaagacggaggacuaccacaaagugguagaauuguuguugauuacauggugcaaaaaucugggaaaacaggaacaauuaccuaucaaagagguauuuuauugccucaaaagguguggugcgcaaguggcaggagcaagguaauaaaaggauccuugccuuuaauuggagaagcagauugccuccacgaaaaauacgguggauuaaacaaaagcaagccuuacuacacaggggaacaugcaaaggccauaggaaauugcccaauaugggugaaaacacccuugacgcuggccaauggaaccaaauauagaccuccugcaaaacuauuaaaggaaagggguuucuucggagcuauugcugguuuuuuagaaggaggaugggaaggaaugauugcagguuggcacggauacacaucccauggggcacauggaguagcgguggcagcagaccuuaagagcacucaagaggccauaaacaagauaacaaaaaaucucaacucuuugagugagcuggaaguaaagaaucuucaaagacuaaguggugccauggaugaacuccacaacgaaauacuagaacuagacgagaaaguggaugaucucagagcugauacaauaagcucacaaauagaacucgcaguccugcuuuccaaugaaggaauaauaaacagugaagaugagcaucucuuggcgcuugaaagaaagcugaagaaaaugcugggccccucugcuguagagauagggaauggaugcuuugaaaccaaacacaagugcaaccagaccugucucgacagaauagcugcugguaccuuugaugcaggagaauuuucucuccccaccuuugauucacugaauauuacugcugcaucuuuaaaugacgauggauuggauaaucauacuauacugcuuuacuacucaacugcugccuccaguuuggcuguaacauugaugauagcuaucuuuguuguuuauauggucuccagagacaauguuucuugcuccaucugucuauaa

SEQ ID NO: 58538 - RNA, 1758 nt, Artificial Sequence
  derived and/or modified CDS sequence (wt) from hemagglutinin__InfluenzaB__ACA65086
augaaggcaauaauuguacuacucaugguaguaacauccaaugcagaucgaaucugcacugggauaacaucgucaaacucaccacauguugucaaaacugcuacucaaggggaggucaaugugacugguguaauaccacugacaacaacacccaccaaaucucauuuugcaaaucucaaaggaacagaaaccagagggaaacuaugcccaaaaugccucaacugcacagaucuggacguggccuugggcagaccaaaaugcacggggaacauacccucggcaagaguuucaauacuccaugaagucagaccuguuacaucugggugcuucccuauaaugcacgacagaacaaaaauuagacagcugccuaaccuucucagaggauacgaacauaucagguuaucaacucauaacguuaucaaugcagaaaaugcaccaggaggacccuacaaaauuggaaccucagggucuugcccuaacguuaccaauggaaacggauuuuucgcaacaauggcuugggccgucccaaaaaacgacaacaacaaaacagcaacaaauucauuaacaauagaaguaccauacauuuguacagaaggagaagaccaaauuaccguuuggggguuccacucugauaacgagacccaaauggcaaagcucuauggggacucaaagccccagaaguucaccucaucugccaacggagugaccacacauuacguuucacagauugguggcuucccaaaucaaacagaagacggaggacuaccacaaagugguagaauuguuguugauuacauggugcaaaaaucugggaaaacaggaacaauuaccuaucaaagagguauuuuauugccucaaaagguguggugcgcaaguggcaggagcaagguaauaaaaggauccuugccuuuaauuggagaagcagauugucuccacgaaaaauacgguggauuaaacaaaagcaagccuuacuacacaggggaacaugcaaaggccauaggaaauugcccaauaugggugaaaacacccuugaaguuggccaauggaaccaaauauagaccuccugcaaaacuauuaaaggaaagggguuucuucggagcuauugcugguuucuuagaaggaggaugggaaggaaugauugcagguuggcacggauacacaucccauggggcacauggaguagcgguggcagcagaccuuaagagcacucaagaggccauaaacaagauaacaaaaaaucucaacucuuugagugagcuggaaguaaagaaucuucaaagacuaagcggugccauggaugaacuccacaacgaaauacuagaauuagacgagaaaguggaugaucucagagcugauacaauaagcucacaaauagaacucgcaguccugcuuuccaaugaaggaauaauaaacagugaagaugagcaucucuuggcgcuugaaagaaagcugaagaaaaugcugggccccucugcuguagagauagggaauggaugcuuugaaaccaaacacaagugcaaccagaccugucucgacagaauagcugcugguaccuuugaugcaggagaauuuucucuccccaccuuugauucacugaauauuacugcugcaucuuuaaaugacgauggauuggauaaucauacuauacugcuuuacuacucaacugcugccuccaguuuggcuguaacauugaugauagcuaucuuuguuguuuauauggucuccagagacaauguuucuugcuccaucugucuauaa

SEQ ID NO: 58539 - RNA, 1758 nt, Artificial Sequence
  derived and/or modified CDS sequence (wt) from hemagglutinin__InfluenzaB__ACA65097
augaaggcaauaauuguacuacucaugguaguaacaucuaaugcagaucgaaucugcacugggauaacaucgucaaacucaccacauguugucaaaacugcuacucaaggggaggucaaugugacugguguaauaccacugacaacaacacccaccaaaucucauuuugcaaaucucaaaggaacagaaaccagagggaaacuaugcccaaaaugccucaacugcacagaucuggacguggccuugggcagaccaaaaugcacggggaacauacccucggcaagaguuucaauacuccaugaagucagaccuguuacaucugggugcuuuccuauaaugcacgacagaacaaaaauuagacagcugccuaaccuucucagaggauacgaacauaucagguuaucaacucauaacguuaucaaugcagaaaaugcaccaggaggacccuacaaaauuggaaccucagggucuugcccuaacguuaccaauggaaacggauuuuucgcaacaauggcuugggccgucccaaaaaacgacaacaacaaaacagcaacaaauucauuaacaauagaaguaccauacauuuguacagaaggagaagaccaaauuaccguuuggggguuccacucugauaacgagacccaaauggcaaagcucuauggggacucaaagccccagaaguucaccucaucugccaacggagugaccacacauuacguuucacagauugguggcuucccaaaucaaacagaagacggaggacuaccacaaagugguagaauuguuguugauuacauggugcaaaaaucugggaaaacaggaacaauuaccuaucaaagagguauuuuauugccucaaaagguguggugcgcaaguggcaggagcaagguaauaaaaggauccuugccuuuaauuggagaagcagauugccuccacgaaaaauacgguggauuaaacaaaagcaagccuuauuacacaggggaacaugcaaaggccauaggaaauugcccaauaugggugaaaacacccuugaagcuggccaauggaaccaaauauagaccuccugcaaaacuauuaaaggaaagggguuucuucggagcgauugcugguuucuuagaaggaggaugggaaggaaugauugcagguuggcacggauacacaucccauggggcacauggaguagcgguggcagcagaccuuaagagcacucaagaggccauaaacaagauaacaaaaaaucucaacucuuugagugagcuggaaguaaagaaucuucaaagacuaagcggugccauggaugaacuccacaacgaaauacuagaacuagacgagaaaguggaugaucucagagcugauacaauaagcucacaaauagaacucgcaguccugcuuuccaaugaaggaauaauaaacagugaagaugagcaucucuuggcgcuugaaagaaagcugaagaaaaugcugggccccucugcuguagagauagggaauggaugcuuugaaaccaaacacaagugcaaccagaccugucucgacagaauagcugcugguaccuuugaugcaggagaauuuucucuccccaccuuugauucacugaauauuacugcugcaucuuuaaaugacgauggauuggauaaucauacuauacugcuuuacuacucaacugcugccuccaguuuggcuguaacauugaugauagcuaucuuuguuguuuauauggucuccagagacaauguuucuugcuccaucugucuauaa

SEQ ID NO: 58540 - RNA, 1758 nt, Artificial Sequence
  derived and/or modified CDS sequence (wt) from hemagglutinin__InfluenzaB__ACA96552
augaaggcaauaauuguacuacucaugguaguaacauccaaugcagaucgaaucugcacugggauaacaucgucaaacucaccacauguugucaaaacugcuacucaaggggaggucaaugugacugguguaauaccacugacaacaacacccaccaaaucucauuuugcaaaucucaaaggaacagaaaccagagggaaacuaugcccaaaaugccucaacugcacagaucuggacguggccuugggcagaccaaaaugcacggggaacauacccucggcaagaguuucaauacuccaugaagucagaccuguuacaucugggugcuucccuauaaugcacgacagaacaaaaauuagacagcugccuaaccuucucagaggauacgaacauaucagguuaucaacucauaacguuaucaaugcagaaaaugcaccaggaggacccuacaaaauuggaaccucagggucuugcccuaacguuaccaauggaaacggauuuuucgcaacaauggcuugggccgucccaaaaaacgacaacaacaaaacagcaacaaauucauuaacaauagaaguaccauacauuuguacagaaggagaagaccaaauuaccguuuggggguuccacucugauaacgagacccaaauggcaaagcucuauggggacucaaagccccagaaguucaccucaucugccaacggagugaccacacauuacguuucacagauugguggcuucccaaaucaaacagaagacggaggacuaccacaaagugguagaauuguuguugauuacauggugcaaaaaucugggaaaacaggaacaauuaccuaucaaagagguauuuuauugccucaaaagguguggugcgcaaguggcaggagcaagguaauaaaaggauccuugccuuuaauuggagaagcagauugucuccacgaaaaauacgguggauuaaacaaaagcaagccuuacuacacaggggaacaugcaaaggccauaggaaauugcccaauaugggugaaaacacccuugaaguuggccaauggaaccaaauauagaccuccugcaaaacuauuaaaggaaagggguuucuucggagcuauugcugguuucuuagaaggaggaugggaaggaaugauugcagguuggcacggauacacaucccauggggcacauggaguagcgguggcagcagaccuuaagagcacucaagaggccauaaacaagauaacaaaaaaucucaacucuuugagugagcuggaaguaaagaaucuucaaagacuaagcggugccauggaugaacuccacaacgaaauacuagaauuagacgagaaaguggaugaucucagagcugauacgauaagcucacaaauagaacucgcaguccugcuuuccaaugaaggaauaauaaacagugaagaugagcaucucuuggcgcuugaaagaaagcugaagaaaaugcugggccccucugcuguagagauagggaauggaugcuuugaaaccaaacacaagugcaaccagaccugucucgacagaauagcugcugguaccuuugaugcaggagaauuuucucuccccaccuuugauucacugaauauuacugcugcaucuuuaaaugacgauggauuggauaaucauacuauacugcuuuacuacucaacugcugccuccaguuuggcuguaacauugaugauagcuaucuuuguuguuuauauggucuccagagacaauguuucuugcuccaucugucuauaa

SEQ ID NO: 58541 - RNA, 1758 nt, Artificial Sequence
  derived and/or modified CDS sequence (wt) from hemagglutinin__InfluenzaB__ACA96563
augaaggcaauaauuguacuacucaugguaguaacauccaaugcagaucgaaucugcacugggauaacaucgucaaacucaccacauguugucaaaacugcuacucaaggggaggucaaugugacugguguaauaccacugacaacaacacccaccaaaucucauuuugcaaaucucaaaggaacagaaaccagagggaaacuaugcccaaaaugccucaacugcacagaucuggacguggccuugggcagaccaaaaugcacggggaacauacccucggcaagaguuucaauacuccaugaagucagaccuguuacaucugggugcuuuccuauaaugcacgacagaacaaaaauuagacagcugccuaaccuucucagaggauacgaacauaucagguuaucaacucauaacguuaucaaugcagaaaaugcaccaggaggacccuacaaaauuggaaccucagggucuugcccuaacguuaccaauggaaacggauuuuucgcaacaauggcuugggccgucccaaaaaacgacaacaacaaaacagcaacaaauucauuaacaauagaaguaccauacauuuguacagaaggagaagaccaaauuaccguuuggggguuccacucugauaacgaaacccaaauggcaaagcucuauggggacucaaagccccagaaguucaccucaucugccaacggagugaccacacauuacguuucacagauuggugguuucccaaaucaaacagaagacggaggacuaccacaaagugguagaauuguuguugauuacauggugcaaaaaucugggaaaacaggaacaauuaccuaucaaagagguauuuuauugccucaaaaaguguggugcgcaaguggcaggagcaagguaauaaaaggauccuugccuuuaauuggagaagcagauugccuccacgaaaaauacgguggauuaaacaaaagcaagccuuacuacacaggggaacaugcaaaggccauaggaaauugcccaauaugggugaaaacacccuugaagcuggccaauggaaccaaauauagaccuccugcaaaacuauuaaaggaaagggguuuuuucggagcuauugcugguuucuuagaaggaggaugggaaggaaugauugcagguuggcacggauacacaucccauggggcacauggaguagcgguggcagcagaccuuaaaagcacucaagaggccauaaacaagauaacaaaaaaucucaacucuuugagugagcuggaaguaaagaaucuucaaagacuaagcggugccauggaugaacuccacaacgaaauacuagaacuagacgagaaaguggaugaucucagagcugauacaauaagcucacaaauagaacucgcaguccugcuuuccaaugaaggaauaauaaacagugaagaugagcaucucuuggcgcuugaaagaaagcugaagaaaaugcugggccccucugcuguagagauagggaauggaugcuuugaaaccaaacacaagugcaaccagaccugucucgacaggauagcugcugguaccuuugaugcaggagaauuuucucuccccaccuuugauucacugaauauuacugcugcaucuuuaaaugacgauggauuggauaaucauacuauacugcuuuacuacucaacugcugccuccaguuuggcuguaacauugaugauagcuaucuuuguuguuuauauggucuccagagacaauguuucuugcuccaucugucuauaa

SEQ ID NO: 58542 - RNA, 1758 nt, Artificial Sequence
  derived and/or modified CDS sequence (wt) from hemagglutinin__InfluenzaB__ACA96574
augaaggcaauaauuguacuacucaugguaguaacauccaaugcagaucgaaucugcacugggauaacaucgucaaacucaccacauguugucaaaacugcuacucaaggggaggucaaugugacugguguaauaccacugacaacaacacccaccaaaucucauuuugcaaaucucaaaggaacagaaaccagagggaaacuaugcccaaaaugccucaacugcacagaucuggacguggccuugggcagaccaaaaugcacggggaacauacccucggcaagaguuucaauacuccaugaagucagaccuguuacaucugggugcuuuccuauaaugcacgacagaacaaaaauuagacagcugccuaaccuucucagaggauacgaacauaucagguuaucaacucauaacguuaucaaugcagaaaaugcaccaggaggacccuacaaaauuggaaccucagggucuugcccuaacguuaccaauggaaacggauuuuucgcaacaauggcuugggccgucccaaaaaacgacaacaacaaaacagcaacaaauucauuaacaauagaaguaccauacauuuguacagaaggagaagaccaaauuaccguuuggggguuccacucugauaacgagacccaaauggcaaagcucuauggggacucaaagccccagaaguucaccucaucugccaacggagugaccacacauuacguuucacagauugguggcuucccaaaucaaacagaagacggaggacuaccacaaagugguagaauuguuguugauuacauggugcaaaaaucugggaaaacaggaacaauuaccuaucaaagagguauuuuauugccucaaaagguguggugcgcaaguggcaggagcaaaguaauaaaaggauccuugccuuuaauuggagaagcagauugccuccacgaaaaauacgguggauuaaacaaaagcaagccuuacuacacaggggaacaugcaaaggccauaggaaauugcccaauaugggugaaaacacccuugaagcuggccaauggaaccaaauauagaccuccugcaaaacuauuaaaggaaagggguuucuucggagcuauugcugguuucuuagaaggaggaugggaaggaaugauugcagguuggcacggauacacaucccauggggcacauggaguagcgguggcagcagaccuuaagagcacucaagaggccauaaacaagauaacaaaaaaucucaacucuuugagugagcuggaagugaagaaucuucaaagacuaagcggugccauggaugaacuccacaacgaaauacuagaacuagacgagaaaguggaugaucucagagcugauacaauaagcucacaaauagaacucgcaguccugcuuuccaaugaaggaauaauaaacagugaagaugagcaucucuuggcgcuugaaagaaagcugaagaaaaugcugggccccucugcuguagagauagggaauggaugcuuugaaaccaaacacaagugcaaccagaccugucucgacagaauagcugcugguaccuuugaugcaggagaauuuucucuccccacuuuugauucacugaauauuacugcugcaucuuuaaaugacgauggauuggauaaucauacuauacugcuuuacuacucaacugcugccuccaguuuggcuguaacauugaugauagcuaucuuuguuguuuauauggucuccagagacaauguuucuugcuccaucugucuauaa

SEQ ID NO: 58543 - RNA, 1758 nt, Artificial Sequence; identical to SEQ ID NO: 58529
  derived and/or modified CDS sequence (wt) from hemagglutinin__InfluenzaB__ACA96585

SEQ ID NO: 58544 - RNA, 1758 nt, Artificial Sequence
  derived and/or modified CDS sequence (wt) from hemagglutinin__InfluenzaB__ACA96596
augaaggcaauaauuguacuacucaugguaguaacaucuaaugcagaucgaaucugcacugggauaacaucgucaaacucaccacauguugucaaaacugcuacucaaggggaggucaaugugacugguguaauaccacugacaacaacacccaccaaaucucauuuugcaaaucucaaaggaacagaaaccagagggaaacuaugcccaaaaugccucaacugcacagaucuggacguggccuugggcagaccaaaaugcacggggaacauacccucggcaagaguuucaauacuccaugaagucagaccuguuacaucugggugcuuuccuauaaugcacgacagaacaaaaauuagacagcugccuaaccuucucagaggauacgaacauaucagguuaucaacucauaacguuaucaaugcagaaaaugcaccaggaggacccuacaaaauuggaaccucagggucuugcccuaacguuaccaauggaaacggauuuuucgcaacaauggcuugggccgucccaaaaaacgacaacaacaaaacagcaacaaauucauuaacaauagaaguaccauacauuuguacagaaggagaagaccaaauuaccguuuggggguuccacucugauaacgagacacaaauggcaaagcucuauggggacucaaagccccagaaguucaccucaucugccaacggagugaccacacauuacguuucacagauugguggcuucccaaaucaaacagaagacggaggacuaccacaaagugguagaauuguuguugauuacauggugcaaaaaucugggaaaacaggaacaauuaccuaucaaagagguauuuuauugccucaaaagguguggugcgcaaguggcaggagcaagguaauaaaaggauccuugccuuuaauuggagaagcagauugccuccacgaaaaauacgguggauuaaacaaaagcaagccuuauuacacaggggaacaugcaaaggccauaggaaauugcccaauaugggugaaaacacccuugaagcuggccaauggaaccaaauauagaccuccugcaaaacuauuaaaggaaagggguuucuucggagcuauugcugguuucuuagaaggaggaugggaaggaaugauugcagguuggcacggauacacaucccauggggcacauggaguagcgguggcagcagaccuuaagagcacucaagaggccauagacaagauaacaaaaaaucucaacucuuugagugagcuggaaguaaagaaucuucaaagacuaagcggugccauggaugaacuccacaacgaaauacuagaacuagacgagaaaguggaugaucucagagcugauacaauaagcucacaaauagaacucgcaguccugcuuuccaaugaaggaauaauaaacagugaagaugagcaucucuuggcgcuugaaagaaagcugaagaaaaugcugggccccucugcuguagagauagggaauggaugcuuugaaaccaaacacaagugcaaccagaccugucucgacagaauagcugcugguaccuuugaugcaggagaauuuucucuccccaccuuugauucacugaauauuacugcugcaucuuuaaaugacgauggauuggauaaucauacuauacugcuuuacuacucaacugcugccuccaguuuggcuguaacauugaugauagcuaucuuuguuguuuauauggucuccagagacaauguuucuugcuccaucugucuauaa

SEQ ID NO: 58545 - RNA, 1758 nt, Artificial Sequence
  derived and/or modified CDS sequence (wt) from hemagglutinin__InfluenzaB__ACA96607
augaaggcaauaauuguacuacucaugguaguaacauccaaugcagaucgaaucugcacugggauaacaucgucaaacucaccacauguugucaaaacugcuacucaaggggaggucaaugugacugguguaauaccacugacaacaacacccaccaaaucucauuuugcaaaucucaaaggaacagaaaccagagggaaacuaugcccaaaaugccucaacugcacagaucuggacguggccuugggcagaccaaaaugcacggggaacauacccucggcaagaguuucaauacuccaugaagucagaccuguuacaucugggugcuuuccuauaaugcacgacagaacaaaaauuagacagcugccuaaccuucucagaggauacgaacauaucagguuaucaacucauaacguuaucaaugcagaaaaugcaccaggaggacccuacaaaauuggaaccucagggucuugcccuaacguuaccaauggaaacggauuuuucgcaacaauggcuugggccgucccaaaaaacgacaacaacaaaacagcaaccaauucauuaacaauagaaguaccauacauuuguacagaaggagaagaccaaauuaccguuuggggguuccacucugauaacgaaacccaaauggcaaagcucuauggggacucaaagccccagaaguucaccucaucugccaacggagugaccacacauuacguuucacagauugguggcuucccaaaucaaacagaagacggaggacuaccacaaagugguagaauuguuguugauuacaugguacaaaaaucugggaaaacaggaacaauuaccuaucaaagagguauuuuauugccucaaaaaguguggugcgcaaguggcaggagcaagguaauaaaaggauccuugccuuuaauuggagaagcagauugccuccacgaaaaauacgguggauuaaacaaaagcaagccuuacuauacaggggaacaugcaaaggccauaggaaauugcccaauaugggugaaaacacccuugaagcuggccaauggaaccaaauauagaccuccugcaaaacuauuaaaggaaagggguuucuucggagcuauugcugguuucuuagaaggaggaugggaaggaaugauugcagguuggcacggauacacaucccauggggcacauggaguagcgguggcagcagaccuuaaaagcacucaagaggccauaaacaagauaacaaaaaaucucaacucuuugagugagcuggaaguaaagaaucuucaaagacuaagcggugccauggaugaacuccacaacgaaauacuagaacuagacgagaaaguggaugaucucagagcugauacaauaagcucacaaauagaacucgcaguccugcuuuccaaugaaggaauaauaaacagugaagaugagcaucucuuggcgcuugaaagaaagcugaagaaaaugcugggccccucugcuguagagauagggaauggaugcuuugaaaccaaacacaagugcaaccagaccugucucgacagaauagcugcugguaccuuugaugcaggagaauuuucucuccccaccuuugauucacugaauauuacugcugcaucuuuaaaugacgauggguuggauaaucauacuauacugcuuuacuacucaacugcugccuccaguuuggcuguaacauugaugauagcuaucuuuguuguuuauauggucuccagagacaauguuucuugcuccaucugucuauaa

SEQ ID NO: 58546 - RNA, 1758 nt, Artificial Sequence
  derived and/or modified CDS sequence (wt) from hemagglutinin__InfluenzaB__ACA96618
augaaggcaauaauuguacuacucaugguaguaacauccaaugcagaucgaaucugcacugggauaacaucgucaaacucaccacauguugucaaaacugcuacucaaggggaggucaaugugacugguguaauaccacugacaacaacacccaccaaaucucauuuugcaaaucucaaaggaacagaaaccagagggaaacuaugcccaaaaugccucaacugcacagaucuggacguggccuugggcagaccaaaaugcacggggaacauacccucggcaagaguuucaauacuccaugaagucagaccuguuacaucugggugcuuuccuauaaugcacgacagaacaaaaauuagacagcugccuaaccuucucagaggauacgaacauaucagguuaucaacucauaacguuaucaacgcagaaaaugcaccaggaggacccuacaaaauuggaaccucagggucuugcccuaauguuaccaauggaaacggauuuuucgcaacaauggcuugggccgucccaaaaaacgacaacaacaaaacagcaacaaauucauuaacaauagaaguaccauacauuuguacagaaggagaagaccaaauuaccguuuggggguuccacucugauaacgaaacccaaauggcaaagcucuauggggacucaaagccccagaaguucaccucaucugccaacggagugaccacacauuacguuucacagauugguggcuucccaaaucaaacagaagacggaggacuaccacaaagugguagaauuguuguugauuacauggugcaaaaaucugggaaaacaggaacaauuaccuaucaaagagguauuuuauugccucaaaaaguguggugcgcaaguggcaggagcaagguaauaaaaggauccuugccuuuaauuggagaagcagauugccuccacgaaaaauacgguggauuaaacaaaagcaagccuuacuacacaggggaacaugcaaaggccauaggaaauugcccaauaugggugaaaacacccuugaagcuggccaauggaaccaaauauagaccuccugcaaaacuauuaaaggaaagggguuucuucggagcuauugcugguuucuuagaaggaggaugggaaggaaugauugcagguuggcacggauacacaucccauggggcacauggaguagcgguggcagcagaccuuaaaagcacucaagaggccauaaacaagauaacaaaaaaucucaacucuuugagugagcuggaaguaaagaaucuucaaagacuaagcggugccauggaugaacuccacaacgaaauacuagaacuagacgagaaaguggaugaucucagagcugauacaauaagcucacaaauagaacucgcaguccugcuuuccaaugaaggaauaauaaacagugaagaugagcaucucuuggcgcuugaaagaaagcugaagaaaaugcugggccccucugcuguagagauagggaauggaugcuuugaaaccaaacacaagugcaaccagaccugucucgacagaauagcugcugguaccuuugaugcaggagaauuuuuucuccccaccuuugauucacugaauauuacugcugcaucuuuaaaugacgauggauuggauaaucauacuauacugcuuuacuacucaacugcugccuccaguuuggcuguaacauugaugauagcuaucuuuguuguuuauauggucuccagagacaauguuucuugcuccaucugucuauaa

SEQ ID NO: 58547 - RNA, 1758 nt, Artificial Sequence
  derived and/or modified CDS sequence (wt) from hemagglutinin__InfluenzaB__ACA96629
augaaggcaauaauuguacuacucaugguaguaacauccaaugcagaucgaaucugcacugggauaacaucgucaaacucaccacauguugucaaaacugcuacucaaggggaggucaaugugacugguguaauaccacugacaacaacacccaccaaaucucauuuugcaaaucucaaaggaacagaaaccagagggaaacuaugcccaaaaugccucaacugcacagaucuggacguggccuugggcagaccaaaaugcacggggaacauacccucggcaagaguuucaauacuccaugaagucagaccuguuacaucugggugcuuuccuauaaugcacgacagaacaaaaauuagacagcugccuaaccuucucagaggauacgaacauaucagguuaucaacucauaacguuaucaaugcagaaaaugcaccaggaggacccuacaaaauuggaaccucagggucuugcccuaacguuaccaauggaaacggauuuuucgcaacaauggcuugggccgucccaaaaaacgacaacaacaaaacagcaacaaauucauuaacaauagaaguaccauacauuuguacagaaggagaagaccaaauuaccguuuggggguuccacucugauaacgagacccaaauggcaaagcucuauggggacucaaagccccagaaauucaccucaucugccaacggagugaccacacauuacguuucacagauugguggcuucccaaaucaaacagaagacggaggacuaccacaaagugguagaauuguuguugauuacauggugcaaaaaucugggaaaacaggaacaauuaccuaucaaagagguauuuuauugccucaaaagguguggugcgcaaguggcaggagcaagguaauaaaaggauccuugccuuuaauuggagaagcagauugccuccacgaaaaauacgguggauuaaacaaaagcaagccuuauuacacaggggaacaugcaaaggccauaggaaauugcccaauaugggugaaaacacccuugaagcuggccaauggaaccaaauauagaccuccugcaaaacuauuaaaggaaagggguuuuuucggagcuauugcugguuucuuagaaggaggaugggaaggaaugauugcagguuggcacggauacacaucccauggggcacauggaguagcgguggcagcagaccuuaagagcacucaagaggccauaaacaagauaacaaaaaaccucaacucuuugagugagcuggaaguaaagaaucuucaaagacuaagcggugccauggaugaacuccacaacgaaauacuagaacuagacgagaaaguggaugaucucagagcugauacaauaagcucacaaauagaacucgcaguccugcuuuccaaugaaggaauaauaaacagugaagaugagcaucucuuggcgcuugaaagaaagcugaagaaaaugcugggccccucugcuguagagauagggaauggaugcuuugaaaccaaacacaagugcaaccagaccugucucgacagaauagcugcugguaccuuugaugcaggagaauuuucucuccccaccuuugauucacugaauauuacugcugcaucuuuaaaugacgauggauuggauaaucauacuauacugcuuuacuacucaacugcugccuccaguuuggcuguaacauugaugauagcuaucuuuguuguuuauauggucuccagagacaauguuucuugcuccaucugucuauaa

SEQ ID NO: 58548 - RNA, 1758 nt, Artificial Sequence
  derived and/or modified CDS sequence (wt) from hemagglutinin__InfluenzaB__ACA96640
augaaggcaauaauuguacuacucaugguaguaacauccaaugcagaucgaaucugcacugggauaacaucgucaaacucaccacauguugucaaaacugcuacucaaggggagguuaaugugacugguguaauaccacugacaacaacacccaccaaaucucauuuugcaaaucucaaaggaacagaaaccagagggaaacuaugcccaaaaugcuucaacugcacagaucuggacguggccuugggcagaccaaaaugcacggggaacauacccucggcaagaguuucaauacuccaugaagucagaccuguuacaucugggugcuuuccuauaaugcacgacagaacaaaaauuagacagcugccuaaccuucucagaggauacgaacauaucagguuaucaacucauaacguuaucaaugcagaaaaugcaccaggaggacccuacaaaauuggaaccucagggucuugcccuaacguuaccaauggaaacggauuuuucgcaacaauggcuugggccgucccaaaaaacgacaacaacaaaacagcaacaaauucauuaacaauagaaguaccauacauuuguacagaaggagaagaccaaauuaccguuuggggguuccacucugauaacgagacccaaauggcaaagcucuauggggacucaaagccccagaaguucaccucaucugccaacggagugaccacacauuacguuucacagauugguggcuucccaaaucaaacagaagacggaggacugccacaaagugguagaauuguuguugauuacauggugcaaaaaucugggaaaacaggaacaauuaccuaucaaagagguauuuuauugccucaaaagguguggugcgcaaguggcaggagcaagguaauaaaaggauccuugccuuuaauuggagaagcagauugccuccacgaaaaauacgguggauuaaacaaaagcaagccuuacuacacaggggaacaugcaaaggccauaggaaauugcccaauaugggugaaaacacccuugaagcuggccaauggaaccaaauauagaccuccugcaaaacuauuaaaggaaagggguuucuucggagcuauugcugguuucuuagaaggaggaugggaaggaaugauugcagguuggcacggauacacaucccauggggcacauggaguagcgguggcagcagaccuuaagagcacucaagaggccauaaacaagauaacaaaaaaucucaacucuuugagugagcuggaaguaaagaaucuucaaagacuaagcggugccauggaugaacuccacaacgaaauacuagaacuagacgagaaaguggaugaucucagagcugauacaauaagcucacaaauagaacucgcaguccugcuuuccaaugaaggaauaauaaacagugaagaugagcaucucuuggcgcuugaaagaaagcugaagaaaaugcugggccccucugcuguagagauagggaauggaugcuuugaaaccaaacacaagugcaaccagaccugucucgacagaauagcugcugguaccuuugaugcaggagaauuuucucuccccaccuuugauucacugaauauuacugcugcaucuuuaaaugacgauggauuggauaaucauacuauacugcuuuacuacucaacugcugccuccaguuuggcuguaacauugaugauagcuaucuuuguuguuuauauggucuccagagacaauguuucuugcuccaucugucuauaa

SEQ ID NO: 58549 - RNA, 1755 nt, Artificial Sequence
  derived and/or modified CDS sequence (wt) from hemagglutinin__InfluenzaB__ACD56566
augaaggcaauaauuguacuacucaugguaguaacauccaaugcagaucgaaucugcacugggauaacaucuucaaacucaccucauguggucaaaacagcuacucaaggggaggucaaugugacugguguaauaccacugacaacaacaccaacaaaaucuuauuuugcaaaucucaaaggaacaaggaccagagggaaacuauguccagacugucucaacuguacagaucuggauguggccuugggcagaccaauguguguggggaccacaccuucggcaaaagcuucaauacuccacgaagucagaccuguuacauccgggugcuuuccuauaaugcacgacagaacaaaaaucagacaacuacccaaucuucucagaggauaugaaaauaucagauuaucaacccaaaacguugucgaugcagaaaaugcaccaggaggacccuacagacuuggaaccucaggaucuugcccuaacgcuaccaguaaaagcggauuuuuugcaacaauggcuugggcugucccaaaggacaacaacaaaaaugcaacgaacccacuaacaguagaaguaccauacguuuguacagaaggggaagaccaaauuacuguuuggggguuccauucagauaacaaaacccaaaugaagaaccucuauggagacucaaauccucaaaaguucaccucaucugcuaauggaguaaccacacauuauguuucucagauuggcggcuucccagcucaaacagaagacggaggacuaccacaaagcggcagaauuguuguugauuacauggugcaaaaaccuaggaaaacaggaacaauugucuaucaaagagguguuuuguugccucaaaagguguggugcgcgaguggcaggagcaaaguaauaaaaggguccuugccuuuaauuggugaagcagauugccuucaugaaaaauacgguggauuaaacaaaagcaagccuuacuacacaggagaacaugcaaaagccauaggaaauugcccaauaugggugaaaacaccuuugaagcuugccaauggaaccaaauauagaccuccugcaaaacuauuaaaggaaagggguuucuucggagcuauugcugguuuccuagaaggaggaugggaaggaaugauugcagguuggcacggauacacaucucacggagcacauggaguggcaguggcggcagaccuuaagaguacgcaagaagcuauaaacaagauaacaaaaaaucucaauucuuugagugagcuagaaguaaagaaucuucaaagacuaaguggugccauggaugaacuccacaacgaaauacucgagcuggaugagaaaguggaugaucucagagcugacacuauaagcucgcaaauagaacuugcagucuugcuuuccaaugaaggaauaauaaacagugaagaugagcaucuauuggcacuugagagaaaacuaaagaaaaugcugggucccucugcuguagacauaggaaauggaugcuucgaaaccaaacacaagugcaaccagaccugcuuagacaagauagcugcuggcaccuuuaaugcaggagaauuuucucuccccacuuuugauucacugaacauuacugcugcaucuuuaaaugaugauggauuggauaaccauacuauacugcucuauuacucaacugcugcuucuaguuuggcuguaacauugaugcuagcuauuuuuauuguuuauauggucuccagagacaauguuucaugcuccaucugucuauaa

SEQ ID NO: 58550 - RNA, 1755 nt, Artificial Sequence
  derived and/or modified CDS sequence (wt) from hemagglutinin__InfluenzaB__ACD56577
augaaggcaauaauuguacuacucaugguaguaacauccaaugcagaucgaaucugcacugggauaacaucuucaaacucaccucauguggucaaaacagcuacucaaggggaggucaaugugacugguguaauaccacugacaacaacaccaacaaaaucuuauuuugcaaaucucaaaggaacaaggaccagagggaaacuauguccagacugucucaacuguacagaucuggauguggccuugggcagaccaaugugugugggaaccacaccuucggcaaaagcuucaauacuccacgaagucagaccuguuacauccgggugcuuuccuauaaugcacgacagaacaaaaaucagacaacuacccaaucuucucagaggauaugaaaauaucagauuaucaacccaaaacguuaucgaugcagaaaaugcaccaggaggacccuacagacuuggaaccucaggaucuugcccuaacgcuaccaguaaaagcggauuuuucgcaacaauggcuugggcugucccaaaggacaacaacaaaaaugcaacgaacccacuaacaguagaaguaccauacauuuguacagaaggggaagaccaaauuacuguuuggggguuccauucagauaacaaagcccaaaugaagaaccucuauggagacucaaauccucaaaaguucaccucaucugcuaauggaguaaccacacauuauguuucucagauuggcggcuucccagcucaaacagaagacggaggacuaccacaaagcggcagaauuguuguugauuacauggugcaaaaaccuaggaaaacaggaacaauugucuaucaaagagguguuuuguugccucaaaagguguggugcgcaaguggcaggagcaaaguaauaaaaggguccuugccuuuaauuggugaagcagauugccuucaugaaaaauacgguggauuaaacaaaagcaagccuuacuacacaggagaacaugcaaaagccauaggaaauugcccaauaugggugaaaacaccuuugaagcuugccaauggaaccaaauauagaccuccugcaaaacuauuaaaggaaagggguuucuucggagcuauugcugguuuccuagaaggaggaugggaaggaaugauugcagguuggcacggauacacaucucacggagcacauggaguggcaguggcggcagaccuuaagaguacgcaagaagcuauaaacaagauaacaaaaaaucucaauucuuugagugagcuagaaguaaagaaucuucaaagacuaaguggugccauggaugaacuccacaacgaaauacucgagcuggaugagaaaguggaugaucucagagcugacacuauaagcucgcaaauagaacuugcagucuugcuuuccaaugaaggaauaauaaacagugaagaugaacaucuauuggcacuugagagaaaacuaaagaaaaugcugggucccucugcuguagacauaggaaauggaugcuucgaaaccaaacacaagugcaaccagaccugcuuagacaggauagcugcuggcaccuuuaaugcaggagaauuuucucuccccacuuuugauucacugaacauuacugcugcaucuuuaaaugaugauggauuggauaaccauacuauacugcuuuauuacucaacugcugcuucuaguuuggcuguaacauugaugcuagcuauuuuuauuguuuauauggucuccagagacaacguuucaugcuccaucugucuauaa

SEQ ID NO: 58551 - RNA, 1758 nt, Artificial Sequence; identical to SEQ ID NO: 58532
  derived and/or modified CDS sequence (wt) from hemagglutinin__InfluenzaB__ACF41658

SEQ ID NO: 58552 - RNA, 1758 nt, Artificial Sequence
  derived and/or modified CDS sequence (wt) from hemagglutinin__InfluenzaB__ACF54136
augaaggcaauaauuguacuacucaugguaguaacauccaaugcagaucgaaucugcacugggauaacaucgucaaacucaccacauguugucaaaacugcuacucaaggggagguuaaugugacugguguaauaccacugacaacaacacccaccaaaucucauuuugcaaaucucaaaggaacagaaaccagagggaaacuaugcccaaaaugccucaacugcacagaucuggacguggccuugggcagaccaaaaugcacggggaacauacccucggcaagaguuucaauacuccaugaagucagaccuguuacaucugggugcuuuccuauaaugcacgacagaacaaaaauuagacagcugccuaaccuucucagaggauacgaacauaucagguuaucaacucauaacguuaucaaugcagaaaaugcaccaggaggacccuacaaaauuggaaccucagggucuugcccuaacguuaccaauggaaacggauuuuucgcaacaauggcuugggccgucccaaaaaacgacaacaacaaaacagcaacaaauucauuaacaauagaaguaccauacauuuguacagaaggagaagaccaaauuaccguuuggggguuccacucugauaacaagacccaaauggcaaagcucuauggggacucaaagccccagaaguucaccucaucugccaacggagugaccacacauuacguuucacagauugguggcuucccaaaucaaacagaagacggaggacuaccacaaagugguagaauuguuguugauuacauggugcaaaaaucugggaaaacaggaacaauuaccuaucaaagagguauuuuauugccucaaaagguguggugcgcaaguggcaggagcaagguaauaaaaggauccuugccuuuaauuggagaagcagauugccuccacgaaaaauacgguggauuaaacaaaagcaagccuuacuacacaggggaacaugcaaaggccauaggaaauugcccaauaugggugaaaacacccuugaagcuggccaauggaaccaaauauagaccuccugcaaaacuauuaaaggaaagggguuucuucggagcuauugcugguuucuuagaaggaggaugggaaggaaugauugcagguuggcacggauauacaucccauggggcacauggaguagcgguggcagcagaccuuaagagcacucaagaggccauaaacaagauaacaaaaaaucucaacucuuugagugagcuggaaguaaagaaucuucaaagacuaagcggugccauggaugaacuccacaacgaaauacuagaacuagacgagaaaguggaugaucucagagcugauacaauaagcucacaaauagaacucgcaguccugcuuuccaaugagggaauaauaaacagugaagaugagcaucucuuggcgcuugaaagaaagcugaagaaaaugcugggccccucugcuguagagauagggaauggaugcuuugaaaccaaacacaagugcaaccagaccugucucgacagaauagcugcugguaccuuugaugcaggagaauuuucucuccccaccuuugauucacugaauauuacugcugcaucuuuaaaugacgauggauuggauaaucauacuauacugcuuuacuacucaacugcugccuccaguuuggcuguaacauugaugauagcuaucuuuguuguuuauauggucuccagagacaauauuucuugcuccaucugucuauaa

SEQ ID NO: 58553 - RNA, 1758 nt, Artificial Sequence
  derived and/or modified CDS sequence (wt) from hemagglutinin__InfluenzaB__ACF54147
augaaggcaauaauuguacuacucaugguaguaacauccaaugcagaucgaaucugcacugggauaacaucgucaaacucaccacauguugucaaaacugcuacucaaggggaggucaaugugacugguguaauaccacugacaacaacacccaccaaaucucauuuugcaaaucucaaaggaacagaaaccagagggaaacuaugcccaaaaugccucaacugcacagaucuggacguggccuugggcagaccaaaaugcacggggaacauacccucggcaagaguuucaauacuccaugaagucagaccuguuacaucugggugcuuuccuauaaugcacgacagaacaaaaauuagacagcugccuaaccuucucagaggauacgaacauaucagguuaucaacucauaacguuaucaaugcagaaaaugcaccaggaggacccuacaaaauuggaaccucagggucuugcccuaacguuaccaauggaaacggauuuuucgcaacaauggcuugggccgucccaaaaaacgacaacaacaaaacagcaacaaauucauuaacaauagaaguaccauacauuuguacagaaggagaagaccaaauuaccguuuggggguuccacucugauaacgaaacccaaauggcaaagcucuauggggacucaaagccccagaaguucaccucaucugccaacggagugaccacacauuacguuucacagauugguggcuucccaaaucaaacagaagacggaggacuaccacaaagugguagaauuguuguugauuacauggugcaaaaaucugggaaaacaggaacaauuaccuaucaaagagguauuuuauugccucaaaaaguguggugcgcaaguggcaggagcaagguaauaaaaggauccuugccuuuaauuggagaagcagauugccuccacgaaaaauacgguggauuaaacaaaagcaagccuuacuacacaggggaacaugcaaaggccauaggaaauugcccaauaugggugaaaacacccuugaagcuggccaauggaaccaaauauagaccuccugcaaaacuauuaaaggaaagggguuucuucggagcuauugcugguuucuuagaaggaggaugggaaggaaugauugcagguuggcacggauacacaucccauggggcacauggaguagcgguggcagcagaccuuaagagcacucaagaggccauaaacaagauaacaaaaaaucucaacucuuugagugagcuggaaguaaagaaucuucaaagacuaagcggugccauggaugaacuccacaacgaaauacuagaacuagacgagaaaguggaugaucucagagcugauacaauaagcucacaaauagaacucgcaguccugcuuuccaaugaaggaauaauaaacagugaagaugagcaucucuuggcgcuugaaagaaagcugaagaaaaugcugggccccucugcuguagagauagggaauggaugcuuugaaaccaaacacaagugcaaccagaccugucucgacagaauagcugcugguaccuuugaugcaggagaauuuucucuccccacuuuugauucacugaauauuacugcugcaucuuuaaaugacgauggauuggauaaucauacuauacugcuuuacuacucaacugcugccuccaguuuggcuguaacauugaugauagcuaucuuuguuguuuauauggucuccagagacaauguuucuugcuccaucugucuauaa

SEQ ID NO: 58554 - RNA, 1755 nt, Artificial Sequence
  derived and/or modified CDS sequence (wt) from hemagglutinin__InfluenzaB__ACF54158
augaaggcaauaauuguacuacucaugguaguaacauccaaugcagaucgaaucugcacugggauaacaucuucaaacucaccucauguggucaaaacagcuacucaaggggaggucaaugugacuggugugauaccacugacaacaacaccaacaaaaucuuauuuugcaaaucucaaaggaacaaggaccagagggaaacuaugcccagacugucucaacuguacagaucuggauguggccuugggcaggccaauguguguggggaccacaccuucugcgaaagcuucaauacuccacgaagucagaccuguuacauccgggugcuuuccuauaaugcacgacagaacaaaaaucaggcaacuagccaaucuucucagaggauaugaaaauaucagguuaucaacccaaaacguuaucgaugcagaaaaggcaccaggaggacccuacagacuuggaaccucaggaucuugcccuaacgcuaccaguaaaagcggauuuuucgcaacaauggcuugggcugucccaaaggacaacaacaaaaaugcaacgaacccacuaacaguagaaguaccauacauuuguacagaaggggaagaccaaauuacuguuuggggguuccauucagauaacaaaacccaaaugaagaaccucuauggagacucaaauccucaaaaguucaccucaucugcuaauggaguaaccacacauuauguuucucagauuggcggcuucccagaucaaacagaagacggaggacuaccacaaagcgguagaauuguuguugauuacaugaugcaaaaaccugggaaaacaggaacaauugucuaucaaagagguguuuuguugccucaaaagguguggugcgcgaguggcaggagcaaaguaauaaaaggguccuugccuuuaauuggugaagcagauugccuucaugaaaaauacgguggauuaaacaaaagcaggccuuacuacacaggagaacaugcaaaagccauaggaaauugcccaauauggguaaaaacaccuuugaagcuugccaauggaaccaaauauagaccuccugcaaaacuauuaaaggaaagggguuucuucggagcuauugcugguuuccuagaaggaggaugggaaggaaugauugcagguuggcacggauacacaucucacggagcacauggaguggcaguggcggcagaccuuaagaguacacaagaagcuauaaacaagauaacaaaaaaucucaauucuuugagugagcuagaaguaaagaaucuucaaagacuaaguggugccauggaugaacuccacaacgaaauacucgagcuggaugagaaaguggaugaucucagagcugacacuauaagcucacaaauagaacuugcagucuugcuuuccaacgaaggaauaauaaacagugaagacgagcaucuauuggcacuugagagaaaacuaaagaaaaugcugggucccucugcuguagacauaggaaauggaugcuucgaaaccaaacacaaaugcaaccagaccugcuuagacaggauagcugcuggcaccuuuaaugcaggagaauuuucucuccccacuuuugauucauugaacauuacugcugcaucuuuaaaugaugauggauuggauaaccauacuauacugcucuauuacucaacugcugcuucuaguuuggcuguaacauugaugcuagcuauuuuuauuguuuauauggucuccagagacaacguuucaugcuccaucugucuauaa

SEQ ID NO: 58555 - RNA, 1755 nt, Artificial Sequence
  derived and/or modified CDS sequence (wt) from hemagglutinin__InfluenzaB__ACF54169
augaaggcaauaauuguacuacucaugguaguaacauccaaugcagaucgaaucugcacugggauaacaucuucaaacucaccucauguggucaaaacagcuacucaaggggaggucaaugugacugguguaauaccacugacaacaacaccaacaaaaucuuauuuugcaaaucucaaaggaacaaggaccagagggaaacuauguccagacugucucaacuguacagaucuggauguggccuugggcagaccaauguguguggggaccacaccuucggcaaaagcuucaauacuccacgaagucagaccuguuacauccgggugcuuuccuauaaugcacgacagaacaaaaaucagacaacuacccaaucuucucagaggauaugaaaauaucagauuaucaacccaaaacguuaucgaugcagaaaaugcaccaggaggacccuacagacuuggaaccucaggaucuugcccuaacgcuaccaguaaaagcggauuuuucgcaacaauggcuugggcugucccaaaggacaacaacaaaaaugcaacgaacccacuaacaguagaaguaccauacguuuguacagaaggggaagaccaaauuacuguuuggggguuccauucagauaacaaaaccccaaugaagaaccucuauggagacucaaauccucaaaaguucaccucaucugcuaauggaguaaccacacauuauguuucucagauuggcggcuucccagcucaaacagaagacgaaggaauaccacaaagcggcagaauuguuguugauuacauggugcaaaaaccuaggaaaacaggaacaauugucuaucaaagagguguuuuguugccucaaaagguguggugcgcgaguggcaggagcaaaguaauaaaaggguccuugccuuuaauuggugaagcagauugccuucaugaaaaauacgguggauuaaacaaaagcaagccuuacuacacaggagaacaugcaaaagccauaggaaauugcccaauaugggugaaaacaccuuugaagcuugccaauggaaccaaauauagaccuccugcaaaacuauuaaaggaaagggguuucuucggagcuauugcugguuuccuagaaggaggaugggaaggaaugauugcagguuggcacggauacacaucucacggagcacauggaguggcaguggcggcagaccuuaagaguacgcaagaagcuauaagcaagauaacaaaaaaucucaauucuuugagugagcuagaaguaaagaaucuucaaagacuaaguggugccauggaugaacuccacaacgaaauacucgagcuggaugagaaaguggaugaucucagagcugacacuauaagcucgcaaauagaacuugcagucuugcuuuccaaugaaggaauaauaaacagugaagaugagcaucuauuggcacuugagagaaaacuaaagaaaaugcugggucccucugcuguagacauaggaaauggaugcuucgaaaccaaacacaagugcaaccagaccugcuuagacaggauagcugcuggcaccuuuaaugcaggagaauuuucucuccccacuuuugauucacugaacauuacugcugcaucuuuaaaugaugauggauuggauaaccauacuauacugcucuauuacucaacugcugcuucuaguuuggcuguaacauugaugcuagcuauuuuuauuguuuauauggucuccagagacaacguuucaugcuccaucugucuauaa

SEQ ID NO: 58556 - RNA, 1755 nt, Artificial Sequence
  derived and/or modified CDS sequence (wt) from hemagglutinin__InfluenzaB__ACF54180
augaaggcaauaauuguacuacucaugguaguaacauccaaugcagaucgaaucugcacugggauaacaucuucaaacucaccucauguggucaaaacagcuacucaaggggaggucaaugugacugguguaauaccacugacaacaacaccaacaaaaucuuauuuugcaaaucucaaaggaacaaggaccagagggaaacuauguccagacugucucaacuguacagaucuggauguggccuugggcagaccaauguguguggggaccacaccuucggcaaaagcuucaauacuccacgaagucagaccuguuacauccgggugcuuuccuauaaugcacgacagaacaaaaaucagacaacuacccaaucuucucagaggauaugaaaauaucagauuaucaacccaaaacguuaucgaugcagaaaaugcaccaggaggacccuacagacuuggaaccucaggaucuugcccuaacgcuaccaguaaaagcggauuuuucgcaacaauggcuugggcugucccaaaggacaacaacaaaaaugcaacgaacccacuaacaguagaaguaccauacguuuguacagaaggggaagaccaaauuacuguuuggggguuccauucagauaacaaaaccccaaugaagaaccucuauggagacucaaauccucaaaaguucaccucaucugcuaauggaguaaccacacauuauguuucucagauuggcggcuucccagcucaaacagaagacggaggacuaccacaaagcggcagaauuguuguugauuacauggugcaaaaaccuaggaaaacaggaacaauugucuaucaaagagguguuuuguugccucaaaagguguggugcgcgaguggcaggagcaaaguaauaaaaggguccuugccuuuaauuggugaagcagauugccuucaugaaaaauacgguggauuaaacaaaagcaagccuuacuacacaggagaacaugcaaaagccauaggaaauugcccaauaugggugaaaacaccuuugaagcuugccaauggaaccaaauauagaccuccugcaaaacuauuaaaggaaagggguuucuucggagcuauugcugguuuccuagaaggaggaugggaaggaaugauugcagguuggcacggauacacaucucacggagcacauggaguggcaguggcggcagaccuuaagaguacgcaagaagcuauaaacaagauaacaaaaaaucucaauucuuugagugagcuagaaguaaagaaucuucaaagacuaaguggugccauggaugaacuccacaacgaaauacucgagcuggaugagaaaguggaugaucucagagcugacacuauaagcucgcaaauagaacuugcagucuugcuuuccaaugaaggaauaauaaacagugaagaugagcaucuauuggcacuugagagaaaacuaaagaaaaugcugggucccucugcuguagacauaggaaauggaugcuucgaaaccaaacacaagugcaaccagaccugcuuagacaggauagcugcuggcaccuuuaaugcaggagaauuuucucuccccacuuuugauucacugaacauuacugcugcaucuuuaaaugaugauggauuggauaaccauacuauacugcucuauuacucaacugcugcuucuaguuuggcuguaacauugaugcuagcuauuuuuauuguuuauauggucuccagagacaacguuucaugcuccaucugucuauaa

SEQ ID NO: 58557 - RNA, 1755 nt, Artificial Sequence
  derived and/or modified CDS sequence (wt) from hemagglutinin__InfluenzaB__ACF54202
augaaggcaauaauuguacuacucaugguaguaacauccaaugcagaucgaaucugcacugggauaacaucuucaaacucaccucauguggucaaaacagcuacucaaggggaggucaaugugacugguguaauaccacugacaacaacaccaacaaaaucuuauuuugcaaaucucaaaggaacaaggaccagagggaaacuauguccagacugucucaacuguacagaucuggauguggccuugggcagaccaauguguguggggaccacaccuucggcaaaagcuucaauacuccacgaagucagaccuguuacauccgggugcuuuccuauaaugcacgacagaacaaaaaucagacaacuacccaaucuucucagaggauaugaaaauaucagauuaucaacccaaaacguuaucgaugcagaaaaugcaccaggaggacccuacagacuuggaaccucaagaucuugcccuaacgcuaccaguaaaagcggauuuuucgcaacaauggcuugggcugucccaaaggacaacaacaaaaaugcaacgaacccacuaacaguagaaguaccauacguuuguacagaaggggaagaccaaauuacuguuuggggguuccauucagauaacaaaacccaaaugaagaaccucuauggagacucaaauccucaaaaguucaccucaucugcuaauggaguaaccacacauuauguuucucagauuggcggcuucccagcucaaacagaagacgaaggacuaccacaaagcggcagaauuguuguugauuacauggugcaaaaaccuagaaaaacaggaacaauugucuaucaaagagguguuuuguugccucaaaagguguggugcgcgaguggcaggagcaaaguaauaaaaggguccuugccuuuaauuggugaagcagauugccuucaugaaaaauacgguggauuaaacaaaagcaagccuuacuacacaggagaacaugcaaaagccauaggaaauugcccaauaugggugaaaacaccuuugaagcuugccaauggaaccaaauauagaccuccugcaaaacuauuaaaggaaagggguuucuucggagcuauugcugguuuccuagaaggaggaugggaaggaaugauugcagguuggcacggauacacaucucacggagcacauggaguggcaguggcggcagaccuuaagaguacgcaagaagcuauaaacaagauaacaaaaaaucucaauucuuugagugagcuagaaguaaagaaucuucaaagacuaaguggugccauggaugaacuccacaacgaaauacucgagcuggaugagaaaguggaugaucucagagcugacacuauaagcucgcaaauagaacuugcagucuugcuuuccaaugaaggaauaauaaacagugaagaugagcaucuauuggcacuugagagaaaacuaaagaaaaugcugggucccucugcuguagacauaggaaauggaugcuucgaaaccaaacacaagugcaaccagaccugcuuagacaggauagcugcuggcaccuuuaaugcaggagaauuuucucuccccacuuuugauucacugaacauuacugcugcaucuuuaaaugaugauggauuggauaaccauacuauacugcucuauuacucaacugcugcuucuaguuuggcuguaacauugaugcuagcuauuuuuauuguuuauauggucuccagagacaacguuucaugcuccaucugucuauaa

SEQ ID NO: 58558 - RNA, 1755 nt, Artificial Sequence
  derived and/or modified CDS sequence (wt) from hemagglutinin__InfluenzaB__ACF54213
augaaggcaauaauuguacuacucaugguaguaacauccaaugcagaucgaaucugcacugggauaacaucuucaaacucaccucauguggucaaaacagccacucaaggggaggucaaugugacuggugugauaccacugacaacaacaccaacaaaaucuuauuuugcaaaucucaaaggaacaaggaccagagggaaacuaugcccagacugucucaacuguacagaucuggauguggccuugggcagaccaauguguguggggaccacaccuucugcgaaagcuucaauacuccacgaagucagaccuguuacaucugggugcuuuccuauaaugcacgacagaacaaaaaucaggcaacuacccaaucuucucagaggauaugaaaauaucagguuaucaacccaaaacguuaucgaugcagaaaaggcaccaggaggacccuacagacuuggaaccucaggaucuugcccuaacgcuaccaguaaaagcggauuuuucgcaacaauggcuugggcugucccaaaggacaacaacaaaaaugcaacgaacccacuaacaguagaaguaccauacauuuguacagaaggggaagaccaaauuacuguuuggggguuccauucagaugacaaaacccaaaugaagaaccucuauggggacucaaauccucaaaaguucaccucaucugcuaauggaguaaccacacauuauguuucucagauuggcggcuucccagaucaaacagaagacggaggacuaccacaaagcggcagaauuguuguugauuacaugaugcaaaaaccugggaaaacaggaacaauugucuaucaaagagguguuuuguugccucaaaagguguggugcgcgaguggcaggagcaaaguaauaaaaggguccuugcccuuaauuggugaagcagauugccuucaugaaaaauacgguggauuaaacaaaagcaagccuuacuacacaggagaacaugcaaaagccauaggaaauugcccaauaugggugaaaacaccuuugaagcuugccaauggaaccaaauauagaccuccugcaaaacuauuaaaggaaagggguuucuucggagcuauugcugguuuccuagaaggaggaugggaaggaaugauugcagguuggcacggauacacaucucacggagcacauggaguggcaguggcggcagaccuuaagaguacacaagaagcuauaaacaagauaacaaaaaaucucaauucuuugagugagcuagaaguaaagaaucuucaaagacuaaguggugccauggaugaacuccacaacgaaauacucgagcuggaugagaaaguggaugaucucagagcugacacuauaagcucacaaauagaacuugcagucuugcuuuccaacgaaggaauaauaaacagugaaaaugagcaucuauuggcacuugagagaaaacuaaagaaaaugcugggucccucugcuguagacauaggaaauggauguuucgaaaccaaacacaagugcaaccagaccugcuuagacaggauagcugcuggcaccuuuaaugcaggagaauuuucucuccccacuuuugauucacugaacauuacugcugcaucuuuaaaugaugauggauuggauaaccauacuauacugcucuauuacucaacugcugcuucuaguuuggcuguaacauugaugcuagcuauuuuuauuguuuauauggucuccagagacaacguuucaugcuccaucugucuauaa

SEQ ID NO: 58559 - RNA, 1758 nt, Artificial Sequence
  derived and/or modified CDS sequence (wt) from hemagglutinin__InfluenzaB__ACF54224
augaaggcaauaauuguacuacucaugguaguaacauccaaugcagaucgaaucugcacugggauaacaucgucaaacucaccucauguggucaaaacugcuacucaaggggaggucaaugugacuggugugauaccacugacaacaacacccaccaaaucucauuuugcaaaucucaaaggaacaaaaaccagagggaaacuaugcccaaaaugccucaacugcacagaucuggacguggccuugggcagaccaaaaugcacggggaacauacccucggcagaaguuucaauacuccaugaagucagaccuguuacaucugggugcuuuccuauaaugcacgacagaacaaaaauuagacagcugcccaaccuucucagaggauacgaacauaucagguuaucaacucauaacguuaucaaugcagaaaaggcaccaggaggacccuacaaaauuggaaccucagggucuugcccuaacguuaccaauggaaacggauuuuucgcaacaauggcuugggccgucccaaaaaacgacaacaacaaaacagcaacaaauucauuaacaauagaaguaccauacauuuguacagaaggagaagaccaaauuaccguuuggggguuccacucugauaacgaaacccaaauggcaaaacucuauggggacucaaagccccagaaguucaccucaucuuccaacggagugaccacacauuacguuucacagauugguggcuucccaaaucaaacggaagacggaggacuaccacaaagugguagaauuguuguugauuacauggugcaaaaaucugggaaaacaggaacaauuaccuaucaaagagguauuuuauugccucaaaaaguguggugcgcaaguggcaggagcaagguaauaaaaggauccuugccuuuaauuggagaagcagauugccuccacgaaagauacgguggauuaaacaaaagcaagccuuacuacacaggggaacaugcaaaggccauaggaaauugcccaauaugggugaaaacacccuugaagcuggccaauggaaccaaauauagaccuccugcaaaacuauuaaaggaaagggguuucuucggagcuauugcugguuucuuagaaggaggaugggaaggaaugauugcagguuggcacggauacacaucccauggggcacauggaguagcaguggcagcagaccuuaagagcacucaagaagccauaaacaagauaacaaaaaaucucaauucuuugagugagcuggaaguaaagaaucuucaaagacuaagcggugccauggaugaacuccacaacgaaauacuagaacuagacgagaaaguggaugaucucagagcugauacaauaagcucacaaauagaacucgcaguccugcuuuccaaugaaggaauaauaaacagugaagaugagcaucucuuggcgcuugaaagaaagcugaagaaaaugcugggccccucugcuguagagauagggaauggaugcuucgaaaccaaacacaagugcaaccagaccugucucgacagaauagcugcugguaccuuugaugcaggagaauuuucucuccccacuuuugauucacugaauauuacugcugcaucuuuaaaugacgauggauuggauaaucauacuauacugcuuuacuacucaacugcugccuccaguuuggcuguaacauugaugauagcuaucuuuguuguuuauauggucuccagagacaauguuucuugcuccaucugucuauaa

SEQ ID NO: 58560 - RNA, 1755 nt, Artificial Sequence
  derived and/or modified CDS sequence (wt) from hemagglutinin__InfluenzaB__ACF54257
augaaggcaauaauuguacuacucaugguaguaacauccaaugcagaucgaaucugcacugggauaacaucgucaaacucaccucauguggucaaaacagcuacucaaggggaggucaaugugacuggugcgauaccacugacaacaacaccaacaaaaucucauuuugcaaaucucaaaggaacaaagaccagagggaagcuaugcccaaccugucucaacugcacagaucuggauguggccuugggcagaccgauguguguggggaucacaccuucggcaaaagcuucaauacuccacgaagucagaccuguuacauccggaugcuuuccuauaaugcacgacagaacgaaaaucagacagcuacccaaucuucucagaggauaugaaaaaaucagauuaucaacccaaaauguuaucgacgcagaaaaggcaccaggaggacccuacagacuuggaacuucaggaucuugcccuaaugcuaccaguaaaagcggauuuuucgcaacaauggcuugggcugucccaagggaaaacaacaaaacagcaacgaauccacuaacaguagaaguaccacacaucuguacaaaagaagaagaccaaauuacuguuuggggguuccauucugauaacaaaccccaaaugaaaaaccucuauggagacucaaauccucaaaaguucaccucaucugcuaauggaauaaccacacauuauguuucucagauuggcggcuucccggaccaaacagaagacggagggcuaccacaaagcggcagaauuguuguugauuacauggugcaaaaaccugggaaaacaggaacaauugucuaucaaagagggauuuuguugccucaaaagguguggugcgcgaguggcaggagcaaaguaauaaaaggguccuugccuuuaauuggugaagcagauugccuucacgaaaaauaugguggauuaaacaaaagcaagccuuacuacacaggagaacaugcaaaagccauaggaaauugcccaauaugggugaaaacaccuuugaagcuugccaauggaaccaaauauagaccuccugcaaaacuauuaaaggaaagggguuucuucggagcuauugcugguuucuuagaaggaggaugggaaggaaugauugcagguuggcacggauacacaucucacggagcacacggaguggcaguggcagcagaccuuaagaguacgcaagaagccauaaacaagauaacaaaaaaucucaauucuuugagugagcuagaaguaaagaaccuucaaagacuaaguggugccauggaugaacuccauaacgaaauacucgagcuggaugagaaaguggaugaucucagagcugacacaauaagcucacaaauagaacuugcagucuugcuuuccaacgaaggaauaauaaacagugaagaugagcaucuauuggcacuugagagaaaacuaaaaaagaugcugggucccucugcuguagacauagggaauggaugcuucgaaaccaaacacaagugcaaccagaccugcuuagacaggauagcugcuggcaccuuuaaugcaggagaauuuucucuucccacuuuugauucacugaacauuacugcugcaucuuuaaaugaugauggauuggauaaccauacuauacugcucuacuacucaacugcugcuucuaguuuggcuguaacauugaugauagcuauuuuuauuguuuauaugauuuccagagacaauguuucuugcuccaucugucuauaa

SEQ ID NO: 58561 - RNA, 1755 nt, Artificial Sequence
  derived and/or modified CDS sequence (wt) from hemagglutinin__InfluenzaB__ACF54268
augaaggcaauaauuguacuacucaugguaguaacauccaaugcagaucgaaucugcacugggauaacaucgucaaacucaccucauguggucaaaacagcuacucaaggggaggucaaugugacuggugcgauaccacugacaacaacaccaacaaaaucucauuuugcaaaucucaaaggaacaaagaccagaggaaaacuaugcccaaccugucucaacugcacagaucuggauguggccuugggcagaccgauguguguggggaucacaccuucggcaaaagcuucaauacuccacgaagucagaccuguuacauccggaugcuuuccuauaaugcacgacagaacgaaaaucagacagcuacccaaucuucucagaggauaugaaaaaaucagauuaucaacccaaaauguuaucgacgcagaaaaggcaccaggaggacccuacagacuuggaacuucaggaucuugcccuaaugcuaccaguaaaagcggauuuuucgcaacaauggcuugggcugucccaagggaaaacaacaaaacagcaacgaauccacuaacaguagaaguaccacacaucuguacaaaagaagaagaccaaauuacuguuuggggguuccauucugauaacaaaauccaaaugaaaaaccucuauggagacucaaauccucaaaaguucaccucaucugcuaauggaauaaccacacauuauguuucucagauuggcggcuucccggaccaaacagaggacggagggcuaccacaaagcggcagaauuguuguugauuacauggugcaaaaaccugggaaaacaggaacaauugucuaucaaagagggauuuuguugccucaaaagguguggugcgcgaguggcaggagcaaaguaauaaaaggguccuugccuuuaauuggugaagcagauugccuucacgaaaaauaugguggauuaaacaaaagcaagccuuacuacacaggagaacaugcaaaagccauaggaaauuguccaauaugggugaaaacaccuuugaagcuugccaauggaaccaaauauagaccuccugcaaaacuauuaaaggaaagggguuucuucggagcuauugcugguuucuuagaaggaggaugggaaggaaugauugcagguuggcacggauacacaucucacggagcacacggaguggcaguggcagcagaccuuaagaguacgcaagaagccauaaacaagauaacaaaaaaucucaauucuuugagugagcuagaaguaaagaaccuucaaagacuaaguggugccauggaugaacuccauaacgaaauacucgagcuggaugagaaaguggaugaucucagagcugacacaauaagcucacaaauagaacuugcagucuugcuuuccaacgaaggaauaauaaacagugaagaugagcaucuauuggcacuugagagaaaacugaagaaaaugcugggucccucugcuauagacauagggaauggaugcuucgaaaccaaacacaagugcaaccagaccugcuuagacaggauagcugcuggcaccuuuaaugcaggagaauuuucucuucccacuuuugauucacugaacauuacugcugcaucuuuaaaugaugauggauuggauaaccauacuauacugcucuacuacucaacugcugcuucuaguuuggcuguaacauugaugauagcuauuuuuauuguuuauaugauuuccagagacaauguuucuugcuccaucugucuauaa

SEQ ID NO: 58562 - RNA, 1755 nt, Artificial Sequence
  derived and/or modified CDS sequence (wt) from hemagglutinin__InfluenzaB__ACF54279
augaaggcaauaauuguacuacucaugguaguaacauccaaugcagaucgaaucugcacugggauaacaucgucaaacucaccucauguggucaaaacagcuacucaaggggaggucaaugugacuggugcgauaccacugacaacaacaccaacaaaaucucauuuugcaaaucucaaaggaacaaagaccagagggaaacuaugcccaaccugucucaacugcacagaucuggauguggccuugggcagaccgauguguguggggaucacaccuucggcaaaagcuucaauacuccacgaagucagaccuguuacauccggaugcuuuccuauaaugcacgacagaacgaaaaucagacagcuacccaaucuucucagaggauaugaaaaaaucagauuaucaacccaaaauguuaucgacgcagaaaaggcaccaggaggacccuacagacuuggaacuucaggaucuugcccuaaugcuaccaguaaaagcggauuuuucgcaacaauggcuugggcugucccaagggaaaacaacaaaacagcaacgaauccacuaacaguagaaguaccacacaucuguacaaaagaagaagaccaaauuacuguuuggggguuccauucugauaacaaaacccaaaugaaaaaccucuauggagacucaaauccucaaaaguucaccucaucugcuaauggaauaaccacacauuauguuucucagauuggcggcuucccggaccaaacagaagacggagggcuaccacaaagcggcagaauuguuguugauuacauggugcaaaaaccugggaaaacaggaacaauugucuaucaaagagggauuuuguugccucaaaagguguggugcgcgaguggcaggagcaaaguaauaaaaggguccuugccuuuaauuggugaagcagauugccuucacgaaaaauaugguggauuaaacaaaagcaagccuuacuacacaggagaacaugcaaaagccauaggaaauugcccaauaugggugaaaacaccuuugaagcuugccaauggaaccaaauauagaccuccugcaaaacuauuaaaggaaagggguuucuucggagcuauugcugguuucuuagaaggaggaugggaaggaaugauugcagguuggcacggauacacaucucacggagcacacggaguggcaguggcagcagaccuuaagaguacgcaagaagccauaaacaagauaacaaaaaaucucaauucuuugagugagcuagaaguaaagaaccuucaaagacuaaguggugccauggaugaacuccauaacgaaauacucgagcuggaugagaaaguggaugaucucagagcugacacaauaagcucacaaauagaacuugcagucuugcuuuccaacgaaggaauaauaaacagugaagaugagcaucuauuggcacuugagagaaaacuaaaaaagaugcugggucccucugcuguagacauagggaauggaugcuucgaaaccaaacacaagugcaaccagaccugcuuagacaggauagcugcuggcaccuuuaaugcaggagaauuuucucuucccacuuuugauucacugaacauuacugcugcaucuuuaaaugaugauggauuggauaaccauacuauacugcucuacuacucaacugcugcuucuaguuuggcuguaacauugaugauagcuauuuuuauuguuuauaugauuuccagagacaauguuucuugcuccaucugucuauaa

SEQ ID NO: 58563 - RNA, 1755 nt, Artificial Sequence
  derived and/or modified CDS sequence (wt) from hemagglutinin__InfluenzaB__ACF54290
augaaggcaauaauuguacuacucaugguaguaacauccaaugcagaucgaaucugcacugggauaacaucuucaaacucaccucauguggucaaaacagcuacucaaggggaggucaaugugacuggugugauaccacugacaacaacaccaacaaaaucuuauuuugcaaaucucaaaggaacaaggaccagagggaaacuauguccagacugucucaacuguacagaucuggauguggccuugggcagaccaauguguguggggaccacaccuucggcaaaagcuucaauacuccacgaagucagaccuguuacauccgggugcuuuccuauaaugcacgacagaacaaaaaucagacaacuacccaaucuucucagaggauaugaaaauaucagauuaucaacccaaaacguugucgaugcagaaaaugcaccaggaggacccuacagacuuggaaccucaggaucuugcccuaacgcuaccaguaaaagcggauuuuuugcaacaauggcuugggcugucccaaaggacaacaacaaaaaugcaacgaacccacuaacaguagaaguaccauacguuuguacagaaggggaagaccaaauuacuguuuggggguuccauucagauaaaaaaacccaaaugaagaaccucuauggagacucaaauccucaaaaguucaccucaucugcuaauggaguaaccacacauuauguuucucagauuggcggcuucccagcucaaacagaagacggaggacuaccacaaagcggcagaauuguuguugauuacauggugcaaaaaccuaggaaaacaggaacaauugucuaucaaagagguguuuuguugccucaaaagguguggugcgcgaguggcaggagcaaaguaauaaaaggguccuugccuuuaauuggugaagcagauugccuucaugaaaaauacgguggauuaaacaaaagcaagccuuacuacacaggagaacaugcaaaagccauaggaaauugcccaauaugggugaaaacaccuuugaagcuugccaauggaaccaaauauagaccuccugcaaaacuauuaaaggaaagggguuucuucggagcuauugcugguuuccuagaaggaggaugggaaggaaugauugcagguuggcacggauacacaucucacggagcacauggaguggcaguggcggcagaccuuaagaguacgcaagaagcuauaaacaagauaacaaaaaaucucaauucuuugagugagcuagaaguaaagaaucuucaaagacuaaguggugccauggaugaacuccacaacgaaauacucgagcuggaugagaaaguggaugaucucagagcugacacuauaagcucgcaaauagaacuugcagucuugcuuuccaaugaaggaauaauaaacagugaagaugagcaucuauuggcacuugagagaaaacuaaagaaaaugcugggucccucugcuguagacauaggaaauggaugcuucgaaaccaaacacaagugcaaccagaccugcuuagacaagauagcugcuggcaccuuuaaugcaggagaauuuucucuccccacuuuugauucacugaacauuacugcugcaucuuuaaaugaugauggauuggauaaccauacuauacugcucuauuacucaacugcugcuucuaguuuggcuguaacauugaugcuagcuauuuuuauuguuuauauggucuccagagacaauguuucaugcuccaucugucuauaa

SEQ ID NO: 58564 - RNA, 1758 nt, Artificial Sequence
  derived and/or modified CDS sequence (wt) from hemagglutinin__InfluenzaB__ACF54312
augaaggcaauaauuguacuacucaugguaguaacauccaaugcagaucgaaucugcacugggauaacaucgucaaacucaccccauguggucaaaacugcuacucaaggggaggucaaugugacuggugugauaccacugacaacaacacccaccaaaucucauuuugcaaaucucaaaggaacaaaaaccagagggaaacuaugcccaaaaugccucaacugcacagaucuggacguggccuugggcagaccaaaaugcacggggaacauacccucggcagaaguuucaauacuccaugaaguuagaccuguuacaucugggugcuuuccuauaaugcacgacagaacaaaaauuagacagcugcccaaccuucucagaggauacgaacauaucagguuaucaacucauaacguuaucaaugcagaaaaggcaccaggaggacccuacaaaauuggaaccucagggucuugcccuaacguuaccaauggaaacggauuuuucgcaacaauggcuugggccgucccaaaaaacgacaacaacaaaacagcaacaaauucauuaacaauagaaguaccauacauuuguacagaaggagaagaccaaauuaccguuuggggguuccacucugauagcgaaacccaaauggcaaaacucuauggggacucaaagccccagaaauucaccucaucuuccaacggagugaccacacauuacauuucacagauugguggcuucccaaaucaaacggaagacggaggacuaccacaaagugguagaauuguuguugauuacauggugcaaaaaucugggaaaacaggaacaauuaccuaucaaagagguauuuuauugccucaaaaaguguggugcgcaaguggcaggagcaagguaauaaaaggauccuugccuuuaauuggagaagcagauugccuccacgaaaaauacgguggauuaaacaaaagcaagccuuacuacacaggggaacaugcaaaggccauaggaaauugcccaauaugggugaaaacacccuugaagcuggccaauggaaccaaauauagaccuccugcaaaacuauuaaaggaaagggguuucuucggagcuauugcugguuucuuagaaggaggaugggaaggaaugauugcagguuggcacggauacacaucccauggggcacauggaguagcaguggcagcagaccuuaagagcacucaagaagccauaaacaaaauaacaaaaaaucucaacucuuugagugagcuggaaguaaagaaucuucaaagacuaagcggugccauggaugaacuccacaacgaaauacuagaacuagacgagaaaguggaugaucucagagcugauacaauaagcucacaaauagaacucgcaguccugcuuuccaaugaagggauaauaaacagugaagaugagcaucucuuggcgcuugaaagaaagcugaagaaaaugcugggccccucugcuauagagauagggaauggaugcuucgaaaccaaacacaagugcaaccagaccugucucgacagaauagcugcugguaccuuugaugcaggagaauuuucucuccccacuuuugauucacugaauauuacugcugcaucuuuaaaugacgauggauuggauaaucauacuauacugcuuuacuacucaacugcugccuccaguuuggcuguaacauugaugauagcuaucuuuguuguuuauauggucuccagagacaauguuucuugcuccaucugucuauaa

SEQ ID NO: 58565 - RNA, 1758 nt, Artificial Sequence
  derived and/or modified CDS sequence (wt) from hemagglutinin__InfluenzaB__ACF54323
augaaggcaauaauuguacuacucaugguaguaacauccaaugcagaucgaaucugcacugggauaacaucgucaaacucaccacauguugucaaaacugcuacucaaggggaggucaaugugacugguguaauaccacugacaacaacacccaccaaaucucauuuugcaaaucucaaaggaacagaaaccagagggaaacuaugcccaaaaugccucaacugcacagaccuggacguggcauugggcagaccaaaaugcacggggaacauacccucggcaagaguuucaauacuccaugaagucagaccuguuacaucugggugcuuuccuauaaugcacgacagaacaaaaauuagacagcugccuaaccuucucagaggauacgaacauaucagguuaucaacucguaacguuaucaaugcagaaaaugcaccaggaggacccuacaaaauuggaaccucagggucuugcccuaacguuaccaauggaaacggauuuuucgcaacaauggcuugggccgucccaaaaaacgacaacaacaaaacagcaacaaauucauuaacaauagaaguaccauacauuuguacagaaggagaagaccaaauuaccguuuggggguuccacucugauaacgaagcccaaauggcaaagcucuauggggacucaaagccccagaaguucaccucaucugccaacggagugaccacacauuacguuucacagauugguggcuucccaaaucaaacagaagacggaggacuaccacaaagugguagaauuguuguugauuacauggugcaaaaaucugggaaaacaggaacaauuaccuaucaaagagguauuuuauugccucaaaaaguguggugcgcaaguggcaggagcaagguaauaaaaggauccuugccuuuaauuggagaagcagauugccuccacgaaaaauacgguggauuaaacaaaagcaagccuuacuacacaggagaacaugcaaaggccauaggaaauugcccaauaugggugaaaacacccuugaagcuggccaauggaaccaaauauagaccuccugcaaaacuacuaaaggaaagggguuucuucggagcuauugcugguuucuuagaaggaggaugggaaggaaugauugcagguuggcacggauacacaucccauggggcacauggaguagcgguggcagcagaccuuaagagcacucaagaggccauaaacaagauaacaaaaaaucucaacucuuugagugagcuggaaguaaagaaucuucaaagacuaagcggugccauggaugaacuccacaacgaaauacuagaacuagacgagaaaguggaugaucucagagcugauacaauaagcucacaaauagaacucgcaguccugcuuuccaaugaaggaauaauaaacagugaagaugagcaucucuuggcgcuugaaagaaagcugaagaaaauguugggccccucugcuguagagauagggaauggaugcuuugaaaccaaacacaagugcaaccagaccugucucgacagaauagcugcugguaccuuugaugcaggagaauuuucucuccccacuuuugauucacugaauauuacugcugcaucuuuaaaugacgauggauuggauaaucauacuauauugcuuuacuacucaacugcugccuccaguuuggcuguaacauugaugauagcuaucuuuguuguuuauauggucuccagagacaauguuucuugcuccaucugucuauaa

SEQ ID NO: 58566 - RNA, 1755 nt, Artificial Sequence
  derived and/or modified CDS sequence (wt) from hemagglutinin__InfluenzaB__ACF54345
augaaggcaauaauuguacuacucaugguaguaacauccaaugcagaucgaaucugcacugggauaacaucuucaaacucaccucauguggucaaaacagcuacucaaggggaggucaaugugacuggugugauaccacugacaacaacaccaacaaaaucuuauuuugcaaaucucaaaggaacaaggaccagagggaaacuaugcccagacugucucaacuguacagaucuggauguggccuugggcaggccaauguguguggggaccacaccuucugcgaaagcuucaauacuccacgaagucagaccuguuacauccgggugcuuuccuauaaugcacgacagaacaaaaaucaggcaacuagccaaucuucucagaggauaugaaaauaucagauuaucaacccaaaacguuaucgaugcagaaaaggcaccaggaggacccuacagacuuggaaccucaggaucuugcccuaacgcuaccaguaaaagcggauuuuucgcaacaauggcuugggcugucccaaaggacaacaacaaaaaugcaacgaacccacuaacaguagaaguaccauacauuuguacagaaggggaagaccaaauuacuguuuggggguuccauucagauaacaaagcccaaaugaagaaccucuauggagacucaaauccucaaaaguucaccucaucugcuaauggaguaaccacacauuauguuucucagauuggcggcuucccagaucaaacagaagacggaggacuaccacaaagcggcagaauugucguugauuacaugauacaaaaaccugggaaaacaggaacaauugucuaucaaagagguguuuuguugccucaaaagguguggugcgcgaguggcaggagcaaaguaauaaaaggguccuugccuuuaauuggugaagcagauugccuucaugaaaaauacgguggauuaaacaaaagcaagccuuacuacacaggagaacaugcaaaagccauaggaaauugcccaauaugggugaaaacaccuuugaagcuugccaauggaaccaaauauagaccuccugcaaaacuauuaagggaaagggguuucuucggagcuauugcugguuuccuagaaggaggaugggaaggaaugauugcagguuggcacggauacacaucucacggagcacauggaguggcaguugcggcagaccuuaagaguacacaagaagcuauaaacaagauaacaaaaaaucucaauucuuugagugagcuagaaguaaagaaucuucaaagacuaaguggugccauggaugaacuccacaacgaaauacucgagcuggaugagaaaguggaugaucucagagcugacacuauaagcucacaaauagaacuugcagucuugcuuuccaacgaaggaauaauaaacagugaagacgagcaucuauuggcacuugagagaaaacuaaagaaaaugcugggucccucugcuguagacauaggaaauggaugcuucgaaaccaaacacaaaugcaaccagaccugcuuagacaggauagcugcuggcaccuuuaaugcaggagaauuuucucuccccacuuuugauucauugaacauuacugcugcaucuuuaaaugaugauggauuggauaaccauacuauacugcucuauuacucaacugcugcuucuaguuuggcuguaacauugaugcuagcuauuuuuauuguuuauauggucuccagagacaacguuucaugcuccaucugucuauaa

SEQ ID NO: 58567 - RNA, 1755 nt, Artificial Sequence
  derived and/or modified CDS sequence (wt) from hemagglutinin__InfluenzaB__ACF54367
augaaggcaauaauuguacuacucaugguaguaacauccaaugcagaucgaaucugcacugggauaacaucuucaaacucaccucauguggucaaaacagcuacucaaggggaggucaaugugacuggugugauaccacugacaacagcaccaacaaaaucuuauuuugcaaaucucaaagggacaaggaccagagggaaacuaugcccagacugucucaacuguacagaucuggauguggccuugggcaggccaauguguguggggaccacaccuucugcgaaagcuucaauacuccacgaagucagaccuguuacauccgggugcuuuccuauaaugcacgacagaacaaaaaucaggcaacuagccaaucuucucagaggauaugaaaauaucagguuaucaacccaaaacguuaucgaugcagaaaaggcaccaggaggacccuacagacuuggaaccucaggaucuugcccuaacgcuaccaguaaaagcggauuuuucgcaacaauggcuugggcugucccaaaggacaacaacaaaaaugcaacgaacccacuaacaguagaaguaccauacauuuguacagaaggggaagaccaaauuacuguuuggggguuccauucagauagcaaaacccaaaugaagaaccucuauggagacucaaauccucaaaaguucaccucaucugcuaauggaguaaccacacauuauguuucucagauuggcggcuucccagaucaaacagaagacggaggacuaccacaaagcggcagaauugucguugauuacaugaugcaaaaaccugggaaaacaggaacaauugucuaucaaagagguguuuuguugccucaaaagguguggugcgcgaguggcaggagcaaaguaauaaaaggguccuugccuuuaauuggugaagcagauugccuucaugaaaaauacgguggauuaaacaaaagcaagccuuacuacacaggagaacaugcaaaagccauaggaaauugcccaauaugggugaaaacaccuuugaagcuugccaauggaaccaaauauagaccuccugcaaaacuauuaaaggaaagggguuucuucggagcuauugcugguuuccuagaaggaggaugggaaggaaugauugcagguuggcacggauacacaucucacggagcacauggaguggcaguggcggcagaccuuaagaguacacaagaagcuauaaacaagauaacaaaaaaucucaacucuuugagugagcuagaaguaaagaaccuucaaagacuaaguggugccauggaugaacuccacaaugaaauacucgagcuggaugagaaaguggaugaucucagagcugacacuauaagcucacaaauagaacuugcagucuugcuuuccaacgaaggaauaauaaacagugaagaugagcaucuauuggcacuugagagaaaacuaaagaaaaugcugggucccucugccguagacauaggaaauggaugcuucgaaaccaaacacaaaugcaaccagaccugcuuagacaggauagcugcuggcaccuuuaaugcaggagaauuuucucuccccacuuuugauucauugaacauuacugcugcaucuuuaaaugaugauggauuggauaaccauacuauacugcucuauuacucaacugcugcuucuaguuuggcuguaacauugaugcuagcuauuuuuauuguuuauauggucuccagagacaacguuucauguuccaucugucuauaa

SEQ ID NO: 58568 - RNA, 1755 nt, Artificial Sequence
  derived and/or modified CDS sequence (wt) from hemagglutinin__InfluenzaB__ACN32556
augaaggcaauaauuguacuacucaugguaguaacauccaaugcagaucgaaucugcacugggauaacaucgucaaacucaccucauguggucaaaacagcuacucaaggggaggucaaugugacuggcgcgauaccacugacaacaacaccaacaaaaucucauuuugcaaaucucaaaggaacaaagaccagagggaaacuaugcccaaccugucucaacugcacagaucuggauguggccuugggcagaccaauguguguggggaucacaccuucggcaaaagcuucaauacuccacgaagucagaccuguuacauccggaugcuuuccuauaaugcacgacagaacaaaaaucagacagcuacccaaucuucucagaggauaugaaaaaaucagauuaucaacccaaaacguuaucaacgcagaaaaggcaccaggaggacccuacagacuuggaacuucaggaucuugcccuaacgcuaccaguaaaagcggauuuuucgcaacaauggcuugggcugucccaagggacaacaacaaaacagcaacgaauccacuaacaguagaaguaccacacaucuguacaaaagaagaagaccaaauuacuguuuggggguuccauucugauaacaaaacccaaaugaaaaaccucuauggagacucaaauccucaaaaguucaccucauuugcuaauggaauaaccacacauuauguuucucagauuggcggcuucccggaccaaacagaagacggagggcuaccacaaagcggcagaauuguuguugauuacauggugcaaaaaccugggaaaacaggaacaauugucuaucaaagagggauuuuguugccucaaaagguguggugcgcgaguggcaggagcaaaguaauaaaaggguccuugccuuuaauuggugaagcagauugccuucacgaaaaauacgguggauuaaacaaaagcaagccuuacuacacaggagaacaugcaaaagccauaggaaauugcccaauaugggugaaaacaccuuugaagcuugccaauggaaccaaauauagaccuccugcaaaacuauuaaaggaaagggguuucuucggagcuauugcugguuucuuagaaggaggaugggaaggaaugauugcagguuggcauggauacacaucucacggagcacauggaguggcaguggcagcagaccuuaagaguacgcaagaagccauaaacaagauaacaaaaaaucucaauucuuugagugagcuagaaguaaagaaccuucaaagacuaaguggugccauggaugaacuccauaacgaaauacucgagcuggaugagaaaguggaugaucucagagcugacacaauaagcucacaaauagaacuugcagucuugcuuuccaacgaaggaauaauaaacagugaagaugagcaucuauuggcacuugagagaaaacuaaagaaaaugcugggucccucugcuguagacauagggaauggaugcuucgaaaccaaacacaagugcaaccagaccugcuuagacaggauagcugcuggcaccuuuaaugcaggagaauuuucucuucccacuuuugauucacugaacauuacugcugcaucuuuaaaugaugauggauuggauaaccauacuauacugcucuacuacucaacugcugcuucuaguuuggcuguaacauugaugauagcuauuuuuauuguuuauaugaucuccagagacaauguuucuugcuccaucugucuauaa

SEQ ID NO: 58569 - RNA, 1758 nt, Artificial Sequence
  derived and/or modified CDS sequence (wt) from hemagglutinin__InfluenzaB__ACN32567
auggaggcaauaauuguacuacucaugguaguaacauccaaugcagaucgaaucugcacugggauaacaucgucaaacucaccacauguugucaaaacugcuacucaaggggaggucaaugugacugguguaauaccacugacaacaacacccaccaaaucucauuuugcaaaucucaaagggacagaaaccagagggaaacuaugcccaaaaugccucaacugcacagaucuggacguggccuugggcagaccaaaaugcacggggaacauacccucggcaagaguuucaauacuccaugaagucagaccuguuacaucugggugcuuuccuauaaugcacgacagaacaaaaauuagacagcugccuaaccuucucagaggauacgaacauaucagguuaucaacucauaacguuaucaaugcagaaaaugcaccaggaggacccuacaaaauuggaaccucagggucuugcccuaacguuaccaauggaaacggauuuuucgcaacaauggcuugggccgucccaaaaaacgacaacaacaaaacagcaacaaauucauuaacaauagaaguaccauacauuuguacagaaggagaagaccaaauuaccguuuggggguuccacucugauaacgaaacccaaauggcaaagcucuauggggacucaaagccccagaaguucaccucaucugccaacggagugaccacacauuacguuucacagauugguggcuucccaaaucaaacagaagacggaggacuaccacaaagugguagaauuguuguugauuacauggugcaaaaaucugggaaaacaggaacaauuaccuaucaaagagguauuuuauugccucaaaaaguguggugcgcaaguggcaggagcaagguaauaaaaggauccuugccuuuaauuggagaagcagauugccuccacgaaaaauacgguggauuaaacaaaagcaagccuuacuacacaggggaacaugcaaaggccauaggaaauugcccaauaugggugaaaacacccuugaagcuggccaauggaaccaaauauagaccuccugcaaaacuauuaaaggaaagggguuucuucggagcuauugcugguuucuuagaaggaggaugggaaggaaugauugcagguuggcacggauacacaucccauggggcacauggaguagcgguggcagcagaccuuaaaagcacucaagaggccauaaacaagauaacaaaaaaucucaacucuuugagugagcuggaaguaaagaaucuucaaagacuaagcggugccauggaugaacuccacaacgaaauacuagaacuagacgagaaaguggaugaucucagagcugauacaauaagcucacaaauagaacucgcaguccugcuuuccaaugaaggaauaauaaacagugaagaugagcaucucuuggcgcuugaaagaaagcugaagaaaaugcugggccccucugcuguagagauagggaauggaugcuuugaaaccaaacacaagugcaaccagaccugucucgacagaauagcugcugguaccuuugaugcaggagaauuuucucuccccaccuuugauucacugaauauuacugcugcaucuuuaaaugacgauggauuggauaaucauacuauacugcuuuacuacucaacugcugcuuccaguuuggcuguaacauugaugauagcuaucuuuguuguuuauauggucuccagagacaauguuucuugcuccaucugucuauaa

SEQ ID NO: 58570 - RNA, 1758 nt, Artificial Sequence; identical to SEQ ID NO: 58529
  derived and/or modified CDS sequence (wt) from hemagglutinin__InfluenzaB__ACN32578

SEQ ID NO: 58571 - RNA, 1758 nt, Artificial Sequence
  derived and/or modified CDS sequence (wt) from hemagglutinin__InfluenzaB__ACN32589
augaaggcaauaauuguacuacucaugguaguaacauccaaugcagaucgaaucugcacugggauaacaucgucaaacucaccacauguugucaaaacugcuacucaaggggaggucaaugugacugguguaauaccacugacaacaacacccaccaaaucucauuuuucaaaucucaaaggaacagaaaccagagggaaacuaugcccaaaaugccucaacugcacagaucuggacguggccuugggcagaccaaaaugcacggggaacauacccucggcaagaguuucaauacuccaugaagucagaccuguuacaucugggugcuuuccuauaaugcacgacagaacaaaaauuagacagcugccuaaccuucucagaggauacgaacauaucagguuaucaacucauaacguuaucaaugcagaaaaugcaccaggaggacccuacaaaauuggaaccucagggucuugcccuaacguuaccaauggaaacggauuuuuugcaacaauggcuugggccgucccaaaaaacgacaacaacaaaacagcaacaaauucauuaacaauagaaguaccauacauuuguacagaaggagaagaccaaauuaccauuuggggguuccacucugauaacgagacccaaauggcaaagcucuauggggacucaaagccccagaaguucaccucaucugccaacggagugaccacacauuacguuucacagauugguggcuucccaaaucaaacagaagacggaggacuaccacaaagugguagaauuguuguugauuacauggugcaaaaaucugggaaaacaggaacaauuaccuaucaaagagguauuuuauugccucaaaagguguggugcgcaaguggcaggagcaagguaauaaaaggauccuugccuuuaauuggagaagcagauugccuccacgaaaaauacgguggauuaaacaaaagcaagccuuacuacacaggggaacaugcaaaggccauaggaaauugcccaauaugggugaaaacacccuugaagcuggccaauggaaccaaauauagaccuccugcaaaacuauuaaaggaaagggguuucuucggagcuauugcugguuucuuagaaggaggaugggaaggaaugauugcagguuggcacggauacacaucccauggggcacauggaguagcgguggcagcagaccuuaagagcacucaagaggccauaaacaagauaacaaaaaaucucaacucuuugagugagcuggaaguaaagaaucuucaaagacuaagcggugccauggaugaacuccacaacgaaauacuagaacuagacgagaaaguggaugaucucagagcugauacaauaagcucacaaauagaacucgcaguccugcuuuccaaugaaggaauaauaaacagugaagaugagcaucucuuggcgcuugaaagaaagcugaagaaaaugcugggccccucugcuguagagauagggaauggaugcuuugaaaccaaacacaagugcaaccagaccugucucgacagaauagcugcugguaccuuugaugcaggagaauuuucucuccccaccuuugauucacugaauauuacugcugcaucuuuaaaugacgauggauuggauaaucauacuauacugcuuuacuacucaacugcugccuccaguuuggcuguaacauugaugauagcuaucuuuguuguuuauauggucuccagagacaauguuucuugcuccaucugucuauaa

SEQ ID NO: 58572 - RNA, 1758 nt, Artificial Sequence
  derived and/or modified CDS sequence (wt) from hemagglutinin__InfluenzaB__ACN32600
augaaggcaauaauuguacuacucaugguaguaacauccaaugcagaucgaaucugcacugggauaacaucgucaaacucaccacauguugucaaaacugcuacucaaggggaggucaaugugacugguguaauaccacugacaacaacacccaccaaaucucauuuuucaaaucucaaaggaacagaaaccagagggaaacuaugcccaaaaugccucaacugcacagaucuggacguggccuugggcagaccaaaaugcacggggaacauacccucggcaagaguuucaauacuccaugaagucagaccuguuacaucugggugcuuuccuauaaugcacgacagaacaaaaauuagacagcugccuaaccuucucagaggauacgaacauaucagguuaucaacucauaacguuaucaaugcagaaaaugcaccaggaggacccuacaaaauugggaccucagggucuugcccuaacguuaccaauggaaacggauuuuuugcaacaauggcuugggccgucccaaaaaacgacaacaacaaaacagcaacaaauucauuaacaauagaaguaccauacauuuguacagaaggagaagaccaaauuaccguuuggggguuccacucugauaacgagacccaaauggcaaagcucuauggggacucaaagccccagaaguucaccucaucugccaacggagugaccacacauuacguuucacagauugguggcuucccaaaucaaacagaagacggaggacuaccacaaagugguagaauuguuguugauuacauggugcaaaaaucugggaaaacaggaacaauuaccuaucaaagagguauuuuauugccucaaaagguguggugcgcaaguggcaggagcaagguaauaaaaggauccuugcccuuaauuggagaagcagauugccuccacgaaaaauacgguggauuaaacaaaagcaagccuuacuacacaggggaacaugcaaaggccauaggaaauugcccaauaugggugaaaacacccuugaagcuggccaauggaaccaaauauagaccuccugcaagacuauuaaaggaaagggguuucuucggagcuauugcugguuucuuagaaggaggaugggaaggaaugauugcagguuggcacggauacacaucccauggggcacauggaguagcgguggcagcagaccuuaagagcacucaagaggccauaaacaagauaacaaaaaaucucaacucuuugagugagcuggaaguaaagaaucuucaaagacuaagcggugccauggaugaacuccacaacgaaauacuagaacuagacgagaaaguggaugaucucagagcugauacaauaagcucacaaauagaacucgcaguccugcuuuccaaugaaggaauaauaaacagugaagaugagcaucucuuggcgcuugaaagaaagcugaagaaaaugcugggccccucugcuguagagauagggaaugggugcuuugaaaccaaacacaagugcaaccagaccugucucgacagaauagcugcugguaccuuugaugcaggagaauuuucucuccccaccuuugauucacugaauauuacugcugcaucuuuaaaugacgauggauuggauaaucauacuauacugcuuuacuacucaacugcugccuccaguuuggcuguaacauugaugauagcuaucuuuguuguuuauauggucuccagagacaauguuucuugcuccaucugucuauaa

SEQ ID NO: 58573 - RNA, 1758 nt, Artificial Sequence
  derived and/or modified CDS sequence (wt) from hemagglutinin__InfluenzaB__ACN32611
augaaggcaauaauuguacuacucaugguaguaacauccaaugcagaucgaaucugcacugggauaacaucgucgaacucaccacauguugucaaaacugcuacucaaggggaggucaaugugacugguguaauaccacugacaacaacacccaccaaaucucauuuugcaaaucucaaaggaacagaaaccagagggaaacuaugcccaaaaugccucaacugcacagaucuggacguggccuugggcagaccaaaaugcacggggaacauacccucggcaagaguuucaauacuccaugaagucagaccuguuacaucugggugcuuuccuauaaugcacgacagaacaaaaauuagacagcugccuaaccuucucagaggauacgaacauaucagguuaucaacucauaacguuaucaaugcagaaaaugcaccaggaggacccuacaaaauuggaaccucagggucuugcccuaacauuaccaauggaaacggauuuuucgcaacaauggcuugggccgucccaaaaaacgacaacaacaaaacagcaacaaauucauuaacaauagaaguaccauacauuuguacagaaggagaagaccaaauuaccguuuggggguuccacucugauaaugagacccaaauggcaaagcucuauggggacucaaagccccagaaguucaccucaucugccaacggagugaccacacauuacguuucacagauugguggcuucccaaaucaaacagaagacggaggacuaccacaaagugguagaauuguuguugauuacauggugcaaaaaucugggaaaacaggaacaauuaccuaucaaagagguauuuuauugccucaaaagguguggugcgcaaguggcaggagcaagguaauaaaaggauccuugccuuuaauuggagaagcagauugccuccacgaaaaauacgguggauuaaacaaaagcaagccuuacuacacaggggaacaugcaaaggccauaggaaauugcccaauaugggugaaaacacccuugacgcuggccaauggaaccaaauauagaccuccugcaaaacuauuaaaggaaagggguuucuucggagcuauugcugguuuuuuagaaggaggaugggaaggaaugauugcagguuggcacggauacacaucccauggggcacauggaguagcgguggcagcagaccuuaaaagcacucaagaggccauaaacaagauaacaaaaaaucucaacucuuugagugagcuggaaguaaagaaucuucaaagacuaagcggugccauggaugaacuccacaacgaaauacuagaacuagacgagaaaguggaugaucucagagcugauacaauaagcucacaaauagaacucgcaguccugcuuuccaaugaaggaauaauaaacagugaagaugagcaucucuuggcgcuugaaagaaagcugaagaaaaugcugggccccucugcuguagagauagggaauggaugcuuugaaaccaaacacaagugcaaccagaccugucucgacagaauagcugcugguaccuuugaugcaggagaauuuucucuccccaccuuugauucacugaauauuacugcugcaucuuuaaaugacgauggauuggauaaucauacuauacugcuuuacuacucaacugcugccuccaguuuggcuguaacauugaugauagcuaucuuuguuguuuauauggucuccagagacaauguuucuugcuccaucugucuauaa

SEQ ID NO: 58574 - RNA, 1755 nt, Artificial Sequence
  derived and/or modified CDS sequence (wt) from hemagglutinin__InfluenzaB__ACN32716
augaaggcaauaauuguacuacucaugguaguaacauccaaugcagaucgaaucugcacugggauaacaucuucaaacucaccucauguggucaaaacagcuacucaaggggaggucaaugugacuggugugauaccacuaacaacaacaccaacaaaaucuuauuuugcaaaucucaaaggaacaaggaccagagggaaacuaugcccagacugucucaacuguacagaucuggauguggccuugggcagaccaauguguguggggaccacaccuucugcgaaagcuucaauacuccacgaagucagaccuguuacauccgggugcuuuccuauaaugcacgacagaacaaaaaucaggcaacuagccaaucuucucagaggauaugaaaauaucagguuaucaacccaaaacguuaucgaugcagaaaaggcaccaggaggacccuacagacuuggaaccucaggaucuugcccuaacgcuaccagcaaaagcggauuuuucgcaacaauggcuugggcugucccaaaggacaacaacaaaaacgcaacgaacccacuaacaguagaaguaccauacauuuguacagaaggggaagaccaaauuacuguuuggggguuccauucagauaacaaaacccaaaugaagaaccucuauggagacucaaauccucaaaaguucaccucaucugcuaauggaguaaccacacauuauguuucucagauuggcggcuucccagaucaaacagaagacggaggacuaccacaaagcggcagaauugucguugauuacaugaugcaaaaaccugggaaaacaggaacaauugucuaucaaagagguguuuuguugccucaaaagguguggugcgcgaguggcaggagcaaaguaauaaaaggguccuugccuuuaauuggugaagcagauugccuucaugaaaaauacgguggauuaaacaaaagcaagccuuacuacacaggagaacaugcaaaagccauaggaaauugcccaauaugggugaaaacaccuuugaagcuugccaauggaaccaaauauagaccuccugcaaaacuauuaaaggaaagggguuucuucggagcuauugcugguuuccuagaaggaggaugggaaggaaugauugcagguuggcacggauacacaucucacggagcacauggaguggcaguugcggcagaccuuaagaguacacaagaagcuauaaacaagauaacaaaaaaucucaacucuuugagugagcuagaaguaaagaaucuucaaagacuaaguggugccauggaugaacuccacaacgaaauacucgagcuggaugagaaaguggaugaucucagagcugacacuauaagcucacaaauagaacuugcaguuuugcuuuccaacgaaggaauaauaaacagugaagacgagcaucuauuggcacuugagagaaaacuaaagaaaaugcugggucccucugcuguagacauaggaaauggaugcuucgaaaccaaacacaaaugcaaccagaccugcuuagacaggauagcugcuggcaccuuuaaugcaggagaauuuucucuccccacuuuugauucauugaacauuacugcugcaucuuuaaaugaugauggauuggauaaccauacuauacugcucuauuacucaacugcugcuucuaguuuggcuguaacauugaugcuagccauuuuuauuguuuauauggucuccagagacaacguuucaugcuccaucugucuauaa

SEQ ID NO: 58575 - RNA, 1758 nt, Artificial Sequence
  derived and/or modified CDS sequence (wt) from hemagglutinin__InfluenzaB__ACN32771
augaaggcaauaauuguacuacucaugguaguaacauccaaugcagaucgaaucugcacugggauaacaucgucaaacucaccacauguugucaaaacugcuacucaaggggaggucaaugugaccgguguaauaccacugacaacaacacccaccaaaucucauuuugcaaaucucaaaggaacagaaaccagagggaaacuaugcccaaaaugccucaacugcacagaucuggacguggccuugggcagaccaaaaugcacggggaacauacccucggcaagaguuucaauacuccaugaagucagaccuguuacaucugggugcuuuccuauaaugcacgacagaacaaaaauuagacagcugccuaaccuucucagaggauacgaacauaucagguuaucaacucauaacguuaucaacgcagaaaaugcaccaggaggacccuacaaaauuggaaccucagggucuugcccuaauguuaccaauggaaacggauuuuucgcaacaauggcuugggccgucccaaaaaacgacaacaacaaaacagcaacaaauucauuaacaauagaaguaccauacauuuguacagaaggagaagaccaaauuaccguuuggggguuccacucugauaacgaaacccaaauggcaaagcucuauggggacucaaagccccagaaguucaccucaucugccaacggagugaccacacauuacguuucacagauugguggcuucccaaaucaaacagaagacggaggacuaccacaaagugguagaauuguuguugauuacauggugcaaaaaucugggaaaacaggaacaauuaccuaucaaagagguauuuuauugccucaaaaaguguggugcgcaaguggcaggagcaagguaauaaaaggauccuugccuuuaauuggagaagcagauugccuccacgaaaaauacgguggauuaaacaaaagcaagccuuacuacacaggggaacaugcaaaggccauaggaaauugcccaauaugggugaaaacacccuugaagcuggccaauggaaccaaauauagaccuccugcaaaacuauuaaaggaaagggguuucuucggagcuauugcugguuucuuagaaggaggaugggaaggaaugauugcagguuggcacggauacacaucccauggggcacauggaguagcgguggcagcagaccuuaaaagcacucaagaggccauaaacaagauaacaaaaaaucucaacucuuugagugagcuggaaguaaagaaucuucaaagacuaagcggugccauggaugaacuccacaacgaaauacuagaacuagacgagaaaguggaugaucucagagcugauacaauaagcucacaaauagaacucgcaguccugcuuuccaaugaaggaauaauaaacagugaagaugagcaucucuuggcgcuugaaagaaagcugaagaaaaugcugggccccucugcuguagagauagggaauggaugcuuugaaaccaaacacaagugcaaccagaccugucucgacagaauagcugcugguaccuuugaugcaggagaauuuucucuccccaccuuugauucacugaauauuacugcugcaucuuuaaaugacgauggauuggauaaucacacuauacugcuuuacuacucaacugcugccuccaguuuggcuguaacauugaugauagcuaucuuuguuguuuauauggucuccagagacaauguuucuugcuccaucugucuauaa

SEQ ID NO: 58576 - RNA, 1758 nt, Artificial Sequence; identical to SEQ ID NO: 58548
  derived and/or modified CDS sequence (wt) from hemagglutinin__InfluenzaB__ACN32782

SEQ ID NO: 58577 - RNA, 1758 nt, Artificial Sequence
  derived and/or modified CDS sequence (wt) from hemagglutinin__InfluenzaB__ACO05957
augaaggcaauaauuguacuacucaugguaguaacauccaaugcagaucgaaucugcacugggauaacaucgucaaacucaccacauguugucaaaacugcuacucaaggggaggucaaugugacugguguaauaccacugacaacaacacccaccaaaucucauuuugcaaaucucaaaggaacagaaaccagagggaaacuaugcccaaaaugccucaacugcacagaucuggacguggccuugggcagaccaaaaugcacggggaacauacccucggcaagaguuucaauacuccaugaagucagaccuguuacaucugggugcuuuccuauaaugcacgacagaacaaaaauuagacagcugccuaaccuucucagaggauacgaacauaucagguuaucaacucauaacguuaucaaugcagaaaaugcaccaggaggacccuacaaaauuggaaccucagggucuugcccuaacguuaccaauggaaacggauuuuucgcaacaauggcuugggccgucccaaaaaacgacaacaacaaaacagcaacaaauucauuaacaauagaaguaccauacauuuguacagaaggagaagaccaaauuaccguuuggggguuccacucugauaacgaaauccaaauggcaaagcucuauggggacucaaagccccagaaguucaccucaucugccaacggagugaccacacauuacguuucacagauugguggcuucccaaaucaaacagaagacggaggacuaccacaaagugguagaauuguuguugauuacauggugcaaaaaucugggaaaacaggaacaauuaccuaucaaagagguauuuuauugccucaaaaaguguggugcgcaaguggcaggagcaagguaauaaaaggauccuugccuuuaauuggagaagcagauugccuccacgaaaaauacgguggauuaaacaaaagcaagccuuacuacacaggggaacaugcaaaggccauaggaaauugcccaauaugggugaaaacacccuugaagcuggccaauggaaccaaauauagaccuccugcaaaacuauuaaaggaaagggguuucuucggagcuauugcugguuucuuagaaggaggaugggaaggaaugauugcagguuggcacggauacacaucccauggggcacauggaguagcgguggcagcagaccuuaagagcacucaagaggccauaaacaagauaacaaaaaaucucaacucuuugagugagcuggaaguaaagaaucuucaaagacuaagcggugccauggaugaacuccacaacgaaauacuagaacuagacgagaaaguggaugaucucagagcugauacaauaagcucacaaauagaacucgcaguccugcuuuccaaugaaggaauaauaaacagugaagaugagcaucucuuggcgcuugaaagaaagcugaagaaaaugcugggccccucugcuguagagauagggaauggaugcuuugaaaccaaacacaagugcaaccagaccugucucgacagaauagcugcugguaccuuugaugcaggagaauuuucucuccccacuuuugauucacugaauauuacugcugcaucuuuaaaugacgauggauuggauaaucauacuauacugcuuuacuacucaacugcugccuccaguuuggcuguaacauugaugauagcuaucuuuguuguuuauauggucuccagagacaauguuucuugcuccaucugucuauaa

SEQ ID NO: 58578 - RNA, 1755 nt, Artificial Sequence
  derived and/or modified CDS sequence (wt) from hemagglutinin__InfluenzaB__ACO05968
augaaggcaauaauuguacuacucaugguaguaacauccaaugcagaucgaaucugcacuggaauaacaucuucaaacucaccucacguggucaaaacagccacucaaggggaggucaaugugacuggugugauaccacuaacaacaacaccaacaaaaucuuauuuugcaaaucucaaaggaacaaggaccagagggaaacuaugcccagacugucucaacugcacagaucuggauguggcuuugggcagaccaauguguguggggaccacaccuucggcgaaagcuucaauacuccacgaagucagaccuguuacauccgggugcuuuccuauaaugcacgacagaacaaaaaucaggcaacuacccaaucuucucagaggauaugaaaauaucaggcuaucaacccaaaacgucaucgaugcggaaaaggcaccaggaggacccuacagacuuggaaccucaggaucuugcccuaacgcuaccaguaagagcggauuuuucgcaacaauggcuugggcugucccaaaggacaacaacaaaaaugcaacgaacccacuaacaguagaaguaccauacauuuguacagaaagggaagaccaaaucacuguuuggggguuccauucagauaacaaaacccaaaugaagaaccucuauggagacucaaauccucaaaaguucaccucaucugcuaauggaguaaccacacacuauguuucucagauuggcagcuucccagaucaaacagaagacggaggacuaccacaaagcggcaggauuguuguugauuacaugaugcaaaaaccugggaaaacaggaacaauugucuaccaaagagguguuuuguugccucaaaagguguggugcgcgaguggcaggagcaaaguaauaaaaggguccuugccuuuaauuggugaagcagauugccuucaugaaaaauacgguggauuaaacaaaagcaagccuuacuacacaggagaacaugcaaaagccauaggaaauugcccaauaugggugaaaacaccuuugaagcuugccaauggaaccaaauauagaccuccugcaaagcuauuaaaggaaagggguuucuucggagcuauugcugguuuccuagaaggaggaugggaaggaaugauugcaggcuggcacggauacacaucucacggagcacauggaguggcaguggcggcggaccuuaagagcacgcaagaagcuauaaacaagauaacaaaaaaucucaauucuuugagugagcuagaaguaaagaaucuucaaagacuaaguggugccauggaugaacuccacaacgaaauacucgagcuggaugagaaaguggaugaucucagagcugacacuauaagcucgcaaauagaacuugcagucuugcuuuccaacgaaggaauaauaaacagugaagaugagcaucuauuggcacuugagagaaaacuaaagaaaaugcugggucccucugcuguagagauaggaaauggaugcuucgaaaccaaacacaagugcaaccagaccugcuuagacaggauagcugcuggcaccuuuaaugcaggagaauuuucucuccccacuuuugauucacugaacauuacugcugcaucuuuaaaugaugauggauuggauaaccauacuauacugcucuauuacucaacugcugcuucuaguuuggcuguaacauugaugcuagcuauuuuuauuguuuauauggucuccagagacaacguuucaugcuccaucugucuauaa

SEQ ID NO: 58579 - RNA, 1755 nt, Artificial Sequence
  derived and/or modified CDS sequence (wt) from hemagglutinin__InfluenzaB__ACO05979
augaaggcaauaauuguacuacucaugguaguaacauccaaugcagaucgaaucugcacuggaauaacaucuucaaacucaccucacguggucaaaacagccacucaaggggaggucaaugugacuggugugauaccacuaacaacaacaccaacaaaaucuuauuuugcaaaucucaaaggaacaaggaccagagggaaacuaugcccagacugucucaacugcacagaucuggauguggcuuugggcagaccaauguguguggggaccacaccuucggcgaaagcuucaauacuccacgaagucagaccuguuacauccgggugcuuuccuauaaugcacgacagaacaaaaaucaggcaacuacccaaucuucucagaggauaugaaaauaucaggcuaucaacccaaaacgucaucgaugcggaaaaggcaccaggaggacccuacagacuuggaaccucaggaucuugcccuaacgcuaccaguaagagcggauuuuucgcaacaauggcuugggcugucccaaaggacaacaacaaaaaugcaacgaacccacuaacaguagaaguaccauacauuuguacagaaggggaagaccaaaucacuguuuggggguuccauucagauaacaaaacccaaaugaagaaccucuauggagacucaaauccucaaaaguucaccucaucugcuaauggaguaaccacacacuauguuucucagauuggcagcuucccagaucaaacagaagacggaggacuaccacaaagcggcaggauuguuguugauuacaugaugcaaaaaccugggaaaacaggaacaauugucuaccaaagagguguuuuguugccucaaaagguguggugcgcgaguggcaggagcaaaguaauaaaaggguccuugccuuuaauuggugaagcagauugccuucaugaaaaauacgguggauuaaacaaaagcaagccuuacuacacaggagaacaugcaaaagccauaggaaauugcccaauaugggugaaaacaccuuugaagcuugccaauggaaccaaauauagaccuccugcaaagcuauuaaaggaaagggguuucuucggagcuauugcugguuuccuagaaggaggaugggaaggaaugauugcaggcuggcacggauacacaucucacggagcacauggaguggcaguggcggcggaccuuaagagcacgcaagaagcuauaaacaagauaacaaaaaaucucaauucuuugagugagcuagaaguaaagaaucuucaaagacuaaguggugccauggaugaacuccacaacgaaauacucgagcuggaugagaaaguggaugaucucagagcugacacuauaagcucgcaaauagaacuugcagucuugcuuuccaacgaaggaauaauaaacagugaagaugagcaucuauuggcacuugagagaaaacuaaagaaaaugcugggucccucugcuguagagauaggaaauggaugcuucgaaaccaaacacaagugcaaccagaccugcuuagacaggauagcugcuggcaccuuuaaugcaggagaauuuucucuccccacuuuugauucacugaacauuacugcugcaucuuuaaaugaugauggauuggauaaccauacuauacugcucuauuacucaacugcugcuucuaguuuggcuguaacauugaugcuagcuauuuuuauuguuuauauggucuccagagacaacguuucaugcuccaucugucuauaa

SEQ ID NO: 58580 - RNA, 1755 nt, Artificial Sequence; identical to SEQ ID NO: 58579
  derived and/or modified CDS sequence (wt) from hemagglutinin__InfluenzaB__ACO05990

SEQ ID NO: 58581 - RNA, 1758 nt, Artificial Sequence
  derived and/or modified CDS sequence (wt) from hemagglutinin__InfluenzaB__ACO06001
augaaggcaauaauuguacuacucaugguaguaacauccaaugcagaucgaaucugcacugggauaacaucgucaaacucaccacauguugucaaaacugcuacucaaggggagguuaaugugacuggugugauaccacugacaacaacacccaccaaaucucauuuugcaaaucucaaaggaacagaaaccagagggaaacuaugcccaaaaugccucaacugcacagaucuggacguggccuugggcagaccaaaaugcacggggaacauacccucggcaagaguuucaauacuccaugaagucagaccuguuacaucugggugcuuuccuauaaugcacgacagaacaaaaauuagacagcugccuaaccuucucagaggauacgaacauaucagguuaucaacucauaacguuaucaaugcagaaaaugcaccaggaggacccuacaaaauuggaaccucagggucuugcccuaacguuaccaauggaaacggauuuuucgcaacaauggcuugggccgucccaaaaaacgacaacaacaaaacagcaacaaauucauuaacaauagaaguaccauacauuuguacagaaggagaagaccaaauuaccguuuggggguuccacucugauaacgagaaccaaauggcaaagcucuauggggacucaaagccccagaaguucaccucauuugccaacggagugaccacacauuacguuucacagauugguggcuucccaaaucaaacagaagacggaggacuaccacaaagugguagaauuguuguugauuacauggugcaaaaaucugggaaaacaggaacaauuaccuaucaaagagguauuuuauugccucaaaagguguggugcgcaaguggcaggagcaagguaauaaaaggauccuugccuuuaauuggagaagcagauugccuccacgaaaaauacgguggauuaaacaaaagcaagccuuacuacacaggggaacaugcaaaggccauaggaaauugcccaauaugggugaaaacacccuugaagcuggccaauggaaccaaauauagaccuccugcaaaacuauuaaaggaaagggguuucuucggagcuauugcugguuucuuagaaggaggaugggaaggaaugauugcagguuggcacggauauacaucccauggggcacauggaguagcgguggcagcagaccuuaagagcacucaagaggccauaaacaagauaacaaaaaaucucaacucuuugagugagcuggaaguaaagaaucuucaaagacuaagcggugccauggaugaacuccacaacgaaauacuagaacuagacgagaaaguggaugaucucagagcugauacaauaagcucacaaauagaacucgcaguccugcuuuccaaugagggaauaauaaacagugaagaugagcaucucuuggcgcuugaaagaaagcugaagaaaaugcugggccccucugcuguagagauagggaauggaugcuuugaaaccaaacacaagugcaaccagaccugucucgacagaauagcugcugguaccuuugaugcaggagaauuuucucuccccaccuuugauucacugaauauuacugcugcaucuuuaaaugacgauggauuggauaaucauacuauacugcuuuacuacucaacugcugccuccaguuuggcuguaacauugaugauagcuaucuuuguuguuuauauggucuccagagacaauguuucuugcuccaucugucuauaa

SEQ ID NO: 58582 - RNA, 1755 nt, Artificial Sequence
  derived and/or modified CDS sequence (wt) from hemagglutinin__InfluenzaB__ACO06012
augaaggcaauaauuguacuacucaugguaguaacauccaaugcagaucgaaucugcacuggaauaacaucuucaaacucaccucacguggucaaaacagccacucaaggggaggucaaugugacuggugugauaccacuaacaacaacaccaacaaaaucuuauuuugcaaaucucaaaggaacaaggaccagagggaaacuaugcccagacugucucaacugcacagaucuggauguggcuuugggcagaccaauguguguggggaccacaccuucggcgaaagcuucaauacuccacgaagucagaccuguuacauccgggugcuuuccuauaaugcacgacagaacaaaaaucaggcaacuacccaaucuucucagaggauaugaaaauaucaggcuaucaacccaaaacgucaucgaugcggaaaaggcaccaggaggacccuacagacuuggaaccucaggaucuugcccuaacgcuaccaguaagagcggauuuuucgcaacaauggcuugggcugucccaaaggacaacaacaaaaaugcaacgaacccacuaacaguagaaguaccauacauuuguacagaaggggaagaccaaaucacuguuuggggguuccauucagauaacaaaacccaaaugaagaaccucuauggagacucaaauccucaaaaguucaccucaucugcuaauggaguaaccacacacuauguuucucagauuggcagcuucccagaucaaacagaagacggaggacuaccacaaagcggcaggauuguuguugauuacaugaugcaaaaaccugggaaaacaggaacaauugucuaccaaagagguguuuuguugccucaaaagguguggugcgcgaguggcaggagcaaaguaauaaaaggguccuugccuuuaauuggugaagcagauugccuucaugaaaaauacgguggauuaaacaaaagcaagccuuacuacacaggagaacaugcaaaagccauaggaaauugcccaauaugggugaaaacaccuuugaagcuugccaauggaaccaaauauagaccuccugcaaaacuauuaaaggaaagggguuucuucggagcuauugcugguuuccuagaaggaggaugggaaggaaugauugcaggcuggcacggauacacaucucacggagcacauggaguggcaguggcggcggaccuuaagagcacgcaagaagcuauaaacaagauaacaaaaaaucucaauucuuugagugagcuagaaguaaagaaucuucaaagacuaaguggugccauggaugaacuccacaacgaaauacucgagcuggaugagaaaguggaugaucucagagcugacacuauaagcucgcaaauagaacuugcagucuugcuuuccaacgaaggaauaauaaacagugaagaugagcaucuauuggcacuugagagaaaacuaaagaaaaugcugggucccucugcuguagagauaggaaauggaugcuucgaaaccaaacacaagugcaaccagaccugcuuagacaggauagcugcuggcaccuuuaacgcaggagaauuuucucuccccacuuuugauucacugaacauuacugcugcaucuuuaaaugaugauggauuggauaaccauacuauacugcucuauuacucaacugcugcuucuaguuuggcuguaacauugaugcuagcuauuuuuauuguuuauauggucuccagagacaacguuucaugcuccaucugucuauaa

SEQ ID NO: 58583 - RNA, 1755 nt, Artificial Sequence
  derived and/or modified CDS sequence (wt) from hemagglutinin__InfluenzaB__ACO06023
augaaggcaauaauuguacuacucaugguaguaacauccaaugcagaucgaaucugcacuggaauaacaucuucaaacucaccucacguggucaaaacagccacucaaggggaggucaaugugacuggugugauaccacuaacaacaacaccaacaaaaucuuauuuugcaaaucucaaaggaacaaggaccagagggaaacuaugcccagacugucucaacugcacagaucuggauguggcuuugggcagaccaauguguguggggaccacaccuucggcgaaagcuucaauacuccacgaagucagaccuguuacauccgggugcuuuccuauaaugcacgacagaacaaaaaucaggcaacuacccaaucuucucagaggauaugaaaauaucaggcuaucaacccaaaacgucaucgaugcggaaaaggcaccaggaggacccuacagacuuggaaccucaggaucuugcccuaacgcuaccaguaagagcggauuuuucgcaacaauggcuugggcugucccaaaggacaacaacaaaaaugcaacgaacccacuaacaguagaaguaccauacauuuguacagaaggggaagaccaaaucacuguuuggggguuccauucagauaacaaaacccaaaugaagaaccucuauggagacucaaauccucaaaaguucaccucaucugcuaauggaguaaccacacacuauguuucucagauuggcagcuucccagaucaaacagaagacggaggacuaccacaaagcggcaggauuguuguugauuacaugaugcaaaaaccugggaaaacaggaacaauugucuaccaaagagguguuuuguugccucaaaagguguggugcgcgaguggcaggagcaaaguaauaaaaggguccuugccuuuaauuggugaagcagauugccuucaugaaaaauacgguggauuaaacaaaagcaagccuuacuacacaggagaacaugcaaaagccauaggaaauugcccaauaugggugaaaacaccuuugaagcuugccaauggaaccaaauauagaccuccugcaaaacuauuaaaggaaagggguuucuucggagcuauugcugguuuccuagaaggagggugggaaggaaugauugcaggcuggcacggauacacaucucacggagcacauggaguggcaguggcggcggaccuuaagagcacgcaagaagcuauaaacaagauaacaaaaaaucucaauucuuugagugagcuagaaguaaagaaucuucaaagacuaaguggugccauggaugaacuccacaacgaaauacucgagcuggaugagaaaguggaugaucucagagcugacacuauaagcucgcaaauagaacuugcagucuugcuuuccaacgaaggaauaauaaacagugaagaugagcaucuauuggcacuugagagaaaacuaaagaaaaugcugggucccucugcuguagagauaggaaauggaugcuucgaaaccaaacacaagugcaaccagaccugcuuagacaggauagcugcuggcaccuuuaacgcaggagaauuuucucuccccacuuuugauucacugaacauuacugcugcaucuuuaaaugaugauggauuggauaaccauaccauacugcucuauuacucaacugcugcuucuaguuuggcuguaacauugaugcuagcuauuuuuauuguuuauauggucuccagagacaacguuucaugcuccaucugucuauaa

SEQ ID NO: 58584 - RNA, 1755 nt, Artificial Sequence
  derived and/or modified CDS sequence (wt) from hemagglutinin__InfluenzaB__ACO06062
augaaggcaauaauuguacuacucaugguaguaacauccaaugcagaucgaaucugcacuggaauaacaucuucaaacucaccucacguggucaaaacagccacucaaggggaggucaaugugacuggugugauaccacuaacaacaacaccaacaaaaucuuauuuugcaaaucucaaaggaacaaggaccagagggaaacuaugcccagacugucucaacugcacagaucuggauguggcuuugggcagaccaauguguguggggaccacaccuucggcgaaagcuucaauacuccacgaagucagaccuguuacauccgggugcuuuccuauaaugcacgacagaacaaaaaucaggcaacuacccaaucuucucagaggauaugaaaauaucaggcuaucaacccaaaacgucaucgaugcggaaaaggcaccaggaggacccuacagacuuggaaccucaggaucuugcccuaacgcuaccaguaagagcggauuuuucgcaacaauggcuugggcugucccaaaggacaacaacaaaaaugcaacgaacccacuaacaguagaaguaccauacauuuguacagaaggggaagaccaaaucacuguuuggggguuccauucagauaacaaaacccaaaugaagaaccucuauggagacucaaauccucaaaaguucaccucaucugcuaauggaguaaccacacacuauguuucucagauugacagcuucccagaucaaacagaagacggaggacuaccacaaagcggcaggauuguuguugauuacaugaugcaaaaaccugggaaaacaggaacaauugucuaccaaagagguguuuuguugccucaaaagguguggugcgcgaguggcaggagcaaaguaauaaaaggguccuugccuuuaauuggugaagcagauugccuucaugaaaaauacgguggauuaaacaaaagcaagccuuacuacacaggagaacaugcaaaagccauaggaaauugcccaauaugggugaaaacaccuuugaagcuugccaauggaaccaaauauagaccuccugcaaaacuauuaaaggaaagggguuucuucggagcuauugcugguuuccuagaaggaggaugggaaggaaugauugcaggcuggcacggauacacaucucacggagcacauggaguggcaguggcggcggaccuuaagagcacgcaagaagcuauaaacaagauaacaaaaaaucucaauucuuugagugagcuagaaguaaagaaucuucaaagacuaaguggugccauggaugaacuccacaacgaaauacucgagcuggaugagaaaguggaugaucucagagcugacacuauaagcucgcaaauagaacuugcagucuugcuuuccaacgaaggaauaauaaacagugaagaugagcaucuauuggcacuugagagaaaacuaaagaaaaugcugggucccucugcuguagagauaggaaauggaugcuucgaaaccaaacacaagugcaaccagaccugcuuagacaggauagcugcuggcaccuuuaaugcaggagaauuuucucuccccacuuuugauucacugaacauuacugcugcaucuuuaaaugaugauggauuggauaaccauacuauacugcucuauuacucaacugcugcuucuaguuuggcuguaacauugaugcuagcuauuuuuauuguuuauauggucuccagagacaacguuucaugcuccaucugucuauaa

SEQ ID NO: 58585 - RNA, 1758 nt, Artificial Sequence
  derived and/or modified CDS sequence (wt) from hemagglutinin__InfluenzaB__ACO94661
augaaggcaauaauuguacuacucaugguaguaacauccaaugcagaucgaaucugcacugggauaacaucgucaaacucaccacauguugucaaaacugcuacucaaggggaggucaaugugacugguguaauaccacugacaacaacacccaccaaaucucauuuugcaaaucucaaaggaacagaaaccagagggaaacuaugcccaaaaugccucaacugcacagaucuggacguggccuugggcagaccaaaaugcacggggaacauacccucggcaagaguuucaauacuccaugaagucagaccuguuacaucugggugcuuuccuauaaugcacgacagaacaaaaauuagacagcugccuaaccuucucagaggauacgaacauaucagguuaucaacucauaacguuaucaaugcagaaaaugcaccaggaggacccuacaaaauuggaaccucagggucuugcccuaacguuaccaauggaaacggauuuuucacaacaauggcuugggccgucccaaaaaacgacaacaacaaaacagcaacaaauucauuaacaauagaaguaccauacauuuguacagaaggagaagaccaaauuaccguuuggggguuccacucugauaacgagacccaaauggcaaagcucuauggggacucaaagccccagaaguucaccucaucugccaacggagugaccacacauuacguuucacagauugguggcuucccaaaucaaacagaagacggaggacuaccacaaagugguagaauuguuguugauuacauggugcaaaaaucugggaaaacaggaacaauuaccuaucaaagagguauuuuauugccucaaaagguguggugcgcaaguggcaggagcaagguaauaaaaggauccuugccuuuaauuggagaagcagauugccuccacgaaaaauacgguggauuaaacaaaagcaagccuuacuacacaggggaacaugcaaaggccauaggaaauugcccaauaugggugaaaacacccuugaagcuggccaauggaaccaaauauagaccuccugcaaaacuauuaaaggaaagggguuucuucggagcuauugcugguuucuuagaaggaggaugggaaggaaugauugcagguuggcacggauacacaucccauggggcacauggaguagcgguggcagcagaccuuaagagcacucaagaggccauaaacaagauaacaaaaaaucucaacucuuugagugagcuggaagugaagaaucuucaaagacuaagcggugccauggaugaacuccacaacgaaauacuagaacuagacgagaaaguggaugaucucagagcugauacaauaagcucacaaauagaacucgcaguccugcuuuccaaugaaggaauaauaaacagugaagaugagcaucucuuggcgcuugaaagaaagcugaagaaaaugcugggccccucugcuguagagauagggaauggaugcuuugaaaccaaacacaagugcaaccagaccugucucgacagaauagcugcugguaccuuugaugcaggagaauuuucucuccccacuuuugauucacugaauauuacugcugcaucuuuaaaugacgauggauuggauaaucauacuauacugcuuuacuacucaacugcugccuccaguuuggcuguaacauugaugauagcuaucuuuguuguuuauauggucuccagagacaauguuucuugcuccaucugucuauaa

SEQ ID NO: 58586 - RNA, 1758 nt, Artificial Sequence
  derived and/or modified CDS sequence (wt) from hemagglutinin__InfluenzaB__ACR15622
augaaggcaauaauuguacuacucaugguaguaacauccaaugcagaucgaaucugcacugggauaacaucgucaaacucaccacauguugucaaaacugcuacucaaggggagguuaaugugacugguguaauaccacugacaacaacacccaccaaaucucauuuugcaaaucucaaaggaacagaaaccagagggaaacuaugcccaaaaugccucaacugcacagaucuggacguggccuugggcagaccaaaaugcacggggaacauacccucggcaagaguuucaauacuccaugaagucagaccuguuacaucugggugcuuuccuauaaugcacgacagaacaaaaauuagacagcugccuaaccuucucagaggauacgaacauaucagguuaucaacucauaacguuaucaaugcagaaaaugcaccaggaggacccuacaaaauuggaaccucagggucuugcccuaacguuaccaauggaaacggauuuuucgcaacaauggcuugggccgucccaaaaaacgacaacaacaaaacagcaacaaauucauuaacaauagaaguaccauacauuuguacagaaggagaagaccaaauuaccguuuggggguuccacucugauaacgagacccaaauggcaaagcucuauggggacucaaagccccagaaguucaccucaucugccaacggagugaccacacauuacguuucacagauugguggcuucccaaaucaaacagaagacggaggacuaccacaaagugguagaauuguuguugauuacauggugcaaaaaucugggaaaacaggaacaauuaccuaucaaagagguauuuuauugccucaaaagguguggugcgcaaguggcaggagcaagguaauaaaaggauccuugccuuuaauuggagaagcagauugccuccacgaaaaauacgguggauuaaacaaaagcaagccuuacuacacaggggaacaugcaaaggccauaggaaauugcccaauaugggugaaaacacccuugaagcuggccaauggaaccaaauauagaccuccugcaaaacuauuaaaggaaagggguuucuucggagcuauugcugguuucuuagaaggaggaugggaaggaaugauugcagguuggcacggauauacaucccauggggcacauggaguagcgguggcagcagaccuuaagagcacucaagaggccauaaacaagauaacaaaaaaucucaacucuuugagugagcuggaaguaaagaaucuucaaagacuaagcggugccauggaugaacuccacaacgaaauacuagaacuagacgagaaaguggaugaucucagagcugauacaauaagcucacaaauagaacucgcaguccugcuuuccaaugagggaauaauaaacagugaagaugagcaucucuuggcgcuugaaagaaagcugaagaaaaugcugggccccucugcuguagagauagggaauggaugcuuugaaaccaaacacaagugcaaccagaccugucucgacagaauagcugcugguaccuuugaugcaggagaauuuucucuccccaccuuugauucacugaauauuacugcugcaucuuuaaaugacgauggauuggauaaucauacuauacugcuuuacuacucaacugcugccuccaguuuggcuguaacauugaugauagcuaucuuuguuguuuauauggucuccagagacaauguuucuugcuccaucugucuauaa

SEQ ID NO: 58587 - RNA, 1758 nt, Artificial Sequence
  derived and/or modified CDS sequence (wt) from hemagglutinin__InfluenzaB__ACR15633
augaaggcaauaauuguacuacucaugguaguaacauccaaugcagaucgaaucugcacugggauaacaucgucaaacucaccacauguugucaaaacugcuacucaaggggagguuaaugugacugguguaauaccacugacaacaacacccaccaaaucucauuuugcaaaucucaaaggaacagaaaccagagggaaacuaugcccaaaaugccucaacugcacagaucuggacguggccuugggcagaccaaaaugcacggggaacauacccucggcaagaguuucaauacuucaugaagucagaccuguuacaucugggugcuuuccuauaaugcacgacagaacaaaaauuagacagcugccuaaccuucucagaggauacgaacauaucagguuaucaacucauaacguuaucaaugcagaaaaugcaccaggaggacccuacaaaauuggaaccucagggucuugcccuaacguuaccaauggaaacggauuuuucgcaacaauggcuugggccgucccaaaaaacgacaacaacaaaacagcaacaaauucauuaacaauagaaguaccauacauuuguacagaaggagaagaccaaauuaccguuuggggguuccacucugauagcgagacccaaauggcaaagcucuauggggacucaaagccccagaaguucaccucaucugccaacggagugaccacacauuacguuucacagauugguggcuucccaaaucaaacagaagacggaggacuaccacaaagugguagaauuguuguugauuacauggugcaaaaaucugggaaaacaggaacaauuaccuaucaaagagguauuuuauugccucaaaagguguggugcgcaaguggcaggagcaagguaauaaaaggauccuugccuuuaauuggagaagcagauugccuccacgaaaaauacgguggauuaaacaaaagcaagccuuacuacacaggggaacaugcaaaggccauaggaaauugcccaauaugggugaaaacacccuugaagcuggccaauggaaccaaauauagaccuccugcaaaacuauuaaaggaaagggguuuuuucggagcuauugcugguuucuuagaaggaggaugggaaggaaugauugcagguuggcacggauauacaucccauggggcacauggaguagcgguggcagcagaccuuaagagcacucaagaggccauaaacaagauaacaaaaaaucucaacucuuugagugagcuggaaguaaagaaucuucaaagacuaagcggugccauggaugaacuccacaacgaaauacuagaacuagacgagaaaguggaugaucucagagcugauacaauaagcucacaaauagaacucgcaguccugcuuuccaaugagggaauaauaaacagugaagaugagcaucucuuggcgcuugaaagaaagcugaagaaaaugcugggccccucugcuguagagauagggaauggaugcuuugaaaccaaacacaagugcaaccagaccugucucgacagaauagcugcugguaccuuugaugcaggagaauuuucucuccccaccuuugauucacugaauauuacugcugcaucuuuaaaugacgauggauuggauaaucauacuauacugcuuuacuacucaacugcugcuuccaguuuggcuguaacauugaugauagcuaucuuuguuguuuauauggucuccagagacaauguuucuugcuccaucugucuauaa

SEQ ID NO: 58588 - RNA, 1755 nt, Artificial Sequence
  derived and/or modified CDS sequence (wt) from hemagglutinin__InfluenzaB__ACR15644
augaaggcaauaauuguacuacucaugguaguaacauccaaugcagaucgaaucugcacugggauaacaucuucaaacucaccucauguggucaaaacagcuacucaaggggaggucaaugugacugguguaauaccacugacaacaacaccaacaaaaucuuauuuugcaaaucucaaaggaacaaggaccagagggaaacuauguccagacugucucaacuguacagaucuggauguggccuugggcagaccaauguguguggggaccacaccuucggcaaaagcuucaauacuccaugaagucagaccuguuacauccgggugcuuuccuauaaugcacgacagaacaaaaaucagacaacuacccaaucuucucagaggauaugaaaauaucagauuaucaacccaaaacguuaucgaugcagaaaaugcaccaggaggacccuacagacuuggaaccucaggaucuugcccuaacgcuaccaguaaaagcggauucuucgcaacaauggcuugggcugucccaaaggacaacaacaaaaaugcaacgaacccacuaacaguagaaguaccauacguuuguacggaaggggaagaccaaauuacuguuuggggguuccauucagauaacaaaauccaaaugaagaaccucuauggagacucaaauccucaaaaguucaccucaucugcuaauggaguaaccacacauuauguuucucagauuggcggcuucccagcucaaacagaagacggaggacuaccacaaaguggcagaauuguuguugauuacauggugcaaaaaccuaggaaaacaggaacaauugucuaucaaagagguguuuuguugccucaaaagguguggugcgcgaguggcaggagcaaaguaauaaaaggguccuugccuuuaauuggugaagcagauugccuucaugaaaaauacgguggauuaaacaaaagcaagccuuacuacacaggagaacaugcaaaagccauaggaaauugcccaauaugggugaaaacaccuuugaagcuugccaauggaaccaaauauagaccuccugcaaaacuauuaaaggaaagggguuucuucggagcuauugcugguuuccuagaaggaggaugggaaggaaugauugcagguuggcacggauacacaucucacggagcacauggaguggcaguggcggcagaccuuaagaguacgcaagaagcuauaaacaagauaacaaaaaaucucaauucuuugagugagcuagaaguaaagaaucuucaaagacuaaguggugccauggaugaacuccacaacgaaauacucgagcuggaugagaaaguggaugaucucagagcugacacuauaagcucgcaaauagaacuugcagucuugcuuuccaaugaaggaauaauaaacagugaagaugagcaucuauuggcacuugagagaaaacuaaagaaaaugcugggucccucugcuguagacauaggaaauggaugcuucgaaaccaaacacaagugcaaccagaccugcuuagacaggauagcugcuggcaccuuuaaugcaggagaauuuucucuccccacuuuugauucacugaacauuacugcugcaucuuuaaaugaugauggauuggauaaccauacuauacugcucuauuacucaacugcugcuucuaguuuggcuguaacauugaugcuagcuauuuuuauuguuuauauggucuccagagacaacguuucaugcuccaucugucuauaa

SEQ ID NO: 58589 - RNA, 1758 nt, Artificial Sequence
  derived and/or modified CDS sequence (wt) from hemagglutinin__InfluenzaB__ACR15655
augaaggcaauaauuguacuacucaugguaguaacauccaaugcagaucgaaucugcacugggauaacaucgucaaacucaccacauguugucaaaacugcuacucaaggggagguuaaugugacugguguaauaccacugacaacaacacccaccaaaucucauuuugcaaaucucaaaggaacagaaaccagagggaaacuaugcccaaaaugccucaacugcacagaucuggacguggccuugggcagaccaaaaugcacggggaacauacccucggcaagaguuucaauacuccaugaagucagaccuguuacaucugggugcuuuccuauaaugcacgacagaacaaaaauuagacagcugccuaaccuucucagaggauacgaacauaucagguuaucaacucauaacguuaucaaugcagaaaaugcaccaggaggacccuacaaaauuggaaccucagggucuugcccuaacguuaccaauggaaacggauuuuucgcaacaauggcuugggccgucccaaaaaacgacaacaacaaaacagcaacaaauucauuaacaauagaaguaccauacauuuguacagaaggagaagaccaaauuaccguuuggggguuccacucugauagcgagacccaaauggcaaagcucuauggggacucaaagccccagaaguucaccucaucugccaacggagugaccacacauuacguuucacagauugguggcuucccaaaucaaacagaagacggaggacuaccacaaagugguagaauuguuguugauuacauggugcaaaaaucugggaaaacaggaacaauuaccuaucaaagagguauuuuauugccucaaaagguguggugcgcaaguggcaggagcaagguaauaaaaggauccuugccuuuaauuggagaagcagauugccuccacgaaaaauacgguggauuaaacaaaagcaagccuuacuacacaggggaacaugcaaaggccauaggaaauugcccaauaugggugaaaacacccuugaagcuggccaauggaaccaaauauagaccuccugcaaaacuauuaaaggaaagggguuucuucggagcuauugcugguuucuuagaaggaggaugggaaggaaugauugcagguuggcacggauauacaucccauggggcacauggaguagcgguggcagcagaccuuaagagcacucaagaggccauaaacaagauaacaaaaaaucucaacucuuugagugagcuggaaguaaagaaucuucaaagacuaagcggugccauggaugaacuccacaacgaaauacuagaacuagacgagaaaguggaugaucucagagcugauacaauaagcucacaaauagaacucgcaguccugcuuuccaaugagggaauaauaaacagugaagaugagcaucucuuggcgcuugaaagaaagcugaagaaaaugcugggccccucugcuguagagauagggaauggaugcuuugaaaccaaacacaagugcaaccagaccugucucgacagaauagcugcugguaccuuugaugcaggagaauuuucucuccccaccuuugauucacugaauauuacugcugcaucuuuaaaugacgauggauuggauaaucauacuauacugcuuuacuacucaacugcugccuccaguuuggcuguaacauugaugauagcuaucuuuguuguuuauauggucuccagagacaauauuucuugcuccaucugucuauaa

SEQ ID NO: 58590 - RNA, 1758 nt, Artificial Sequence
  derived and/or modified CDS sequence (wt) from hemagglutinin__InfluenzaB__ACR15666
augaaggcaauaauuguacuacucaugguaguaacauccaaugcagaucgaaucugcacugggauaacaucgucaaacucaccacauguugucaaaacugcuacucaaggggagguuaaugugacugguguaauaccacugacaacaacacccaccaaaucucauuuugcaaaucucaaaggaacagaaaccagagggaaacuaugcccaaaaugccucaacugcacagaucuggacguggccuugggcagaccaaaaugcacggggaacauacccucggcaagaguuucaauacuccaugaagucagaccuguuacaucugggugcuuuccuauaaugcacaacagaacaaaaauuagacagcugccuaaccuucucagaggauacgaacauaucagguuaucaacucauaacguuaucaaugcagaaaaugcaccaggaggacccuacaaaauuggaaccucagggucuugcccuaacguuaccaauggaaacggauuuuucgcaacaauggcuugggccgucccaaaaaacgacaacaacaaaacagcaacaaauucauuaacaauagaaguaccauacauuuguacagaaggagaagaccaaauuaccguuuggggguuccacucugaugacgagacccaaauggcaaagcucuauggggacucaaagccccagaaguucaccucaucugccaacggagugaccacacauuacguuucacagauugguggcuucccaaaucaaacagaagacggaggacuaccacaaagugguagaauuguuguugauuacauggugcaaaaaucugggaaaacaggaacaauuaccuaucaaagagguauuuuauugccucaaaagguguggugcgcaaguggcaggagcaagguaauaaaaggauccuugccuuuaauuggagaagcagauugccuccacgaaaaauacgguggauuaaacaaaagcaagccuuacuacacaggggaacaugcaaaggccauaggaaauugcccaauaugggugaaaacacccuugaagcuggccaauggaaccaaauauagaccuccugcaaaacuauuaaaggaaagggguuucuucggagcuauugcugguuucuuagaaggaggaugggaaggaaugauugcagguuggcacggauauacaucccauggggcacauggaguagcgguggcagcagaccuuaagagcacucaagaggccauaaacaagauaacaaaaaaucucaacucuuugagugagcuggaaguaaagaaucuucaaagacuaagcggugccauggaugaacuccacaacgaaauacuagaacuagacgagaaaguggaugaucucagagcugauacaauaagcucacaaauagaacucgcaguccugcuuuccaaugagggaauaauaaacagugaagaugagcaucucuuggcgcuugaaagaaagcugaagaaaaugcugggccccucugcuguagagauagggaauggaugcuuugaaaccaaacacaagugcaaccagaccugucucgacagaauagcugcugguaccuuugaugcaggagaauuuucucuccccaccuuugauucacugaauauuacugcugcaucuuuaaaugacgauggauuggauaaucauacuauacugcuuuacuacucaacugcugccuccaguuuggcuguaacauugaugauagcuaucuuuguuguuuauauggucuccagagacaauguuucuugcuccaucugucuauaa

SEQ ID NO: 58591 - RNA, 1758 nt, Artificial Sequence
  derived and/or modified CDS sequence (wt) from hemagglutinin__InfluenzaB__ACR15677
augaaggcaauaauuguacuacucaugguaguaacauccaaugcagaucgaaucugcacugggauaacaucgucaaacucaccccauguggucaaaacugcuacucaaggggaggucaaugugacuggugugauaccacugacaacaacacccaccaaaucucauuuugcaaaucucaaaggaacaaaaaccagagggaaacuaugcccaaaaugccucaacugcacagaucuggacguggccuugggcagaccaaaaugcacggggaacauacccucggcaaaaguuucaauacuccaugaagucagaccuguuacaucugggugcuuuccuauaaugcacgacagaacaaaaauuagacagcugcccaaucuucucagaggauacgaacauaucagguuaucaacucauaacguuaucaaugcagaaaaggcaccaggaggacccuacaaaauuggaaccucagggucuugcccuaacauuaccaauggaaacggauuuuucgcaacaauggcuugggccgucccaaaaaacgacaacaacaaaacagcaacaaauucauuaacaauagaaguaccauacauuuguacagaaggagaagaccaaauuaccguuuggggguuccacucugauaacgaggcccaaauggcaaaacucuauggggacucaaagccccagaaguucaccucaucugccaacggagugaccacacauuacguuucacagauugguggcuucccaaaucaaacagaagacggaggacuaccacaaagugguagaauuguuguugauuacauggugcaaaaaucugggaaaacaggaacaauuaccuaucaaagagguauuuuauugccucaaaagguguggugcgcaaguggcaggagcaagguaauaaaaggauccuugccuuuaauuggagaagcagauugccuccacgaaaaauacgguggauuaaacaaaagcaagccuuacuacacaggggaacaugcaaaggccauaggaaauugcccaauaugggugaaaacacccuugaagcuggccaauggaaccaaauauagaccuccugcaaaacuauuaaaggaaagggguuucuucggagcuauugcugguuucuuagaaggaggaugggaaggaaugauugcagguuggcacggauacacaucccauggggcacauggaguagcaguggcagcagaccuuaagaguacucaagaagccauaaacaagauaacaaaaaaucucaacucuuugagugagcuggaaguaaagaaucuucaaagacuaagcggugccauggaugaacuccacaacgaaauacuagaacuagacgagaaaguggaugaucucagagcugauacaauaagcucacaaauagaacucgcagucuugcuuuccaaugaaggaauaauaaacagugaagaugagcaucucuuggcgcuugaaagaaagcugaagaaaaugcugggccccucugcuguagagauagggaauggaugcuucgaaaccaaacacaagugcaaccagaccugucucgacagaauagcugcugguaccuuugaugcaggagaauuuucucuccccacuuuugauucacugaauauuacugcugcaucuuuaaaugacgauggauuggauaaucauacuauacugcuuuacuacucaacugcugccuccaguuuggcuguaacauugaugauagcuaucuuuguuguuuauauggucuccagagacaauguuucuugcuccaucugucuauaa

SEQ ID NO: 58592 - RNA, 1755 nt, Artificial Sequence
  derived and/or modified CDS sequence (wt) from hemagglutinin__InfluenzaB__ACR15710
augaaggcaauaauuguacuacucaugguaguaacauccaaugcagaucgaaucugcacuggaauaacaucuucaaacucaccucacguggucaaaacagccacucaaggggaggucaaugugacuggugugauaccacuaacaacaacaccaacaaaaucuuauuuugcaaaucucaaaggaacaaggaccagagggaaacuaugcccagacugucucaacugcacagaucuggauguggcuuugggcagaccaauguguguggggaccacaccuucggcgaaagcuucaauacuccacgaagucagaccuguuacauccgggugcuuuccuauaaugcacgacagaacaaaaaucaggcaacuacccaaucuucucagaggauaugaaaauaucaggcuaucaacccaaaacgucaucgaugcggaaaaggcaccaggaggacccuacagacuuggaaccucaggaucuugccccaacgcuaccaguaagagcggauuuuucgcaacaauggcuugggcugucccaaaggacaacaacaaaaaugcaacgaacccacuaacaguagaaguaccauacauuuguacagaaggggaagaccaaaucacuguuuggggguuccauucagauaacaaaacccaaaugaagaaccucuauggagacucaaauccucaaaaguucaccucaucugcuaauggaguaaccacacacuauguuucucagauuggcagcuucccagaucaaacagaagacggaggacuaccacaaagcggcagaauuguuguugauuacaugaugcaaaaaccugggaaaacaggaacaauugucuaccaaagagguguuuuguugccucaaaagguguggugcgcgaguggcaggagcaaaguaauaaaaggguccuugccuuuaauuggugaagcagauugccuucaugaaaaauacgguggauuaaacaaaagcaagccuuacuacacaggagaacaugcaaaagccauaggaaauugcccaauaugggugaaaacaccuuugaagcuugccaauggaaccaaauauagaccuccugcaaaacuauuaaaggaaagggguuucuucggagcuauugcugguuuccuagaaggaggaugggaaggaaugauugcaggcuggcacggauacacaucucacggagcacauggaguggcaguggcggcggaccuuaagagcacgcaagaagcuauaaacaagauaacaaaaaaucucaauucuuugagugagcuagaaguaaagaaucuucaaagacuaaguggugccauggaugaacuccacaacgaaauacucgagcuggaugagaaaguggaugaucucagagcugacacuauaagcucgcaaauagaacuugcagucuugcuuuccaacgaaggaauaauaaacagugaagaugagcaucuauuggcacuugagagaaaacuaaagaaaaugcugggucccucugcuguagagauaggaaauggaugcuucgaaaccaaacacaagugcaaccagaccugcuuagacaggauagcugcuggcaccuuuaacgcaggagaauuuucucuccccacuuuugauucacugaacauuacugcugcaucuuuaaaugaugauggauuggauaaccauacuauacugcucuauuacucaacugcugcuucuaguuuggcuguaacauugaugcuagcuauuuuuauuguuuauauggucuccagagacaacguuucaugcuccaucugucuauaa

SEQ ID NO: 58593 - RNA, 1755 nt, Artificial Sequence
  derived and/or modified CDS sequence (wt) from hemagglutinin__InfluenzaB__ACR15721
augaaggcaauaauuguacuacucaugguaguaacauccaaugcagaucgaaucugcacugggauaacaucuucaaacucaccucauguggucaaaacagcuacucaaggggaggucaaugugacuggugugauaccacugacaacaacaccaacaaaaucucauuuugcaaaucucaaaggaacaaagaccagagggaaacuaugcccaaacugucucaacugcacagaucuggauguggccuugggcagaccaauguguguggggaccacaccuucggcaaaagcuucaauacuccacgaagucagaccuguuacauccgggugcuuuccuauaaugcacgacagaacaaaaaucagacagcuacccaaucuucucagaggauaugaaaauaucagauuaucaacccaaaacguuaucaaugcagaaaaagcaccaggaggacccuacagacuuggaaccucaggaucuugcccuaacgcuaccaguagaagcggauuuuuugcaacaauggcuugggcugucccaagggacgacaacaaaacagcaacgaauccacuaacaguagaaguaccauacguuuguacagaaggagaagaccaaauuacuguuuggggguuccauucugauaacaaagcccaaaugaaaaaccucuauggagacucaaauccucaaaaguucaccucaucugcuaauggaguaaccacacauuauguuucucagauuggcggcuucccagaucaaacagaagacggagggcuaccacaaagcggcagaauuguuguugauuacauggugcaaaaaccugggaaaacaggaacaauugucuaucaaagagguguuuuguugccucaaaagguguggugcgcgaguggcaggagcaaaguaauaaaaggguccuugccuuuaauuggugaagcagauugccuucacgaaaaauacgguggauuaaacaaaagcaagccuuacuacacaggagaacaugcaaaagccauaggaaauugcccaauaugggugaaaacaccuuugaagcuugccaauggaaccaaauauagaccuccugcaaaacuauuaaaggaaagggguuucuucggagcuauugcugguuucuuagaaggaggaugggaaggaaugauugcagguuggcacggauacacaucucacggagcacauggaguggcaguggcagcagaccuuaagaguacgcaagaagccauaaacaagauaacaaaaaaucucaauucuuugagugagcuagaaguaaagaaucuucaaagacuaaguggugccauggaugaacuccauaacgaaauacucgagcuggaugagaaaguggaugaucucagagcugacacuauaagcucgcaaauagaacuugcagucuugcuuuccaacgaaggaauaauaaacagugaagaugagcaucuauuggcacuugagagaaaacuaaagaaaaugcugggucccucugcuguagacauagggaauggaugcuucgaaaccaaacacaagugcaaccagaccugcuuagacaggauagcugcuggcaccuuuaaugcaggagaauuuucucuccccacuuuugauucacugaauauuacugcugcaucuuuaaaugaugauggauuggauaaucauacuauacugcucuacuacucaacugcugcuucuaguuuggcuguaacauugaugauagcuauuuuuauuguuuauauggucuccagagacaauguuucaugcuccaucugucuauaa

SEQ ID NO: 58594 - RNA, 1758 nt, Artificial Sequence
  derived and/or modified CDS sequence (wt) from hemagglutinin__InfluenzaB__ACR39336
augaaggcaauaauuguacuacucaugguaguaacauccaaugcagaucgaaucugcacugggauaacaucgucaaacucaccacauguugucaaaacugcuacucaaggggagguuaaugugacugguguaauaccacugacaacaacacccaccaaaucucauuuugcaaaucucaaaggaacagaaaccagagggaaacuaugcccaaaaugccucaacugcacagaucuggacguggccuugggcagaccaaaaugcacggggaacauacccucggcaagaguuucaauacuccaugaagucagaccuguuacaucugggugcuuuccuauaaugcacgacagaacaaaaauuagacagcugccuaaccuucucagaggauacgaacauaucagguuaucaacucauaacguuaucaaugcagaaaaugcaccaggaggacccuacaaaauuggaaccucagggucuugcccuaacguuaccaauggaaacggauuuuucgcaacaauggcuugggccgucccaaaaaacgacaacaacaaaacagcaacaaauucauuaacaauagaaguaccauacauuuguacagaaggagaagaccaaauuaccguuuggggguuccacucugauaacgaggcccaaauggcaaagcucuauggggacucaaagccccagaaguucaccucaucugccaacggagugaccacacauuacguuucacagauugguggcuucccaaaucaaacagaagacggaggacuaccacaaagugguagaauuguuguugauuacauggugcaaaaaucugggaaaacaggaacaauuaccuaucaaagagguauuuuauugccucaaaagguguggugcgcaaguggcaggagcaagguaauaaaaggauccuugccuuuaauuggagaagcagauugccuccacgaaaaauacgguggauuaaacaaaagcaagccuuacuacacaggggaacaugcaaaggccauaggaaauugcccaauaugggugaaaacacccuugaagcuggccaauggaaccaaauauagaccuccugcaaaacuauuaaaggaaagggguuucuucggagcuauugcugguuucuuagaaggaggaugggaaggaaugauugcagguuggcacggauauacaucccauggggcacauggaguagcgguggcagcagaccuuaagagcacucaagaggccauaaacaagauaacaaaaaaucucaacucuuugagugagcuggaaguaaagaaucuucaaagacuaagcggugccauggaugaacuccacaacgaaauacuagaacuagacgagaaaguggaugaucucagagcugauacaauaagcucacaaauagaacucgcaguccugcuuuccaaugagggaauaauaaacagugaagaugagcaucucuuggcgcuugaaagaaagcugaagaaaaugcugggccccucugcuguagagauagggaauggaugcuuugaaaccaaacacaagugcaaccagaccugucucgacagaauagcugcugguaccuuugaugcaggagaauuuucucuccccaccuuugauucacugaauauuacugcugcaucuuuaaaugacgauggauuggauaaucauacuauacugcuuuacuacucaacugcugccuccaguuuggcuguaacauugaugauagcuaucuuuguuguuuauauggucuccagagacaauguuucuugcuccaucugucuauaa

SEQ ID NO: 58595 - RNA, 1755 nt, Artificial Sequence
  derived and/or modified CDS sequence (wt) from hemagglutinin__InfluenzaB__AEA51386
augaaggcaauaauuguacuacucaugguaguaacauccaaugcagaucgaaucugcacugggauaacaucuucaaacucaccucauguggucaaaacagcuacucaaggggaggucaaugugacuggugugauaccacugacaacaacaccaacaaaaucuuauuuugcaaaucucaaaggaacaaggaccagagggaaacuaugcccggacugucucaacuguacagaucuggauguggccuugggcaggccaauguguguggggaccacaccuucugcgaaagcuucaauacuccacgaagucagaccuguuacauccgggugcuuuccuauaaugcacgacagaacaaaaaucaggcaacuacccaaucuucucagaggauaugaaaauaucagguuaucaacccaaaacguuaucgaugcggaaaaagcaccaggaggacccuacagacuuggaaccucaggaucuugcccuaacgcuaccaguaaaagcggauuuuucgcaacaauggcuugggcugucccaaaggacaacuacaaaaaugcaacgaacccacuaacaguagaaguaccauacauuuguacagaaggggaaggccaaauuacuguuuggggguuccauucagauaacaaaccccaaaugaagaaccucuauggagacucaaauccucaaaaguucaccucaucugcuaguggaguaaccacacauuauguuucucagauuggcgacuucccagaucaaacagaagacggaggacuaccacaaagcggcagaauuguuguugauuacaugaugcaaaaaccugggaaaacaggaacaauugucuaucaaagagguguuuuguugccucaaaagguguggugcgcgaguggcaggagcaaaguaauaaaagggucauugccuuuaauuggugaagcagauugccuucaugaaaaauacgguggauuaaacaaaagcaagccuuacuacacaggagaacaugcaaaagccauaggaaauugcccaauauggguaauuacuccacaaaagcuugccaauggaaccacauuuagcccuccugcaaaacuauuaaaggaaagggguuucuucggagcuauugcugguuuccuagaaggaggaugggaaggaaugauugcagguuggcacggauacacaucucacggagcacauggaguggcaguggcggcagaccuuaagaguacacaagaagcuauaaacaagauaacaaaaaaucucaauucuuugagugagcuagaaguaaagaaccuucaaagacuaaguggugccauggaugaacuccacaacgaaauacucgagcuggaugagaaaguggaugaucucagagcugacacuauaagcucacaaauagaacuugcagucuugcuuuccaacgaaggaauaauaaacagugaagacgagcaucuauuggcacuugagagaaaacuaaagaaaaugcugggucccucugcuguagacauaggaaauggaugcuuugaaaccaaacacaaaugcaaccagaccugcuuagacaggauagcugcuggcaccuuuaaugcaggagaauuuucucuccccacuuuugauucauugaacauuacugcugcaucuuuaaaugaugauggauuggauaaccauacuauacugcucuauuacucaacugcugcuucuaguuuggcuguaacauugaugcuagcuauuuuuauuguuuauauggucuccagagacaacguuucaugcuccaucugucuauaa

SEQ ID NO: 58596 - RNA, 1755 nt, Artificial Sequence
  derived and/or modified CDS sequence (wt) from hemagglutinin__InfluenzaB__AEA51387
augaaggcaauaauuguacuacucaugguaguaacauccaaugcagaucgaaucugcacugagauaacaucuucaaacucaccucuuguggucaaaacagcuacucaaggggaggucaaugugacuggugugauaccacugacaacaacaccaacaaaaucuuauuuugcaaaucucaaaggaacaaggaccagagggaaacuaugcccggacugucucaacuguacagaucuggauguggccuugggcaggccaauguguguggggaccacaccuucugcgaaagcuucaauacuccacgaagucagaccuguuacauccgggugcuuuccuauaaugcacgacagaacaaaaaucaggcaacuacccaaucuucucagaggauaugaaaauaucagguuaucaacccaaaacguuaucgaugcagaaaaagcaccaggaggacccuacagacuuggaaccucaggaucuugcccuaacgcuaccaguaaaaucggauuuuucgcuacaauggcuugggccgucccaaaggacaacuacaaaaaugcaacgaacccacuaacaguagaaguaccauacauuuguacagaaggggaagaccaaauuacuguuuggggguuccauucagauaacaaaacccaaaugaagaaccucuauggagacucaaauccucaaaaguucaccucaucugcuaauggaguaaccacacauuauguuucucagauuggcgacuucccagaucaaacagaagacggaggacuaccccaaagcggcagaauuguuguugauuacaugaugcaaaaaccugggaaaacaggaccaauugucuaucaaagagguguuuuguugccucaaaagguguggugcgcgaguggcaggagcaaaguaauaaaagggucauugccuuuaauuggugaagcagauugccuucaugaaaaauacgguggauuaaacaaaagcaaguauucccacacaggagaccaugcaaaaacccuaggaaauugcccaauauggguaaaaacaccuuugaagcuugccaauggaaccaaauauagaccuccugcaaaacuauuaaaggaaagggguuucuucggagcuauugcugguuuccuagaaggaggaugggaaggaaugauugcagguuggcacggauacacaucucacggagcacauggaguggcaguggcggcagaccuuaagaguacacaagaagcuauaaauaagauaacaaaaaaucucaauucuuugagugagcuagaaguaaagaaccuucaaagacuaaguggugccauggaugaacuccacaacgaaauacucgagcuggaugagaaaguggaugaucucagagcugacacuauaagcucacaaauagaacuugcagucuugcuuuccaacgaaggaauaauaaacagugaagacgagcaucuauuggcacuugagagaaaacuaaagaaaaugcugggucccucugcuguagacauaggaaauggaugcuucgaaaccaaacacaaaugcaaccagaccugcuuagacaggauagcugcuggcaccuuuaaugcaggagaauuuucucuccccaccuuugauucauugaacauuacugcugcaucuuuaaaugaugauggauuggauaaccauacuauauugcucuauuacucaacugcugcuucuaguuuggcuguaacauuaauguuagcuauuuuuauuguuuauauggucuccagagacaacguuucaugcuccaucugucuauaa

SEQ ID NO: 58597 - RNA, 1755 nt, Artificial Sequence
  derived and/or modified CDS sequence (wt) from hemagglutinin__InfluenzaB__AEA51388
augaaggcaauaauuguacuacucaugguaguuacauccaaugcagaucgaaucugcacugggauaacaucuucaaacucaccucauguggucaaaacagcuacucaaggggaggucaaugugacuggugugauaccacugacaacaacaccaacaaaaucuuauuuugcaaaucucaaaggaacaaggaccagagggaaacuaugcccggacugucucaacuguacagaucuggauguggccuugggcaggccaauguguguggggaccacaccuucugcuaaggcuucaauacuccacgaagucagaccuguuacauccgggugcuuuccuauaaugcacgacagaacaaaaaucaggcaacuacccaaucuucucagaggauaugaaaauauaagguuaucaacccaaaacguuaucgaugcagaaaaagcaccaggaggacccuauagacuuggaaccucaggaucuugcccuaacgcuaccaguaaaaucggauuuuucgcaacaauggcuugggcugucccaaaggacaacuacaaaaaugcaacgaacccacuaacaguagaaguaccauacauuuguacagaaggggaagaccaaauuacuguuuggggguuccauucagauaacaaaacccaaaugaagaaccucuauggagacucaaauccucaaaaguucaccucaucugcuaauggaguaaccacacauuauguuucucagauuggcgacuucccagaucaaacagaagacggaggacuaccacaaagcggcagaauuguuguugauuacaugaugcaaaaaccugggaaaacaggaacaauugucuaucaaagagguguuuuguugccucaaaagguguggugcgcgaguggcaggagcaaaguaauaaaagggucauugccuuuaauuggugaagcagauugccuucaugaaaaauacgguggauuaaacaaaagcaagccuuccuacacaggagaacaugcaaaagccaaaggaaauugcccaauauggguaaauacaccuuugaagcuugccaauggaaccaaauauagaccuccugcaaaacuauuuaaggaaagggguuucuucggagcuauugcugguuuccuagaaggagguugggaaggaaugauugcagguuggcacggauacacaucucacggagcacauggaguagcaguggcggcagaccuuaagaguacacaagaagcuauaaauaagauaacaaaaaaucucaauucuuugagugagcuagaaguaaagaaccuucaaagacuaaguggugccauggaugaacuccacaacgaaauacucgagcuggaugagaaaguggaugaucucagagcugacacuauaagcucacaaauagaacuugcagucuugcuuuccaacgaaggaauaauaaacagugaagacgagcaucuauuggcacuugagagaaaacuaaagaaaaugcugggucccucugcuguagacaaaggaaauggaugcuucgaaaccaaacacaaaugcaaccagaccugcuuagacaggauagcugcuggcaccuuuaaugcaggagaauuuucucuccccacuuuugauucauugaacauuacugcugcaucuuuaaaugaugauggauuggauaaccauacuauacugcucuauuacucaacugcugcuucuaguuuggcuguaacauuaaugcuagcuauuuuuauuguuuauauggucuccagagacaacguuucaugcuccaucugucuauaa

SEQ ID NO: 58598 - RNA, 1755 nt, Artificial Sequence
  derived and/or modified CDS sequence (wt) from hemagglutinin__InfluenzaB__AEA51389
augaaggcaauaauuguacuacucaugguaguaacauccaaugcagaucgaaucugcacugggauaacaucuucaaucucaccucuuguggacaaaacagcuacucaaggggaggucaaugugacuggugugauaccacugacaacaacaccaacaaaaucuuauuuugcaaaugucaaaggaacaaggaccagagggaaacuaugcccggacugucucaacuguacagaucuggauguggccuugggcaggccaauguguguggggaccacaccuucugcuaaggcuucaauacuccacgaagucagaccuguuacauccgggugcuuuccuauaaugcacgacagaacaaaaaucaggcaacuacccaaucuucucagaggauaugaaaauaucagguuaucaacccaaaacguuaucgaugcacaaaaagcaccaggaggacccuacagacuuggaaccucaggaucuugcccuaacgcuaccaguaaaaucggauuuuucgcaacaauggcuugugcugucccaaaggacaacuacaaaaaugcaacgaacccacuaacagucgaaguaccauacauucguacagaaggggaagaccaaauuacuguuuggggguuccauucagauaacaaaacccaaaugaagaaucucuauggagacucaaauccuccaaaguucaccucaucugcuaauggaguaaccacucauuauguuucucaaacuggcgacuuuccagaucaaacagaggacgggggacuacccccaagcggcagaauuguuguugauuacaugaugcaaaaaccugggaaaacaggaacaauugccuaucaaagagguguuuuguugccucaaaagguguggugcgcgaguggcaggagcaaaguaauaaaagggucauugccuuuaauuggugaagcagauugccuucaugaaaaauacgguggauuaaacaaaagcaagccuccccacacuggagaacauacaaaagccauaggaaauugcccaauauggguaaaaacaccuuugaagcuugccaauggaaccaaauauagaccuucugcaaaacuauuaaaggaaagggguuucuucggagcuauugcugguuuccuagaaggaggaugggaaggaaugauugcagguuggcacggauacacaucucacggagcacauggaguggcaguggcggcagaccuuaagaguacacaagaagcuauaaauaagauaacaaaaaaucucaauucuuugagugagcuagaaguaaagaaccuucaaagacuaaguggugccauggaugaacuccacaacgaaauacucgagcuggaugagaaaguggaugaucucagagcugacacuauaagcucacaaauagaacuugcagucuugcuuuccaacgaaggaauaauaaacagugaagacgagcaucuauuggcacuugagagaaaacuaaagaaaaugcugggucccucugcuguagacauaggaaauggaugcuucgaaaccaaacacaaaugcaaccagaccugcuuagacaggauagcugcuggcaccuuuaaugcaggagaauuuuuucuccccacuuuugauucauugaacauuacugcugcaucuuuaaaugaugauggauuggauaaccauacuauacugcucuauuacucaacugcugcuucuaguuuggcuguaacauuaaugcuagcuauuuuuauuguuuauauggucuccagagacaacguuucaugcuccaucugucuauaa

SEQ ID NO: 58599 - RNA, 1755 nt, Artificial Sequence
  derived and/or modified CDS sequence (wt) from hemagglutinin__InfluenzaB__AEA51390
augaaggcaauaauuguacuacucaugguaguaacauccaaugcagaucgaaucugcacugggauaacaucuucaaacucaccucauguggucaaaacagcuacucaaggggaggucaaugugacuggcgugauaccacugacaacaacaccaacaaaaucuuauuuugcaaaucucaaaggaacaaggaccagagggaaacuaugcccggacugucucaacuguacagaucuggauguggccuugggcaggccaauguguguggggaccacaccuucugcuaaagcuucaauacuccacgaagucagaccuguuacauccgggugcuuuccuauaaugcacgacagaacaaaaaucaggcaacuacccaaucuucucagaggauaugaaaauaucagguuaucaacccaaaacguuaucgaugcagaaaaagcaccaggaggacccuacagacuuggaaccucaggaucuugcccuaacgcuaccaguaaaaucggauuuuucgcaacaauggcuugggcugucccaaaggacaacuacaaaaaugcaacgaacccacuaacaguagaaguaccauacauuuguacagaaggggaagaccaaauuacuguuuggggguuccauucagauaacaaaacccaaaugaagaaccucuauggagacucaaauccucaaaaguucaccucaucugcuaauggaguaaccacacauuauguuucucagauuggcgacuucccagaucaaacagaagacggaggacuaccaccaagcggcagaauuguuguugauuacaugaugcaaaaaccugggaaaacaggaaccauugucuaucaaagaggugguuuguugccucaaaagguguggugcgcgaguggcaggagcaaaguaauaaaagggucauugccuuuaauuggugaagcagauugccuucaugaaaaauacgguggauuaaacaaaagcaagccuuacuacacaggagaacaugcaaaagccauaggaaauugcccaauauggguaaaaccacccuugaagcuugccaauggaaccaaauauagaccuccugcaaaacucuuuaaggaaagggguuucuucggagcucuugcugguuuccuagaaggaggaugggaaggaaugauugcagguuggcacggauacacaucucacggagcacauggaguggcaguggcggcagaccuuaagaguacacaagaagcuauaaauaagauaacaaaaaaucucaauucuuugagugagcuagaaguaaagaaccuucaaagacuaaguggugccauggaugaacuccacaacgaaauacucgagcuggaugagaaaguggaugaucucagagcugacacuauaagcucacaaauagaacuugcagucuugcuuuccaacgaaggaauaauaaacagugaagacgagcaucuauuggcacuugagagaaaacuaaagaaaaugcugggucccucugcuguagacauaggaaauggaugcuucgaaaccaaacacaaaugcaaccagaccugcuuagacaggauagcugcuggcaccuuuaaugcaggagaauuuucucuccccacuuuugauucauugaacauuacugcugcaucuuuaaaugaugauggauuggauaaccauacuauacugcucuauuacucaacugcugcuucuaguuuggcuguaacauuaaugcuagcuauuuuuauuguuuauauggucuccagagacaacguuucaugcuccaucugucuauaa

SEQ ID NO: 58600 - RNA, 1758 nt, Artificial Sequence
  derived and/or modified CDS sequence (wt) from hemagglutinin__InfluenzaB__AEA51391
augaaggcaauaauuguacuacucaugguaguaacauccaaugcagaucgaaucugcacugggauaacaucgucaaacucaccacaugucgucaaaacugcuacucaaggggaggucaaugugacugguguaauaccacugacaacaacacccaccaaaucucauuuugcaaaucucaaaggaacagaaaccagggggaaacuaugcccaaaaugccucaacugcacagaucuggacguagccuugggcagaccaaaaugcacggggaaaauacccucggcaagaguuucaauacuccaugaagucagaccuguuacaucugggugcuuuccuauuaugcacgacagaacaaaaauuagacagcugccuaaccuucuccgaggauacgaacauaucagguuaucaacucauaacguuaucaaugcagaaaaugcaccaggaggacccuacaaaauuggaaccucagggucuugcccuaacauuaccaauggaaacggauuuuucgcaacaauggcuugggccgucccaaaaaacgacaaaaacaaaacagcaacaaauccauuaacaauagaaguaccauacauuuguacagaaggagaagaccaaauuaccguuuggggguuccacucugucaacgagacccaaauggcaaagcucuauggggacucaaagccccagaaguucaccucaucugccaacggagugaccacacauuacauuucacagauugguggcuucccaaaucaaacagaagacggaggacuaccacaaagugguagaauuguuguugauuacauggugcaaaaaucugggaaaacaggaacaauuaccuaucaaagggguauuuuauugccucaaaagguguggugcgcaaguggcaggagcaagguaauaaaaggauccuuaccuuuaauuggagaagcagauugccuccacgaaaaauacgguggauuaaacaaaagcaagccuuacuacacaggggaacaugcaaaggccauaggaaauugcccaauaugggugaaaacacccuugaagcuggccaauggaaccaaauauagaccuccugcaaaacuauuaaaggaaagggguuucuucggagcuauugcugguuucuuagaaggaggaugggaaggaaugauugcagguuggcacggauacacaucccauggggcacauggaguaccgguggcagcagaccuuaagagcacucaagaggccauaaacaagauaacaaaaaaucucaacucuuugagugagcuggaaguaaagaaucuucaaagacuaagcggugccauggaugaacuccacaacgaaauacuagaacuagacgagaaaguggaugaucucagagcugauacaauaagcucacaaauagaacucgcaguccugcuuuccaaugaaggaauaauaaacagugaagaugaacaucucuuggcgcuugaaagaaagcugaagaaaaugcugggccccucugcuguagagauagggaauggaugcuuugaaaccaaacacaagugcaaccagaccugucucgacagaauagcugcugguaccuuugaugcaggagaauuuucucuccccaccuuugauucacugaauauuacugcugcaucuuuaaaugacgauggauuggauaaucauacuauacugcuuuacuacucaacugcugccuccaguuuggcuguaacacugaugauagcuaucuuuguuguuuauauggucuccagagacaauguuucuugcuccaucugucuauaa

SEQ ID NO: 58601 - RNA, 1758 nt, Artificial Sequence
  derived and/or modified CDS sequence (wt) from hemagglutinin__InfluenzaB__AEA51392
augaaggcaauaauuguacuacucaugguaguaacauccaaugcagaucgaaucugcacugggauaacaucgucaaacucaccacaugucgucaaaacugcuacucaaggggaggucaaugugacugguguaauaccacugacaacaacacccaccaaaucucauuuugcaaaucucaaaggaacagaaaccagagggaaacuaugcccaaaaugccccaacugcacagaucuggacguagccuugggcagaccaaaaugcacggggaaaauacccucggcaagaguuucaauacuccaugaagucagaccuguuacaucugggugcuuuccuauaaugcacgacagaacaaaaauuagacagcugccuaaccuucuccgaggauacgaacauaucagguuaucaacucauaacguuaucaaugcagaaaaugcaccaggaggacccuacaaaauuggaaccucagggucuugcccuaacguuaccaauggaaacggauuuuucgcaacaauggcuugggccgucccaaaaaacgacaaaaacaaaacagcaacaaauccauuaacaauagaaguaccauacauuuguacagaaggagaagaccaaauuaccguuuggggguuccacucugauaacgagacccaaauggcaaagcucuauggggacucaaagccccagaaguucaccucaucugccaacggagggaccacccauuacguuucacagauuggugguuucccaaaucaaacggaagacgggggacuaccacaaagugguagaauuguuguugauuacauggugcaaaaaucugggaaaacaggaacaauuaccuaucaaagggguauuuuauugccucaaaagguguggugcgcaaguggcaggagcaagguaauaaaaggauccuugccuuuaauuggagaagcagauugccuccacgaaaaauacgguggauuaaacaaaagcaagccuuacuacacaggggaacaugcaaaggccauaggaaauugcccaauaugggugaagacacccuugaagcuggccaauggaaccaaaaauauagcuccugcaaaacuauuaaaggaaagggguuucuucggagcuauugcugguuucuuagaaggaggaugggaaggaaugauugcagguuggcacggauacacgucccauggggcacauggaguagcgguggcagcagaccuuaagagcacucaagaggccauaaacaagauaacaaaaaaucucaacucuuugagugagcuggaaguaaagaaucuucaaagacuaagcggugccauggaugaacuccacaacgaaauacuagaacuagacgagaaaguggaugaucucagagcugauacaauaagcucacaaauagaacucgcaguccugcuuuccaaugaaggaauaauaaacagugaagaugaacaucucuuggcgcuugaaagaaagcugaagaaaaugcugggccccucugcuguagagauagggaauggaugcuuugaaaccaaacacaagugcaaccagaccugucucgacagaauagcugcugguaccuuugaugcaggagaauuuucucuccccaccuuugauucacugaauauuacugcugcaucuuuaaaugacgauggauuggauaaucauacuauacugcuuuacuacucaacugcugccuccaguuuggcuguaacacugaugauagcuaucuuuguuguuuauauggucuccagagacaauguuucuugcuccaucugucuauag

SEQ ID NO: 58602 - RNA, 1755 nt, Artificial Sequence
  derived and/or modified CDS sequence (wt) from hemagglutinin__InfluenzaB__AEA51395
augaaggcaauaauuguacuacucaugguaguaacauccaaugcagaucgaaucugcacugggauaacaucuucaaacucaccucauguggucaaaacagcuacucuaggggaggucaaugugacuggugugauaccacugacaacaacaccaacaaaaucuuauuuugcaaaucucaaaggaacaaggaccagagggaaacuaugcccggacugucucaacuguacagaucuggauguggccuugggcaggccaauguguguggggaccacaccuucugcgaaagcuucaauacuccacgaagucagaccuguuacauccgggugcuuuccuauaaugcacgacagaacaaaaaucaggcaacuacccaaucuucucagaggauaugaaaauaucagguuaucaacccaaaacguuaucgaugcagaaaaagcaccaggaggacccuacagacuuggaaccucaggaucuugcccuaacgcuaccaguaaaaucggauuuuucgcuacaauggcuugggccgucccaaaggacaacuacaaaaaugcaacgaacccccuaacaguagaaguaccauacauuuguaccgaaggggaagaccaauuuacuguuuggggguuccauucagauaacauaacccaauugaagaaccucuuuggagacucaaauccucaaagguucaccucaucugcuaauggaguaaccacacauuauguuucucagauuggcgacuucccagaucaaacagaagacggaggacuaccacaaagcggcagaauuguuguugauuacgugaugcaaaaaccugggaaaacaggaacaauugucuaucaaagagguguuuuguugccuccaaaggugugguucgcgaggggcaggagcaaaguaauaaaagggucauugccuuuaauuggugaagcagauugcauucaugaaaaauacgguggauuaaacaaaagcaagccuuacuacacaggagaacaugcaaaagccauaggaaauugcccaauauggguaaaaacaccuuugaagcuugccaauggaaccaaauauagaccuccugcaaaacuauuaaaggaaagggguuucuucggagcuauugcugguuuccuagaaggaggaugggaaggaaugauugcagguuggcacggauacacaucucacggagcacauggaguggcaguggcggcagaccuuaagaguacacaagaagcuauaaauaagauaacaaaaaaucucaauucuuugagugagcuagaaguaaagaaccuucaaagacuaaguggugccauggaugaacuccacaacgaaauacucgagcuggaugagaaaguggaugaucucagagcugacacuauaagcucacaaauagaacuugcagucuugcuuuccaacgaaggaauaauaaacagugaagacgagcaucuauuggcacuugagagaaaacuaaagaaaaugcugggucccucugcuguagacauaggaaauggaugcuucgaaaccaaacacaaaugcaaccagaccugcuuagacaggauagcugcuggcaccuuuaaugcaggagaauuuucucuccccaccuuugauucauugaacauuacugcugcaucuuuaaaugaugauggauuggauaaccauacuauauugcucuauuacucaacugcugcuucuaguuuggcuguaacauuaauguuagcuauuuuuauuguuuauauggucuccagagacaacguuucaugcuccaucugucuauaa

SEQ ID NO: 58603 - RNA, 1758 nt, Artificial Sequence
  derived and/or modified CDS sequence (wt) from hemagglutinin__InfluenzaB__AEA51398
augaaggcaauaauuguacuacucaugguaguaacauccaaugcagaucgaaucugcacugggauaacaucgucaaacucaccacaugucgucaaaacugcuacucaaggggaggucaaugugacugguguaauaccacugacaacaacacccaccaaaucucauuuugcaaaucucaaaggaacagaaaccagagggaaacuaugcccaaaaugccccaacugcacagaucuggacguagccuugggcagaccaaaaugcacggggaaaauacccucggcaagaguuucaauacuccaugaagucagaccuguuacaucugggugcuuuccuauaaugcacgacagaacaaaaauuagacagcugccuaaccuucuccgaggauacgaacauaucagguuaucaacucauaacguuaucaaugcagaaaaugcaccaggaggacccuacaaaauuggaaccucagggucuugcccuaauguuaccaauggaaucggauuuuucgcaacaauggcuugggccgucccaaaaaacgacaaaaacaaaacagcaacaaauccauuaacaauagaaguaccauacauuuguacagaaggagaagaccaaauuaccguuuggggguuccacucugauaacgagacccaaauggcaaagcucuauggggacucaaagccccagaaguucaccucaucugccaacggagugaccacacauuacguuucacagauugguggcuucccaaaucaaacagaagacggaggacuaccacaaagugguagaauuguuguugauuacauggugcaaaaaucugggaaaacaggaacaauuaccuaucaaagagguauuuuauugccucaaaagguguggugcgcaaguggcagaagcaagguaauaaaaggauccuugccuuuaauuggagaagcagauugccuccacgaaaaauacgguggauuaaacaaaagcaagucuuacuacacaggggaacaugcaaaggccauaggaaauugcccaauaugggugaagacacccuugaagcuggccaauggaaccaaauauagaccuccugcacaccuaucauacuuuugcgguuucuucggagcuauugcugguuucuuagaaggaggaugggaaggaaugauugcagguuggaacggauacacaucccauggggcacauggaguagcggugguagcagaccuuaagagcacucaagaggccauaaacaagauaacaaaaaaucucaacucuuugagugagcuggaaguaaagaaucuucaaagacuaagcggugccauggaugaacuccacaacgaaauacuagaacuagaugagaaaguggaugaucucagagcugauacaauaagcucacaaauagaacucgcaguccugcuuuccaaugaaggaauaauaaacagugaagaugaacaucucuuggcgcuugaaagaaagcugaagaaaaugcugggccccucugcuguagagauagggaauggaugcuuugaaaccaaacacaagugcaaccagaccugucucgacagaauagcugcugguaccuuugaugcaggagaauuuucucuccccaccuuugauucacugaauauuacugcugcaucuuuaaaugacgauggauuggauaaucauacuauacugcuuuacuacucaacugcugccuccaguuuggcuguaacacugaugauagcuaucuuuguuguuuauauggucuccagagacaauguuucuugcuccaucugucuauaa

SEQ ID NO: 58604 - RNA, 1758 nt, Artificial Sequence
  derived and/or modified CDS sequence (wt) from hemagglutinin__InfluenzaB__AEA51399
augaaggcaauaauuguacuacucaugguaguaacauccaaugcagaucgaaucugcacugggauaacagcgucacagucaccaaauauagacaaaucuucuacucaaggggaggucaaugugacugguguaauaccacugacaacaacacccaccaaaucucauuuugcaaaucucaaaggaacagaaaccagagggaaacuaugcccaaaaugccccaacugcacagaucuggacguagccuugggcagaccaaaaugcacggggaaaauacccucggcaagaguuucaauacuccaugaagucagaccuguuacaucugggugcuuuccuauaaugcacgacagaacaaaaauuagacagcugccuaaccuucuccgaggauacgaacauaucagguuaucaacucauaacguuaucaaugcagaaaaugcaccaggaggacccuacaaaauuggaaccucagggucuugcccuaauguuaccaauggaaucggauuuuucgcaacaauggcuugggccgucccaaaaaacgacaaaaacaaaacagcaacaaauccauuaacaauagaaguaccauacauuuguacagaaggagaagaccaaauuaccguuuggggguuccacucugauaacgagacccaaauggcaaagcucuauggggacucaaagccccagaaguucaccucaucugccaacggagugaccacacauuacguuucacagauugguggcuucccaaaucaaacagaagacggaggacuaccacaaagugguagaauuguuguugauuacauggugcaaaaaucugggaaaacaggaacaauuaccuaucaaagagguauuuuauugccucaaaagguguggugcgcaaguggcagaagcaagguaauaaaaggauccuugccuuuaauuggagaagcagauugccuccacgaaaaauacgguggauuaaacaaaagcaagucuuacuacacaggggaacaugcaaaggccauaggaaauugcccaauaugggugaagacacccuugaagcuggccaauggaaccaaauauagaccuccugcacaccuaucauacuuuugcgguuucuucggagcuauugcugguuucuuagaaggaggaugggaaggaaugauugcagguuggaacggauacacaucccauggggcacauggaguagcggugguagcagaccuuaagagcacucaagaggccauaaacaagauaacaaaaaaucucaacucuuugagugagcuggaaguaaagaaucuucaaagacuaagcggugccauggaugaacuccacaacgaaauacuagaacuagaugagaaaguggaugaucucagagcugauacaauaagcucacaaauagaacucgcaguccugcuuuccaaugaaggaauaauaaacagugaagaugaacaucucuuggcgcuugaaagaaagcugaagaaaaugcugggccccucugcuguagagauagggaauggaugcuuugaaaccaaacacaagugcaaccagaccugucucgacagaauagcugcugguaccuuugaugcaggagaauuuucucuccccaccuuugauucacugaauauuacugcugcaucuuuaaaugacgauggauuggauaaucauacuauacugcuuuacuacucaacugcugccuccaguuuggcuguaacacugaugauagcuaucuuuguuguuuauauggucuccagagacaauguuucuugcuccaucugucuauag

SEQ ID NO: 58605 - RNA, 1758 nt, Artificial Sequence
  derived and/or modified CDS sequence (wt) from hemagglutinin__InfluenzaB__AEG21014
augaaggcaauaauuguacuacucaugguaguaacauccaaugcagaucgaaucugcacugggauaacaucgucaaacucaccacauguugucaaaacugcuacucaaggggaggucaaugugacugguguaauaccacugacaacaacacccaccaaaucucauuuugcaaaucucaaaggaacagaaaccagagggaaacuaugcccaaaaugccuccacugcacagaucuggacguggccuugggcagaccaaaaugcacggggaaaauacccucggcaagaguuucaauacuccaugaagucagaccuguuacaucugggugcuuuccuauaaugcacgacagaacaaaaauuagacagcugccuaaccuucuccgaggauacgaacauaucagguuaucaacucauaacguuaucaaugcagaaaaugcaccaggaggacccuacaaaauuggaaccucagggucuugcccuaacguuaccaauggaaacggauuuuucgcaacaauggcuugggccgucccaaaaaacgacaacaacaaaacagcaacaaauucauuaacaauagaaguaccauacauuuguacagaaggagaggaccaaauuaccguuuggggguuccacucugauaacgagacccaaauggcaaagcucuauggggacucaaagccccagaaguucaccucaucugccaacggagugaccacacauuacguuucacagauggguggcuucccaaaucaaacagaagacgggggacuaccacaaagugguagaauuguuguugauuacauggugcagaaaucugggaaaacaggaacaauuaccuaucaaagagguauuuuauugccucaaaaaguguggugcgcaaguggcaggagcaagguaauaaaaggauccuugcccuuaauuggagaagcagauugccuccacgaaaaauacgguggauuaaacaaaagcaagccuuacuacacaggggaacaugcaaaggccauaggaaauugcccaauaugggugaaaacacccuugaagcuggccaauggaaccaaauauagaccuccugcaaaacuauuaauggaaagggguuucuucggagcuauugcugguuucuuagaaggaggaugggaaggaaugauugcagguuggcacggauacacaucccauggggcacauggaguagcgguggcagcagaccuuaagagcacucaagaggccauaaacaagauaacaaaaaaucucaacucuuugagugaguuggaaguaaagaaucuucaaagacuaagcggugccauggaugaacuccacaacgaaauacuagaacuagacgagaaaguggaugaucucagagcugauacaauaagcucacaaauagaacucgcaguccugcuuuccaaugaaggaauaauaaacagugaagaugaacaucucuuggcgcuugaaagaaagcugaagaaaaugcugggccccucugcuguagagauagggaauggaugcuuugaaaccaaacacaagugcaaccagaccugucucgacagaauagcugcugguaccuuugaugcaggagaauuuucucuccccaccuuugauucacugaauauuacugcugcaucuuuaaaugacgauggauuggauaaucauacuauacugcuuuacuacucaacugcugccuccaguuuggcuguaacauugaugauagcuaucuuuguuguuuauauggucuccagagacaauguuucuugcuccaucugucuauag

SEQ ID NO: 58606 - RNA, 1755 nt, Artificial Sequence
  derived and/or modified CDS sequence (wt) from hemagglutinin__InfluenzaB__AEG21015
augaaggcaauaauuguacuacucaugguaguaacauccaaugcagaucgaaucugcacugggauaacaucuucaaacucaccucauguggucaaaacagcuacucaaggggaggucaaugugacuggugugauaccacugacaacaacaccaacaaaaucuuauuuugcaaaucucaaaggaacaaggaccagagggaaacuaugcccggacugucucaacuguacagaucuggauguggccuugggcaggccaauguguguggggaccacaccuucugcgaaagcuucaauacuccacgaagucagaccuguuacauccgggugcuuuccuauaaugcacgacagaacaaaaaucaggcaacuacccaaucuucucagaggauaugaaaauaucagguuaucaacccaaaacguuaucgaugcggaaaaagcaccaggaggacccuacagacuuggaaccucaggaucuugcccuaacgcuaccaguaaaaacggauuuuucgcuacaauggcuugggcugucccaaaggacaacuacaaaggugcaacuaacccaaaaacaguagaaguaccauacauuuguacagaaggggaaggccaaauuacuguuuggggguuccauucagauaacaaaccccaaaugaagaaccucuauggagacucaaauccucaaaaguucaccucaucugcuaguggaguaaccacacauuauguuucucagauuggcgacuucccagaucaaacagaagacggaggacuaccacaaagcggcagaauuguuguugauuacaugaugcaaaaaccugggaaaacaggaacaauugucuaucaaagagguguuuuguugccucaaaagguguggugcgcgaguggcaggagcaaaguaauaaaagggucauugccuuuaauuggugaagcagauugccuucaugaaaaauacgguggauuaaacaaaagcaagccuuacuacacaggagaacaugcaaaagccauaggaaauugcccaauauggguaauuacuccacaaaagcuugccaauggaaccacauuuagcccuccugcaaaacuauuaaaggaaagggguuucuucggagcuauugcugguuuccuagaaggaggaugggaaggaaugauugcagguuggcacggauacacaucucacggagcacauggaguggcaguggcggcagaccuuaagaguacacaagaagcuauaaacaagauaacaaaaaaucucaauucuuugagugagcuagaaguaaagaaccuucaaagacuaaguggugccauggaugaacuccacaacgaaauacucgagcuggaugagaaaguggaugaucucagagcugacacuauaagcucacaaauagaacuugcagucuugcuuuccaacgaaggaauaauaaacagugaagacgagcaucuauuggcacuugagagaaaacuaaagaaaaugcugggucccucugcuguagacauaggaaauggaugcuuugaaaccaaacacaaaugcaaccagaccugcuuagacaggauagcugcuggcaccuuuaaugcaggagaauuuucucuccccacuuuugauucauugaacauuacugcugcaucuuuaaaugaugauggauuggauaaccauacuauacugcucuauuacucaacugcugcuucuaguuuggcuguaacauugaugcuagcuauuuuuauuguuuauauggucuccagagacaacguuucaugcuccaucugucuauaa

SEQ ID NO: 58607 - RNA, 1755 nt, Artificial Sequence
  derived and/or modified CDS sequence (wt) from hemagglutinin__InfluenzaB__AEG21016
augaaggcaauaauuguacuacucaugguaguaacauccaaugcagaucgaaucugcacugggauaacaucuucaaacucaccucauguggucaaaacagcuacucaaggggaggucaaugugacuggugugauaccacugacaacaacaccaacaaaaucuuauuuugcaaaucucaaaggaacaaggaccagagggaaacuaugcccggacugucucaacuguacagaucuggauguggccuugggcaggccaauguguguggggaccacaccuucugcgaaagcuucaauacuccacgaagucagaccuguuacauccgggugcuuuccuauaaugcacgacagaacaaaaaucaggcaacuacccaaucuucucagaggauaugaaaauaucagguuaucaacccaaaacguuaucgaugcagaaaaagcaccaggaggacccuacagacuuggaaccucaggauccugcccuaacgcuaccaguaaaaucggauuuuucgcuacaauggcuugggcugucccaaaggacaacuacaaaagggcaacuaacccaaaaacaguagaaguaccauacauuuguacagaaggggaagaccaaauuacuguuuggggguuccauucagauaacaaaccccaaaugaagaaccccuauggagacucaaauccucaaaaguucaccucaucugcuaguggaguaaccacacauuauguuucucagauuggcgacuucccagaucaaacagaagacggaggacuaccacaaagcggcagaauuguuguugauuacaugaugcaaaagccugggaaaacaggaacaauugucuaucaaagagguguuuuguugccucaaaagguguggugcgcgaguggcaggagcaaaguaauaaaagggucauugccuuuaauuggugaagcagauugccuucaugaaaaauacgguggauuaaacaaaagcaagccuuacuacacaggagaacaugcaaaagccauaggaaauugcccaauauggguaaaaacaccuuugaagcuugccaauggaaccaaauauagaccuccugcaaaacuauuaaaggaaagggguuucuucggagcuauugcugguuuccuagaaggaggaugggaaggaaugauugcagguuggcacggauacacaucucacggagcacauggaguggcaguggcggcagaccuuaagaguacacaagaagcuauaaacaagauaacaaaaaaucucaauucuuugagugagcuagaaguaaagaaccuucaaagacuaaguggugccauggaugaacuccacaacgaaauacucgagcuggaugagaaaguggaugaucucagagcugacacuauaagcucacaaauagaacuugcagucuugcuuuccaacgaaggaauaauaaacagugaagacgagcaucuauuggcacuugagagaaaacuaaagaaaaugcugggucccucugcuguagacauaggaaauggaugcuuugaaaccaaacacaaaugcaaccagaccugcuuagacaggauagcugcuggcaccuuuaaugcaggagaauuuucucuccccacuuuugauucauugaacauuacugcugcaucuuuaaaugaugauggauuggauaaccauacuauacugcucuauuacucaacugcugcuucuaguuuggcuguaacauugaugcuagcuauuuuuauuguuuauauggucuccagagacaacguuucaugcuccaucugucuuuaa

SEQ ID NO: 58608 - RNA, 1755 nt, Artificial Sequence
  derived and/or modified CDS sequence (wt) from hemagglutinin__InfluenzaB__AEG21017
augaaggcaauaauuguacuacucaugguaguaacauccaaugcagaucgaaucugcacugggauaacaucuucaaacucaccucauguggucaaaacagcuacucaaggggaggucaaugugacuggugugauaccacugacaacaacaccaacaaaaucuuauuuugcaaaucucaaaggaacaaggaccagagggaaacuaugcccggacugucucaacuguacagaucuggauguggccuugggcaggccaauguguguggggaccacaccuucugcuaaggcuucaauacuccacgaagucagaccuguuacauccgggugcuuuccuauaaugcacgacagaacaaaaaucaggcaacuacccaaucuucucagaggauaugaaaauauaagguuaucaacccaaaacguuaucgaugcagaaaaagcaccaggaggacccuauagacuuggaaccucaggaucuugcccuaacgcuaccaguaaaaucggauuuuucgcuacaauggcuugggccgucccaaaggacaacuacaaaaaugcaacgaacccacuaacaguagaaguaccauacauuuguacagaaggggaagaccaaauuacuguuuggggguuccauucagauaacaaaacccaaaugaagaaccucuauggagacucaaauccucaaaaguucaccucaucugcuaauggaguaaccacacauuauguuucucagauuggcgacuucccagaucaaacagaagacggaggacuaccccaaagcggcagaauuguuguugauuacaugaugcaaaaaccugggaaaacaggaacaauugucuaucaaagagguguuuuguugccucaaaagguguggugcgcgaguggcaggagcaaaguaauaaaagggucauugccuuuaauuggugaagcagauugccuucaugaaaaauacgguggauuaaacaaaagcaagccuuccuacacaggagaacaugcaaaagccauaggaaauugcccaauauggguaaaaacaccuuugaagcuugccaauggaaccaaauauagaccuccugcaaaacuauuaaaggaaagggguuucuucggagcuauugcugguuuccuagaaggaggaugggaaggaaugauugcagguuggcacggauacacaucucacggagcacauggaguagcaguggcggcagaccuuaagaguacacaagaagcuauaaauaagauaacaaaaaaucucaauucuuugagugagcuagaaguaaagaaccuucaaagacuaaguggugccauggaugaacuccacaacgaaauacucgagcuggaugagaaaguggaugaucucagagcugacacuauaagcucacaaauagaacuugcagucuugcuuuccaacgaaggaauaauaaacagugaagacgagcaucuauuggcacuugagagaaaacuaaagaaaaugcugggucccucugcuguagacauaggaaauggaugcuucgaaaccaaacacaaaugcaaccagaccugcuuagacaggauagcugcuggcaccuuuaaugcaggagaauuuucucuccccaccuuugauucauugaacauuacugcugcaucuuuaaaugaugauggauuggauaaccauacuauacugcucuauuacucaacugcugcuucuaguuuggcuguaacauuaauguuagcuauuuuuauuguuuauauggucuccagagacaacguuucaugcuccaucugucuauaa

SEQ ID NO: 58609 - RNA, 1755 nt, Artificial Sequence
  derived and/or modified CDS sequence (wt) from hemagglutinin__InfluenzaB__AEG21018
augaaggcaauaauuguacuacucaugguaguaacauccaaugcagaucgaaucugcacugggauaacaucuucaaucucaccucuuguggacaaaacagcuacucaaggggaggucaaugugacuggugugauaccacugacaacaacaccaacaaaaucuuauuuugcaaaugucaaaggaacaaggaccagagggaaacuaugcccggacugucucaacuguacagaucuggauguggccuugggcaggccaauguguguggggaccacaccuucugcuaaggcuucaauacuccacgaagucagaccuguuacauccgggugcuuuccuauaaugcacgacagaacaaaaaucaggcaacuacccaaucuucucagaggauaugaaaauaucagguuaucaacccaaaacguuaucgaugcacaaaaagcaccaggaggacccuacagacuuggaaccucaggaucuugcccuaacgcuaccaguaaaaucggauuuuucgcaacaauggcuugugcugucccaaaggacaacuacaaaaaugcaacgaacccacuaacagucgaaguaccauacauucguacagaaggggaagaccaaauuacuguuuggggguuccauucagauaacaaaacccaaaugaagaaucucuauggagacucaaauccuccaaaguucaccucaucugcuaauggaguaaccacucauuauguuucucaaacuggcgacuuuccagaucaaacagaggacgggggacuacccccaagcggcagaauuguuguugauuacaugaugcaaaaaccugggaaaacaggaccaauugccuaucaaagagguguuuuguugccucaaaagguguggugcgcgaguggcaggagcaaaguaauaaaagggucauugccuuuaauuggugaagcagauugccuucaugaaaaauacgguggauuaaacaaaagcaaguauucccacacaggagaccaugcaaaaacccuaggaaauugcccaauauggguaaaaacaccuuugaagcuugccaauggaaccaaauauagaccuucugcaaaacuauuaaaggaaagggguuucuucggagcuauugcugguuuccuagaaggaggaugggaaggaaugauugcagguuggcacggauacacaucucacggagcacauggaguggcaguggcggcagaccuuaagaguacacaagaagcuauaaauaagauaacaaaaaaucucaauucuuugagugagcuagaaguaaagaaccuucaaagacuaaguggugccauggaugaacuccacaacgaaauacucgagcuggaugagaaaguggaugaucucagagcugacacuauaagcucacaaauagaacuugcagucuugcuuuccaacgaaggaauaauaaacagugaagacgagcaucuauuggcacuugagagaaaacuaaagaaaaugcugggucccucugcuguagacauaggaaauggaugcuucgaaaccaaacacaaaugcaaccagaccugcuuagacaggauagcugcuggcaccuuuaaugcaggagaauuuucucuccccaccuuugauucauugaacauuacugcugcaucuuuaaaugaugauggauuggauaaccauacuauauugcucuauuacucaacugcugcuucuaguuuggcuguaacauuaaugcuagcuauuuuuauuguuuauauggucuccagagacaacguuucaugcuccaucugucuauaa

SEQ ID NO: 58610 - RNA, 1755 nt, Artificial Sequence
  derived and/or modified CDS sequence (wt) from hemagglutinin__InfluenzaB__AEG21019
augaaggcaauaauuguacuacucaugguaguaacauccaaugcagaucgaaucugcacugggauaacaucuucaaacucaccucauguggucaaaacagcuacucaaggggaggucaaugugacuggugugauaccacugacaacaacaccaacaaaaucuuauuuugcaaaucucaaaggaacaaggaccagagggaaacuaugcccggacugucucaacuguacagaucuggauguggccuugggcaggccaauguguguggggaccacaccuucugcuaaggcuucaauacuccacgaagucagaccuguuacauccgggugcuuuccuauaaugcacgacagaacaaaaaucaggcaacuacccaaucuucucagaggauaugaaaauauaagguuaucaacccaaaacguuaucgaugcagaaaaagcaccaggaggacccuauagacuuggaaccucaggaucuugcccuaacgcuaccaguaaaaucggauuuuucgcaacaauggcuugggcugucccaaaggacaacuacaaaaaugcaacgaacccacuaacaguagaaguaccauacauuuguacagaaggggaagaccaaauuacuguuuggggguuccauucagauaacaaaacccaaaugaagaaccucuauggagacucaaauccucaaaaguucaccucaucugcuaauggaguaaccacacauuauguuucucaaacuggcgacuuuccagaucaaacagaggacgggggacuacccccaagcggcagaauuguuguugauuacaugaugcaaaaaccugggaaaacaggaacaauugucuaucaaagagguguuuuguugccucaaaagguguggugcgcgaguggcaggagcaaaguaauaaaagggucauugccuuuaauuggugaagcagauugccuucaugaaaaauacgguggauuaaacaaaagcaagccuuccuacacaggagaacaugcaaaagccauaggaaauugcccaauauggguaaaaacaccuuugaagcuugccaauggaaccaaauauagaccuucugcaaaacuauuaaaggaaagggguuucuucggagcuauugcugguuuccuagaaggagguugggaaggaaugauugcagguuggcacggauacacaucucacggagcacauggaguagcaguggcggcagaccuuaagaguacacaagaagcuauaaauaagauaacaaaaaaucucaauucuuugagugagcuagaaguaaagaaccuucaaagacuaaguggugccauggaugaacuccacaacgaaauacucgagcuggaugagaaaguggaugaucucagagcugacacuauaagcucacaaauagaacuugcagucuugcuuuccaacgaaggaauaauaaacagugaagacgagcaucuauuggcacuugagagaaaacuaaagaaaaugcugggucccucugcuguagacauaggaaauggaugcuucgaaaccaaacacaaaugcaaccagaccugcuuagacaggauagcugcuggcaccuuuaaugcaggagaauuuucucuccccacuuuugauucauugaacauuacugcugcaucuuuaaaugaugauggauuggauaaccauacuauacugcucuauuacucaacugcugcuucuaguuuggcuguaacauuaaugcuagcuauuuuuauuguuuauauggucuccagagacaacguuucaugcuccaucugucuauaa

SEQ ID NO: 58611 - RNA, 1758 nt, Artificial Sequence
  derived and/or modified CDS sequence (wt) from hemagglutinin__InfluenzaB__AEG21021
augaaggcaauaauuguacuacucaugguaguaacauccaaugcagaucgaaucugcacugggauaacaucgucaaacucaccacaugucgucaaaacugcuacucaaggggaggucaaugugacugguguaauaccacugacaacaacacccaccaaaucucauuuugcaaaucucaaaggaacagaaaccagggggaaacuaugcccaaaaugccucaacugcacagaucuggacguagccuugggcagaccaaaaugcacggggaaaauacccucggcaagaguuucaauacuccaugaagucagaccuguuacaucugggugcuuuccuauacugcacgacagaacaaaaauuagacagcugccuaaccuucuccgaggauacgaacauaucagguuaucaacccauaacguuaucaaugcagaaaaugcaccaggaggacccuacaaaauuggaaccucagggucuugcccuaacauuaccaauggaaacggauuuuucgcaacaauggcuugggccgucccaaaaaacgacaaaaacaaaacagcaacaaauccauuaucaauagaaguaccauacauuuguacagaaggagaagaccaaauuaccguuuggggguuccacucugauaacgagacccaaauggcaaagcucuauggggacucaaagccccagaaguucaccucaucugccaacggaguggccacacauuacguuucacagauugguggcuucccaaaucaaacagaagacggaggacuaccacaaagugguagaauuguuguugauuacauggugcaaaaaucugggaaaacaggaacaauuaccuaucaaagagguauuuuauugccucaaaagguguggugcgcaaguggcaggagcaaggucauaaaaggauccuugccuuuauuuggagaagcagauugccuccacgaaaaauacgguggauuuaacaaaagcaagccuuacuacacaggggaacaugcaaaggccauaggaaauugcccaauaugggugaaaacacccuugaagcuggccaauggaaccaaauauagaccuccugcaaaacuauucaaggaaagggguuucuucggagcuauugcugguuucuuagaaggaggaugggaaggaaugauugcagguuggcacggauacacaucccauggggcacauggaguagcgguggcagcagaccuuaagagcacucaagaggccauaaacaagauaacaaaaaaucucaacucuuugagugagcuggaaguaaagaaucuucaaagacuaagcggugccauggaugaacuccacaacgaaauacuagaacuagacgagaaaguggaugaucucagagcugauacaauaagcucacaaauagaacucgcaguccugcuuuccaaugaaggaauaauaaacagugaagaugaacaucucuuggcgcuugaaagaaagcugaagaaaaugcugggccccucugcuguagagauagggaauggaugcuuugaaaccaaacacaagugcaaccagaccugucucgacagaauagcugcugguaccuuugaugcaggagaauuuucucuccccaccuuugauucacugaauauuacugcugcaucuuuaaaugacgauggauuggauaaucauacuauacugcuuuacuacucaacugcugccuccaguuuggcuguaacacugaugauagcuaucuuuguuguuuauauggucuccagagacaauguuucuugcuccaucugucuauaa

SEQ ID NO: 58612 - RNA, 1758 nt, Artificial Sequence
  derived and/or modified CDS sequence (wt) from hemagglutinin__InfluenzaB__AEG21022
augaaggcaauaauuguacuacucaugguaguaacauccaaugcagaucgaaucugcacugggauaacaucgucaaacucaccucauguggucaaaacagcuacucaaggggaggucaaugugacuggcgugauaccacugacaacaacacccaccaaaucucauuuugcaaaucucaaaggaacagaaaccagggggaaacuaugcccaaaaugccucaacugcacagaucuggacguagccuugggcagaccaaaaugcacggggaccacaccuucugcaagagcuucaauacuccacgaagucagaccuguuacauccgggugcuuuccuauacugcacgacagaacaaaaauuagacagcugccuaaccuucuccgaggauacgaacauaucagguuaucaacccauaacguuaucaaugcagaaaaugcaccaggaggacccuacaaaauuggaaccucagggucuugcccuaacauuaccaauggaaacggauuuuucgcaacaauggcuugggccgucccaaaaaacgacaaaaacaaaacagcaacaaauccauuaucaguagaaguaccauacauuuguacagaaggggaagaccaaauuacuguuuggggguuccauucugauaacgagacccaaauggcaaagcucuauggggacucaaagccccagaaguucaccucaucugccaacggaguggccacacauuacguuucacagauugguggcuucccaaaucaaacggaagacgggggacuaccacaaagugguagaauuguuguugauuacauggugcaaaaaucugggaaaacaggaacaauuaccuaucaaagggguauuuuauugccucaaaggggguggugcgcaaguggcaggagcaaggucauaaaaggauccuugccuuuauuuggagaagcagauugccuucaugaaaaauacgguggauuaaacaaaagcaagccuuacuacacaggagaacaugcaaaggccauaggaaauugcccaauaugggugaaaacacccuugaagcuggccaauggaaccaaauauagaccuccugcaaaacuauucaaggaaagggguuucuucggagcuauugcugguuucuuagaaggaggaugggaaggaaugauugcagguuggcacggauacacaucccauggggcacauggaguaccgguggcagcagaccuuaagagcacucaagaggccauaaacaagauaacaaaaaaucucaacucuuugagugagcuggaaguaaagaaucuucaaagacuaagcggugccauggaugaacuccacaacgaaauacuagaacuagacgagaaaguggaugaucucagagcugauacaauaagcucacaaauagaacucgcaguccugcuuuccaaugaaggaauaauaaacagugaagaugaacaucucuuggcgcuugaaagaaagcugaagaaaaugcugggccccucugcuguagagauagggaauggaugcuuugaaaccaaacacaagugcaaccagaccugucucgacagaauagcugcugguaccuuugaugcaggagaauuuucucuccccaccuuugauucacugaauauuacugcugcaucuuuaaaugacgauggauuggauaaucauacuauacugcuuuacuacucaacugcugccuccaguuuggcuguaacacugaugauagcuaucuuuguuguuuauauggucuccagagacaauguuucuugcuccaucugucuauaa

SEQ ID NO: 58613 - RNA, 1755 nt, Artificial Sequence
  derived and/or modified CDS sequence (wt) from hemagglutinin__InfluenzaB__AEG21023
augaaggcaauaauuguacuacucaugguaguaacauccaaugcagaucgaaucugcacugggauaacaucuucaaacucaccucauguggucaaaacagcuacucuaggggaggucaaugagacuggugugauaccacugacaacaacaccaacaaaaucuuauuuugcaaaucucaaaggaacaaggaccagagggaaacuaugcccggacugucucaacuguacagaucuggauguggccuugggcaggccaauguguguggggaccacaccuucugcgaaagcuucaauacuccacgaagucagaccuguuacauccgggugcuuuccuauaaugcacgacagaacaaaaaucaggcaacuacccaaucuucucagaggauaugaaaauaucagguuaucaacccaaaacguuaucgaugcagaaaaagcaccaggaggacccuacagacuuggaaccucaggaucuugcccuaacgcuaccaguaaaaucggauuuuucgcuacaauggcuugggccgucccaaaggacaacuacaaaaaugcaacgaacccacuaacaguagaaguaccauacauuuguacagaaggggaagaccaaauuacuguuuggggguuccauucagauaacaaaacccaaaugaagaaccucuauggagacucaaauccucaaaaguucaccucaucugcuaauggaguacccacacauuauguuucucaaauuggcgacuucccagauccaaccgaagacggaggacuaccccaaagcggcagaauugguguugauuacaugaugcaaaaaccugggaaaacaggaacaauuguuuaucaaagagguguuuuguugccucaaaagguguggugcgcgaguggcaggagcaaaguaauaaaagggucauuaccuuuaauuggugaagcagauugccuucaugaaaaauacgguggauuaaacaaaagcaagccuuacuacacaggagaacaugcaaaagccauaggaaauugcccaauauggguaaaaacaccuuugaagcuugccaauggaaccaaauauagaccuccugcaaaacuauuaaaggaaagggguuucuucggagcuauuucugguuucuuagaaggaggaugggaaggaaugauugcagguuggcacggauacacgucccauggggcacauggaguagcgguggcagcagaccuuaagagcacucaagaggccauaaacaagauaacaaaaaaucucaacucuuugagugagcuggaaguaaagaaucuucaaagacuaagcggugccauggaugaacuccacaacgaaauacuagaacuagacgagaaaguggaugaucucagagcugauacaauaagcucacaaauagaacucgcaguccugcuuuccaaugaaggaauaauaaacagugaagaugaacaucucuuggcgcuugaaagaaagcugaagaaaaugcugggccccucugcuguagagauagggaauggaugcuuugaaaccaaacacaagugcaaccagaccugcucagacagaauagcugcugguaccuuugaugcaggagaauuuucucuccccaccuuugauucacugaauauuacugcugcaucuuuaaaugacgauggauuggauaaucauacuauacugcuuuacuacucaacugcugccuccaguuuggcuguaacacugaugauagcuaucuuugugguuuauauggucuccagagacaauguuucuugcuccaucugucuauaa

SEQ ID NO: 58614 - RNA, 1758 nt, Artificial Sequence
  derived and/or modified CDS sequence (wt) from hemagglutinin__InfluenzaB__AEG21024
augaaggcaauaauuguacuacucaugguaguaacauccaaugcagaucgaaucugcacugggauaacaucgucaagcucaccacaugucgucaaaacugcuacucaaggggaggucaaugugacuggugugauaccacugacaacaacacccaccaaaucuuauuuugcaaaucucaaaggaacagagaccagagggaaacuaugcccagacugccccaacugcacagaucuagauguggccuugggcagaccaaauugcugggggaacauacccucggcaagaguuucaauacuccaugaagucagaccuguuacaucugggugcuuuccuauaaugcacgacagaacaaaaauuagacagcugccuaaccuucuccgaggauacgaacauaucagguuaucaacucauaacguuaucaaugcagaaaaugcaccaggaggacccuacaaaauuggaaccucaggaucuugcccuaacguuaccaauggaaacggauuuuucgcaacaauggcuugggccgucccaaaggacgacaaaaacaaugcagcgacccaucuauuaacaauagaaguaccauuuuuuuguacaggaggagaacaccauauugccguguggggguuccccucugauaacgacacccugauggccaagcucuuuggggacucuaauccccagauguucuccucaucugccaacggaacgaccacacauuacguuucacagauugguggcuucccaaaucaaacagaagacggaggacuaccacaaagugguagaauuguuguugauuacauggugcaaaaaucugggaaaacaggaacaauugccuaucaaagagguguuuuguugccucaaaagguguggugcgcaaguggcaggagcaagguaauaaaagggucauugccuuuaauuggagaagcagauugccugcaugaaaaauacgguggauuaaacaaaagcaagccuuacuacacaggggaacaugcaaaggccauaggaaauugcccaauaugggugaagacacccuugaagcuggccaauggaaccaaauauagaccuccugcaaaacuauuaaaggaaagggguuucuucggagcuauugcugguuucuuagaaggaggaugggaaggaaugauugcagguuggcacggauacacgucccauggggcacauggaguagcgguggcagcagaccuuaagagcacucaagaggccauaaacaagauaacaaaaaaucucaacucuuugagugagcuggaaguaaagaaucuucaaagacuaagcggugccauggaugaacuccacaacgaaauacuagaacuagacgagaaaguggaugaucucagagcugauacaauaagcucacaaauagaacucgcaguccugcuuuccaaugaaggaauaauaaacagugaagaugaacaucucuuggcgcuugaaagaaagcugaagaaaaugcugggccccucugcuguagagauagggaauggaugcuuugaaaccaaacacaagugcaaccagaccugucucgacagaauagcugcugguaccuuugaugcaggagaauuuucucuccccaccuuugauucacugaauauuacugcugcaucuuuaaaugacgauggauuggauaaucauacuauacugcuuuacuacucaacugcugccuccaguuuggcuguaacacugaugauagcuaucuuugugguuuauauggucuccagagacaauguuucuugcuccaucugucuauaa

SEQ ID NO: 58615 - RNA, 1755 nt, Artificial Sequence
  derived and/or modified CDS sequence (wt) from hemagglutinin__InfluenzaB__AEG21025
augaaggcaauaauuguacuacucaugguaguaacauccaaugcagaucgaaucugcacggggauaacaucuucaaacucaccucauguggucaaaacagcuacucuaggggaggucaaugagacuggugugauaccacugacaacaacaccaacaaaaucuuauuuugcaaaucucaaaggaacaaggacuagagggaaacuaugcccggacugucucaacuguacagaucuggauguggccuugggcaggccaauguguguggggaccacaccuucugcgaaagcuucaauacuccacgaagucagaccuguuacauccgggugcuuuccuauaaugcacgacagaacaaaaaucaggcaacuacccaaucuucucagaggauaugaaaauaucagguuaucaacccaaaacguuaucgaugcagaaaaagcaccaggaggacccuacagacuuggaaccucaggaucuugcccuaacgcuaccaguaaaaucggauuuuucgcuacaauggcuugggccgucccaaaggacaacuacaaaaaugcaacgaacccacuaacaguagaaguaccauacauuuguacagaaggggaagaccaaauuacuguuuggggguuccauucagauaucaaaacccaaaugaagaaccucuauggagacucaaauccucaaaaguucaccucaucugcuaauggaguacccacacauuauguuucucaaauuggcgacuucccagauccaaccgaagacggaggacuaccccaaagcggcagaauugguguugauuacaugaugcaaaaaccugggaaaacaggaacaauuguuuaucaaagagguguuuuguugccucaaaagguguggugcgcgaguggcaggagcaaaguaauaaaagggucauuaccuuuaauuggugaagcagauugccuucaugaaaaauacgguggauuaaacaaaagcaagccuuacuacacaggagaacaugcaaaagccauaggaaauugcccaauauggguaaaaacaccuuugaagcuugccaauggaaccaaauauagaccuccugcaaaacuauuaaaggaaagggguuucuucggagcuauuucugguuucuuagaaggaggaugggaaggaaugauugcagguuggcacggauacacgucccauggggcacauggaguagcgguggcagcagaccuuaagagcacucaagaggccauaaacaagauaacaaaaaaucucaacucuuugagugagcuggaaguaaagaaucuucaaagacuaagcggugccauggaugaacuccacaacgaaauacuagaacuagacgagaaaguggaugaucucagagcugauacaauaagcucacaaauagaacucgcaguccugcuuuccaaugaaggaauaauaaacagugaagaugaacaucucuuggcgcuugaaagaaagcugaagaaaaugcugggccccucugcuguagagauagggaauggaugcuuugaaaccaaacacaagugcaaccagaccugcucagacagaauagcugcugguaccuuugaugcaggagaauuuucucuccccaccuuugauucacugaauauuacugcugcaucuuuaaaugacgauggauuggauaaucauacuauacugcuuuacuacucaacugcugccuccaguuuggcuguaacacugaugauagcuaucuuugugguuuauauggucuccagagacaauguuucuugcuccaucugucuauaa

SEQ ID NO: 58616 - RNA, 1758 nt, Artificial Sequence
  derived and/or modified CDS sequence (wt) from hemagglutinin__InfluenzaB__AEG21026
augaaggccaugaugguacuacucaugguaguaacauccaaugcagaucgaaucugcacugggauaacaucgucaaacucaccacaugucgucaaaacugcuacucaaggggaggucaaugugacugguguaauaccccugacaauaacacccaccaaaucucauuuugcaaaucucaaaguaaaagaaaccagagggaaacuaugcccaaaaugccccaacugcacagaucuggacguagccuugggcagaccaaaaugcacggggaaaauacccucggcaagaguuucaauacuccaugaagacacaccuguuacaucugggugcauuccuauaaugcacgacagaacaaaaauuagacagcugccuaaccuucuccgaggauacgaacacaucagguuaucaacucauaacguuaucaaugcagaaagugcaccaggaggacccuacaaaauuggaaccucagggucuugcccuaauguuaccaauggaaucggauuuuucgcaacaauggcuugggccgucccaaaaaacgacaaaaacaaaacagcaacaaauccauuaacaauagaaguaccauacauuuguacagaaggagaagaccaaauuaccguuuggggguuccacuuugauaacgagacccaaauggcaaagcucuauggggacucaaagccccagguguucaccucaucugccaacggagugaaugcagauuucguuucacagauucguggcuucccaaaucaaacagaagacggaggacuaccacaaagugguagaauuguuguugauuacauggugcaaaaaucugggaaaacaggaacaauuaccuaucaaagagguauuuuauugccucaaaagguguggugcgcaaguggccgaagcaagguaauaaaagaauccuugccuuuaauuggagaagcauauuuccaacaggaagaguacgguggauuaaacaaaagcaagucuuacuacacugaggaacaugcaaaggccauagggauuugcccaauaugggugaagacacccuugaagcuggccaauaaaaccaaauauagaccuccugcacaccuaucauacuuuugcgguuucuucggagcuauugcugguuucuuagaaggaggaugggaaggaaugauugcagguuggaacggauacacaucccauggggcacauggaguagcggugguagcagaccuuaagagcacucaagaggccauaaacaagauaacaaaaaaucucaacucuuugagugagcuggaaguggagacucuucaaagacuaagcggugccauggaugaacuccacaacgaaauacuagaacuagaugagaaaguugaugaucacagagcugauacaauaagcucacaaauagaacucccagaccagcuuuccaaugauggaagcauaaacagugaagaugaacaucucuuggcgcuugaaagaaagcugaagaaaaugcugggccccucuaauggggacaaagggaguggaggcauugaaaccaaacacaagugcaaccagaccugucucgacagaauagcugcugguaccuuugaugcaggaggauuuucucaccccaccuuugauucaaagaauguuacugcugcaucuuuaaaugacgauggauuggauagugguacuauacugcuuuacuacucaacugaugucuccaauuuggcuguaacagugaugauggguaucuuugucaaguauauggucuccagagacaauguuucuugcuccaucugucuauaa

SEQ ID NO: 58617 - RNA, 1758 nt, Artificial Sequence
  derived and/or modified CDS sequence (wt) from hemagglutinin__InfluenzaB__AEG21027
augaaggcaauaauuguacuacucaugguaguaacauccaaugcagaucgaaucugcacugggauaacaucgucaaacucaccacaugucgucaaaacugcuacucaaggggaggucaaugugacugguguaauaccccugacaauaacacccaccaaaucucauuuugcaaaucucaaaggaacagaaaccagagggaaacuaugcccaaaaugccccaacugcacagaucuggacguagccuugggcagaccaaaaugcacggggaaaauacccucggcaagaguuucaauacuccaugaagucagaccuguuacaucugggugcuuuccuauaaugcacgacagaacaaaaauuagacagcugccuaaccuucuccgaggauacgaacauaucagguuaucaacucauaacguuaucaaugcagaaaaugcaccaggaggacccuacaaaauuggaaccucagggucuugcccuaauguuaccaauggaaucggauuuuucgcaacaauggcuugggccgucccaaaaaacgacaaaaacaaaacagcaacaaauccauuaacaauagaaguaccauacauuuguacagaaggagaagaccaaauuaccguuuggggguuccacuuugauaacgagacccaaauggcaaagcucuauggggacucaaagccccagaaguucaccucaucugccaacggagugaaugcagauuucguuucacagauugguggcuucccaaaucaaacagaagacggaggacuaccacaaagugguagaauuguuguugauuacauggugcaaaaaucugggaaaacaggaacaauuaccuaucaaagagguauuuuauugccucaaaagguguggugcgcaaguggcagaagcaagguaauaaaagaauccuugccuuuaauuggagaagcauauuuccaacaggaagaguacgguggauuaaacaaaagcaagucuuacuacacaggggaacaugcaaaggccauaggaaauugcccaauaugggugaagacacccuugaagcuggccaauggaaccaaauauagaccuccugcacaccuaucauacuuuugcgguuucuucggagcuauugcugguuucuuagaaggaggaugggaaggaaugauugcagguuggaacggauacacaucccauggggcacauggaguagcggugguagcagaccuuaagagcacucaagaggccauaaacaagauaacaaaaaaucucaacucuuugagugagcuggaaguggagacucuucaaagacuaagcggugccauggaugaacuccacaacgaaauacuagaaauagaugagaaaguugaugaucacagagcugauacaauaagcucacaaauagaacucgcaguccugcuuuccaaugaaggaauaauaaacagugaagaugaacaucucuuggcgcuugaaagaaagcugaagaaaaugcugggccccucuaauggggacaaagggaguggaggcauugaaaccaaacacaagugcaaccagaccugucucgacagaauagcugcugguaccuuugaugcaggagaauuuucucuccccaccuuugauucacugaauauuacugcugcaucuuuaaaugacgauggauuggauagugguacuauacugcuuuacuacucaacugaugucuccaauuuggcuguaacagugaugauggguaucuuugucaaguauauggucuccagagacaauguuucuugcuccaucugucuauaa

SEQ ID NO: 58618 - RNA, 1758 nt, Artificial Sequence
  derived and/or modified CDS sequence (wt) from hemagglutinin__InfluenzaB__AEG21028
augaaggcaauaauuguacuacucaugguaguaacauccaaugcagaucgaaucugcacugggauaacagcgucacagucaccaaauauagacaaaucuucuacucaaggggaggucaaugugaguuguguaauaccacugacaacaacacccaccaaaucucauuuugcaaaucucaaaguaaaagaaaccagagggaaacuaugcccaaaaugccccaacugcacagaucuggacguauccuugggcagaccaaaaugcacggggaaaauacccucggcaagaguuucaauacuccaugaagucagaccuguugcaucggggggcuuuccuauaaugcacgacagaacaaaaauuagacagcugccuaaccuucuccgaggauacgaacauaucagguuaucaacucauaacguuaucaaugcagaaaaugcaccaggaggacccuacaaaauuggaaccucagggucuugcccuaauguuaccaauggaaucggauuuuucgcaacaauggcuugggccgucccaaaaaacgacaaaaacaaaacagcaacaaauccauuaacaauagaaguaccauacauuuguacagaaggagaagaccaaauuaccguuuggggguuccacucugauaacgagacccaaauggcaaagcucuauggggacucaaagccccagaaguucaccucaucugccaacggagugaccacacauuacgcagcaaaaagaccuugcuucccaaaucaaacagaagacggaggacuaccacaaagugguagaauuguuguugauuacauggugcaaaaaucugggaaaacaggaacaauuaccuaucaaagagguauuuuauugccucaaaagguguggugcgcaaguggcagaagcaagguaauaaaaggauccuugccuuuaauuggagaagcagauugccuccacgaaaaauacgguggauuaaacaaaagcaagucuuacuacacaggggaacaugcaaaggccauaggaaauugcccaauaugggugaagacacccuugaagcuggccucucgaacgaugucuaaaacuccugcacaccuaucauacuuuugcgguuucuucggagcuauugcugguuucuuagaaggaggaugggaaggaaugauugcagguuggaacggauacacaucccauggggcacauggaguagcggugguagcagaccuuaagagcacucaagaggccauaaacaagauaacaaaaaaucucaacucuuugagugagcuggaaguaaagaaucuucaaagacuaagcggugccauggaugaacuccacaacgaaauacuagaacuagaugagaaaguggaugaucucagagcugauacaauaagcucacaaauagaacucgcaguccugcuuuccaaugaaggaauaauaaacagugaagaugaacaucucuuggcgcuugaaagaaagcugaagaaaaugcugggccccucugcuguagagauagggaauggaugcuuugaaaccaaacacaagugcaaccagaccugucucgacagaauagcugcugguaccuuugaugcaggagaauuuucucuccccaccuuugauucacugaauauuacugcugcaucuuuaaaugacgauggauuggauaaucauacuauacugcuuuacuacucaacugcugccuccaguuuggcuguaacacugaugauagcuaucuuuguuguuuauauggucuccagagacaauguuucuugcuccaucugucuauag

SEQ ID NO: 58619 - RNA, 1758 nt, Artificial Sequence
  derived and/or modified CDS sequence (wt) from hemagglutinin__InfluenzaB__AEG21029
augaaggcaauaauuguacuacucaugguaguaacauccaaugcagaucgaaucugcacugggauaacaucgucaaacucaccacaugucgucaaaacugcuacucaaggggaggucaaugugacugguguaauaccacugacaacaacacccaccaaaucucauuuugcaaaucucaaaggaacagaaaccagagggaaacuaugcccaaaaugccccaacugcacagaucuggacguagccuugggcagaccaaaaugcacggggaaaauacccucggcaagaguuucaauacuccaugaagucagaccuguuacaucugggugcuuuccuauaaugcacgacagaacaaaaauuagacagcugccuaaccuucuccgaggauacgaacauaucagguuaucaacucauaacguuaucaaugcagaaaaugcaccaggaggacccuacaaaauuggaaccucagggucuugcccuaauguuaccaauggaaucggauuuuucgcaacaauggcuugggccgucccaaaaaacgacaaaaacaaaacagcaacaaauccauuaacaauagaaguaccauacauuuguacagaaggagaagaccaaauuaccguuuggggguuccacucugacagcgagacccaaauggcaaagcucuauggggacucaaagccccagaaguucaccucaucugccaacggagugaccacacauuacguuucacagauugguggcuucccaaaucaaacagaagacgggggacuaccacaaagugguagaauuguuguugauuacauggugcaaaaaucugggaaaacaggaacaauuaccuaucaaagggguauuuuauugccucaaaagguguggugcgcaaguggcaggagcaagguaauaaaaggauccuugccuuuaauuggagaagcagauugccuccacgaaaaauacgguggauuaaacaaaagcaagccuuacuacacaggggaacaugcaaaggccauaggaaauugcccaauaugggugaaaacacccuugaagcuggccaauggaaccaaauauagaccuccugcaaaacuauuaaaggaaagggguuucuucggagcuauugcugguuucuuagaaggaggaugggaaggaaugauugcagguuggcacggauacacaucccauggggcacauggaguagcgguggcagcagaccuuaagagcacucaagaggccauaaacaagauaacaaaaaaucucaacucuuugagugagcuggaaguaaagaaucuucaaagacuaagcggugccauggaugaacuccacaacgaaauacuagaacuagaugagaaaguggaugaucucagagcugauacaauaagcucacaaauagaacucgcaguccugcuuuccaaugaaggaauaauaaacagugaagaugaacaucucuuggcgcuugaaagaaagcugaagaaaaugcugggccccucugcuguagagauagggaauggaugcuuugaaaccaaacacaagugcaaccagaccugucucgacagaauagcugcugguaccuuugaugcaggagaauuuucucuccccaccuuugauucacugaauauuacugcugcaucuuuaaaugacgauggauuggauaaucauacuauacugcuuuacuacucaacugcugccuccaguuuggcuguaacacugaugauagcuaucuuuguuguuuauauggucuccagagacaauguuucuugcuccaucugucuauaa

SEQ ID NO: 58620 - RNA, 1758 nt, Artificial Sequence
  derived and/or modified CDS sequence (wt) from hemagglutinin__InfluenzaB__AEO80052
augaaggcaauaauuguacuacucaugguaguaacauccaaugcagaucgaaucugcacugggauaacaucgucaaacucaccacaugucgucaaaacugcuacucaaggggaggucaaugugacugguguaauaccacugacaacaacacccaccaaaucucauuuugcaaaucucaaaggaacagaaaccagagggaaacuaugcccaaaaugccccaacugcacagaucuggacguagccuugggcagaccaaaaugcacggggaaaauacccucggcaagaguuucaauacuccaugaagucagaccuguuacaucugggugcuuuccuauaaugcacgacagaacaaaaauuagacagcugccuaaccuucuccgaggauacgaacauaucagauuaucaacucauaacguuaucaaugcagaaaaugcaccaggaggacccuacaaaauuggaaccucagggucuugcccuaacguuaccaauggaaacggauuuuucgcaacaauggcuugggccgucccaaaaaacgacaaaaacaaaacagcaacaaauccauuaacaauagaaguaccauacauuuguacagaaggagaagaccaaaucaccguuuggggguuccacucugauaacgagacccaaauggcaaagcucuauggggacucaaagccccagaaguucaccucaucugccaacggagugaccacacauuacguuucacagauugguggcuucccaaaucaaacagaagacggaggacuaccacaaagugguagaauuguuguugauuacauggugcaaaaaucugggaaaacaggaacaauuaccuaucaaagagguauuuuauugccucaaaagguguggugcgcaaguggcaggagcaagguaauaaaaggauccuugccuuuaauuggagaagcagauugccuccacgaaaaauacgguggauuaaacaaaagcaagccuuacuacacaggggaacaugcaaaggccauaggaaauugcccaauaugggugaagacacccuugaagcuggccaauggaaccaaauauagaccuccugcaaaacuauuaaaggaaagggguuucuucggagcuauugcugguuucuuagaaggaggaugggaaggaaugauugcagguuggcacggauacacgucccauggggcacauggaguagcgguggcagcagaccuuaagagcacucaagaggccauaaacaagauaacaaaaaaucucaacucuuugagugagcuggaaguaaagaaucuucaaagacuaagcggugccauggaugaacuccacaacgaaauacuagaacuagacgagaaaguggaugaucucagagcugauacaauaagcucacaaauagaacucgcaguccugcuuuccaaugaaggaauaauaaacagugaagaugaacaucucuuggcacuugaaagaaagcugaagaaaaugcugggcccuucugcuguagagauagggaauggaugcuuugaaaccaaacacaagugcaaucagaccugucucgacagaauagcugcugguaccuuugaugcaggagaauuuucucuccccaccuuugauucacugaauauuacugcugcaucuuuaaaugacgauggauuggauaaucauaccauacugcuuuacuacucaacugcugccuccaguuuggcuguaacacugaugauagcuaucuuuguuguuuauauggucuccagagacaauguuucuugcuccaucugucuauaa

SEQ ID NO: 58621 - RNA, 1758 nt, Artificial Sequence
  derived and/or modified CDS sequence (wt) from hemagglutinin__InfluenzaB__AEO80067
augaaggcaauaauuguacuacucaugguaguaacauccaaugcagaucgaaucugcacugggauaacaucgucaaacucaccacauguugucaaaacugcuacucaaggggaggucaaugugacugguguaauaccacugacaacaacacccaccaaaucucauuuugcaaaucucaaaggaacagaaaccagagggaaacuaugcccaaaaugccucaacugcacagaucuggacguggccuugggcagaccaaaaugcacggggaacauacccucggcaagaguuucaauacuccaugaagucagaccuguuacaucugggugcuuuccuauaaugcacgacagaacaaaaauuagacagcugccuaaccuucucagaggauacgaacauaucagguuaucaacucauaacguuaucaacgcagaaaaugcaccaggaggacccuacaaaauuggaaccucagggucuugcccuaauguuaccaauggaaacggauuuuucgcaacaauggcuugggccgucccaaaaaacgacaacaacaaaacagcaacaaauucauuaacaauagaaguaccauacauuuguacagaaggagaagaccaaauuaccguuuggggguuccacucugauaacgaaacccaaauggcaaagcucuauggggacucaaagccccagaaguucaccucaucugccaacggagugaccacacauuacguuucacagauugguggcuucccaaaucaaacagaagacggaggacuaccacaaagugguagaauuguuguugauuacauggugcaaaaaucugggaaaacaggaacaauuaccuaucaaagagguauuuuauugccucaaaaaguguggugcgcaaguggcaggagcaagguaauaaaaggauccuugccuuuaauuggagaagcagauugccuccacgaaaaauacgguggauuaaacaaaagcaagccuuacuacacaggggaacaugcaaaggccauaggaaauugcccaauaugggugaaaacacccuugaagcuggccaauggaaccaaauauagaccuccugcaaaacuauuaaaggaaagggguuucuucggagcuauugcugguuucuuagaaggaggaugggaaggaaugauugcagguuggcacggauacacaucccauggggcacauggaguagcgguggcagcagaccuuaaaagcacucaagaggccauaaacaagauaacaaaaaaucucaacucuuugagugagcuggaaguaaagaaucuucaaagacuaagcggugccauggaugaacuccacaacgaaauacuagaacuagacgagaaaguggaugaucucagagcugauacaauaagcucacaaauagaacucgcaguccugcuuuccaaugaaggaauaauaaacagugaagaugagcaucucuuggcgcuugaaagaaagcugaagaaaaugcugggccccucugcuguagagauagggaauggaugcuuugaaaccaaacacaagugcaaccagaccugucucgacagaauagcugcugguaccuuugaugcaggagaauuuucucuccccaccuuugauucacugaauauuacugcugcaucuuuaaaugacgauggauuggauaaucauacuauacugcuuuacuacucaacugcugccuccaguuuggcuguaacauugaugauagcuaucuuuguuguuuauauggucuccagagacaauguuucuugcuccaucugucuauaa

SEQ ID NO: 58622 - RNA, 1755 nt, Artificial Sequence
  derived and/or modified CDS sequence (wt) from hemagglutinin__InfluenzaB__AEO80078
augaaggaaauaauuguacuacucaugguaguaacauccaaugcagaucgaaucugcacugggauaacaucuucaaacucaccucauguggucaaaacagcuacucaaggggaggucaaugugacuggugugauaccacugacaacaacaccaacaaaaucuuauuuugcaaaucucaaaggaacaaggaccagagggaaacuaugcccagacugucucaacuguacagaucuggauguggccuugggcaggccaauguguguggggaccacaccuucugcgaaagcuucaauacuccacgaagucagaccuguuacauccgggugcuuuccuauaaugcacgacagaacaaaaaucaggcaacuagccaaucuucucagaggauaugaaaauaucagguuaucaacccaaaacguuaucgaugcagaaaaggcaccaggaggacccuacagacuuggaaccucaggaucuugcccuaacgcuaccaguaaaagcggauuuuucgcaacaauggcuugggcugucccaaaggacaacaacaaaaaugcaacgaacccacuaacaguagaaguaccauacauuuguacagaaggggaagaccaaauuacuguuuggggguuccauucagauaacaaaacccaaaugaagaaccucuauggagacucaaauccucaaaaguucaccucaucugcuaauggaguaaccacacauuauguuucucagauuggcggcuucccagaucaaacagaagacggaggacuaccacaaagcggcagaauuguuguugauuacaugaugcaaaaaccugggaaaacaggaacaauugucuaucaaagagguguuuuguugccucaaaagguguggugcgcgaguggcaggagcaaaguaauaaaaggguccuugccuuuaauuggugaagcagauugccuucaugaaaaauacgguggauuaaacaaaagcaagccuuacuacacaggagaacaugcaaaagccauaggaaauugcccaauaugggugaaaacaccuuugaagcuugccaauggaaccaaauauagaccuccugcaaaacuguuaaaggaaagggguuucuucggagcuauugcuggcuuccuagaaggaggaugggaaggaaugaucgcagguuggcacggauacacaucucacggagcacauggaguggcaguggcggcagaccuuaagaguacacaagaagcuauaaacaagauaacaaaaaaucucaauucuuugagugagcuagaaguaaagaaucuucaaagacuaaguggugccauggaugaacuccacaacgaaauacucgagcuggaugagaaaguggaugaucucagagcugacacuauaagcucacaaauagaacuugcagucuugcuuuccaacgaaggaauaauaaacagugaagacgagcaucuauuggcacuugagagaaaacuaaagaaaaugcugggucccucugcuguagacauaggaaauggaugcuucgaaaccaaacacaaaugcaaccagaccugcuuagacaggauagcugcuggcaccuuuaaugcaggagaauuuucucuccccacuuuugauucauugaacauuacugcugcaucuuuaaaugaugauggauuggauaaccauacuauacugcucuauuacucaacugcugcuucuaguuuggcuguaacauugaugcuagcuauuuuuauuguuuauauggucuccagagacaacguuucaugcuccaucugucuauaa

SEQ ID NO: 58623 - RNA, 1758 nt, Artificial Sequence
  derived and/or modified CDS sequence (wt) from hemagglutinin__InfluenzaB__AEO80086
augaaggcaauaauuguacuacucaugguaguaacauccaaugcagaucgaaucugcacugggauaacaucgucaaacucaccccauguggucaaaacugcuacucaaggggaggucaaugugacuggugugauaccacugacaacaacacccaccaaaucucauuuugcaaaucucaaaggaacaaaaaccagagggaaacuauguccaaaaugccucaacugcacagaucuggacguggccuugggcagaccaaaaugcacggggaacauacccucggcaaaaguuucaauacuccaugaagucagaccuguuacaucugggugcuuuccuauaaugcacgacagaacaaaaauuagacagcugcccaaccuucucagaggauacgaacauaucagguuaucaacucauaacguuaucaaugcagaaaaggcaccaggaggacccuacaaaauuggaaccucagggucuugcccuaacguuaccaauggaaacggauuuuucgcaacaauggcuugggccgucccaaaaaacgacaacaacaaaacagcaacaaauucauuaacaauagaaguaccauacauuuguacagaaggagaagaccaaauuaccauuuggggguuccacucugauaacgaaacccaaauggcaaaacucuauggggacucaaagccccagaaguucaccucaucugccaacggagugaccacacauuacguuucacagauugguggcuucccaaaucaaacagaagacggaggacuaccacaaagugguagaauuguuguugauuacauggugcaaaaaucugggaaaacaggaacaauuaccuaucaaagagguauuuuauugccucaaaaaguguggugcgcaaguggcaggagcaagguaauaaaaggauccuugccuuuaauuggagaagcagauugccuccacgaaaaauacgguggauuaaacaaaagcaagccuuacuacacaggggaacaugcaaaggccauaggaaauugcccaauaugggugaaaacacccuugaagcuggccaauggaaccaaauauagaccuccugcaaaacuauuaaaggaaagggguuucuucggagcuauugcugguuucuuagaaggaggaugggaaggaaugauugcagguuggcacggauacacaucccauggggcacauggaguagcaguggcagcagaccuuaagagcacucaagaagccauaaacaagauaacaaaaaaucucaacucuuugagugagcuggaaguaaagaaucuucaaagacuaagcggugccauggaugaacuccacaacgaaauacuagaacuagacgagaaaguggaugaucucagagcugauacgauaagcucacaaauagaacucgcaguccugcuuuccaaugaaggaauaauaaacagugaagaugagcaucucuuggcgcuugaaagaaagcugaagaaaaugcugggccccucugcuguagagauagggaauggaugcuucgaaaccaaacacaagugcaaccagaccugucucgacagaauagcugcugguaccuuugaugcaggagaauuuucucuccccacuuuugauucacugaauauuacugcugcaucuuuaaaugacgauggauuggauaaucauacuauacugcuuuacuacucaacugcugccuccaguuuggcuguaacauuaaugauagcuaucuuuguuguuuauauggucuccagagacaauguuucuugcuccaucugucuauaa

SEQ ID NO: 58624 - RNA, 1755 nt, Artificial Sequence
  derived and/or modified CDS sequence (wt) from hemagglutinin__InfluenzaB__AEO80097
augaaggcaauaauuguacuacucaugguaguaacauccaaugcagaucgaaucugcacugggauaacaucuucaaacucaccucauguggucaaaacagcuacucaaggggaggucaaugugacuggugugauaccacugacaacaacaccaacaaaaucucauuuugcaaaucucaaaggaacaaggaccagagggaaacuaugcccagacugucucaacuguacagaucuggauguggccuugggcaggccaauguguguggggaccacaccuucugcgaaagcuucaauacuccacgaagucagaccuguuacauccgggugcuuuccuauaaugcacgacagaacaaaaaucaggcaacuagccaaucuucucagaggauaugaaaauaucagguuaucaacccaaaacguuaucgaugcagaaaaggcaccaggaggacccuacagacuuggaaccucaggaucuugcccuaacgcuaccaguaaaagcggauuuuucgcaacaauggcuugggcugucccaaaggacaacaacaaaaaugcaacgaacccacuaacaguagaaguaccauacauuuguacagaaggggaagaccaaauuacuguuuggggguuccauucagauaacaaaacccaaaugaagaaccucuauggagacucaaauccucaaaaguucaccucaucugcuaauggaguaaccacacauuauguuucucagauuggcggcuucccagaucaaacagaagacggaggacuaccacaaagcggcagaauuguuguugauuacaugaugcaaaaaccugggaaaacaggaacaauugucuaucaaagagguguuuuguugccucaaaagguguggugcgcgaguggcaggagcaaaguaauaaaaggguccuugccuuuaauuggugaagcagauugccuucaugaaaaauacgguggauuaaacaaaagcaagccuuacuacacaggagaacaugcaaaagccauaggaaauugcccaauaugggugaaaacaccuuugaagcuugccaauggaaccaaauauagaccuccugcaaaacuauuaaaggaaagggguuucuucggagcuauugcugguuuccuagaaggaggaugggaaggaaugauugcagguuggcacggauacacaucucacggagcacauggaguggcaguggcggcagaccuuaagaguacacaagaagcuauaaacaagauaacaaaaaaucucaauucuuugagugagcuagaaguaaagaaucuucaaagacuaaguggugccauggaugaacuccacaacgaaauacucgagcuggaugagaaaguggaugaucucagagcugacacuauaagcucacaaauagaacuugcagucuugcuuuccaacgaaggaauaauaaacagugaagacgagcaucuauuggcacuugagagaaaacuaaagaaaaugcugggucccucugcuguagacauaggaaauggaugcuucgaaaccaaacacaaaugcaaccagaccugcuuagacaggauagcugcuggcaccuuuaaugcaggagaauuuucucuccccacuuuugauucauugaacauuacugcugcaucuuuaaaugaugauggauuggauaaccauacuauacugcucuauuacucaacugcugcuucuaguuuggcuguaacauugaugcuagcuauuuuuauuguuuauauggucuccagagacaacguuucaugcuccaucugucuauaa

SEQ ID NO: 58625 - RNA, 1755 nt, Artificial Sequence
  derived and/or modified CDS sequence (wt) from hemagglutinin__InfluenzaB__AEO80108
augaaggcaauaauuguacuacucaugguaguaacauccaaugcagaucgaaucugcacugggauaacaucuucaaacucaccucauguggucaaaacagcuacucaaggggaggucaaugugacuggugugauaccacugacaacaacaccaacaaaaucuuauuuugcaaaucucaaaggaacaaggaccagagggaaacuaugcccagacugucucaacuguacagaucuggauguggccuugggcaggccaauguguguggggaccacaccuucugcgaaagcuucaauacuccacgaagucagaccuguuacauccgggugcuuuccuauaaugcacgacagaacaaaaaucaggcaacuagccaaucuucucagaggauaugaaaauaucagguuaucaacccaaaacguuaucgaugcagaaaaggcaccaggaggacccuacagacuuggaaccucaggaucuugcccuaacgcuaccaguaaaagcggauuuuucgcaacaauggcuugggcugucccaaaggacaacaacaaaaaugcaacgaacccacuaacaguagaaguaccauacauuuguacagaaggggaagaccaaauuacuguuuggggguuccauucagauaacaaaacccaaaugaagaaccucuauggagacucaaacccucaaaaguucaccucaucugcuaauggaguaaccacacauuauguuucucagauuggcggcuucccagaucaaacagaagacggaggacuaccacaaagcggcagaauuguuguugauuacaugaugcaaaaaccugggaaaacaggaacaauugucuaucaaagagguguuuuguugccucaaaagguguggugcgcgaguggcaggagcaaaguaauaaaaggguccuugccuuuaauuggugaagcagauugccuucaugaaaaauacgguggauuaaacaaaagcaagccuuacuacacaggagaacaugcaaaagccauaggaaauugcccaauaugggugaaaacaccuuugaagcuugccaauggaaccaaauauagaccuccugcaaaacuauuaaaggaaagggguuucuucggagcuauugcugguuuccuagaaggaggaugggaaggaaugauugcagguuggcacggauacacaucucacggagcacauggaguggcaguggcggcagaccuuaagaguacacaagaagcuauaaacaagauaacaaaaaaucucaauucuuugagugagcuagaaguaaagaaucuucaaagacuaaguggugccauggaugaacuccacaacgaaauacucgagcuggaugagaaaguggaugaucucagagcugacacuauaagcucacaaauagaacuugcagucuugcuuuccaacgaaggaauaauaaacagugaagacgagcaucuauuggcacuugagagaaaacuaaagaaaaugcugggucccucugcuguagacauaggaaauggaugcuucgaaaccaaacacaaaugcaaccagaccugcuuagacaggauagcugcuggcaccuuuaaugcaggagaauuuucucuccccacuuuugauucauugaacauuacugcugcaucuuuaaaugaugauggauuggauaaccauacuauacugcucuauuacucaacugcugcuucuaguuuggcuguaacauugaugcuagcuauuuuuauuguuuauauggucuccagagacaacguuucaugcuccaucugucuauaa

SEQ ID NO: 58626 - RNA, 1758 nt, Artificial Sequence; identical to SEQ ID NO: 58529
  derived and/or modified CDS sequence (wt) from hemagglutinin__InfluenzaB__AEO80145

SEQ ID NO: 58627 - RNA, 1758 nt, Artificial Sequence; identical to SEQ ID NO: 58585
  derived and/or modified CDS sequence (wt) from hemagglutinin__InfluenzaB__AEO80154

SEQ ID NO: 58628 - RNA, 1758 nt, Artificial Sequence
  derived and/or modified CDS sequence (wt) from hemagglutinin__InfluenzaB__AEO80183
augaaggcaauaauuguacuacucaugguaguaacauccaaugcagaucgaaucugcacugggauaacaucgucaaacucaccacauguugucaaaacugcuacucaaggggagguuaaugugacugguguaauaccacugacaacaacacccaccaaaucucauuuugcaaaucucaaaggaacagaaaccagagggaaacuaugcccaaaaugccucaacugcacagaucuggacguggccuugggcagaccaaaaugcacggggaacauacccucggcaagaguuucaauacuccaugaagucagaccuguuacaucugggugcuuuccuauaaugcacgacagaacaaaaauuagacagcugccuaaccuucucagaggauacgaacauaucagguuaucaacucauaacguuaucaaugcagaaaaugcaccaggaggacccuacaaaauuggaaccucagggucuugcccuaacguuaccaauggaaacggauuuuucgcaacaauggcuugggccgucccaaaaaacgacaacaacaaaacagcaacaaauucauuaacaauagaaguaccauacauuuguacagaaggagaagaccaaauuaccguuuggggguuccacucugauaucgagacccaaauggcaaagcucuauggggacucaaagccccagaaguucaccucaucugccaacggagugaccacacauuacguuucacagauugguggcuucccaaaucaaacagaagacggaggacuaccacaaagugguagaauuguuguugauuacauggugcaaaaaucugggaaaacaggaacaauuaccuaucaaagagguauuuuauugccucaaaagguguggugcgcaaguggcaggagcaagguaauaaaaggauccuugccuuuaauuggagaagcagauugccuccacgaaaaauacgguggauuaaacaaaagcaagccuuacuacacaggggaacaugcaaaggccauagggaauugcccaauaugggugaaaacacccuugaagcuggccaauggaaccaaauauagaccuccagcaaaacuauuaaaggaaagggguuucuucggagcuauugcugguuucuuagaaggaggaugggaaggaaugauugcagguuggcacggauauacaucccauggggcacauggaguagcgguggcagcagaccuuaagagcacucaagaggccauaaacaagauaacaaaaaaucucaacucuuugagugagcuggaaguaaagaaucuucaaagacuaagcggugccauggaugaacuccacaacgaaauacuagaacuagacgagaaaguggaugaucucagagcugauacaauaagcucacaaauagaacucgcaguccugcuuuccaaugagggaauaauaaacagugaagaugagcaucucuuggcgcuugaaagaaagcugaagaaaaugcugggccccucugcuguagagauagggaauggaugcuuugaaaccaaacacaagugcaaccagaccugucucgacagaauagcugcugguaccuuugaugcaggagaauuuucucuccccaccuuugauucacugaauauuacugcugcaucuuuaaaugacgauggauuggauaaucauacuauacugcuuuacuacucaacugcugccuccaguuuggcuguaacauugaugauagcuaucuuuguuguuuauauggucuccagagacaauguuucuugcuccaucugucuauaa

SEQ ID NO: 58629 - RNA, 1758 nt, Artificial Sequence
  derived and/or modified CDS sequence (wt) from hemagglutinin__InfluenzaB__AEO80194
augaaggcaauaauuguacuacucaugguaguaacauccaaugcagaucgaaucugcacugggauaacaucgucaaacucaccacauguugucaaaacugcuacucaaggggagguuaaugugacugguguaauaccacugacaacaacacccaccaaaucucauuuugcaaaucucaaaggaacagaaaccagagggaaacuaugcccaaaaugccucaacugcacagaucuggacguggccuugggcagaccaaaaugcacggggaacauacccucggcaagaguuucaauacuccaugaagucagaccuguuacaucugggugcuuuccuauaaugcacgacagaacaaaaauuagacagcugccuaaccuucucagaggauacgaacauaucagguuaucaacucauaacguuaucaaugcagaaaaugcaccaggaggacccuacaaaauuggaaccucagggucuugcccuaacguuaccaauggaaacggauuuuucgcaacaauggcuugggccgucccaaaaaacgacaacaacaaaacagcaacaaauucauuaacaauagaaguaccauacauuuguacagaaggagaagaccaaauuaccguuuggggguuccacucugauaacgaggcccaaauggcaaagcucuauggggacucaaagccccagaaguucaccucaucugccaacggagugaccacacauuacguuucacagauugguggcuucccaaaucaaacagaagacggaggacuaccacaaagugguagaauuguuguugauuacauggugcaaaaaucugggaaaacaggaacaauuaccuaucaaagagguauuuuauugccucaaaagguguggugcgcaagaggcaggagcaagguaauaaaaggauccuugccuuuaauuggagaagcagauugccuccacgaaaaauacgguggauuaaacaaaagcaagccuuacuacacaggggaacaugcaaaggccauaggaaauugcccaauaugggugaaaacacccuugaagcuggccaauggaaccaaauauagaccuccugcaaaacuauuaaaggaaagggguuucuucggagcuauugcugguuucuuagaaggaggaugggaaggaaugauugcagguuggcacggauauacaucccauggggcacauggaguagcgguggcagcagaccuuaagagcacucaagaggccauaaacaagauaacaaaaaaucucaacucuuugagugagcuggaaguaaagaaucuucaaagacuaagcggugccauggaugaacuccacaacgaaauacuagaacuagacgagaaaguggaugaucucagagcugauacaauaagcucacaaauagaacucgcaguccugcuuuccaaugagggaauaauaaacagugaagaugagcaucucuuggcgcuugaaagaaagcugaagaaaaugcugggccccucugcuguagagauagggaauggaugcuuugaaaccaaacacaagugcaaccagaccugucucgacagaauagcugcugguaccuuugaugcaggagaauuuucucuccccaccuuugauucacugaauauuacugcugcaucuuuaaaugacgauggauuggauaaucauacuauacugcuuuacuacucaacugcugccuccaguuuggcuguaacauugaugauagcuaucuuuguuguuuauaugaucuccagagacaauguuucuugcuccaucugucuauaa

SEQ ID NO: 58630 - RNA, 1758 nt, Artificial Sequence
  derived and/or modified CDS sequence (wt) from hemagglutinin__InfluenzaB__AEO80205
augaaggcaauaauuguacuacucaugguaguaacauccaaugcagaucgaaucugcacugggauaacaucgucaaacucaccacauguugucaaaacugcuacucaaggggagguuaaugugacugguguaauaccacugacaacaacacccaccaaaucucauuuugcaaaucucaaaggaacagaaaccagagggaaacuaugcccaaaaugccucaacugcacagaucuggacguggccuugggcagaccaaaaugcacggggaacauacccucggcaagaguuucaauacuccaugaagucagaccuguuacaucugggugcuuuccuauaaugcacgacagaacaaaaauuagacagcugccuaaccuucucagaggauacgaacauaucagguuaucaacucauaacguuaucaaugcagaaaaugcaccaggaggacccuacaaaauuggaaccucagggucuugcccuaacguuaccaauggaaacggauuuuucgcaacaauggcuugggccgucccaaaaaacgacaacaacaaaacagcaacaaauucauuaacaauagaaguaccauacauuuguacagaaggagaagaccaaauuaccguuuggggguuccacucugauaacgagauccaaauggcaaagcucuauggggacucaaagccccagaaguucaccucaucugccaacggagugaccacacauuacguuucacagauugguggcuucccaaaucaaacagaagacggaggacuaccacaaagugguagaauuguuguugauuacauggugcaaaaaucugggaaaacaggaacaauuaccuaucaaagagguauuuuauugccucaaaagguguggugcgcaaguggcaggagcaagguaauaaaaggauccuugccuuuaauuggagaagcagauugccuccacgaaaaauacgguggauuaaacaaaagcaagccuuacuacacaggggaacaugcaaaggccauaggaaauugcccaauaugggugaaaacacccuugaagcuggccaauggaaccaaauauagaccuccugcaaaacuauuaaaggaaagggguuucuucggagcuauugcugguuucuuagaaggaggaugggaaggaaugauugcagguuggcacggauauacaucccauggggcacauggaguagcgguggcagcagaccuuaagagcacucaagaggccauaaacaagauaacaaaaaaucucaacucuuugagugagcuggaaguaaagaaucuucaaagacuaagcggugccauggaugaacuccacaacgaaauacuagaacuagacgagaaaguggaugaucucagagcugauacaauaagcucacaaauagaacucgcaguccugcuuuccaaugagggaauaauaaacagugaagaugagcaucucuuggcgcuugaaagaaagcugaagaaaaugcugggccccucugcuguagagauagggaauggaugcuuugaaaccaaacacaagugcaaccaaaccugucucgacagaauagcugcugguaccuuugaugcaggagaauuuucucuccccaccuuugauucacugaauauuacugcugcaucuuuaaaugacgauggauuggauaaucauacuauacugcuuuacuacucaacugcugccuccaguuuggcuguaacauugaugauagcuaucuuuguuguuuauauggucuccagagacaauguuucuugcuccaucugucuauaa

SEQ ID NO: 58631 - RNA, 1758 nt, Artificial Sequence
  derived and/or modified CDS sequence (wt) from hemagglutinin__InfluenzaB__AEO80216
augaaggcaauaauuguacuacucaugguaguaacauccaaugcagaucgaaucugcacugggauaacaucgucaaacucaccacauguugucaaaacugcuacucaaggggagguuaauguaacugguguaauaccacugacaacaacacccaccaaaucucauuuugcaaaucucaaaggaacagaaaccagagggaaacuaugcccaaaaugccucaacugcacagaucuggacguggccuugggcagaccaaaaugcacggggaacauacccucggcaagaguuucaauacuccaugaagucagaccuguuacaucugggugcuuuccuauaaugcacgacagaacaaaaauuagacagcugccuaaccuucucagaggauacgaacauaucagguuaucaacucauaacguuaucaaugcagaaaaugcaccaggaggacccuacaaaauuggaaccucagggucuugcccuaacguuaccaauggaaacggauuuuucgcaacaauggcuugggccgucccaaaaaacgacaacaacaaaacagcaacaaauucauuaacaauagaaguaccauacauuuguacagaaggagaagaccaaauuaccguuuggggguuccacucugauaacgagauccaaauggcaaagcucuauggggacucaaagccccagaaguucaccucaucugccaacggagugaccacacauuacguuucacagauugguggcuucccaaaucaaacagaagacggaggacuaccacaaagugguagaauuguuguugauuacauggugcaaaaaucugggaaaacaggaacaauuaccuaucaaagagguauuuuauugccucaaaagguguggugcgcaaguggcaggagcaagguaauaaaaggauccuugccuuuaauuggagaagcagauugccuccacgaaaaauacgguggauuaaacaaaagcaagccuuacuacacaggggaacaugcaaaggccauaggaaauugcccaauaugggugaaaacaccuuugaagcuggccaauggaaccaaauauagaccuccugcaaaacuauuaaaggaaagggguuucuucggagcuauugcugguuucuuagaaggaggaugggaaggaaugauugcagguuggcacggauauacaucccauggggcacauggaguagcgguggcagcagaccuuaagagcacucaagaggccauaaacaagauaacaaaaaaucucaacucuuugagugagcuggaaguaaagaaucuucaaagacuaagcggugccauggaugaacuccacaacgaaauacuagaacuagacgagaaaguggaugaucucagagcugauacaauaagcucacaaauagaacucgcaguccugcuuuccaaugagggaauaauaaacagugaagaugagcaucucuuggcgcuugaaagaaagcugaagaaaaugcugggccccucugcuguagagauagggaauggaugcuuugaaaccaaacacaagugcaaccagaccugucucgacagaauagcugcugguaccuuugaugcaggagaauuuucucuccccaccuuugauucacugaauauuacugcugcaucuuuaaaugacgauggauuggauaaucauacuauacugcuuuacuacucaacugcugccuccaguuuggcuguaacauugaugauagcuaucuuuguuguuuauauggucuccagagacaauguuucuugcuccaucugucuauaa

SEQ ID NO: 58632 - RNA, 1755 nt, Artificial Sequence
  derived and/or modified CDS sequence (wt) from hemagglutinin__InfluenzaB__AEO80227
augaaggcaauaauuguacuacucaugguaguaacauccaaugcagaucgaaucugcacugggauaacaucuucaaacucaccucauguggucaaaacagcuacucaaggggaggucaaugugacuggugugauaccacugacaacaacaccaacaaaaucuuauuuugcaaaucucaaaggaacaaggaccagagggaaacuauguccagacugucucaacuguacagaucuggauguggccuugggcaggccaauguguguggggaccacaccuucugcgaaagcuucaauacuccacgaagucagaccuguuacauccgggugcuuuccuauaaugcacgacagaacaaaaaucaggcaacuagccaaucuucucagaggauaugaaaauaucagguuaucaacccaaaacguuaucgaugcagaaaaggcaccaggaggacccuacagacuuggaaccucaggaucuugcccuaacgcuaccaguaaaagcggauuuuucgcaacaauggcuugggcugucccaaaggacaacaacaaaaaugcaacgaacccacuaacaguagaaguaccauacauuuguacagaaggggaagaccaaauuacuguuuggggguuccauucagauaacaaaauccaaaugaagaaccucuauggagacucaaauccucaaaaguucaccucaucugcuaauggaguaaccacacauuauguuucucagauuggcggcuucccagaucaaacagaagacggaggacuaccacaaagcggcagaauugucguugauuacaugaugcaaaaaccugggaaaacaggaacaauugucuaucaaagagguguuuuguugccucaaaagguguggugcgcgaguggcaggagcaaaguaauaaaaggguccuugccuuuaauuggugaagcagauugccuucaugaaaaauacgguggauuaaacaaaagcaagccuuacuacacaggagaacaugcaaaagccauaggaaauugcccaauaugggugaaaacaccuuugaagcuugccaauggaaccaaauauagaccuccugcaaaacuauuaaaggaaagggguuucuucggagcuauugcugguuuccuagaaggaggaugggaaggaaugaucgcagguuggcacggauacacaucucacggagcacauggaguggcaguugcggcagaccuuaagaguacacaagaagcuauaaacaagauaacaaaaaaucucaacucuuugagugagcuagaaguaaagaaucuucaaagacuaaguggugccauggaugaacuccacaacgaaauacucgagcuggaugagaaaguggaugaucucagagcugacacuauaagcucacaaauagaacuugcagucuugcuuuccaacgaaggaauaauaaacagugaagacgagcaucuauuggcacuugagagaaaacuaaagaaaaugcugggucccucugcuguagacauaggaaauggaugcuucgaaaccaaacacaaaugcaaccagaccugcuuagacaggauagcugcuggcaccuuuaaugcaggagaauuuucucuccccacuuuugauucauugaacauuacugcugcaucuuuaaaugaugauggauuggauaaccauacuauacugcucuauuacucaacugcugcuucuaguuuggcuguaacauugaugcuagcuauuuuuauuguuuauauggucuccagagacaacguuucaugcuccaucugucuauaa

SEQ ID NO: 58633 - RNA, 1758 nt, Artificial Sequence; identical to SEQ ID NO: 58594
  derived and/or modified CDS sequence (wt) from hemagglutinin__InfluenzaB__AEO80238

SEQ ID NO: 58634 - RNA, 1758 nt, Artificial Sequence
  derived and/or modified CDS sequence (wt) from hemagglutinin__InfluenzaB__AEP20178
augaaggcaauaauuguacuacucaugguaguaacauccaaugcagaucgaaucugcacugggauaacaucgucaaacucaccacauguugucaaaacugcuacucaaggggaggucaaugugacugguguaauaccacugacaacaacacccaccaaaucucauuuuucaaaucucaaaggaacagaaaccagagggaaacuaugcccaaaaugccucaacugcacagaucuggacguggccuugggcagaccaaaaugcacggggaacauacccucggcaagaguuucaauacuccaugaagucagaccuguuacaucugggugcuuuccuauaaugcacgacagaacaaaaauuagacagcugccuaaccuucucagaggauaugaacauaucagguuaucaacucauaacguuaucaaugcagaaaaugcaccaggaggacccuacaaaauuggaaccucagggucuugcccuaacguuaccaauggaaacggauuuuucgcaacaauggcuugggccgucccaaaaaacgacaacaacaaaacagcaacaaauucauuaacaauagaaguaccauacauuuguacagaaggagaagaccaaauuaccguuuggggguuccacucugauaacgagacccaaauggcaaagcucuauggggacucaaagccccagaaguucaccucaucugccaacggagugaccacacauuacguuucacagauugguggcuucccaaaucaaacagaagacggaggacuaccacaaagugguagaauuguuguugauuacauggugcaaaaaucugggaaaacaggaacaauuaccuaucaaagagguauuuuauugccucaaaagguguggugcgcaaguggcaggagcaagguaauaaaaggauccuugccuuuaauuggagaagcagauugccuccacgaaaaauacgguggauuaaacaaaagcaagccuuacuacacaggggaacaugcaaaggccauaggaaauugcccaauaugggugaaaacacccuugaagcuggccaauggaaccaaauauagaccuccugcaaaacuauuaaaggaaagggguuucuucggagcuauugcugguuucuuagaaggaggaugggaaggaaugauugcagguuggcacggauacacaucccauggggcacauggaguagcgguggcagcagaccuuaagagcacucaagaggccauaaacaagauaacaaaaaaucucaacucuuugagugagcuggaaguaaagaaucuucaaagacuaagcggugccauggaugaacuccacaacgaaauacuagaacuagacgagaaaguggaugaucucagagcugauacaauaagcucacaaauagaacucgcaguccugcuuuccaaugaaggaauaauaaacagugaagaugagcaucucuuggcgcuugaaagaaagcugaagaaaaugcugggccccucugcuguagagauagggaauggaugcuuugaaaccaaacacaagugcaaccagaccugucucgacagaauagcugcugguaccuuugaugcaggagaauuuucucuccccaccuuugauucacugaauauuacugcugcaucuuuaaaugacgauggauuggauaaucauacuauacugcuuuacuacucaacugcugccuccaguuuggcuguaacauugaugauagcuaucuuuguuguuuauauggucuccagagacaauguuucuugcuccaucugucuauaa

SEQ ID NO: 58635 - RNA, 1758 nt, Artificial Sequence
  derived and/or modified CDS sequence (wt) from hemagglutinin__InfluenzaB__AEP20189
augaaggcaauaauuguacuacucaugguaguaacauccaaugcagaucgaaucugcacugggauaacaucgucaaacucaccacauguugucaaaacugcuacucaaggggaggucaaugugacugguguaauaccacugacaacaacacccaccaaaucucauuuugcaaaucucaaaggaacagaaaccagagggaaacuaugcccaaaaugccucaacugcacagaucuggacguggccuugggcagaccaaaaugcacggggaacauacccucggcaagaguuucaauacuccaugaagucagaccuguuacaucugggugcuuuccuauaaugcacgacagaacaaaaauuagacagcugccuaaccuucucagaggauacgaacauaucagguuaucaacucauaacguuaucaaugcagaaaaugcaccaggaggacccuacaaaauuggaaccucagggucuugcccuaacguuaccaauggaaacggauuuuucgcaacaauggcuugggccgucccaaaaaacgacaacaacaaaacagcaacaaauucauuaacaauagaaguaccauacauuuguacagaaggagaagaccaaauuaccguuuggggguuccacucugauaacgaaacccaaauggcaaagcucuauggggacucaaagccccagaaguucaccucaucugccaacggagugaccacacauuacguuucacagauugguggcuucccaaaucaaacagaagacggaggacuaccacaaagugguagaauuguuguugauuacauggugcaaaaaucugggaaaacaggaacaauuaccuaucaaagagguauuuuauugccucaaaaaguguggugcgcaaguggcaggagcaagguaauaaaaggauccuugccuuuaauuggagaagcagauugccuccacgaaaaauacgguggauuaaacaaaagcaagccuuacuacacaggggaacaugcaaaggccauaggaaauugcccaauaugggugaaaacacccuugaagcuggccaauggaaccaaauauagaccuccugcaaaacuauuaaaggaaagggguuucuucggagcuauugcugguuucuuagaaggaggaugggaaggaaugauugcagguuggcacggauacacaucccauggggcacauggaguagcgguggcagcagaccuuaaaagcacucaagaggccauaaacaagauaacaaaaaaucucaacucuuugagugagcuggaaguaaagaaucuucaaagacuaagcggugccauggaugaacuccacaacgaaauacuagaacuagacgagaaaguggaugaucucagagcugauacaauaagcucacaaauagaacucgcaguccugcuuuccaaugaaggaauaauaaacagugaagaugagcaucucuuggcgcuugaaagaaagcugaagaaaaugcugggccccucugcuguagagauagggaauggaugcuuugaaaccaaacacaagugcaaccagaccugucucgacagaauagcugcugguaccuuugaugcaggagaauuuucucuccccaccuuugauucacugaauauuacugcugcaucuuuaaaugacgauggauuggauaaucauacuguacugcuuuacuacucaacugcugccuccaguuuggcuguaacauugaugauagcuaucuuuguuguuuauauggucuccagagacaauguuucuugcuccaucugucuauaa

SEQ ID NO: 58636 - RNA, 1758 nt, Artificial Sequence
  derived and/or modified CDS sequence (wt) from hemagglutinin__InfluenzaB__AEP20200
augaaggcaauaauuguacuacucaugguaguaacauccaaugcagaucgaaucugcacugggauaacaucgucaaacucaccacauguugucaaaacugcuacucaaggggaggucaaugugacugguguaauaccacugacaacaacacccaccaaaucucauuuugcaaaucucaaaggaacagaaaccagagggaaacuaugcccaaaaugccucaacugcacagaucuggacguggccuugggcagaccaaaaugcacggggaacauacccucggcaagaguuucaauacuccaugaagucagaccuguuacaucugggugcuuuccuauaaugcacgacagaacaaaaauuagacagcugccuaaccuucucagaggauacgaacauaucagguuaucaacucauaacguuaucaaugcagaaaaugcaccaggaggacccuacaaaauuggaaccucagggucuugcccuaacguuaccaauggaaacggauuuuucgcaacaauggcuugggccgucccaaaaaacgacaacaacaaaacagcaacaaauucauuaacaauagaaguaccauacauuuguacagaaggagaagaccaaauuaccguuuggggguuccacucugauaacgagacccaaauggcaaagcucuauggagacucaaagccccagaaguucaccucaucugccaacggagugaccacacauuacguuucacagauugguggcuucccaaaucaaacagaagacggaggacuaccacaaagugguagaauuguuguugauuacauggugcaaaaaucugggaaaacaggaacaauuaccuaucaaagagguauuuuauugccucaaaagguguggugcgcaaguggcaggagcaagguaauaaaaggauccuugccuuuaauuggagaagcagauugccuccacgaaaaauacgguggauuaaacaaaagcaagccuuacuacacaggggaacaugcaaaggccauaggaaauugcccaauaugggugaaaacacccuugaagcuggccaauggaaccaaauauagaccuccugcaaaacuauuaaaggaaagggguuucuucggagcuauugcugguuucuuagaaggaggaugggaaggaaugauugcagguuggcacggauacacaucccauggggcacauggaguagcgguggcagcagaccuuaagagcacucaagaggccauaaacaagauaacaaaaaaucucaacucuuugagugagcuggaaguaaagaaucuucaaagacuaagcggugccauggaugaacuccacaacgaaauacuagaacuagacgagaaaguggaugaucucagagcugauacaauaagcucacaaauagaacucgcaguccugcuuuccaaugaaggaauaauaaacagugaagaugagcaucucuuggcgcuugaaagaaagcugaagaaaaugcugggccccucugcuguagagauagggaauggaugcuuugaaaccaaacacaagugcaaccagaccugucucgacagaauagcugcugguaccuuugaugcaggagaauuuucucuccccaccuuugauucacugaauauuacugcugcaucuuuaaaugacgauggauuggauaaucauacuauacugcuuuacuacucaacugcugccuccaguuuggcuguaacauugaugauagcuaucuuuguuguuuauauggucuccagagacaauguuucuugcuccaucugucuauaa

SEQ ID NO: 58637 - RNA, 1755 nt, Artificial Sequence
  derived and/or modified CDS sequence (wt) from hemagglutinin__InfluenzaB__AEP20211
augaaggcaauaauuguacuacucaugguaguaacauccaaugcagaucgaaucugcacugggauaacaucgucaaacucaccucauguggucaaaacagcuacucaaggggaggucaaugugacuggugcgauaccccugacaacaacaccaacaaaaucucauuuugcaaaucucaaaggaacaaagaccagagggaaacuaugcccaaccugucucaacugcacagaucuggauguggccuugggcaggccaauguguguggggaucacaccuucggcaaaagcuucaauacuccacgaagucagaccuguuacauccggaugcuuuccuauaaugcacgacagaacaaaaaucagacagcuacccaaucuucucagaggauaugaaaaaaucagauuaucaacccaaaacguuaucaacgcagagaaggcaccaggaggacccuacagacuuggaacuucaggaucuugcccuaacgcuaccaguaaaagcggauuuuucgcaacaauggcuugggcugucccaagggacaacaacaaaacagcaacgaauccacuaacaguagaaguaccacacaucuguacaaaagaagaagaccaaauuacuguuuggggguuccauucugauaacaaaacccaaaugaaaaaccucuauggagacucaaauccucaaaaguucaccucaucugcuaauggaauaaccacacauuauguuucucagauugggggcuucccggaccaaacagaagacggagggcuaccacaaagcggcagaauuguuguugauuacauggugcaaaaaccugggaaaacaggaacaauugucuaucaaagagggauuuuguugccucaaaagguguggugcgcgaguggcaggagcaaaguaauaaaaggguccuugccuuuaauuggugaagcagauugccuucacgaaaaauacgguggauuaaacaaaagcaagccuuacuacacaggagaacaugcaaaagccauagggaauugcccaauaugggugaaaacaccuuugaagcuugccaauggaaccaaauauagaccuccugcaaaacuauuaaaggaaagggguuucuucggagcuauugcugguuucuuagaaggaggaugggaaggaaugauugcagguuggcacggauacacaucucacggagcacauggaguggcaguggcagcagaccuuaagaguacgcaagaagccauaaacaagauaacaaaaaaucucaauucuuugagugagcuagaaguaaagaaccuucaaagacuaaguggugccauggaugaacuccauaacgaaauacucgagcuggaugagaaaguggaugaucucagagcugacacaauaaguucacaaauagaacuugcagucuugcuuuccaacgaaggaauaauaaacagugaagaugagcaucuauuggcacuugagagaaaacuaaagaaaaugcugggucccucugcuguagacauagggaauggaugcuucgaaaccaaacacaagugcaaccagaccugcuuagacaggauagcugcuggcaccuuuaaugcaggagaauuuucucuucccacuuuugauucacugaacauuacugcugcaucuuuaaaugaugauggauuggauaaccauacuauacugcucuacuacucaacugcugcuucuaguuuggcuguaacauugaugauagcuauuuuuauuguuuauaugaucuccagagacaauguuucuugcuccaucugucuauaa

SEQ ID NO: 58638 - RNA, 1755 nt, Artificial Sequence
  derived and/or modified CDS sequence (wt) from hemagglutinin__InfluenzaB__AEP20222
augaaggcaauaauuguacuacucaugguaguaacauccaaugcagaucgaaucugcacugggauaacaucgucaaacucaccucauguggucaaaacagcuacucaaggggaggucaaugugacuggugcgauaccacugacaacaacaccaacaaaaucucauuuugcaaaucucaaaggaacaaagaccagagggaaacuaugcccaaccuguuucaacugcaccgaucuggauguggccuugggcagaccaauguguguggggaucacgccuucggcaaaagcuucaauacuccacgaagucagaccuguuacauccggaugcuuuccuauaaugcacgacagaacaaaaaucagacagcuacccaaucuucucagaggauaugaaaaaaucagauuaucaacccaaaacguuaucgacgcagaaaaggcaccaggaggacccuacagacuuggaacuucaggaucuugcccuaacgcuaccaguaaaagcggauuuuucgcaacaauggcuugggcugucccaagggacaacaacaaaacagcaacgaauccacuaacaguagaaguaccaaacaucuguacaaaagaagaagaccaaauuacuguuuggggguuccauucugauaacaaaacccaaaugaaaaaccucuauggagacccaaauccucaaaaguucaccucaucugcuaauggaauaaccacacauuauguuucucagauugggggcuucccggaccaaacagaagacggagggcuaccacaaagcggcagaauuguuguugauuacauggugcaaaaaccugggaaaacaggaacaauugucuaucaaagagggauuuuguugccucaaaagguguggugcgcgaguggcaggagcaaaguaauaaaaggguccuugccuuuaauuggugaagcugauugccuucacgaaaaauacgguggauuaaacaaaagcaagccuuacuacacaggagaacaugcaaaagccauagggaauugcccaauaugggugaaaacaccuuugaagcuugccaauggaaccaaauauagaccuccugcaaaacuauuaaaggaaagggguuucuuuggagcuauugcugguuucuuagaaggaggaugggaaggaaugauugcagguuggcacggauacacaucucacggagcacacggaguggcaguggcagcagaccuuaagagcacgcaagaagccauaaacaagauaacaaaaaaucucaauucuuugagugagcuagaaguaaagaaccuucaaagacuaaguggugccauggaugaacuccauaacgaaauacucgagcuggaugagaaaguggaugaucucagagcugacacaauaaguucacaaauagaacuugcagucuugcuuuccaaugaaggaauaauaaacagugaagaugagcaucuauuggcacuugagagaaaacuaaagaaaaugcugggucccucugcuguagacauagggaauggaugcuucgaaaccaaacacaagugcaaccagaccugcuuagacaggauagcugcuggcaccuuuaaugcaggagaauuuucucuucccacuuuugauucacugaacauuacugcugcaucuuuaaaugaugauggauuggauaaccauacuauacugcucuacuacucaacugcugcuucuaguuuggcuguaacauugaugauagcuauuuuuauuguuuauaugaucuccagagacaauguuucuugcuccaucugucuauaa

SEQ ID NO: 58639 - RNA, 1755 nt, Artificial Sequence
  derived and/or modified CDS sequence (wt) from hemagglutinin__InfluenzaB__AEP20233
augaaggcaauaauuguacuacucaugguaguaacauccaaugcagaucgaaucugcacugggauaacaucgucaaacucaccucauguggucaaaacagcuacucaaggggaggucaaugugacuggugcgauaccacugacaacaacaccaacaaaaucucauuuugcaaaucucaaaggaacaaagaccagagggaaacuaugcccaaccuguuucaacugcaccgaucuggauguggccuugggcagaccaauguguguggggaucacaccuucggcaaaagcuucaauacuccacgaagucagaccuguuacauccggaugcuuuccuauaaugcacgacagaacaaaaaucagacagcuacccaaucuucucagaggauaugaaaaaaucagauuaucaacccaaaacguuaucgacgcagaaaaggcaccaggaggacccuacagacuuggaacuucaggaucuugcccuaacgcuaccaguaaaagcggauuuuucgcaacaauggcuugggcugucccaagggacaacaacaaaacagcaacgaauccacuaacaguagaaguaccacacaucuguacaaaagaagaagaccaaauuacuguuuggggguuccauucugauaacaaaacccaaaugaaaaaccucuauggagacucaaauccucaaaaguucaccucaucugcuaauggaauaaccacacauuauguuucucagauugggggcuucccggaccaaacagaagacggagggcuaccacaaagcggcagaauuguuguugauuacauggugcaaaaaccugggaaaacaggaacaauugucuaucaaagagggauuuuguugccucaaaagguguggugcgcgaguggcaggagcaaaguaauaaaaggguccuugccuuuaauuggugaagcugauugccuucacgaaaaauacgguggauuaaacaaaagcaagccuuacuacacaggagaacaugcaaaagccauagggaauugcccaauaugggugaaaacaccuuugaagcuugccaauggaaccaaauauagaccuccugcaaaacuauuaaaggaaagggguuucuuuggagcuauugcugguuucuuagaaggaggaugggaaggaaugauugcagguuggcacggauacacaucucacggagcacacggaguggcaguggcagcagaccuuaagaguacgcaagaagccauaaacaagauaacaaaaaaucucaauucuuugagugagcuagaaguaaagaaccuucaaagacuaaguggugccauggaugaacuccauaacgaaauacucgagcuggaugagaaaguggaugaucucagagcugacacaauaaguucacaaauagaacuugcagucuugcuuuccaaugaaggaauaauaaacagugaagaugagcaucuauuggcacuugagagaaaacuaaagaaaaugcugggucccucugcuguagacauagggaauggaugcuucgaaaccaaacacaagugcaaccagaccugcuuagacaggauagcugcuggcaccuuuaaugcaggagaauuuucucuucccacuuuugauucacugaacauuacugcugcaucuuuaaaugaugauggauuggauaaccauacuauacugcucuacuacucaacugcugcuucuaguuuggcuguaacauuaaugauagcuauuuuuauuguuuauaugaucuccagagacaauguuucuugcuccaucugucuauaa

SEQ ID NO: 58640 - RNA, 1755 nt, Artificial Sequence
  derived and/or modified CDS sequence (wt) from hemagglutinin__InfluenzaB__AEP20244
augaaggcaauaauuguacuacucaugguaguaacauccaaugcagaucgaaucugcacugggauaacaucgucaaacucaccucauguggucaaaacagcuacucaaggggaggucaaugugacuggugcgauaccacugacaacaacaccaacaaaaucucauuuugcaaaucucaaaggaacaaaaaccagagggaaacuaugcccaaccuguuucaacugcaccgaucuggauguggccuugggcagaccaauguguauggggaucacaccuucggcaaaagcuucaauacuccacgaagucagaccuguuacaucaggaugcuuuccuauaaugcacgacagaacaaaaaucagacagcuacccaaucuucucagaggauaugaaaaaaucagauuaucaacccaaaacguuaucgacgcagaaaaggcaccaggaggacccuacagacuuggaacuucaggaucuugcccuaacgcuaccaguaaaagcggauuuuucgcaacaauggcuugggcugucccaaggggcaacaacaaaacagcaacgaauccacuaacaguagaaguaccacacaucuguacaaaagaagaagaccaaauuacuguuuggggguuccauucugauaacaaaacccaaaugaaaaaccucuauggagacucaaauccucaaaaguucaccucaucugcuaauggaauaaccacacauuauguuucucagauugggggcuucccggaccaaacagaagacggagggcuaccacaaagcggcagaauuguuguugauuacauggugcaaaaaccugggaaaacaggaacaauugucuaucaaagagggauuuuguugccucaaaagguguggugcgcgaguggcaggagcaaaguaauaaaaggguccuugccuuuaauuggugaagcugauugccuucacgaaaaauacgguggauuaaacaaaagcaagccuuacuacacaggagaacaugcaaaagccauagggaauugcccaauaugggugaaaacaccuuugaagcuugccaauggaaccaaauauagaccuccugcaaaacuauuaaaggaaagggguuucuuuggagcuauugcugguuucuuagaaggaggaugggaaggaaugauugcagguuggcacggauacacaucucacggagcacacggaguggcaguggcagcagaccuuaagaguacgcaagaagccauaaacaagauaacaaaaaaucucaauucuuugagugagcuagaaguaaagaaccuucaaagacuaaguggugccauggaugaacuccauaacgaaauacucgagcuggaugagaaaguggaugaucucagagcugacacaauaaguucacaaauagaacuugcagucuugcuuuccaaugaaggaauaauaaacagugaagaugagcaucuauuggcacuugagagaaaacuaaagaaaaugcugggucccucugcuguagacauagggaauggaugcuucgaaaccaaacacaagugcaaccagaccugcuuagacaggauagcugcuggcaccuuuaaugcaggagaauuuucucuucccacuuuugauucacugaacauuacugcugcaucuuuaaaugaugauggauuggauaaccauacuauacugcucuacuacucaacugcugcuucuaguuuggcuguaacauugaugauagcuauuuuuauuguuuauaugaucuccagagacaauguuucuugcucuaucugucuauaa

SEQ ID NO: 58641 - RNA, 1758 nt, Artificial Sequence
  derived and/or modified CDS sequence (wt) from hemagglutinin__InfluenzaB__AEP20255
augaaggcaauaauuguacuacucaugguaguaacauccaaugcagaucgaaucugcacugggauaacaucgucaaacucaccccauguggucaaaacugcuacucaaggggaggucaaugugacuggugugauaccacugacaacaacacccaccaaaucucauuuugcaaaucucaaaggaacaaaaaccagagggaaacuaugcccaaaaugccucaacugcacagaucuggacguggccuugggcagaccaaaaugcacggggaacauacccucggcagaaguuucaauacuccaugaagucagaccuguuacaucugggugcuuuccuauaaugcacgacagaacaaaaauuagacagcugcccaaccuucucagaggauacgaacauaucagguuaucaacucauaacguuaucaaugcagaaaaggcaccaggaggacccuacaaaauuggaaccucagggucuugcccuaacguuaccaauggaaacggauuuuucgcaacaauggcuugggccgucccaaaaaacgacaacaacaaaacagcaacaaauucauuaacaauagaaguaccauacauuuguacagaaggagaagaccaaauuaccguuuggggguuccacucugauaacgaaacccaaauggcaaaacucuauggggacucaaagccccagaaguucaccucaucugccaacggagugaccacacauuacguuucacagauugguggcuucccaaaucaaacagaagacggaggacuaccacaaagugguagaauuguuguugauuacauggugcaaaaaucugggaaaacaggaacaauuaccuaucaaagagguauuuuauugccucaaaaaguguggugcgcaaguggcaggagcaagguaauaaaaggaucuuugccuuuaauuggagaagcagauugccuccacgaaaaauacgguggauuaaacaaaagcaagccuuacuacacaggggaacaugcaaaggccauaggaaauugcccaauaugggugaaaacacccuugaagcuggccaauggaaccaaauauagaccuccugcaaaacuauuaaaggaaagggguuucuucggagcuauugcugguuuccuagaaggaggaugggaaggaaugauugcagguuggcacggauacacaucccauggggcacauggaguagcaguggcagcagaccuuaagagcacucaagaagccauaaacaagauaacaaaaaaucucaacucuuugagugagcuggaaguaaagaaucuucaaagacuaagcggugccauggaugaacuccacaacgaaauacuagaacuagacgagaaaguggaugaucucagagcugauacaauaagcucacaaauagaacucgcaguccugcuuuccaaugaaggaauaauaaacagugaagaugagcaucucuuggcgcuugaaagaaagcugaagaaaaugcugggccccucugcuguagagauagggaauggaugcuucgaaaccaaacacaagugcaaccagaccugucucgacagaauagcugcugguaccuuugaugcaggagaauuuucucuccccacuuuugauucacugaauauuacugcugcaucuuuaaaugacgauggauuggauaaucauacuauacugcuuuacuacucaacugcugccuccaguuuggcuguaacauugaugauagcuaucuuuguuguuuauauggucuccagagacaauguuucuugcuccaucugucuauaa

SEQ ID NO: 58642 - RNA, 1758 nt, Artificial Sequence
  derived and/or modified CDS sequence (wt) from hemagglutinin__InfluenzaB__AEP20277
augaaggcaauaauuguacuacucaugguaguaacauccaaugcagaucgaaucugcacugggauaacaucgucaaacucaccccauguggucaaaacugcuacucaaggggaggucaaugugacuggugugauaccacugacaacaacacccaccaaaucucauuuugcaaaucucaaaggaacaaaaaccagagggaaacuaugcccaaaaugccucaacugcacagaucuggacguggccuugggcagaccaaaaugcacggggaacauacccucggcagaaguuucaauacuccaugaagucagaccuguuacaucugggugcuuuccuauaaugcacgacagaacaaaaauuagacagcugcccaaccuucucagaggauacgaacauaucagguuaucaacucauaacguuaucaaugcagaaaaggcaccaggaggacccuacaaaauuggaaccucagggucuugcccuaacguuaccaauggaaacggauuuuucgcaacaauggcuugggccgucccaaaaaacgacaacaacaaaacagcaacaaauucauuaacaauagaaguaccauacauuuguacagaaggagaagaccaaauuaccguuuggggguuccacucugauaacgaaacccaaauggcaaaacucuauggggacucaaagccccagaaguucaccucaucugccaacggagugaccacacauuacguuucacagauugguggcuucccaaaucaaacagaagacggaggacuaccacaaagugguagaauuguuguugauuacauggugcaaaaaucugggaaaacaggaacaauuaccuaucaaagagguauuuuauugccucaaaaaguguggugcgcaaguggcaggagcaagguaauaaaaggauccuugccuuuaauuggagaagcagauugccuccacgaaaaauacgguggauuaaacaaaagcaagccuuacuacacaggggaacaugcaaaggccauaggaaauugcccaauaugggugaaaacacccuugaagcuggccaauggaaccaaauauagaccuccugcaaaacuauuaaaggaaagggguuucuucggagcuauugcugguuucuuagaaggaggaugggaaggaaugauugcagguuggcacggauacacaucccauggggcacauggaguagcaguggcagcagaccuuaagagcacucaagaagccauaaacaagauaacaaaaaaucucaacucuuugagugagcuggaaguaaagaaucuucaaagacuaagcggugccauggaugaacuccacaacgaaauacuagaacuagacgagaaaguggaugaucucagagcugauacaauaagcucacaaauagaacucgcaguccugcuuuccaaugaaggaauaauaaacagugaagaugagcaucucuuggcgcuugaaagaaagcugaagaaaaugcugggccccucugcuguagagauagggaauggaugcuucgaaaccaaacacaagugcaaccagaccugucucgacaaaauagcugcugguaccuuugaugcaggagaauuuucucuccccacuuuugauucacugaauauuacugcugcaucuuuaaaugacgauggauuggauaaucauacuauacugcuuuacuacucaacugcugccuccaguuuggcuguaacauugaugauagcuaucuuuguuguuuauauggucuccagagacaauguuucuugcuccaucugucuauaa

SEQ ID NO: 58643 - RNA, 1755 nt, Artificial Sequence
  derived and/or modified CDS sequence (wt) from hemagglutinin__InfluenzaB__AEP20299
augaaggcaauaauuguacuacucaugguaguaacauccaaugcagaucgaaucugcacugggauaacaucuucaaacucaccucauguggucaaaacagcuacucaaggggaggucaaugugacuggugugauaccacugacaacaacaccaacaaaaucuuauuuugcaaaucucaaaggaacaaggaccagagggaaacuaugcccagacugucucaacuguacagaucuggauguggccuugggcaggccaauguguguggggaccacaccuucugcgaaagcuucaauacuccacgaagucagaccuguuacauccgggugcuuuccuauaaugcacgacagaacaaaaaucaggcaacuagccaaucuucucagaggauaugaaaauaucagguuaucaacccaaaacguuaucgaugcagaaaaggcaccaggaggacccuacagacuuggaaccucaggaucuugcccuaacgcuaccaguaaaagcggauuuuucgcaacaauggcuugggcugucccaaagaacaacaacaaaaaugcaacgaacccacuaacaguagaaguaccauacauuuguacagaaggggaagaccaaauuacuguuuggggguuccauucagauaacaaaacccaaaugaagaaccucuauggagacucaaauccucaaaaguucaccucaucugcuaauggaguaaccacacauuauguuucucagauuggcggcuucccagaucaaacagaagacggaggacuaccacaaagcggcagaauuguuguugauuacaugaugcaaaaaccugggaaaacaggaacaauugucuaucaaagagguguuuuguugccucaaaagguguggugcgcgaguggcaggagcaaaguaauaaaaggguccuugccuuuaauuggugaagcagauugccuucaugaaaaauacgguggauuaaacaaaagcaagccuuacuacacaggagaacaugcaaaagccauaggaaauugcccaauaugggugaaaacaccuuugaagcuugccaauggaaccaaauauagaccuccugcaaaacuauuaaaggaaagggguuucuucggagcuauugcugguuuccuagaaggaggaugggaaggaaugauugcagguuggcacggauacacaucucacggagcacauggaguggcaguggcggcagaccuuaagaguacacaagaagcuauaaacaagauaacaaaaaaucucaauucuuugagugagcuagaaguaaagaaucuucaaagacuaaguggugccauggaugaacuccacaacgaaauacucgagcuggaugagaaaguggaugaucucagagcugacacuauaagcucacaaauagaacuugcagucuugcuuuccaacgaaggaauaauaaacagugaagacgagcaucuauuggcacuugagagaaaacuaaagaaaaugcugggucccucugcuguagacauaggaaauggaugcuucgaaaccaaacacaaaugcaaccagaccugcuuagacaggauagcugcuggcaccuuuaaugcaggagaauuuucucuccccacuuuugauucauugaacauuacugcugcaucuuuaaaugaugauggauuggauaaccauacuauacugcucuauuacucaacugcugcuucuaguuuggcuguaacauugaugcuagcuauuuuuauuguuuauauggucuccagagacaacguuucaugcuccaucugucuauaa

SEQ ID NO: 58644 - RNA, 1755 nt, Artificial Sequence
  derived and/or modified CDS sequence (wt) from hemagglutinin__InfluenzaB__AEP20310
augaaggcaauaauuguacuacucaugguaguaacauccaaugcagaucgaaucugcacugggauaacaucuucaaacucaccucauguggucaaaacagcuacucaaggggaggucaaugugacuggugugauaccacugacaacaacaccaacaaaaucuuauuuugcaaaucucaaaggaacaaggaccagagggaaacuaugcccagacugucucaacuguacagaucuggauguggcuuugggcagaccaauguguguggggaccacaccuucugcgaaagcuucaauacuccacgaagucagacccguuacauccgggugcuuuccuauaaugcacgacagaacaaaaaucaggcaacuacccaaucuucucagaggauaugaaaauaucagguuaucaacccaaaauguuaucgaugcagaaaaggcaccaggaggacccuacagacuuggaaccucaggaucuugcccuaacgcuaccaguaaaagcggauuuuucgcaacaauggcuugggcugucccaaaggacaacaacaaaaaugcaacgaacccacuaacaguagaaguaccauacauuuguacagaaggggaagaccaaauuacuguuuggggguuccauucagauaacaaaacccaaaugaagaaccucuauggagacucaaauccucaaaaguucaccucaucugcuaauggaguaaccgcacauuauguuucucagauuggcggcuucccagaucaaacagaagacggaggacuaccacaaagcggcagaauuguuguugauuacaugaugcaaaaaccugggaaaacaggaacaauugucuaucaaagagguguuuuguugccucaaaagguguggugcgcgaguggcaggagcaaaguaauaaaaggguccuugccuuuaauuggugaagcagauugccuucaugaaaaauacgguggauuaaacaaaagcaagccuuacuacacaggagaacaugcaaaagccauaggaaauugcccaauaugggugaaaacaccuuugaagcucgccaauggaaccaaauauagaccuccugcaaaacuauuaaaggaaagggguuucuucggagcuauugcugguuuccuagaaggaggaugggaaggaaugauugcagguuggcacggauacacaucucacggagcacauggaguggcaguggcggcagaccuuaagagcacacaagaagcuauaaacaagauaacaaaaaaucucaauucuuugagugagcuagaaguaaagaaucuucaaagacuaaguggugccauggaugaacuccacaacgaaauacucgagcuggaugagaaaguggaugaucucagagcugacacuauaagcucacaaauagaacuugcagucuugcuuucaaacgaaggaauaauaaacagugaagacgagcaucuauuggcacuugagagaaaacuaaagaaaaugcugggucccucugcuguagacauaggaaauggaugcuucgaaaccaaacacaagugcaaccagaccugcuuagacaggauagcugcuggcaccuuuaaugcaggagaauuuucucuccccacuuuugauucauugaacauuacugcugcaucuuuaaaugaugauggauuggauaaccauacuauacugcucuauuacucaacugcugcuucuaguuuggcuguaacauugaugcuagcuauuuucauuguuuauauggucuccagagacaacguuucaugcuccaucugucuauaa

SEQ ID NO: 58645 - RNA, 1758 nt, Artificial Sequence
  derived and/or modified CDS sequence (wt) from hemagglutinin__InfluenzaB__AEP20332
augaaggcaauaauuguacuacucaugguaguaacauccaaugcagaucgaaucugcacugggauaacaucgucaaacucaccccauguggucaaaacugcuacucaaggggaggucaaugugacuggugugauaccacugacaacaacacccaccaaaucucauuuugcaaaucucaaaggaacaaaaaccagagggaaacuaugcccaaaaugccucaacugcacagaucuggacguggccuugggcagaccaaaaugcacggggaacauacccucagcagaaguuucaauacuccaugaagucagaccuguuacaucugggugcuuuccuauaaugcacgacagaacaaaaauuagacagcugcccaaccuucucagaggauacgaacauaucagguuaucaacucauaacguuaucaaugcagaaaaggcaccaggaggacccuacaaaauuggaaccucagggucuugcccuaacguuaccaauggaaacggauuuuucgcaacaauggcuugggccgucccaaaaaacgacaacaacaaaacagcaacaaauccauuaacaauagaaguaccauacauuuguacagaaggagaagaccaaauuaccguuuggggguuccacucugauaacgaaacccaaauggcaaaacucuauggggacucaaagccccagaaguucaccucaucugccaacggagugaccacacauuacguuucacagauugguggcuucccaaaucaaacagaagacggaggacuaccacaaagugguagaauuguuguugauuacauggugcaaaaaucugggaaaacaggaacaauuaccuaucaaagagguauuuuauugccucaaaaaguguggugcgcaaguggcaggagcaagguaauaaaaggauccuugccuuuaauuggagaagcagauugccuccacgaaaaauacgguggauuaaacaaaagcaagccuuacuacacaggggaacaugcaaaggccauaggaaauugcccaauaugggugaaaacacccuugaagcuggccaauggaaccaaauauagaccuccugcaaaacuauuaaaggaaagggguuucuucggagcuauugcugguuucuuagaaggaggaugggaaggaaugauugcagguuggcacggauacacaucccauggggcacauggaguagcaguggcagcagaccuuaagagcacucaagaagccauaaacaagauaacaaaaaaucucaacucuuugagugagcuggaaguaaagaaucuucaaagacuaagcggugccauggaugaacuccacaacgaaauacuagaacuagacgagaaaguggaugaucucagagcugauacaauaagcucacaaauagaacucgcaguccugcuuuccaaugaaggaauaauaaacagugaagaugagcaucucuuggcgcuugaaagaaagcugaagaaaaugcugggccccucugcuguagagauagggaauggaugcuucgaaaccaaacacaagugcaaccagaccugucucgacagaauagcugcugguaccuuugaugcaggagaauuuucucuccccacuuuugauucacugaauauuacugcugcaucuuuaaaugacgauggauuggauaaucauacuauacugcuuuacuacucaacugcugccuccaguuuggcuguaacauugaugauagcuaucuuuguuguuuauauggucuccagagacaauguuucuugcuccaucugucuauaa

SEQ ID NO: 58646 - RNA, 1755 nt, Artificial Sequence; identical to SEQ ID NO: 58625
  derived and/or modified CDS sequence (wt) from hemagglutinin__InfluenzaB__AEP20343

SEQ ID NO: 58647 - RNA, 1755 nt, Artificial Sequence; identical to SEQ ID NO: 58625
  derived and/or modified CDS sequence (wt) from hemagglutinin__InfluenzaB__AEP20354

SEQ ID NO: 58648 - RNA, 1755 nt, Artificial Sequence; identical to SEQ ID NO: 58625
  derived and/or modified CDS sequence (wt) from hemagglutinin__InfluenzaB__AEP20365

SEQ ID NO: 58649 - RNA, 1755 nt, Artificial Sequence; identical to SEQ ID NO: 58625
  derived and/or modified CDS sequence (wt) from hemagglutinin__InfluenzaB__AEP20376

SEQ ID NO: 58650 - RNA, 1758 nt, Artificial Sequence
  derived and/or modified CDS sequence (wt) from hemagglutinin__InfluenzaB__AEP20398
augaaggcaauaauuguacuacucaugguaguaacauccaaugcagaucgaaucugcacugggauaacaucgucaaacucaccccauguggucaaaacugcuacucaaggggaggucaaugugacuggugugauaccacugacaacaacacccaccaaaucucauuuugcaaaucucaaaggaacaaaaaccagagggaaacuaugcccaaaaugccucaacugcacagaucuggacguggccuugggcagaccaaaaugcacggggaacauacccucggcagaaguuucaauacuccaugaagucagaccuguuaccucugggugcuuuccuauaaugcacgacagaacaaaaauuagacagcugcccaaccuucucagaggauacgaacauaucagauuaucaacucauaacguuaucaaugcagaaaaggcaccaggaggacccuacaaaauuggaaccucagggucuugcccuaauguuaccaauggaaacggauuuuucgcaacaauggcuugggccgucccaaaaaacgacaacaacaaaacagcaacaaauucauuaacaauagaaguaccauacauuuguacagaaggagaagaccaaauuaccauuuggggguuccacucugauaacgaaacccaaauggcaaaacucuauggggacucaaagccccagaaguucaccucaucugccaacggagugaccacacauuacguuucacagauugguggcuucccaaaucaaacagaagacggaggacuaccacaaagugguagaauuguuguugauuacauggugcaaaaaucugggaaaacaggaacaauuaccuaucaaagagguauuuuauugccucaaaaaguguggugcgcaaguggcaggagcaagguaauaaaaggauccuugcccuuaauuggagaagcagauugccuccacgaaaaauacgguggauuaaacaaaagcaagccuuacuacacaggggaacaugcaaaggccauaggaaauugcccaauaugggugaaaacacccuugaagcuggccaauggaaccaaauauagaccuccugcaaaacuauuaaaggaaagggguuucuucggagcuauugcugguuucuuagaaggaggaugggaaggaaugauugcagguuggcacggguacacaucccauggggcacauggaguagcaguggcagcagaccuuaagagcacucaagaagccauaaacaagauaacaaaaaaucucaacucuuugagugagcuggaaguaaagaaucuucaaagacuaagcggugccauggaugaacuccacaacgaaauacuagaacuagacgagaaaguggaugaucucagagcugauacaauaagcucacaaauagaacucgcaguccugcuuuccaaugaaggaauaauaaacagugaagaugagcaucucuuggcgcuugaaagaaagcugaagaaaaugcugggccccucugcuguagagauagggaauggaugcuucgaaaccaaacacaagugcaaccagaccugucuugacagaauagcugcugguaccuuugaugcaggagaauuuucucuccccacuuuugauucacugaauauuacugcugcaucuuuaaaugacgauggauuggauaaucauacuauacugcuuuacuacucaacugcugccuccaguuuggcuguaacauugaugauagcuaucuuuguuguuuauauggucuccagagacaauguuucuugcuccaucugucuauaa

SEQ ID NO: 58651 - RNA, 1758 nt, Artificial Sequence
  derived and/or modified CDS sequence (wt) from hemagglutinin__InfluenzaB__AEP20409
augaaggcaauaauuguacuacucaugguaguaacauccaaugcagaucgaaucugcacugggauaacaucgucaaacucaccacaugucgucaaaacugcuacucaaggggaggucaaugugacugguguaauaccacugacaacaacacccaccaaaucucauuuugcaaaucucaaaggaacagaaaccagagggaaacuaugcccaaaaugccccaacugcacagaucuggacguagccuugggcagaccaaaaugcacggggaaaauacccucggcaagaguuucaauacuccaugaagucagaccuguuacaucugggugcuuuccuauaaugcacgacagaacaaaaauuagacagcugccuaaccuucuccgaggauacgaacauaucagauuaucaacucauaacguuaucaaugcagaaaaugcaccaggaggacccuacaaaauuggaaccucagggucuugcccuaacguuaccaauggaaacggauuuuucgcaacaauggcuugggccgucccaaaaaacgacaaaaacaaaacagcaacaaauccauuaacaauagaaguaccauacauuuguacagaaggagaagaccaaauuaccguuuggggguuccacucugauaacgagacccaaauggcaaagcucuauggggacucaaagccccagaaguucaccucaucugccaacggagugaccacacauuacguuucacagauugguggcuucccaaaucaaacagaagacggaggacuaccacaaagugguagaauuguuguugauuacauggugcaaaaaucugggaaaacaggaacaauuaccuaucaaagagguauuuuauugccucaaaagguguggugcgcaaguggcaggagcaagguaauaaaaggauccuugccuuuaauuggagaagcagauugccuccacgaaaaauacgguggauuaaacaaaagcaagccuuacuacacaggggaacaugcaaaggccauaggaaauugcccaauaugggugaagacacccuugaagcuggccaauggaaccaaauauagaccuccugcaaaacuauuaaaggaaagggguuucuucggagcuauugcugguuucuuagaaggaggaugggaaggaaugauugcagguuggcacggauacacgucccauggggcacauggaguagcgguggcagcagaccuuaagagcacucaagaggccauaaacaagauaacaaaaaaucucaacucuuugagugagcuggaaguaaagaaucuucaaagacuaagcggugccauggaugaacuccacaacgaaauacuagaacuagacgagaaaguggaugaucucagagcugauacaauaagcucacaaauagaacucgcaguccugcuuuccaaugaaggaauaauaaacagugaagaugaacaucucuuggcacuugaaagaaagcugaagaaaaugcugggcccuucugcuguagagauagggaauggaugcuuugaaaccaaacacaagugcaaccagaccugucucgacagaauagcugcugguaccuuugaugcaggagaauuuucucuccccaccuuugauucacugaauauuacugcugcaucuuuaaaugacgauggauuggauaaucauaccauacugcuuuacuacucaacugcugccuccaguuuggcuguaacacugaugauagcuaucuuuguuguuuauauggucuccagagacaauguuucuugcuccaucugucuauaa

SEQ ID NO: 58652 - RNA, 1758 nt, Artificial Sequence
  derived and/or modified CDS sequence (wt) from hemagglutinin__InfluenzaB__AEP20420
augaaggcaauaauuguacuacucaugguaguaacauccaaugcagaucgaaucugcacugggauaacaucgucaaacucaccacaugucgucaaaacugcuacucaaggggaggucaaugugacugguguaauaccacugacaacaacacccaccaaaucucauuuugcaaaucucaaaggaacagaaaccagagggaaacuaugcccaaaaugccccaacugcacagaucuggacguagccuugggcagaccaaaaugcacggggaaaauacccucggcaagaguuucaauacuccaugaagucagaccuguuacaucugggugcuuuccuauaaugcacgacagaacaaaaauuagacagcugccuaaccuucuccgaggauacgaacauaucagauuaucaacucauaacguuaucaaugcagaaaaugcaccaggaggacccuacaaaauuggaaccucagggucuugcccuaacguuaccaauggaaacggauuuuucgcaacaauggcuugggccgucccaaaaaacgacaaaaacaaaacagcaacaaauccauuaacaauagaaguaccauacauuuguacagaaggagaagaccaaauuaccguuuggggguuccacucugauaacgagacccaaauggcaaagcucuauggggacucaaagccccagaaguucaccucaucugccaacggagugaccacacauuacguuucacagauugguggcuucccaaaucaaacagaagacggaggacuaccacaaagugguagaauuguuguugauuacauggugcaaaaaucugggaaaacaggaacaauuaccuaucaaagagguauuuuauugccucaaaagguguggugcgcaaguggcaggagcaagguaauaaaaggauccuugccuuuaauuggagaagcagauugccuccacgaaaaauacgguggauuaaacaaaagcaagccuuacuacacaggggaacaugcaaaggccauaggaaauugcccaauaugggugaagacacccuugaagcuggccaauggaaccaaauauagaccuccugcaaaacuauuaaaggaaagggguuucuucggagcuauugcugguuucuuagaaggaggaugggaaggaaugauugcagguuggcacggauacacgucccauggggcacauggaguagcgguggcagcagaccuuaagagcacucaagaggccauaaacaagauaacaaaaaaucucaacucuuugagugagcuggaaguaaagaaucuucaaagacuaaguggugccauggaugaacuccacaacgaaauacuagaacuagacgagaaaguggaugaucucagagcugauacaauaagcucacaaauagaacucgcaguccugcuuuccaaugaaggaauaauaaacagugaagaugaacaucucuuggcacuugaaagaaagcugaagaaaaugcugggcccuucugcuguagagauagggaauggaugcuuugaaaccaaacacaagugcaaccagaccugucucgacagaauagcugcugguaccuuugaugcaggagaauuuucucuccccaccuuugauucacugaauauuacugcugcaucuuuaaaugacgauggauuggauaaucauaccauacugcuuuacuacucaacugcugccuccaguuuggcuguaacacugaugauagcuaucuuuguuguuuauauggucuccagagacaauguuucuugcuccaucugucuauaa

SEQ ID NO: 58653 - RNA, 1758 nt, Artificial Sequence; identical to SEQ ID NO: 58651
  derived and/or modified CDS sequence (wt) from hemagglutinin__InfluenzaB__AEP20431

SEQ ID NO: 58654 - RNA, 1758 nt, Artificial Sequence
  derived and/or modified CDS sequence (wt) from hemagglutinin__InfluenzaB__AEP20442
augaaggcaauaauuguacuacucaugguaguaacauccaaugcagaucgaaucugcacugggauaacaucgucaaacucaccacaugucgucaaaacugcuacucaaggggaggucaaugugacugguguaauaccacugacaacaacacccaccaaaucucauuuugcaaaucucaaaggaacagaaaccagagggaaacuaugcccaaaaugccccaacugcacagaucuggacguagccuugggcagaccaaaaugcacggggaaaauacccucggcaagaguuucaauacuccaugaagucagaccuguuacaucugggugcuuuccuauaaugcacgacagaacaaaaauuagacagcugccuaaccuucuccgaggauacgaacauaucagauuaucaacucauaacguuaucaaugcagaaaaugcaccaggaggacccuacaaaauuggaaccucagggucuugcccuaacguuaccaauggaaacggauuuuucgcaacaauggcuugggccgucccaaaaaacgacaaaaacaaaacagcaacaaauccauuaacaauagaaguaccauacauuuguacagaaggagaagaccaaauuaccguuuggggguuccacucugauaacgagacccaaauggcaaagcucuauggggacucaaagccccagaaguucaccucaucugccaacggagugaccacacauuacguuucacagauugguggcuucccaaaucaaacagaagacggaggacuaccacaaagugguagaauuguuguugauuacauggugcaaaaaucugggaaaacaggaacaauuaccuaucaaagagguauuuuauugccucaaaagguguggugcgcaaguggcaggagcaagguaauaaaaggauccuugccuuuaauuggagaagcagauugccuccacgaaaaauacgguggauuaaacaaaagcaagccuuacuacacaggggaacaugcaaaggccauaggaaauugcccaauaugggugaagacacccuugaagcuggccaauggaaccaaauauagaccuccugcaaaacuauuaaaggaaagggguuucuucggagcuauugcugguuucuuagaaggaggaugggaaggaaugauugcagguuggcacggauacacgucccauggggcacauggaguagcgguggcagcagaccuuaagagcacucaagaggccauaaacaagauaacaaaaaaucucaacucuuugagugagcuggaaguaaagaaucuucaaagacuaagcggugccauggaugaacuccacaacgaaauacuagaacuagacgagaaaguggaugaucucagagcugauacaauaagcucacaaauagaacucgcaguccugcuuuccaaugaaggaauaauaaacagugaagaugaacaucucuuggcgcuugaaagaaagcugaagaaaaugcugggcccuucugcuguagagauagggaauggaugcuuugaaaccaaacacaagugcaaccagaccugucucgacagaauagcugcugguaccuuugaugcaggagaauuuucucuccccaccuuugauucacugaauauuacugcugcaucuuuaaaugacgauggauuggauaaucauaccauacugcuuuacuacucaacugcugccuccaguuuggcuguaacacugaugauagcuaucuuuguuguuuauauggucuccagagacaauguuucuugcuccaucugucuauaa

SEQ ID NO: 58655 - RNA, 1758 nt, Artificial Sequence
  derived and/or modified CDS sequence (wt) from hemagglutinin__InfluenzaB__AEP20453
augaaggcaauaauuguacuacucaugguaguaacauccaaugcagaucgaaucugcacugggauaacaucgucaaacucaccacaugucgucaaaacugcuacucaaggggaggucaaugugacugguguaauaccacugacaacaacacccaccaaaucucauuuugcaaaucucaaaggaacagaaaccagagggaaacuaugcccaaaaugccccaacugcacagaucuggacguagccuugggcagaccaaaaugcacggggaaaauacccucggcaagaguuucaauacuccaugaagucagaccuguuacaucugggugcuuuccuauaaugcacgacagaacaaaaauuagacagcugccuaaccuucucagaggauacgaacauaucagauuaucaacucauaacguuaucaaugcagaaaaugcaccaggaggacccuacaaaauuggaaccucagggucuugcccuaacguuaccaauggaaacggauuuuuugcaacaauggcuugggccgucccaaaaaacgacaaaaacaaaacagcaacaaauccauuaacaauagaaguaccauacauuuguacagaaggagaagaccaaauuaccguuuggggguuccacucugauaacgagacccaaauggcaaagcucuauggggacucaaagccccagaaguucaccucaucugccaacggagugaccacacauuacguuucacagauugguggcuucccaaaucaaacagaagacggaggacuaccacaaagugguagaauuguuguugauuacauggugcaaaaaucugggaaaacaggaacaauuaccuaucaaagagguauuuuauugccucaaaagguguggugcgcaaguggcaggagcaagguaauaaaaggauccuugccuuuaauuggagaagcagauugccuccacgaaaaauacgguggauuaaacaaaagcaagccuuacuacacaggggaacaugcaaaggccauaggaaauugcccaauaugggugaagacacccuugaagcuggccaauggaaccaaauauagaccuccugcaaaacuauuaaaggaaagagguuucuucggagcuauugcugguuucuuagaaggaggaugggaaggaaugauugcagguuggcacggauacacgucccauggggcacauggaguagcgguggcagcagaccuuaagagcacucaagaggccauaaacaagauaacaaaaaaucucaacucuuugagugagcuggaaguaaaaaaucuucaaagacuaagcggugccauggaugaacuccacaacgaaauacuagaacuagacgaaaaaguggaugaucucagagcugauacaauaagcucacaaauagaacucgcaguccugcuuuccaaugaaggaauaauaaacagugaagaugaacaucucuuggcgcuugaaagaaagcugaagaaaaugcugggcccuucugcuguagagauagggaauggaugcuuugaaaccaaacacaagugcaaccagaccugucucgauagaauagcugcugguaccuuugaugcaggagaauuuucucuccccaccuuugauucacugaauauuacugcugcaucuuuaaaugacgauggauuagauaaucauaccauacugcuuuacuacucaacugcugccuccaguuuggcuguaacacugaugauagcuaucuuuguuguuuauauggucuccagagacaauguuucuugcuccaucugucuauaa

SEQ ID NO: 58656 - RNA, 1755 nt, Artificial Sequence; identical to SEQ ID NO: 58625
  derived and/or modified CDS sequence (wt) from hemagglutinin__InfluenzaB__AEQ39027

SEQ ID NO: 58657 - RNA, 1758 nt, Artificial Sequence
  derived and/or modified CDS sequence (wt) from hemagglutinin__InfluenzaB__AEQ39260
augaaggcaauaauuguacuacucaugguaguaacauccaaugcagaucgaaucugcacugggauaacaucaucaaacucaccacaugucgucaaaacugcuacucaaggggaggucaaugugacugguguaauaccacugacaacaacacccaccaaaucucauuuugcaaaucucaaaggaacagaaaccagagggaaacuaugcccaaaaugccucaacugcacagaucuggacguagccuugggcagaccaaaaugcacggggaaaauaccaucggcaagaguuucaauacuccaugaaguaagaccuguuacaucugggugcuuuccuauaaugcacgacagaacaaaaauuagacagcugccuaaccuucuccgaggauacgaacauaucagguuaucaacucauaacguuaucaaugcagaaaaugcaccaggaggacccuacaaaauuggaaccucagggucuugcccuaacguuaccaauggaaacggauuuuucgcaacaauggcuugggccgucccaaaaaacgacaaaaacaaaacagcaacaaauccauuaacaauagaaguaccauacauuuguacagaaggagaagaccaaauuaccguuuggggguuccacucugauaacgagacccaaauggcaaagcucuauggggacucaaagccccagaaguucaccucaucugccaacggagugaccacacauuacguuucacagauugguggcuucccaaaucaaacagaagacggaggacuaccacaaagugguagaauuguuguugauuacauggugcaaaaaucugggaaaacaggaacaauuaccuaucaaagagguauuuuauugccucaaaagguguggugcgcaaguggcaggagcaagguaauaaaaggauccuugccuuuaauuggagaagcagauugccuccacgaaaaauacgguggauuaaacaaaagcaagccuuacuacacaggggaacaugcaaaggccauaggaaauugcccaauaugggugaagacacccuugaagcuggccaauggaaccaaauauagaccuccugcaaaacuauuaaaggaaagggguuucuucggagcuauugcugguuucuuagaaggaggaugggaaggaaugauugcagguuggcacggauacacgucccauggggcacauggaguagcgguggcagcagaccuuaagagcacucaagaggccauaaacaagauaacaaaaaaucucaacucuuugagugagcuggaaguaaagaaucuucaaagacuaagcggugccauggaugaacuccacaaugaaauacuagaacuagacgagaaaguggaugaucucagagcugauacaauaagcucacaaauagaacucgcaguccuucuuuccaaugaaggaauaauaaacagugaagaugaacaucucuuggcgcuugaaagaaagcugaagaaaaugcugggccccucugcuguagagauagggaauggaugcuuugaaaccaaacacaagugcaaccagaccugucucgacagaauagcugcugguaccuuugaugcaggagaauuuucucuccccaccuuugauucacuaaauauuacugcugcaucuuuaaaugacgauggauuggauaaucauacuauacugcuuuacuacucaacugcugccuccaguuuggcuguaacacugaugauagcuaucuuuguuguuuauauggucuccagagacaauguuucuugcuccaucugucuauaa

SEQ ID NO: 58658 - RNA, 1758 nt, Artificial Sequence
  derived and/or modified CDS sequence (wt) from hemagglutinin__InfluenzaB__AEQ39271
augaaggcaauaauuguacuacucaugguaguaacauccaaugcagaucgaaucugcacugggauaacaucaucaaacucaccacaugucgucaaaacugcuacucaaggggaggucaaugugacugguguaauaccacugacaacaacacccaccaaaucucauuuugcaaaucucaaaggaacagaaaccagagggaaacuaugcccaaaaugccucaacugcacagaucuggacguagccuugggcagaccaaaaugcacggggaaaauaccaucggcaagaguuucaauacuccaugaaguaagaccuguuacaucugggugcuuuccuauaaugcacgacagaacaaaaauuagacagcugccuaaccuucuccgaggauacgaacauaucagguuaucaacucauaacguuaucaaugcagaaaaugcaccaggaggacccuacaaaauuggaaccucagggucuugcccuaacguuaccaauggaaacggauuuuucgcaacaauggcuugggccgucccaaaaaacgacaaaaacaaaacagcaacaaauccauuaacaauagaaguaccauacauuuguacagaaggagaagaccaaauuaccguuuggggguuccacucugauaacgagacccaaauggcaaagcucuauggggacucaaagccccagaaguucaccucaucugccaacggagugaccacacauuacguuucacagauugguggcuucccaaaucaaacagaagacggaggacuaccacaaagugguagaauuguuguugacuacauggugcaaaaaucugggaaaacaggaacaauuaccuaucaaagagguauuuuauugccucaaaagguguggugcgcaaguggcaggagcaagguaauaaaaggauccuugccuuuaauuggagaagcagauugccuccacgaaaaauacgguggauuaaacaaaagcaagccuuacuacacaggggaacaugcaaaggccauaggaaauugcccaauaugggugaagacacccuugaagcuggccaauggaaccaaauauagaccuccugcaaaacuauuaaaggaaagggguuucuucggagcuauugcugguuucuuagaaggaggaugggaaggaaugauugcagguuggcacggauacacgucccauggggcacacggaguagcgguggcagcagaccuuaagagcacucaagaggccauaaacaagauaacaaaaaaucucaacucuuugagugagcuggaaguaaagaaucuucaaagacuaagcggugccauggaugaacuccacaaugaaauacuagaacuagacgagaaaguggaugaucucagagcugauacaauaagcucacaaauagaacucgcaguccuucuuuccaaugaaggaauaauaaacagugaagaugaacaucucuuggcgcuugaaagaaagcugaagaaaaugcugggccccucugcuguagagauagggaauggaugcuuugaaaccaaacacaagugcaaccagaccugucucgacagaauagcugcugguaccuuugaugcaggagaauuuucucuccccaccuuugauucacuaaauauuacugcugcaucuuuaaaugacgauggauuggauaaucauacuauacugcuuuacuacucaacugcugccuccaguuuggcuguaacacugaugauagcuaucuuuguuguuuauauggucuccagagacaauguuucuugcuccaucugucuauaa

SEQ ID NO: 58659 - RNA, 1758 nt, Artificial Sequence
  derived and/or modified CDS sequence (wt) from hemagglutinin__InfluenzaB__AEQ39282
augaaggcaauaauuguacuacucaugguaguaacauccaaugcagaucgaaucugcacugggauaacaucaucaaacucaccacaugucgucaaaacugcuacucaaggggaggucaaugugacugguguaauaccacugacaacaacacccaccaaaucucauuuugcaaaucucaaaggaacagaaaccagagggaaacuaugcccaaaaugccucaacugcacagaucuggacguagccuugggcagaccaaaaugcacggggaaaauaccaucggcaagaguuucaauacuccaugaaguaagaccuguuacaucugggugcuuuccuauaaugcacgacagaacaaaaauuagacagcugccuaaccuucuccgaggauacgaacauaucagguuaucaacucauaacguuaucaaugcagaaaaugcaccaggaggacccuacaaaauuggaaccucagggucuugcccuaacguuaccaauggaaacggauuuuucgcaacaauggcuugggccgucccaaaaaacgacaaaaacaaaacagcaacaaauccauuaacaauagaaguaccauacauuuguacagaaggagaagaccaaauuaccguuuggggguuccacucugauaacgagacccaaauggcaaagcucuauggggacucaaagccccagaaguucaccucaucugccaacggagugaccacacauuacguuucacagauugguggcuucccaaaucaaacagaagacggaggacuaccacaaagugguagaauuguuguugacuacauggugcaaaaaucugggaaaacaggaacaauuaccuaucaaagagguauuuuauugccucaaaagguguggugcgcaaguggcaggagcaagguaauaaaaggauccuugccuuuaauuggagaagcagauugccuccacgaaaaauacgguggauuaaacaaaagcaagccuuacuacacaggggaacaugcaaaggccauaggaaauugcccaauaugggugaagacacccuugaagcuggccaauggaaccaaauauagaccuccugcaaaacuauuaaaggaaagggguuucuucggagcuauugcugguuucuuagaaggaggaugggaaggaaugauugcagguuggcacggauacacgucccauggggcacauggaguagcgguggcagcagaccuuaagagcacucaagaggccauaaacaagauaacaaaaaaucucaacucuuugagugagcuggaaguaaagaaucuucaaagacuaagcggugccauggaugaacuccacaaugaaauacuagaacuagacgagaaaguggaugaucucagagcugauacaauaagcucacaaauagaacucgcaguccuucuuuccaaugaaggaauaauaaacagugaagaugaacaucucuuggcgcuugaaagaaagcugaagaaaaugcugggccccucugcuguagagauagggaauggaugcuuugaaaccaaacacaagugcaaccagaccugucucgacagaauagcugcugguaccuuugacgcaggagaauuuucucuccccaccuuugauucacuaaauauuacugcugcaucuuuaaauggcgaugaauuggauaaucauacuauacugcuuuacuacucaacugcugccuccaguuuggcuguaacacugaugauagcuaucuuuguuguuuauauggucuccagagacaauguuucuugcuccaucugucuauaa

SEQ ID NO: 58660 - RNA, 1758 nt, Artificial Sequence
  derived and/or modified CDS sequence (wt) from hemagglutinin__InfluenzaB__AEQ39315
augaaggcaauaauuguacuacucaugguaguaacauccaaugcagaucgaaucugcacugggauaacaucaucaaacucaccacaugucgucaaaacugcuacucaaggggaggucaaugugacugguguaauaccacugacaacaacacccaccaaaucucauuuugcaaaucucaaaggaacagaaaccagagggaaacuaugcccaaaaugccucaacugcacagaucuggacguagccuugggcagaccaaaaugcacggggaaaauaccaucggcaagaguuucaauacuccaugaaguaagaccuguuacaucugggugcuuuccuauaaugcacgacagaacaaaaauuagacagcugccuaaccuucuccgaggauacgaacauaucagguuaucaacucauaacguuaucaaugcagaaaaugcaccaggaggacccuacaaaauuggaaccucagggucuugcccuaacguuaccaauggaaacggauuuuucgcaacaauggcuugggccgucccaaaaaacgacaaaaacaaaacagcaacaaauccauuaacaauagaaguaccauacauuuguacagaaggagaagaccaaauuaccguuuggggguuccacucugauaacgagacccaaauggcaaagcucuauggggacucaaagccccagaaguucaccucaucugccaacggagugaccacacauuacguuucacagauugguggcuucccaaaucaaacagaagacggaggacuaccacaaagugguagaauuguuguugacuacauggugcaaaaaucugggaaaacaggaacaauuaccuaucaaagagguauuuuauugccucaaaagguguggugcgcaaguggcaggagcaagguaauaaaaggauccuugccuuuaauuggagaagcagauugccuccacgaaaaauacgguggauuaaacaaaagcaagccuuacuacacaggggaacaugcaaaggccauaggaaauugcccaauaugggugaagacacccuugaagcuggccaauggaaccaaauauagaccuccugcaaaacuauuaaaggaaagggguuucuucggagcuauugcugguuucuuagaaggaggaugggaaggaaugauugcagguuggcacggauacacgucccauggggcacauggaguagcgguggcagcagaccuuaagagcacucaagaggccauaaacaagauaacaaaaaaucucaacucuuugagugagcuggaaguaaagaaucuucaaagacuaagcggugccauggaugaacuccacaaugaaauacuagaacuagacgagaaaguggaugaucucagagcugauacaauaagcucacaaauagagcucgcaguccuucuuuccaaugaaggaauaauaaacagugaagaugaacaucucuuggcgcuugaaagaaagcugaagaaaaugcugggccccucugcuguagagauagggaauggaugcuuugaaaccaaacacaagugcaaccagaccugucucgacagaauagcugcugguaccuuugacgcaggagaauuuucucuccccaccuuugauucacuaaauauuacugcugcaucuuuaaauggcgauggauuggauaaucauacuauacugcuuuacuacucaacugcugccuccaguuuggcuguaacacugaugauagcuaucuuuguuguuuauauggucuccagagacaauguuucuugcuccaucugucuauaa

SEQ ID NO: 58661 - RNA, 1758 nt, Artificial Sequence
  derived and/or modified CDS sequence (wt) from hemagglutinin__InfluenzaB__AEQ39326
augaaggcaauaauuguacuacucaugguaguaacauccaaugcagaucgaaucugcacugggauaacaucaucaaacucaccacaugucgucaaaacugcuacucaaggggaggucaaugugacugguguaauaccacugacaacaacacccaccaaaucucauuuugcaaaucucaaaggaacagaaaccagagggaaacuaugcccaaaaugccucaacugcacagaucuggacguagccuugggcagaccaaaaugcacggggaaaauaccaucggcaagaguuucaauacuccaugaaguaagaccuguuacaucugggugcuuuccuauaaugcacgacagaacaaaaauuagacagcugccuaaccuucuccgaggauacgaacauaucagguuaucaacucauaacguuaucaaugcagaaaaugcaccaggaggacccuacaaaauuggaaccucagggucuugcccuaacguuaccaauggaaacggauuuuucgcaacaauggcuugggccgucccaaaaaacgacaaaaacaaaacagcaacaaauccauuaacaauagaaguaccauacauuuguacagaaggagaagaccaaauuaccguuuggggguuccacucugauaacgagacccaaauggcaaagcucuauggggacucaaagccccagaaguucaccucaucugccaacggagugaccacacauuacguuucacagauugguggcuucccaaaucaaacagaagacggaggacuaccacaaagugguagaauuguuguugacuacauggugcaaaaaucuggaaaaacaggaacaauuaccuaucaaagagguauuuuauugccucaaaagguguggugcgcaaguggcaggagcaagguaauaaaaggauccuugccuuuaauuggagaagcagauugccuccacgaaaaauacgguggauuaaacaaaagcaagccuuacuacacaggggaacaugcaaaggccauaggaaauugcccaauaugggugaagacacccuugaagcuggccaauggaaccaaauauagaccuccugcaaaacuauuaaaggaaagggguuucuucggagcuauugcugguuucuuagaaggaggaugggaaggaaugauugcagguuggcacggauacacgucccauggggcacauggaguagcgguggcagcagaccuuaagagcacucaagaggccauaaacaagauaacaaaaaaucucaacucuuugagugagcuggaaguaaagaaucuucaaagacuaagcggugccauggaugaacuccacaaugaaauacuagaacuagacgagaaaguggaugaucucagagcugauacaauaagcucacaaauagaacucgcaguccuucuuuccaaugaaggaauaauaaacagugaagaugaacaucucuuggcgcuugaaagaaagcugaagaaaaugcugggccccucugcuguagagauagggaauggaugcuuugaaaccaaacacaagugcaaccagaccugucucgacagaauagcugcugguaccuuugacgcaggagaauuuucucuccccaccuuugauucacuaaauauuacugcugcaucuuuaaauggcgauggauuggauaaucauacuauacugcuuuacuacucaacugcugccuccaguuuggcuguaacacugaugauagcuaucuuuguuguuuauauggucuccagagacaauguuucuugcuccaucugucuauaa

SEQ ID NO: 58662 - RNA, 1758 nt, Artificial Sequence
  derived and/or modified CDS sequence (wt) from hemagglutinin__InfluenzaB__AEQ39337
augaaggcaauaauuguacuacucaugguaguaacauccaaugcagaucgaaucugcacugggauaacaucaucaaacucaccacaugucgucaaaacugcuacucaaggggaggucaaugugacugguguaauaccacugacaacaacacccaccaaaucucauuuugcaaaucucaaaggaacagaaaccagagggaaacuaugcccaaaaugccucaacugcacagaucuggacguagccuugggcagaccaaaaugcacggggaaaauaccaucggcaagaguuucaauacuccaugaaguaagaccuguuacaucugggugcuuuccuauaaugcacgacagaacaaaaauuagacagcugccuaaccuucuccgaggauaugaacauaucagguuaucaacucauaacguuaucaaugcaggaaaugcaccaggaggacccuacaaaauuggaaccucagggucuugcccuaacguuaccaauggaaacggauuuuucgcaacaauggcuugggccgucccaaaaaacgacaaaaacaaaacagcaacaaauccauuaacaauagaaguaccauacauuuguacagaaggagaagaccaaauuaccguuuggggguuccacucugauaacgagacccaaauggcaaagcucuauggggacucaaagccccagaaguucaccucaucugccaacggagugaccacacauuacguuucacagauugguggcuucccaaaucaaacagaagacggaggacuaccacaaagugguagaauuguuguugauuacauggugcaaaaaucugggaaaacaggaacaauuaccuaucaaagagguauuuuauugccucaaaagguguggugcgcaaguggcaggagcaagguaauaaaaggauccuugccuuuaauuggagaagcagauugccuccacgaaaaauacgguggauuaaacaaaagcaagccuuacuacacaggggaacaugcaaaggccauaggaaauugcccaauaugggugaagaaacccuugaagcuggccaauggaaccaaauauagaccuccugcaaaacuauuaaaggaaagggguuucuucggagcuauugcugguuucuuagaaggaggaugggaaggaaugauugcagguuggcacggauacacgucccauggggcacauggaguagcgguggcagcagaccuuaagagcacucaagaggccauaaacaagauaacaaaaaaucucaacucuuugagugagcuggaaguaaagaaucuucaaagacuaagcggugccauggaugaacuccacaaugaaauacuagaacuagacgagaaaguggaugaucucagagcugauacaauaagcucacaaauagaacucgcaguccuucuuuccaaugaaggaauaauaaacagugaagaugaacaucucuuggcgcuugaaagaaagcugaagaaaaugcugggccccucugcuguagagauagggaauggaugcuuugaaaccaaacacaagugcaaccagaccugucucgacagaauagcugcugguaccuuugaugcaggagaauuuucucuccccaccuuugauucacuaaauauuacugcugcaucuuuaaaugacgauggauuggauaaucauacuauacugcuuuacuacucaacugcugccuccaguuuggcuguaacacugaugauagcuaucuuuguuguuuauauggucuccagagacaauguuucuugcuccaucugucuauaa

SEQ ID NO: 58663 - RNA, 1758 nt, Artificial Sequence
  derived and/or modified CDS sequence (wt) from hemagglutinin__InfluenzaB__AEQ39348
augaaggcaauaauuguacuacucaugguaguaacauccaaugcagaucgaaucugcacugggauaacaucaucaaacucaccacaugucgucaaaacugcuacucaaggggaggucaaugugacugguguaauaccacugacaacaacacccaccaaaucucauuuugcaaaucucaaaggaacagaaaccagagggaaacuaugcccaaaaugccucaacugcacagaucuggacguagccuugggcagaccaaaaugcacggggaaaauaccaucggcaagaguuucaauacuccaugaaguaagaccuguuacaucugggugcuuuccuauaaugcacgacagaacaaaaauuagacagcugccuaaccuucuccgaggauacgaacauaucagguuaucaacucauaacguuaucaaugcagaaaaugcaccaggaggacccuacaaaauuggaaccucagggucuugcccuaacguuaccaauggaaacggauuuuucgcaacaauggcuugggccgucccaaaaaacgacaaaaacaaaacagcaacaaauccauuaacaauagaaguaccauacauuuguacagaaggagaagaccaaauuaccguuuggggguuccacucugauaacgagacccaaauggcaaagcucuauggggacucaaagccccagaaguucaccucaucugccaacggagugaccacacauuacguuucacagauugguggcuucccaaaucaaacagaagacggaggacuaccacaaagugguagaauuguuguugauuacauggugcaaaaaucugggaaaacaggaacaauuaccuaucaaagagguauuuuauugccucaaaagguguggugcgcaaguggcaggagcaagguaauaaaaggauccuugccuuuaauuggagaagcagauugccuccacgaaaaauacgguggauuaaacaaaagcaagccuuacuacacaggggaacaugcaaaggccauaggaaauugcccaauaugggugaagacacccuugaagcuggccaauggaaccaaauauagaccuccugcaaaacuauuaaaggaaagggguuucuucggagcuauugcugguuucuuagaaggaggaugggaaggaaugauugcagguuggcacggauacacgucccauggggcacauggaguagcgguggcagcagaccuuaagagcacucaagaggccauaaacaagauaacaaaaaaucucaacucuuugagugagcuggaaguaaagaaucuucaaagacuaagcggugccauggaugaacuccacaaugaaauacuagaacuagacgagaaaguggaugaucucagagcugauacaauaagcucacaaauagaacucgcaguccuucuuuccaaugaaggaauaauaaacagugaagaugaacaucucuuggcgcuugaaagaaagcugaagaaaaugcugggccccucugcuguagagauagggaauggaugcuuugaaaccaaacacaagugcaaccagaccugucucgacagaauagcugcugguaccuuugaugcaggagaauuuucucuccccaccuuugauucacuaaauauuacugcugcaucuuuaaaugacgauggauuggauaaucauauuauacugcuuuacuacucaacugcugccuccaguuuggcuguaacacugaugauagcuaucuuuguuguuuauauggucuccagagacaauguuucuugcuccaucugucuauaa

SEQ ID NO: 58664 - RNA, 1758 nt, Artificial Sequence
  derived and/or modified CDS sequence (wt) from hemagglutinin__InfluenzaB__AEQ39359
augaaggcaauaauuguacuacucaugguaguaacauccaaugcagaucgaaucugcacugggauaacaucaucaaacucaccacaugucgucaaaacugcuacucaaggggaggucaaugugacugguguaauaccacugacaacaacacccaccaaaucucauuuugcaaaucucaaaggaacagaaaccagagggaaacuaugcccaaaaugccucaacugcacagaucuggacguagccuugggcagaccaaaaugcacggggaaaauaccaucggcaagaguuucaauacuccaugaaguaagaccuguuacaucugggugcuuuccuauaaugcacgacagaacaaaaauuagacagcugccuaaccuucuccgaggauacgaacauaucagguuaucaacucauaacguuaucaaugcagaaaaugcaccaggaggacccuacaaaauuggaaccucagggucuugcccuaacguuaccaauggaaacggauuuuucgcaacaauggcuugggccgucccaaaaaacgacaaaaacaaaacagcaacaaauccauuaacaauagaaguaccauacauuuguacagaaggagaagaccaaauuaccguuuggggguuccacucugauaacgagacccaaauggcaaagcucuauggggacucaaagccccagaaguucaccucaucugccaacggagugaccacacauuacguuucacagauugguggcuucccaaaucaaacagaagacggaggacuaccacaaagugguagaauuguuguugacuacauggugcaaaaaucugggaaaacaggaacaauuaccuaucaaagagguauuuuauugccucaaaagguguggugugcaaguggcaggagcaagguaauaaaaggauccuugccuuuaauuggagaagcagauugccuccacgaaaaauacgguggauuaaacaaaagcaagccuuacuacacaggggaacaugcaaaggccauaggaaauugcccaauaugggugaagacacccuugaagcuggccaauggaaccaaauauagaccuccugcaaaacuauuaaaggaaagggguuucuucggagcuauugcugguuucuuagaaggaggaugggaaggaaugauugcagguuggcacggauacacgucccauggggcacauggaguagcgguggcagcagaccuuaagagcacucaagaggccauaaacaagauaacaaaaaaucucaacucuuugagugagcuggaaguaaagaaucuucaaagacuaagcggugccauggaugaacuccacaaugaaauacuagaacuagacgagaaaguggaugaucucagagcugauacaauaagcucacaaauagaacucgcaguccuucuuuccaaugaaggaauaauaaacagugaagaugaacaucucuuggcgcuugaaagaaagcugaagaaaaugcugggccccucugcuguagagauagggaauggaugcuuugaaaccaaacacaagugcaaccagaccugucucgacagaauagcugcugguaccuuugacgcaggagaauuuucucuccccaccuuugauucacuaaauauuacugcugcaucuuuaaauggcgauggauuggauaaucauacuauacugcuuuacuacucaacugcugccuccaguuuggcuguaacacugaugauagcuaucuuuguuguuuauauggucuccagagacaauguuucuugcuccaucugucuauaa

SEQ ID NO: 58665 - RNA, 1758 nt, Artificial Sequence
  derived and/or modified CDS sequence (wt) from hemagglutinin__InfluenzaB__AEQ39370
augaaggcaauaauuguacuacucaugguaguaacauccaaugcagaucgaaucugcacugggauaacaucgucaaacucaccacauguugucaaaacugcuacucaaggggaggucaaugugacugguguaauaccacugacaacaacacccaccaaaucucauuuugcaaaucucaaaggaacagaaaccagagggaaacuaugcccaaaaugccucaacugcacagaucuggacguggccuugggcagaccaaaaugcacggggaacauacccucggcaagaguuucaauacuccaugaagucagaccuguuacaucugggugcuuuccuauaaugcacgacagaacaaaaauuagacagcugccuaaccuucucagaggauacgaacauaucagguuaucaacucauaacguugucaaugcagaaaaugcaccaggaggacccuacaaaauuggaaccucagggucuugcccuaacguuaccaauggaaacggauuuuucgcaacaauggcuugggccgucccaaaaaacgacaacaacaaaacagcaacaaauucauuaacaauagaaguaccauacauuuguacagaaggagaagaccaaauuaccguuuggggguuccacucugauaacgaaacccaaauggcaaagcucuauggggacucaaagccccagaaguucaccucaucugccaacggagugaccacacauuacguuucacagauugguggcuucccaaaucaaacagaagacggaggacuaccacaaagugguagaauuguuguugauuacauggugcaaaaaucugggaaaacaggaacaauuaccuaucaaagagguauuuuauugccucaaaaaguguggugcgcaaguggcaggagcaagguaauaaaaggauccuugccuuuaauuggagaagcagauugccuccacgaaaaauacgguggauuaaacaaaagcaagccuuacuacacaggggaacaugcaaaggccauaggaaauugcccaauaugggugaaaacacccuugaagcuggccaauggaaccaaauauagaccuccugcaaaacuauuaaaggaaagggguuucuucggagcuauugcugguuucuuagaaggaggaugggaaggaaugauugcagguuggcacggauacacaucccauggggcacauggaguagcgguggcagcagaccuuaaaagcacucaagaggccauaaacaagauaacaaaaaaucucaacucuuugagugagcuggaaguaaagaaucuucaaagacuaagcggugccauggaugaacuccacaacgaaauacuagaacuagacgagaaaguggaugaucucagagcugauacgauaagcucacaaauagaacucgcaguccugcuuuccaaugaaggaauaauaaacagugaagaugagcaucucuuggcgcuugaaagaaagcugaagaaaaugcugggccccucugcuguagagauagggaauggaugcuuugaaaccaaacacaagugcaaccagaccugucucgacagaauagcugcugguaccuuugaugcaggagaauuuucucuccccaccuuugauucacugaauauuacugcugcaucuuuaaaugacgauggauuggauaaucauacuauacugcuuuacuacucaacugcugccuccaguuuggcuguaacauugaugauagcuaucuuuguuguuuauauggucuccagagacaauguuucuugcuccaucugucuauaa

SEQ ID NO: 58666 - RNA, 1755 nt, Artificial Sequence
  derived and/or modified CDS sequence (wt) from hemagglutinin__InfluenzaB__AEQ39392
augaaggcaauaauuguacuacucaugguaguaacauccaaugcagaucgaaucugcacugggauaacaucuucaaacucaccucauguggucaaaacagcuacucaaggggaggucaaugugacuggugugauaccacugacaacaacaccaacaaaaucuuauuuugcaaaucucaaaggaacaaggaccagagggaaacuaugcccagacugucucaacuguacagaucuggauguggccuugggcaggccaauguguguggggaccacaccuucugcgaaagcuucaauacuccacgaagucagaccuguuacauccgggugcuuuccuauaaugcacgacagaacaaaaaucaggcaacuagccaaucuucucagaggauaugaaaauaucagguuaucaacccaaaacguuaucgaugcagaaaaggcaccaggaggacccuacagacuuggaaccucaggaucuugcccuaacgcuaccaguaaaagcggauuuuucgcaacaauggcuugggcugucccaaaggacaacaacaaaaaugcaacgaacccacuaacaguagaaguaccauacauuuguacagaaggggaagaccaaauuacuguuuggggguuccauucagauaacaaaacccaaaugaagaaccucuauggagacucaaauccucaaaaguucaccucaucugcuaauggaguaaccacacauuauguuucucagauuggcggcuucccagaucaaacagaagacggaggacuaccacaaagcggcagaauugucguugauuacaugaugcaaaaaccugggaaaacaggaacaauugucuaucaaagagguguuuuguugccucaaaagguguggugcgcgaguggcaggagcaaaguaauaaaaggguccuugccuuuaauuggugaagcagauugccuucaugaaaaauacgguggauuaaacaaaagcaagccuuacuacacaggagaacaugcaaaagccauaggaaauugcccaauaugggugaaaacaccuuugaagcuugccaauggaaccaaauacagaccuccugcaaaacuauuaaaggaaagggguuucuucggagcuauugcugguuuccuagaaggaggaugggaaggaaugauugcagguuggcacggauacacaucucacggagcacauggaguggcaguggcggcagaccuuaagaguacacaagaagcuauaaacaagauaacaaaaaaucucaacucuuugagugagcuagaaguaaagaaucuucaaagacuaaguggugccauggaugaacuccacaacgaaauacucgagcuggaugagaaaguggaugaucucagagcugacacuauaagcucacaaauagaacuugcagucuugcuuuccaacgaaggaauaauaaacagugaagacgagcaucuauuggcacuugagagaaaacuaaagaaaaugcugggucccucugcuguagacauaggaaauggaugcuucgaaaccaaacacaaaugcaaccagaccugcuuagacaggauagcugcuggcaccuuuaaugcaggagaauuuucucuccccacuuuugauucauugaacauuacugcugcaucuuuaaaugaugauggauuggauaaccauacuauacugcucuauuacucaacugcugcuucuaguuuggcuguaacauugaugcuagcuauuuuuauuguuuauauggucuccagagacaacguuucaugcuccaucugucuauaa

SEQ ID NO: 58667 - RNA, 1755 nt, Artificial Sequence
  derived and/or modified CDS sequence (wt) from hemagglutinin__InfluenzaB__AEQ39429
augaaggcaauaauuguacuacucaugguaguaacauccaaugcagaucgaaucugcacugggauaacaucuucaaacucaccucauguggucaaaacagcuacucaaggggaggucaaugugacuggugugauaccacugacaacaacaccaacaaaaucuuauuuugcaaaucucaaaggaacaaggaccagagggaaacuaugcccagacugucucaacuguacagaucuggauguggccuugggcaggccaauguguguggggaccacaccuucugcgaaagcuucaauacuccacgaagucagaccuguuacauccgggugcuuuccuauaaugcacgacagaacaaaaaucaggcaacuagccaaucuucucagaggauaugaaaauaucagguuaucaacccaaaacguuaucgaugcagaaaaggcaccaggaggacccuacagacuuggaaccucaggaucuugcccuaacgcuaccaguaaaagcggauuuuucgcaacaauggcuugggcugucccaaaggacaacaacaaaaaugcaacgaacccacuaacaguagaaguaccauacauuuguacagaaggggaagaccaaauuacuguuuggggguuccauucagauaacaaaacccaaaugaagaaccucuauggagacucaaauccucaaaaguucaccucaucugcuaauggaguaaccacacauuauguuucucagauuggcggcuucccagaucaaacagaagacggaggacuaccacaaagcggcagaauuguuguugauuacaugaugcaaaaaccugggaaaacaggaacaauugucuaucaaagagguguuuuguugccucaaaagguguggugcgcgaguggcaggagcaaaguaauaaaaggguccuugccuuuaauuggugaagcagauugccuucaugaaaaauacgguggauuaaacaaaagcaagccuuacuacacaggagaacaugcaaaagccauaggaaauugcccaauaugggugaaaacaccuuugaagcuugccaauggaaccaaauauagaccuccugcaaaacuauuaaaggaaagggguuucuucggagcuauugcugguuuccuagaaggaggaugggaaggaaugauugcagguuggcacggauacacaucucacggagcacauggaguggcaguggcggcagaccuuaagaguacacaagaagcuauaaacaagauaacaaaaaaucucaauucuuugagugagcuagaaguaaagaaucuucaaagacuaaguggugccauggaugaacuccacaacgaaauacucgagcuggaugagaaaguggaugaucucagagcugacacuauaagcucacaaauagaacuugcagucuugcuuuccaacgaaggaauaauaaacagugaagacgagcaucuauuggcacuugagagaaaacuaaagaaaaugcugggucccucugcuguagacauaggaaauggaugcuucgaaaccaaacacaaaugcaaccagaccugcuuagacaggauagcugcuggcaccuuuaaugcaggagaauuuucucuccccacuuuugauucauugaacauuacugcugcaucuuuaaaugaugauggauuggauaaccauacuauacugcucuauuacucaacugcugcuucuaguuuggcuguaacauugaugcuagcuauuuuuauuguuuauauggucuccagagacaacguuucaugcuccaucugucuauaa

SEQ ID NO: 58668 - RNA, 1755 nt, Artificial Sequence
  derived and/or modified CDS sequence (wt) from hemagglutinin__InfluenzaB__AEQ39440
augaaggcaauaauuguacuacucaugguaguaacauccaaugcagaucgaaucugcacugggauaacaucuucaaacucaccucauguggucaaaacagcuacucaaggggaggucaaugugacuggugugauaccacugacaacaacaccaacaaaaucuuauuuugcaaaucucaaaggaacaaggaccagagggaaacuaugcccagacugucucaacuguacagaucuggauguggccuugggcaggccaauguguguggggaccacaccuucugcgaaagcuucaauacuccacgaagucagaccuguuacauccgggugcuuuccuauaaugcacgacagaacaaaaaucaggcaacuagccaaucuucucagaggauaugaaaauaucagguuaucaacccaaaacguuaucgaugcagaaaaggcaccaggaggacccuacagacuuggaaccucaggaucuugcccuaaugcuaccaguaaaagcggauuuuucgcaacaauggcuugggcugucccaaaggacaacaacaaaaaugcaacgaacccacuaacaguagaaguaccauacauuuguacagaaggggaagaccaaauuacuguuuggggguuccauucagauaacaaaacccaaaugaagaaccucuauggagacucaaauccucaaaaguucaccucaucugcuaauggaguaaccacacauuauguuucucagauuggcggcuucccagaucaaacagaagacggaggacuaccacaaagcggcagaauuguuguugauuacaugaugcaaaaaccugggaaaacaggaacaauugucuaucaaagagguguuuuguugccucaaaagguguggugcgcgaguggcaggagcaaaguaauaaaaggguccuugccuuuaauuggugaagcagauugccuucaugaaaaauacgguggauuaaacaaaagcaagccuuacuacacaggagaacaugcaaaagccauaggaaauugcccaauaugggugaaaacaccuuugaagcuugccaauggaaccaaauauagaccuccugcaaaacuauuaaaggaaagggguuucuucggagcuauugcugguuuccuagaaggaggaugggaaggaaugauugcagguuggcacggauacacaucucacggagcacauggaguggcaguggcggcagaccuuaagaguacacaagaagcuauaaacaagauaacaaaaaaucucaauucuuugagugagcuagaaguaaagaaucuucaaagacuaaguggugccauggaugaacuccacaacgaaauacucgagcuggaugagaaaguggaugaucucagagcugacacuauaagcucacaaauagaacuugcagucuugcuuuccaacgaaggaauaauaaacagugaagacgagcaucuauuggcacuugagagaaaacuaaagaaaaugcugggucccucugcuguagacauaggaaauggaugcuucgaaaccaaacacaaaugcaaccagaccugcuuagacaggauagcugcuggcaccuuuaaugcaggagaauuuucucuccccacuuuugauucauugaacauuacugcugcaucuuuaaaugaugauggauuggauaaccauacuauacugcucuauuacucaacugcugcuucuaguuuggcuguaacauugaugcuagcuauuuuuauuguuuauauggucuccagagacaacguuucaugcuccaucugucuauaa

SEQ ID NO: 58669 - RNA, 1755 nt, Artificial Sequence
  derived and/or modified CDS sequence (wt) from hemagglutinin__InfluenzaB__AEQ39451
augaaggcaauaauuguacuacucaugguaguaacauccaaugcagaucgaaucugcacugggauaacaucuucaaacucaccucauguggucaaaacagcuacucaaggggaggucaaugugacuggugugauaccacugacaacaacaccaacaaaaucuuauuuugcaaaucucaaaggaacaaggaccagagggaaacuaugcccagacugucucaacuguacagaucuggauguggccuugggcaggccaauguguguggggaccacaccuucugcgaaagcuucaauacuccacgaagucagaccuguuacauccgggugcuuuccuauaaugcacgacagaacaaaaaucaggcaacuagccaaucuucucagaggauaugaaaauaucagguuaucaacccaaaacguuaucgaugcagaaaaggcaccaggaggacccuacagacuuggaaccucaggaucuugcccuaacgcuaccaguaaaagcggauuuuucgcaacaauggcuugggcugucccaaaggacaacaacaaaaaugcaacgaacccacuaacaguagaaguaccauacauuuguacagaaggggaagaccaaauuacuguuuggggguuccauucagauaacaaaacccaaaugaagaaccucuauggagacucaaauccucaaaaguucaccucaucugcuaauggaguaaccacacauuauguuucucagauuggcggcuucccagaucaaacagaagacggaggacuaccacaaagcggcagaauuguuguugauuacaugaugcaaaaaccugggaaaacaggaacaauugucuaucaaagagguguuuuguugccucaaaagguguggugcgcgaguggcaggagcaaaguaauaaaaggguccuugccuuuaauuggugaagcagauugccuucaugaaaaauacgguggauuaaacaaaagcaagccuuacuacacaggagaacaugcaaaagccauaggaaauugcccaauaugggugaaaacaccuuugaagcuugccaauggaaccaaauauagaccuccugcaaaauuauuaaaggaaagggguuucuucggagcuauugcugguuuccuagaaggaggaugggaaggaaugauugcagguuggcacggauacacaucucacggagcacauggaguggcaguggcggcagaccuuaagaguacacaagaagcuauaaacaagauaacaaaaaaucucaacucuuugagugagcuagaaguaaagaaucuucaaagacuaaguggugccauggaugaacuccacaacgaaauacucgagcuggaugagaaaguggaugaucucagagcugacacuauaagcucacaaauagaacuugcagucuugcuuuccaacgaaggaauaauaaacagugaagacgagcaucuauuggcacuugagagaaaacuaaagaaaaugcugggucccucugcuguagacauaggaaauggaugcuucgaaaccaaacacaaaugcaaccagaccugcuuagacaggauagcugcuggcaccuuuaaugcaggagaauuuucucuccccacuuuugauucauugaacauuacugcugcaucuuuaaaugaugauggauuggauaaccauacuauacugcucuauuacucaacugcugcuucuaguuuggcuguaacauugaugcuagcuauuuuuauuguuuauauggucuccagagacaacguuucaugcuccaucugucuauaa

SEQ ID NO: 58670 - RNA, 1758 nt, Artificial Sequence
  derived and/or modified CDS sequence (wt) from hemagglutinin__InfluenzaB__AEQ39462
augaaggcaauaauuguacuacucaugguaguaacauccaaugcagaucgaaucugcacugggauaacaucgucaaacucaccccauguggucaaaacugcuacucaaggggaggucaaugugacuggugugauaccacugacaacaacacccaccaaaucucauuuugcaaaucucaaaggaacaaaaaccagaggaaaacuaugcccaaaaugccucaacugcacagaucuggacguggccuugggcagaccaaaaugcacggggaacauacccucggcagaaguuucaauacuccaugaagucagaccuguuaccucugggugcuuuccuauaaugcacgacagaacaaaaauuagacagcugcccaaccuucucagaggauacgaacauaucagauuaucaacucauaacguuaucaaugcagaaaaggcaccaggaggacccuacaaaauuggaaccucagggucuugcccuaauguuaccaauggaaacggauuuuucgcaacaauggcuugggccgucccaaaaaacgacaacaauaaaacagcaacaaauucauuaacaauagaaguaccauacauuuguacagaaggagaagaccaaauuaccauuuggggguuccacucugauaacgaaacccaaauggcaaaacucuauggggacucaaagccccagaaguucaccucaucugccaacggagugaccacacauuacguuucacagauugguggcuucccaaaucaaacagaagacggaggacuaccacaaagugguagaauuguuguugauuacauggugcaaaaaucugggaaaacaggaacaauuaccuaucaaagagguauuuuauugccucaaaaaguguggugcgcaaguggcaggagcaagguaauaaaaggauccuugcccuuaauuggagaagcagauugccuccacgaaaaauacgguggauuaaacaaaagcaagccuuacuacacaggggaacaugcaaaggccauaggaaauugcccaauaugggugaaaacacccuugaagcuggccaauggaaccaaauauagaccuccugcaaaacuauuaaaggaaagggguuucuucggagcuauugcugguuucuuagaaggaggaugggaaggaaugauugcagguuggcacggauacacaucccauggggcacauggaguagcaguggcagcagaccuuaagagcacucaagaagccauaaacaagauaacaaaaaaucucaacucuuugagugagcuggaaguaaagaaucuucaaagacuaagcggugccauggaugaacuccacaacgaaauacuagaacuagacgagaaaguggaugaucucagagcugauacaauaagcucacaaauagaacucgcaguccugcuuuccaaugaaggaauaauaaacagugaagaugagcaucucuuggcgcuugaaagaaagcugaagaaaaugcugggccccucugcuguagagauagggaauggaugcuucgaaaccaaacacaagugcaaccagaccugucuugacagaauagcugcugguaccuuugaugcaggagaauuuucucuccccacuuuugauucacugaauauuacugcugcaucuuuaaaugacgauggauuggauaaucauacuauacugcuuuacuacucaacugcugccuccaguuuggcuguaacauugaugauagcuaucuuuguuguuuauauggucuccagagacaauguuucuugcuccaucugucuauaa

SEQ ID NO: 58671 - RNA, 1758 nt, Artificial Sequence
  derived and/or modified CDS sequence (wt) from hemagglutinin__InfluenzaB__AEQ39484
augaaggcaauaauuguacuacucaugguaguaacauccaaugcagaucgaaucugcacugggauaacaucgucaaacucaccacaugucgucaaaacugcuacucaaggggaggucaauguuacugguguaauaccacugacaacaacacccaccaaaucucacuuugcaaaucucaaaggaacagaaaccagggggaaacuaugcccaaaaugccucaacugcacagaucuggacguagccuugggcagaccaaaaugcacggggaaaauacccucggcaagaguuucaauacuccaugaagucagaccuguuacaucugggugcuuuccuauaaugcacgacagaacaaaaauuagacagcugccuaaccuucuccgaggauacgaacauaucagguuaucaacucauaacguuaucaaugcagaaaaugcaccaggaggacccuacaaaauuggaaccucagggucuugcccuaacguuaccaauggaaacggauuuuucgcaacaauggcuugggccgucccaaaaaacgacaaaaacaaaacagcaacaaauccauuaacaauagaaguaccauacauuuguacagaaggagaagaccaaauuaccguuuggggguuccacucugacaacgagacccaaauggcaaagcucuauggggacucaaagccccagaaguucaccucaucugccaacggagugaccacacauuacguuucacagauugguggcuucccaaaucaaacagaagacggaggacuaccacaaagugguagaauuguuguugauuacauggugcaaaaaucugggaaaacaggaacaauuaccuaucaaagagguauuuuauugccucaaaagguguggugcgcaaguggcaggagcaagguaauaaaaggauccuugccuuuaauuggagaagcagauugccuccacgaaaaauacgguggauuaaacaaaagcaagccuuacuacacaggggaacaugcaaaggccauaggaaauugcccaauaugggugaaaacacccuugaagcuggccaauggaaccaaauauagaccuccugcaaaacuauuaaaggaaagggguuucuucggagcuauugcugguuucuuagaaggaggaugggaaggaaugauugcagguuggcacggauacacaucccauggggcacauggaguggcgguggcagcagaccuuaagagcacucaagaggccauaaacaagauaacaaaaaaucucaacucuuugagugagcuggaaguaaagaaucuucaaagacuaaguggugccauggaugaacuccacaacgaaauacuagaacuagaugagaaaguggaugaucucagagcugauacaauaagcucacaaauagaacucgcaguccugcuuuccaaugaaggaauaauaaacagugaagaugaacaucucuuggcgcuugaaagaaagcugaagaaaaugcugggccccucugcuguagagauagggaauggaugcuuugaaaccaaacacaagugcaaccagaccugucucgacagaauagcugcugguaccuuugaugcaggagaauuuucucuccccaccuuugauucacugaauauuacugcugcaucuuuaaaugacgauggauuggauaaucauacuauacugcuuuacuacucaacugcugccuccaguuuggcuguaacacugaugauagcuaucuuuguuguuuauauggucuccagagacaauguuucuugcuccaucugucuauaa

SEQ ID NO: 58672 - RNA, 1755 nt, Artificial Sequence; identical to SEQ ID NO: 58637
  derived and/or modified CDS sequence (wt) from hemagglutinin__InfluenzaB__AEQ39506

SEQ ID NO: 58673 - RNA, 1758 nt, Artificial Sequence
  derived and/or modified CDS sequence (wt) from hemagglutinin__InfluenzaB__AEQ39517
augaaggcaauaauuguacuacucaugguaguaacauccaaugcagaucgaaucugcacugggauaacaucgucaaacucaccccauguggucaaaacugcuacucaaggggaggucaaugugacuggugugauaccacugacaacaacacccaccaaaucucauuuugcaaaucucaaaggaacaaaaaccagagggaaacuaugcccaaaaugccucaacugcacagaucuggacguggccuugggcagaccaaaaugcacggggaacauacccucggcagaaguuucaauacuccaugaagucagaccuguuaccucugggugcuuuccuauaaugcacgacagaacaaaaauuagacagcugcccaaccuucucagaggauacgaacauaucagauuaucaacucauaacguuaucaaugcagaaaaggcaccaggaggacccuacaaaauuggaaccucagggucuugcccuaauguuaccaauggaaacggauuuuucgcaacaauggcuugggccgucccaaaaaacgacaacaacaaaacagcaacaaauucauuaacaauagaaguaccauacauuuguacagaaggagaagaccaaauuaccauuuggggguuccacucugauaacgaaacccaaauggcaaaacucuauggggacucaaagccccagaaguucaccucaucugccaacggagugaccacacauuacguuucacagauugguggcuucccaaaucaaacagaagacggaggacuaccacaaagugguagaauuguuguugauuacauggugcaaaaaucugggaaaacaggaacaauuaccuaucaaagagguauuuuauugccucaaaaaguguggugcgcaaguggcaggagcaagguaauaaaaggauccuugcccuuaauuggagaagcagauugccuccacgaaaaauacgguggauuaaacaaaagcaagccuuacuacacaggggaacaugcaaaggccauaggaaauugcccaauaugggugaaaacacccuugaagcuggccaauggaaccaaauauagaccuccugcaaaacuauuaaaggaaagggguuucuucggagcuauugcugguuucuuagaaggaggaugggaaggaaugauugcagguuggcacggguacacaucccauggggcacauggaguagcaguggcagcagaccuuaagagcacucaagaagccauaaacaagauaacaaaaaaucucaacucuuugagugagcuggaaguaaagaaucuucaaagacuaagcggugccauggaugaacuccacaacgaaauacuagaacuagacgagaaaguggaugaucucagagcugauacaauaagcucacaaauagaacucgcaguccugcuuuccaaugaaggaauaauaaacagugaagaugagcaucucuuggcgcuugaaagaaagcugaagaaaaugcugggccccucugcuguagagauagggaauggaugcuucgaaaccaaacacaagugcaaccagaccugucuugacagaauagcugcugguaccuuugaugcaggagaauuuucucuccccacuuuugauucacugaauauuacugcugcaucuuuaaaugacaauggauuggauaaucauacuauacugcuuuacuacucaacugcugccuccaguuuggcuguaacauugaugauagcuaucuuuguuguuuauauggucuccagagacaauguuucuugcuccaucugucuauaa

SEQ ID NO: 58674 - RNA, 1758 nt, Artificial Sequence
  derived and/or modified CDS sequence (wt) from hemagglutinin__InfluenzaB__AER27038
augaaggcaauaauuguacuacucaugguaguaacauccaaugcagaucgaaucugcacugggauaacaucgucaaacucaccacaugucgucaaaacugcuacucaaggggaggucaaugugacugguguaauaccacugacaacaacacccaccaaaucucauuuugcaaaucucaaaggaacagaaaccagagggaaacuaugcccaaaaugccccaacugcacagaucuggacguagccuugggcagaccaaaaugcacggggaaaauacccucggcaagaguuucaauacuccaugaagucagaccuguuacaucugggugcuuuccuauaaugcacgacagaacaaaaauuagacagcugccuaaccuucuccgaggauacgaacauaucagauuaucaacucauaacguuaucaaugcagaaaaugcaccaggaggacccuacaaaauuggaaccucagggucuugcccuaacguuaccaauggaaacggauuuuucgcaacaauggcuugggccgucccaaaaaacgacaaaaacaaaacagcaacaaauccauuaacaauagaaguaccauacauuuguacaaaaggagaagaccaaauuaccguuuggggguuccacucugauaacgagacccaaauggcaaagcucuauggggacucaaagccccagaaguucaccucaucugccaacggagugaccacgcauuacguuucacagauugguggcuucccaaaucaaacagaagacggaggacuaccacaaagugguagaauuguuguugauuacauggugcaaaaaucugggaaaacaggaacaauuaccuaucaaagagguauuuuauugccucaaaagguguggugcgcaaguggcaggagcaagguaauaaaaggauccuugccuuuaauuggagaagcagauugccuccacgaaaaauacgguggauuaaacaaaagcaagccuuacuacacaggggaacaugcaaaggccauaggaaauugcccaauaugggugaagacacccuugaagcuggccaauggaaccaaauauagaccuccugcaaaacuauuaaaggaaagggguuucuucggagcuauugcugguuucuuagaaggaggaugggaaggaaugauugcagguuggcacggauacacgucccauggggcacauggaauagcgguggcagcagaccuuaagagcacucaagaggccauaaacaagauaacaaaaaaucucaacucuuugagugagcuggaaguaaagaaucuucaaagacuaagcggugccauggaugaacuccacaacgaaauacuagaacuagacgagaaaguggaugaucucagagcugauacaauaagcucacaaauagaacucgcaguccugcuuuccaaugaaggaauaauaaacagugaagaugaacaucucuuggcacuugaaagaaagcugaagaaaaugcugggcccuucugcuguagagauagggaauggaugcuuugaaaccaaacacaagugcaaccagaccugucucgacagaauagcugcugguaccuuugaugcaggagaauuuucucuccccaccuuugauucacugaauauuacugcugcaucuuuaaaugacgauggauuggauaaucauaccauacugcuuuacuacucaacugcugccuccaguuuggcuguaacacugaugauagcuaucuuuguuguuuauauggucuccagagacaauguuucuugcuccaucugucuauaa

SEQ ID NO: 58675 - RNA, 1758 nt, Artificial Sequence; identical to SEQ ID NO: 58651
  derived and/or modified CDS sequence (wt) from hemagglutinin__InfluenzaB__AER27060

SEQ ID NO: 58676 - RNA, 1758 nt, Artificial Sequence
  derived and/or modified CDS sequence (wt) from hemagglutinin__InfluenzaB__AET10061
augaaggcaauaauuguacuacucaugguaguaacauccaaugcagaucgaaucugcacuggaauaacaucgucaaacucaccacauguugucaaaacugcuacucaaggggaggucaaugugacugguguaauaccacugacaacaacacccaccaaaucucauuuugcaaaucucaaaggaacagaaaccagagggaaacuaugcccaaaaugccucaacugcacagaucuggacguggccuugggcagaccgaaaugcacggggaacauacccucagcaagaguuucaauacuccaugaagucagaccuguuacaucugggugcuuuccuauaaugcacgacagaacaaaaauuagacagcugccuaaccuucucagaggauacgaacauaucagguuaucaacucauaacguuaucaaugcaaaaaaugcaccaggaggacccuacaaaauuggaaccucagggucuugcccuaacguuaccaauggaaacggauuuuucgcaacaauggcuugggccgucccaaaaaacgauaaaaacagaacagcaacaaauucauuaacaauagaaguaccauacauuuguaaagaaggagaagaccaaauuaccguuuggggguuccacucugauaacgaaacccaaauggcaaagcucuauggggacucaaagccccagaaauucaccucaucugccaacggagugaccacacauuacguuucacagauugguggcuucccaaaucaaacagaagacggaggacuaccacaaagugguagaauuguuguugauuacauggugcaaaaaucugggaaaacaggaacaauuaccuaucaaagagguauuuuauugccucaaaaaguguggugcgcaaguggcaggagcaagguaauaaaaggauccuugccuuuaauuggagaagcagauugccuccacgaaaaauacgguggauuaaacaaaagcaagccuuacuacacaggggaacaugcaaaggccauaggaaauugcccaauaugggugaaaacacccuugaagcuggccaauggaaccaaauauagaccuccugcaaaacuauuaaaggaaagggguuucuuuggagcuauugcugguuucuuagaaggaggaugggaaggaaugauugcagguuggcacggauacacaucccauggggcacauggaguagcgguggcugcagaccuuaaaagcacucaagaggccauaaacaagauaacaaaaaaucucaacucuuugagugagcuggaaguaaagaaucuucaaagacuaagcggugccauggaugaacuccacaacgaaauacuagaacuagacgagaaaguggaugaucucagagcugauacaauaagcucacaaauagaacucgcaguccugcuuuccaaugaaggaauaauaaacagugaagaugagcaucucuuggcgcuugaaagaaagcugaagaaaaugcugggccccucugcuguggagauagggaauggaugcuuugaaaccaaacacaagugcaaccagaccugucucgacagaauagcugcugguaccuuugaugcaggagaauuuucucuccccaccuuugauucacugaauauuacugcugcaucuuuaaaugacgauggauuggauaaucauacuauacugcuuuacuacucaacugcugccuccaguuuggcuguaacauugaugauagcuaucuuuguuguuuauauggucuccagagacaauguuucuugcuccaucugucuauaa

SEQ ID NO: 58677 - RNA, 1755 nt, Artificial Sequence
  derived and/or modified CDS sequence (wt) from hemagglutinin__InfluenzaB__AET10062
augaaggcaauaauuguacuacucaugguaguaacauccaaugcagaucgaaucugcacugggauaacaucuucaaacucaccccauguggucaaaacagcuacucaaggggaggucaaugugacuggcgugauaccacugacaauaacaccaacaaaaucuuauuuugcgaaccucaaaggaacaaggaccagagggaaacuaugcccggauugucucaacuguacagaucuggauguggccuugggcaggccaauguguguggggaccacaccuucugcuaaagcuucaauacuccacgaagucagaccuguuacauccgggugcuuuccuauaaugcacgacagaacaaaaaucaggcaacuacccaaucuucucagaggauaugaaaauaucagguuaucaacccagaacguuaucgaugcagaaaaagcaccaggaggacccuacagacuuggaaccucaggaucuugcccuaaugcuaccaguaaaaucggauuuuucgcaacaauggcuugggcugucccaaaggacaacuacaaaaaugcaacgaacccacuaacaguagaaguaccauacauuuguaaagaaggggaagaccaaauuacuguuuggggguuccauucagauaacaaaacccaaaugaagaaccucuauggagacucaaauccucaaaaguucaccucaucugcuaauggaguaaccacacauuauguuucucagauuggugacuucccagaucaaacagaagacggaggacuaccacaaagcggcagaauuguuguugauuacaugaugcaaaaaccugggaaaacaggaacaauugucuaucaaagagguguuuuguugccucaaaagguguggugcgcgaguggcaggagcaaaguaauaaaagggucauugccuuuaauuggugaagcagauugccuucaugagaaauacgguggauuaaacaaaagcaagccuuacuacacaggagaacaugcaaaagccauaggaaacugcccaauauggguaaaaacaccuuugaagcuugccaaugggaccaaauauagaccuccugcaaaacuauuaaaggaaagggguuucuucggggcuauugcugguuuccuagaaggaggaugggaaggaaugauugcagguuggcacggauacacaucucacggagcacauggaguggcaguggcggcagaccuuaagaguacacaagaagcuauaaauaagauaacaaaaaaucucaauucuuugagugagcuagaaguaaagaaccuucaaagacuaaguggugccauggaugaacuccacaacgaaauacucgagcuggaugagaaaguggaugaucucagagcugacacuauaagcucacaaauagaacuugcagucuugcuuuccaacgaaggaauaauaaacagugaagacgagcaucuauuggcacuugagagaaaacuaaagaaaaugcugggccccucugcuguagacauaggaaauggaugcuucgaaaccaaacacaaaugcaaccagaccugcuuagacaggauagcugcuggcaccuuuaaugcaggagaauuuucucuccccacuuuugauucauugaacauuacugcugcaucuuuaaaugaugauggauuggauaaccauacuauacugcucuauuacucaacugcugcuucuaguuuggcuguaacauuaaugcuagcuauuuuuauuguuuauauggucuccagagacaacguuucaugcuccaucugucuauaa

SEQ ID NO: 58678 - RNA, 1755 nt, Artificial Sequence
  derived and/or modified CDS sequence (wt) from hemagglutinin__InfluenzaB__AET10064
augaaggcaauaauuguacuacucaugguaguaacauccaaugcagaucgaaucugcacugggauaacaucuucaaacucaccucauguggucaaaacagcuacucaaggggaggucaauguaacuggcgugauaccacugacaacaacaccaacaaaaucuuauuuugcaaaucucaaaggaacaaggaccagagggaaacuaugcccggacugucucaacuguacagaucuggauguggccuugggcaggccaauguguguggggaccacaccuucugcuaaagcuucaauacuccacgaagucagaccuguuacauccgggugcuuuccuauaaugcacgacagaacaaaaaucaggcaacuacccaaucuucucagaggauaugaaaauaucagguuaucaacccagaacguuaucgaugcagaaaaagcaccaggaggacccuacagacuuggaaccucaggaucuugcccuaaugcuaccaguaaaaucggauuuuucgcaacaauggcuugggcugucccaaaggacaacuacaaaaaugcaacgaacccacuaacaguagaaguaccauacauuuguacagaaggggaagaccaaauuacuauuuggggguuccauucagauaacaaaacccaaaugaagaaccucuauggagacucaaauccucaaaaguucaccucaucugcuaacggaguaaccacacauuauguuucucagauuggcgacuucccagaucaaacagaagacggaggacuaccacaaagcggcagaauuguuguugauuacaugaugcaaaaaccugggaaaacaggaacaauugucuaucaaagagguguuuuguugccucaaaagguguggugcgcgaguggcaggagcaaaguaauaaagggaucauugccuuuaauuggugaagcagauugccuccaugaaaaauacgguggauuaaacaaaagcaagccuuauuacacaggagaacaugcaaaagccauaggaaauugcccaauauggguaaaaacaccuuugaagcuugccaauggaaccaaauauagaccuccugcaaaacuauuaaaggaaagggguuucuucggagcuauugcugguuuccuagaaggaggaugggaaggaaugauugcagguuggcacggauacacaucucacggagcacauggaguggcaguggcggcagaccuuaagaguacacaagaagcuauaaauaagauaacaaaaaaucucaauucuuugagugagcuagagguaaagaaucuucagagacuaaguggugccauggaugaacuccacaacgaaauacucgagcuggaugagaaaguggaugaucucagagcugacacuauaagcucacaaauagaacuugcagucuugcuuuccaacgaaggaauaauaaacagugaagacgagcaucuauuggcacuugagagaaaacuaaagaaaaugcugggccccucugcuguagacauaggaaauggaugcuucgaaaccaaacacaaaugcaaccagaccugcuuagacaggauagcugcuggcaccuuuaaugcaggagaauuuucucuccccacuuuugauucauugaacauuacugcugcaucuuuaaaugaugauggauuggauaaccauacuauacugcucuauuacucaacugcugcuucuaguuuggcuguaacauuaaugcuagcuauuuuuauuguuuauauggucuccagagacaacguuucaugcuccaucugucuauaa

SEQ ID NO: 58679 - RNA, 1755 nt, Artificial Sequence
  derived and/or modified CDS sequence (wt) from hemagglutinin__InfluenzaB__AET10065
augaaggcaauaauuguacuacucaugguaguaacauccaaugcagaucgaaucugcacugggauaacaucuucaaacucaccucauguggucaaaacagcuacucaaggggaggucaaugugacuggcgugauaccacugacaacaacaccaacaaaaucuuauuuugcaaaccucaaaggaacaaggaccagagggaaacuaugcccggacugucucaacuguacagaucuggauguggccuugggcaggccaauguguguggggaccacaccuucugcuaaagcuucaauacuccacgaagucagaccuguuacauccgggugcuuuccuauaaugcacgacagaacaaaaaucaggcaacuacccaaucuucucagaggauaugaaaauaucagguuaucaacccagaacguuaucgaugcagaaaaagcaccaggaggacccuacagacuuggaaccucaggaucuugcccuaaugcuaccaguaaaaucggauuuuucgcaacaauggcuugggcugucccaaaggacaacuacaaaaaugcaacgaacccacuaacaguagaaguaccauacauuuguaaagaaggggaagaccaaauuacuguuuggggguuccauucagauaacaaaacccaaaugaaaaaccucuauggagacucaaauccucaaaaguucaccucaucugcuaauggaguaaccacacauuauguuucucagauuggcgacuucccagaucaaacagaagacggaggacuaccacaaagcggcagaauuguuguugauuacaugaugcaaaaaccugggaaaacaggaacaauugucuaucaaagagguguuuuguugccucaaaagguguggugcgcgaguggcaggagcaaaguaauaaaagggucauugccuuuaauuggugaagcagauugccuucaugagaaauacgguggauuaaacaaaagcaagccuuacuacacaggagaacaugcaaaagccauaggaaacugcccaauauggguaaaaacaccuuugaagcuugccaaugggaccaaauauagaccuccugcaaaacuauuaaaggaaagggguuucuucggggcuauugcugguuuccuagaaggaggaugggaaggaaugauugcagguuggcacggauacacaucucacggagcacauggaguggcaguggcggcagaccuuaagaguacacaagaagcuauaaauaagauaacaaaaaaucucaauucuuugagugagcuagaaguaaagaaccuucaaagacuaaguggugccauggaugaacuccacaacgaaauacucgagcuggaugagaaaguggaugaucucagagcugacacuauaagcucacaaauagaacuugcagucuugcuuuccaacgaaggaauaauaaacagugaagacgagcaucuauuggcacuugagagaaaacuaaagaaaaugcugggccccucugcuguagacauaggaaauggaugcuucgaaaccaaacacaaaugcaaccagaccugcuuagacaggauagcugcuggcaccuuuaaugcaggagaauuuucucuccccacuuuugauucauugaacauuacugcugcaucuuuaaaugaugauggauuggauaaccauacuauacugcucuauuacucaacugcugcuucuaguuuggcuguaacauuaaugcuagcuauuuuuauuguuuauauggucuccagagacaacguuucaugcuccaucugucuauaa

SEQ ID NO: 58680 - RNA, 1755 nt, Artificial Sequence
  derived and/or modified CDS sequence (wt) from hemagglutinin__InfluenzaB__AET10066
augaaggcaauaauuguacuacucaugguaguaacauccaaugcagaucgaaucugcacugggauaacaucuucaaacucaccucauguggucaaaacagcuacucaaggggaggucaaugugacuggcgugauaccacugacaacaacaccgacaaaaucuuauuuugcaaaccucaaaggaacaaggaccagagggaaacuaugcccggacugucucaacuguacagaucuggauguggccuugggcaggccaauguguguggggaccacaccuucugcuaaagcuucaauacuccacgaagucagaccuguuacauccgggugcuuuccuauaaugcacgacagaacaaaaaucaggcaacuacccaaucuucucagaggauaugaaaauaucagguuaucaacccagaacguuaucgaugcagaaaaagcaccaggaggacccuacagacuuggaaccucaggaucuugcccuaaugcuaccaguaaaaucggauuuuucgcaacaauggcuugggcugucccaaaggacaacuacaaaaaugcaacgaacccacuaacaguagaaguaccauacauuuguaaagaaggggaagaccaaauuacuguuuggggguuccauucagauaacaaaacccaaaugaagaaccucuauggagacucaaauccucaaaaguucaccucaucugcuaauggaguaaccacacauuauguuucucagauuggcgacuucccagaucaaacagaagacggaggacuaccacaaagcggcagaauuguuguugauuacaugaugcaaaaaccugggaaaacaggaacaauugucuaucaaagagguguuuuguugccucaaaagguguggugcgcgaguggcaggagcaaaguaauaaaagggucauugccuuuaauuggugaagcagauugccuucaugagaaauacgguggauuaaacaaaagcaagccuuacuacacaggagaacaugcaaaagccauaggaaacugcccaauauggguaaaaacaccuuugaagcuugccaaugggaccaaauauagaccuccugcaaaacuauuaaaggaaagggguuucuucggggcuauugcugguuuccuagaaggaggaugggaaggaaugauugcagguuggcacggauacacaucucacggagcacauggaguggcaguggcggcagaccuuaagaguacacaagaagcuauaaauaagauaacaaaaaaucucaauucuuugagugagcuagaaguaaagaaccuucaaagacuaaguggugccauggaugaacuccacaacgaaauacucgagcuggaugagaaaguggaugaucucagagcugacacuauaagcucacaaauagaacuugcagucuugcuuuccaacgaaggaauaauaaacagugaagacgagcaucuauuggcacuugagagaaaacuaaagaaaaugcugggccccucugcuguagacauaggaaauggaugcuucgaaaccaaacacaaaugcaaccagaccugcuuagacaggauagcugcuggcaccuuuaaugcaggagaauuuucucuccccacuuuugauucauugaacauuacugcugcaucuuuaaaugaugauggauuggauaaccauacuauacugcucuauuacucaacugcugcuucuaguuuggcuguaacauuaaugcuagcuauuuuuauuguuuauauggucuccagagacaacguuucaugcuccaucugucuauaa

SEQ ID NO: 58681 - RNA, 1755 nt, Artificial Sequence
  derived and/or modified CDS sequence (wt) from hemagglutinin__InfluenzaB__AET10067
augaaggcaauaauuguacuacucaugguaguaacauccaaugcagaucgaaucugcacugggauaacaucuucaaacucaccucauguggucaaaacagcuacucaaggggaggucaaugugacuggcgugauaccacugacagcaacaccaacaaaaucuuauuuugcaaaccucaaaggaacaagaaccagagggaaacuaugcccggacugucucaacuguacagaucuggauguggccuugggcaggccaauguguguggggaccacaccuucugcuaaagcuucaauacuccacgaagucagaccuguuacauccgggugcuuuccuauaaugcacgacagaacaaaaaucaggcaacuacccaaucuucucagaggauaugaaaauaucagguuaucaacccagaacguuaucgaugcagaaaaagcaccaggaggacccuacagacuuggaaccucaggaucuugcccuaaugcuaccaguaaaaucggauuuuucgcaacaauggcuugggcugucccaaaggacaacuacaaaaaugcaacgaacccacuaacaguagaaguaccauacauuuguaaagaaggggaagaccaaauuacuguuuggggguuccauucagauaacaaaacccaaaugaagaaccucuauggagacucaaauccucaaaaguucaccucaucugcuaauggaguaaccacacauuauguuucucagauuggcgacuucccagaucaaacagaagacggaggacuaccacaaagcggcagaauuguuguugauuacaugaugcaaaaaccugggaaaacaggaacaauugucuaucaaagagguguuuuguugccucaaaagguguggugcgcgaguggcaggagcaaaguaauaaaagggucauugccuuuaauuggugaagcagauugccuucaugagaaauacgguggauuaaacaaaagcaagccuuacuacacaggagaacaugcaaaagccauaggaaacugcccaauauggguaaaaacaccuuugaagcuugccaaugggaccaaauauagaccuccugcaaaacuauuaaaggaaagggguuucuucggggcuauugcugguuuccuagaaggaggaugggaaggaaugauugcagguuggcacggauacacaucucacggagcacauggaguggcaguggcggcagaccuuaagaguacacaagaagcuauaaauaagauaacaaaaaaucucaauucuuugagugagcuagaaguaaagaaccuucaaagacuaaguggugccauggaugaacuccacaacgaaauacucgagcuggaugagaaaguggaugaucucagagcugacacuauaagcucacaaauagaacuugcagucuugcuuuccaacgaaggaauaauaaacagugaagacgagcaucuauuggcacuugagagaaaacuaaagaaaaugcugggccccucugcuguagacauaggaaauggaugcuucgaaaccaaacacaaaugcaaccagaccugcuuagacaggauagcugcuggcaccuuuaaugcaggagaauuuucucuccccacuuuugauucauugaacauuacugcugcaucuuuaaaugaugauggauuggauaaccauacuauacugcucuauuacucaacugcugcuucuaguuuggcuguaacauuaaugcuagcuauuuuuauuguuuauauggucuccagagacaacguuucaugcuccaucugucuauaa

SEQ ID NO: 58682 - RNA, 1755 nt, Artificial Sequence
  derived and/or modified CDS sequence (wt) from hemagglutinin__InfluenzaB__AET10068
augaaggcaauaauuguacuacucaugguaguaacauccaaugcagaucgaaucugcacugggauaacaucuucaaacucaccucauguggucaaaacagcuacucaaggggaggucaaugugacuggcgugauaccacugacaacagcaccgacaaaaucuuauuuugcaaaccucaaaggaacaaggaccagagggaaacuaugcccggacugucucaacuguacagaucuggauguggccuugggcaggccaaugugugcggggaccacaccuucugcuaaagcuucaauacuccacgaagucagaccuguuacauccgggugcuuuccuauaaugcacgacagaacaaaaaucaggcaacuacccaaucuucucagaggauaugaaaauaucagguuaucaacccagaacguuaucgaugcagaaaaagcaccaggaggacccuacagacuuggaaccucaggaucuugcccuaaugcuaccaguaaaaucggauuuuucgcaacaauggcuugggcugucccaaaggacaacuacaaaaaugcaacgaacccacuaacaguagaaguaccauacauuuguaaagaaggggaagaccaaauuacuguuuggggguuccauucagauaacaaaacccaaaugaagaaccucuauggagacucaaauccucaaaaguucaccucaucugcuaauggaguaaccacacauuauguuucucagauuggcgacuucccagaucaaacagaagacggaggacuaccacaaagcggcagaauuguuguugauuacaugaugcaaaaaccugggaaaacaggaacaauugucuaucaaagagguguuuuguugccucaaaagguguggugcgcgaguggcaggagcaaaguaauaaaagggucauugccuuuaauuggugaagcagauugccuucaugagaaauacgguggauuaaacaaaagcaagccuuacuacacaggagaacaugcaaaagccauagggaacugcccaauauggguaaaaacaccuuugaagcuugccaaugggaccaaauauagaccuccugcaaaacuauuaaaggaaagggguuucuucggggcuauugcugguuuccuagaaggaggaugggaaggaaugauugcagguuggcacggauacacaucucacggagcacauggaguggcaguggcggcagaccuuaagaguacacaagaagcuauaaauaagauaacaaaaaaucucaauucuuugagugagcuagaaguaaagaaccuucaaagacuaaguggugccauggaugaacuccacaacgaaauacucgagcuggaugagaaaguggaugaucucagagcugacacuauaagcucacaaauagaacuugcagucuugcuuuccaacgaaggaauaauaaacagugaagacgagcaucuauuggcacuugagagaaaacuaaagaaaaugcugggccccucugcuguagacauaggaaauggaugcuucgaaaccaaacacaaaugcaaccagaccugcuuagacaggauagcugcuggcaccuuuaaugcaggagaauuuucucuccccacuuuugauucauugaacauuacugcugcaucuuuaaaugaugauggauuggauaaccauacuauacugcucuauuacucaacugcugcuucuaguuuggcuguaacauuaaugcuagcuauuuuuauuguuuauauggucuccagagacaacguuucaugcuccaucugucuauaa

SEQ ID NO: 58683 - RNA, 1755 nt, Artificial Sequence
  derived and/or modified CDS sequence (wt) from hemagglutinin__InfluenzaB__AET10069
augaaggcaauaauuguacuacucaugguaguaacauccaaugcagaucgaaucugcacugggauaacaucuucaaacucaccucauguggucaaaacagcuacucaaggggaggucaaugugacuggcgugauaccacugacaacaacaccaacaaaaucuuauuuugcaaaccucaaaggaacaaggaccagagggaaacuaugcccggacugucucaacuguacagaucuggauguggccuugggcaggccaauguguguggggaccacaccuucugcuaaagcuucaauacuccacgaagucagaccuguuacauccgggugcuuuccuauaaugcacgacagaacaaaaaucaggcaacuacccaaucuucucagaggauaugaaaauaucagguuaucaacccagaacguuaucgaugcagaaaaagcaccaggaggacccuacagacuuggaaccucaggaucuugcccuaaugcuaccaguaaaaucggauuuuucgcaacaauggcuugggcugucccaaaggacaacuacaaaaaugcaacgaacccacuaacaguagaaguaccauacauuuguaaagaaggggaagaccaaauuacuguuuggggguuccauucagauaacaaaacccaaaugaagaaccucuauggagacucaaauccucaaaaguucaccucaucugcuaauggaguaaccacacauuauguuucucagauuggcgacuucccagaucaaacagaagacggaggacuaccacaaagcggcagaauuguuguugauuacaugaugcaaaaaccugggaaaacaggaacaauugucuaucaaagagguguuuuguugccucaaaagguguggugcgcgaguggcaggagcaaaguaauaaaagggucauugccuuuaauuggugaagcagauugccuucaugagaaauacgguggauuaaacaaaagcaagccuuacuacacaggagaacaugcaaaagccauaggaaacugcccaauauggguaaaaacaccuuugaagcuugccaaugggaccaaauauagaccuccugcaaaacuauuaaaggaaagggguuucuucggggcuauugcugguuuccuagaaggaggaugggaaggaaugauugcagguuggcacggauacacaucucacggagcacauggaguggcaguggcggcagaccuuaagaguacacaagaagcuauaaauaagauaacaaaaaaucucaauucuuugagugagcuagaaguaaagaaccuucaaagacuaaguggugccauggaugaacuccacaacgaaauacucgagcuggaugagaaaguggaugaucucagagcugacacuauaagcucacaaauagaacuugcagucuugcuuuccaacgaaggaauaauaaacagugaagacgagcaucuauuggcacuugagagaaaacuaaagaaaaugcugggccccucugcuguagacauaggaaauggaugcuucgaaaccaaacacaaaugcaaccagaccugcuuagacaggauagcugcuggcaccuuuaaugcaggagaauuuucucuccccacuuuugauucauugaacauuacugcugcaucuuuaaaugaugauggauuggauaaccauacuauacugcucuauuacucaacugcugcuucuaguuuggcuguaacauuaaugcuagcuauuuuuauuguuuauauggucuccagagacaacguuucaugcuccaucugucuauaa

SEQ ID NO: 58684 - RNA, 1758 nt, Artificial Sequence
  derived and/or modified CDS sequence (wt) from hemagglutinin__InfluenzaB__AET10070
augaaggcaauaauuguacuacucaugguaguaacauccaaugcagaucgaaucugcacugggauaacgucgucaaacucaccacaugucgucaaaacugcuacucaaggggaagucaaagugacugguguaauaccacugacaacaacacccaccaaaucucauuuugcaaaucucaaaggaacagaaaccagaggaaaacuaugcccaaaaugccccaacugcacagaucuggacguagccuugggcagaccaaaaugcacggggaaaauacccucggcaagaguuucaauacuccaugaagucagaccuguuacaucugggugcuuuccuauaaugcacgacagaacaaaaauuagacagcugccuaaccuucuccgaggauacgaacauaucagguuaucaacucauaacguuaucaaugcagaaaaugcaccaggaggacccuacaaaauuggaaccucagggucuugcccuaacguuaccaauggaaacggauuuuucgcaacaauggcuugggccgucccaaaaaacgacaaaaacaaaacagcaacaaauccauuaacaauagaaguaccauacauuuguacagaaggagaagaccaaauuaccguuuggggguuccacucugauaacgagacccaaauggcaaagcuuuauggggacucaaagccccagaaguucaccucaucugccaacggagugaccacacauuacguuucacagauugguggcuucccaaaucaaacagaagacggaggacuaccacaaagugguagaauuguuguugauuacauggugcaaaaaucugggaaaacaggaacaauuaccuaucaaagagguauuuuauugccucaaaagguguggugcgcaaguggcaggagcaagguaauaaaaggauccuugccuuuaauuggagaagcagauugccuccacgaaaaauacgguggauuaaacaaaagcaagccuuacuacacaggggaacaugcaaaggccauaggaaauugcccaauaugggugaagacacccuugaagcuggccaauggaaccaaauauagaccuccugcaaaacuauuaaaggaaagggguuucuucggagcuauugcugguuucuuggaaggaggaugggaaggaaugauugcagguuggcacggauacacgucccauggggcacauggaguagcgguggcagcagaccuuaagagcacucaagaggccauaaacaagauaacaaaaaaucuuaacucuuugagugaacuggaaguaaagaaucuucaaagacuaagcggugccauggaugaacuccacaacgaaauacuagaacuagacgaaaaaguggaugaucucagagcugauacaauaagcucacaaauagaacucgcaguccugcuuuccaaugaaggaauaauaaacagugaagaugaacaucucuuggcgcuugaaagaaagcugaagaaaaugcugggccccucugcuguagaaauagggaauggaugcuuugaaaccaaacacaagugcaaccagaccugucucgacagaauagcugcugguaccuuugaugcaggagaauuuucucuccccacuuuugauucacugaauauuacugcugcaucuuuaaaugacgauggauuggauaaucauacuauacugcuuuacuacucaacugcugccuccaguuuggcuguaacacugaugauagcuaucuuuguuguuuauauggucuccagagacaauguuucuugcuccaucugucuauaa

SEQ ID NO: 58685 - RNA, 1758 nt, Artificial Sequence
  derived and/or modified CDS sequence (wt) from hemagglutinin__InfluenzaB__AET10071
augaaggcaauaauuguacuacucaugguaguaacauccaaugcagaucgaaucugcacugggauaacgucgucaaacucaccacaugucgucaaaacugcuacucaaggggaagucaaugugacugguguaauaccacugacaacaacacccaccaaaucucauuuugcaaaucucaaaggaacagaaaccagagggaaacuaugcccaaaaugccccaacugcacagaucuggacguagccuugggcagaccaaaaugcacggggaaaauacccucggcaagaguuucaauacuccaugaagucagaccuguuacaucugggugcuuuccuauaaugcacgacagaacaaaaauuagacagcugccuaaccuucuccgaggauacgaacauaucagguuaucaacucauaacguuaucaaugcagaaaaugcaccaggaggacccuacaaaauuggaaccucagggucuugcccuaacguuaccaauggaaacggauuuuucgcaacaauggcuugggccgucccaaaaaacgacaaaaacaaaacagcaacaaauccauuaacaauagaaguaccauacauuuguacagaaggagaagaccaaauuaccguuuggggguuccacucugauaacgagacacaaauggcaaagcuuuauggggacucaaagccccagaaguucaccucaucugccaacggagugaccacacauuacguuucacagauugguggcuucccaaaucaaacagaagacggaggacuaccacaaagugguagaauuguuguugauuacauggugcaaaaaucugggaaaacaggaacaauuaccuaucaaagagguauuuuauugccucaaaagguguggugcgcaaguggcaggagcaagguaauaaaaggauccuugccuuuaauuggagaagcagauugccuccacgaaaaauacgguggauuaaacaaaagcaagccuuacuacacaggggaacaugcaaaggccauaggaaauugcccaauaugggugaagacacccuugaagcuggccaauggaaccaaauauagaccuccugcaaaacuauuaaaggaaagggguuucuucggagcuauugcugguuucuuggaaggaggaugggaaggaaugauugcagguuggcacggauacacgucccauggggcacauggaguagcgguggcagcagaccuuaagagcacucaagaggccauaaacaagauaacaaaaaaucuuaacucuuugagugaacuggaaguaaagaaucuucaaagacuaagcggugccauggaugaacuccacaacgaaauacuagaacuagacgaaaaaguggaugaucucagagcugauacaauaagcucacaaauagaacucgcaguccugcuuuccaaugaaggaauaauaaacagugaagaugaacaucucuuggcgcuugaaagaaagcugaagaaaaugcugggccccucugcuguagaaauagggaauggaugcuuugaaaccaaacacaagugcaaccagaccugucucgacagaauagcugcugguaccuuugaugcaggagaauuuucucuccccaccuuugauucacugaauauuacugcugcaucuuuaaaugacgauggauuggauaaucauacuauacugcuuuacuacucaacugcugccuccaguuuggcuguaacacugaugauagcuaucuuuguuguuuauauggucuccagagacaauguuucuugcuccaucugucuauaa

SEQ ID NO: 58686 - RNA, 1758 nt, Artificial Sequence
  derived and/or modified CDS sequence (wt) from hemagglutinin__InfluenzaB__AET10072
augaaggcaauaauuguacuacucaugguaguaacauccaaugcagaucgaaucugcacugggauaacaucgucaaacucaccacaugucgucaaaacugcuacucaaggggaggucaaugugacugguguaauaccacugacaacaacacccaccaaaucucauuuugcaaaucucaaaggaacagaaaccagagggaaacuaugcccaaaaugccccaacugcacagaucuggacguagccuugggcagaccaaaaugcacggggaaaauacccucggcaagaguuucaauacuccaugaagucagaccuguuacaucugggugcuuuccuauaaugcacgacagaacaaaaauuagacagcugccuaaccuucuccgaggauacgaacauaucagauuaucaacucauaacguuaucaaugcagaaaaugcaccaggaggacccuacaaaauuggaaccucagggucuugcccuaacguuaccaauggaaacggauuuuucgcaacaauggcuugggccgucccaaaaaacgacaaaaacaaaacagcaacaaauccauuaacaauagaaguaccauacauuuguacagaaggagaagaccaaauuaccguuuggggguuccacucugauaacgagacccaaauggcaaagcucuauggggacucaaagccccagaaguucaccucaucugccaacggagugaccacacauuacguuucacagauugguggcuucccaaaucaaacagaagacggaggacuaccacaaagugguagaauuguuguugauuacauggugcaaaaaucugggaaaacaggaacaauuaccuaucaaagagguauuuuauugccucaaaagguguggugcgcaaguggcaggagcaagguaauaaaaggauccuugccuuuaauuggagaagcggauugccuccacgaaaaauacgguggauuaaacaaaagcaagccuuacuacacaggggaacaugcaaaggccauaggaaauugcccaauaugggugaagacacccuugaagcuggccaauggaaccaaauauagaccuccugcaaaacuauuaaaggaaagggguuucuucggagcuauugcugguuucuuagaaggaggaugggaaggaaugauugcagguuggcacggauacacgucccauggggcacauggaguagcgguggcagcagaccuuaagagcacucaagaggccauaaacaagauaacaaaaaaucucaacucuuugagugagcuagaaguaaagaaucuucaaagacuaagcggugccauggaugaacuccacaacgaaauacuagaacuagacgagaaaguggaugaucucagagcugauacaauaagcucacaaauagaacucgcaguccugcuuuccaaugaaggaauaauaaacagugaagaugaacaucucuuggcgcuugaaagaaagcugaagaaaaugcugggccccucugcuguagagauagggaauggaugcuuugaaaccaaacacaagugcaaccagaccugucucgacagaauagcugcugguaccuuugaugcaggagaauuuucucuccccaccuuugauucacugaauauuacugcugcaucuuuaaaugacgauggauuggauaaucauaccauacugcuuuacuacucaacugcugccuccaguuuggcuguaacacugaugauagcuaucuuuguuguuuauauggucuccagagacaauguuucuugcuccaucugucuauaa

SEQ ID NO: 58687 - RNA, 1755 nt, Artificial Sequence
  derived and/or modified CDS sequence (wt) from hemagglutinin__InfluenzaB__AET10073
augaaggcaauaauuguacuacucaugguaguaacauccaaugcagaucgaaucugcacugggauaacaucuucaaacucaccucauguggucaaaacagcuacucaaggggaggucaaugugacuggcgugauaccacugacaacaacaccgacaaaaucuuauuuugcaaaccucaaaggaacaaggaccagagggaaacuaugcccggacugucucaacuguacagaucuggauguggccuugggcaggccaauguguguggggaccacaccuucugcuaaagcuucaauacuccacgaagucagaccuguuacauccgggugcuuuccuauaaugcacgacagaacaaaaaucaggcaacuacccaaucuucucagaggaugugaaaauaucagguuaucaacccagaauguuaucgaugcagaaaaagcaccaggaggacccuacagacuuggaaccucaggaucuugcccuaaugcuaccaguaaaaucggauuuuucgcaacaauggcuugggcugucccaaaggacaacuacaaaaaugcaacgaacccacuaacaguagaaguaccauacauuuguaaagaaggggaagaccaaauuacuguuuggggguuccauucagauaacaaaacccaaaugaagaaccucuauggagacucaaauccucaaaaguucaccucaucugcuaauggaguaaccacacauuauguuucucagauuggcgacuucccagaucaaacagaagacggaggacuaccacaaagcggcagaauuguuguugauuacaugaugcaaaaaccugggaaaacaggaacaauugucuaucaaagagguguuuuguugccucaaaagguguggugcgcgaguggcaggagcaaaguaauaaaagggucauugccuuuaauuggugaagcagauugccuucaugagaaauacgguggauuaaacaaaagcaagccuuacuacacaggagaacaugcaaaagccauaggaaacugcccaauauggguaaaaacaccuuugaagcuugccaaugggaccaaauauagaccuccugcaaaacuauuaaaggaaagggguuucuucggggcuauugcugguuuccuagaaggaggaugggaaggaaugauugcagguuggcacggauacacaucucacggagcacauggaguggcaguggcggcagaccuuaagaguacacaagaagcuauaaauaagauaacaaaaaaucucaauucuuugagugagcuagaaguaaagaaccuucaaagacuaaguggugccauggaugaacuccacaacgaaauacucgagcuggaugagaaaguggaugaucucagagcugacacuauaagcucacaaauagaacuugcagucuugcuuuccaacgaaggaauaauaaacagugaagacgagcaucuauuggcacuugagagaaaacuaaagaaaaugcugggccccucugcuguagacauaggaaauggaugcuucgaaaccaaacacaaaugcaaccagaccugcuuagacaggauagcugcuggcaccuuuaaugcaggagaauuuucucuccccacuuuugauucauugaacauuacugcugcaucuuuaaaugaugauggauuggauaaccauacuauacugcucuauuacucaacugcugcuucuaguuuggcuguaacauuaaugcuagcuauuuuuauuguuuauauggucuccagagacaacguuucaugcuccaucugucuauaa

SEQ ID NO: 58688 - RNA, 1758 nt, Artificial Sequence
  derived and/or modified CDS sequence (wt) from hemagglutinin__InfluenzaB__AET10074
augaaggcaauaauuguacuacucaugguaguaacauccaacgcagaucgaaucugcacugggauaacaucgucaaacucaccacaugucgucaaaacugcuacucaaggggaggucaaugugacugguguaauaccacugacaacaacacccacuagaucucauuuugcaaaucucaaaggaacagaaaccagagggaaacuaugcccaaaaugccccaacugcacagaucuggacguagccuugggcagaccaaaaugcacggggaaaauacccucggcaagaguuucaauacuccaugaagucagaccuguuacaucugggugcuuuccuauaaugcacgacagaacaaaaauuagacagcugccuaaucuucuccgaggauacgaacauaucagguuaucaacucauaacguuaucaaugcagaaaaugcaccaggaggacccuacaaaauuggaaccucagggucuugcccuaauguuaccaauggaaacggauuuuucgcaacaauggcuugggccgucccaaaaaacgacaaaaacaaaacagcaacaaauccauuaacaauagaaguaccauacauuuguacagaaggagaagaccaaauuaccguuuggggguuccacucugauaacgagacccaaauggcaaagcucuauggggacucaaagccccagaaguucaccucaucugccaacggagugaccacacauuacguuucacagauugguggcuucccaaaucaaacagaagacggaggacuaccacaaagugguagaauuguuguugauuacauggugcaaaaaucugggagaacaggaacaauuaccuaucaaagagguauuuuauugccucaaaagguguggugcgcaaguggcaggagcaagguaauaaaaggauccuugccuuuaauuggagaagcagauugccuccacgaaaaauacgguggauuaaacaaaagcaagccuuacuacacaggggaacaugcaaaggccauaggaaauugcccaauaugggugaagacacccuugaagcuggccaauggaaccaaauauagaccuccugcaaaacuauuaaaggaaagggguuucuucggagcuauugcugguuuccuagaaggaggaugggaaggaaugauugcagguuggcacggauacacgucccauggggcacauggaguagcgguggcagcagaccuuaagagcacucaagaggccauaaacaagauaacaaaaaaucucaacucuuugagugagcuggaaguaaagaaucuucaaagacuaagcggugccauggaugaacuccacaacgaaauacuagaacuagacgagaaaguggaugaucucagagcugauacaauaagcucacaaauagaacucgcaguccugcuuuccaaugaaggaauaauaaacagugaagaugaacaucucuuggcgcuugaaagaaagcugaagaaaaugcugggccccucugcuguagagauagggaauggaugcuuugaaaccaaacacaagugcaaccagaccugucucgacagaauagcugcugguaccuuugaugcaggagaauuuucucuccccaccuuugauucacugaauauuacugcugcaucuuuagaugacgauggauuggauaaucauacuauacugcuuuacuacucaacugcugccuccaguuuggcuguaacacugaugauagcuaucuuuguuguuuauauggucuccagagacaauguuucuugcuccaucugucuauaa

SEQ ID NO: 58689 - RNA, 1758 nt, Artificial Sequence
  derived and/or modified CDS sequence (wt) from hemagglutinin__InfluenzaB__AET10076
augaaggcaauaauuguacuacucaugguaguaacauccaaugcagaucgaaucugcacugggauaacgucgucaaacucaccacaugucgucaaaacugcuacucaaggggaagucaaugugacugguguaauaccacugacaacaacacccaccaaaucucauuuugcaaaucucaaaggaacagaaaccagaggaaaacuaugcccaaaaugccccaacugcacagaucuggacguagccuugggcagaccaaaaugcacggggaaaauacccucggcaagaguuucaauacuccaugaagucagaccuguuacaucugggugcuuuccuauaaugcacgacagaacaaaaauuagacagcugccuaaccuucuccgaggauacgaacauaucagguuaucaacucauaacguuaucaaugcagaaaaugcaccaggaggacccuacaaaauuggaaccucagggucuugcccuaacguuaccaauggaaacggauuuuucgcaacaauggcuugggccgucccaaaaaacgacaaaaacaaaacagcaacaaauccauuaacaauagaaguaccauacauuuguacagaaggagaagaccaaauuaccguuuggggguuccacucugauaacgagacccaaauggcaaagcuuuauggggacucaaagccccagaaguucaccucaucugccaacggagugaccacacauuacguuucacagauugguggcuucccaaaucaaacagaagacggaggacuaccacaaagugguagaauuguuguugauuacauggugcaaaaaucugggaaaacaggaacaauuaccuaucaaagagguauuuuauugccucaaaagguguggugcgcaaguggcaggagcaagguaauaaaaggauccuugccuuuaauuggagaagcagauugccuccacgaaaaauacgguggauuaaacaaaagcaagccuuacuacacaggggaacaugcaaaggccauaggaaauugcccaauaugggugaagacacccuugaagcuggccaauggaaccaaauauagaccuccugcaaaacuauuaaaggaaagggguuucuucggagcuauugcugguuucuuggaaggaggaugggaaggaaugauugcagguuggcacggauacacgucccauggggcacauggaguagcgguggcagcggaccuuaagagcacucaagaggccauaaacaagauaacaaaaaaucuuaacucuuugagugaacuggaaguaaagaaucuucaaagacuaagcggugccauggaugaacuccacaacgaaauacuagaacuagacgaaaaaguggaugaucucagagcugauacaauaagcucacaaauagaacucgcaguccugcuuuccaaugaaggaauaauaaacagugaagaugaacaucucuuggcgcuugaaagaaagcugaagaaaaugcugggccccucugcuguagaaauagggaauggaugcuuugaaaccaaacacaagugcaaccagaccugucucgacagaauagcugcugguaccuuugaugcaggagaauuuucucuccccaccuuugauucacugaauauuacugcugcaucuuuaaaugacgauggauuggauaaucauacuauacugcuuuacuacucaacugcugccuccaguuuggcuguaacacugaugauagcuaucuuuguuguuuauauggucuccagagacaauguuucuugcuccaucugucuauaa

SEQ ID NO: 58690 - RNA, 1758 nt, Artificial Sequence
  derived and/or modified CDS sequence (wt) from hemagglutinin__InfluenzaB__AET10077
augaaggcaauaauuguacuacucaugguaguaacauccaaugcagaucgaaucugcacugggauaacgucgucaaacucaccacaugucgucaaaacugcuacucaaggggaagucaaugugacugguguaauaccacugacaacaacacccaccaaaucucauuuugcaaaucucaaaggaacagaaaccagaggaaaacuaugcccaaaaugccccaacugcacagaucuggacguagccuugggcagaccaaaaugcacggggaaaauacccucggcaagaguuucaauacuccaugaagucagaccuguuacaucugggugcuuuccuauaaugcacgacagaacaaaaauuagacagcugccuaaccuucuccgaggauacgaacauaucagguuaucaacucauaacguuaucaaugcagaaaaugcaccaggaggacccuacaaaauuggaaccucagggucuugcccuaacguuaccaauggaaacggauuuuucgcaacaauggcuugggccgucccaaaaaacgacaaaaacaaaacagcaacaaauccauuaacaauagaaguaccauacauuuguacagaaggagaagaccaaauuaccguuuggggguuccacucugauaacgagacccaaauggcaaagcuuuauggggacucaaagccccagaaguucaccucaucugccaacggagugaccacacauuacguuucacagauugguggcuucccaaaucaaacagaagacggaggacuaccacaaagugguagaauuguuguugauuacauggugcaaaaaucugggaaaacaggaacaauuaccuaucaaagagguauuuuauugccucaaaagguguggugcgcaaguggcaggagcaagguaauaaaaggauccuugccuuuaauuggagaagcagauugccuccacgaaaaauacgguggauuaaacaaaagcaagccuuacuacacaggggaacaugcaaaggccauaggaaauugcccaauaugggugaagacacccuugaagcuggccaauggaaccaaauauagaccuccugcaaaacuauuaaaggaaagggguuucuucggagcuauugcugguuucuuggaaggaggaugggaaggaaugauugcagguuggcacggauacacgucccauggggcacauggaguagcgguggcagcagaccuuaagagcacucaagaggccauaaacaagauaacaaaaaaucuuaacucuuugagugaacuggaaguaaagaaucuucaaagacuaagcggugccauggaugaacuccacaacgaaauacuagaacuagacgaaaaaguggaugaucucagagcugauacaauaagcucacaaauagaacucgcaguccugcuuuccaaugaagggauaauaaacagugaagaugaacaucucuuggcgcuugaaagaaagcugaagaaaaugcugggccccucugcuguagaaauagggaauggaugcuuugaaaccaaacacaagugcaaccagaccugucucgacagaauagcugcugguaccuuugaugcaggagaauuuucucuccccaccuuugauucacugaauauuacugcugcaucuuuaaaugacgauggauuggauaaucauacuauacuacuuuacuacucaacugcugccuccaguuuggcuguaacacugaugauagcuaucuuuguuguuuauauggucuccagagacaauguuucuugcuccaucugucuauaa

SEQ ID NO: 58691 - RNA, 1758 nt, Artificial Sequence
  derived and/or modified CDS sequence (wt) from hemagglutinin__InfluenzaB__AET10078
augaaggcaauaauuguacuacucaugguaguaacauccaaugcagaucgaaucugcacugggauaacaucgucaaacucaccacaugucgucaaaacugcuacucaaggggaggucaaugugacugguguaauaccacugacaacaacacccaccaaaucucauuucgcaaaucucaaaggaacagaaaccagagggaaacuaugcccaaaaugccucaacugcacagaucuggacguagccuugggcagaccaaaaugcacggggaaaauacccucggcaagaguuucaguacuccaugaagucagaccuguuacaucugggugcuuuccuauaaugcacgacagaacaaaaauuagacagcugccuaaccuucuccgaggauacgaacauaucagauuaucaacucauaacguuaucaaugcagaaaaugcaccaggaggacccuauaaaauuggaaccucagggucuugcccuaacguuaccaauggaaacggauuuuucgcaacaauggcuugggccguuccaaaaaacgacaaaaacaaaacagcaacaaauccauuaacaauagaaguaccauacauuuguacagaaggagaagaccaaauuaccguuuggggguuccacucugauaacgagacccaaauggcaaagcucuauggggacucaaagccccagaaguucaccucaucugccaacggagugaccacacauuacguuucacagauugguggcuucccaaaucaaacagaagacggaggacuaccacaaagugguagaauuguuguugauuacauggugcaaaaaucugggaaaacaggaacaauuacuuaucaaagagguauuuuauugccucaaaagguguggugcgcaaguggcaggagcaagguaauaaaaggauccuugccuuuaauuggagaagcagauugccuccacgaaaaauacgguggauuaaacaaaagcaagccuuacuacacaggggaacaugcaaaggccauaggaaauugcccaauaugggugaagacacccuugaagcuggccaauggaaccaaauauagaccuccugcaaaacuauuaaaggaaagggguuucuucggagcuauugcugguuucuuagaaggaggaugggaaggaaugauugcagguuggcacggauacacgucccauggggcacauggaguagcgguggcagcagaccuuaagagcacucaagaggccauaaacaagauaacaaaaaaucucaacucuuugagugagcuggaaguaaagaaucuucaaagacuaagcggugccauggaugaacuccacaacgaaauacuagaacuagacgagaaaguggaugaucucagagcugauacaauaagcucacaaauagaacucgcaguccugcuuuccaaugaaggaauaauaaacagugaagaugaacaucucuuggcgcuugaaagaaagcugaagaaaaugcugggcccuucugcuguagagauagggaauggaugcuuugaaaccaaacacaagugcaaccagaccugucucgacagaauagcugcugguaccuuuaaugcaggagaauuuucucuccccaccuuugauucacugaauauuacugcugcaucuuuaaaugaagauggauuggauaaucaugccauacugcuuuacuacucaacugcugccuccaguuuggcuguaacacugaugauagcuaucuuuguuguuuauauggucuccagagacaauguuucuugcuccaucugucuauaa

SEQ ID NO: 58692 - RNA, 1758 nt, Artificial Sequence
  derived and/or modified CDS sequence (wt) from hemagglutinin__InfluenzaB__AET10079
augaaggcaauaauuguacuacucaugguaguaacauccaaugcagaugggaucugcacugggauaacgucgucaaacucaccacaugucgucaaaacugcuacucaaggggaagucaaugugacugguguaauaccacugacaacaacacccaccaaaucucauuuugcaaaucucaaaggaacagaaaccagagggaaacuaugcccaaaaugccccaacugcacagaucuggacguagccuugggcaggccaaaaugcacggggaaaauacccucggcaagaguuucaauacuccaugaagucaggccuguuacaucugggugcuuuccuauaaugcacgacagaacaaaaauuagacagcugccuaaccuucuccgaggauacgaacauaucagguuaucaacucauaacguuaucaaugcagaaaaugcaccaggaggacccuacaaaauuggaaccucagggucuugcccuaacguuaccaauggaaacggauuuuucacaacaauggcuugggccgucccaaaaaacgacaaaaacaaaacagcaacaaauccauuaacaauagaaguaccauacauuuguacagaaggagaagaccaaauuaccguuuggggguuccacucugauaacgagacacaaauggcaaagcuuuauggggacucaaagccccagaaguucaccucaucugccaacggagugaccacacauuacguuucacagauugguggcuucccaaaucaaacagaagacggaggacuaccacaaagugguagaauuguuguugauuacauggugcaaaaaucugggaaaacaggaacaauuaccuaucaaagagguauuuuauugccucaaaagguguggugcgcaaguggcaggagcaagguaauaaaaggauccuugccuuuaauuggagaagcagauugccuccacgaaaaauacgguggauuaaacaaaagcaagccuuacuacacaggggaacaugcaaaggccauaggaaauuguccaauaugggugaagacacccuugaagcuggccaauggaaccaaauauagaccuccugcaaaacuauuaaaggaaagggguuucuucggagcuauugcugguuucuuggaaggaggaugggaaggaaugauugcagguuggcacggauacacgucccauggggcacauggaguagcgguggcagcagaccuuaagagcacucaagaggccauaaacaagauaacaaaaaaucuuaacucuuugagugaacuggaaguagagaaucuucaaagacuaagcggugccauggaugaacuccacaacgaaauacuagaacuagacgaaaaaguggaugaucucagagcugauacaauaagcucacaaauagaacucgcaguccugcuuuccaaugaaggaauaauaaacagugaagaugaacaucucuuggcgcuugaaagaaagcugaagaaaaugcugggccccucugcuguagaaauagggaauggaugcuuugaaaccaaacacaagugcaaccagaccugucucgacagaauagcugcugguaccuuugaugcaggagaauuuucucuccccaccuuugauucacugaauauuacugcugcaucuuuaaaugacgauggauuggauaaucauacuauacugcuuuacuacucaacugcugccuccaguuuggcuguaacacugaugauagcuaucuuuguuguuuauauggucuccagagacaauguuucuugcuccaucugucuauaa

SEQ ID NO: 58693 - RNA, 1758 nt, Artificial Sequence
  derived and/or modified CDS sequence (wt) from hemagglutinin__InfluenzaB__AET10080
augaaggcaauaauuguacuacucaugguaguaacauccaaugcagaucgaaucugcacugggauaacgucgucaaacucaccacaugucgucaaaacugcuacccaaggggaagucaaugugacugguguaauaccacugacaacaacacccaccaaaucucauuuugcaaaucucaaaggaacagaaaccagaggaaaacuaugcccaaaaugccccaacugcacagaucuagacguagccuugggcagaccaaaaugcacggggaaaauacccucggcaagaguuucaauacuccaugaagucagaccuguuacaucugggugcuuuccuauaaugcacgacagaacaaaaauuagacagcugccuaaccuucuccgaggauacgaacauaucagguuaucaacucauaacguuaucaaugcagaaaaugcaccaggaggacccuacaaaauuggaaccucagggucuugcccuaacguuaccaauggaaacggauuuuucgcaacaauggcuugggccgucccaaaaaacgacaaaaacaaaacagcaacaaauccauuaacaauagaaguaccauacauuuguacagaaggagaagaccaaauuaccguuuggggguuccacucugauaacgagacccaaauggcaaagcuuuauggggacucaaagccccagaaguucaccucaucugccaacggagugaccacacauuacguuucacagauugguggcuucccaaaucaaacagaagacggaggacuaccacaaagugguagaauuguuguugauuacauggugcaaaaaucugggaaaacaggaacaauuaccuaucaaagagguauuuuauugccucaaaagguguggugcgcaaguggcaggagcaagguaauaaaaggauccuugccuuuaauuggagaagcagauugccuccacgaaaaauacgguggauuaaacaaaagcaagccuuacuacacaggggaacaugcaaaggccauaggaaauugcccaauaugggugaagacacccuugaagcuggccaauggaaccaaauauagaccuccugcaaaacuauuaaaggaaagggguuucuucggagcuauugcugguuucuuggaaggaggaugggaaggaaugauugcagguuggcacggauacacgucccauggggcacauggaguagcgguggcagcagaccuuaagagcacucaagaggccauaaacaagauaacaaaaaaucuuaacucuuugagugaacuggaaguaaagaaucuucaaagacuaagcggugccauggaugaacuccacaacgaaauacuagaacuagacgaaaaaguggaugaucucagagcugauacaauaagcucacaaauagaacucgcaguccugcuuuccaaugaaggaauaauaaacagugaagaugaacaucucuuggcgcuugaaagaaagcugaagaaaaugcugggccccucugcuguagaaauagggaauggaugcuuugaaaccaaacacaagugcaaccagaccugucucgacagaauagcugcugguaccuuugaugcaggagaauuuucucuccccaccuuugauucacugaauauuacugcugcaucuuuaaaugacgauggauuggauaaucauacuauacugcuuuacuacucaacugcugccuccaguuuggcuguaacacugaugauagcuaucuuuguuguuuauauggucuccagagacaauguuucuugcuccaucugucuauaa

SEQ ID NO: 58694 - RNA, 1758 nt, Artificial Sequence
  derived and/or modified CDS sequence (wt) from hemagglutinin__InfluenzaB__AET10081
augaaggcaauaauuguacuacucaugguaguaacauccaaugcagaucgaaucugcacugggauaacgucgucaaacucaccacaugucgucaaaacugcuacucaaggggaagucaaugugacugguguaauaccacugacaacaacacccaccaaaucucauuuugcaaaucucaaaggaacagaaaccagaggaaaacuaugcccaaaaugccccaacugcacagaucuggacguagccuugggcagaccaaaaugcacggggaaaauacccucggcaagaguuucaauacuccaugaagucagaccuguuacaucugggugcuuuccuauaaugcacgacagaacaaaaauuagacagcugccuaaccuucuccgaggauacgaacauaucagguuaucaacucauaacguuaucaaugcagaaaaugcaccaggaggacccuacaaaauuggaaccucagggucuugcccuaacguuaccaauggaaacggauuuuucgcaacaauggcuugggccgucccaaaaaacgacaaaaacaaaacagcaacaaauccauuaacaauagaaguaccauacauuuguacagaaggagaagaccaaauuaccguuuggggguuccacucugauaacgagacccaaauggcaaagcuuuauggggacucaaagccccagaaguucaccucaucugccaacggagugaccacacauuacguuucacagauugguggcuucccaaaucaaacagaagacggaggacuaccacaaagugguagaauuguuguugauuacauggugcaaaaaucugggaaaacaggaacaauuaccuaucaaagagguauuuuauugccucaaaagguguggugcgcaaguggcaggagcaagguaauaaaaggauccuugccuuuaauuggagaagcagauugccuccacgaaaaauacgguggauuaaacaaaagcaagccuuacuacacaggggaacaugcaaaggccauaggaaauugcccaauaugggugaagacacccuugaagcuggccaauggaaccaaauauagaccuccugcaaaacuauuaaaggaaagggguuucuucggagcuauugcugguuucuuggaaggaggaugggaaggaaugauugcagguuggcacggauacacgucccauggggcacauggaguagcgguggcagcagaccuuaagagcacucaagaggccauaaacaagauaacaaaaaaucuuaacucuuugagugaacuggaaguaaagaaucuucaaagacuaagcggugccauggaugaacuccacaacgaaauacuagaacuagacgaaaaaguggaugaucucagagcugauacaauaagcucacaaauagaacucgcaguccugcuuuccaaugaagggauaauaaacagugaagaugaacaucucuuggcgcuugaaagaaagcugaagaaaaugcugggccccucugcuguagaaauagggaauggaugcuuugaaaccaaacacaagugcaaccagaccugucucgacagaauagcugcugguaccuuugaugcaggagaauuuucucuccccaccuuugauucacugaauauuacugcugcaucuuuaaaugacgauggguuggauaaucauacuauacuacuuuacuacucaacugcugccuccaguuuggcuguaacacugaugauagcuaucuuuguuguuuauauggucuccagagacaauguuucuugcuccaucugucuauaa

SEQ ID NO: 58695 - RNA, 1758 nt, Artificial Sequence
  derived and/or modified CDS sequence (wt) from hemagglutinin__InfluenzaB__AET10082
augaaggcaauaauuguacuacucaugguaguaacauccaaugcagaucgaaucugcacugggauaacaucgucaaacucaccacauaucgucaaaacugcuacucaaggggaggucaaugugacugguguaauaccacugacaacaacacccaccaaaucucauuuugcaaaucucaaaggaacagaaaccagggggaaacuaugcccaaaaugccucaacugcacagaucuggacguagccuugggcagaccaaaaugcacggggaaaauacccucggcaagaguuucaauacuccaugaagucagaccuguuacaucugggugcuuuccuauaaugcacgacagaacaaaaauuagacagcugccuaaccuucucagaggauacgaacauaucagguuaucaacucauaacguuaucaaugcagaaaaugcaccaggaggacccuacaaaauuggaaccucagggucuugccccaacauuaccaauggaaacggauuuuucgcaacaauggcuugggccgucccaaaaaacgacaaaaacaaaacagcaacaaauccauuaacaauagaaguaccauacauuuguacagaaggagaagaccaaauuaccguuuggggguuccacucugacaaugaaacccaaauggcaaagcucuauggggacucaaagccccagaaguucaccucaucugccaacggagugaccacacauuacguuucacagauugguggcuucccaaaucaaacagaagacggaggacuaccacaaagugguagaauuguuguugauuacauggugcaaaaaucugggaaaacaggaacaauuaccuaucaaagggguauuuuauugccucaaaagguguggugcgcaaguggcaggagcaagguaauaaaaggauccuugccuuuaauuggagaagcagauugccuccacgaaaaauacgguggauuaaacaaaagcaagccuuacuacacaggggaacaugcaaaggccauaggaaauugcccaauaugggugaaaacacccuugaagcuggccaauggaaccaaauauagaccuccugcaaaacuauuaaaggaaagggguuucuucggugcuauugcuggcuucuuagaaggaggaugggaaggaaugauugcagguuggcacggauacacaucccauggggcacauggaguagcgguggcagcagaccuuaagagcacucaagaggccauaaacaagauaacaaaaaaucucaacucuuugagugagcuggaaguaaagaaucuucaaagacuaagcggugccauggaugaacuccacaaugaaauacuagaauuagaugagaaaguggaugaucucagagcugauacaauaagcucacaaauagaacuagcaguccugcuuuccaaugaaggaauaauaaacagugaagaugaacaucucuuggcgcuugaaagaaagcugaagaaaaugcugggccccucugcuguagagauagggaauggaugcuuugaaaccaaacacaagugcaaccagaccugucucgacagaauagcugcugguaccuuugaugcaggagaauuuucucuccccacuuuugauucacugaauauuacugcugcaucuuuaaaugacgauggauuggauaaucauacuauacugcuuuacuacucaacugcugccuccaguuuggcuguaacacugaugauagcuaucuuuguuguuuauauggucuccagagacaauguuucuugcuccaucugucuauaa

SEQ ID NO: 58696 - RNA, 1758 nt, Artificial Sequence
  derived and/or modified CDS sequence (wt) from hemagglutinin__InfluenzaB__AET10083
augaaggcaauaauuguacuacucaugguaguaacauccaaugcagaucgaaucugcacugggauaacaucgucaaacucaccacaugucgucaaaacugcuacucaaggggaggucaaugugacugguguaauaccacugacaacaacacccaccaaaucucauuuugcaaaucucaaaggaacagaaaccagggggaaacuaugcccaaaaugccucaacugcacagaucuggacguagccuugggcagaccaaaaugcacggggaaaguacccucggcaagaguuucaauacuccaugaagucagaccuguuacaucugggugcuuuccuauaaugcacgacagaacaaaaauuagacagcugccuaaccuucuccgaggauacgaacauaucagguuaucaacucauaacguuaucaaugcagaaaaugcaccaggaggacccuacaaaauuggaaccucagggucuugcccuaacauuaccaauggaaacggauuuuucgcaacaauggcuugggccgucccaaaaaacgacaaaaacaaaacagcaacaaauccauuaacaauagaaguaccauacauuuguacagaaggagaagaccaaauuaccguuuggggguuccacucugacaacgagacccaaauggcaaagcucuauggggacucaaagccccagaaguucaccucaucugccaacggagugaccacacauuacguuucacagauugguggcuucccaaaucaaacagaagacggaggacuaccacaaagugguagaauuguuguugauuacauggugcaaaaaucugggaaaacaggaacaauuaccuaucaaagggguauuuuauugccucaaaagguguggugcgcaaguggcaggagcaagguaauaaaaggauccuugccuuuaauuggagaagcagauugccuccacgaaaaauacgguggauuaaacaaaagcaagccuuacuacacaggggaacaugcaaaggccauaggaaauugcccaauaugggugaaaacacccuugaagcuggccaauggaaccaaauauagaccuccugcaaaacuauuaaaggaaagggguuucuucggagcuauugcugguuucuuagaaggaggaugggaaggaaugauugcagguuggcacggauacacaucccauggggcacauggaguagcgguggcagcagaccuuaagagcacucaagaggccauaaacaagauaacaaaaaaucucaacucuuugagugagcuggaaguaaagaaucuucaaagacuaagcggugccauggaugaacuccacaaugaaauacuagaauuagaugagaaaguggaugaucucagagcugauacaauaagcucacaaauagaacucgcaguccugcuuuccaaugaaggaauaauaaacagugaagaugaacaucucuuggcgcuugaaagaaagcugaagaaaaugcugggccccucugcuguagagauagggaauggaugcuuugaaaccaaacacaagugcaaccaaaccugucucgacagaauagcugcugguaccuuugaugcaggagaauuuucucuccccaccuuugauucacugaauauuacugcugcaucuuuaaaugacgauggauuggauaaucauacuauacugcuuuacuacucaacugcugccuccaguuuggcuguaacacugaugauagcuaucuuuguuguuuauauggucuccagagacaauguuucuugcuccaucugucuauag

SEQ ID NO: 58697 - RNA, 1758 nt, Artificial Sequence
  derived and/or modified CDS sequence (wt) from hemagglutinin__InfluenzaB__AET10084
augaaggcaauaauuguacuacucaugguaguaacauccaaugcagaucggaucugcacugggauaacaucgucaaacucaccacaugucgucaaaacugcuacucaaggggaggucaaugugaccgguguaauaccacugacaacaacacccaccaaaucucauuuugcaaaucucaaaggaacagaaaccagggggaaacuaugcccaaaaugccucaacugcacagaucuggacguagccuugggcagaccaaaaugcacugggaaaauacccucggcaagaguuucaauacuccaugaagucagaccuguuacaucugggugcuuuccuauaaugcacgauagaacaaaaauuagacagcugccuaaccuucuccgaggauacgaacauaucagguuaucaacucauaacguuaucaaugcagaaaaugcaccaggaggacccuacaaaauuggaaccucagggucuugcccuaacguuaccaauggaaacggauucuucgcaacaauggcuugggcugucccaaaaaacgacaaaaacaaaacagcaacaaauccauuaacaauagaaguaccauacauuuguacagaaggagaagaccaaauuaccguuuggggguuccacucugacaacgagacccaaauggcaaagcucuauggggacucaaagccccagaaguucaccucaucugccaacggagugaccacacauuacguuucacagauugguggcuucccaaaucaaacagaagacggaggacuaccacaaagugguagaauuguuguugauuacauggugcaaaaaucugggaaaacaggaacaauuaccuaucaaagagguauuuuauugccucaaaagguguggugcgcaaguggcaggagcaagguaauaaaaggauccuugccuuuaauuggagaagcagauugccuccacgaaaaauacgguggauuaaacaaaagcaagccuuacuacacaggggaacaugcaaaggccauaggaaauugcccaauaugggugaaaacacccuugaagcuggccaauggaaccaaauauagaccuccugcaaaacuauuaaaggaaagggguuucuucggagcuauugcugguuucuuagaaggaggaugggaaggaaugauugcagguuggcacggauacacaucccauggggcacauggaguagcgguggcagcagaccuuaagagcacucaagaggccauaaacaagauaacaaaaaaucucaacucuuugagugagcuggaaguaaagaaucuccaaagacuaagcggugccauggaugaacuccacaacgaaauacuagaacuagaugagaaaguggaugaucucagagcugauacaauaagcucacaaauagagcucgcaguccugcuuuccaaugaaggaauaauaaacagugaagaugaacaucucuuggcgcuugaaagaaagcugaagaaaaugcugggccccucugcuguagagauagggaauggaugcuuugaaaccaaacacaagugcaaccagaccugucucgacagaauagcugcugguaccuuugaugcaggagaauuuucucuccccaccuuugauucacugaauauuacugcugcaucuuuaaaugacgauggauuggauaaucauacuauacugcuuuacuacucaacugcugccuccaguuuggcuguaacacugaugauagcuaucuuuguuguuuauauggucuccagagacaauguuucuugcuccaucugucuauag

SEQ ID NO: 58698 - RNA, 1758 nt, Artificial Sequence
  derived and/or modified CDS sequence (wt) from hemagglutinin__InfluenzaB__AET10085
augaaggcaauaauuguacuacucaugguaguaacauccaaugcagaucgaaucugcacugggauaacgucgucaaacucaccacaugucgucaaaacugcuacucaaggggaagucaaugugacugguguaauaccacugacaacaacacccaccaaaucucauuuugcaaaucucaaaggaacagaaaccagaggaaaacuaugcccaaaaugccccaacugcacagaucuggacguagccuugggcagaccaaaaugcacggggaaaauacccucggcaagaguuucaauacuccaugaagucagaccuguuacaucugggugcuuuccuauaaugcacgacagaacaaaaauuagacagcugccuaaccuucuccgaggauacgaacauaucagguuaucaacucauaacguuaucaaugcagaaaaugcaccaggaggacccuacaaaauuggaaccucagggucuugcccuaacguuaccaauggaaacggauuuuucgcaacaauggcuugggccgucccaaaaaacgacaaaaacaaaacagcaacaaauccauuaacaauagaagugccauacauuuguacagaaggagaagaccaaauuaccguuuggggguuccacucugauaacgagacccaaauggcaaagcuuuauggggacucaaagccccagaaguucaccucaucugccaacggagugaccacacauuacguuucacagauugguggcuucccaaaucaaacagaagacggaggacuaccacaaagugguagaauuguuguugauuacauggugcaaaaaucugggaaaacaggaacaauuaccuaucaaagagguauuuuauugccucaaaagguguggugcgcaaguggcaggagcaagguaauaaaaggauccuugccuuuaauuggagaagcagauugccuccacgaaaaauacgguggauuaaacaaaagcaagccuuacuacacaggggaacaugcaaaggccauaggaaauugcccaauaugggugaagacacccuugaagcuggccaauggaaccaaauauagaccuccugcaaaacuauuaaaggaaagggguuucuucggagcuauugcugguuucuuggaaggaggaugggaaggaaugauugcagguuggcacggauacacgucccauggggcacauggaguagcgguggcagcagaccuuaagagcacucaagaggccauaaacaagauaacaaaaaaucuuaacucuuugagugaacuggaaguaaagaaucuucaaagacuaagcggugccauggaugaacuccacaacgaaauacuagaacuagacgaaaaaguggaugaucucagagcugauacaauaagcucacaaauagaacucgcaguccugcuuuccaaugaagggauaauaaacagugaagaugaacaucucuuggcgcuugaaagaaagcugaagaaaaugcugggccccucugcuguagaaauagggaauggaugcuuugaaaccaaacacaagugcaaccagaccugucucgacagaauagcugcugguaccuuugaugcaggagaauuuucucuccccacuuuugauucacugaauauuacugcugcaucuuuaaaugacgauggauuggauaaucauacuauacuacuuuacuacucaacugcugccuccaguuuggcuguaacacugaugauagcuaucuuuguuguuuauauggucuccagagacaauguuucuugcuccaucugucuauaa

SEQ ID NO: 58699 - RNA, 1758 nt, Artificial Sequence
  derived and/or modified CDS sequence (wt) from hemagglutinin__InfluenzaB__AET43124
augaaggcaauaauuguacuacucaugguaguaacauccaaugcagaucgaaucugcacugggauaacaucaucaaacucaccacaugucgucaaaacugcuacucaaggggaggucaaugugacugguguaauaccacugacaacaacacccaccaaaucucauuuugcaaaucucaaaggaacagaaaccagagggaaacuaugcccaaaaugccucaacugcacagaucuggacguagccuugggcagaccaaaaugcacggggaaaauaccaucggcaagaguuucaauacuccaugaaguaagaccuguuacaucugggugcuuuccuauaaugcacgacagaacaaaaauuagacagcugccuaaccuucuccgaggauacgaacauaucagguuaucaacucauaacguuaucaaugcagaaaaugcaccaggaggacccuacaaaauuggaaccucagggucuugcccuaacguuaccaauggaaacggauuuuucgcaacaauggcuugggccgucccaaaaaacgacaaaaacaaaacagcaacaaauccauuaacaauagaaguaccauacauuuguacagaaggagaagaccaaauuaccguuuggggguuccacucugauaacgagacccaaauggcaaagcucuauggggacucaaagccccagaaguucaccucaucugccaacggagugaccacacauuacguuucacagauugguggcuucccaaaucaaacagaagacggaggacuaccacaaagugguagaauuguuguugacuacauggugcaaaaaucugggaaaacaggaacaauuaccuaucaaagagguauuuuauugccucaaaagguguggugcgcaaguggcaggagcaagguaauaaaaggauccuugccuuuaauuggagaagcagauugccuccacgaaaaauacgguggauuaaacaaaagcaagccuuacuacacaggggaacaugcaaaggccauaggaaauugcccaauaugggugaagacacccuugaagcuggccaauggaaccaaauauagaccuccugcaaaacuauuaaaggaaagggguuucuucggagcuauugcugguuucuuagaaggaggaugggaaggaaugauugcagguuggcacggauacacgucccauggggcacauggaguagcgguggcagcagaccuuaagagcacucaagaggccauaaacaagauaacaaaaaaucucaacucuuugagugagcuggaaguaaagaaucuucaaagacuaagcggugccauggaugaacuccacaaugaaauacuagaacuagacgagaaaguggaugaucucagagcugauacaauaagcucacaaauagaacucgcaguccuucuuuccaaugaaggaauaauaaacagugaagaugaacaucucuuggcgcuugaaagaaagcugaagaaaaugcugggccccucugcuguagagauagggaauggaugcuuugaaaccaaacacaagugcaaccagaccugucucgacagaauagcugcugguaccuuugacgcaggagaauuuucucuccccaccuuugauucacuaaauauuacugcugcaucuuuaaauggcgauggauuggauaaucauacuauacugcuuuacuacucaacugcugccuccaguuuggcuguaacacugaugauagcuaucuuuguuguuuauauggucuccagagacaauguuucuugcuccaucugucuauaa

SEQ ID NO: 58700 - RNA, 1758 nt, Artificial Sequence; identical to SEQ ID NO: 58699
  derived and/or modified CDS sequence (wt) from hemagglutinin__InfluenzaB__AET43135

SEQ ID NO: 58701 - RNA, 1758 nt, Artificial Sequence
  derived and/or modified CDS sequence (wt) from hemagglutinin__InfluenzaB__AET43146
augaaggcaauaauuguacuacucaugguaguaacauccaaugcagaucgaaucugcacugggauaacaucaucaaacucaccacaugucgucaaaacugcuacucaaggggaggucaaugugacugguguaauaccacugacaacaacacccaccaaaucucauuuugcaaaucucaaaggaacagaaaccagagggaaacuaugcccaaaaugccucaacugcacagaucuggacguagccuugggcagaccaaaaugcacggggaaaauaccaucggcaagaguuucaauacuccaugaaguaagaccuguuacaucugggugcuuuccuauaaugcacgacagaacaaaaauuagacagcugccuaaccuucuccgaggauacgaacauaucagguuaucaacucauaacguuaucaaugcagaaaaugcaccaggaggacccuacaaaauuggaaccucagggucuugcccuaacguuaccaauggaaacggauuuuucgcaacaauggcuugggccgucccaaaaaacgacaaaaacaaaacagcaacaaauccauuaacaauagaaguaccauacauuuguacagaaggagaagaccaaauuaccguuuggggguuccacucugauaacgagacccaaauggcaaagcucuauggggacucaaagccccagaaguucaccucaucugccaacggagugaccacacauuacguuucacagauugguggcuucccaaaucaaacagaagacggaggacuaccacaaagugguagaauuguuguugacuacauggugcaaaaaucugggaaaacaggaacaauuaccuaucaaagagguauuuuauugccucaaaagguguggugcgcaaguggcaggagcaagguaauaaaaggauccuuaccuuuaauuggagaagcagauugccuccacgaaaaauacgguggauuaaacaaaagcaagccuuacuacacaggggaacaugcaaaggccauaggaaauugcccaauaugggugaagacaccccugaagcuggccaauggaaccaaauauagaccuccugcaaaacuauuaaaggaaagggguuucuucggagcuauugcugguuucuuagaaggaggaugggaaggaaugauugcagguuggcacggauacacgucccauggggcacauggaguagcgguggcagcagaccuuaagagcacucaagaggccauaaacaagauaacaaaaaaucucaacucuuugagugagcuggaaguaaagaaucuucaaagacuaagcggugccauggaugaacuccacaaugaaauacuagaacuagacgagaaaguggaugaucucagagcugauacaauaagcucacaaauagaacucgcaguccuucuuuccaaugaaggaauaauaaacagugaagaugaacaucucuuggcgcuugaaagaaagcugaagaaaaugcugggccccucugcuguagagauagggaauggaugcuuugaaaccaaacacaagugcaaccagaccugucucgacagaauagcugcugguaccuuugacgcaggagaauuuucucuccccaccuuugauucacuaaauauuacugcugcaucuuuaaauggcgauggauuggauaaucauacuauacugcuuuacuacucaacugcugccuccaguuuggcuguaacacugaugauagcuaucuuuguuguuuauauggucuccagagacaauguuucuugcuccaucugucuauaa

SEQ ID NO: 58702 - RNA, 1758 nt, Artificial Sequence; identical to SEQ ID NO: 58699
  derived and/or modified CDS sequence (wt) from hemagglutinin__InfluenzaB__AET43157

SEQ ID NO: 58703 - RNA, 1758 nt, Artificial Sequence
  derived and/or modified CDS sequence (wt) from hemagglutinin__InfluenzaB__AET43168
augaaggcaauaauuguacuacucaugguaguaacauccaaugcagaucgaaucugcacugggauaacaucaucaaacucaccacaugucgucaaaacugcuacucaaggggaggucaaugugacugguguaauaccacugacaacaacacccaccaaaucucauuuugcaaaucucaaaggaacagaaaccagagggaaacuaugcccaaaaugccucaacugcacagaucuggacguaaccuugggcagaccaaaaugcacagggaaaauaccaucggcaagaguuucaauacuccaugaaguaagaccuguuacaucugggugcuuuccuauaaugcacgacagaacaaaaauuagacagcugccuaaccuucuccgaggauacgaacauaucagguuaucaacucauaacguuaucaaugcagaaaaugcaccaggaggacccuacaaaauuggaaccucagggucuugcccuaacguuaccaauggaaacggauuuuucgcaacaauggcuugggccgucccaaaaaacgacaaaaacaaaacagcaacaaauccauuaacaauagaaguaccauacauuuguacagaaggagaagaccaaauuaccguuuggggguuccacucugauaacgagacccaaauggcaaagcucuauggggacucaaagccccagaaguucaccucaucugccaacggagugaccacacauuacguuucacagauugguggcuucccaaaucaaacagaagacggaggacuaccacaaagugguagaauuguuguugauuacauggugcaaaaaucugggaaaacaggaacaauuaccuaucaaagagguauuuuauugccucaaaagguguggugcgcaaguggcaggagcaagguaauaaaaggauccuugccuuuaauuggagaagcagauugccuccacgaaaaauacgguggauuaaacaaaagcaagccuuacuacacaggggaacaugcaaaggccauaggaaauugcccaauaugggugaagacacccuugaagcuggccaauggaaccaaauauagaccuccugcaaaacuauuaaaggaaagggguuucuucggagcuauugcugguuucuuagaaggaggaugggaaggaaugauugcagguuggcacggauacacgucccauggggcacauggaguagcgguggcagcagaccuuaagagcacucaagaggccauaaacaagauaacaaaaaaucucaacucuuugagugagcuggaaguaaagaaucuucaaagacuaagcggugccauggaugaacuccacaaugaaauacuagaacuagacgagaaaguggaugaucucagagcugauacaauaagcucacaaauagaacucgcaguccuucuuuccaaugaaggaauaauaaacagugaagaugaacaucucuuggcgcuugaaagaaagcugaagaaaaugcugggccccucugcuguagagauagggaauggaugcuuugaaaccaaacacaagugcaaccagaccugucucgacagaauagcugcugguaccuuugaugcaggagaauuuucucuccccaccuuugauucacuaaauauuacugcugcaucuuuaaaugacgauggauuggauaaucauacuauacugcuuuacuacucaacugcugccuccaguuuggcuguaacacugaugauagcuaucuuuguuguuuauauggucuccagagacaauguuucuugcuccaucugucuauaa

SEQ ID NO: 58704 - RNA, 1758 nt, Artificial Sequence
  derived and/or modified CDS sequence (wt) from hemagglutinin__InfluenzaB__AET43179
augaaggcaauaauuguacuacucaugguaguaacauccaaugcagaucgaaucugcacugggauaacaucaucaaacucaccacaugucgucaaaacugcuacucaaggggaggucaaugugacugguguaauaccacugacaacaacacccaccaaaucucauuuugcaaaucucaaaggaacagaaaccagagggaaacuaugcccaaaaugccucaacugcacagaucuggacguagccuugggcagaccaaaaugcacggggaaaauaccaucggcaagaguuucaauacuccaugaaguaagaccuguuacaucugggugcuuuccuauaaugcacgacagaacaaaaauuagacagcugccuaaccuucuccgaggauacgaacauaucagguuaucaacucauaacguuaucaaugcagaaaaugcaccaggaggacccuacaaaauuggaaccucagggucuugcccuaacguuaccaauggaaacggauuuuucgcaacaauggcuugggccgucccaaaaaacgacaaaaacaaaacagcaacaaauccauuaacaauagaaguaccauacauuuguacagaaggagaagaccaaauuaccguuuggggguuccacucugauaacgagacccaaauggcaaagcucuauggggacucaaagccccagaaguucaccucaucugccaacggagugaccacacauuacguuucacagauugguggcuucccaaaucaaacagaagacggaggacuaccacaaagugguagaauuguuguugacuacauggugcaaaaaucugggaaaacaggaacaauuaccuaucaaagagguauuuuauugccucaaaagguguggugcgcaaguggcaggagcaagguaauaaaaggauccuugccuuuaauuggagaagcagauugccuccacgaaaaauacgguggauuaaacaaaagcaagccuuacuacacaggggaacaugcaaaggccauaggaaauugcccaauaugggugaagacacccuugaagcuggccaauggaaccaaauauagaccuccugcaaaacuauuaaaggaaagggguuucuucggagcuauugcugguuucuuagaaggaggaugggaaggaaugauugcagguuggcacggauacacgucccauggggcacauggaguagcgguggcagcagaccuuaagagcacucaagaggccauaaacaagauaacaaaaaaucucaacucuuugagugagcuggaaguaaagaaucuucaaagacuaagcggugccauggaugaacuccacaaugaaauacuagaacuagacgagaaaguggaugaucucagagcugauacaauaagcucacaaauagaacucgcaguccuucuuuccaaugaaggaauaauaaacagugaagaugaacaucucuuggcgcuugaaagaaagcugaagaaaaugcugggccccucugcuguagaaauagggaauggaugcuuugaaaccaaacacaagugcaaccagaccugucucgacagaauagcugcugguaccuuugacgcaggagaauuuucucuccccaccuuugauucacuaaauauuacugcugcaucuuuaaauggcgauggauuggauaaucauacuauacugcuuuacuacucaacugcugccuccaguuuggcuguaacacugaugauagcuaucuuuguuguuuauauggucuccagagacaauguuucuugcuccaucugucuauaa

SEQ ID NO: 58705 - RNA, 1758 nt, Artificial Sequence; identical to SEQ ID NO: 58699
  derived and/or modified CDS sequence (wt) from hemagglutinin__InfluenzaB__AET43190

SEQ ID NO: 58706 - RNA, 1758 nt, Artificial Sequence
  derived and/or modified CDS sequence (wt) from hemagglutinin__InfluenzaB__AET43201
augaaggcaauaauuguacuacucaugguaguaacauccaaugcagaucgaaucugcacugggauaacaucaucaaacucaccacaugucgucaaaacugcuacucaaggggaggucaaugugacugguguaauaccacugacaacaacacccaccaaaucucauuuugcaaaucucaaaggaacagaaaccagagggaaacuaugcccaaaaugccucaacugcacagaucuggacguagccuugggcagaccaaaaugcacggggaaaauaccaucggcaagaguuucaauacuccaugaaguaagaccuguuacaucugggugcuuuccuauaaugcacgacagaacaaaaauuagacagcugccuaaccuucuccgaggauacgaacauaucagguuaucaacucauaacguuaucaaugcaggaaaugcaccaggaggacccuacaaaauuggaaccucagggucuugcccuaacguuaccaauggaaacggauuuuucgcaacaauggcuugggccgucccaaaaaacgacaaaaacaaaacagcaacaaauccauuaacaauagaaguaccauacauuuguacagaaggagaagaccaaauuaccguuuggggguuccacucugauaacgagacccaaauggcaaagcucuauggggacucaaagccccagaaguucaccucaucugccaacggagugaccacacauuacguuucacagauugguggcuucccaaaucaaacagaagacggaggacuaccacaaagugguagaauuguuguugauuacauggugcaaaaaucugggaaaacaggaacaauuaccuaucaaagagguauuuuauugccucaaaagguguggugcgcaaguggcaggagcaagguaauaaaaggauccuugccuuuaauuggagaagcagauugccuccacgaaaaauacgguggauuaaacaaaagcaagccuuacuacacaggggaacaugcaaaggccauaggaaauugcccaauaugggugaagacacccuugaagcuggccaauggaaccaaauauagaccuccugcaaaacuauuaaaggaaagggguuucuucggagcuauugcugguuucuuagaaggaggaugggaaggaaugauugcagguuggcacggauacacgucccauggggcacauggaguagcgguggcagcagaccuuaagagcacucaagaggccauaaacaagauaacaaaaaaucucaacucuuugagugagcuggaaguaaagaaucuucaaagacuaagcggugccauggaugaacuccacaaugaaauacuagaacuagacgagaaaguggaugaucucagagcugauacaauaagcucacaaauagaacucgcaguccuucuuuccaaugaaggaauaauaaacagugaagaugaacaucucuuggcgcuugaaagaaagcugaagaaaaugcugggccccucugcuguagagauagggaauggaugcuuugaaaccaaacacaagugcaaccagaccugucucgacagaauagcugcugguaccuuugaugcaggagaauuuucucuccccaccuuugauucacuaaauauuacugcugcaucuuuaaaugacgauggauuggauaaucauacuauacugcuuuacuacucaacugcugccuccaguuuggcuguaacacugaugauagcuaucuuuguuguuuauauggucuccagagacaauguuucuugcuccaucugucuauaa

SEQ ID NO: 58707 - RNA, 1758 nt, Artificial Sequence
  derived and/or modified CDS sequence (wt) from hemagglutinin__InfluenzaB__AET43212
augaaggcaauaauuguacuacucaugguaguaacauccaaugcagaucgaaucugcacugggauaacaucaucaaacucaccacaugucgucaaaacugcuacucaaggggaggucaaugugacugguguaauaccacugacaacaacacccaccaaaucucauuuugcaaaucucaaaggaacagaaaccagagggaaacuaugcccaaaaugccucaacugcacagaucuggacguagccuugggcagaccaaaaugcacggggaaaauaccaucggcaagaguuucaauacuccaugaaguaagaccuguuacaucugggugcuuuccuauaaugcacgacagaacaaaaauuagacagcugccuaaccuucuccgaggauacgaacauaucagguuaucaacucauaacguuaucaaugcagaaaaugcaccaggaggacccuacaaaauuggaaccucagggucuugcccuaacguuaccaauggaaacggauuuuucgcaacaauggcuugggccgucccaaaaaacgacaaaaacaaaacagcaacaaauccauuaacaauagaaguaccauacauuuguacagaaggagaagaccaaauuaccguuuggggguuccacucugauaacgagacccaaauggcaaagcucuauggggacucaaagccccagaaguucacuucaucugccaacggagugaccacacauuacguuucacagauugguggcuucccaaaucaaacagaagacggaggacuaccacaaagugguagaauuguuguugacuacauggugcaaaaaucugggaaaacaggaacaauuaccuaucaaagagguauuuuauugccucaaaagguguggugcgcaaguggcaggagcaagguaauaaaaggauccuugccuuuaauuggagaagcagauugccuccacgaaaaauacgguggauuaaacaaaagcaagccuuacuacacaggggaacaugcaaaggccauaggaaauugcccaauaugggugaagacacccuugaagcuggccaauggaaccaaauauagaccuccugcaaaacuauuaaaggaaagggguuucuucggagcuauugcugguuucuuagaaggaggaugggaaggaaugauugcagguuggcacggauacacgucccauggggcacauggaguagcgguggcagcagaccuuaagagcacucaagaggccauaaacaagauaacaaaaaaucucaacucuuugagugagcuggaaguaaagaaucuucaaagacuaagcggugccauggaugaacuccacaaugaaauacuagaacuagacgagaaaguggaugaucucagagcugauacaauaagcucacaaauagaacucgcaguccuucuuuccaaugaaggaauaauaaacagugaagaugaacaucucuuggcgcuugaaagaaagcugaagaaaaugcugggccccucugcuguagagauagggaauggaugcuuugaaaccaaacacaagugcaaccagaccugucucgacagaauagcugcugguaccuuugacgcaggagaauuuucucuccccaccuuugauucacuaaauauuacugcugcaucuuuaaauggcgauggauuggauaaucauacuauacugcuuuacuacucaacugcugccuccaguuuggcuguaacacugaugauagcuaucuuuguuguuuauauggucuccagagacaauguuucuugcuccaucugucuauaa

SEQ ID NO: 58708 - RNA, 1758 nt, Artificial Sequence; identical to SEQ ID NO: 58699
  derived and/or modified CDS sequence (wt) from hemagglutinin__InfluenzaB__AET43223

SEQ ID NO: 58709 - RNA, 1758 nt, Artificial Sequence; identical to SEQ ID NO: 58706
  derived and/or modified CDS sequence (wt) from hemagglutinin__InfluenzaB__AET50943

SEQ ID NO: 58710 - RNA, 1758 nt, Artificial Sequence
  derived and/or modified CDS sequence (wt) from hemagglutinin__InfluenzaB__AET50954
augaaggcaauaauuguacuacucaugguaguaacauccaaugcagaucgaaucugcacugggauaacaucaucaaacucaccacaugucgucaaaacugcuacucaaggggaggucaaugugacugguguaauaccacugacaacaacacccaccaaaucucauuuugcaaaucucaaaggaacagaaaccagagggaaacuaugcccaaaaugccucaacugcacagaucuggacguagccuugggcagaccaaaaugcacggggaaaauaccaucggcaagaguuucaauacuccaugaaguaagaccuguuacaucugggugcuuuccuauaaugcacgacagaacaaaaauuagacagcugccuaaccuucuccgaggauacgaacauaucagguuaucaacucauaacguuaucaaugcagaaaaugcaccaggaggacccuacaaaauuggaaccucagggucuugcccuaacguuaccaauggaaacggauuuuucgcaacaauggcuugggccgucccaaaaaacgacaaaaacaaaacagcaacaaauccauuaacaauagaaguaccauacauuuguacagaaggagaagaccaaauuaccguuuggggguuccacucugauaacgagacccaaauggcaaagcucuauggggacucaaagccccagaaguucaccucaucugccaacggagugaccacacauuacguuucacagauugguggcuucccaaaucaaacagaagacggaggacuaccacaaagugguagaauuguuguugacuacauggugcaaaaaucugggaaaacaggaacaauuaccuaucaaagagguauuuuauugccucaaaagguguggugcgcaaguggcaggagcaagguaauaaaaggauccuugccuuuaauuggagaagcagauugccuccacgaaaaauacgguggauuaaacaaaagcaagccuuacuacacaggggaacaugcaaaggccauaggaaauugcccaauaugggugaagacacccuugaagcuggccaauggaaccaaauauagaccuccugcaaaacuauuaaaggaaagagguuucuucggagcuauugcugguuucuuagaaggaggaugggaaggaaugauugcagguuggcacggauacacgucccauggggcacauggaguagcgguggcagcagaccuuaagagcacucaagaggccauaaacaagauaacaaaaaaucucaacucuuugagugagcuggaaguaaagaaucuucaaagacuaagcggugccauggaugaacuccacaaugaaauacuagaacuagacgagaaaguggaugaucucagagcugauacaauaagcucacaaauagaacucgcaguccuucuuuccaaugaaggaauaauaaacagugaagaugaacaucucuuggcgcuugaaagaaagcugaagaaaaugcugggccccucugcuguagagauagggaauggaugcuuugaaaccaaacacaagugcaaccagaccugucucgacagaauagcugcugguaccuuugacgcaggagaauuuucucuccccaccuuugauucacuaaauauuacugcugcaucuuuaaauggcgauggauuggauaaucauacuauacugcuuuacuacucaacugcugccuccaguuuggcuguaacacugaugauagcuaucuuuguuguuuauauggucuccagagacaauguuucuugcuccaucugucuauaa

SEQ ID NO: 58711 - RNA, 1758 nt, Artificial Sequence
  derived and/or modified CDS sequence (wt) from hemagglutinin__InfluenzaB__AET50965
augaaggcaauaauuguacuacucaugguaguaacauccaaugcagaucgaaucugcacugggauaacaucaucaaacucaccacaugucgucaaaacugcuacucaaggggaggucaaugugacugguguaauaccacugacaacaacacccaccaaaucucauuuugcaaaucucaaaggaacagaaaccagagggaaacuaugcccaaaaugccucaacugcacagaucuggacguagccuugggcagaccaaaaugcacggggaaaauaccaucggcaagaguuucaauacuccaugaaguaagaccuguuacaucugggugcuuuccuauaaugcacgacagaacaaaaauuagacagcugccuaaccuucuccgaggauacgaacauaucagauuaucaacucauaacguuaucaaugcagaaaaugcaccaggaggacccuacaaaauuggaaccucagggucuugcccuaacguuaccaauggaaacggauuuuucgcaacaauggcuugggccgucccaaaaaacgacaaaaacaaaacagcaacaaauccauuaacaauagaaguaccauacauuuguacagaaggagaagaccaaauuaccguuuggggguuccacucugauaacgagacccaaauggcaaagcucuauggggacucaaagccccagaaguucaccucaucugccaacggagugaccacacauuacguuucacagauugguggcuucccaaaucaaacagaagacggaggacuaccacaaagugguagaauuguuguugacuacauggugcaaaaaucugggaaaacaggaacaauuaccuaucaaagagguauuuuauugccucaaaagguguggugcgcaaguggcaggagcaagguaauaaaaggauccuugccuuuaauuggagaagcagauugccuccacgaaaaauacgguggauuaaacaaaagcaagccuuacuacacaggggaacaugcaaaggccauaggaaauugcccaauaugggugaagacacccuugaagcuggccaauggaaccaaauauagaccuccugcaaaacuauuaaaggaaagggguuucuucggagcuauugcugguuucuuagaaggaggaugggaaggaaugauugcagguuggcacggauacacgucccauggggcacauggaguagcgguggcagcagaccuuaagagcacucaagaggccauaaacaagauaacaaaaaaucucaacucuuugagugagcuggaaguaaagaaucuucaaagacuaagcggugccauggaugaacuccacaaugaaauacuagaacuagacgagaaaguggaugaucucagagcugauacaauaagcucacaaauagaacucgcaguccuucuuuccaaugaaggaauaauaaacagugaagaugaacaucucuuggcgcuugaaagaaagcugaagaaaaugcugggccccucugcuguagagauagggaauggaugcuuugaaaccaaacacaagugcaaccagaccugucucgacagaauagcugcugguaccuuugacgcaggagaauuuucucuccccaccuuugauucacuaaauauuacugcugcaucuuuaaauggcgauggauuggauaaucauacuauacugcuuuacuacucaacugcugccuccaguuuggcuguaacacugaugauagcuaucuuuguuguuuauauggucuccagagacaauguuucuugcuccaucugucuauaa

SEQ ID NO: 58712 - RNA, 1758 nt, Artificial Sequence; identical to SEQ ID NO: 58699
  derived and/or modified CDS sequence (wt) from hemagglutinin__InfluenzaB__AET50976

SEQ ID NO: 58713 - RNA, 1758 nt, Artificial Sequence; identical to SEQ ID NO: 58699
  derived and/or modified CDS sequence (wt) from hemagglutinin__InfluenzaB__AET74255

SEQ ID NO: 58714 - RNA, 1758 nt, Artificial Sequence; identical to SEQ ID NO: 58706
  derived and/or modified CDS sequence (wt) from hemagglutinin__InfluenzaB__AET74277

SEQ ID NO: 58715 - RNA, 1758 nt, Artificial Sequence
  derived and/or modified CDS sequence (wt) from hemagglutinin__InfluenzaB__AET74288
augaaggcaauaauuguacuacucaugguaguaacauccaaugcagaucgaaucugcacugggauaacaucaucaaacucaccacaugucgucaaaacugcuacucaaggggaggucaaugugacugguguaauaccacugacaacaacacccaccaaaucucauuuugcaaaucucaaaggaacagaaaccagagggaaacuaugcccaaaaugccucaacugcacagaucuggacguagccuugggcagaccaaaaugcacggggaaaauaccaucggcaagaguuucaauacuccaugaaguaagaccuguuacaucugggugcuuuccuauaaugcacgacagaacaaaaauuagacagcugccuaaccuucuccgaggauacgaacauaucagguuaucaacucacaacguuaucaaugcagaaaaugcaccaggaggacccuacaaaauuggaaccucagggucuugcccuaacguuaccaauggaaacggauuuuucgcaacaauggcuugggccgucccaaaaaacgacaaaaacaaaacagcaacaaauccauuaacaauagaaguaccauacauuuguacagaaggagaagaccaaauuaccguuuggggguuccacucugauaacgagacccaaauggcaaagcucuauggggacucaaagccccagaaguucaccucaucugccaacggagugaccacacauuacguuucacagauugguggcuucccaaaucaaacagaagacggaggacuaccacaaagugguagaauuguuguugacuacauggugcaaaaaucugggaaaacaggaacaauuaccuaucaaagagguauuuuauugccucaaaagguguggugcgcaaguggcaggagcaagguaauaaaaggauccuugccuuuaauuggagaagcagauugccuccacgaaaaauacgguggauuaaacaaaagcaagccuuacuacacaggggaacaugcaaaggccauaggaaauugcccaauaugggugaagacacccuugaagcuggccaauggaaccaaauauagaccuccugcaaaacuauuaaaggaaagggguuucuucggagcuauugcugguuucuuagaaggaggaugggaaggaaugauugcagguuggcacggauacacgucccauggggcacauggaguagcgguggcagcagaccuuaagagcacucaagaggccauaaacaagauaacaaaaaaucucaacucuuugagugagcuggaaguaaagaaucuucaaagacuaagcggugccauggaugaacuccacaaugaaauacuagaacuagacgagaaaguggaugaucucagagcugauacaauaagcucacaaauagaacucgcaguccuucuuuccaaugaaggaauaauaaacagugaagaugaacaucucuuggcgcuugaaagaaagcugaagaaaaugcugggccccucugcuguagagauagggaauggaugcuuugaaaccaaacacaagugcaaccagaccugucucgacagaauagcugcugguaccuuugacgcaggagaauuuucucuccccaccuuugauucacuaaauauuacugcugcaucuuuaaauggcgauggauuggauaaucauacuauacugcuuuacuacucaacugcugccuccaguuuggcuguaacacugaugauagcuaucuuuguuguuuauauggucuccagagacaauguuucuugcuccaucugucuauaa

SEQ ID NO: 58716 - RNA, 1758 nt, Artificial Sequence
  derived and/or modified CDS sequence (wt) from hemagglutinin__InfluenzaB__AET74299
augaaggcaauaauuguacuacucaugguaguaacauccaaugcagaucgaaucugcacugggauaacaucaucaaacucaccacaugucgucaaaacugcuacucaaggggaggucaaugugacugguguaauaccacugacaacaacacccaccaaaucucauuuugcaaaucucaaaggaacagaaaccagagggaaacuaugcccaaaaugccucaacugcacagaucuggacguaaccuugggcagaccaaaaugcacagggaaaauaccaucggcaagaguuucaauacuccaugaaguaagaccuguuacaucugggugcuuuccuauaaugcacgacagaacaaaaauuagacagcugccuaaccuucuccgaggauacgaacauaucagguuaucaacucauaacguuaucaaugcagaaaaugcaccaggaggacccuacaaaauuggaaccucagggucuugcccuaacguuaccaauggaaacggauuuuucgcaacaauggcuugggccgucccaaaaaacgacaaaaacaaaacagcaacaaauccauuaacaauagaaguaccauacauuuguacagaaggagaagaccaaauuaccguuuggggguuccacucugauaacgagacccaaauggcaaagcucuauggggacucaaagccccagaaguucaccucaucugccaacggagugaccacacauuacguuucacagauugguggcuucccaaaucaaacagaagacggaggacuaccacaaagugguagaauuguuguugauuacauggugcaaaaaucugggaaaacaggaacaauuaccuaucaaagagguauuuuauugccucaaaagguguggugcgcaaguggcaggagcaagguaauaaaaggauccuugccuuuaauuggagaagcagauugccuccacgaaaaauacgguggauuaaacaaaagcaagccuuacuacacaggggaacaugcaaaggccauaggaaauugcccaauaugggugaagacacccuugaagcuggccaauggaaccaaauauagaccuccugcaaaacuauuaaaggaaagggguuucuucggagcuauugcugguuucuuagaaggaggaugggaaggaaugauugcagguuggcacggauacacgucccauggggcacauggaguagcgguggcagcagaccuuaagagcacucaagaggccauaaacaagauaacaaacaaucucaacucuuugagugagcuggaaguaaagaaucuucaaagacuaagcggugccauggaugaacuccacaaugaaauacuagaacuagacgagaaaguggaugaucucagagcugauacaauaagcucacaaauagaacucgcaguccuucuuuccaaugaaggaauaauaaacagugaagaugaacaucucuuggcgcuugaaagaaagcugaagaaaaugcugggccccucugcuguagagauagggaauggaugcuuugaaaccaaacacaagugcaaccagaccugucucgacagaauagcugcugguaccuuugaugcaggagaauuuucucuccccaccuuugauucacuaaauauuacugcugcaucuuuaaaugacgauggauuggauaaucauacuauacugcuuuacuacucaacugcugccuccaguuuggcuguaacacugaugauagcuaucuuuguuguuuauauggucuccagagacaauguuucuugcuccaucugucuauaa

SEQ ID NO: 58717 - RNA, 1758 nt, Artificial Sequence
  derived and/or modified CDS sequence (wt) from hemagglutinin__InfluenzaB__AET74329
augaaggcaauaauuguacuacucaugguaguaacauccaaugcagaucgaaucugcacugggauaacaucaucaaacucaccacaugucgucaaaacugcuacucaaggggaggucaaugugaccgguguaauaccacugacaacaacacccaccaaaucucauuuugcaaaucucaaaggaacagaaaccagagggaaacuaugcccaaaaugccucaacugcacagaucuggacguagccuugggcagaccaaaaugcacggggaaaauaccaucggcaagaguuucaauacuccaugaaguaagaccuguuacaucugggugcuuuccuauaaugcacgacagaacaaaaauuagacagcugccuaaccuucuccgaggauacgaacauaucagguuaucaacucauaacguuaucaaugcagaaaaugcaccaggaggacccuacaaaauuggaaccucagggucuugcccuaacguuaccaauggaaacggauuuuucgcaacaauggcuugggccgucccaaaaaaugacaaaaacaaaacagcaacaaauccauuaacaauagaaguaccauacauuuguacagaaggagaagaccaaauuaccguuuggggguuccacucugauaacgagacccaaauggcaaagcucuauggggacucaaagccccagaaguucaccucaucugccaacggagugaccacacauuacguuucacagauugguggcuucccaaaucaaacagaagacggaggacuaccacaaagugguagaauuguuguugacuacauggugcaaaaaucugggaaaacaggaacaauuaccuaucaaagagguauuuuauugccucaaaagguguggugcgcaaguggcaggagcaagguaauaaaaggauccuugccuuuaauuggagaagcagauugccuccacgaaaaauacgguggauuaaacaaaagcaagccuuacuacacaggggaacaugcaaaggccauaggaaauugcccaauaugggugaagacacccuugaagcuggccaauggaaccaaauauagaccuccugcaaaacuauuaaaggaaagggguuucuucggagcuauugcugguuucuuagaaggaggaugggaaggaaugauugcagguuggcacggauacacgucccauggggcacauggaguagcgguggcagcagaccuuaagagcacucaagaggccauaaacaagauaacaaaaaaucucaacucuuugagugagcuggaaguaaagaaucuucaaagacuaagcggugccauggaugaacuccacaaugaaauauuagaacuagacgagaaaguggaugaucucagagcugauacaauaagcucacaaauagaacucgcaguccuucuuuccaaugaaggaauaauaaacagugaagaugaacaucucuuggcgcuugaaagaaagcugaagaaaaugcugggccccucugcuguagagauagggaauggaugcuuugaaaccaaacacaagugcaaccagaccugucucgacagaauagcugcugguaccuuugacgcaggagaauuuucucuccccaccuuugauucacuaaauauuacugcugcaucuuuaaauggcgauggauuggauaaucauacuauacugcuuuacuacucaacugcugccuccaguuuggcuguaacacugaugauagcuaucuuuguuguuuauauggucuccagagacaauguuucuugcuccaucugucuauaa

SEQ ID NO: 58718 - RNA, 1758 nt, Artificial Sequence; identical to SEQ ID NO: 58699
  derived and/or modified CDS sequence (wt) from hemagglutinin__InfluenzaB__AET74340

SEQ ID NO: 58719 - RNA, 1758 nt, Artificial Sequence
  derived and/or modified CDS sequence (wt) from hemagglutinin__InfluenzaB__AET74351
augaaggcaauaauuguacuacucaugguaguaacauccaaugcagaucgaaucugcacugggauaacaucaucaaacucaccacaugucgucaaaacugcuacucaaggggaggucaaugugacugguguaauaccacugacaacaacacccaccaaaucucauuuugcaaaucucaaaggaacagaaaccagagggaaacuaugcccaaaaugccucaacugcacagaucuggacguagccuugggcagaccaaaaugcacggggaaaauaccaucggcaagaguuucaauacuccaugaaguaagaccuguuacaucugggugcuuuccuauaaugcacgacagaacaaaaauuagacagcugccuaaccuucuccgaggauacgaacauaucagguuaucaacucauaacguuaucaaugcagaaaaugcaccaggaggacccuacaaaauuggaaccucagggucuugcccuaacguuaccaauggaaacggauuuuucgcaacaauggcuugggccgucccaaaaaacgacaaaaacaaaacagcaacaaauccauuaacaauagaaguaccauacauuuguacagaaggagaagaccaaauuaccguuuggggguuccacucugauaacgagacccaaauggcaaagcucuauggggacucaaagccccagaaguucaccucaucugccaacggagugaccacacauuacguuucacagauugguggcuucccaaaucaaacagaagacggaggacuaccacaaagugguagaauuguuguugacuacauggugcaaaaaucugggaaaacaggaacaauuaccuaucaaagagguauuuuauugccucaaaagguguggugcgcaaguggcaggagcaagguaauaaaaggauccuuaccuuuaauuggagaagcagauugccuccacgaaaaauacgguggauuaaacaaaagcaagccuuacuacacaggggaacaugcaaaggccauaggaaauugcccaauaugggugaagacacccuugaagcuggccaauggaaccaaauauagaccuccugcaaaacuauuaaaggaaagggguuucuucggagcuauugcugguuucuuagaaggaggaugggaaggaaugauugcagguuggcacggauacacgucccauggggcacauggaguagcgguggcagcagaccuuaagagcacucaagaggccauaaacaagauaacaaaaaaucucaacucuuugagugagcuggaaguaaagaaucuucaaagacuaagcggugccauggaugaacuccacaaugaaauacuagaacuagacgagaaaguggaugaucucagagcugauacaauaagcucacaaauagaacucgcaguccuucuuuccaaugaaggaauaauaaacagugaagaugaacaucucuuggcgcuugaaagaaagcugaagaaaaugcugggccccucugcuguagagauagggaauggaugcuuugaaaccaaacacaagugcaaccagaccugucucgacagaauagcugcugguaccuuugacgcaggagaauuuucucuccccaccuuugauucacuaaauauuacugcugcaucuuuaaauggcgauggauuggauaaucauacuauacugcuuuacuacucaacugcugccuccaguuuggcuguaacacugaugauagcuaucuuuguuguuuauauggucuccagagacaauguuucuugcuccaucugucuauaa

SEQ ID NO: 58720 - RNA, 1758 nt, Artificial Sequence
  derived and/or modified CDS sequence (wt) from hemagglutinin__InfluenzaB__AEY69077
augaaggcaauaauuguacuacucaugguaguaacauccaaugcagaucgaaucugcacugggauaacaucaucaaacucaccacaugucgucaaaacugcuacucaaggggaggucaaugugacugguguaauaccacugacaacaacacccaccaaaucucauuuugcaaaucucaaaggaacagaaaccagagggaaacuaugcccaaaaugccucaacugcacagaucuggacguagccuugggcagaccaaaaugcacggggaaaauaccaucggcaagaguuucaauacuccaugaaguaagaccuguuacaucugggugcuuuccuauaaugcacgacagaacaaaaauuagacagcugccuaaccuucuccgaggauacgaacauaucagguuaucaacucauaacguuaucaaugcagaaaaugcaccaggaggacccuacaaaauuggaaccucagggucuugcccuaacguuaccaauggaaacggauuuuucgcaacaauggcuugggccgucccaaaaaacgacaaaaacaaaacagcaacaaauccauuaacaauagaaguaccauacauuuguacagaaggagaagaccaaauuaccguuuggggguuccacucugauaacgagacccaaauggcaaagcucuauggggacucaaagccccagaaauucaccucaucugccaacggagugaccacacauuacguuucacagauugguggcuucccaaaucaaacagaagacggaggacuaccacaaagugguagaauuguuguugauuacauggugcaaaaaucugggaaaacaggaacaauuaccuaucaaagagguauuuuauugccucaaaagguguggugcgcaaguggcaggagcaagguaauaaaaggauccuugccuuuaauuggagaagcagauugccuccacgaaaaauacgguggauuaaacaaaagcaagccuuacuacacaggggaacaugcaaaggccauaggaaauugcccaauaugggugaagacacccuugaagcuggccaauggaaccaaauauagaccuccugcaaaacuauuaaaggaaagggguuucuucggagcuauugcugguuucuuagaaggaggaugggaaggaaugauugcagguuggcacggauacacgucccauggggcacauggaguagcgguggcagcagaccuuaagagcacucaagaggccauaaacaagauaacaaaaaaucucaacucuuugagugagcuggaaguaaagaaucuucaaagacuaagcggugccauggaugaacuccacaaugaaauacuagaacuagacgagaaaguggaugaucucagagcugauacaauaagcucacaaauagaacucgcaguccuucuuuccaaugaaggaauaauaaacagugaagaugaacaucucuuggcgcuugaaagaaagcugaagaaaaugcugggccccucugcuguagagauaggaaauggaugcuuugaaaccaaacacaagugcaaccagaccugucucgacagaauagcugcugguaccuuugaugcaggagaauuuucucuccccaccuuugauucacuaaauauuacugcugcaucuuuaaaugacgauggauuggauaaucauacuauacugcuuuacuacucaacugcugccuccaguuuggcuguaacacugaugauagcuaucuuuguuguuuauauggucuccagagacaauguuucuugcuccaucugucuauaa

SEQ ID NO: 58721 - RNA, 1758 nt, Artificial Sequence
  derived and/or modified CDS sequence (wt) from hemagglutinin__InfluenzaB__AFB77676
augaaggcaauaauuguacuacucaugguaguaacauccaaugcagaucggaucugcacugggauaacaucgucaaacucaccacauguagucaaaacugcuacucaaggggaggucaaugugaccgguguaauaccacugacaacaacacccaccaaaucucauuuugcaaaucucaaaggaacagaaaccagggggaaacuauguccaaaaugccucaacugcacagaucuggacguagccuuaggcagaccaaaaugcacugggaaaauacccucggcaagaguuucaauacuccaugaagucagaccuguuacaucugggugcuuuccuauaaugcacgauagaacaaaaauuagacagcugccuaaccuucuccgaggauacgaacauaucagguuaucaacucauaacguuaucaaugcagaaaaugcaccaggaggacccuacaaaauuggaaccucagggucuugcccuaacguuaccaauggaaacggauucuucgcaacaauggcuugggccgucccaaaaaacgacaaaaacaaaacagcaacaaauccauuaacaauagaaguaccauacauuuguacagaaggagaagaccaaauuaccguuuggggguuccacucugacaacgagacccaaauggcaaagcucuauggggacucaaagccccagaaguucaccucaucugccaacggagugaccacacauuacguuucacagauugguggcuucccaaaucaaacagaagacggaggacuaccacaaagugguagaauuguuguugauuacauggugcaaaaaucugggaaaacaggaacaauuaccuaucaaagagguauuuuauugccucaaaagguguggugugcaaguggcaggagcaagguaauaaaaggauccuugccuuuaauuggagaagcagauugccuccacgaaaaauacgguggauuaaacaaaagcaagccuuacuacacaggggaacaugcaaaggccauaggaaauugcccaauaugggugaaaacacccuugaagcuggccaauggaaccaaauauagaccuccugcaaaacuauuaaaggaaagggguuucuucggagcuauugcugguuucuuagaaggaggaugggaaggaaugauugcagguuggcacggauacacaucccauggggcacauggaguagcgguggcagcagaccuuaagagcacucaagaggccauaaacaagauaacaaaaaaucucaacucuuugagugagcuggaaguaaagaaucuucaaagacuaagcggugccauggaugaacuccacaacgaaauacuagaacuagaugagaaaguggaugaucucagagcugauacaauaagcucacaaauagagcucgcaguccugcuuuccaaugaaggaauaauaaacagugaagaugaacaucucuuggcgcuugaaagaaagcugaagaaaaugcugggccccucugcuguagagauagggaauggaugcuuugaaaccaaacacaagugcaaccagaccugucucgacagaauagcugcugguaccuuugaugcaggagaauuuucucuccccaccuuugauucacugaauauuacugcugcaucuuuaaaugacgauggauuggauaaucauacuauacugcuuuacuacucaacugcugccuccaguuuggcuguaacacugaugauagcuaucuuuguuguuuauauggucuccagagacaauguuucuugcuccaucugucuauaa

SEQ ID NO: 58722 - RNA, 1758 nt, Artificial Sequence
  derived and/or modified CDS sequence (wt) from hemagglutinin__InfluenzaB__AFB77677
augaaggcaauaauuguacuacucaugguaguaacauccaaugcagaucggaucugcacugggauaacaucgucaaacucaccacauguagucaaaacugcuacucaaggggaggucaaugugaccgguguaauaccacugacaacaacacccaccaaaucucauuuugcaaaucucaaaggaacagaaaccagggggaaacuaugcccaaaaugcuucaacugcacagaucuggacguagccuuaggcagaccgaaaugcacugggaaaauacccucggcaagaguuucaauacuccaugaagucagaccuguuacaucugggugcuuuccuauaaugcacgauagaacaaaaauuagacagcugccuaaccuucuccgaggauacgaacauaucagguuaucaacucauaacguuaucaaugcagaaaaugcaccaggaggacccuacaaaauuggaaccucagggucuugcccuaacguuaccaauggaaacggauucuucgcaacaauggcuugggccgucccaaaaaacgacaaaaacaaaacagcaacaaauccauuaacaauagaaguaccguacauuuguacagaaggagaagaccaaauuaccguuuggggguuccacucugacaacgagacccaaauggcaaagcucuauggggacucaaagccccagaaguucaccucaucugccaacggagugaccacacauuacguuucacagauugguggcuucccaaaucaaacagaagacggaggacuaccacaaagugguagaauuguuguugauuacauggugcaaaaaucugggaaaacaggaacaauuaccuaucaaagagguauuuuauugccucaaaagguguggugcgcaaguggcaggagcaagguaauaaaaggauccuugccuuuaauuggagaagcagauugccuccacgaaaaauacgguggauuaaacaaaagcaagccuuacuacacaggggaacaugcaaaggccauaggaaauugcccaauaugggugaaaacacccuugaagcuggccaauggaaccaaauauagaccuccugcaaaacuauuaaaagaaagggguuucuucggagcuauugcugguuucuuagaaggaggaugggaaggaaugauugcagguuggcacggauacacaucccauggggcacauggaguagcgguggcagcagaccuuaagagcacucaagaggccauaaacaagauaacaaaaaaucucaacucuuugagugagcuggaaguaaagaaucuucaaagacuaagcggugccauggaugaacuccacaacgaaauacuagaacuagaugagaaaguggaugaucucagagcugauacaauaagcucacaaauagagcucgcaguccugcuuuccaaugaaggaauaauaaacagugaagaugaacaucucuuggcgcuugaaagaaagcugaagaaaaugcugggccccucugcuguagagauagggaauggaugcuuugaaaccaaacacaagugcaaccagaccugucucgacagaauagcugcugguaccuuugaugcaggagaauuuucucuccccaccuuugauucacugaauauuacugcugcaucuuuaaaugacgauggauuggauaaucauacuauacugcuuuacuacucaacugcugccuccaguuuggcuguaacacugaugauagcuaucuuuguuguuuauauggucuccagagacaauguuucuugcuccaucugucuauaa

SEQ ID NO: 58723 - RNA, 1758 nt, Artificial Sequence
  derived and/or modified CDS sequence (wt) from hemagglutinin__InfluenzaB__AFB77678
augaaggcaauaauuguacuacucaugguaguaacauccaaugcagaucggaucugcacugggauaacaucgucaaacucaccacauguagucaaaacugcuacucaaggggaggucaaugugaccgguguaauaccacugacaacaacacccaccaaaucucauuuugcaaaucucaaaggaacagaaaccagggggaaacuauguccaaaaugccucaacugcacagaucuggacguagccuuaggcagaccaaaaugcacugggaaaauacccucggcaagaguuucaauacuccaugaagucagaccuguuacaucugggugcuuuccuauaaugcacgauagaacaaaaauuagacagcugccuaaccuucuccgaggauacgaacauaucagguuaucaacucauaacguuaucaaugcagaaaaugcaccaggaggacccuacaaaauuggaaccucagggucuugcccuaacguuaccaauggaaacggauucuucgcaacaauggcuugggccgucccaaaaaacgacaaaaacaaaacagcaacaaauccauuaacaauagaaguaccauacauuuguacagaaggagaagaccaaauuaccguuuggggguuccacucugacaacgagacccaaauggcaaagcucuauggggacucaaagccccagaaguucaccucaucugccaacggagugaccacacauuacguuucacagauugguggcuucccaaaucaaacagaagacggaggacuaccacaaagugguagaauuguuguugauuacauggugcaaaaaucugggaaaacaggaacaauuaccuaucaaagagguauuuuauugccucaaaagguguggugcgcaaguggcaggagcaagguaauaaaaggauccuugccuuuaauuggagaagcagauugccuccacgaaaaauacgguggauuaaacaaaagcaagccuuacuacacaggggaacaugcaaaggccauaggaaauugcccaauaugggugaaaacacccuugaagcuggccaauggaaccaaauauagaccuccugcaaaacuauuaaaggaaagggguuucuucggagcuauugcugguuucuuagaaggaggaugggaaggaaugauugcagguuggcacggauacacaucccauggggcacauggaguagcgguggcagcagaccuuaagagcacucaagaggccauaaacaagauaacaaaaaaucucaacucuuugagugagcuggaaguaaagaaucuucaaagacuaagcggugccauggaugaacuccacaacgaaauacuagaacuagaugagaaaguggaugaucucagagcugauacaauaagcucacaaauagagcucgcaguccugcuuuccaaugaaggaauaauaaacagugaagaugaacaucucuuggcgcuugaaagaaagcugaagaaaaugcugggccccucugcuguagagauagggaauggaugcuuugaaaccaaacacaagugcaaccagaccugucucgacagaauagcugcugguaccuuugaugcaggagaauuuucucuccccaccuuugauucacugaauauuacugcugcaucuuuaaaugacgauggauuggauaaucauacuauacugcuuuacuacucaacugcugccuccaguuuggcuguaacacugaugauagcuaucuuuguuguuuauauggucuccagagacaauguuucuugcuccaucugucuauaa

SEQ ID NO: 58724 - RNA, 1758 nt, Artificial Sequence
  derived and/or modified CDS sequence (wt) from hemagglutinin__InfluenzaB__AFB77679
augaaggcaauaauuguacuacucaugguaguaacauccaaugcagaucggaucugcacugggauaacaucgucaaacucaccacauguagucaaaacugcuacucaaggggaggucaaugugaccgguguaauaccacugacaacaacacccaccaaaucucauuuugcaaaucucaaaggaacagaaaccagggggaaacuauguccaaaaugccucaacugcacagaucuggacguagccuuaggcagaccaaaaugcacugggaaaauacccucggcaagaguuucaauacuccaugaagucagaccuguuacaucugggugcuuuccuauaaugcacgauagaacaaaaauuagacagcugccuaaccuucuccgaggauacgaacauaucagguuaucaacucauaacguuaucaaugcagaaaaugcaccaggaggacccuacaaaauuggaaccucagggucuugcccuaacguuaccaauggaaacggauucuucgcaacaauggcuugggccgucccaaaaaacgacaaaaacaaaacagcaacaaauccauuaacaauagaaguaccauacauuuguacagaaggagaagaccaaauuaccguuuggggguuccacucugacaacgagacccaaauggcaaagcucuauggggacucaaagccccagaaguucaccucaucugccaacggagugaccacacauuacguuucacagauugguggcuucccaaaucaaacagaagacggaggacuaccacaaagugguagaauuguuguugauuacauggugcaaaaaucugggaaaacaggaacaauuaccuaucaaagagguauuuuauugccucaaaagguguggugcgcaaguggcaggagcaagguaauaaaaggauccuugccuuuaauuggagaagcagauugccuccacgaaaaauacgguggauuaaacaaaagcaagccuuacuacacaggggaacaugcaaaggccauaggaaauugcccaauaugggugaaaacacccuugaagcuggccaauggaaccaaauauagaccuccugcaaaacuauuaaaggaaagggguuucuucggagcuauugcugguuucuuagaaggaggaugggaaggaaugauugcagguuggcacggauacacaucccauggggcacauggaguagcgguggcagcagaccuuaagagcacucaagaggccauaaacaagauaacaaaaaaucucaacucuuugagugagcuagaaguaaagaaucuucaaagacuaagcggugccauggaugaacuccacaacgaaauacuagaacuagaugagaaaguggaugaucucagagcugauacaauaagcucacaaauagagcucgcaguccugcuuuccaaugaaggaauaauaaacagugaagaugaacaucucuuggcgcuugaaagaaagcugaagaaaaugcugggccccucugcuguagagauagggaauggaugcuuugaaaccaaacacaagugcaaccagaccugucuagacagaauagcugcugguaccuuugaugcaggagaauuuucucuccccaccuuugauucacugaauauuacugcugcaucuuuaaaugacgauggauuggauaaucauacuauacugcuuuacuacucaacugcugccuccaguuuggcuguaacacugaugauagcuaucuuuguuguuuauauggucuccagagacaauguuucuugcuccaucugucuauaa

SEQ ID NO: 58725 - RNA, 1758 nt, Artificial Sequence
  derived and/or modified CDS sequence (wt) from hemagglutinin__InfluenzaB__AFB77680
augaaggcaauaauuguacuacucaugguaguaacauccaaugcagaucggaucugcacugggauaacaucgucaaacucaccacauguagucaaaacugcuacucaaggggaggucaaugugaccgguguaauaccacugacaacaacacccaccaaaucucauuuugcaaaucucaaaggaacagaaaccagggggaaacuaugcccaaaaugccucaacugcacagaucuggacguagccuuaggcagaccaaaaugcacugggaaaauacccucggcaagaguuucaauacuccaugaagucagaccuauuacaucugggugcuuuccuauaaugcacgauagaacaaaaauuagacagcugccuaaccuucuccgaggauacgaacauaucagguuaucaacucauaacguuaucaaugcagaaaaugcaccaggaggacccuacaaaauuggaaccucagggucuugcccuaacguuaccaauggaaacggauucuucgcaacaauggcuugggccgucccaaaaaacgacaaaaacaaaacagcaacaaauccauuaacaauagaaguaccauacauuuguacagaaggagaagaccaaauuaccguuuggggguuccacucugacaacgagacccaaauggcaaagcucuauggggacucaaagccccagaaguucaccucaucugccaacggagugaccacacauuacguuucacagauugguggcuucccaaaucaaacagaagacggaggacuaccacaaagugguagaauuguuguugauuacauggugcaaaaaucugggaaaacaggaacaauuaccuaucaaagagguauuuuauugccucaaaagguguggugcgcaaguggcaggagcaagguaauaaaaggauccuugccuuuaauuggagaagcagauugccuccacgaaaaauacgguggauuaaacaaaagcaagccuuacuacacaggggaacaugcaaaggccauaggaaauugcccaauaugggugaaaacacccuugaagcuggccaauggaaccaaauauagaccuccugcaaaacuauuaaaggaaagggguuucuucggagcuauugcugguuucuuagaaggaggaugggaaggaaugauugcagguuggcacggauacacaucccauggggcacauggaguagcgguggcagcagaccuuaagagcacucaagaggccauaaacaagauaacaaaaaaucucaacucuuugagugagcuggaaguaaagaaucuucaaagacuaagcggugccauggaugaacuccacaacgaaauacuagaacuagaugagaaaguggaugaucucagagcugauacaauaagcucacaaauagagcucgcaguccugcuuuccaaugaaggaauaauaaacagugaagaugaacaucucuuggcgcuugaaagaaagcugaagaaaaugcugggccccucugcuguagagauagggaauggaugcuuugaaaccaaacacaagugcaaccagaccugucucgacagaauagcugcugguaccuuugaugcaggagaauuuucucuccccaccuuugauucacugaauauuacugcugcaucuuuaaaugacgauggauuggauaaucauacuauacugcuuuacuacucaacugcugccuccaguuuggcuguaacacugaugauagcuaucuuuguuguuuauauggucuccagagacaauguuucuugcuccaucugucuauaa

SEQ ID NO: 58726 - RNA, 1758 nt, Artificial Sequence
  derived and/or modified CDS sequence (wt) from hemagglutinin__InfluenzaB__AFB77681
augaaggcaauaauuguacuacucaugguaguaacauccaaugcagaucggaucugcacugggauaacaucgucaaacucaccacauguagucaaaacugcuacucaaggggaggucaaugugaccgguguaauaccacugacaacaacacccaccaaaucucauuuugcaaaucucaaaggaacagaaaccagggggaaacuaugcccaaaaugccucaacugcacagaucuggacguagccuuaggcagaccaaaaugcacugggaaaauacccucggcaagaguuucaauacuccaugaagucagaccuguuacaucugggugcuuuccuauaaugcacgauagaacaaaaauuagacagcugccuaaccuucuccgaggauacgaacauaucagguuaucaacucauaacguuaucaaugcagaaaaugcaccaggaggacccuacaaaauuggaaccucagggucuugcccuaacguuaccaauggaaacggauucuucgcaacaauggcuugggccgucccaaaaaacgacaaaaacaaaacagcaacaaauccauuaacaauagaaguaccauacauuuguacagaaggagaagaccaaauuaccguuuggggguuccacucugacaacgagacccaaauggcaaagcucuauggggacucaaagccccagaaguucaccucaucugccaacggagugaccacacauuacguuucacagauugguggcuucccaaaucaaacagaagacggaggacuaccacaaagugguagaauuguuguugauuacauggugcaaaaaucugggaaaacaggaacaauuaccuaucaaagagguauuuuauugccucaaaagguguggugcgcaaguggcaggagcaagguaauaaaaggauccuugccuuuaauuggagaagcagauugccuccacgaaaaauacgguggauuaaacaaaagcaagccuuacuacacaggggaacaugcaaaggccauaggaaauugcccaauaugggugaaaacacccuugaagcuggccaauggaaccaaauauagaccuccugcaaaacuauuaaaggaaagggguuucuucggagcuauugcugguuucuuagaaggaggaugggaaggaaugauugcagguuggcacggauacacaucccauggggcacauggaguagcgguggcagcagaccuuaagagcacucaagaggccauaaacaagauaacaaaaaaucucaacucuuugagugagcuggaaguaaagaaucuucaaagacuaagcggugccauggaugaacuccacaacgaaauacuagaacuagaugagaaaguggaugaucucagagcugauacaauaagcucacaaauagagcucgcaguccugcuuuccaaugaaggaauaauaaacagugaagaugaacaucucuuggcgcuugaaagaaagcugaagaaaaugcugggccccucugcuguagagauagggaauggaugcuuugaaaccaaacacaagugcaaccagaccugucucgacagaauagcugcugguaccuuugaugcaggagaauuuucucuccccaccuuugauucacugaauauuacugcugcaucuuuaaaugacgauggauuggauaaucauacuauacugcuuuacuacucaacugcugccuccaguuuggcuguaacacugaugauagcuaucuuuguuguuuauauggucuccagagacaauguuucuugcuccaucugucuauaa

SEQ ID NO: 58727 - RNA, 1758 nt, Artificial Sequence
  derived and/or modified CDS sequence (wt) from hemagglutinin__InfluenzaB__AFB77682
augaaggcaauaauuguacuacucaugguaguaacauccaaugcagaucgaaucugcacugggauaacaucgucaaacucaccacaugucgucaaaacugcuacucaaggggaggucaaugugacugguguaauaccacugacaacaacacccaccaaaucucauuuugcaaaucucaaaggaacagaaaccagggggaaacuauguccaaaaugccucaacugcacagaucuggacguagccuugggcagaccaaaaugcacggggaaaauacccucggcaagaguuucaauacuccaugaagucaggccuguuacaucuggguguuuuccuauaaugcacgacagaacaaaaauuagacagcugccuaaccuucuccgaggauacgaacauaucagguuaucaacucauaacguuaucaaugcagaaaaugcaccaggaggacccuacaaaauuggaaccucagggucuugcccuaacauuaccaauggaaacggauuuuucgcaacaauggcuugggccgucccaaaaaacgacaaaaacaaaacagcaacaaauccauuaacaauagaaguaccauacauuuguacagaaggagaagaccaaauuaccguuuggggguuccacucugacaacgagacccaaauggcaaagcucuauggggacucaaagccccagaaguucaccucuucugccaacggagugaccacacauuacguuucacagauugguggcuucccaaaucaaacagaagacggaggacuaccacaaagugguagaauuguuguugauuacauggugcaaaaaucugggaaaacaggaacaauuaccuaucaaagggguauuuuauugccucaaaagguguggugcgcaaguggcaggagcaagguaauaaaaggauccuugccuuuaauuggagaagcagauugccuccacgaaaaauacgguggauuaaacaaaagcaagccuuacuacacaggggaacaugcaaaggccauaggaaauugcccaauaugggugaaaacacccuugaagcuggccaauggaaccaaauauagaccuccugcaaaacuauuaaaggaaagggguuucuucggagcuauugcugguuucuuagaaggaggaugggaaggaaugauugcagguuggcacggauacacaucccauggggcacauggaguagcgguggcagcagaccuuaagagcacucaagaggccauaaacaagauaacacaaaaucucaacucuuugagugagcuggaaguaaagaaucuucaaagacuaagcggugccauggaugaacuccacaacgaaauacuagaacuagaugagaaaguggaugaucucagagcugauacaauaagcucacaaauagaacucgcaguccugcuuuccaaugaaggaauaauaaacagugaagaugaacaucucuuggcgcuugaaagaaagcugaagaaaaugcugggccccucugcuguagagauagggaauggaugcuuugaaaccaaacacaagugcaaccagaccugucucgacagaauagcugcugguaccuuugaugcaggagaauuuucucuccccaccuuugauucacugaauauuacugcugcaucuuuaaaugacgauggauuggauaaucauacuauacugcuuuacuacucaacugcugccuccaguuuggcuguaacacugaugauagcuaucuuuguuguuuauauggucuccagagacaauguuucuugcuccaucugucuauaa

SEQ ID NO: 58728 - RNA, 1758 nt, Artificial Sequence; identical to SEQ ID NO: 58726
  derived and/or modified CDS sequence (wt) from hemagglutinin__InfluenzaB__AFB77683

SEQ ID NO: 58729 - RNA, 1758 nt, Artificial Sequence; identical to SEQ ID NO: 58726
  derived and/or modified CDS sequence (wt) from hemagglutinin__InfluenzaB__AFB77684

SEQ ID NO: 58730 - RNA, 1758 nt, Artificial Sequence
  derived and/or modified CDS sequence (wt) from hemagglutinin__InfluenzaB__AFB77685
augaaggcaauaauuguacuacucaugguaguaacauccaaugcagaucgaaucugcacugggauaacaucgucaaacucaccacaugucgucaaaacugcuacucaaggggaggucaaugugacugguguaauaccacugacaacaacacccaccaaaucucauuuugcaaaucucaaaggaacagaaaccagggggaaacuaugcccaaaaugccucaacugcacagaucuggacguagccuugggcagaccgaaaugcacggggaaaacacccucggcaagaguuucaauacuccaugaagucagaccuguuacaucugggugcuuuccuauaaugcacgacagaacaaaaauuagacagcugccuaaccuucuccgaggauacgaacauaucagguuaucaacucauaacguuaucaaugcagaaaaugcaccaggaggacccuacaaaauuggaaccucagggucuugcccuaacauuaccaauggaaacggauuuuucgcaacaauggcuugggccgucccaaaaaacgacaaaaacaaaacagcaacaaauccauuaacaauagaaguaccauacauuuguacagaaggagaagaccaaauuaccguuuggggguuccacucugacaacgagacccaaauggcaaagcucuauggggacucaaagccccagaaguucaccucaucugccaacggagugaccacacauuacauuucacagauugguggcuucccaaaucaaacagaagacggaggauuaccacaaagugguagaauuguuguugauuacauggugcaaaaaucugagaaaacaggaacaauuaccuaucaaagggguauuuuauugccucaaaagguguggugcgcaaguggcaggagcaagguaauaaaaggauccuugccuuuaauuggagaagcagauugccuccacgaaaaauacgguggauuaaacaaaagcaagccuuacuacacaggggaacaugcaaaggccauaggaaauugcccaauaugggugaaaacacccuugaagcuggccaauggaaccaaauacagaccuccugcaaaacuauuaaaggaaagggguuucuucggagcuauugcugguuucuuagaaggaggaugggaaggaaugauugcagguuggcacggauacacaucccauggagcacauggaguagcgguggcagcagaccuuaagagcacucaagaggccauaaacaagauaacaaaaaaucucaacucuuugagugagcuggaaguaaagaaucuucaaagacuaaguggugccauggaugaacuccacaacgaaauacuagaacuagaugagaaaguggaugaucucagagcugauacaauaagcucacaaauagaacucgcaguccugcuuuccaaugaaggaauaauaaacagugaggaugaacaucucuuggcgcuugaaagaaagcugaagaaaaugcugggccccucugcuguagagauagggaauggaugcuuugaaaccaaacacaagugcaaccagaccugucucgacagaauagcugcugguaccuuugaugcaggagaauuuucucuccccaccuuugauucacugaauauuacugcugcaucuuuaaaugacgauggauuggauaaucacacuauacugcuuuacuacucaacugcugccuccaguuuggcuguaacacugaugauagcuaucuuuguuguuuauauggucuccagagacaauguuucuugcuccaucugucuauaa

SEQ ID NO: 58731 - RNA, 1758 nt, Artificial Sequence
  derived and/or modified CDS sequence (wt) from hemagglutinin__InfluenzaB__AFB77686
augaaggcaauaauuguacuacucaugguaguaacauccaaugcagaucgaaucugcacugggauaacaucgucaaacucaccacaugucgucaaaacugcuacucaaggggaggucaaugugacugguguaauaccacugacaacaacacccaccaaaucucauuuugcaaaucucaaaggaacagaaaccagggggaaacuauguccaaaaugccucaacugcacagaucuggacguagccuugggcagaccaaaaugcacggggaaaauacccucggcaagaguuucaauacuccaugaagucaggccuguuacaucuggguguuuuccuauaaugcacgacagaacaaaaauuagacagcugccuaaccuucuccgaggauacgaacauaucagguuaucaacucauaacguuaucaaugcagaaaaugcaccaggaggacccuacaaaauuggaaccucagggucuugcccuaacauuaccaauggaaacggauuuuucgcaacaauggcuugggccgucccaaaaaacgacaaaaacaaaacagcaacaaauccauuaacaauagaaguaccauacauuuguacagaaggagaagaccaaauuaccguuuggggguuccacucugacaacgagacccaaauggcaaagcucuauggggacucaaagccccagaaguucaccucuucugccaacggagugaccacacauuacguuucacagauuaguggcuucccaaaucaaacagaagacggaggacuaccacaaagugguagaauuguuguugauuacauggugcaaaaaucugggaaaacaggaacaauuaccuaucaaagggguauuuuauugccucaaaagguguggugcgcaaguggcaggagcaagguaauaaaaggauccuugccuuuaauuggagaagcagauugccuccacgaaaaauacgguggauuaaacaaaagcaagccuuacuacacaggggaacaugcaaaggccauaggaaauugcccaauaugggugaaaacacccuugaagcuggccaauggaaccaaauauagaccuccugcaaaacuauuaaaggaaagggguuucuucggagcuauugcugguuucuuagaaggaggaugggaaggaaugauugcagguuggcacggauacacaucccauggggcacauggaguagcgguggcagcagaccuuaagagcacucaagaggccauaaacaagauaacacaaaaucucaacucuuugagugagcuggaaguaaagaaucuucaaagacuaagcggugccauggaugaacuccacaacgaaauacuagaacuagaugagaaaguggaugaucucagagcugauacaauaagcucacaaauagaacucgcaguccugcuuuccaaugaaggaauaauaaacagugaagaugaacaucucuuggcgcuugaaagaaagcugaagaaaaugcugggccccucugcuguagagauagggaauggaugcuuugaaaccaaacacaagugcaaccagaccugucucgacagaauagcugcugguaccuuugaugcaggagaauuuucucuccccaccuuugauucacugaauauuacugcugcaucuuuaaaugacgauggauuggauaaucauacuauacugcuuuacuacucaacugcugccuccaguuuggcuguaacacugaugauagcuaucuuuguuguuuauauggucuccagagacaauguuucuugcuccaucugucuauaa

SEQ ID NO: 58732 - RNA, 1758 nt, Artificial Sequence
  derived and/or modified CDS sequence (wt) from hemagglutinin__InfluenzaB__AFB77687
augaaggcaauaauuguacuacucaugguaguaacauccaaugcagaucggaucugcacugggauaacaucgucaaacucaccacauguagucaaaacugcuacucaaggggaggucaaugugaccgguguaauaccacugacaacaacacccaccaaaucucauuuugcaaaucucaaaggaacagaaaccagggggaaacuaugcccaaaaugccucaacugcacagaucuggacguagccuuaggcagaccaaaaugcacugggaaaauacccucggcaagaguuucaauacuccaugaagucagaccuguuacaucugggugcuuuccuauaaugcacgauagaacaaaaauuagacagcugccuaaccuucuccgaggauacgaacauaucaaguuaucaacucauaacguuaucaaugcagaaaaugcaccaggaggacccuacaaaauuggaaccucagggucuugcccuaacguuaccaauggaaacggauucuucgcaacaauggcuugggccgucccaaaaaacgacaaaaacaaaacagcaacaaauccauuaacaauagaaguaccguacauuuguacagaaggagaagaccaaauuaccguuuggggguuccacucugacaacgagacccaaauggcaaagcucuauggggacucaaagccccagaaguucaccucaucugccaacggagugaccacacauuacguuucacagauugguggcuucccaaaucaaacagaagacggaggacuaccacaaagugguagaauuguuguugauuacauggugcaaaaaucugggaaaacaggaacaauuaccuaucaaagagguauuuuauugccucaaaagguguggugcgcaaguggcaggagcaagguaauaaaaggauccuugccuuuaauuggagaagcagauugccuccacgaaaaauacgguggauuaaacaaaagcaagccuuacuacacaggggaacaugcaaaggccauaggaaauugcccaauaugggugaaaacacccuugaagcuggccaauggaaccaaauauagaccuccugcaaaacuauuaaaagaaagggguuucuucggagcuauugcugguuucuuagaaggaggaugggaaggaaugauugcagguuggcacggauacacaucccauggggcacauggaguagcgguggcagcagaccuuaagagcacucaagaggccauaaacaagauaacaaaaaaucucaacucuuugagugagcuggaaguaaagaaucuucaaagacuaagcggugccauggaugaacuccacaacgaaauacuagaacuagaugagaaaguggaugaucucagagcugauacaauaagcucacaaauagagcucgcaguccugcuuuccaaugaaggaauaauaaacagugaagaugaacaucucuuggcgcuugaaagaaagcugaagaaaaugcugggccccucugcuguagagauagggaauggaugcuuugaaaccaaacacaagugcaaccagaccugucucgacagaauagcugcugguaccuuugaugcaggagaauuuucucuccccaccuuugauucacugaauauuacugcugcaucuuuaaaugacgauggauuggauaaucauacuauacugcuuuacuacucaacugcugccuccaguuuggcuguaacacugaugauagcuaucuuuguuguuuauauggucuccagagacaauguuucuugcuccaucugucuauaa

SEQ ID NO: 58733 - RNA, 1758 nt, Artificial Sequence
  derived and/or modified CDS sequence (wt) from hemagglutinin__InfluenzaB__AFB77688
augaaggcaauaauuguacuacucaugguaguaacauccaaugcagaucggaucugcacugggauaacaucgucaaacucaccacauguagucaaaacugcuacucaaggggaggucaaugugaccgguguaauaccacugacaacaacacccaccaaaucucauuuugcaaaucucaaaggaacagaaaccagggggaaacuaugcccaaaaugccucaacugcacagaucuggacguagccuuaggcagaccaaaaugcacugggaaaauacccucggcaagaguuucaauacuccaugaagucagaccuguuacaucugggugcuuuccuauaaugcacgauagaacaaaaauuagacagcugccuaaccuucuccgaggauacgaacauaucagguuaucaacucauaacguuaucaaugcagaaaaugcaccaggaggacccuacaaaauuggaaccucagggucuugcccuaacguuaccaauggaaacggauucuucgcaacaauggcuugggccgucccaaaaaacgacaaaaacaaaacagcaacaaauccauuaacaauagaaguaccauacauuuguacagaaggagaagaccaaauuaccguuuggggguuccacucugacaacgagacccaaauggcaaagcucuauggggacucaaagccccagaaguucaccucaucugccaacggagugaccacacauuacguuucacagauugguggcuucccaaaucaaacagaagacggaggacuaccacaaagugguagaauuguuguugauuacauggugcaaaaaucugggaaaacaggaacaauuaccuaucaaagagguauuuuauugccucaaaagguguggugcgcaaguggcaggagcaagguaauaaaaggauccuugccuuuaauuggagaagcagauugccuccacgaaaaauacgguggauuaaacaaaagcaagccuuacuacacaggggaacaugcaaaggccauaggaaauugcccaauaugggugaaagcacccuugaagcuggccaauggaaccaaauauagaccuccugcaaaacuauuaaaggaaagggguuucuucggagcuauugcugguuucuuagaaggaggaugggaaggaaugauugcagguuggcacggauacacaucccauggggcacauggaguagcgguggcagcagaccuuaagagcacucaagaggccauaaacaagauaacaaaaaaucucaacucuuugagugagcuggaaguaaagaaucuucaaagacuaagcggugccauggaugaacuccacaacgaaauacuagaacuagaugagaaaguggaugaucucagagcugauacaauaagcucacaaauagagcucgcaguccugcuuuccaaugaaggaauaauaaacagugaagaugaacaucucuuggcgcuugaaagaaagcugaagaaaaugcugggccccucugcuguagagauagggaauggaugcuuugaaaccaaacacaagugcaaccagaccugucucgacagaauagcugcugguaccuuugaugcaggagaauuuucucuccccaccuuugauucacugaauauuaccgcugcaucuuuaaaugacgauggauuggauaaucauacuauacugcuuuacuacucaacugcugccuccaguuuggcuguaacacugaugauagcuaucuuuguuguuuauauggucuccagagacaauguuucuugcuccaucugucuauaa

SEQ ID NO: 58734 - RNA, 1758 nt, Artificial Sequence
  derived and/or modified CDS sequence (wt) from hemagglutinin__InfluenzaB__AFB77689
augaaggcaauaauuguacuacucaugguaguaacauccaaugcagaucggaucugcacugggauaacaucgucaaacucaccacauguagucaaaacugcuacucaaggggaggucaaugugaccgguguaauaccacugacaacaacacccaccaaaucucauuuugcaaaucucaaaggaacagaaaccagggggaaacuaugcccaaaaugccucaacugcacagaucuggacguagccuuaggcagaccaaaaugcacugggaaaauacccucggcaagaguuucaauacuccaugaagucagaccuguuacaucugggugcuuuccuauaaugcacgauagaacaaaaauuagacagcugccuaaccuucuccgaggauacgaacauaucagguuaucaacucauaacguuaucaaugcagaaaaugcaccaggaggacccuacaaaauuggaaccucagggucuugcccuaacguuaccaauggaaacggauucuucgcaacaauggcuugggccgucccaaaaaacgacaaaaacaaaacagcaacaaauccauuaacaauagaaguaccauacauuuguacagaaggagaagaccaaauuaccguuuggggguuccacucugacaacgagacccaaauggcaaagcucuauggggacucaaagccccagaaguucaccucaucugccaacggagugaccacacauuacguuucacagauugguggcuucccaaaucaaacagaagacggaggacuaccacaaagugguagaauuguuguugauuacaugguacaaaaaucugggaaaacaggaacaauuaccuaucaaagagguauuuuauugccucaaaagguguggugcgcaaguggcaggagcaagguaauaaaaggauccuugccuuuaauuggagaagcagauugccuccacgaaaaauacgguggauuaaacaaaagcaagccuuacuacacaggggaacaugcaaaggccauaggaaauugcccaauaugggugaaaacacccuugaagcuggccaauggaaccaaauauagaccuccugcaaaacuauuaaaggaaagggguuucuucggagcuauugcugguuucuuagaaggaggaugggaaggaaugauugcagguuggcacggauacacaucccauggggcacauggaguagcgguggcagcagaccuuaagagcacucaagaggccauaaacaagauaacaaaaaaucucaacucuuugagugagcuggaaguaaagaaucuucaaagacuaagcggugccauggaugaacuccacaacgaaauacuagaacuagaugagaaaguggaugaucucagagcugauacaauaagcucacaaauagagcucgcaguccugcuuuccaaugaaggaauaauaaacagugaagaugaacaucucuuggcgcuugaaagaaagcugaagaaaaugcugggccccucugcuguagagauagggaauggaugcuuugaaaccaaacacaagugcaaccagaccugucucgacagaauagcugcugguaccuuugaugcaggagaauuuucucuccccaccuuugauucacugaauauuacugcugcaucuuuaaaugacgauggauuggauaaucauacuauacugcuuuacuacucaacugcugccuccaguuuggcuguaacacugaugauagcuaucuuuguuguuuauauggucuccagagacaauguuucuugcuccaucugucuauaa

SEQ ID NO: 58735 - RNA, 1758 nt, Artificial Sequence
  derived and/or modified CDS sequence (wt) from hemagglutinin__InfluenzaB__AFB77690
augaaggcaauaauuguacuacucaugguaguaacauccaaugcagaucggaucugcacugggauaacaucgucaaacucaccacauguagucaaaacugcuacucaaggggaggucaaugugaccgguguaauaccacugacaacaacacccaccaaaucucauuuugcaaaucucaaaggaacagaaaccagggggaaacuaugcccaaaaugccucaacugcacagaucuggacguagccuuaggcagaccaaaaugcacugggaaaauacccucggcaagaguuucaauacuccaugaagucagaccuguuacaucugggugcuuuccuauaaugcacgauagaacaaaaauuagacagcugccuaaccuucuccgaggauacgaacauaucagguuaucaacucauaacguuaucaaugcagaaaaugcaccaggaggacccuacaaaauuggaaccucagggucuugcccuaacguuaccaauggaaacggauucuucgcaacaauggcuugggccguuccaaaaaaugacaaaaacaaaacagcaacaaauccauuaacaauagaaguaccauacauuuguacagaaggagaagaccaaauuaccguuuggggguuccacucugacaacgagacccaaauggcaaagcucuauggggacucaaagccccagaaguucaccucaucugccaacggagugaccacacauuacguuucacagauugguggcuucccaaaucaaacagaagacggaggacuaccacaaagugguagaauuguuguugauuacauggugcaaaaaucugggaaaacaggaacaauuaccuaucaaagagguauuuuauugccucaaaagguguggugcgcaaguggcaggagcaagguaauaaaaggauccuugccuuuaauuggagaagcagauugccuccacgaaaaauacgguggauuaaacaaaagcaagccuuacuacacaggggaacaugcaaaggccauaggaaauugcccaauaugggugaaaacacccuugaagcuggccaauggaaccaaauauagaccuccugcaaaacuauuaaaggaaagggguuucuucggagcuauugcugguuucuuagaaggaggaugggaaggaaugauugcagguuggcacggauacacaucccauggggcacauggaguagcgguggcagcagaccuuaagagcacucaagaggccauaaacaagauaacaaaaaaucucaacucuuuaagugagcuggaaguaaagaaucuucaaagacuaagcggugccauggaugaacuccacaacgaaauacuagaacuagaugagaaaguggaugaucucagagcugauacaauaagcucacaaauagagcucgcaguccugcuuuccaaugaaggaauaauaaacagugaagaugaacaucucuuggcgcuugaaagaaagcugaagaaaaugcugggccccucugcuguagagauagggaauggaugcuuugaaaccaaacacaagugcaaccagaccugucucgacagaauagcugcugguaccuuugaugcaggagaauuuucucuccccaccuuugauucacugaauauuacugcugcaucuuuaaaugacgauggauuggauaaucauacuauacugcuuuacuacucaacugcugccuccaguuuggcuguaacacugaugauagcuaucuuuguuguuuauauggucuccagagacaauguuucuugcuccaucugucuauaa

SEQ ID NO: 58736 - RNA, 1758 nt, Artificial Sequence
  derived and/or modified CDS sequence (wt) from hemagglutinin__InfluenzaB__AFE00360
augaaggcaauaauuguacuacucaugguaguaacauccaaugcagaucgaaucugcacugggauaacaucgucaaacucaccacauaucgucaaaacugcuacucaaggggaggucaaugugacugguguaauaccacugacaacaacacccaccaaaucucauuuugcaaaucucaaaggaacagaaaccagggggaaacuaugcccaaaaugccucaacugcacagaucuggacguagccuugggcagaccaaaaugcacggggaaaauacccucggcaagaguuucaauacuccaugaagucagaccuguuacaucugggugcuuuccuauaaugcacgacagaacaaaaauuagacagcugccuaaccuucucagaggauacgaacauaucagguuaucaacucauaacguuaucaaugcagaaaaugcaccaggaggacccuacaaaauuggaaccucagggucuugcccuaacauuaccaauggaaacggauuuuucgcaacaauggcuugggccgucccaaaaaacgacaaaaacaaaacagcaacaaauccauuaacaauagaaguaccauacauuuguacagaaggagaagaccaaauuaccguuuggggguuccacucugacaaugaaacccaaauggcaaagcucuauggggacucaaagccucagaaguucaccucaucugccaacggagugaccacacauuacguuucacagauugguggcuucccaaaucaaacagaagacggaggacuaccacaaagugguagaauuguuguugauuacauggugcaaaaaucugggaaaacaggaacaauuaccuaucaaagggguauuuuauugccucaaaagguguggugcgcaaguggcaggagcaagguaauaaaaggauccuugccuuuaauuggagaagcagauugccuccacgaaaaauacgguggauuaaacaaaagcaagccuuacuacacaggggaacaugcaaaggccauaggaaauugcccaauaugggugaaaacacccuugaagcuggccaauggaaccaaauauagaccuccugcaaaacuauuaaaggaaagggguuucuucggugcuauugcuggcuucuuagaaggaggaugggaaggaaugauugcagguuggcacggauacacaucccauggggcacauggaguagcgguggcagcagaccuuaagagcacucaagaggccauaaacaagauaacaaaaaaucucaacucuuugagugagcuggaaguaaagaaucuucaaagacuaagcggugccauggaugaacuccacaaugaaauacuagaauuagaugagaaaguggaugaucucagagcugauacaauaagcucacaaauagaacucgcaguccugcuuuccaaugaaggaauaauaaacagugaagaugaacaucucuuggcgcuugaaagaaagcugaagaaaaugcugggccccucugcuguagagauagggaauggaugcuuugaaaccaaacacaagugcaaccagaccugucucgacagaauagcugccgguaccuuugaugcaggagaauuuucucuccccacuuuugauucacugaauauuacugcugcaucuuuaaaugacgauggauuggauaaucauacuauacugcuuuacuacucaacugcugccuccaguuuggcuguaacacugaugauagcuaucuuuguuguuuauauggucuccagagacaauguuucuugcuccaucugucuauaa

SEQ ID NO: 58737 - RNA, 1758 nt, Artificial Sequence
  derived and/or modified CDS sequence (wt) from hemagglutinin__InfluenzaB__AFF18534
augaaggcaauaauuguacuacucaugguaguaacauccaaugcagaucgaaucugcacugggauaacaucgucaaacucaccacauaucgucaaaacugcuacucaaggggaggucaaugugacugguguaauaccacugacaacaacacccaccaaaucucauuuugcaaaucucaaaggaacagaaaccagggggaaacuaugcccaaaaugccucaacugcacagaucuggacguagccuugggcagaccaaaaugcacggggaaaauacccucggcaagaguuucaauacuccaugaagucagaccuguuacaucugggugcuuuccuauaaugcacgacagaacaaaaauuagacagcugccuaaccuucucagaggauacgaacauaucagguuaucaacucauaacguuaucaaugcagaaaaugcaccaggaggacccuacaaaauuggaaccucagggucuugcccuaacauuaccaauggaaacggauuuuucgcaacaauggcuugggccgucccaaaaaacgacaaaaacaaaacagcaacaaauccauuaacaauagaaguaccauacauuuguacagaaggagaagaccaaauuaccguuuggggguuccacucugacaaugaaacccaaauggcaaagcucuauggggacucaaagccccagaaguucaccucaucugccaacggagugaccacacauuacguuucacagauugguggcuucccaaaucaaacagaagacggaggacuaccacaaagugguagaauuguuguugauuacauggugcaaaaaucugggaaaacaggaacaauuaccuaucaaagggguauuuuauugccucaaaagguguggugcgcaaguggcaggagcaagguaauaaaaggauccuugccuuuaauuggagaagcagauugccuccacgaaaaauacgguggauuaaacaaaagcaagccuuacuacacaggggaacaugcaaaggccauaggaaauugcccaauaugggugaaaacacccuugaagcuggccaauggaaccaaauauagaccuccugcaaaacuauuaaaggaaagggguuucuucggugcuauugcuggcuucuuagaaggaggaugggaaggaaugauugcagguuggcacggauacacaucccauggggcacauggaguagcgguggcagcagaccuuaagagcacucaagaggccauaaacaagauaacaaaaaaucucaacucuuugagugagcuggaaguaaagaaucuucaaagacuaagcggugccauggaugaacuccacaaugaaauacuagaauuagaugagaaaguggaugaucucagagcugauacaauaagcucacaaauagaacucgcaguccugcuuuccaaugaaggaauaauaaacagugaagaugaacaucucuuggcgcuugaaagaaagcugaagaaaaugcugggucccucugcuguagagauagggaauggaugcuuugaaaccaaacacaagugcaaccagaccugucucgacagaauagcugcugguaccuuugaugcaggagaauuuucucuccccacuuuugauucacugaauauuacugcugcaucuuuaaaugacgauggauuggauaaucauacuauacugcuuuacuacucaacugcugccuccaguuuggcuguaacacugaugauagcuaucuuuguuguuuauauggucuccagagacaauguuucuugcuccaucugucuauaa

SEQ ID NO: 58738 - RNA, 1758 nt, Artificial Sequence
  derived and/or modified CDS sequence (wt) from hemagglutinin__InfluenzaB__AFF18543
augaaggcaauaauuguacuacucaugguaguaacauccaaugcagaucgaaucugcacugggauaacaucgucaaacucaccacauaucgucaaaacugcuacucaaggggaggucaaugugacugguguaauaccacugacaacaacacccaccaaaucucauuuugcaaaucucaaaggaacagaaaccagggggaaacuaugcccaaaaugccucaacugcacagaucuggacguagccuugggcagaccaaaaugcacggggaaaauacccucggcaagaguuucaauacuccaugaagucagaccuguuacaucugggugcuuuccuauaaugcacgacagaacaaaaauuagacagcugccuaaccuucucagaggauacgaacauaucagguuaucaacucauaacguuaucaaugcagaaaaugcaccaggaggacccuacaaaauuggaaccucagggucuugcccuaacauuaccaauggaaacggauuuuucgcaacaauggcuugggccgucccaaaaaacgacaaaaacaaaacagcaacaaauccauuaacaauagaaguaccauacauuuguacagaaggagaagaccaaauuaccguuuggggguuccacucugacaaugaaacccaaauggcaaagcucuauggggacucaaagccccagaaguucaccucaucugccaacggagugaccacacauuacguuucacagauugguggcuucccaaaucaaacagaagacggaggacuaccacaaagugguagaauuguuguugauuacauggugcaaaaaucugggaaaacaggaacaauuaccuaucaaagggguauuuuauugccucaaaagguguggugcgcaaguggcaggagcaagguaauaaaaggauccuugccuuuaauuggagaagcagauugccuccacgaaaaauacgguggauuaaacaaaagcaagccuuacuacacaggggaacaugcaaaggccauaggaaauugcccaauaugggugaaaacacccuugaagcuggccaauggaaccaaauauagaccuccugcaaaacuauuaaaggaaagggguuucuucggugcuauugcuggcuucuuagaaggaggaugggaaggaaugauugcagguuggcacggauacacaucccauggggcacauggaguagcgguggcagcagaccuuaagagcacucaagaggccauaaacaagauaacaaaaaaucucaacucuuugagugagcuggaaguaaagaaucuucaaagacuaagcggugccauggaugaacuccacaaugaaauacuagaauuagaugagaaaguggaugaucucagagcugauacaauaagcucacaaauagaacucgcaguccugcuuuccaaugaaggaauaauaaacagugaagaugaacaucucuuggcgcuugaaagaaagcugaagaaaaugcugggccccucugcuguagagauagggaauggaugcuuugaaaccaaacacaagugcaaccagaccugucucgacagaauagcugcugguaccuuugaugcaggagaauuuucucuccccacuuuugauucacugaauauuacugcugcaucuuuaaaugacgauggauuggauaaucauacuauacugcuuuacuacucaacugcugccuccaguuuggcuguaacacugaugauagcuaucuuuguuguuuauauggucuccagagacaauguuucuugcuccaucugucuauaa

SEQ ID NO: 58739 - RNA, 1758 nt, Artificial Sequence
  derived and/or modified CDS sequence (wt) from hemagglutinin__InfluenzaB__AFG48978
augaaggcaauaauuguacuacucaugguaguaacauccaaugcagaucgaaucugcacugggauaacaucgucaaacucaccacaugucgucaaaacugcuacucaaggggaggucaaugugaccgguguaauaccacugacaacaacacccaccaaaucucauuuugcaaaucucaaaggaacagaaaccagggggaaacuaugcccaaaaugccucaacugcacagaucuggacguagccuuaggcagaccaaaaugcacggggaaaauacccucggcaagaguuucaauacuccaugaagucagaccuguuacaucugggugcuuuccuauaaugcacgauagaacaaaaauuagacagcugccuaaccuucuccgaggauacgaacauaucagguuaucaacucacaacguuaucaaugcagaaaaugcaccaggaggacccuacaaaauuggaaccucagggucuugcccuaacguuaccaauggaaacggauucuucgcaacaauggcuugggccgucccaaaaaacgacaaaaacaaaacagcaacaaauccauuaacaauagaaguaccauacauuuguacagaaggagaagaccaaauuaccguuuggggguuccacucugacaacgagacccaaauggcaaagcucuauggggacucaaagccccagaaguucaccucaucugccaacggagugaccacacauuacguuucacagauugguggcuucccaaaucaaacagaagauggaggacuaccacaaagugguagaauuguuguugauuacauggugcaaaaaucugggaaaacaggaacaauuaccuaucaaagagguauuuuauugccucaaaagguguggugcgcaaguggcaggagcaagguaauaaaaggauccuugccuuuaauuggagaagcagauugccuccacgaaaaauacgguggauuaaacaaaagcaagccuuacuacacaggggaacaugcaaaggccauaggaaauugcccaauaugggugaaaacacccuugaagcuggccaauggaaccaaauauagaccuccugcaaaacuauuaaaggaaagggguuucuucggagcuauugcugguuucuuagaaggaggaugggaaggaaugauugcagguuggcacggauacacaucccauggggcacauggaguagcgguggcagcugaccuuaagagcacucaagaggccauaaacaagauaacaaaaaaucucaacucuuugagugagcuggaaguaaagaaucuucaaagacuaagcggugccauggaugaacuccacaacgaaauacuagaacuagaugagaaaguggaugaucucagagcugauacaauaagcucacaaauagaacucgcaguccugcuuuccaaugaaggaauaauaaacagugaagaugaacaucucuuggcgcuugaaagaaagcugaagaaaaugcugggccccucugcuguagagauagggaauggaugcuuugaaaccaaacacaagugcaaccagaccugucucgacagaauagcugcugguaccuuugaugcaggagaauuuucucuccccaccuuugauucacugaauauuacugcugcaucuuuaaaugacgauggauuggauaaucauacuauacugcuuuacuacucaacugcugccuccaguuuggcuguaacacugaugauagcuaucuuuguuguuuauauggucuccagagacaauguuucuugcuccaucugucuauaa

SEQ ID NO: 58740 - RNA, 1758 nt, Artificial Sequence; identical to SEQ ID NO: 58739
  derived and/or modified CDS sequence (wt) from hemagglutinin__InfluenzaB__AFG48997

SEQ ID NO: 58741 - RNA, 1758 nt, Artificial Sequence
  derived and/or modified CDS sequence (wt) from hemagglutinin__InfluenzaB__AFG48998
augaaggcaauaauuguacuacucaugguaguaacauccaaugcagaucgaaucugcacugggauaacaucgucaaacucaccacaugucgucaaaacugcuacucaaggggaggucaaugugacugguguaauaccacugacaacaacacccaccaaaucucauuuugcaaaucucaaaggaacagaaaccagagggaaacuaugcccaaaaugccccaauugcacagaucuggacguagccuugggcagaccaaaaugcacgggaaaaauacccucggcaagaguuucaauacuccaugaagucagaccuguuacaucugggugcuuuccuauaaugcacgacagaacaaaaauuagacagcugccuaaccuucuccgaggauacgaacauaucagauuaucaacucauaacguuaucaaugcagaaaaugcaccaggaggacccuacaaaauuggaaccucagggucuugcccuaacguuaccaauggaaacggauuuuucgaaacaauggcuugggccgucccaaaaaacgacaaaaacaaaacagcaacaaauccauuaacaauagaaguaccauacauuuguacagaaggagaagaccaaauuaccguuuggggguuccacucugauaacgagacccaaauggcaaagcucuauggggacucaaagccccagaaguucaccucaucugccaacggagugaccacacauuacguuucacagauugguggcuucccaaaucaaacagaagacggaggacuaccacaaagugguagaauuguuguugauuacauggugcaaaaaucugggaaaacaggaacaauuaccuaucaaagagguauuuuauugccucaaaagguguggugcgcaaguggcaggagcaagguaauaaaaggauccuugccuuuaauuggagaagcagauugccuccacgaaaaauacgguggauuaaacaaaagcaagccuuacuacacaggggaacaugcaaaggccauaggaaauugcccaauaugggugaagacacccuugaagcuggccaauggaaccaaauauagaccuccugcaaaacuauuaaaggaaagggguuucuucggagcuauugcugguuucuuagaaggaggaugggaaggaaugauugcagguuggcacggauacacgucccauggggcacauggaguagcgguggcagcagaccuuaagagcacucaagaggccauaaacaagauaacaaaaaaucucaacucuuugagugagcuggaaguaaagaaucuucaaagacuaagcggugccauggaugaacuccacaacgaaauacuagaacuagacgagaaaguagaugaucucagagcugauacaauaagcucacaaauagaacucgcaguccugcuuuccaaugaaggaauaauaaacagugaagaugaacaucucuuggcgcuugaaagaaagcugaagaaaaugcugggccccucugcuguagagauagggaauggaugcuuugaaaccaaacacaagugcaaccagaccugucucgacagaauagcugcugguaccuuugaugcaggagaauuuucucuccccaccuuugauucacugaauauuacugcugcaucuuuaaaugacgauggauuggauaaucauaccauacugcuuuacuacucaacugcugccuccaguuuggcuguaacacugaugauagcuaucuuuguuguuuauauggucuccagagacaauguuucuugcuccaucugucuauaa

SEQ ID NO: 58742 - RNA, 1755 nt, Artificial Sequence
  derived and/or modified CDS sequence (wt) from hemagglutinin__InfluenzaB__AFG49012
augaaggcaauaauuguacuacucaugguaguaacauccaaugcagaucgaaucugcacugggauaacaucuucaaacucaccucauguggucaaaacagcuacucaaggggaggucaaugugacuggugugauaccacugacaacaacaccaacaaaaucuuauuuugcaaaucucaaaggaacaaagaccagagggaaacuaugcccagacugucucaacuguacagaucuggauguggccuugggcaggccaauguguguggggaccacaccuucugcuaaagcuucaauacuccacgaagucagaccuguuacauccgggugcuuuccuauaaugcacgacagaacaaaaaucaggcaacuacccaaucuucucagaggauaugaaaauaucagguuaucaacccaaaacguuaucgaugcagaaaaagcaccaggaggacccuacagacuuggaaccucaggaucuugcccuaacgcuaccaguaaaaucggauuuuucgcaacaauggcuugggcugucccaaaggacaacuacaaaaaugcaacgaacccacuaacaguugaaguaccauacauuuguacagaaggggaagaccaaauuacuguuuggggguuccauucagauaacaaaacccaaaugaagaaccucuauggagacucaaauccucaaaaguucaccucaucugcuaauggaguaaccacacauuauguuucucagauuggcgacuucccagaucaaacagaagacggaggacuaccacaaagcggcagaauuguuguugauuacaugaugcaaaaaccugggaaaacaggaacaauugucuaucaaagagguguuuuguugccucaaaagguguggugcgcgaguggcaggagcaaaguaauaaaagggucauugccuuuaauuggugaagcagauugccuucaugaaaaauacgguggauuaaacaaaagcaagccuuacuacacaggagaacaugcaaaagccauaggaaauugcccaauauggguaaaaacaccuuugaagcuugccaauggaaccaaauauagaccuccugcaaaacuauuaaaggaaagggguuucuucggagcuauugcuaguuuccuagaaggaggaugggaaggaaugauugcagguuggcacggauacacaucucacggagcacauggaguggcaguggcggcagaccuuaagaguacacaagaagcuauaaauaagauaacaaaaaaucucaauucuuugagugagcuagaaguaaagaaccuucaaagacuaaguggugccauggaugaacuccacaacgaaauacucgagcuggaugagaaaguggaugaucucagagcugacacuauaagcucacaaauagaacuugcagucuugcuuuccaacgaaggaauaauaaacagugaagacgagcaucuauuggcacuugagagaaaacuaaagaaaaugcugggucccucugcuguagacauaggaaauggaugcuucgaaaccaaacacaaaugcaaccagaccugcuuagacaggauagcugcuggcaccuuuaaugcaggagaauuuucucuccccacuuuugauucauugaacauuacugcugcaucuuuaaaugaugauggauuggauaaccauacuauacugcucuauuacucaacugcugcuucuaguuuggcuguaacauuaaugcuagcuauuuuuauuguuuauauggucuccagagacaacguuucaugcuccaucugucuauaa

SEQ ID NO: 58743 - RNA, 1755 nt, Artificial Sequence
  derived and/or modified CDS sequence (wt) from hemagglutinin__InfluenzaB__AFG49013
augaaggcaauaauuguacuacucaugguaguaacauccaaugcagaucgaaucugcacugggauaacaucuucaaacucaccucauguggucaaaacagcuacucaaggggaagucaaugugacuggugugauaccacugacaacaacaccaacaaaaucuuauuuugcaaaucucaaaggaacaaagaccagagggaaacuaugcccagacugucucaacuguacagaucuggauguggccuugggcaggccaaugugugugggaaccacaccuucugcgaaagcuucaauacuccacgaagucaggccuguuacauccgggugcuuuccuauaaugcacgacagaacaaaaaucaggcaacuagccaaucuucucagaggauaugaaaauaucagguuaucaacccaaaacguuaucgaugcagaaaaggcaccaggaggacccuacagacuuggaaccucaggaucuugcccuaacgcuaccaguaaaagcggauuuuuugcaacaauggcuugggcugucccaaaggacaacaacaaaaaugcaacgaacccacuaacaguagaaguaccauacauuuguacagaaggggaagaccaaauuacuguuuggggguuccauucagauaacaaaacccaaaugaagaaccucuauggagacucaaauccucaaaaguucaccucaucugcuaauggaguaaccacacauuauguuucucagauuggcggcuucccagaucaaacagaagacggaggacuaccacaaagcggcagaauugucguugauuacaugaugcaaaaaccugggaaaacaggaacaauugucuaucaaagagguguuuuguugccucaaaagguguggugcgcgaguggcaggagcaaaguaauaaaaggguccuugccuuuaauuggugaagcagauugccuucaugaaaaauacgguggauuaaacaaaagcaagccuuacuacacaggagaacaugcaaaagccauaggaaauugcccaauaugggugaaaacaccuuugaagcuugccaauggaaccaaauauagaccuccugcaaaacuauuaaaggaaagggguuucuucggagcuauugcugguuuccuagaaggaggaugggaaggaaugauugcagguuggcacggauacacaucucacggagcacauggaguggcaguugcggcagaccuuaagaguacacaagaagcuauaaacaagauaacaaaaaaucucaacucuuugagugagcuagaaguaaagaaucuucaaaggcuaaguggugccauggaugaacuccacaaugaaauacucgagcuggaugagaaaguggaugaucucagagcugacacuauaagcucacaaauagaacuugcagucuugcuuuccaacgaaggaauaauaaacagugaagacgagcaucuauuggcacuugagagaaaacuaaagaaaaugcugggucccucugcuguagacauaggaaauggaugcuucgaaaccaaacacaaaugcaaccagaccugcuuagacaggauagcugcuggcaccuuuaaugcaggagaguuuucccucccuacuuuugauucauugaacauuacugcugcaucuuuaaaugaugauggauuggauaaucauacuauacugcucuauuacucaacugcugcuucuaguuuggcuguaacauugaugcuagcuauuuuuauuguuuauauggucuccagagacaacguuucaugcuccaucugucuauaa

SEQ ID NO: 58744 - RNA, 1755 nt, Artificial Sequence
  derived and/or modified CDS sequence (wt) from hemagglutinin__InfluenzaB__AFH57865
augaaggcaauaauuguacuacucaugguaguaacauccaaugcagaucgaaucugcacugggauaacaucuucaaacucaccucauguggucaaaacagccacucaaggggaggucaaugugacuggugugauaccacugacaacaacaccaacaaaaucuuauuuugcaaaucucaaaggaacaaggaccagagggaaacuaugcccagacugucucaacuguacagaucuggauguggccuugggcagaccaauguguguggggaccacaccuucugcgaaagcuucaauacuccacgaagucagaccuguuacaucugggugcuuuccuauaaugcacgacagaacaaaaaucaggcaacuacccaaucuucucagaggauaugaaaauaucagguuaucaacccaaaacguuaucgaugcagaaaaggcaccaggaggacccuacagacuuggaaccucaggaucuugcccuaacgcuaccaguaaaagcggauuuuucgcaacaauggcuugggcugucccaaaggacaacaacaaaaaugcaacgaacccacuaacaguagaaguaccauacauuuguacagaaggggaagaccaaauuacuguuuggggguuccauucagauaacaaaaccccaaugaagaaccucuauggggacucaaauccucaaaaguucaccucaucugcuaauggaguaaccacacauuauguuucucagauuggcggcuucccagaucaaacagaagacggaggacuaccacaaagcggcagaauuguuguugauuacaugaugcaaaaaccugggaaaacaggaacaauugucuaucaaagagguguuuuguugccucaaaagguguggugcgcgaguggcaggagcaaaguaauaaaaggguccuugcccuuaauuggugaagcagauugccuucaugaaaaauacgguggauuaaacaaaagcaagccuuacuacacaggagaacaugcaaaagccauaggaaauugcccaauaugggugaaaacaccuuugaagcuugccaauggaaccaaauauagaccuccugcaaaacuauuaaaggaaagggguuucuucggagcuauugcugguuuccuagaaggaggaugggaaggaaugauugcagguuggcacggauacacaucucacggagcacauggaguggcaguggcggcagaccuuaagaguacacaagaagcuauaaacaagauaacaaaaaaucucaauucuuugagugagcuagaaguaaagaaucuucaaagacuaaguggugccauggaugaacuccacaacgaaauacucgagcuggaugagaaaguggaugaucucagagcugacacuauaagcucacaaauagaacuugcagucuugcuuuccaacgaaggaauaauaaacagugaagaugagcaucuauuggcacuugagagaaaacuaaagaaaaugcugggucccucugcuguagacauaggaaauggauguuucgaaaccaaacacaagugcaaccagaccugcuuagacaggauagcugcuggcaccuuuaaugcaggagaauuuucucuccccacuuuugauucacugaacauuacugcugcaucuuuaaaugaugauggauuggauaaccauacuauacugcucuauuacucaacugcugcuucuaguuuggcuguaacauugaugcuagcuauuuuuauuguuuauauggucuccagagacaacguuucaugcuccaucugucuauaa

SEQ ID NO: 58745 - RNA, 1755 nt, Artificial Sequence
  derived and/or modified CDS sequence (wt) from hemagglutinin__InfluenzaB__AFH57876
augaaggcaauaauuguacuacucaugguaguaacauccaaugcagaucgaaucugcacuggaauaacaucuucaaacucaccucauguggucaaaacagccacucaaggggaggucaaugugacuggugugauaccacuaacaacaacaccaacaaaaucuuauuuugcaaaucucaaaggaacaaggaccagagggaaacuaugcccagacugucucaacugcacagaucuggauguggcuuugggcagaccaauguguguggggaccacaccuucggcgaaagcuucaauacuccacgaagucagaccuguuacauccgggugcuuuccuauaaugcacgacagaacaaaaaucaggcaacuacccaaucuucucagaggauaugaaaauaucaggcuaucaacccaaaacgucaucgaugcggaaaaggcaccaggaggacccuacagacuuggaaccucaggaucuugcccuaacgcuaccaguaagagcggauuuuucgcaacaauggcuugggcugucccaaaggacaacaacaaaaaugcaacgaacccacuaacaguagaaguaccauacauuuguacagaaggggaagaccaaaucacuguuuggggguuccauucagauaacaaaaaccaaaugaagaaccucuauggagacucaaauccucaaaaguucaccucaucugcuaauggaguaaccacacacuauguuucucagauuggcagcuucccagaucaaacagaagacggaggacuaccacaaagcggcaggauuguuguugauuacaugaugcaaaaaccugggaaaacaggaacaauugucuaccaaagagguauuuuguugccucaaaagguguggugcgcgaguggcaggagcaaaguaauaaaaggguccuugccuuuaauuggugaagcagauugccuucaugaaaaauacgguggauuaaacaaaagcaagccuuacuacacaggagaacaugccaaagccauaggaaauugcccaauaugggugaaaacaccuuugaagcuugccaauggaaccaaauauagaccuccugcaaaacuauuaaaggaaagggguuucuucggagcuauugcugguuuccuagaaggaggaugggaaggaaugauugcaggcuggcacggauacacaucucacggagcacauggaguggcaguggcggcggaccuuaagaguacgcaagaagcuauaaacaagauaacaaaaaaucucaauucuuugagugagcuagaaguaaagaaucuucaaagacuaaguggugccauggaugaacuccacaacgaaauacucgagcuggaugagaaaguggaugaucucagagcugacacuauaagcucgcaaauagaacuugcagucuugcuuuccaacgaaggaauaauaaacagugaagaugagcaucuauuggcacuugagagaaaacuaaagaaaaugcugggucccucugcuguagagauaggaaauggaugcuucgaaaccaaacacaagugcaaccagaccugcuuagacaggauagcugcuggcaccuuuaaugcaggagaauuuucucuccccacuuuugauucacugaacauuacugcugcaucuuuaaaugaugauggauuggauaaccauacuauacugcucuauuacucaacugcugcuucuaguuuggcuguaacauugaugcuagcuauuuuuauuguuuauauggucuccagagacaacguuucaugcuccaucugucuauaa

SEQ ID NO: 58746 - RNA, 1755 nt, Artificial Sequence
  derived and/or modified CDS sequence (wt) from hemagglutinin__InfluenzaB__AFH57942
augaaggcaauaauuguacuacucaugguaguaacauccaaugcagaucgaaucugcacugggauaacaucuucaaauucaccucauguggucaaaacagcuacucaaggggaggucaaugugacuggcgugauaccacugacaacaacaccaacaaaaucuuauuuugcaaaucucaaaggaacaaggaccagagggaaacuaugcccggacugucucaacuguacagaucuggauguggccuugggcaggccaauguguguggggaccacaccuucugcuaaagcuucaauacuccacgaagucagaccuguuacauccgggugcuuuccuauaaugcacgacagaacaaaaaucaggcaacuacccaaucuucucagaggauaugaaaauaucagguuaucaacccaaaacguuaucgaugcagaaaaagcaccaggaggacccuacagacuuggaaccucaggaucuugcccuaacgcuaccaguaaaaucggauuuuucgcaacaauggcuugggcugucccaaaggacaacuacaaaaaugcaacgaacccacuaacaguagaaguaccauacauuuguacagaaggggaagaccaaauuacuguuuggggguuccauucagauaacaaaaaccaaaugaagagccucuauggagacucaaauccucaaaaguucaccucaucugcuaauggaguaaccacacauuauguuucucagauuggcgacuucccagaucaaacagaagacggaggacuaccacaaagcggcagaauuguuguugauuacaugaugcaaaaaccugggaaaacaggaacaauugucuaucaaagagguguuuuguugccucaaaagguguggugcgcgaguggcaggagcaaaguaauaaaagggucauugccuuuaauuggugaagcagauugccuucaugaaaaauacgguggauuaaacaaaagcaagccuuacuacacaggagaacaugcaaaagccauaggaaauugcccaauauggguaaaaacaccuuugaagcuugccaauggaaccaaauauagaccuccugcaaaacuauugaaggaaagggguuucuucggagcuauugcugguuuccuagaaggaggaugggaaggaaugauugcagguuggcacggauacacaucucacggagcacauggaguggcaguggcggcagaccuuaagaguacacaagaagcuauaaauaagauaacaaaaaaucucaauucuuugagugagcuagaaguaaagaaccuucaaagacuaaguggugccauggaugaacuccacaacgaaauacucgagcuggaugagaaaguggaugaucucagagcugacacuauaagcucacaaauagaacuugcagucuugcuuuccaacgaaggaauaauaaacagugaagacgagcaucuauuggcacuugagagaaaacuaaagaaaaugcugggucccucugcuguagacauaggaaacggaugcuucgaaaccaaacacaaaugcaaccagaccugcuuagacaggauagcugcuggcaccuuuaaugcaggagaauuuucucuccccacuuuugauucauugaacauuacugcugcaucuuuaaaugaugauggauuggauaaccauacuauacugcucuauuacucaacugcugcuucuaguuuggcuguaacauuaaugcuagcuauuuuuauuguuuacauggucuccagagacaacguuucaugcuccaucugucuauaa

SEQ ID NO: 58747 - RNA, 1752 nt, Artificial Sequence
  derived and/or modified CDS sequence (wt) from hemagglutinin__InfluenzaB__AFH57986
augaaggcaauaauuguacuacucaugguaguaacauccaacgcagaucgaaucugcacugggauaacaucuucaaacucaccucauguggucaaaacagcuacucaaggggaagucaaugugacuggugugauaccacugacaacaacaccaacaaaaucucauuuugcaaaucuaaaaggaacaaagaccagagggaaacuaugcccaaacugucucaacugcacagaucuggauguggccuugggcagaccaauguguguggggaccacaccuucggcaaaagcuucaauacuccacgaagucagaccuguuacauccgggugcuuuccuauaaugcacgacagaacaaaaaucagacagcuacccaaucuucucagaggauaugaaaauaucagauuaucaacccaaaacguuaucaacgcagaaagagcaccaggaggacccuacagacuuggaaccucaggaucuugcccuaacguuaccaguagagacggauucuucgcaacaauggcuugggcugucccaagggacaacaaaacagcaacgaauccacuaacaguagaaguaccauacauuuguacaaaaggagaagaccaaauuacuguuuggggguuccauucugaugacaaaacccaaaugaaaaaccucuauggagacucaaauccucaaaaguucaccucaucugccaauggaguaaccacacauuauguuucucagauugguggcuucccaaaucaaacagaagacggagggcuaccacaaagcggcagaauuguuguugauuacauggugcaaaaaccugggaaaacaggaacaauugucuaucaaagagguguuuuguugccucaaaagguguggugcgcaaguggcaggagcaagguaauaaaaggguccuugccuuuaauuggugaagcagauugccuucacgaaaaauacgguggauuaaacaaaagcaagccuuacuacacaggagaacaugcaaaagccauaggaaauugcccaauaugggugaaaacaccuuugaagcuugccaauggaaccaaauauagaccuccugcaaaacuauuaaaggaaagggguuucuucggagcuauugcugguuucuuagaaggaggaugggaaggaaugauugcagguuggcacggauacacaucucauggagcacauggaguggcaguggcagcagaccuuaagaguacgcaagaagccauaaacaagauaacaaaaaaucucaauucuuugagugagcuagaaguaaagaaucuucaaagacuaaguggugccauggaugaacuccacaacgaaauacucgagcuggaugagaaaguggaugaucucagagcugacacaauaagcucgcaaauagagcuugcagucuugcuuuccaacgaaggaauaauaaacagugaagaugagcaucuauuggcacuugagagaaaacuaaagaaaaugcugggucccucugcuguagacauagggaauggaugcuucgaaaccaaacacaagugcaaccagaccugcuuagacagaauagcugcuggcaccuuuaaugcaggagaauuuucucuucccacuuuugauucacugaauauuacugcugcaucuuuaaaugaugauggauuggauaaucauacuauacugcucuacuacucaacugcugcuucuaguuuggcuguaacauugaugauagcuauuuuuauuguuuauauggucuccagagacaauguuucuugcuccaucugucuauaa

SEQ ID NO: 58748 - RNA, 1758 nt, Artificial Sequence
  derived and/or modified CDS sequence (wt) from hemagglutinin__InfluenzaB__AFH58249
augaaggcaauaauuguacuacucaugguaguaacauccaaugcagaucgaaucugcacuggaauaacaucgucaaacucaccccauguggucaaaacugcuacucaaggggaagucaaugugacuggugugauaccacugacaacaacacccaccaaaucucauuuugcaaaucucaaaggaacaaaaaccagagggaaacuaugcccaaaaugucucaacugcacagaucuggacguggccuugggcagaccaaaaugcacggggaacauaccuccggcaaaaguuucaauacuccaugaaguaagaccuguuacaucugggugcuuuccuauaaugcacgacagaacaaaaauuagacagcugcccaaucuucucagaggauacgaacguaucagguuaucaaaccauaacguuaucaaugcagaagaagcaccaggaggacccuacaaaauuggaaccucagggucuugcccuaacguuaccaauggaaacggauucuucgcaacaauggcuugggcugucccaaaaaacgaaaacaacaaaacagcaacaaauucauuaacaauagaaguaccauacauuuguacagaaggagaagaccaaauuaccguuuggggguuccacucugauagcgaaacccaaauggcaaaacucuauggagacucaaagccucagaaauucacuucaucugccaacggagugaccacacauuacguuucacagauugguggcuucccaaaucaaacagaagacggaggacuaccacaaagugguagaauuguuguugauuacauggugcaaaaaucuggaaaaacaggaacaauuaccuaucaaagagguauuuuauugccucaaaaaguguggugcgcaaguggcaggagcaagguaauaaaaggauccuugccuuuaauuggagaagcagauugccuccacgaaaaauacgguggauuaaacaaaagcaagccuuacuauacaggggaacaugcaaaagccauaggaaauugcccaauaugggugaaaacacccuugaagcuggccaauggaaccaaauauagaccuccugcaacacuauuaaaggaaagggguuucuucggagcuauugcugguuucuuagaaggaggaugggaaggaaugauugcagguuggcacggauacacaucccauggagcacauggaguagcaguggcagcagaccuuaagaguacucaagaagccauaaacaagaucacaaaaaaucucaacucuuugagugagcuggaaguaaagaaucuucaaagacuaagcggagccauggaugaacuccacaacgaaauacuagaacuagaugagaaaguggaugaucucagagcugauacaauaagcucgcaaauagaacucgcagucuugcuuuccaaugaaggaauaauaaacagugaagaugagcaucucuuggcgcuugaaagaaaacugaagaaaaugcugggccccucugcuguagagauagggaauggaugcuucgaaaccaaacauaagugcaaccagaccugccucgacagaauagcugcuggcaccuuuaaugcaggagaauuuucucuccccaccuuugauucacuaaauauuacugcugcaucuuuaaaugacgauggauuggauaaucauacuauacugcuuuacuacucaacugcugcuuccaguuuggcuguaacauugaugauagcuaucuuuguuguuuauauggucuccagagacaauguuucuuguuccaucugucuauaa

SEQ ID NO: 58749 - RNA, 1758 nt, Artificial Sequence
  derived and/or modified CDS sequence (wt) from hemagglutinin__InfluenzaB__AFH58260
augaaggcaauaauuguacuacucaugguaguaacauccaaugcagaucgaaucugcacugggauaacaucgucaaacucaccucauguggucaaaacugcuacucaaggggaggucaaugugacuggugugauaccacugacaacaacacccaccaaaucucauuuugcaaaucucaaaggaacaaaaaccagagggaaacuaugcccaaaaugccucaacugcacagaucuggacguggccuugggcagaccaaaaugcacggggaacauacccucggcagaaguuucaauacuccaugaagucagaccuguuacaucugggugcuuuccuauaaugcacgacagaacaaaaauuagacagcugcccaaccuucucagaggauacgaacauaucagguuaucaacucauaacguuaucaaugcagaaaaggcaccaggaggacccuacaaaauuggaaccucagggucuugcccuaacguuaccaauggaaacggauuuuucgcaacaauggcuugggccgucccaaaaaacgacaacaacaaaacagcaacaaauucauuaacaauagaaguaccauacauuuguacagaaggagaagaccaaauuaccguuuggggguuccacucugauaacgaaauccaaauggcaaaacucuauggggacucaaagccccagaaguucaccucaucuuccaacggagugaccacacauuacguuucacagauugguggcuucccaaaucaaacggaagacggaggacuaccacaaagugguagaauuguuguugauuacauggugcaaaaaucugggaaaacaggaacaauuaccuaucaaagagguauuuuauugccucaaaaaguguggugcgcaaguggcaggagcaagguaauaaaaggauccuugccuuuaauuggagaagcagauugccuccacgaaagauacgguggauuaaacaaaagcaagccuuacuacacaggggaacaugcaaaggccauaggaaauugcccaauaugggugaaaacacccuugaagcuggccaauggaaccaaauauagaccuccugcaaaacuauuaaaggaaagggguuucuucggagcuauugcugguuucuuagaaggaggaugggaaggaaugauugcagguuggcacggauacacaucccauggggcacauggaguagcaguggcagcagaccuuaagagcacucaagaagccauaaacaagauaacaaaaaaucucaauucuuugagugagcuggaaguaaagaaucuucaaagacuaagcggugccauggaugaacuccacaacgaaauacuagaacuagacgagaaaguggaugaucucagagcugauacaauaagcucacaaauagaacucgcaguccugcuuuccaaugaaggaauaauaaacagugaagaugagcaucucuuggcgcuugaaagaaagcugaagaaaaugcugggccccucugcuguagagauagggaauggaugcuucgaaaccaaacacaagugcaaccagaccugucucgacagaauagcugcugguaccuuugaugcaggagaauuuucucuccccacuuuugauucacugaauauuacugcugcaucuuuaaaugacgauggauuggauaaucauacuauacugcuuuacuacucaacugcugccuccaguuuggcuguaacauugaugauagcuaucuuuguuguuuauauggucuccagagacaauguuucuugcuccaucugucuauaa

SEQ ID NO: 58750 - RNA, 1755 nt, Artificial Sequence
  derived and/or modified CDS sequence (wt) from hemagglutinin__InfluenzaB__AFH58271
augaaggcaauaauuguacuacucaugguaguaacauccaaugcagaucgaaucugcacuggaauaacaucuucaaacucaccucauguggucaaaacagccacucaaggggaggucaaugugacuggugugauaccacuaacaacaacaccaacaaaaucuuauuuugcaaaucucaaaggaacaaggaccagagggaaacuaugcccagacugucucaacugcacagaucuggauguggcuuugggcagaccaauguguguggggaccacaccuucggcgaaagcuucaauacuccacgaagucaaaccuguuacauccgggugcuuuccuauaaugcacgacagaacaaaaaucaggcaacuacccaaucuucucagaggauaugaaaauaucaggcuaucaacccaaaacgucaucgaugcggaaaaggcaccaggaggacccuacagacuuggaaccucaggaucuugcccuaacgcuaccaguaagagcggauuuuucgcaacaauggcuugggcugucccaaaggacaacaacaaaaaugcaacgaacccacuaacaguagaaguaccauacauuuguacagaaggggaagaccaaaucacuguuuggggguuccauucagaugacaaaacccaaaugaagaaccucuauggagacucaaauccucaaaaguucaccucaucugcuaauggaguaaccacacacuauguuucucagauuggcagcuucccagaucaaacagaagacggaggacuaccacaaagcggcaggauuguuguugauuacaugaugcaaaaaccugggaaaacaggaacaauugucuaccaaagagguguuuuguugccucaaaagguguggugcgcgaguggcaggagcaaaguaauaaaaggguccuugccuuuaauuggugaagcagauugccuucaugaaaaauacgguggauuaaacaaaagcaagccuuacuacacaggagaacaugcaaaagccauaggaaauugcccaauaugggugaaaacaccuuugaagcuugccaauggaaccaaauauagaccuccugcaaaacuauuaaaggaaagggguuucuucggagcuauugcugguuuccuagaaggaggaugggaaggaaugauugcaggcuggcacggauacacaucucacggagcacauggaguggcaguggcggcggaccuuaagaguacgcaagaagcuauaaacaagauaacaaaaaaucucaauucuuugagugagcuagaaguaaagaaucuucaaagacuaaguggugccauggaugaacuccacaacgaaauacucgagcuggaugagaaaguggaugaucucagagcugacacuauaagcucgcaaauagaacuugcagucuugcuuuccaacgaaggaauaauaaacagugaagaugagcaucuauuggcacuugagagaaaacuaaagaaaaugcugggucccucugcuguagagauaggaaauggaugcuucgaaaccaaacacaagugcaaccagaccugcuuagacaggauagcugcuggcaccuuuaaugcaggagaauuuucucuccccacuuuugauucacugaacauuacugcugcaucuuuaaaugaugauggauuggauaaccauacuauacugcucuauuacucaacugcugcuucuaguuuggcuguaacauugaugcuagcuauuuuuauuguuuauauggucuccagagacaacguuucaugcuccaucugucuauaa

SEQ ID NO: 58751 - RNA, 1755 nt, Artificial Sequence; identical to SEQ ID NO: 58750
  derived and/or modified CDS sequence (wt) from hemagglutinin__InfluenzaB__AFH58282

SEQ ID NO: 58752 - RNA, 1758 nt, Artificial Sequence
  derived and/or modified CDS sequence (wt) from hemagglutinin__InfluenzaB__AFH58293
augaaggcaauaauuguacuacucaugguaguaacauccaaugcagaucgaaucugcacugggauaacaucgucaaacucaccacaugucgucaaaacugcuacucaaggggaggucaaugugacugguguaauaccacugacaacaacacccaccaaaucucauuuugcaaaucucaaaggaacagaaaccagggggaaacuaugcccaaaaugccucaacugcacagaucuggacguagccuugggcagaccaaaaugcacggggaaaauacccucggcaagaguuucaauacuccaugaagucagaccuguuacaucugggugcuuuccuauaaugcacgacagaacaaaaauuagacagcugccuaaccuucuccgaggauacgaacauaucagguuaucaacccauaacguuaucaaugcagaaaaugcaccaggaggacccuacaaaauuggaaccucagggucuugcccuaacauuaccaauggaaacggauuuuucgcaacaauggcuugggccgucccaaaaaacgacaaaaacaaaacagcaacaaauccauuaacaauagaaguaccauacauuuguacagaaggagaagaccaaauuaccguuuggggguuccacucugacgacgagacccaaauggcaaagcucuauggggacucaaagccccagaaguucaccucaucugccaacggagugaccacacauuacguuucacagauugguggcuucccaaaucaaacagaagacggaggacuaccacaaagugguagaauuguuguugauuacauggugcaaaaaucugggaaaacaggaacaauuaccuaucaaagggguauuuuauugccucaaaagguguggugcgcaaguggcaggagcaagguaauaaaaggauccuugccuuuaauuggagaagcagauugccuccacgaaaaauacgguggauuaaacaaaagcaagccuuacuacacaggggaacaugcaaaggccauaggaaauugcccaauaugggugaaaacacccuugaagcuggccaauggaaccaaauauagaccuccugcaaaacuauuaaaggaaagggguuucuucggagcuauugcugguuucuuagaaggaggaugggaaggaaugauugcagguuggcacggauacacaucccauggggcacauggaguagcgguggcagcagaccuuaagagcacucaagaggccauaaacaagauaacaaaaaaucucaacucuuugagugagcuggaaguaaagaaucuucaaagacuaagcggugccauggaugaacuccacaacgaaauacuagaacuagaugagaaaguggaugaucucagagcugauacaauaagcucacaaauagaacucgcaguccugcuuuccaaugaaggaauaauaaacagugaagaugaacaucucuuggcgcuugaaagaaagcugaagaaaaugcugggccccucugcuguagagauagggaauggaugcuuugaaaccaaacacaagugcaaccagaccugucucgacagaauagcugcugguaccuuugaugcaggagaauuuucucuccccaccuuugauucacugaauauuacugcugcaucuuuaaaugacgauggauuggauaaucauacuauacugcuuuacuacucaacugcugccuccaguuuggcuguaacacugaugauagcuaucuuuguuguuuauauggucuccagagacaauguuucuugcuccaucugucuauaa

SEQ ID NO: 58753 - RNA, 1755 nt, Artificial Sequence
  derived and/or modified CDS sequence (wt) from hemagglutinin__InfluenzaB__AFH58304
augaaggcaauaauuguacuacucaugguaguaacauccaaugcagaucgaaucugcacugggauaacaucuucaaacucaccucauguggucaaaacagcuacucaaggggaggucaaugugacuggugugauaccacugacaacaacaccaacaaaaucuuauuuugcaaaucucaaaggaacaaggaccagagggaaacuaugcccggacugucucaacuguacagaucuggauguggccuugggcaggccaauguguguggggaccacaccuucugcgaaagcuucaauacuccacgaagucagaccuguuacauccgggugcuuuccuauaaugcacgacagaacaaaaaucaggcaacuacccaaucuucucagaggauaugaaaauaucagguuaucaacccaaaacguuaucgaugcagaaaaagcaccaggaggacccuacagacuuggaaccucaggaucuugcccuaacgcuaccaguaaaaucggauuuuucgcaacaauggcuugggcugucccaaaggacaacuacaaaaaugcaacgaacccacuaacaguagaaguaccauacauuuguacagaaggggaagaccaaauuacuguuuggggguuccauucagaugacaaaacccaaaugaagaaccucuauggagacucaaauccucaaaaguucaccucaucugcuaauggaguaaccacacauuauguuucucagauuggcgacuucccagaucaaacagaagacggaggacuaccacaaagcggcagaauuguuguugauuacaugaugcaaaaaccugggaaaacaggaacaauugucuaucaaagagguguuuuguugccucaaaagguguggugcgcgaguggcaggagcaaaguaauaaaagggucauugccuuuaauuggugaagcagauugccuucaugaaaaauacgguggauuaaacaaaagcaagccuuacuacacgggagaacaugcaaaagccauaggaaauugcccaauauggguaaaaacaccuuugaagcuugccaauggaaccaaauauagaccuccugcaaaacuauuaaaggaaagggguuucuucggagcuauugcugguuuccuagaaggaggaugggaaggaaugauugcagguuggcacggauacacaucucacggagcacauggaguggcaguggcggcagaccuuaagaguacacaagaagcuauaaacaagauaacaaaaaaucucaauucuuugagugagcuagaaguaaagaaccuucaaagacuaaguggugccauggaugaacuccacaacgaaauacucgagcuggaugagaaaguggaugaucucagagcugacacuauaagcucacaaauagaacuugcagucuugcuuuccaacgaaggaauaauaaacagugaagacgagcaucuauuggcacuugagagaaaacuaaagaaaaugcugggucccucugcuguagacauaggaaauggaugcuuugaaaccaaacacaaaugcaaccagaccugcuuagacaggauagcugcuggcaccuuuaaugcaggagaauuuucucuccccacuuuugauucauugaacaucacugcugcaucuuuaaaugaugauggauuggauaaccauacuauacugcucuauuacucaacugcugcuucuaguuuggcuguaacauugaugcuagcuauuuuuauuguuuauauggucuccagagacaacguuucaugcuccaucugucuauaa

SEQ ID NO: 58754 - RNA, 1755 nt, Artificial Sequence; identical to SEQ ID NO: 58753
  derived and/or modified CDS sequence (wt) from hemagglutinin__InfluenzaB__AFH58315

SEQ ID NO: 58755 - RNA, 1755 nt, Artificial Sequence
  derived and/or modified CDS sequence (wt) from hemagglutinin__InfluenzaB__AFH58326
augaaggcaauaauuguacuacucaugguaguaacauccaaugcagaucgaaucugcacugggauaacaucuucaaacucaccucauguggucaaaacagcuacucaaggggaggucaaugugacuggcgugauaccacugacaacaacaccaacaaaaucuuauuuugcaaaucucaaaggaacaaggaccagagggaaacuaugcccggacugucucaacuguacagaucuggauguggccuugggcaggccaauguguguggggaccacaccuucugcuaaagcuucaauacuccacgaagucagaccuguuacauccgggugcuuuccuauaaugcacgacagaacaaaaaucaggcaacuacccaaucuucucagaggauaugaaaauaucagguuaucaacccaaaacguuaucgaugcagaaaaagcaccaggaggacccuacagacuuggaaccucaggaucuugcccuaacgcuaccaguaaaaucggauuuuucgcaacaauggcuugggcugucccaaaggacaacuacaaaaaugcaacgaacccacuaacaguagaaguaccauacauuuguacagaaggggaagaccaaauuacuguuuggggguuccauucagauaacaaagcccaaaugaagaaccucuauggagacucaaauccucaaaaguucaccucaucugcuaauggaguaaccacacauuauguuucucagauuggcgacuucccagaucaaacagaagacggaggaccaccacaaagcggcagaauuguuguugauuacaugaugcaaaaaccugggaaaacaggaacaauugucuaucaaagagguguuuuguugccucaaaagguguggugcgcgaguggcaggagcaaaguaauaaaagggucauugccuuuaauuggugaagcagauugccuucaugaaaaauacgguggauuaaacaaaagcaagccuuacuacacaggagaacaugcaaaagccauaggaaauugcccaauauggguaaaaacaccuuugaagcuugccaauggaaccaaauauagaccuccugcaaaacuauuaaaggaaagggguuucuucggagcuauugcugguuuccuagaaggaggaugggaaggaaugauugcagguuggcacggauacacaucucacggagcacauggaguggcaguggcggcagaccuuaagaguacacaagaagcuauaaauaagauaacaaaaaaucucaauucuuugagugagcuagaaguaaagaaccuucaaagacuaaguggugccauggaugaacuccacaacgaaauacucgagcuggaugagaaaguggaugaucucagagcugacacuauaagcucacaaauagaacuugcagucuugcuuuccaacgaaggaauaauaaacagugaagacgagcaucuauuggcacuugagagaaaacuaaagaaaaugcugggucccucugcuguagacauaggaaauggaugcuucgaaaccaaacacaaaugcaaccagaccugcuuagacaggauagcugcuggcaccuuuaaugcaggagaauuuucucuccccacuuuugauucauugaacauuacugcugcaucuuuaaaugaugauggauuggauaaccauacuauacugcucuauuacucaacugcugcuucuaguuuggcuguaacauuaaugcuagcuauuuuuauuguuuauauggucuccagagacaacguuucaugcuccaucugucuauaa

SEQ ID NO: 58756 - RNA, 1755 nt, Artificial Sequence
  derived and/or modified CDS sequence (wt) from hemagglutinin__InfluenzaB__AFH58337
augaaggcaauaauuguacuacucaugguaguaacauccaaugcagaucgaaucugcacugggauaacaucuucaaacucaccucauguggucaaaacagcuacucaaggggaggucaaugugacuggcgugauaccacugacaacaacaccaacaaaaucuuauuuugcaaaucucaaaggaacaaggaccagagggaaacuaugcccggacugucucaacuguacagaucuggauguggccuugggcaggccaauguguguggggaccacaccuucugcuaaagcuucaauacuccacgaagucagaccuguuacauccgggugcuuuccuauaaugcacgacagaacaaaaaucaggcaacuacccaaucuucucagaggauaugaaaauaucagguuaucaacccaaaacguuaucgaugcagaaaaagcaccaggaggacccuacagacuuggaaccucaggaucuugcccuaacgcuaccaguaaaaucggauuuuucgcaacaauggcuugggcugucccaaaggacaacuacaaaaaugcaacgaacccacuaacaguagaaguaccauacauuuguacagaaggggaagaccaaauuacuguuuggggguuccauucagauaacaaagcccaaaugaagaaccucuauggagacucaaauccucaaaaguucaccucaucugcuaauggaguaaccacacauuauguuucucagauuggcgacuucccagaucaaacagaagacggaggacuaccacaaagcggcagaauuguuguugauuacaugaugcaaaaaccugggaaaacaggaacaauugucuaucaaagagguguuuuguugccucaaaagguguggugcgcgaguggcaggagcaaaguaauaaaagggucauugccuuuaauuggugaagcagauugccuucaugaaaaauacgguggauuaaacaaaagcaagccuuacuacacaggagaacaugcaaaagccauaggaaauugcccaauauggguaaaaacaccuuugaagcuugccaauggaaccaaauauagaccuccugcaaaacuauuaaaggaaagggguuucuucggagcuauugcugguuuccuagaaggaggaugggaaggaaugauugcagguuggcacggauacacaucucacggagcacauggaguggcaguggcggcagaccuuaagaguacacaagaagcuauaaauaagauaacaaaaaaucucaauucuuugagugagcuagaaguaaagaaccuucaaagacuaaguggugccauggaugaacuccacaacgaaauacucgagcuggaugagaaaguggaugaucucagagcugacacuauaagcucacaaauagaacuugcagucuugcuuuccaacgaaggaauaauaaacagugaagacgagcaucuauuggcacuugagagaaaacuaaagaaaaugcugggucccucugcuguagacauaggaaauggaugcuucgaaaccaaacacaaaugcaaccagaccugcuuagacaggauagcugcuggcaccuuuaaugcaggagaauuuucucuccccacuuuugauucauugaacauuacugcugcaucuuuaaaugaugauggauuggauaaccauacuauacugcucuauuacucaacugcugcuucuaguuuggcuguaacauuaaugcuagcuauuuuuauuguuuauauggucuccagagacaacguuucaugcuccaucugucuauaa

SEQ ID NO: 58757 - RNA, 1758 nt, Artificial Sequence
  derived and/or modified CDS sequence (wt) from hemagglutinin__InfluenzaB__AFH58348
augaaggcaauaauuguacuacucaugguaguaacauccaaugcagaccgaaucugcacugggauaacaucgucaaacucaccacauguugucaaaacugcuacucaaggggaggucaaugugacugguguaauaccacugacaacaacacccaccaaaucucauuuugcaaaucucaaaggaacagaaaccagaggaaaacuaugcccaaaaugccucaacugcacagaucuggacguggccuugggcagaccaaaaugcacggggaacauaccuucggcaagaguuucaauacuccaugaagucaggccuguuacaucugggugcuuuccuauaaugcacgacagaacaaaaauuagacagcugccuaaccuucucagaggauacgaacauaucagguuaucagcucauaacguuaucaaugcagaaaaugcaccaggaggacccuacaaaauuggaaccucagggucuugcccuaauguuaccaauggaaacggauuuuucgcaacaauggcuugggccgucccaaaaaacgacaacaacaaaacagcaacaaauucauuaacaauagaaguaccauacauuuguacagaaggagaagaccaaauuaccguuuggggguuccacucugauaaagaaacccaaauggcaaagcucuauggggacucaaagccccagaaguucaccucaucugccaacggagugaccacacauuacguuucacagauugguggcuucccaaaccaaacagaagauggaggacuaccacaaagugguagaauuguuguugauuacauggugcaaaaaucugggaaaacaggaacaauuaccuaucaaagagguauuuuauugccucaaaaaguguggugcgcaaguggcaggagcaagguaauaaaaggauccuugccuuuaauuggagaagcagauugccuccacgaaaaauacgguggauuaaacaaaagcaagccuuacuacacaggggaacaugcaaaggccauaggaaauugcccaauaugggugaaaacacccuugaagcuggccaauggaaccaaauauagaccuccugcaaaacuauuaaaggaaagggguuucuucggagcuauugcugguuucuuagaaggaggaugggaaggaaugauugcagguuggcacggauacacaucccauggggcacauggaguagcaguggcagcagaccuuaagagcacucaagaggccauaaacaagauaacaaaaaaucucaacucuuugagugagcuggaaguaaagaaucuucaaagacuaagcggugccauggaugaacuccacaacgaaauacuagaacuagacgagaaaguggaugaucucagagcugacacaauaagcucacaaauagaacucgcaguccugcuuuccaaugaaggaauaauaaacagugaagaugagcaucucuuggcgcuugaaagaaagcugaagaaaaugcugggccccucugcuguagagauagggaauggaugcuuugaaaccaaacacaagugcaaccagaccugucucgacagaauagcugcugguaccuuuaaugcaggagaauuuucucuccccacuuuugauucacugaauauuacugcugcaucuuuaaaugacgauggauuggauaaucauacuauacugcuuuacuacucaacugcugccuccaguuuggcuguaacauugaugauagcuaucuuuguuguuuauauggucuccagagacaauguuucuugcuccaucugucuauaa

SEQ ID NO: 58758 - RNA, 1758 nt, Artificial Sequence
  derived and/or modified CDS sequence (wt) from hemagglutinin__InfluenzaB__AFH58370
augaaggcaauaauuguacuacucaugguaguaacauccaaugcagaccgaaucugcacugggauaacaucgucaaacucaccacauguugucaaaacugcuacucaaggggaggucaaugugacugguguaauaccacugacaacaacacccaccaaaucucauuuugcaaaucucaaaggaacagaaaccagaggaaaacuaugcccaaaaugccucaacugcacagaucuggacguggccuugggcagaccaaaaugcacggggaacauaccuucggcaagaguuucaauacuccaugaagucaggccuguuacaucugggugcuuuccuauaaugcacgacagaacaaaaauuagacagcugccuaaccuucucagaggauacgaacauaucagguuaucagcucauaacguuaucaaugcagaaaaugcaccaggaggacccuacaaaauuggaaccucagggucuugcccuaauguuaccaauggaaacggauuuuucgcaacaauggcuugggccgucccaaaaaacgacaacaacaaaacagcaacaaauucauuaacaauagaaguaccauacauuuguacagaaggagaagaccaaauuaccguuuggggguuccacucugauaacgaaauccaaauggcaaagcucuauggggacucaaagccccagaaguucaccucaucugccaacggagugaccacacauuacguuucacagauugguggcuucccaaaccaaacagaagauggaggacuaccacaaagugguagaauuguuguugauuacauggugcaaaaaucugggaaaacaggaacaauuaccuaucaaagagguauuuuauugccucaaaaaguguggugcgcaaguggcaggagcaagguaauaaaaggauccuugccuuuaauuggagaagcagauugccuccacgaaaaauacgguggauuaaacaaaagcaagccuuacuacacaggggaacaugcaaaggccauaggaaauugcccaauaugggugaaaacacccuugaagcuggccaauggaaccaaauauagaccuccugcaaaacuauuaaaggaaagggguuucuucggagcuauugcugguuucuuagaaggaggaugggaaggaaugauugcagguuggcacggauacacaucccauggggcacauggaguagcaguggcagcagaccuuaagagcacucaagaggccauaaacaagauaacaaaaaaucucaacucuuugagugagcuggaaguaaagaaucuucaaagacuaagcggugccauggaugaacuccacaacgaaauacuagaacuagacgagaaaguggaugaucucagagcugacacaauaagcucacaaauagaacucgcaguccugcuuuccaaugaaggaauaauaaacagugaagaugagcaucucuuggcgcuugaaagaaagcugaagaaaaugcugggccccucugcuguagagauagggaauggaugcuuugaaaccaaacacaagugcaaccagaccugucucgacagaauagcugcugguaccuuuaaugcaggagaauuuucucuccccacuuuugauucacugaauauuacugcugcaucuuuaaaugacgauggauuggauaaucauacuauacugcuuuacuacucaacugcugccuccaguuuggcuguaacauugaugauagcuaucuuuguuguuuauauggucuccagagacaauguuucuugcuccaucugucuauaa

SEQ ID NO: 58759 - RNA, 1758 nt, Artificial Sequence
  derived and/or modified CDS sequence (wt) from hemagglutinin__InfluenzaB__AFH58392
augaaggcaauaauuguacuacucaugguaguaacauccaaugcagaucgaaucugcacugggauaacaucgucaaacucaccacaugucgucaaaacugcuacucaaggggaggucaaugugacugguguaauaccacugacaacaacacccaccaaaucucauuuugcaaaucucaaaggaacagaaaccagggggaaacuaugcccaaaaugccucaacugcacagaucuggacguagccuugggcagaccaaaaugcacggggaaaauacccucggcaagaguuucaauacuccaugaagucagaccuguuacaucugggugcuuuccuauaaugcacgacagaacaaaaauuagacagcugccuaaccuucuccgaggauacgaacauaucagguuaucaacccauaacguuaucaaugcagaaaaugcaccaggaggacccuacaaaauuggaaccucagggucuugcccuaacauuaccaauggaaacggauuuuucgcaacaauggcuugggccgucccaaaaaacgacaaaaacaaaacagcaacaaauccauuaacaauagaaguaccauacauuuguacagaaggagaagaccaaauuaccguuuggggguuccacucugacaacgagauccaaauggcaaagcucuauggggacucaaagccccagaaguucaccucaucugccaacggagugaccacacauuacguuucacagauugguggcuucccaaaucaaacagaagacggaggacuaccacaaagugguagaauuguuguugauuacauggugcaaaaaucugggaaaacaggaacaauuaccuaucaaagggguauuuuauugccucaaaagguguggugcgcaaguggcaggagcaagguaauaaaaggauccuugccuuuaauuggagaagcagauugccuccacgaaaaauacgguggauuaaacaaaagcaagccuuacuacacaggggaacaugcaaaggccauaggaaauugcccaauaugggugaaaacacccuugaagcuggccaauggaaccaaauauagaccuccugcaaaacuauuaaaggaaagggguuucuucggagcuauugcugguuucuuagaaggaggaugggaaggaaugauugcagguuggcacggauacacaucccauggggcacauggaguagcgguggcagcagaccuuaagagcacucaagaggccauaaacaagauaacaaaaaaucucaacucuuugagugagcuggaaguaaagaaucuucaaagacuaagcggugccauggaugaacuccacaacgaaauacuagaacuagaugagaaaguggaugaucucagagcugauacaauaagcucacaaauagaacucgcaguccugcuuuccaaugaaggaauaauaaacagugaagaugaacaucucuuggcgcuugaaagaaagcugaagaaaaugcugggccccucugcuguagagauagggaauggaugcuuugaaaccaaacacaagugcaaccagaccugucucgacagaauagcugcugguaccuuugaugcaggagaauuuucucuccccaccuuugauucacugaauauuacugcugcaucuuuaaaugacgauggauuggauaaucauacuauacugcuuuacuacucaacugcugccuccaguuuggcuguaacacugaugauagcuaucuuuguuguuuauauggucuccagagacaauguuucuugcuccaucugucuauaa

SEQ ID NO: 58760 - RNA, 1758 nt, Artificial Sequence; identical to SEQ ID NO: 58752
  derived and/or modified CDS sequence (wt) from hemagglutinin__InfluenzaB__AFH58403

SEQ ID NO: 58761 - RNA, 1758 nt, Artificial Sequence; identical to SEQ ID NO: 58752
  derived and/or modified CDS sequence (wt) from hemagglutinin__InfluenzaB__AFH58414

SEQ ID NO: 58762 - RNA, 1758 nt, Artificial Sequence; identical to SEQ ID NO: 58752
  derived and/or modified CDS sequence (wt) from hemagglutinin__InfluenzaB__AFH58425

SEQ ID NO: 58763 - RNA, 1758 nt, Artificial Sequence; identical to SEQ ID NO: 58752
  derived and/or modified CDS sequence (wt) from hemagglutinin__InfluenzaB__AFH58436

SEQ ID NO: 58764 - RNA, 1758 nt, Artificial Sequence
  derived and/or modified CDS sequence (wt) from hemagglutinin__InfluenzaB__AFH58458
augaaggcaauaauuguacuacucaugguaguaacauccaaugcagaucgaaucugcacugggauaacaucgucaaacucaccacaugucgucaaaacugcuacucaaggggaggucaaugugacugguguaauaccacugacaacaacacccaccaaaucucauuuugcaaaucucaaaggaacagaaaccagagggaaacuaugcccaaaaugccucaacugcacagaucuggacguagccuugggcagaccaaaaugcacggggaaaauacccucggcaagaguuucaauacuccaugaaguaagaccuguuacaucugggugcuuuccuauaaugcacgacagaacaaaaauuagacagcugcccaaccuucuccgaggauacgaacauaucagguuaucaacuaauaacguuaucaaugcagaaaaugcaccaggaggacccuacaaaauuggaaccucagggucuugcccuaacguuaccaauggaaacggauuuuucgcaacaauggcuugggccgucccaaaaaacgacaaaaacaaaacagcaacaaauccauuaacaauagaaguaccauacauuuguacagaaggagaagaccaaauuaccguuuggggguuccacucugauaacgagauccaaauggcaaagcucuauggggacucaaggccccagaaguucaccucaucugccaacggagugaccacacauuacguuucacagauugguggcuucccaaaucaaacagaagacggaggacuaccacaaagugguagaauuguuguugauuacauggugcaaaaaucugggaaaacaggaacaauuaccuaucaaagagguauuuuauugccucaaaagguguggugcgcaaguggcaggagcaagguaauaaaaggauccuugccuuuaauuggagaagcagauugccuccacgaaaaauacgguggauuaaacaaaagcaagccuuacuacacaggggaacaugcaaaggccauaggaaauugcccaauaugggugaagacacccuugaaguuggccaaugggaccaaauauagaccuccugcaaagcuauuaaaggaaagggguuucuucggagcuauugcugguuucuuagaaggaggaugggaaggaaugauugcagguuggcacggauacacgucccauggggcacauggaguagcgguggcagcagaccuuaagagcacccaagaggccauaaacaagauaacaaaaaaucucaacucuuugagugagcuggaaguaaagaaucuucaaagacuaagcggugccauggaugaacuccacaacgaaauacuagaacuagacgagaaaguggaugaucucagagcugacacaauaagcucacaaauagaacucgcaguccugcuuuccaaugaaggaauaauaaacagugaagaugaacaucucuuggcgcuugaaagaaagcugaagaaaaugcugggccccucugcuguagagauagggaauggaugcuuugaaaccaaacacaaguguaaccagaccugucucgacagaauagcugcugguaccuuugaugcaggagaauuuucucuccccaccuuugauucacugaauauuacugcugcaucuuuaaaugacgauggauuggauaaucauacuauacugcuuuacuacucaacugcugccuccaguuuggcuguaacacugaugauagcuaucuuuguuguuuauauggucuccagagacaauguuucuugcuccaucugucuauaa

SEQ ID NO: 58765 - RNA, 1758 nt, Artificial Sequence; identical to SEQ ID NO: 58764
  derived and/or modified CDS sequence (wt) from hemagglutinin__InfluenzaB__AFH58469

SEQ ID NO: 58766 - RNA, 1755 nt, Artificial Sequence; identical to SEQ ID NO: 58746
  derived and/or modified CDS sequence (wt) from hemagglutinin__InfluenzaB__AFH58480

SEQ ID NO: 58767 - RNA, 1755 nt, Artificial Sequence
  derived and/or modified CDS sequence (wt) from hemagglutinin__InfluenzaB__AFH58502
augaaggcaauaauuguacuacucaugguaguaacauccaaugcagaucgaaucugcacugggauaacaucuucaaacucaccucauguggucaaaacagcuacucaaggggaggucaaugugacuggcgugauaccacugacaacaacaccaacaaaaucuuauuuugcaaaucucaaaggaacaaggaccagagggaaacuaugcccggacugucucaacuguacagaucuggauguggccuugggcaggccaauguguguggggaccacaccuucugcuaaagcuucaauacuccacgaggucagaccuguuacauccgggugcuuuccuauaaugcacgacagaacaaaaaucaggcaacuacccaaucuucucagaggauaugaaaauaucagguuaucaacccaaaacguuaucgaugcagaaaaagcaccaggaggacccuacagacuuggaaccucaggaucuugcccuaacgcuaccaguaaaaucggauuuuuugcaacaauggcuugggcugucccaaaggacaacuacaaaaaugcaacgaacccacuaacaguagaaguaccauacauuuguacagaaggggaagaccaaauuacuguuuggggguuccauucagaugacaaaacccaaaugaagagccucuauggagacucaaauccucaaaaguucaccucaucugcuaauggaguaaccacacauuauguuucucagauuggcgacuucccagaucaaacagaagacggaggacuaccacaaagcggcagaauuguuguugauuacaugaugcaaaaaccugggaaaacaggaacaauugucuaucaaagagguguuuuguugccucaaaagguguggugcgcgaguggcaggagcaaaguaauaaaagggucauugccuuuaauuggugaagcagauugccuucaugaaaaauacgguggauuaaacaaaagcaagccuuacuacacaggagaacaugcaaaagccauaggaaauugcccaauauggguaaaaacaccuuugaagcuugccaauggaaccaaauauagaccuccugcaaaacuauugaaggaaagggguuucuucggagcuauugcugguuuccuagaaggaggaugggaaggaaugauugcagguuggcacggauacacaucucacggagcacauggaguggcaguggcggcagaccuuaagaguacacaagaagcuauaaauaagauaacaaaaaaucucaauucuuugagugagcuagaaguaaagaaccuucaaagacuaaguggugccauggaugaacuccacaacgaaauacucgagcuggaugagaaaguggaugaucucagagcugacacuauaagcucacaaauagaacuugcagucuugcuuuccaacgaaggaauaauaaacagugaagacgagcaucuauuggcacuugagagaaaacuaaagaaaaugcugggucccucugcuguagacauaggaaacggaugcuucgaaaccaaacacaaaugcaaccagaccugcuuagacaggauagcugcuggcaccuuuaaugcaggagaauuuucucuccccacuuuugauucauugaacauuacugcugcaucuuuaaaugaugauggauuggauaaccauacuauacugcucuauuacucaacugcugcuucuaguuuggcuguaacauuaaugcuagcuauuuuuauuguuuauauggucuccagagacaacguuucaugcuccaucugucuauaa

SEQ ID NO: 58768 - RNA, 1758 nt, Artificial Sequence
  derived and/or modified CDS sequence (wt) from hemagglutinin__InfluenzaB__AFH58513
augaaggcaauaauuguacuacucaugguaguaacauccaaugcagaucgaaucugcacugggauaacaucgucaaacucaccacaugucgucaaaacugcuacucaaggggaggucaaugugacugguguaauaccacugacaacaacacccaccaaaucucauuuugcaaaucucaaaggaacagaaaccagagggaaacuaugcccaaaaugccccaacugcacagaucuggacguagccuugggcagaccaaaaugcacggggaaaauacccucggcaagaguuucaauacuccaugaagucagaccuguuacaucugggugcuuuccuauaaugcacgacagaacaaaaauuagacagcugccuaaccuucuccgaggauacgaacauaucagauuaucaacucauaacguuaucaaugcagaaaaugcaccaggaggacccuacaaaauuggaaccucagggucuugcccuaacguuaccaauggaaacggauuuuucgcaacaauggcuugggccgucccaaaaaacgacaaaaacaaaacagcaacaaauccauuaacaauagaaguaccauacauuuguacagaaggagaagaccaaauuaccguuuggggguuccacucugaugacgagacccaaauggcaaagcucuauggggacucaaagccccagaaguucaccucaucugccaacggagugaccacacauuacguuucacagauugguggcuucccaaaucaaacagaagacggaggacuaccacaaagugguagaauuguuguugauuacauggugcaaaaaucugggaaaacaggaacaauuaccuaucaaagagguauuuuauugccucaaaagguguggugcgcaaguggcaggagcaagguaauaaaaggauccuugccuuuaauuggagaagcagauugccuccacgaaaaauacgguggauuaaacaaaagcaagccuuacuacacaggggaacaugcaaaggccauaggaaauugcccaauaugggugaagacacccuugaagcuggccaauggaaccaaauauagaccuccugcaaaacuauuaaaggaaagggguuucuucggagcuauugcugguuucuuagaaggaggaugggaaggaaugauugcagguuggcacggauacacgucccauggggcacauggaguagcgguggcagcagaccuuaagagcacucaagaggccauaaacaagauaacaaaaaaucucaacucuuugagugagcuggaaguaaagaaucuucaaagacuaagcggugccauggaugaacuccacaacgaaauacuagaacuagacgagaaaguggaugaucucagagcugauacaauaagcucacaaauagaacucgcaguccugcuuuccaaugaaggaauaauaaacagugaagaugaacaucucuuggcacuugaaagaaagcugaagaaaaugcugggcccuucugcuguagagauagggaauggaugcuuugaaaccaaacacaagugcaaccagaccugucucgacagaauagcugcugguaccuuugaugcaggagaauuuucucuccccaccuuugauucacugaauauuacugcugcaucuuuaaaugacgauggauuggauaaucauaccauacugcuuuacuacucaacugcugccuccaguuuggcuguaacacugaugauagcuaucuuuguuguuuauauggucuccagagacaauguuucuugcuccaucugucuauaa

SEQ ID NO: 58769 - RNA, 1758 nt, Artificial Sequence; identical to SEQ ID NO: 58768
  derived and/or modified CDS sequence (wt) from hemagglutinin__InfluenzaB__AFH58524

SEQ ID NO: 58770 - RNA, 1755 nt, Artificial Sequence
  derived and/or modified CDS sequence (wt) from hemagglutinin__InfluenzaB__AFH58535
augaaggcaauaauuguacuacucaugguaguaacauccaaugcagaucgaaucugcacugggauaacaucgucaaacucaccucaugugguuaaaacugccacucaaggggaagucaaugugacuggugugauaccacuaacaacaacaccuaccaaaucucauuuugcaaaucucaaaggaacacagaccagaggaaaacuaugcccaaacuguuuuaacugcacagaucuggacguggcccugggcagaccaaaaugcauggggaacacacccuccgcaaaagucucaauacuccaugaagucaaaccugcuacaucuggaugcuuuccuauaaugcacgacagaacaaaaaucagacaacuaccuaaucuucucagaggauaugaaaacaucagguuaucaaccaguaauguuaucaauacagagacggcaccaggaggacccuacaagguggggaccucaggaucuugcccuaacguugcuaaugggaacggcuucuucaacacaauggcuuggguuaucccaaaagacaacaacaagacagcaauaaauccaguaacaguagaaguaccauacauuuguucagaaggggaagaccaaauuacuguuuggggguuccacucugaugacaaaacccaaauggaaagacucuauggagacucaaauccucaaaaguucaccucaucugccaauggaguaaccacacauuauguuucucagauugguggcuucccaaaucaaacagaagacgaagggcuaaaacaaagcggcagaauuguuguugauuacaugguacagaaaccuggaaaaacaggaacaauuguuuaucaaagaggcauuuuauugccucaaaaaguguggugcgcaaguggcaggagcaagguaauaaaaggguccuugccuuuaauuggugaagcagauugccuccacgaaaaguacgguggauuaaauaaaagcaagccuuacuacacaggagagcaugcaaaggccauaggaaauugcccaauaugggugaaaacacccuugaagcuggccaauggaaccaaauauagaccgccugcaaaacuauuaaaggaaagagguuucuucggagcuauugcugguuucuuggaaggaggaugggaaggaaugauugcagguuggcacggauacacaucucauggagcacauggaguggcaguggcagcagaccuuaagaguacacaagaagcuauaaacaagauaacaaaaaaucucaacuauuuaagugagcuagaaguaaaaaaccuucaaagacuaagcggagcaaugaaugagcuucacgacgaaauacucgagcuagacgaaaaaguggaugaucuaagagcugauacaauaagcucacaaauagagcuugcagucuugcuuuccaacgaagggauaauaaacagugaagaugagcaucucuuggcacuugaaagaaaacugaagaaaaugcugggccccucugcuguagaaauagggaaugggugcuuugaaaccaaacacaaaugcaaccagacuugccuagacaggauagcugcuggcaccuuuaaugcaggagauuuuucucuucccacuuuugauucauuaaacauuacugcugcaucuuuaaaugaugauggcuuggauaaucauacuauacugcucuacuacucaacugcugcuucuagcuuggcuguaacauuaaugauagcuaucuucauugucuacauggucuccagagacaauguuucuuguuccaucugucuguga

SEQ ID NO: 58771 - RNA, 1752 nt, Artificial Sequence
  derived and/or modified CDS sequence (wt) from hemagglutinin__InfluenzaB__AFH58557
augaaggcaauaauuguacuacucaugguaguaacauccaacgcagaucgaaucugcacugggauaacaucuucaaacucaccucauguggucaaaacagcuacucaaggggaagucaaugugacuggugugauaccacugacaacaacaccaacaaaaucucauuuugcaaaucuaaaaggaacaaagaccagagggaaacuaugcccaaacugucucaacugcacagaucuggauguggccuugggcagaccaauguguguggggaccacaccuucggcaaaagcuucaauacuccacgaagucagaccuguuacauccgggugcuuuccuauaaugcacgacagaacaaaaaucagacagcuacccaaucuucucagaggauaugaaaauaucagauuaucaacccaaaacguuaucaacgcagaaagagcaccaggaggacccuacagacuuggaaccucaggaucuugcccuaacguuaccaguagagacggauucuucgcaacaauggcuugggcugucccaagggacaacaaaacagcaacgaauccacuaacaguagaaguaccauacauuuguacaaaaggagaagaccaaauuacuguuuggggguuccauucugaugacaaaacccaaaugaaaaaccucuauggagacucaaauccucaaaaguucaccucaucugccaauggaguaaccacacauuauguuucucagauugguggcuucccaaaucaaacagaagacggagggcuaccacaaagcggcagaauuguuguugauuacauggugcaaaaaccugggaaaacaggaacaauugucuaucaaagagguguuuuguugccucaaaagguguggugcgcaaguggcaggagcaagguaauaaaaggguccuugccuuuaauuggugaagcagauugccuucacgaaaaauacgguggauuaaacaaaagcaagccuuacuacacaggagaacaugcaaaagccauaggaaauugcccaauaugggugaaaacaccuuugaagcuugccaauggaaccaaauauagaccuccugcaaaacuauuaaaggaaagggguuucuucggagcuauugcugguuucuuagaaggaggaugggaaggaaugauugcagguuggcacggauacacaucucauggagcacauggaguggcaguggcagcagaccuuaagaguacgcaagaagccauaaacaagauaacaaaaaaucucaauucuuugagugagcuagaaguaaagaaucuucaaagacuaaguggugccauggaugaacuccacaacgaaauacucgagcuggaugagaaaguggaugaucucagagcugacacaauaagcucgcaaauagagcuugcagucuugcuuuccaacgaaggaauaauaaacagugaagaugagcaucuauuggcacuugagagaaaacuaaagaaaaugcugggucccucugcuguagacauagggaauggaugcuucgaaaccaaacacaagugcaaccagaccugcuuagacagaauagcugcuggcaccuuuaaugcaggagaauuuucuuuucccacuuuugauucacugaauauuacugcugcaucuuuaaaugaugauggauuggauaaucauacuauacugcucuacuacucaacugcugcuucuaguuuggcuguaacauugaugauagcuauuuuuauuguuuauauggucuccagagacaauguuucuugcuccaucugucuauaa

SEQ ID NO: 58772 - RNA, 1755 nt, Artificial Sequence
  derived and/or modified CDS sequence (wt) from hemagglutinin__InfluenzaB__AFJ76224
augaaggcaauaauuguacuacucaugguaguaacauccaaugcagaucgaaucugcacugggauaacaucgucaaacucaccucauguggucaaaacagcuacucaaggggaggucaaugugacuggugugauaccacugacaacaacaccaacaaaaucccauuuugcaaaucucaaaggaacaaagaccagagggaaacuaugcccaaccugucucaacugcacagaccuggauguggccuuaggcaguccaauguguguggggaucacaccuucggcaaaagcuucaauacuccacgaagucagaccuguuacauccggaugcuuuccuauaaugcacgacagaacaaaaaucagacagcuacccaaucuucucagaggauaugaaaaaaucagauuaucaacccaaaacguuaucaacauagaaaaggcaccaggaggacccuacagacuuggaaccucaggaucuugcccuaacgcuaccaguagaagcggauuuuucgcaacaauggcuugggcugucccaagggacaacaacaaaacagcaacgaauccacuaacaguagaaguaccacacaucuguacaaaagaagaagaccaaauuacuguuuggggguuccauucugauaacaaaacccaaaugaaaaaccucuauggagacucaaauccucaaaaguucaccucaucugcuaauggaguaaccacacauuauguuucucagauuggcggcuucccggaucaaacagaagacggagggcuaccacaaagcggcagaauuguuguugauuacauggugcaaaaaccugggaaaacaggaacaauugucuaucaaagagguauuuuguugccucaaaagguguggugcgcgaguggcaggagcaaaguaauaaaaggguccuugccuuuaauuggugaagcagauugccuucacgaaaaauacgguggauuaaacaaaagcaagccuuacuacacaggagaacaugcaaaagccauaggaaauugcccaauaugggugaaaacaccuuugaagcuugccaauggaaccaaauauagaccuccugcaaaacuauuaaaggaaagggguuucuucggagcuauugcugguuucuuagaaggaggaugggaaggaaugauugcagguuggcacggauacacaucucauggagcacauggaguggcaguggcagcagaccuuaagaguacgcaagaagccauaaacaagauaacaaaaaaucucaauucuuugagugagcuagaaguaaagaaucuucaaagacuaaguggugccauggaugaacuccacaacgaaauacucgagcuggaugagaaaguggaugaucucagagcugacacaauaagcucacaaauagaacuugcggucuugcuuuccaacgaaggaauaauaaacagugaagaugagcaucuauuggcacuugagagaaaacuaaagaaaaugcugggucccucugcuguagacauagggaauggaugcuucgaaaccaaacacaaaugcaaccagaccugcuuagacaggauagcugcuggcaccuuuaaugcaggagaauuuucucuucccacuuuugauucacugaauauuacugcugcaucuuuaaaugaugauggauuggauaaccauacuauacugcucuacuacucaacugcugcuucuaguuuggcuguaacauugaugauagcuauuuuuauuguuuauaugaucuccagagacaauguuucuugcuccaucugucuauaa

SEQ ID NO: 58773 - RNA, 1755 nt, Artificial Sequence
  derived and/or modified CDS sequence (wt) from hemagglutinin__InfluenzaB__AFJ76235
augaaggcaauaauuguacuacucaugguaguaacauccaaugcagaucgaaucugcacugggauaacaucgucaaacucaccucauguggucaaaacagcuacucaaggggaggucaaugugacuggugugauaccacugacaacaacaccaacaaaaucucauuuugcaaaucucaaaggaacaaagaccagagggaaacuaugcccaaccugccucaacugcacagaucuggauguggccuuaggcaguccaauguguguggggaucacaccuucagcaaaagcuucaauacuccacgaagucagaccuguuacauccagaugcuuuccuauaaugcacgacagaacaaaaaucagacagcuacccaaucuucucagaggauaugaaaaaaucagauuaucaacccaaaacguuaucaacauagaaaaggcaccaggaggacccuacagacuuggaaccucaggaucuugcccuaacgcuaccaguagaagcggauuuuucgcaacaauggcuugggcugucccaagggacaacaacaaaacagcaacgaauccacuaacaguagaaguaccacacaucuguacaaaagaagaagaccaaauuacuguuuggggguuccauucugauaacaaaacccaaaugaaaaaccucuauggagacucaaauccucaaaaguucaccucaucggcuaauggaguaaccacacauuauguuucucagauuggcggcuucccggaucaaacagaagacggagggcuaccacaaagcggcagaauuguuguugauuacauggugcaaaaaccugggaaaacaggaacaauugucuaucaaagagguauuuuguugccucaaaagguguggugcgcgaguggcaggagcaaaguaauaaaaggguccuugccuuuaauuggugaagcagauugccuucacgaaaaauacgguggauuaaacaaaagcaagccuuacuacacaggagaacaugcaaaagccauaggaaauugcccaauaugggugaaaacaccuuugaagcuugccaauggaaccaaauauagaccuccugcaaaacuauuaaaggaaagggguuucuucggagcuauugcugguuucuuagaaggaggaugggaaggaaugauugcagguuggcacggauacacaucucauggagcacauggaguggcaguggcagcagaccuuaagaguacgcaagaagccauaaacaagauaacaaaaaaucucaauucuuugagugagcuagaaguaaagaaucuucaaagacuaaguggugccauggaugaacuccacaacgaaauacucgagcuggaugagaaaguggaugaucucagagcugacacaauaagcucacaaauagaacuugcggucuugcuuuccaacgaaggaauaauaaacagugaagaugagcaucuauuggcacuugagagaaaacuaaagaaaaugcugggucccucugcuguagacauagggaauggaugcuucgaaaccaaacacaaaugcaaccagaccugcuuagacaggauagcugcuggcaccuuuaaugcaggagaauuuucucuucccacuuuugauucacugaauauuacugcugcaucuuuaaaugaugauggauuggauaaccauaccauacugcucuacuacucaacugcugcuucuaguuuggcuguaacauugaugauagcuauuuuuauuguuuauaugaucuccagagacaauguuucuugcuccaucugucuauaa

SEQ ID NO: 58774 - RNA, 1755 nt, Artificial Sequence
  derived and/or modified CDS sequence (wt) from hemagglutinin__InfluenzaB__AFJ76246
augaaggcaauaauuguacuacucaugguaguaacauccaaugcagaucgaaucugcacugggauaacaucgucgaacucaccucauguggucaaaacagcuacucaaggggaggucaaugugacuggugugauaccacuaacaacaacaccaacaaaaucucauuuugcaaaucucaaaggaacaaagaccagagggaaacuaugcccaaccugucucaacugcacagaucuggauguggccuuaggcagcccaauguguguggggaucacaccuucggcaaaagcuucaauacuccacgaagucagaccuguuacauccggaugcuuuccuauaaugcacgacagaacaaaaaucagacagcuacccaaucuucucagaggauaugaaaaaaucagauuaucaacccaaaacguuaucaacauagaaaaggcaccaggaggacccuacagacuuggaaccucaggaucuugcccuaacgcuaccaguagaagcggauuuuucgcaacaauggcuugggcugucccaagggacaacaacaaaacagcaacgaauccacuaacaguagaaguaccacacaucuguacaaaagaagaggaccaaauuacuguuuggggguuccauucugauaacaaaacccaaaugaaaaaccucuauggagacucaaauccucaaaaguucaccucaucugcuaauggaguaaccacacauuauguuucucagauuggcggcuucccggaucaaacagaagacggagggcuaccacaaagcggcagaauuguuguugauuacauggugcaaaaaccugggaaaacaggaacaauugucuaucaaagagguauuuuguugccucaaaagguguggugcgcgaguggcaggagcaagguaauaaaaggguccuugccuuuaauuggugaagcagauugccuucacgaaaaauacgguggauuaaacaaaagcaagccuuacuacacaggagaacaugcaaaagccauaggaaauugcccaauaugggugaaaacaccuuugaagcuugccaauggaaccaaauauagaccuccugcaaaacuauuaaaggaaagggguuucuucggagcuauugcugguuucuuagaaggaggaugggaaggaaugauugcagguuggcacggauacacaucucauggagcacauggaguggcaguggcagcagaccuuaagaguacgcaagaagccauaaacaagauaacaaaaaaucucaauucuuugagugagcuagaaguaaagaaucuucaaagacuaaguggugccauggaugaacuccacaacgaaauacucgagcuggaugagaaaguggacgaucucagagcugacacaauaagcucacaaauagaacuugcggucuugcuuuccaacgaaggaauaauaaacagugaagaugagcaucuauuggcacuugagagaaaacuaaagaaaaugcugggucccucugcuguagacauagggaauggaugcuuugaaaccaaacacaaaugcaaccagaccugcuuagacaggauagcugcuggcaccuuuaaugcaggagaauuuucucuucccacuuuugauucacugaauauuacugcugcaucuuuaaaugaugauggauuggauaaccauacuauacugcucuacuacucaacugcugcuucuaguuuggcuguaacauugaugauagcuauuuuuauuguuuauaugaucuccagagacaauguuucuugcuccaucugucuauaa

SEQ ID NO: 58775 - RNA, 1758 nt, Artificial Sequence
  derived and/or modified CDS sequence (wt) from hemagglutinin__InfluenzaB__AFJ76268
augaaggcaauaauuguacuacucaugguaguaacauccaaugcagaucgaaucugcacugggauaacaucgucaaacucaccacauguugucaaaacugcuacucaaggggaggucaaugugacugguguaauaccacugacaacaacacccaccaaaucucauuuugcaaaucucaaaggaacagaaaccagagggaaacuaugcccaaaaugccucaacugcacagaucuggacguggccuugggcagaccaaaaugcacggggaacauacccucggcaagaguuucaauacuccaugaagucagaccuguuacaucugggugcuuuccuauaaugcacgacagaacaaaaauuagacagcugccuaaccuucucagaggauacgaacauaucagguuaucaacucauaacguuaucaaugcagaaaaugcaccaggaggacccuacaaaauuggaaccucagggucuugcccuaacguuaccaauggaaacggauuuuucgcaacaauggcuugggccgucccaaaaaacgacaacaacaaaacagcaacaaauucauuaacaauagaaguaccauacauuuguacagaaggagaagaccaaauuaccguuuggggguuccacucugauaacgaaacccaaauggcaaagcucuauggggacucaaagccccagaaguucaccucaucugccaacggagugaccacacauuacguuucacagauugguggcuucccaaaucaaacagaagacggaggacuaccacaaagugguagaauuguuguugauuacauggugcaaaaaucugggaaaacaggaacaauuaccuaucaaagagguauuuuauugccucaaaaaguguggugcgcaaguggcaggagcaagguaauaaaaggauccuugccuuuaauuggagaagcagauugccuccacgaaaaauacgguggauuaaacaaaagcaagccuuacuacacaggggaacaugcaaaggccauaggaaauugcccaauaugggugaaaacacccuugaagcuggccaauggaaccaaauauaggccuccugcaaaacuauuaaaggaaagggguuucuucggagcuauugcugguuucuuagaaggaggaugggaaggaaugauugcagguuggcacggauacacaucccauggggcacauggaguagcgguggcagcagaccuuaagagcacucaagaggccauaaacaagauaacaaaaaaucucaacucuuugagugagcuggaaguaaagaaucuucaaagacuaagcggugccauggaugaacuccacaacgaaauacuagaacuagacgagaaaguggaugaucucagagcugauacaauaagcucacaaauagaacucgcaguccugcuuuccaaugaaggaauaauaaacagugaagaugagcaucucuuggcgcuugaaagaaagcugaagaaaaugcugggccccucugcuguagagauagggaauggaugcuuugaaaccaaacacaagugcaaccagaccugucucgacagaauagcugcugguaccuuugaugcaggagaauuuucucuccccacuuuugauucacugaauauuacugcugcaucuuuaaaugacgauggauuggauaaucauacuauacugcuuuacuacucaacugcugccuccaguuuggcuguaacauugaugauagcuaucuuuguuguuuauauggucuccagagacaauguuucuugcuccaucugucuauaa

SEQ ID NO: 58776 - RNA, 1758 nt, Artificial Sequence
  derived and/or modified CDS sequence (wt) from hemagglutinin__InfluenzaB__AFJ76301
augaaggcaauaauuguacuacucaugguaguaacauccaaugcagaucgaaucugcacugggauaacaucgucaaacucaccacauguugucaaaacugcuacucaaggggaggucaaugugacugguguaauaccacugacaacaacacccaccaaaucucauuuugcaaaucucaaaggaacagaaaccagagggaaacuaugcccaaaaugccucaacugcacagaucuggacguggccuugggcagaccaaaaugcacggggaacauacccucggcaagaguuucaauacuccaugaagucagaccuguuacaucugggugcuuuccuauaaugcacgacagaacaaaaauuagacagcugccuaaccuucucagaggauacgaacauaucagguuaucaacucauaacguuaucaaugcagaaaaugcaccaggaggacccuacaaaauuggaaccucagggucuugcccuaacguuaccaauggaaacggauuuuucgcaacaauggcuugggccgucccaaaaaacgacaacaacaaaacagcaacaaauucauuaacaauagaaguaccauacauuuguacagaaggagaagaccaaauuaccguuuggggguuccacucugauaacgaaauccaaauggcaaagcucuauggggacucaaagccccagaaguucaccucaucugccaacggagugaccacacauuacguuucacagauugguggcuucccaaaucaaacagaagacggaggacuaccacaaagugguagaauuguuguugauuacauggugcaaaaaucugggaaaacaggaacaauuaccuaucaaagagguauuuuauugccucaaaaaguguggugcgcaaguggcaggagcaagguaauaaaaggauccuugccuuuaauuggagaagcagauugccuccacgaaaaauacgguggauuaaacaaaagcaagccuuacuacacaggggaacaugcaaaggccauaggaaauugcccaauaugggugaaaacacccuugaagcuggccaauggaaccaaauauagaccuccugcaaaacuauuaaaggaaagggguuucuucggagcuauugcugguuucuuagaaggaggaugggaaggaaugauugcagguuggcacggauacacaucccauggggcacauggaguagcgguggcagcagaccuuaagagcacucaagaggccauaaacaagauaacaaaaaaucucaacucuuugagugagcuggaaguaaagaaucuucaaagacuaagcggugccauggaugaacuccacaacgaaauacuagaacuagacgagaaaguggaugaucucagagcugauacaauaagcucacaaauagaacucgcaguccugcuuuccaaugaaggaauaauaaacagugaagaugagcaucucuuggcgcuugaaagaaagcugaagaaaaugcugggccccucugcuguagagauagggaauggaugcuuugaaaccaaacacaagugcaaccagaccugucucgacagaauagcugcugguaccuuugaugcaggagaauuuucucuccccacuuuugauucacugaauauuacugcugcaucuuuaaaugacgauggauuggauaaucauacuauauugcuuuacuacucaacugcugccuccaguuuggcuguaacauugaugauagcuaucuuuguuguuuauauggucuccagagacaauguuucuugcuccaucugucuauaa

SEQ ID NO: 58777 - RNA, 1755 nt, Artificial Sequence
  derived and/or modified CDS sequence (wt) from hemagglutinin__InfluenzaB__AFJ76323
augaaggcaauaauuguacuacucaugguaguaacauccaaugcagaucgaaucugcacugggauaacaucuucaaacucaccucauguggucaaaacagcuacacaaggggaggucaaugugacuggugugauaccacugacaacaacaccaacaaaaucuuauuuugcaaaucucaaagggacaaggaccagagggaaacuaugcccagacugucucaacuguacagaucuggauguggccuugggcaggccaauguguguggggaccacaccuucugcgaaagcuucaauacuccacgaagucagaccuguuacauccgggugcuuuccuauaaugcacgacagaacaaaaaucaggcaacuagccaaucuucucagaggauaugaaaauaucagguuaucaacccaaaacguuaucgaugcagaaaaggcaccaggaggacccuacagacuuggaaccucaggaucuugcccuaacgcuaccagcaaaagcggauuuuucgcaacaauggcuugggcugucccaaaggacaacaacaaaaaugcaacgaacccacuaacaguagaaguaccauacauuuguacagaaggggaagaccaaauuacuguuuggggguuccauucagauaacaaaacccaaaugaagaaccucuauggagacucaaauccucaaaaguucaccucaucugcuaauggaguaaccacacauuauguuucucagauuggcggcuucccagaucaaacagaagacggaggacuaccacaaagcggcagaauugucguugauuacaugaugcaaaaaccugggaaaacaggaacaauugucuaucaaagagguguuuuguugccucaaaagguguggugcgcgaguggcaggagcaaaguaauaaaaggguccuugccuuuaauuggugaagcagauugccuucaugaaaaauacgguggauuaaacaaaagcaagccuuacuacacaggagaacaugcaaaagccauaggaaauugcccaauaugggugaaaacaccuuugaagcuugccaauggaaccaaauauagaccuccugcaaaacuauuaaaggaaagggguuucuucggagcuauugcugguuuccuagaaggaggaugggaaggaaugauugcagguuggcacggauacacaucucacggagcacauggaguggcaguggcggcagaccuuaagaguacacaagaagcuauaaacaagauaacaaaaaaucucaacucuuugagugagcuagaaguaaagaaccuucaaagacuaaguggugccauggaugaacuccacaacgaaauacucgagcuggaugagaaaguggaugaucucagagcugacacuauaagcucacaaauagaacuugcagucuugcuuuccaacgaaggaauaauaaacagugaagaugagcaucuauuggcacuugagagaaaacuaaagaaaaugcugggucccucugcuguagacauaggaaauggaugcuucgaaaccaaacacaaaugcaaccagaccugcuuagacaggauagcugcuggcaccuuuaaugcaggagaauuuucucuccccacuuuugauucauugaacauuacugcugcaucuuuaaaugaugauggauuggauaaccauacuauacugcucuauuacucaacugcugcuucuaguuuggcuguaacauugaugcuagcuauuuuuauuguuuauauggucuccagagacaacguuucaugcuccaucugucuauaa

SEQ ID NO: 58778 - RNA, 1758 nt, Artificial Sequence
  derived and/or modified CDS sequence (wt) from hemagglutinin__InfluenzaB__AFJ76334
augaaggcaauaauuguacuacucaugguaguaacauccaaugcagaucgaaucugcacugggauaacaucgucaaacucaccacauguugucaaaacugcuacucaaggggaggucaaugugacugguguaauaccacugacaacaacacccaccaaaucucauuuugcaaaucucaaaggaacagaaaccagagggaaacuaugcccaaaaugccucaacugcacagaucuggacguggccuugggcagaccaaaaugcacggggaacauacccucggcaagaguuucaauacuccaugaagucagaccuguuacaucugggugcuuuccuauaaugcacgacagaacaaaaauuagacagcugccuaaccuucucagaggauacgaacauaucagguuaucaacucauaacguuaucaaugcagaaaaugcaccaggaggacccuacaaaauuggaaccucagggucuugcccuaacguuaccaauggaaacggauuuuucgcaacaauggcuugggccgucccaaaaaacgacaacaacaaaacagcaacaaauucauuaacaauagaaguaccauacauuuguacagaaggagaagaccaaauuaccguuuggggguuccacucugauagcgaaacccaaauggcaaagcucuauggggacucaaagccccagaaguucaccucaucugccaacggagugaccacacauuacguuucacagauugguggcuucccaaaucaaacagaagacggaggacuaccacaaagugguagaauuguuguugauuacauggugcaaaaaucugggaaaacaggaacaauuaccuaucaaagagguauuuuauugccucaaaaaguguggugcgcaaguggcaggagcaagguaauaaaaggauccuugccuuuaauuggagaagcagauugccuccacgaaaaauacgguggauuaaacaaaagcaagccuuacuacacaggggaacaugcaaaggccauaggaaauugcccaauaugggugaaaacacccuugaagcuggccaauggaaccaaauauagaccuccugcaaaacuauuaaaggaaagggguuucuucggagcuauugcugguuucuuagaaggaggauggaaaggaaugauugcagguuggcacggauacacaucccauggggcacauggaguagcgguggcagcagaccuuaagagcacucaagaggccauaaacaagauaacaaaaaaucucaacucuuugagugagcuggaaguaaagaaucuucaaagacuaagcggugccauggaugaacuccacaacgaaauacuagaacuagacgagaaaguggaugaucucagagcugauacaauaagcucacaaauagaacucgcaguccugcuuuccaaugaaggaauaauaaacagugaagaugagcaucucuuggcgcuugaaagaaagcugaagaaaaugcugggccccucugcuguagagauagggaauggaugcuuugaaaccaaacacaagugcaaccagaccugucucgacagaauagcugcugguaccuuugaugcaggagaauuuucucuccccacuuuugauucacugaauauuacugcugcaucuuuaaaugacgauggauuggauaaucauacuauacugcuuuacuacucaacugcugccuccaguuuggcuguaacauugaugauagcugucuuuguuguuuauauggucuccagagacaauguuucuugcuccaucugucuauaa

SEQ ID NO: 58779 - RNA, 1758 nt, Artificial Sequence; identical to SEQ ID NO: 58775
  derived and/or modified CDS sequence (wt) from hemagglutinin__InfluenzaB__AFJ77327

SEQ ID NO: 58780 - RNA, 1755 nt, Artificial Sequence
  derived and/or modified CDS sequence (wt) from hemagglutinin__InfluenzaB__AFJ77369
augaaggcaauaauuguacuacucaugguaguaacauccaaugcagaucgaaucugcacugggauaacaucuucaaacucaccucauguggucaaaacagcuacucaaggggaggucaaugugaccggugugauaccacugacaacaacaccaacaaaaucuuauuuugcaaaucucaaagggacaaggaccagagggaaacuaugcccagacugucucaacuguacagaucuggauguggccuugggcaggccaauguguguggggaccacaccuucugcgaaagcuucaauacuccacgaagucagaccuguuacauccgggugcuuuccuauaaugcacgacagaacaaaaaucaggcaacuagccaaucuucucagaggauaugaaaauaucagguuaucaacccaaaacguuaucgaugcagaaaaggcaccaggaggacccuacagacuuggaaccucaggaucuugcccuaacgcuaccaguaaaagcggauuuuucgcaacaauggcuugggcugucccaaaggacaacaacaaaaaugcaacgaacccacuaacaguagaaguaccauacauuuguacagaaggggaagaccaaauuacuguuuggggguuccauucagauaacaaaacccaaaugaagaaccucuauggagacucaaauccucaaaaguucaccucaucugcuaauggaguaaccacacauuauguuucucagauuggcggcuucccagaucaaacagaagacggaggacuaccacaaagcggcagaauugucguugauuacaugaugcaaaaaccugggaaaacaggaacaauugucuaucaaagagguguuuuguugccucaaaagguguggugcgcgaguggcaggagcaaaguaauaaaaggguccuugccuuuaauuggugaagcagauugccuucaugaaaaauacgguggauuaaacaaaagcaagccuuacuacacaggagaacaugcaaaagccauaggaaauugcccaauaugggugaaaacaccuuugaagcuugccaauggaaccaaauauagaccuccugcaaaacuauuaaaggaaagggguuucuucggagcuauugcugguuuccuagaaggaggaugggaaggaaugauugcagguuggcacggauacacaucucacggagcacauggaguggcaguggcggcagaccuuaagaguacacaagaagcuauaaacaagauaacaaaaaaucucaacucuuugagugagcuagaaguaaagaaccuucaaagacuaaguggugccauggaugaacuccacaacgaaauacucgagcuggaugagaaaguggaugaucucagagcugacacuauaagcucacaaauagaacuugcagucuugcuuuccaacgaaggaauaauaaacagugaagaugagcaucuauuggcacuugagagaaaacuaaagaaaaugcugggucccucugcuguagacauaggaaauggaugcuucgaaaccaaacacaaaugcaaccagaccugcuuagacaggauagcugcuggcaccuuuaaugcaggagaauuuucucuccccacuuuugauucauugaacauuacugcugcaucuuuaaaugaugauggauuggauaaccauacuauacugcucuauuacucaacugcugcuucuaguuuggcuguaacauugaugcuagcuauuuuuauuguuuauauggucuccagagacaacguuucaugcuccaucugucuauaa

SEQ ID NO: 58781 - RNA, 1755 nt, Artificial Sequence
  derived and/or modified CDS sequence (wt) from hemagglutinin__InfluenzaB__AFJ77380
augaaggcaauaauuguacuacucaugguaguaacauccaaugcagaucgaaucugcacugggauaacaucuucaaacucaccucauguggucaaaacagcuacucaaggggaggucaaugugacuggugugauaccacugacaacaacaccaacaaaaucuuauuuugcaaaucucaaagggacaaggaccagagggaaacuaugcccagacugucucaacuguacagaucuggauguggccuugggcaggccaauguguguggggaccacaccuucugcgaaagcuucaauacuccacgaagucagaccuguuacauccgggugcuuuccuauaaugcacgacagaacaaaaaucaggcaacuagccaaucuucucagaggauaugaaaauaucagguuaucaacccaaaacguuaucgaugcagaaaaagcaccaggaggacccuacagacuuggaaccucaggaucuugcccuaacgcuaccaguaaaagcggauuuuucgcaacaauggcuugggcugucccaaaggacaacaacaaaaaugcaacgaacccacuaacaguagaaguaccauacauuuguacagaaggggaagaccaaauuacuguuuggggguuccauucagauaacaaaacccaaaugaagaaccucuauggagacucaaauccucaaaaguucaccucaucugcuaauggaguaaccacacauuauguuucucagauuggcggcuucccagaucaaacagaagacggaggacuaccacaaagcggcagaauugucguugauuacaugaugcaaaaaccugggaaaacaggaacaauugucuaucaaagagguguuuuguugccucaaaagguguggugcgcgaguggcaggagcaaaguaauaaaaggguccuugccuuuaauuggugaagcagauugccuucaugaaaaauacgguggauuaaacaaaagcaagccuuacuacacaggagaacaugcaaaagccauaggaaauugcccaauauggguuaaaacaccuuugaagcuugccaauggaaccaaauauagaccuccugcaaaacuacuaaaggaaagggguuucuucggagcuauugcugguuuccuagaaggaggaugggaaggaaugauugcagguuggcacggauacacaucucacggagcacauggaguggcaguggcggcagaccuuaagaguacacaagaagcuauaaacaagauaacaaaaaaucucaacucuuugagugagcuagaaguaaagaaccuucaaagacuaaguggugccauggaugaacuccacaacgaaauacucgagcuggaugagaaaguggaugaucucagagcugacacuauaagcucacaaauagaacuugcagucuugcuuuccaacgaaggaauaauaaacagugaagaugagcaucuauuggcacuugagagaaaacuaaagaaaaugcugggucccucugcuguagacauaggaaauggaugcuucgaaaccaaacacaaaugcaaccagaccugcuuagacaggauagcugcuggcaccuuuaaugcaggagaauuuucucuccccacuuuugauucauugaacauuacugcugcaucuuuaaaugaugauggauuggauaaccauacuauacugcucuauuacucaacugcugcuucuaguuuggcuguaacauugaugcuagcuauuuuuauuguuuauauggucuccagagacaacguuucaugcuccaucugucuauaa

SEQ ID NO: 58782 - RNA, 1755 nt, Artificial Sequence
  derived and/or modified CDS sequence (wt) from hemagglutinin__InfluenzaB__AFJ80139
augaaggcaauaauuguacuacucaugguaguaacauccaaugcagaucgaaucugcacugggauaacaucgucaaacucaccucauguggucaaaacagcuacucaaggggaggucaaugugacuggugugauaccacugacaacaacaccaacaaaaucucauuuugcaaaucucaaaggaacaaagaccagagggaaacuaugcccaaccugucucaacugcacagaucuggauguggccuugggcagaccaauguguguggggaucacaccuucggcaaaagcuucaauacuucacgaagucagaccugucacauccggaugcuuuccuauaaugcacgacagaacaaaaaucagacagcuacccaaucuucucagaggauaugaaaaaaucagauuaucaacccagaacguuaucaacgcagaaaaggcaccaggaggacccuacagacuuggaaccucaggaucuugcccuaacgcuaccaguagaagcggauuuuucgcaacaauggcuugggcugucccaagggacaacaacaaaacagcaacgaacccacuaacaguagaaguaccauacaucuguacaaaagaagaagaccaaauuacuguuuggggguuccauucugauaacaaaacccaaaugaaaaaccucuauggagacucaaauccucaaaaguucaccucaucugcuaauggaguaaccacacauuauguuucucagauuggcggcuucccggaucaaacagaagacggagggcuaccacaaagcggcagaauuguuguugauuacauggugcaaaaaccugggaaaacaggaacaauugucuaucaaagagguauuuuguugccucaaaagguguggugcgcgaguggcaggagcaaaguaauaaaaggguucuugccuuuaauuggugaagcagauugccuucacgaaaaauacggugguuuaaacaaaagcaagccuuacuacacaggagaacaugcaaaagccauaggaaauugcccaauaugggugaaaacaccuuugaagcuugccaauggaaccaaauauagaccuccugcaaaacuauuaaaggaaagggguuucuucggagcuauugcugguuucuuagaaggaggaugggaaggaaugauugcagguuggcacggauacacaucucacggagcacauggaguggcaguggcagcagaccuuaagaguacgcaagaagccauaaacaagauaacaaaaaaucucaauucuuugagugagcuagaaguaaagaaucuucaaagacuaaguggugccauggaugaacuccacaacgaaauacucgagcuggaugagaaaguggaugaucucagagcugacacaauaagcucacaaauagaacuugcagucuugcuuuccaacgaaggaauaauaaacagugaagaugagcaucuauuggcacuugagagaaaacuaaagaaaaugcugggucccucugcuguggacauagggaauggaugcuucgaaaccaaacacaagugcaaccagaccugcuuagacaggauagcugcuggcaccuuuaaugcaggagaauuuucucuucccacuuuugauucacugaauauuacugcugcaucuuuaaaugaugauggauuggauaaccauacuauacugcucuacuacucaacugcugcuucuaguuuggcuguaacauugaugauagcuauuuuuauuguuuauaugaucuccagagacaauguuucuugcuccaucugucuauaa

SEQ ID NO: 58783 - RNA, 1755 nt, Artificial Sequence
  derived and/or modified CDS sequence (wt) from hemagglutinin__InfluenzaB__AFJ80150
augaaggcaauaauuguacuacucaugguaguaacauccaaugcagaucgaaucugcacugggauaacaucgucaaacucaccucauguggucaaaacagcuacucaaggggaggucaaugugacuggugugauaccacugacaacaacaccaacaaaaucucauuuugcaaaucucaaaggaacaaagaccagagggaaacuaugcccaaccugucucaacugcacagaucuggauguggccuugggcagaccaauguguguggggaucacaccuucggcaaaagcuucaauacuucacgaagucagaccugucacauccggaugcuuuccuauaaugcacgacagaacaaaaaucagacagcuacccaaucuucucagaggauaugaaaaaaucagauuaucaacccagaacguuaucaacgcagaaaaggcaccaggaggacccuacagacuuggaaccucaggaucuugcccuaacgcuaccaguagaagcggauuuuucgcaacaauggcuugggcugucccaagggacaacaacaaaacagcaacgaacccacuaacaguagaaguaccauacaucuguacaaaagaagaagaccaaauuacuguuuggggguuccauucugauaacaaaacccaaaugaaaaaccucuauggagacucaaauccucaaaaguucaccucaucugcuaauggaguaaccacacauuauguuucucagauuggcggcuucccggaucaaacagaagacggagggcuaccacaaagcggcagaauuguuguugauuacauggugcaaaaaccugggaaaacaggaacaauugucuaucaaagagguauuuuguugccucaaaagguguggugcgcgaguggcaggagcaaaguaauaaaaggguccuugccuuuaauuggugaagcagauugccuucacgaaaaauacgguggauuaaacaaaagcaagccuuacuacacaggagaacaugcaaaagccauaggaaauugcccaauaugggugaaaacaccuuugaagcuugccaauggaaccaaauauagaccuccugcaaaacuauuaaaggaaagggguuucuucggagcuauugcugguuucuuagaaggaggaugggaaggaaugauugcagguuggcacggauacacaucucacggagcacauggaguggcaguggcagcagaccuuaagaguacgcaagaagccauaaacaagauaacaaaaaaucucaauucuuugagugagcuagaaguaaagaaucuucaaagacuaaguggugccauggaugaacuccacaacgaaauacucgagcuggaugagaaaguggaugaucucagagcugacacaauaagcucacaaauagaacuugcagucuugcuuuccaacgaaggaauaauaaacagugaagaugagcaucuauuggcacuugagagaaaacuaaagaaaaugcugggucccucugcuguagacauagggaauggaugcuucgaaaccaaacacaagugcaaccagaccugcuuagacaggauagcugcuggcaccuuuaaugcaggagaauuuucucuucccacuuuugauucacugaauauuacugcugcaucuuuaaaugaugauggauuggauaaccauacuauacugcucuacuacucaacugcugcuucuaguuuggcuguaacauugaugauagcuauuuuuauuguuuauaugaucuccagagacaauguuucuugcuccaucugucuauaa

SEQ ID NO: 58784 - RNA, 1755 nt, Artificial Sequence
  derived and/or modified CDS sequence (wt) from hemagglutinin__InfluenzaB__AFJ80161
augaaggcaauaauuguacuacucaugguaguaacauccaaugcagaucgaaucugcacugggauaacaucgucaaacucaccucauguggucaaaacagcuacucaaggggaggucaaugugacuggugcgauaccacugacaacaacaccaacaaaaucucauuuugcaaaucucaaaggaacaaagaccagagggaaacuaugcccaaccugucucaacugcacagaucuggauguggccuugggcagaccaauguguguggggaucacaccuucggcaaaagcuucaauacuccacgaagucagaccuguuacauccggaugcuuuccuauaaugcacgacagaacaaaaaucagacagcuacccaaucuucucagaggauaugaaaaaaucagauuaucaacccaaaacguuaucaacgcagaaaaggcaccaggaggacccuacagacuuggaacuucaggaucuugcccuaacgcuaccaguagaagcggauuuuucgcaacaauggcuugggcugucccaagggacaacaacaaaacagcaacgaauccacuaacaguagaaguaccacacaucuguacaaaagaagaagaccaaauuacugucuggggguuccauucugauaacaaaacccaaaugaaaaaccucuauggagacucaaauccucaaaaguucaccucaucugcuaauggaauaaccacacauuauguuucucagauuggaggcuucccggaccaaacagaagacggagggcuaccacaaagcggcagaauuguuguugauuacauggugcaaaaaccugggaaaacaggaacaauugucuaucaaagagggauuuuguugccucaaaagguguggugcgcgaguggcaggagcaaaguaauaaaaggguccuugccuuuaauuggugaagcagauugccuucacgaaaaauacgguggauuaaacaaaagcaagccuuacuacacaggagaacaugcaaaagccauagguaauugcccaauaugggugaaaacaccuuugaagcuugccaauggaaccaaauauagaccuccugcaaaacuauuaaaggaaagggguuucuucggagcuauugcugguuucuuagaaggaggaugggaaggaaugauugcagguuggcacggauacacaucucacggagcacauggaguggcaguggcagcagaccuuaagaguacgcaagaagccauaaacaagauaacaaaaaaucucaauucuuugagugagcuagaaguaaagaaccuucaaagacuaaguggugccauggaugaacuccauaacgaaauacucgagcuggaugagaaaguggaugaucucagagcugacacaauaagcucacaaauagaacuugcagucuugcuuuccaacgaaggaauaauaaacagugaagaugagcaucuauuggcacuugagagaaaacuaaagaaaaugcugggucccucugcuguagacauagggaauggaugcuucgaaaccaaacacaagugcaaccagaccugcuuagacaggauagcugcuggcaccuuuaaugcaggagaauuuucucuucccacuuuugauucacugaacauuacugcugcaucuuuaaaugaugauggauuggauaaccauacuauacugcucuacuacucaacugcugcuucuaguuuggcuguaacauugaugauagcuauuuuuauuguuuauaugaucuucagagacaauguuucuugcuccaucugucuauaa

SEQ ID NO: 58785 - RNA, 1755 nt, Artificial Sequence
  derived and/or modified CDS sequence (wt) from hemagglutinin__InfluenzaB__AFJ80172
augaaggcaauaauuguacuacucaugguaguaacauccaaugcagaucgaaucugcacugggauaacaucgucaaacucaccucauguggucaaaacagcuacucaaggggaggucaaugugacuggugugauaccacugacaacaacaccaacaaaaucucauuuugcaaaucucaaaggaacaaagaccagagggaaacuaugcccaaccugucucaacugcacagaucuggauguggccuugggcagaccaauguguguggggaucacaccuucggcaaaagcuucaauacuucacgaagucagaccugucacauccggaugcuuuccuauaaugcacgacagaacaaaaaucagacagcuacccaaucuucucagaggauaugaaaaaaucagauuaucaacccagaacguuaucaacgcagaaaaggcaccaggaggacccuacagacuuggaaccucaggaucuugcccuaacgcuaccaguagaagcggauuuuucgcaacaauggcuugggcugucccaagggacaacaacaaaacagcaacgaacccacuaacaguagaaguaccauacaucuguacaaaagaagaagaccaaauuacuguuuggggguuccauucugauaacaaaacccaaaugaaaaaccucuauggagacucaaauccucaaaaguucaccucaucugcuaauggaguaaccacacauuauguuucucagauuggcgacuucccggaucaaacagaagacggagggcuaccacaaagcggcagaauuguuguugauuacauggugcaaaaaccugggaaaacaggaacaauugucuaucaaagagguauuuuguugccucaaaagguguggugcgcgaguggcaggagcaaaguaauaaaaggguccuugccuuuaauuggugaagcagauugccuucacgaaaaauacgguggauuaaacaaaagcaagccuuacuacacaggagaacaugcaaaagccauaggaaauugcccaauaugggugaaaacaccuuugaagcuugccaauggaaccaaauauagaccuccugcaaaacuauuaaaggaaagggguuucuucggagcuauugcugguuucuuagaaggaggaugggaaggaaugauugcagguuggcacggauacacaucucacggagcacauggaguggcaguggcagcagaccuuaagaguacgcaagaagccauaaacaagauaacaaaaaaucucaauucuuugagugagcuagaaguaaagaaucuucaaagacuaaguggugccauggaugaacuccacaacgaaauacucgagcuggaugagaaaguggaugaucucagagcugacacaauaagcucacaaauagaacuugcagucuugcuuuccaacgaaggaauaauaaacagugaagaugagcaucuauuggcacuugagagaaaacuaaagaaaaugcugggucccucugcuguagacauagggaaugggugcuucgaaaccaaacacaagugcaaccagaccugcuuagacaggauagcugcuggcaccuuuaaugcaggagaauuuucucuucccacuuuugauucacugaauauuacugcugcaucuuuaaaugaugauggauuggauaaccauacuauacugcucuacuacucaacugcugcuucuaguuuggcuguaacauugaugauagcuauuuuuauuguuuauaugaucuccagagacaauguuucuugcuccaucugucuauaa

SEQ ID NO: 58786 - RNA, 1755 nt, Artificial Sequence
  derived and/or modified CDS sequence (wt) from hemagglutinin__InfluenzaB__AFJ80183
augaaggcaauaauuguacuacucaugguaguaacauccaaugcagaucgaaucugcacugggauaacaucgucaaacucaccucauguggucaaaacagcuacucaaggggaggucaaugugacuggugugauaccacugacaacaacaccaacaaaaucucauuuugcaaaucucaaaggaacaaagaccagagggaaacuaugcccaaccugccucaacugcacagaucuggauguggccuuaggcaguccaauguguguggggaucacaccuucggcaaaagcuucaauacuccacgaagucagaccuguuacauccggaugcuuuccuauaaugcacgacagaacaaaaaucagacagcuacccaaucuucucagaggauaugaaaaaaucagauuaucaacccaaaacguuaucaacauagaaaaggcaccaggaggacccuacagacuuggaaccucaggaucuugcccuaacgcuaccaguagaagcggauuuuucgcaacaauggcuugggcugucccaagggacaacaacaaaacagcaacgaauccacuaacaguagaaguaccacacaucuguacaaaagaagaagaccaaauuacuguuuggggguuccauucugauaacaaaacccaaaugaaaaaccucuauggagacucaaauccucaaaaguucaccucaucggcuaauggaguaaccacacauuauguuucucagauuggcggcuucccggaucaaacagaagacggagggcuaccacaaagcggcagaauuguuguugauuacauggugcaaaaaccugggaaaacaggaacaauugucuaucaaagagguauuuuguugccucaaaagguguggugcgcgaguggcaggagcaaaguaauaaaaggguccuugccuuuaauuggugaagcagauugccuucacgaaaaauacgguggauuaaacaaaagcaagccuuacuacacaggagaacaugcaaaagccauaggaaauugcccaauaugggugaaaacaccuuugaagcuugccaauggaaccaaauauagaccuccugcaaaacuauuaaaggaaagggguuucuucggagcuauugcugguuucuuagaaggaggaugggaaggaaugauugcagguuggcacggauacacaucucauggagcacauggaguggcaguggcagcagaccuuaagaguacgcaagaagccauaaacaagauaacaaaaaaucucaauucuuugagugagcuagaaguaaagaaucuucaaagacuaaguggugccauggaugaacuccacaacgaaauacucgagcuggaugagaaaguggaugaucucagagcugacacaauaagcucacaaauagaacuugcggucuugcuuuccaacgaaggaauaauaaacagugaagaugagcaucuauuggcacuugagagaaaacuaaagaaaaugcugggucccucugcuguagacauagggaauggaugcuucgaaaccaaacacaaaugcaaccagaccugcuuagacaggauagcugcuggcaccuuuaaugcaggagaauuuucucuucccacuuuugauucacugaauauuacugcugcaucuuuaaaugaugauggauuggauaaccauacuauacugcucuacuacucaacugcugcuucuaguuuggcuguaacauugaugauagcuauuuuuauuguuuauaugaucuccagagacaauguuucuugcuccaucugucuauaa

SEQ ID NO: 58787 - RNA, 1755 nt, Artificial Sequence
  derived and/or modified CDS sequence (wt) from hemagglutinin__InfluenzaB__AFJ80194
augaaggcaauaauuguacuacucaugguaguaacauccaaugcagaucgaaucugcacugggauaacaucgucaaacucaccucauguggucaaaacagcuacucaaggggaggucaaugugacuggugugauaccacugacaacaacaccaacaaaaucucauuuugcaaaucucaaaggaacaaagaccagagggaaacuaugcccaaccugucucaacugcacagaucuggauguggccuugggcagaccaauguguguggggaucacaccuucggcaaaagcuucaauacuucacgaagucagaccugucacauccggaugcuuuccuauaaugcacgacagaacaaaaaucagacagcuacccaaucuucucagaggauaugaaaaaaucagauuaucaacccagaacguuaucaacgcagaaaaggcaccaggaggacccuacagacuuggaaccucaggaucuugcccuaacgcuaccaguagaagcggauuuuucgcaacaauggcuugggcugucccaagggacaacaacaaaacagcaacgaacccacuaacaguagaaguaccauacaucuguacaaaagaagaagaccaaauuacuguuuggggguuccauucugauaacaaaacccaaaugaaaaaccucuauggagacucaaauccucaaaaguucaccucaucugcuaauggaguaaccacacauuauguuucucagauuggcggcuucccggaucaaacagaagacggagggcuaccacaaagcggcagaauuguuguugauuacauggugcaaaaaccugggaaaacaggaacaauugucuaucaaagagguauuuuguugccucaaaagguguggugcgcgaguggcaggagcaaaguaauaaaagggucauugccuuuaauuggugaagcagauugccuucacgaaaaauacgguggauuaaacaaaagcaagccuuacuacacaggagaacaugcaaaagccauaggaaauugcccaauaugggugaaaacaccuuugaagcuugccaauggaaccaaauauagaccuccugcaaaacuauuaaaggaaagggguuucuucggagcuauugcugguuucuuagaaggaggaugggaaggaaugauugcagguuggcacggauacacaucucacggagcacauggaguggcaguggcagcagaccuuaagaguacgcaagaagccauaaacaagauaacaaaaaaucucaauucuuugagugagcuagaaguaaagaaucuucaaagacuaaguggugccauggaugaacuccacaacgaaauacucgagcuggaugagaaaguggaugaucucagagcugacacaauaagcucacaaauagaacuugcagucuugcuuuccaacgaaggaauaauaaacagugaagaugagcaucuguuggcacuugagagaaaacuaaagaaaaugcugggucccucugcuguggacauagggaauggaugcuucgaaaccaaacacaagugcaaccagaccugcuuagacaggauagcugcuggcaccuuuaaugcaggagaauuuucucuucccacuuuugauucacugaauauuacugcugcaucuuuaaaugaugauggauuggauaaccauacuauacugcucuacuacucaacugcugcuucuaguuuggcuguaacauugaugauagcuauuuuuauuguuuauaugaucuccagagacaauguuucuugcuccaucugucuauaa

SEQ ID NO: 58788 - RNA, 1755 nt, Artificial Sequence; identical to SEQ ID NO: 58774
  derived and/or modified CDS sequence (wt) from hemagglutinin__InfluenzaB__AFJ80205

SEQ ID NO: 58789 - RNA, 1755 nt, Artificial Sequence
  derived and/or modified CDS sequence (wt) from hemagglutinin__InfluenzaB__AFJ80216
augaaggcaauaauuguacuacucaugguaguaacauccaaugcagaucgaaucugcacugggauaacaucgucaaacucaccucauguggucaaaacagcuacucaaggggaggucaaugugacuggugcgauaccacugacaacaacaccaacaaaaucucauuuugcaaaucucaaaggaacaaagaccagagggaaacuaugcccaaccugucucaacugcacagaucuggauguggccuugggcagaccaauguguguggggaucacaccuucggcaaaagcuucaauacuccacgaagucagaccuguuacauccggaugcuuuccuauaaugcacgacagaacaaaaaucagacagcuacccaaucuucucagaggauaugaaaaaaucagauuaucaacccaaaacguuaucaacgcagaaaaggcaccaggaggacccuacagacuuggaacuucaggaucuugcccuaaugcuaccaguaaaagcggauuuuucgcaacaauggcuugggcugucccaagggacaacaacaaaacagcaacgaauccacuaacaguagaaguaccacacaucuguacaaaagaagaagaccaaauuacuguuuggggguuccauucugauaacaaaacccaaaugaaaaaccucuauggagacucaaauccucaaaaguucaccucaucugcuaauggaauaaccacacauuauguuucucagauuggcggcuucccggaccaaacagaagacggagggcuaccacaaagcggcagaauuguuguugauuacauggugcaaaaaccugggaaaacaggaacaauugucuaucaaagagggauuuuguugccucaaaagguguggugcgcgaguggcaggagcaaaguaauaaaaggguccuugccuuuaauuggugaagcagauugccuucacgaaaaauacgguggauuaaacaaaagcaagccuuacuacacaggagaacaugcaaaagccauaggaaauugcccaauaugggugaaaacaccuuugaagcuugccaauggaaccaaauauagaccuccugcaaaacuauuaaaggaaagggguuucuucggagcuauugcugguuucuuagaaggaggaugggaaggaaugauugcagguuggcacggauacacaucucacggagcacacggaguggcaguggcagcagaccuuaagaguacgcaagaagccauaaacaagauaacaaaaaaucucaauucuuugagugagcuagaaguaaagaaccuucaaagacuaaguggugccauggaugaacuccauaacgaaauacucgagcuggaugagaaaguggaugaucucagagcugacacaauaagcucacaaauagaacuugcagucuugcuuuccaacgaaggaauaauaaacagugaagaugagcaucuauuggcacuugagagaaaacuaaagaaaaugcugggucccucugcuguagacauagggaauggaugcuucgaaaccaaacacaagugcaaccagaccugcuuagacaggauagcugcuggcaccuuuaaugcaggagaauuuucucuucccacuuuugauucacugaacauuacugcugcaucuuuaaaugaugauggauuggauaaccauacuauacugcucuacuacucaacugcugcuucuaguuuggcuguaacauugaugauagcuauuuuuauuguuuauaugaucuccagagacaauguuucuugcuccaucugucuauaa

SEQ ID NO: 58790 - RNA, 1755 nt, Artificial Sequence; identical to SEQ ID NO: 58774
  derived and/or modified CDS sequence (wt) from hemagglutinin__InfluenzaB__AFJ80227

SEQ ID NO: 58791 - RNA, 1758 nt, Artificial Sequence
  derived and/or modified CDS sequence (wt) from hemagglutinin__InfluenzaB__AFJ80238
augaaggcaauaauuguacuacucaugguaguaacauccaaugcagaucgaaucugcacugggauaacaucgucaaacucaccccauguggucaaaacugcuacucaaggggaggucaaugugacuggugugauaccacugacaacaacacccaccaaaucucauuuugcaaaucucaaaggaacaaaaaccagagggaaacuaugcccaaaaugccucaacugcacagaucuggacguggccuugggcagaccaaaaugcacggggaacauaccuucagcaaaaguuucaauacuccaugaagucagaccuguuacaucugggugcuuuccuauaaugcacgacagaacaaaaauuagacagcugcccaaucuucucagaggauacgaacauaucagguuaucaauucauaacguuaucaaugcagaaaaggcaccaggaggacccuacaaaauuggaaccucagggucuugcccuaacguuaccaauggaaacggauucuucgcaacaauggcuugggccgucccaaaaaacgacaacaacaaaacagcaacaaauucauuaacaauagaaguaccauacauuuguacagaaggagaagaccaaauuaccguuuggggguuccacucugauaacgaaacccaaauggcaaaacucuauggggacucaaagccccagaaguucaccucaucugccaacggagugaccacacauuacguuucacagauugguggcuucccaaaucaaacagaagacggaggacuaccacaaagugguagaauuguuguugauuacauggugcaaaaaucugggaaaacaggaacaauuaccuaucaaagagguauuuuauugccucaaaaaguguggugcgcaaguggcaggagcaagguaauaaaaggauccuugccuuuaauuggagaagcagauugccuccacgaaaaauacgguggauuaaacaaaagcaagccuuacuacacaggggaacaugcaaaagccauaggaaauugcccaauaugggugaaaacacccuugaagcuggccaauggaaccaaauauagaccuccugcaaaacuauuaaaggaaagggguuucuucggagcuauugcugguuucuuagaaggaggaugggaaggaaugauugcagguuggcacggauacacaucccauggggcacauggaguagcaguggcagcagaccuuaagaguacucaagaagccauaaacaagauaacaaaaaaucucaacucuuugagugagcuggaaguaaagaaucuucaaagacuaagcggugccauggaugaacuccacaacgaaauacuagaacuagacgagaaaguggaugaucucagagcugauacaauaagcucgcaaauagaacucgcagucuugcuuuccaaugaaggaauaauaaacagugaagaugagcaucucuuggcgcuugaaagaaaacugaagaaaaugcugggccccucugcuguagagauagggaauggaugcuucgaaaccaaacacaagugcaaccagaccugucucgacagaauagcugcuggcaccuuugaugcaggagaauuuucucuccccacuuuugauucacugaauauuacugcugcaucuuuaaaugacgauggauuggauaaucauacuauacugcuuuacuacucaacugcugcuuccaguuuggcuguaacauugaugauagcuaucuuuguuguuuauauggucuccagagacaauguuucuugcuccaucugucuauaa

SEQ ID NO: 58792 - RNA, 1755 nt, Artificial Sequence
  derived and/or modified CDS sequence (wt) from hemagglutinin__InfluenzaB__AFJ80656
augaaggcaauaauuguacuacucaugguaguaacauccaaugcagaucgaaucugcacugggauaacaucgucaaacucaccucauguggucagaacagcuacucaaggggaggucaaugugacuggugugauaccacugacaacaacaccaacaaaaucucauuuugcaaaucucaaaggaacaaagaccagagggaaacuaugcccaaccugucucaacugcacagaucuggauguggcauugggcagaccaauguguguggggaucacaccuucggcaaaagcuucaauacuccacgaagucagaccuguuacauccggaugcuuuccuauaaugcacgacagaacaaaaaucagacagcuacccaaucuucucagaggauaugaaaaaaucagauuaucaacccaaaacguuaucaacgcagaaaaggcaccaggaggacccuacagacuuggaaccucaggaucuugcccuaacgcuaccaguagaagcggauuuuucgcaacaauggcuugggcugucccaagggacaacaacaaaacagcaacaaauccacuaacaguagaaguaccacacaucuguacaaaagaagaagaccaaauuacuguuuggggguuccauucugauaacaaaacccaaaugaaaaaccucuauggagacucaaauccucaaaaguucaccucaucugcuaauggaguaaccacacauuaugucucucagauuggcggcuucccggaucaaacagaagacggagggcuaccacaaagcggcagaauuguuguugauuacauggugcaaaaaccuggaaaaacaggaacaauugucuaucaaagagguauuuuguugccucaaaagguguggugcgcgaguggcaggagcaaaguaauaaaaggguccuugccuuuaauuggugaagcagauugccuucacgaaaaauacgguggauuaaacaaaagcaagccuuacuacacaggagaacaugcaaaagccauaggaaauugcccaauaugggugaaaacaccuuugaagcuugccaauggaaccaaauauagaccuccugcaaaacuauuaaaggaaagggguuucuucggagcuauugcugguuucuuagaaggaggaugggaaggaaugauugcagguuggcacggauacacaucucacggagcacauggaguggcaguggcagcagaccuuaagaguacgcaagaagccauaaacaagauaacaaaaaaucucaauucuuugagugaacuagaaguaaagaaucuucaaagacuaaguggugccauggaugaacuccacaacgaaauacucgagcuggaugagaaaguggaugaucucagagcugacacaauaagcucacaaauagaacuugcagucuugcuuuccaacgaaggaauaauaaacagugaagaugagcaucuauuggcacuugagagaaaacuaaagaaaaugcugggucccucugcuguagacauagggaauggaugcuucgaaaccaaacacaagugcaaccagaccugcuuagacaggauagcugcuggcaccuuuaaugcaggagaauuuucucuucccacuuuugauucacugaauauuacugcugcaucuuuaaaugaugauggauuggauaaccauacuauacugcucuacuacucaacugcugcuucuaguuuggcuguaacauugaugauagccauuuuuauuguuuauaugaucuccagagacaauguuucuugcuccaucugucuauaa

SEQ ID NO: 58793 - RNA, 1755 nt, Artificial Sequence; identical to SEQ ID NO: 58774
  derived and/or modified CDS sequence (wt) from hemagglutinin__InfluenzaB__AFJ80667

SEQ ID NO: 58794 - RNA, 1755 nt, Artificial Sequence
  derived and/or modified CDS sequence (wt) from hemagglutinin__InfluenzaB__AFJ80678
augaaggcaauaauuguacuacucaugguaguaacauccaaugcagaucgaaucugcacugggauaacaucgucaaacucaccucauguggucaaaacagcuacucaaggggaggucaaugugacuggugugauaccacuaacaacaacaccaacaaaaucucauuuugcaaaucucaaaggaacaaagaccagagggaaacuaugcccaaccugucucaacugcacagaucuggauguggccuuaggcagcccaauguguguggggaucacaccuucggcaaaagcuucaauacuccacgaagucagaccuguuacauccggaugcuuuccuauaaugcacgacagaacaaaaaucagacagcuacccaaucuucucagaggauaugaaaaaaucagauuaucaacccaaaacguuaucaacauagaaaaggcaccaggaggacccuacagacuuggaaccucaggaucuugcccuaacgcuaccaguagaagcggauuuuucgcaacaauggcuugggcugucccaagggacaacaacaaaacagcaacgaauccacuaacaguagaaguaccacacaucuguacaaaagaagaggaccaaauuacuguuuggggguuccauucugauaacaaaacccaaaugaaaaaccucuauggagacucaaauccucaaaaguucaccucaucugcuaauggaguaaccacacauuauguuucucagauuggcggcuucccggaucaaacagaagacggagggcuaccacaaagcggcagaauuguuguugauuacauggugcaaaaaccugggaaaacaggaacaauugucuaucaaagagguauuuuguugccucaaaagguguggugcgcgaguggcaggagcaagguaauaaaaggguccuugccuuuaauuggugaagcagauugccuucacgaaaaauacgguggauuaaacaaaagcaagccuuacuacacaggagaacaugcaaaagccauaggaaauugcccaauaugggugaaaacaccuuugaagcuugccaauggaaccaaauauagaccuccugcaaaacuauuaaaggaaagggguuucuucggagcuauugcugguuucuuagaaggaggaugggaaggaaugauugcagguuggcacggauacacaucucauggagcacauggaguggcaguggcagcagaccuuaagaguacgcaagaagccauaaacaagauaacaaaaaaucucaauucuuugagugagcuagaaguaaagaaucuucaaagacuaaguggugccauggaugaacuccacaacgaaauacucgagcuggaugagaaaguggacgaucucagagcugacacaauaagcucacaaauagaacuugcggucuugcuuuccaacgaaggaauaauaaacagugaagaugagcaucuauuggcacuugagagaaaacuaaagaaaaugcugggucccucugcuguagacauagggaauggaugcuuugaaaccaaacacaaaugcaaccagaccugcuuagacaggauagcugcuggcaccuuuaaugcaggagaauuuucucuucccacuuuugauucacugaauauuacugcugcaucuuuaaaugaugauggauuggauaaccauacuauacugcucuacuacucaacugcugcuucuaguuuggcuguaacauugaugauagcuauuuuuauuguuuauaugaucuccagagacaauguuucuugcuccaucugucuauaa

SEQ ID NO: 58795 - RNA, 1755 nt, Artificial Sequence
  derived and/or modified CDS sequence (wt) from hemagglutinin__InfluenzaB__AFJ80689
augaaggcaauaauuguacuacucaugguaguaacauccaaugcagaucgaaucugcacugggauaacaucgucaaacucaccucauguggucaaaacagccacucaaggggaggucaaugugacugguguuauaccacugacaacaacaccaacaaaaucccauuuugcaaaucucaaaggaacaaagaccagagggaaacuaugcccaaccugucucaacugcacagaucuggauguggccuuaggcaguccaauguguguggggaucacaccuucggcaaaagcuucaauacuccacgaagucagaccuguuacauccggaugcuuuccuauaaugcacgacagaacaaaaaucagacagcuacccaaucuucucagaggauaugaaaaaaucagauuaucaacccaaaacguuaucaacauagaaaaggcaccaggaggacccuacagacuuggaaccucaggaucuugcccuaacgcuaccaguagaagcggauuuuucgcaacaauggcuugggcugucccaagggacaacaacaaaacagcaacgaauccacuaacaguagaaguaccacacaucuguacaaaagaagaagaccaaauuacuguuuggggguuccauucugauaacaaaacccaaaugaaaaaccucuauggagacucaaauccucaaaaguucaccucaucugcuaauggaguaaccacacauuauguuucucagauuggcggcuucccggaucaaacagaagacggagggcuaccacaaagcggcagaauuguuguugauuacauggugcaaaaaccugggaaaacaggaacaauugucuaucaaagagguauuuuguugccucaaaagguguggugcgcgaguggcaggagcaaaguaauaaaaggguccuugccuuuaauuggugaagcagauugccuucacgaaaaauacgguggauuaaacaaaagcaagccuuacuacacaggagaacaugcaaaagccauaggaaauugcccaauaugggugaaaacaccuuugaagcuugccaauggaaccaaauauagaccuccugcaaaacuauuaaaggaaagggguuucuucggggcuauugcugguuucuuagaaggaggaugggaaggaaugauugcagguuggcacggauacacaucucauggagcacauggaguggcaguggcagcagaccuuaagaguacgcaagaagccauaaacaagauaacaaaaaaucucaauucuuugagugagcuagaaguaaagaaucuucaaagacuaaguggugccauggaugaacuccacaacgaaauacucgagcuggaugagaaaguggaugaucucagagcugauacaauaagcucacaaauagaacuugcggucuugcuuuccaacgaaggaauaauaaacagugaagaugagcaucuauuggcacuugagagaaaacuaaagaaaaugcugggucccucugcuguagacauagggaauggaugcuucgaaaccaaacacaaaugcaaccagaccugcuuagacaggauagcugcuggcaccuuuaaugcaggagaauuuucucuucccacuuuugauucacugaauauuacugcugcaucuuuaaaugaugauggauuggauaaccauacuauacugcucuacuacucaacugcugcuucuaguuuggcuguaacauugaugauagcuauuuuuauuguuuauaugaucuccagagacaauguuucuugcuccaucugucuauaa

SEQ ID NO: 58796 - RNA, 1755 nt, Artificial Sequence
  derived and/or modified CDS sequence (wt) from hemagglutinin__InfluenzaB__AFJ80711
augaaggcaauaauuguacuacucaugguaguaacauccaaugcagaucgaaucugcacugggauaacaucuucaaacucaccucauguagucaaaacagccacucaaggggaggucaaugugacuggugugauaccacugacaacaacaccaauaaaaucuuauuuugcaaaucucaaaggaacaaagaccagagggaaacugugcccagacugucucaacuguacagaucuggauguggccuugggcagaccaauguguguggggaccacgccuucggcaaaagcuucaauacuccacgaagucagaccuguuacauccgggugcuuuccuauaaugcacgacagaacaaaaaucagacaacuacccaaucuucucagaggauaugaaaauaucagguuaucaacccaaaacguuaucgaugcagaaaaggcaccaggaggacccuacagacuuggaaccucaggaucuugcccuaacgcuaccaguaaaagcggauuuuucgcaacaauggcuugggcugucccaaaggacaacaacaaaaaugcaacgaacccacuaacaguagaaguaccauacguuuguacagaaggggaagaccaaauuacuguuuggggguuccauucagauaacaaaacccaaaugaagaaccucuauggagacucaaauccucaaaaguucaccucaucugcuaauggaguaaccacacauuauguuucucagauuggcggcuucccagaucaaacagaagacggaggacuaccacaaagcggcagaauuguuguugauuacauggugcaaaaaccugggaaaacaggaacaauugucuaucaaagagguguuuuguugccucaaaagguauggugcgcgaguggcaggagcaaaguaauaaaaggguccuugccuuuaauuggugaagcagauugccuucaugaaaaauacgguggauuaaacaaaagcaagccuuacuacacaggagaacaugcaaaagccauaggaaauugcccaauaugggugaaaacaccuuugaagcuugccaauggaaccaaauauagaccuccugcaaaacuauuaaaggaaagggguuucuucggagcuauugcugguuuccuagaaggaggaugggaaggaaugauugcagguuggcacggauauacaucucacggagcacauggaguggcaguggcggcagaccuuaagaguacgcaagaagcuauaaacaagauaacaaaaaaucucaauucuuugagugaacuagaaguaaagaaucuucaaagacuaaguggugccauggaugaacuccacaacgaaauacucgagcuggaugagaaaguggaugaucucagagcugacacuauaagcucgcaaauagaacuugcagucuugcuuuccaacgaaggaauaauaaacagugaagaugagcaucuauuggcacuugagagaaaacuaaagaaaaugcugggucccucugcuguagacauaggaaauggaugcuucgaaaccaaacacaagugcaaccagaccugcuuagacaggauagcugcugguaccuuuaaugcaggagaauuuucucuccccacuuuugauucacugaacauuacugcugcaucuuuaaaugaugauggauuggauaaccauaccauacugcucuauuacucaacugcugcuucuaguuuggcuguaacauugaugcuagcuauuuuuauuguuuauauggucuccagagacaacguuucaugcuccaucugucuauaa

SEQ ID NO: 58797 - RNA, 1755 nt, Artificial Sequence; identical to SEQ ID NO: 58796
  derived and/or modified CDS sequence (wt) from hemagglutinin__InfluenzaB__AFJ80722

SEQ ID NO: 58798 - RNA, 1755 nt, Artificial Sequence
  derived and/or modified CDS sequence (wt) from hemagglutinin__InfluenzaB__AFJ80733
augaaggcaauaauuguacuacucaugguaguaacauccaaugcagaucgaaucugcacugggauaacaucuucaaacucaccucauguggucaaaacagcuacucaaggggaggucaaugugacuggugugauaccacugacaacaacaccaacaaaaucuuauuuugcaaaucucaaaggaacaaggaccagagggaaacuaugcccagacugucucaacuguacagaucuggauguggccuugggcagaccaauguguauggggaccacaccuucugcgaaagcuucaauacuccacgaagucagaccuguuacauccgggugcuuuccuauaaugcacgacagaacaaaaaucaggcaacuacccaaucuucucagaggauaugaaaauaucagguuaucaacccaaaacguuaucgaugcagaaaaggcaccaggaggacccuacagacuuggaaccucaggaucuugcccugacgcuaccaauaaaagcggauuuuucgcaacaauggcuugggcugucccaaaggacaacaacaaaaaugcaacgaacccacuaacaguagaaguaccauacauuuguacagaaggggaagaccaaauuacuguuuggggguuccauucagauaacaaaacccaaaugaagaaccucuauggagacucaaauccucaaaaguucaccucaucugcuaauggaguaaccacacauuauguuucucagauuggcggcuucccagaucaaacagaagacggaggacuaccacaaagcggcagaauuguuguugauuacaugaugcaaaaaccugggaaaacaggaacaauugucuaucaaagagguguuuuguugccucaaaagguguggugcgcaaguggcaggagcaaaguaauaaaaggguccuugccuuuaauuggugaagcagauugccuucaugaaaaauacgguggauuaaacaaaagcaagccuuacuacacaggagaacaugcaaaagccauaggaaauugcccaauaugggugaaaacaccuuugaagcuugccaauggaaccaaauauagaccuccugcaaaacuauuaaaggaaagggguuucuucggagcuauugcugguuuccuagaaggaggaugggaaggaaugauugcagguuggcacggauacacaucucacggagcacauggaguggcaguggcggcagaccuuaagaguacacaggaagcuauaaacaagauaacaaaaaaucucaauucuuugagugagcuagaaguaaagaaucuucaaagacuaaguggugccauggaugaacuccacaacgaaauacucgagcuggaugagaaaguggaugaucucagagcugacacuauaagcucacaaauagaacuugcagucuugcuuuccaacgaaggaauaauaaacagugaagaugagcaucuauuggcacuugagagaaaacuaaagaaaaugcugggucccucugcuguagacauaggaaauggaugcuucgaaaccaaacacaagugcaaccagaccugcuuagacagaauagcugcuggcaccuuuaaugcaggagaauuuucucuccccacuuuugauucacugaacauuacugcugcaucuuuaaaugaugauggauuggauaaccauacuauacugcucuauuacucaacugcugcuucuaguuuggcuguaacauugaugcuagcuauuuuuauuguuuauauggucuccagagacaacguuucaugcuccaucugucuauaa

SEQ ID NO: 58799 - RNA, 1758 nt, Artificial Sequence
  derived and/or modified CDS sequence (wt) from hemagglutinin__InfluenzaB__AFJ80744
augaaggcaauaauuguacuacucaugguaguaacauccaaugcagaucgaaucugcacugggauaacaucgucaaacucaccacauguugucaaaacugcuacucaaggggaggucaaugugacugguguaauaccacugacaacaacacccaccaaaucucauuuugcaaaucucaaaggaacagaaaccagagggaaacuaugcccaaaaugccucaacugcacagaucuggacguggccuugggcagaccaaaaugcacggggaacauacccucggcaagaguuucaauacuccaugaagucagaccuguuacaucugggugcuuuccuauaaugcacgacagaacaaaaauuagacagcugccuaaccuucucagaggauacgaacauaucagguuaucaacucauaacguuaucaaugcagaaaaugcaccaggaggacccuacaaaauuggaaccucagggucuugcccuaacguuaccaauggaaacggauuuuucgcaacaauggcuugggccgucccaaaaaacgacaacaacaaaacagcaacaaauucauuaacaauagaaguaccauacauuuguacagaaggagaagaccaaauuaccguuuggggguuccacucugauaacgaaacccaaauggcaaagcucuauggggacucaaagccccagaaguucaccucaucugccaacggagugaccacacauuacguuucacagauugguggcuucccaaaucaaacagaagacggaggacuaccacaaagugguagaauuguuguugauuacauggugcaaaaaucugggaaaacaggaacaauuaccuaucaaagagguauuuuauugccucaaaaaguguggugcgcaaguggcaggagcaagguaauaaaaggauccuugccuuuaauuggagaagcagauugccuccacgaaaaauacgguggauuaaacaaaagcaagccuuacuacacaggggaacaugcaaaggccauaggaaauugcccaauaugggugaaaacacccuugaagcuggccaauggaaccaaauauagaccuccugcaaaacuauuaaaggaaagggguuucuucggagcuauugcugguuucuuagaaggaggaugggaaggaaugauugcagguuggcacggauacacaucccauggggcacauggaguagcgguggcagcagaccuuaagagcacucaagaggccauaaacaagauaacaaaaaaucucaacucuuugagugagcuggaaguaaagaaucuucaaagacuaagcggugccauggaugaacuccacaacgaaauacuagaacuagacgagaaaguggaugaucucagagcugauacaauaagcucacaaauagaacucgcaguucugcuuuccaaugaaggaauaauaaacagugaagaugagcaucucuuggcgcuugaaagaaagcugaagaaaaugcugggccccucugcuguagagauagggaauggaugcuuugaaaccaaacacaagugcaaccagaccugucucgacagaauagcugcugguaccuuugaugcaggagaauuuucucuccccacuuuugauucacugaauauuacugcugcaucuuuaaaugacgauggauuggauaaucauacuauacugcuuuacuacucaacugcugccuccaguuuggcuguaacauugaugauagcuaucuuuguuguuuauauggucuccagagacaauguuucuugcuccaucugucuauaa

SEQ ID NO: 58800 - RNA, 1758 nt, Artificial Sequence; identical to SEQ ID NO: 58553
  derived and/or modified CDS sequence (wt) from hemagglutinin__InfluenzaB__AFJ80755

SEQ ID NO: 58801 - RNA, 1758 nt, Artificial Sequence
  derived and/or modified CDS sequence (wt) from hemagglutinin__InfluenzaB__AFJ80781
augaaggcaauaauuguacuacucaugguaguaacauccaaugcagaucgaaucugcacugggauaacaucgucaaacucaccacauguugucaaaacugcuacucaaggggaggucaaugugacugguguaauaccacugacaacaacacccaccaaaucucauuuugcaaaucucaaaggaacagaaaccagagggaaacuaugcccaaaaugccucaacugcacagaucuggacguggccuugggcagaccaaaaugcacggggaacauacccucggcaagaguuucaauacuccaugaagucagaccuguuacaucugggugcuuuccuauaaugcacgacagaacaaaaauuagacagcugccuaaccuucucagaggauacgaacauaucagguuaucaacucauaacguuaucaaugcagaaaaugcaccaggaggacccuacaaaauuggaaccucaggaucuugcccuaacguuaccaauggaaacggauuuuucgcaacaauggcuugggccgucccaaaaaacgacaacaacaaaacagcaacaaauucauuaacaauagaaguaccauacauuuguacagaaggagaagaccaaauuaccguuuggggguuccacucugauaacgaaacccaaauggcaaagcucuauggggacucaaagccccagaaguucaccucaucugccaacggagugaccacacauuacguuucacagauugguggcuucccaaaucaaacagaagacggaggacuaccacaaagugguagaauuguuguugauuacauggugcaaaaaucugggaaaacaggaacaauuaccuaucaaagagguauuuuauugccucaaaaaguguggugcgcaaguggcaggagcaagguaauaaaaggauccuugccuuuaauuggagaagcagauugccuccacgaaaaauacgguggauuaaacaaaagcaagccuuacuacacaggggaacaugcaaaggccauaggaaauugcccaauaugggugaaaacacccuugaagcuggccaauggaaccaaauauagaccuccugcaaaacuauuaaaggaaagggguuucuucggagcuauugcugguuucuuagaaggaggaugggaaggaaugauugcagguuggcacggauacacaucccauggggcacauggaguagcgguggcagcagaccuuaagagcacucaagaggccauaaacaagauaacaaaaaaucucaacucuuuaagugagcuggaaguaaagaaucuucaaagacuaagcggugccauggacgaacuccacaacgaaauacuagaacuagacgagaaaguggaugaucucagagcugauacaauaagcucacaaauagaacucgcaguccugcuuuccaaugaaggaauaauaaacagugaagaugagcaucucuuggcgcuugaaagaaagcugaagaaaaugcugggccccucugcuguagagauagggaauggaugcuuugaaaccaaacacaagugcaaccagaccugucucgacagaauagcugcugguaccuuugaugcaggagaauuuucucuccccacuuuugauucacugaauauuacugcugcaucuuuaaaugacgauggauuggauaaucauacuauacugcuuuacuacucaacugcugccuccaguuuggcuguaacauugaugauagcuaucuuuguuguuuauauggucuccagagacaauguuuccugcuccaucugucuauaa

SEQ ID NO: 58802 - RNA, 1758 nt, Artificial Sequence
  derived and/or modified CDS sequence (wt) from hemagglutinin__InfluenzaB__AFJ80792
augaaggcaauaauuguacuacucaugguaguaacauccaaugcagaucgaaucugcacugggauaacaucgucaaacucaccacauguugucaaaacugcuacucaaggggaggucaaugugacugguguaauaccacugacaacaacacccaccaaaucucauuuugcaaaucucaaaggaacagaaaccagagggaaacuaugcccaaaaugccucaacugcacagaucuggacguggccuugggcagaccaaaaugcacggggaacauacccucggcaagaguuucaauacuccaugaagucagaccuguuacaucugggugcuuuccuauaaugcacgacagaacaaaaauuagacagcugccuaaccuucucagaggauacgaacauaucagguuaucaacucauaacguuaucaaugcagaaaaugcaccaggaggacccuacaaaauuggaaccucagggucuugcccuaauguuaccaauggaaacggauuuuucgcaacaauggcuugggccgucccaaaaaacgacaacaacaaaacagcaacaaauucauuaacaauagaaguaccauacauuuguacagaaggagaagaccaaauuaccguuuggggguuccacucugauaacgaaacccaaauggcaaagcucuauggggacucaaagccccagaaguucaccucaucugccaacggagugaccacacauuacguuucacagauugguggcuucccaaaucaaacagaagacggaggacuaccacaaagugguagaauuguuguugauuacauggugcaaaaaucugggaaaacaggaacaauuaccuaucaaagagguauuuuauugccucaaaaaguauggugcgcaaguggcaggagcaagguaauaaaaggauccuugccuuuaauuggagaagcagauugccuccacgaaaaauacgguggauuaaacaaaagcaagccuuacuacacaggggaacaugcaaaggccauaggaaauugcccaauaugggugaaaacacccuugaagcuggccaauggaaccaaauauagaccuccugcaaaacuauuaaaggaaagggguuucuucggagcuauugcugguuucuuagaaggaggaugggaaggaaugauugcagguuggcacggauacacaucccauggggcacauggaguagcgguagcagcagaccuuaagagcacucaagaggccauaaacaagauaacaaaaaaucucaacucuuugagugagcuggaaguaaagaaucuucaaagacuaagcggugccauggaugaacuccacaacgaaauacuagaacuagacgagaaaguggaugaucucagagcugauacaauaagcucacaaauagaacucgcaguccugcuuuccaaugaaggaauaauaaacagugaagaugagcaucucuuggcgcuugaaagaaagcugaagaaaaugcugggccccucugcuguagagauagggaauggaugcuuugaaaccaaacacaagugcaaccagaccugucucgacagaauagcugcugguaccuuugaugcaggagaauuuucucuccccacuuuugauucacugaauauuacugcugcaucuuuaaaugacgauggauuggauaaucauacuauacugcuuuacuacucaacugcugccuccaguuuggcuguaacauugaugauagcuaucuuuguuguuuauauggucuccagagacaauguuucuugcuccaucugucuauaa

SEQ ID NO: 58803 - RNA, 1758 nt, Artificial Sequence; identical to SEQ ID NO: 58553
  derived and/or modified CDS sequence (wt) from hemagglutinin__InfluenzaB__AFJ80803

SEQ ID NO: 58804 - RNA, 1758 nt, Artificial Sequence; identical to SEQ ID NO: 58553
  derived and/or modified CDS sequence (wt) from hemagglutinin__InfluenzaB__AFJ80814

SEQ ID NO: 58805 - RNA, 1758 nt, Artificial Sequence
  derived and/or modified CDS sequence (wt) from hemagglutinin__InfluenzaB__AFJ80825
augaaggcaauaauuguacuacucaugguaguaacauccaaugcagaucgaaucugcacugggauaacaucgucaaacucaccacauguugucaaaacugcuacucaaggggaggucaaugugacugguguaauaccacugacaacaacacccaccaaaucucauuuugcaaaucucaaaggaacagaaaccagagggaaacuaugcccaaaaugccucaacugcacagaucuggacguggccuugggcagaccaaaaugcacggggaacauacccucggcaagaguuucaauacuccaugaagucagaccuauuacaucugggugcuuuccuauaaugcacgacagaacaaaaauuagacagcugccuaaccuucucagaggauacgaacauaucagguuaucaacucauaacguuaucaaugcagaaaaugcaccaggaggacccuacaaaauuggaaccucagggucuugcccuaacguuaccaauggaaacggauuuuucgcaacaauggcuugggccgucccaaaaaacgacaacaacaaaacagcaacaaauucauuaacaauagaaguaccauacauuuguacagaaggagaagaccaaauuaccguuuggggguuccacucugauaacgaaacccaaauggcaaagcucuauggggacucaaagccccagaaguucaccucaucugccaacggagugaccacacauuacguuucacagauugguggcuucccaaaucaaacagaagacggaggacuaccacaaagugguagaauuguuguugauuacauggugcaaaaaucugggaaaacaggaacaauuaccuaucaaagagguauuuuauugccucaaaaaguguggugcgcaaguggcaggagcaagguaauaaaaggauccuugccuuuaauuggagaagcagauugccuccacgaaaaauacgguggauuaaacaaaagcaagccuuacuacacaggggaacaugcaaaggccauaggaaauugcccaauaugggugaaaacacccuugaagcuggccaauggaaccaaauauagaccuccugcaaaacuauuaaaggaaagggguuucuucggagcuauugcugguuucuuagaaggaggaugggaaggaaugauugcagguuggcacggauacacaucccauggggcacauggaguagcgguggcagcagaccuuaagagcacucaagaggccauaaacaagauaacaaaaaaucucaacucuuugagugagcuggaaguaaagaaucuucaaagacuaagcggugccauggaugaacuccacaacgaaauacuagaacuagacgagaaaguggaugaucucagagcugauacaauaagcucacaaauagaacucgcaguccugcuuuccaaugaaggaauaauaaacagugaagaugagcaucucuuggcgcuugaaagaaagcugaagaaaaugcugggccccucugcuguagagauagggaauggaugcuuugaaaccaaacacaagugcaaccagaccugucucgacagaauagcugcugguaccuuugaugcaggagaauuuucucuccccacuuuugauucacugaauauuacugcugcaucuuuaaaugacgauggauuggauaaucauacuauacugcuuuacuacucaacugcugccuccaguuuggcuguaacauugaugauagcuaucuuuguuguuuauauggucuccagagacaauguuucuugcuccaucugucuauaa

SEQ ID NO: 58806 - RNA, 1758 nt, Artificial Sequence
  derived and/or modified CDS sequence (wt) from hemagglutinin__InfluenzaB__AFJ80836
augaaggcaauaauuguacuacucaugguaguaacauccaaugcagaucgaaucugcacugggauaacaucgucaaacucaccacauguugucaaaacugcuacucaaggggaggucaaugugacugguguaauaccacugacaacaacacccaccaaaucucauuuugcaaaucucaaaggaacagaaaccagagggaaacuaugcccaaaaugccucaacugcacagaucuggacguggccuugggcagaccaaaaugcacggggaacauacccucggcaagaguuucaauacuccaugaagucagaccuguuacaucugggugcuuuccuauaaugcacgacagaacaaaaauuagacagcugccuaaccuucucagaggauacgaacauaucagguuaucaacucauaacguuaucaaugcagaaaaugcaccaggaggacccuacaaaauuggaaccucagggucuugcccuaacguuaccaauggaaacggauuuuucgcaacaauggcuugggccgucccaaaaaacgacaacaacaaaacagcaacaaauucauuaacaauagaaguaccauacauuuguacagaaggagaagaccaaauuaccguuuggggguuccacucugauaacgaaacccaaauggcaaagcucuauggggacucaaagccccagaaguucaccucuucugccaacggagugaccacacauuacguuucacagauugguggcuucccaaaucaaacagaagacggaggacuaccacaaagugguagaauuguuguugauuacauggugcaaaaaucugggaaaacaggaacaauuaccuaucaaagagguauuuuauugccucaaaaaguguggugcgcaaguggcaggagcaagguaauaaaaggauccuugccuuuaauuggagaagcagauugccuccacgaaaaauacgguggauuaaacaaaagcaagccuuacuacacaggggaacaugcaaaggccauaggaaauugcccaauaugggugaaaacacccuugaagcuggccaauggaaccaaauauagaccuccugcaaaacuauuaaaggaaagggguuucuucggagcuauugcugguuucuuagaaggaggaugggaaggaaugauugcagguuggcacggauacacaucccauggggcacauggaguagcgguggcagcagaccuuaagagcacucaagaggccauaaacaagauaacaaaaaaucucaacucuuugagugagcuggaaguaaagaaucuucaaagacuaagcggugccauggaugaacuccacaacgaaauacuagaacuagacgagaaaguggaugaucucagagcugauacaauaagcucacaaauagaacucgcaguccugcuuuccaaugaaggaauaauaaacagugaagaugagcaucucuuggcgcuugaaagaaagcugaagaaaaugcugggccccucugcuguagagauagggaauggaugcuuugaaaccaaacacaagugcaaccagaccugucucgacagaauagcugcugguaccuuugaugcaggagaauuuucucuccccacuuuugauucacugaauauuacugcugcaucuuuaaaugacgauggauuggauaaucauacuauacugcuuuacuacucaacugcugccuccaguuuggcuguaacauugaugauagcuaucuuuguuguuuauauggucuccagagacaauguuucuugcuccaucugucuauaa

SEQ ID NO: 58807 - RNA, 1758 nt, Artificial Sequence
  derived and/or modified CDS sequence (wt) from hemagglutinin__InfluenzaB__AFJ80847
augaaggcaauaauuguacuacucaugguaguaacauccaaugcagaucgaaucugcacugggauaacaucgucaaacucaccacauguugucaaaacugcuacucaaggggaggucaaugugacugguguaauaccacugacaacaacacccaccaaaucucauuuugcaaaucucaaaggaacagaaaccagagggaaacuaugcccaaaaugccucaacugcacagaucuggacguggccuugggcagaccaaaaugcacggggaacauacccucggcaagaguuucaauacuccaugaagucagaccuguuacaucugggugcuuuccuauaaugcacgacagaacaaaaauuagacagcugccuaaccuccucagaggauacgaacauaucagguuaucaacucauaacguuaucaaugcagaaaaugcaccaggaggacccuacaaaauuggaaccucagggucuugcccuaacguuaccaauggaaacggauuuuuugcaacaauggcuugggccgucccaaaaaacgacaacaacaaaacagcaacaaauucauuaacaauagaaguaccauacauuuguacagaaggagaagaccaaauuaccguuuggggguuccacucugauaacgaagcccaaauggcaaagcucuauggggacucaaaaccccagaaguucaccucaucugccaacggagugaccacacauuacguuucacagauugguggcuucccaaaucaaacagaagacggaggacuaccacaaagugguagaauuguuguugauuacauggugcaaaaaucugggaaaacaggaacaauuaccuaucaaagagguauuuuauugccucaaaaaguguggugcgcaaguggcaggagcaagguaauaaaaggauccuugccuuuaauuggagaagcagauugccuccacgaaaaauacgguggauuaaacaaaagcaagccuuacuacacaggggaacaugcaaaggccauaggaaauugcccaauaugggugaaaacacccuugaagcuggccaauggaaccaaauauagaccuccugcaaaacuauuaaaggaaagggguuucuucggagcuauugcugguuucuuagaaggaggaugggaaggaaugauugcagguuggcacggauacacaucccauggggcacauggaguagcgguggcagcagaccuuaagagcacucaagaggccauaaacaagauaacaaaaaaucucaacucuuugagugagcuggaaguaaagaaucuucaaagacuaagcggugccauggaugaacuccacaacgaaauacuagaacuagacgagaaaguggaugaucucagagcugauacaauaagcucacaaauagaacucgcaguccugcuuuccaaugaaggaauaauaaacagugaagaugagcaucucuuggcgcuugaaagaaagcugaagaaaaugcugggccccucugcuguagagauagggaauggaugcuuugaaaccaaacacaagugcaaccagaccugucucgacagaauagcugcugguaccuuugaugcaggagaauuuucucuccccacuuuugauucacugaauauuacugcugcaucuuuaaaugacgauggauuggauaaucauacuauacugcuuuacuacucaacugcugccuccaguuuggcuguaacauugaugauagcuaucuuuguuguuuauauggucuccagagacaauguuucuugcuccaucugucuauaa

SEQ ID NO: 58808 - RNA, 1758 nt, Artificial Sequence
  derived and/or modified CDS sequence (wt) from hemagglutinin__InfluenzaB__AFJ80858
augaaggcaauaauuguacuacucaugguaguaacauccaaugcagaucgaaucugcacugggauaacaucaucaaacucaccacauguugucaaaacugcuacucaaggggaggucaaugugacugguguaauaccacugacaacaacacccaccaaaucucauuuugcaaaucucaaaggaacagaaaccagagggaaacuaugcccaaaaugccucaacugcacagaucuggacguggccuugggcagaccaaaaugcacggggaacauacccucggcaagaguuucaauacuccaugaagucagaccuguuacaucugggugcuuuccuauaaugcacgacagaacaaaaauuagacagcugccuaaccuucucagaggauacgaacauaucagguuaucaacucauaacguuaucaaugcagaaaaugcaccaggaggacccuacaaaauuggaaccucagggucuugcccuaacguuaccaauggaaacggauuuuucgcaacaauggcuugggccgucccaaaaaacgacaacaacaaaacagcaacaaauucauuaacaauagaaguaccauacauuuguacagaaggagaagaccaaauuaccguuuggggguuccacucugauaacgaaacccaaauggcaaagcucuauggagacucaaagccccagaaguucaccucaucugccaacggagugaccacacauuacguuucacagauugguggcuucccaaaucaaacagaagacggaggacuaccacaaagugguagaauuguuguugauuacauggugcaaaaaucugggaaaacaggaacgauuaccuaucaaagagguauuuuauugccucaaaaaguguggugcgcaaguggcaggagcaagguaauaaaaggauccuugccuuuaauuggagaagcagauugccuccacgaaaaauacgguggauuaaacaaaagcaagccuuacuacacaggggaacaugcaaaagccauaggaaauugcccaauaugggugaaaacacccuugaagcuggccaauggaaccaaauauagaccuccugcaaaacuauuaaaggaaagggguuucuucggagcuauugcugguuucuuagaaggaggaugggaaggaaugauugcagguuggcacggauacacaucccauggggcacauggaguagcgguggcagcagaccuuaagagcacucaagaggccauaaacaagauaacaaaaaaucucaacucuuugagugagcuggaaguaaagaaucuucaaagacuaagcggugccauggaugaacuccacaacgaaauacuagaacuagacgagaaaguggaugaucucagagcugauacaauaagcucacaaauagaacucgcaguccuacuuuccaaugaaggaauaauaaacagugaagaugagcaucucuuggcgcuugaaagaaagcugaagaaaaugcugggccccucugcuguagagauagggaauggaugcuuugaaaccaaacacaagugcaaccagaccugucucgacagaauagcugcugguaccuuugaugcaggagaauuuucucuccccacuuuugauucacugaauauuacugcugcaucuuuaaaugacgauggauuggauaaucauacuauacugcuuuacuacucaacugcugccuccaguuuggcuguaacauugaugauagcuaucuuuguuguuuauauggucuccagagacaauguuucuugcuccaucugucuauaa

SEQ ID NO: 58809 - RNA, 1758 nt, Artificial Sequence
  derived and/or modified CDS sequence (wt) from hemagglutinin__InfluenzaB__AFJ80869
augaaggcaauaauuguacuacucaugguaguaacauccaaugcagaucgaaucugcacugggauaacaucgucaaacucaccacauguugucaaaacugcuacucaaggggaggucaaugugacugguguaauaccacugacaacaacacccaccaaaucucauuuugcaaaucucaaaggaacagaaaccagagggaaacuaugcccaaaaugccucaacugcacagaucuggacguggccuugggcagaccaaaaugcacggggaacauacccucggcaagaguuucaauacuccaugaagucagaccuguuacaucugggugcuuuccuauaaugcacgacagaacaaaaauuagacagcugccuaaccuucucagaggauacgaacauaucagguuaucaacucauaacguuaucaaugcagaaaaugcaccaggaggacccuacaaaauuggaaccucagggucuugcccuaacguuaccaauggaaacggauuuuucgcaacaauggcuugggccgucccaaaaaacgacaacaacaaaacagcaacaaauucauuaacaauagaaguaccauacauuuguacagaaggagaagaccaaaucaccguuuggggguuccacucugauaacgaaacccaaauggcaaagcucuauggggacucaaagccccagaaguucaccucaucugccaacggagugaccacacauuacguuucacagauugguggcuucccaaaucaaacagaagacggaggacuaccacaaagugguagaauuguuguugauuacauggugcaaaaaucugggaaaacaggaacaauuaccuaucaaagagguauuuuauugccucaaaaaguguggugcgcaaguggcaggagcaagguaauaaaaggauccuugccuuuaauuggagaagcagauugccuccacgaaaaauacgguggauuaaacaaaagcaagccuuacuacacaggggaacaugcaaaggccauaggaaauugcccaauaugggugaaaacacccuugaagcuggccaauggaaccaaauauagaccuccugcaaaacuauuaaaggaaagggguuucuucggagcuauugcugguuucuuagaaggaggaugggaaggaaugauugcagguuggcacggauacacaucccauggggcacauggaguagcgguggcagcagaccuuaagagcacucaagaggccauaaacaagauaacaaaaaaucucaacucuuugagugagcuggaaguaaagaaucuucaaagacuaagcggugccauggaugaacuccacaaugaaauacuagaacuagacgagaaaguggaugaucucagagcugauacaauaagcucacaaauagaacucgcaguccugcuuuccaaugaaggaauaauaaacagugaagaugagcaucucuuggcgcuugaaagaaagcugaagaaaaugcugggccccucugcuguagagauagggaauggaugcuuugaaaccaaacacaagugcaaccagaccugucucgacagaauagcugcugguaccuuugaugcaggagaauuuucucuccccacuuuugauucacugaauauuacugcugcaucuuuaaaugacgauggauuggauaaucauacuauacugcuuuacuacucaacugcugccuccaguuuggcuguaacauugaugauagcuaucuuuguuguuuauauggucuccagagacaauguuucuugcuccaucugucuauaa

SEQ ID NO: 58810 - RNA, 1758 nt, Artificial Sequence
  derived and/or modified CDS sequence (wt) from hemagglutinin__InfluenzaB__AFJ80880
augaaggcaauaauuguacuacucaugguaguaacauccaaugcagaucgaaucugcacugggauaacaucgucaaacucaccacauguugucaaaacugcuacucaaggggaggucaaugugacugguguaauaccacugacaacaacacccaccaaaucucauuuugcaaaucucaaaggaacagaaaccagagggaaacuaugcccaaaaugccucaacugcacagaucuggacguggccuugggcagaccaaaaugcacggggaacauacccucggcaagaguuucaauacuccaugaagucagaccuguuacaucugggugcuuuccuauaaugcacgacagaacaaaaauuagacagcugccuaaccuucucagaggauacgaacacaucagguuaucaacucauaacguuaucaaugcagaaaaugcaccaggaggacccuacaaaauuggaacuucagggucuugcccuaacguuaccaauggaaacggauuuuucgcaacaauggcuugggccgucccaaaaaacgacaacaacaaaacagcaacaaauucauuaacaauagaaguaccauacauuuguacagaaggagaagaccaaauuaccguuuggggguuccacucugauaacgaaacccaaauggcaaagcucuauggggacucaaagccccagaaguucaccucaucugccaacggagugaccacacauuacguuucacagauugguggcuucccaaaucaaacagaagacggaggacuaccacaaagugguagaauuguuguugauuacauggugcaaaaaucugggaaaacaggaacaauuaccuaucaaagagguauuuuauugccucaaaaaguguggugcgcaaguggcaggagcaagguaauaaaaggauccuugccuuuaauuggagaagcagauugccuccacgaaaaauacgguggauuaaacaaaagcaagccuuacuacacaggggaacaugcaaaggccauaggaaauugcccaauaugggugaaaacacccuugaagcuggccaauggaaccaaauauagaccuccugcaaaacuauuaaaggaaagggguuucuucggagcuauugcugguuucuuagaaggaggaugggaaggaaugauugcagguuggcacggauacacaucccauggggcacauggaguagcgguggcagcagaccuuaagagcacucaagaggccauaaacaagauaacaaaaaaucucaacucuuugagugagcuggaaguaaagaaucuucaaagacuaagcggugccauggaugaacuccacaacgaaauacuagaacuagacgagaaaguggaugaucucagagcugauacaauaagcucacaaauagaacucgcaguccugcuuuccaaugaaggaauaauaaacagugaagaugagcaucucuuggcgcuugaaagaaagcugaagaaaaugcugggccccucugcuguagagauagggaauggaugcuuugaaaccaaacacaagugcaaccagaccugucucgacagaauagcugcugguaccuuugaugcaggagaauuuucucuccccacuuuugauucacugaauauuacugcugcaucuuuaaaugacgauggauuggauaaucauacuauacugcuuuacuacucaacugcugccuccaguuuggcuguaacauugaugauagcuaucuuuguuguuuauauggucuccagagacaauguuucuugcuccaucugucuauaa

SEQ ID NO: 58811 - RNA, 1758 nt, Artificial Sequence; identical to SEQ ID NO: 58776
  derived and/or modified CDS sequence (wt) from hemagglutinin__InfluenzaB__AFJ80891

SEQ ID NO: 58812 - RNA, 1758 nt, Artificial Sequence
  derived and/or modified CDS sequence (wt) from hemagglutinin__InfluenzaB__AFJ80902
augaaggcaauaauuguacuacucaugguaguaacauccaaugcagaucgaaucugcacugggauaacaucgucaaacucaccacauguugucaaaacugcuacucaaggggaggucaaugugacugguguaauaccacugacaacaacacccaccaaaucucauuuugcaaaucucaaaggaacagaaaccagagggaaacuaugcccaaaaugccucaacugcacagaucuggacguggccuugggcagaccaaaauguacggggaacauacccucggcaagaguuucaauacuccaugaagucagaccuguuacaucugggugcuuuccuauaaugcacgacagaacaaaaauuagacagcugccuaaccuucucagaggauacgaacauaucagguuaucaacucauaacguuaucaaugcagaaaaugcaccaggaggacccuacaaaauuggaaccucagggucuugcccuaacguuaccaauggaaacggauuuuucgcaacaauggcuugggccgucccaaaaaacgacaacaacaaaacagcaacaaauucauuaacaauagaaguaccauacauuuguacagaaggagaagaccaaauuaccguuuggggguuccacucugauaacgaaauccaaauggcaaagcucuauggggacucaaagccccagaaguucaccucaucugccaacggagugaccacacauuacguuucacagauugguggcuucccaaaucaaacagaagacggaggacuaccacaaagugguagaauuguuguugauuacauggugcaaaaaucugggaaaacaggaacaauuaccuaucaaagagguauuuuauugccucaaaaaguguggugcgcaaguggcaggagcaagguaauaaaaggauccuugccuuuaauuggagaagcagauugccuccacgaaaaauacgguggauuaaacaaaagcaagccuuacuacacaggggaacaugcaaaggccauaggaaauugcccaauaugggugaaaacacccuugaagcuggccaauggaaccaaauauagaccuccugcaaaacuauuaaaggaaagggguuucuucggagcuauugcugguuucuuagaaggaggaugggaaggaaugauugcagguuggcacggauacacaucccauggggcacauggaguagcgguggcagcagaccuuaagagcacucaagaggccauaaacaagauaacaaaaaaucucaacucuuugagugagcuggaaguaaagaaucuucaaagacuaagcggugccauggaugaacuccacaacgaaauacuagaacuagacgagaaaguggaugaucucagagcugauacaauaagcucacaaauagaacucgcaguccugcuuuccaaugaaggaauaauaaacagugaagaugagcaucucuuggcgcuugaaagaaagcugaagaaaaugcugggccccucugcuguagagauagggaauggaugcuuugaaaccaaacacaagugcaaccagaccugucucgacagaauagcugcugguaccuuugaugcaggagaauuuucucuccccacuuuugauucacugaauauuacugcugcaucuuuaaaugacgauggauuggauaaucauacuauacugcuuuacuacucaacugcugccuccaguuuggcuguaacauugaugauagcuaucuuuguuguuuauauggucuccagagacaauguuucuugcuccaucugucuauaa

SEQ ID NO: 58813 - RNA, 1758 nt, Artificial Sequence
  derived and/or modified CDS sequence (wt) from hemagglutinin__InfluenzaB__AFJ80913
augaaggcaauaauuguacuacucaugguaguaacauccaaugcagauagaaucugcacugggauaacaucgucaaacucaccacauguugucaaaacugcuacucaaggggaggucaaugugacugguguaauaccacugacaacaacacccaccaaaucucauuuugcaaaucucaaaggaacagaaaccagagggaaacuaugcccaaaaugccucaacugcacagaucuggacguggccuugggcagaccaaaaugcacggggaacauacccucggcaagaguuucaauacuccaugaagucagaccuguuacaucugggugcuuuccuauaaugcacgacagaacaaaaauuagacagcugccuaaccuucucagaggauacgaacauaucagguuaucaacucauaacguuaucaaugcagaaaaugcaccaggaggacccuacaaaauuggaaccucagggucuugcccuaacguuaccaauggaaacggauuuuucgcaacaauggcuugggccgucccaaaaaacgacaacaacaaaacagcaacaaauucauuaacaauagaaguaccauacauuuguacagaaggagaagaccaaauuaccguuuggggguuccacucugauaacgaaacccaaauggcaaagcucuauggggacucaaagccccagaaguucaccucaucugccaacggagugaccacacauuacguuucacagauugguggcuucccaaaucaaacagaagacggaggacuaccacaaagugguagaauuguuguugauuacauggugcaaaaaucugggaaaacaggaacaauuaccuaucaaagagguauuuuauugccucaaaaaguguggugcgcaaguggcaggagcaagguaauaaaaggauccuugccuuuaauuggagaagcagauugccuccacgaaaaauacgguggauuaaacaaaagcaagccuuacuacacaggggaacaugcaaaggccauaggaaauugcccaauaugggugaaaacacccuugaagcuggccaauggaaccaaauauagaccuccugcaaaacuauuaaaggaaagggguuucuucggagcuauugcugguuucuuagaaggaggaugggaaggaaugauugcagguuggcacggauacacaucccauggggcacauggaguagcgguggcagcagaccuuaagagcacucaagaggccauaaacaagauaacaaaaaaucucaacucuuugagugagcuggaaguaaagaaucuucaaagacuaagcggugccauggaugaacuccacaacgaaauacuagaacuagacgagaaaguggaugaucucagagcugauacaauaagcucacaaauagaacucgcaguccugcuuuccaaugaaggaauaauaaacagugaagaugagcaucucuuggcgcuugaaagaaagcugaagaaaaugcugggccccucugcuguagagauagggaauggaugcuuugaaaccaaacacaagugcaaccagaccugucucgacagaauagcugcugguaccuuugaugcaggagaauuuucucuccccacuuuugauucacugaauauuacugcugcaucuuuaaaugacgauggauuggauaaucauacuauacugcuuuacuacucaacugcugccuccaguuuggcuguaacauugaugauagcuaucuuuguuguuuauauggucuccagagacaauguuucuugcuccaucugucuauaa

SEQ ID NO: 58814 - RNA, 1758 nt, Artificial Sequence
  derived and/or modified CDS sequence (wt) from hemagglutinin__InfluenzaB__AFJ80924
augaaggcaauaauuguacuacucaugguaguaacauccaaugcagaucgaaucugcacugggauaacaucgucaaacucaccacauguugucaaaacugcuacucaaggggaggucaaugugacugguguaauaccacugacaacaacacccaccaaaucucauuuugcaaaucucaaaggaacagaaaccagagggaaacuaugcccaaaaugccucaacugcacagaucuggacguagccuugggcagaccaaaaugcacggggaacauacccucggcaagaguuucaauacuccaugaagucagaccuguuacaucugggugcuuuccuauaaugcacgacagaacaaaaauuagacagcugccuaaccuucucagaggauacgaacauaucagguuaucaacucauaacguuaucaaugcagaaaaugcaccaggaggacccuacaaaauuggaaccucagggucuugcccuaacguuaccaauggaaacggauuuuucgcaacaauggcuugggccgucccaaaaaacgacaacaacaaaacagcaacaaauucauuaacaauagaaguaccauacauuugugcagaaggagaagaccaaauuaccguuuggggguuccacucugauaacgaaacccaaauggcaaagcucuauggggacucaaagccccagaaauucaccucaucugccaacggagugaccacacauuacguuucacagauugguggcuucccaaaucaaacagaagacggaggacuaccacaaagugguagaauuguuguugauuacauggugcaaaaaucugggaaaacaggaacaauuaccuaucaaagagguauuuuauugccucaaaaaguguggugcgcaaguggcaggagcaagguaauaaaaggauccuugccuuuaauuggagaagcagauugccuccacgaaaaauacgguggauuaaacaaaagcaagccuuacuacacaggggaacaugcaaaggccauaggaaauugcccaauaugggugaaaacacccuugaagcuggccaauggaaccaaauauagaccuccugcaaaacuauuaaaggaaagggguuucuucggagcuauugcugguuucuuagaaggaggaugggaaggaaugauugcagguuggcacggauacacaucccauggggcacauggaguagcgguggcagcagaccuuaagagcacucaagaggccauaaacaagauaacaaaaaaucucaacucuuugagugagcuggaaguaaagaaucuucaaagacuaagcggugccauggaugaacuccacaacgaaauacuagaacuagacgagaaaguggaugaucucagagcugauacaauaagcucacaaauagaacucgcaguccuacuuuccaaugaaggaauaauaaacagugaagaugagcaucucuuggcgcuugaaagaaagcugaagaaaaugcugggccccucugcuguagagauagggaauggaugcuuugaaaccaaacacaagugcaaccagaccugucucgacagaauagcugcugguaccuuugaugcaggagaauuuucucuccccacuuuugauucacugaauauuacugcugcaucuuuaaaugacgauggauuggauaaucauacuauacugcuuuacuacucaacugcugccuccaguuuggcuguaacauugaugauagcuaucuuuguuguuuauauggucuccagagacaauguuucuugcuccaucugucuauaa

SEQ ID NO: 58815 - RNA, 1758 nt, Artificial Sequence; identical to SEQ ID NO: 58812
  derived and/or modified CDS sequence (wt) from hemagglutinin__InfluenzaB__AFJ80935

SEQ ID NO: 58816 - RNA, 1755 nt, Artificial Sequence; identical to SEQ ID NO: 58777
  derived and/or modified CDS sequence (wt) from hemagglutinin__InfluenzaB__AFJ80946

SEQ ID NO: 58817 - RNA, 1758 nt, Artificial Sequence
  derived and/or modified CDS sequence (wt) from hemagglutinin__InfluenzaB__AFJ80957
augaaggcaauaauuguacuacucaugguagcaacauccaaugcagaucgaaucugcacugggauaacaucgucaaacucaccacauguugucaaaacugcuacucaaggggaggucaaugugacugguguaauaccacugacaacaacacccaccaaaucucauuuugcaaaucucaaaggaacagaaaccagagggaaacuaugcccaaaaugccucaacugcacagaucuggacguggccuugggcagaccaaaaugcacggggaacauacccucggcaagaguuucaauacuccaugaagucagaccuguuacaucugggugcuuuccuauaaugcacgacagaacaaaaauuagacagcugccuaaccuucucagaggauacgaacauaucagguuaucaacucauaacguuaucaaugcagaaaaugcaccaggaggacccuacaaaauuggaaccucagggucuugcccuaacguuaccaauggaaauggauuuuucgcaacaauggcuugggccgucccaaaaaacgacaacaacaaaacagcaacaaauucauuaacaauagaaguaccauacauuuguacagaaggagaagaccaaauuaccguuuggggguuccacucugauaacgaaacccaaauggcaaagcucuauggggacucaaagccccagaaguucaccucaucugccaacggagugaccacacauuacguuucacagauugguggcuucccaaaucaaacagaagacggaggacuaccacagagugguagaauuguuguugauuacauggugcaaaaaucugggaaaacaggaacaauuaccuaucaaagagguauuuuauugccucaaaaaguguggugcgcaaguggcaggagcaagguaauaaaaggauccuugccuuuaauuggagaagcagauugccuccacgaaaaauacgguggauuaaacaaaagcaagccuuacuacacaggggagcaugcaaaggccauaggaaauugcccaauaugggugaaaacacccuugaagcuggccaauggaaccaaauauagaccuccugcaaaacuauuaaaggaaagggguuucuucggagcuauugcugguuucuuagaaggaggaugggaaggaaugauugcagguuggcacggauacacaucccauggggcacauggaguagcgguggcagcagaccuuaagagcacucaagaggccauaaacaagauaacaaaaaaucucaacucuuugagugagcuggaaguaaagaaucuucaaagacuaagcggugccauggaugaacuccacaacgaaauacuagaacuagacgagaaaguggaugaucucagagcugauacaauaagcucacaaauagaacucgcaguccugcuuuccaaugaaggaauaauaaacagugaagaugagcaucucuuggcgcuugaaagaaagcugaagaaaaugcugggccccucugcuguagagauagggaauggaugcuuugaaaccaaacacaagugcaaccagaccugucucgacagaauagcugcugguaccuuuaaugcaggagaauuuucucuccccacuuuugauucacugaauauuacugcugcaucuuuaaaugacgauggauuggauaaucauacuauacugcuuuacuacucaacugcugccuccaguuuggcuguaacauugaugauagcuaucuuuguuguuuauauggucuccagagacaauguuucuugcuccaucugucuauaa

SEQ ID NO: 58818 - RNA, 1755 nt, Artificial Sequence
  derived and/or modified CDS sequence (wt) from hemagglutinin__InfluenzaB__AFJ80968
augaaggcaauaauuguacuacucaugguaguaacauccaaugcagaucgaaucugcacugggauaacaucuucaaacucaccucauguggucaaaacagcuacucaaggggaggucaaugugacuggugugauaccacugacaacaacaccaacaaaaucuuauuuugcaaaucucaaagggacaaggaccagagggaaacuaugcccagacugucucaacuguacagaucuggauguggccuugggcaggccaauguguguggggaccacaccuucugcgaaagcuucaauacuccacgaagucagaccuguuacauccgggugcuuuccuauaaugcacgacagaacaaaaaucaggcaacuagccaaucuucucagaggauaugaaaauaucagguuaucaacccaaaacguuaucgaugcagaaaaggcaccaggaggacccuacagacuuggaaccucaggaucuugcccuaacgcuaccaguaaaagcggauuuuucgcaacaauggcuugggcugucccaaaggacaacaacaaaaaugcaacgaacccacuaacaguagaaguaccauacauuuguacagaaggggaagaccaaauuacuguuuggggguuccauucagauaacaaaacccaaaugaagaaccucuauggagacucaaauccucaaaaguucaccucaucugcuaauggaguaaccacacauuauguuucucagauuggcggcuucccagaucaaacagaagacggaggacuaccacaaagcggcagaauugucguugauuacaugaugcaaaaaccugggaaaacaggaacaauugucuaucaaagagguguuuuguugccucaaaagguguggugcgcgaguggcaggagcaaaguaauaaaaggguccuugccuuuaauuggugaagcagauugccuucaugaaaaauacgguggauuaaacaaaagcaagccuuacuacacaggagaacaugcaaaagccauaggaaauugcccaauaugggugaaaacaccuuugaagcuugccaauggaaccaaauauagaccuccugcaaaacuauuaaaggaaagggguuucuucggagcuauugcugguuuccuagaaggaggaugggaaggaaugauugcagguuggcacggauacacaucucacggagcacauggaguggcaguggcggcagaccuuaagaguacacaagaagcuauaaacaagauaacaaaaaaucucaacucuuugagugagcuagaaguaaagaaccuucaaagacuaaguggugccauggaugaacuccacaacgaaauacucgagcuggaugagaaaguggaugaucucagagcugacacuauaagcucacaaauagaacuugcagucuugcuuuccaacgaaggaauaauaaacagugaagaugagcaucuauuggcacuugagagaaaacuaaagaaaaugcugggucccucugcuguagacauaggaaauggaugcuucgaaaccaaacacaaaugcaaccagaccugcuuagacaggauagcugcuggcaccuuuaaugcaggagaauuuucucuccccacuuuugauucauugaacauuacugcugcaucuuuaaaugaugauggauuggauaaccauacuauacugcucuauuacucaacugcugcuucuaguuuggcuguaacauugaugcuagcuauuuuuauuguuuauauggucuccagagacaacguuucaugcuccaucugucuauaa

SEQ ID NO: 58819 - RNA, 1755 nt, Artificial Sequence; identical to SEQ ID NO: 58818
  derived and/or modified CDS sequence (wt) from hemagglutinin__InfluenzaB__AFJ80979

SEQ ID NO: 58820 - RNA, 1755 nt, Artificial Sequence
  derived and/or modified CDS sequence (wt) from hemagglutinin__InfluenzaB__AFJ80990
augaaggcaauaauuguacuacucaugguaguaacauccaaugcagaucgaaucugcacugggauaacaucuucaaacucaccucauguggucaaaacagcuacucaaggggaggucaaugugacuggugugauaccacugacaacaacaccaacaaaaucuuauuuugcaaaucucaaaggaacaaggaccagagggaaacuaugcccagacugucucaacuguacagaucuggauguggccuugggcagaccaauguguguggggaccacaccuucugcggaagcuucaauacuccacgaagucagaccuguuacauccgggugcuuuccuauaaugcacgacagaacaaaaaucaggcaacuacccaaucuucucagaggauaugaaaauaucagguuaucaacccaaaacguuaucgaugcagaaaaggcaccaggaggacccuacagacuuggaaccucaggaucuugcccuaacgcuaccaauaaaagcggauuuuucgcaacaauggcuugggcugucccaaaggacaacaacaaaaaugcaacgaacccacuaacaguagaaguaccauacauuuguacagaaggggaagaccaaauuacuguuuggggguuccauucagauaacaaaacccaaaugaagaaccucuauggagacucaaauccucaaaaguucaccucaucugcuaauggaguaaccacacauuauguuucucagauuggcggcuucccagaucaaacagaagacggaggacuaccacaaagcggcagaauuguuguugauuacaugaugcaaaaaccugggaaaacaggaacaauugucuaucaaagagguguuuuguugccucaaaagguguggugcgcaaguggcaggagcaaaguaauaaaaggguccuugccuuuaauuggugaagcagauugccuucaugaaaaauacgguggauuaaacaaaagcaagccuuacuacacaggagaacaugcaaaagccauaggaaauugcccaauaugggugaaaacaccuuugaagcuugccaauggaaccaaauauagaccuccugcaaaacuauuaaaggaaagggguuucuucggagcuauugcugguuuccuagaaggaggaugggaaggaaugauugcagguuggcacggauacacaucucacggagcacauggaguggcaguggcggcagaccuuaagaguacacaagaagcuauaaacaagauaacaaaaaaucucaauucuuugagugagcuagaaguaaagaaucuucaaagacuaaguggugccauggaugaacuccacaacgaaauacucgagcuggaugagaaaguggaugaucucagagcugacacuauaagcucacaaauagaacuugcagucuugcuuuccaacgaaggaauaauaaacagugaagaugagcaucuauuggcacuugagagaaaacuaaagaaaaugcugggucccucugcuguagacauaggaaauggaugcuucgaaaccaaacacaagugcaaccagaccugcuuagacaggauagcugcuggcaccuuuaaugcaggagaauuuucucuccccacuuuugauucacugaacauuacugcugcaucuuuaaaugaugauggauuggauaaccauacuauacugcucuauuacucaacugcugcuucuaguuuggcuguaacauugaugcuagcuauuuuuauuguuuauauggucuccagagacaacguuucaugcuccaucugucuauaa

SEQ ID NO: 58821 - RNA, 1755 nt, Artificial Sequence; identical to SEQ ID NO: 58818
  derived and/or modified CDS sequence (wt) from hemagglutinin__InfluenzaB__AFJ81001

SEQ ID NO: 58822 - RNA, 1755 nt, Artificial Sequence
  derived and/or modified CDS sequence (wt) from hemagglutinin__InfluenzaB__AFJ84360
augaaggcaauaauuguacuacucaugguaguaacauccaaugcagaucgaaucugcacugggauaacaucuucaaacucaccucauguggucaaaacagcuacucaaggggaggucaaugugacuggugugauaccacugacaacaacaccaacaaaaucuuauuuugcaaaucucaaagggacaaggaccagagggaaacuaugcccagacugucucaacuguacagaucuggauguggccuugggcaggccaauguguguggggaccacaccuucugcgaaagcuucaauacuccacgaagucagaccuguuacauccgggugcuuuccuauaaugcacgacagaacaaaaaucaggcaacuagccaaucuucucagaggauaugaaaauaucagguuaucaacccaaaacguuaucgaugcagaaaaggcaccaggaggacccuacagacuuggaaccucaggaucuugcccuaacgcuaccaguaaaagcggauuuuucgcaacaauggcuugggcugucccaaaggacaacaacaaaaaugcaacgaacccacuaacaguagaaguaccauacauuuguacagaaggagaagaccaaauuacuguuuggggguuccauucagauaacaaaacccagaugaagaaccucuauggagacucaaauccucaaaaguucaccucaucugcuaauggaguaaccacacauuauguuucucagauuggcggcuucccagaucaaacagaagacggaggacuaccacaaagcggcagaauugucguugauuacaugaugcaaaaaccugggaaaacaggaacaauugucuaucaaagagguguuuuguugccucaaaagguguggugcgcgaguggcaggagcaaaguaauaaaaggguccuugccuuuaauuggugaagcagauugccuucaugaaaaauacgguggauuaaacaaaagcaagccuuacuacacaggagaacaugcaaaagccauaggaaauugcccaauaugggugaaaacaccuuugaagcuugccaauggaaccaaauauagaccuccugcaaaacuauuaaaggaaagggguuucuucggagcuauugcugguuuccuagaaggaggaugggaaggaaugauugcagguuggcacggauacacaucucacggagcacauggaguggcaguggcggcagaccuuaagaguacacaagaagcuauaaacaagauaacaaaaaaucucaacucuuugagugagcuagaaguaaaaaaccuucaaagacuaaguggugccauggaugaacuccacaacgaaauacucgagcuggaugagaaaguggaugaucucagagcugacacuauaagcucacaaauagaacuugcagucuugcuuuccaacgaaggaauaauaaacagugaagaugagcaucuauuggcacuugagagaaaacuaaagaaaaugcugggucccucugcuguagacauaggaaauggaugcuucgaaaccaaacacaaaugcaaccagaccugcuuagacaggauagcugcuggcaccuuuaaugcaggagaauuuucucuccccacuuuugauucauugaacauuacugcugcaucuuuaaaugaugauggauuggauaaccauacuauacugcucuauuacucaacugcugcuucuaguuuggcuguaacauugaugcuagcuauuuuuauuguuuauauggucuccagagacaacguuucaugcuccaucugucuauaa

SEQ ID NO: 58823 - RNA, 1758 nt, Artificial Sequence
  derived and/or modified CDS sequence (wt) from hemagglutinin__InfluenzaB__AFJ90395
augaaggcaauaauuguacuacucaugguaguaacauccaaugcagaucgaaucugcacugggauaacaucgucaaacucaccacauguugucaaaacugcuacucaaggggaggucaaugugacugguguaauaccacugacaacaacacccaccaaaucucauuuugcaaaucucaaaggaacagaaaccagagggaaacuaugcccaaaaugccucaacugcacagaucuggacguggccuugggcagaccaaaaugcacggggaacauacccucggcaagaguuucaauacuccaugaagucagaccuguuacaucugggugcuuuccuauaaugcacgacagaacaaaaauuagacagcugccuaaccuucucagaggauacgaacauaucagguuaucaacucauaacguuaucaaugcagaaaaugcaccaggaggacccuacaaaauuggaaccucagggucuugcccuaauguuaccaauggaaacggauuuuucgcaacaauggcuugggccgucccaaaaaacgacaacaacaaaacagcaacaaauucauuaacaauagaaguaccauacauuuguacagaaggagaagaccaaauuaccguuuggggguuccacucugauaacgaaacccaaauggcaaagcucuauggggacucaaagccccagaaguucaccucaucugccaacggagugaccacacauuacguuucacagauugguggcuucccaaaucaaacagaagacggaggacuaccacaaagugguagaauuguuguugauuacauggugcaaaaaucugggaaaacaggaacaauuaccuaucaaagagguauuuuauugccucaaaaaguguggugcgcaaguggcaggagcaagguaauaaaaggauccuugccuuuaauuggagaagcagauugccuccacgaaaaauacgguggauuaaacaaaagcaagccuuacuacacaggggaacaugcaaaggccauaggaaauugcccaauaugggugaaaacacccuugaagcuggccaauggaaccaaauauagaccuccugcaaaacuauuaaaggaaagggguuucuucggagcuauugcugguuucuuagaaggaggaugggaaggaaugauugcagguuggcacggauacacaucccauggggcacauggaguagcgguggcagcagaccuuaagagcacucaagaggccauaaacaagauaacaaaaaaucucaauucuuugagugagcuggaaguaaagaaucuucaaagacuaagcggugccauggaugaacuccacaacgaaauacuagaacuagacgagaaaguggaugaucucagagcugauacaauaagcucacaaauagaacucgcaguccugcuuuccaaugaaggaauaauaaacagugaagaugagcaucucuuggcgcuugaaagaaagcugaagaaaaugcuaggccccucugcuguagagauagggaauggaugcuuugaaaccaaacacaagugcaaccagaccugucucgacagaauagcugcugguaccuuugaugcaggagaauuuucucuccccacuuuugauucacugaauauuacugcugcaucuuuaaaugacgauggauuggauaaucauacuauauugcuuuacuacucaacugcugccuccaguuuggcuguaacauugaugauagcuaucuuuguuguuuauauggucuccagagacaauguuucuugcuccaucugucuauaa

SEQ ID NO: 58824 - RNA, 1755 nt, Artificial Sequence
  derived and/or modified CDS sequence (wt) from hemagglutinin__InfluenzaB__AFJ90406
augaaggcaauaauuguacuacucaugguaguaacauccaaugcagaucgaaucugcacugggauaacaucuucaaacucaccucauguggucaaaacagcuacucaaggggaggucaaugugacuggugugauaccacugacaacaacaccaacaaaaucuuauuuugcaaaucucaaagggacaaggaccagagggaaacuaugcccagacugucucaacuguacagaucuggauguggccuugggcaggccaauguguguggggaccacaccuucugcgaaagcuucaauacuccacgaagucagaccuguuacauccgggugcuuuccuauaaugcacgacagaacaaaaaucaggcaacuagccaaucuucucagaggauaugaaaauaucagguuaucaacccaaaacguuaucgaugcagaaaaagcaccaggaggacccuacagacuuggaaccucaggaucuugcccuaacgcuaccaguaaaagcggauuuuucgcaacaauggcuugggcugucccaaaggacaacaacaaaaaugcaacgaacccacuaacaguagaaguaccauacauuuguacagaaggggaagaccaaauuacuguuuggggguuccauucagauaacaaaacccaaaugaagaaccucuauggagacucaaauccucaaaaguucaccucaucugcuaauggaguaaccacacauuauguuucucagauuggcggcuucccagaucaaacagaagacggaggacuaccacaaagcggcagaauugucguugauuacaugaugcaaaaaccugggaaaacaggaacaauugucuaucaaagagguguuuuguugccucaaaagguguggugcgcgaguggcaggagcaaaguaauaaaaggguccuugccuuuaauuggugaagcagauugccuucaugaaaaauacgguggauuaaacaaaagcaagccuuacuacacaggagaacaugcaaaagccauaggaaauugcccaauaugggugaaaacaccuuugaagcuugccaauggaaccaaauauagaccuccugcaaaacuacuaaaggaaagggguuucuucggagcuauugcugguuuccuagaaggaggaugggaaggaaugauugcagguuggcacggauacacaucucacggagcacauggaguggcaguggcggcagaccuuaagaguacacaagaagcuauaaacaagauaacaaaaaaucucaacucuuugagugagcuagaaguaaagaaccuucaaagacuaaguggugccauggaugaacuccacaacgaaauacucgagcuggaugagaaaguggaugaucucagagcugacacuauaagcucacaaauagaacuugcagucuugcuuuccaacgaaggaauaauaaacagugaagaugagcaucuauuggcacuugagagaaaacuaaagaaaaugcugggucccucugcuguagacauaggaaauggaugcuucgaaaccaaacacaaaugcaaccagaccugcuuagacaggauagcugcuggcaccuuuaaugcaggagaauuuucucuccccacuuuugauucauugaacauuacugcugcaucuuuaaaugaugauggauuggauaaccauacuauacugcucuauuacucaacugcugcuucuaguuuggcuguaacauugaugcuagcuauuuuuauuguuuauauggucuccagagacaacguuucaugcuccaucugucuauaa

SEQ ID NO: 58825 - RNA, 1755 nt, Artificial Sequence; identical to SEQ ID NO: 58824
  derived and/or modified CDS sequence (wt) from hemagglutinin__InfluenzaB__AFJ90417

SEQ ID NO: 58826 - RNA, 1755 nt, Artificial Sequence; identical to SEQ ID NO: 58818
  derived and/or modified CDS sequence (wt) from hemagglutinin__InfluenzaB__AFJ90428

SEQ ID NO: 58827 - RNA, 1755 nt, Artificial Sequence
  derived and/or modified CDS sequence (wt) from hemagglutinin__InfluenzaB__AFJ90450
augaaggcaauaauuguacuacucaugguaguaacauccaaugcagaucgaaucugcacugggauaacaucuucaaacucaccucauguggucaaaacagcuacucaaggggaggucaaugugacuggugugauaccacugacaacaacaccaacaaaaucuuauuuugcaaaucucaaagggacaaggaccagagggaaacuaugcccagacugucucaacuguacagaucuggauguggccuugggcaggccaauguguguggggaccacaccuucugcgaaagcuucaauacuccacgaagucagaccuguuacauccgggugcuuuccuauaaugcacgacagaacaaaaaucaggcaacuagccaaucuucucagaggauaugaaaauaucagguuaucaacccaaaacguuaucgaugcagaaaaggcaccaggaggacccuacagacuuggaaccucaggaucuugcccuaacgcuaccaguaaaagcggauuuuucgcaacaauggcuugggcugucccaaaggacaacaacaaaaaugcaacgaacccacuaacaguagaaguaccauacauuuguacagaaggggaagaccaaauuacuguuuggggguuccauucagauaacaaaacccaaaugaagaaccucuauggagacucaaauccucaaaaguucaccucaucugcuaauggaguaaccacacauuauguuucucagauuggcggcuucccagaucaaacagaagacggaggacuaccacaaagcggcagaauugucguugauuacaugaugcaaaaaccugggaaaacaggaacaauugucuaucaaagagguguuuuguugccucaaaagguguggugcgcgaguggcaggagcaaaguaauaaaaggguccuugccuuuaauuggugaagcagauugccuucaugaaaaauacgguggauuaaacaaaagcaagccuuacuacacaggagaacaugcaaaagccauaggaaauugcccaauaugggugaaaacaccuuugaagcuugccaauggaaccaaauauagaccuccugcaaaacuauuaaaggaaagggguuucuucggagcuauugcugguuuccuagaaggaggaugggaaggaaugauugcagguuggcacggauacacaucucacggagcacauggaguggcaguggcggcagaccuuaagaguacacaagaagcuauaaacaagauaacaaaaaaucucaacucuuugagugagcuagaaguaaaaaaccuucaaagacuaaguggugccauggaugaacuccacaacgaaauacucgagcuggaugagaaaguggaugaucucagagcugacacuauaagcucacaaauagaacuugcagucuugcuuuccaacgaaggaauaauaaacagugaagaugagcaucuauuggcacuugagagaaaacuaaagaaaaugcugggucccucugcuguagacauaggaaauggaugcuucgaaaccaaacacaaaugcaaccagaccugcuuagacaggauagcugcugguaccuuuaaugcaggagaauuuucucuccccacuuuugauucauugaacauuacugcugcaucuuuaaaugaugauggauuggauaaccauacuauacugcucuauuacucaacugcugcuucuaguuuggcuguaacauugaugcuagcuauuuuuauuguuuauauggucuccagagacaacguuucaugcuccaucugucuauaa

SEQ ID NO: 58828 - RNA, 1755 nt, Artificial Sequence
  derived and/or modified CDS sequence (wt) from hemagglutinin__InfluenzaB__AFJ91038
augaaggcaauaauuguacuacucaugguaguaacauccaaugcggaucgaaucugcacugggauaacaucuucaaacucaccucauguggucaaaacagcuacucaaggggaggucaaugugaccggugugauaccacugacaacaacaccaacaaaaucuuauuuugcaaaucucaaagggacaaggaccagagggaaacuaugcccagacugucucaacuguacagaucuggauguggccuugggcaggccaauguguguggggaccacaccuucugcgaaagcuucaauacuccacgaagucagaccuguuacauccgggugcuuuccuauaaugcacgacagaacaaaaaucaggcaacuagccaaucuucucagaggauaugaaaauaucagguuaucaacccaaaacguuaucgaugcagaaaaggcaccaggaggacccuacagacuuggaaccucaggaucuugcccuaacgcuaccaguaaaagcggauuuuucgcaacaauggcuugggcugucccaaaggacaacaacaaaaaugcaacgaacccacuaacaguagaaguaccauacauuuguacagaaggggaagaccaaauuacuguuuggggguuccauucagauaacaaaacccaaaugaagaaccucuauggagacucaaauccucaaaaguucaccucaucugcuaauggaguaaccacacauuauguuucucagauuggcggcuucccagaucaaacagaagacggaggacuaccacaaagcggcagaauugucguugauuacaugaugcaaaaaccugggaaaacaggaacaauugucuaucaaagagguguuuuguugccucaaaagguguggugcgcgaguggcaggagcaaaguaauaaaaggguccuugccuuuaauuggugaagcagauugccuucaugaaaaauacgguggauuaaacaaaagcaagccuuacuacacaggagaacaugcaaaagccauaggaaauugcccaauaugggugaaaacaccuuugaagcuugccaauggaaccaaauauagaccuccugcaaaacuauuaaaggaaagggguuucuucggagcuauugcugguuuccuagaaggaggaugggaaggaaugauugcagguuggcacggauacacaucucacggagcacauggaguggcaguggcggcagaccuuaagaguacacaagaagcuauaaacaagauaacaaaaaaucucaacucuuugagugagcuagaaguaaagaaccuucaaagacuaaguggugccauggaugaacuccacaacgaaauacucgagcuggaugagaaaguggaugaucucagagcugacacuauaagcucacaaauagaacuugcagucuugcuuuccaacgaaggaauaauaaacagugaagaugagcaucuauuggcacuugagagaaaacuaaagaaaaugcugggucccucugcuguagacauaggaaauggaugcuucgaaaccaaacacaaaugcaaccagaccugcuuagacaggauagcugcuggcaccuuuaaugcaggagaauuuucucuccccacuuuugauucauugaacauuacugcugcaucuuuaaaugaugauggauuggauaaccauacuauacugcucuauuacucaacugcugcuucuaguuuggcuguaacauugaugcuagcuauuuuuauuguuuauauggucuccagagacaacguuucaugcuccaucugucuauaa

SEQ ID NO: 58829 - RNA, 1755 nt, Artificial Sequence
  derived and/or modified CDS sequence (wt) from hemagglutinin__InfluenzaB__AFJ91049
augaaggcaauaauuguacuacucaugguaguaacauccaaugcagaucgaaucugcacugggauaacaucuucaaacucaccucauguggucaaaacagcuacucaaggggaggucaaugugacuggugugauaccacugacaauaacaccaacaaaaucuuauuuugcaaaucucaaagggacaaggaccagagggaaacuaugcccagacugucucaacuguacagaucuggauguggccuugggcaggccaauguguguggggaccacaccuucugcgaaagcuucaauacuccacgaagucagaccuguuacauccgggugcuuuccuauaaugcacgacagaacaaaaaucaggcaacuagccaaucuucucagaggauaugaaaauaucagguuaucaacccaaaacguuaucgaugcagaaaaagcaccaggaggacccuacagacuuggaaccucaggaucuugcccuaacgcuaccaguaaaagcggauuuuucgcaacaauggcuugggcugucccaaaggacaacaacaaaaaugcaacgaacccacuaacaguagaaguaccauacauuuguacagaaggggaagaccaaauuacuguuuggggguuccauucagauaacaaaacccaaaugaagaaccucuauggagacucaaauccucaaaaguucaccucaucugcuaauggaguaaccacacauuauguuucucagauuggcggcuucccagaucaaacagaagacggaggacuaccacaaagcggcagaauugucguugauuacaugaugcaaaaaccugggaaaacaggaacaauugucuaucaaagagguguuuuguugccucaaaagguguggugcgcgaguggcaggagcaaaguaauaaaaggguccuugccuuuaauuggugaagcagauugccuucaugaaaaauacgguggauuaaacaaaagcaagccuuacuacacaggagaacaugcaaaagccauaggaaauugcccaauaugggugaaaacaccuuugaagcuugccaauggaaccaaauauagaccuccugcaaaacuacuaaaggaaagggguuucuucggagcuauugcugguuuccuagaaggaggaugggaaggaaugauugcagguuggcacggauacacaucucacggagcacauggaguggcaguggcggcagaccuuaagaguacacaagaagcuauaaacaagauaacaaaaaaucucaacucuuugagugagcuagaaguaaagaaccuucaaagacuaaguggugccauggaugaacuccacaacgaaauacucgagcuggaugagaaaguggaugaucucagagcugacacuauaagcucacaaauagaacuugcagucuugcuuuccaacgaaggaauaauaaacagugaagaugagcaucuauuggcacuugagagaaaacuaaagaaaaugcugggucccucugcuguagacauaggaaauggaugcuucgaaaccaaacacaaaugcaaccagaccugcuuagacaggauagcugcuggcaccuuuaaugcaggagaauuuucucuccccacuuuugauucauugaacauuacugcugcaucuuuaaaugaugauggauuggauaaccauacuauacuacucuauuacucaacugcugcuucuaguuuggcuguaacauugaugcuagcuauuuuuauuguuuauauggucuccagagacaacguuucaugcuccaucugucuauaa

SEQ ID NO: 58830 - RNA, 1758 nt, Artificial Sequence
  derived and/or modified CDS sequence (wt) from hemagglutinin__InfluenzaB__AFJ91060
augaaggcaauaauuguacuacucaugguaguaacauccaaugcagaucgaaucugcacugggauaacaucgucaaacucaccacauguugucaaaacugcuacucaaggggaggucaaugugacugguguaauaccacugacaacaacacccaccaaaucucauuuugcaaaucucaaaggaacagaaaccagagggaaacuaugcccaagaugccucaacugcacagaucuggauguggccuugggcagaccaaaaugcacggggaacauacccucggcaagaguuucaauacuccaugaagucagaccuguuacaucugggugcuuuccuauaaugcacgacagaacaaaaauuagacagcugccuaaccuucucagaggauacgaacauaucagauuaucaacucauaacguuaucaaugcagaaaaugcaccaggaggacccuacaaaauuggaaccucagggucuugcccuaacguuaccaauggaaacggauuuuucgcaacaauggcuugggccgucccaaaaaacgacaacaacaaaacagcaacaaauucauuaacaauagaaguaccauacauuuguacagaaggagaagaccaaauuaccguuuggggauuccacucugauaacgaggcccaaauggcaaagcucuauggggacucaaagccccagaaguucaccucaucugccaacggagugaccacacauuacguuucgcagauugguggcuucccaaaucaaacagaagacggaggacuaccacaaagugguagaauuguuguugauuacauggugcaaaaaucugggaaaacaggaacaauuaccuaucaaagagguauuuuauugccucaaaagguguggugcgcaaguggcaggagcaagguaauaaaaggauccuugccuuuaauuggagaagcagauugccuccacgaaaaauacgguggauuaaacaaaagcaagccuuacuacacaggggaacaugcaaaggccauaggaaauugcccaauaugggugaaaacacccuugaagcuggccaauggaaccaaauauagaccuccugcaaaacuauuaaaggaaagggguuucuucggagcuauugcugguuucuuagaaggaggaugggaaggaaugauugcagguuggcacggauacacaucccauggggcacaugggguagcgguggcagcagaccuuaagagcacucaagaggccauaaacaagauaacaaaaaaucucaacucuuugagugagcuggaaguaaagaaucuucaaagacuaagcggugccauggaugaacuccacaacgaaauacuagaacuagacgagaaaguggaugaucucagagcugauacaauaagcucacaaauagaacucgcaguccugcuuuccaaugaaggaauaauaaacagugaagaugagcaucucuuggcgcuugaaagaaagcugaagaaaaugcugggccccucugcuguagagauagggaauggaugcuuugaaaccaaacacaagugcaaccagaccugucuugacagaauagcugcugguaccuuugaugcaggagaauuuucucuccccaccuuugauucacugaauauuacugcugcaucuuuaaaugacgauggauuggauaaucauacuauacugcuuuacuacucaacugcugccuccaguuuggcugugacauugaugauagcuaucuuuguuguuuauauggucuccagagacaauguuucuugcuccaucugucuauaa

SEQ ID NO: 58831 - RNA, 1755 nt, Artificial Sequence; identical to SEQ ID NO: 58781
  derived and/or modified CDS sequence (wt) from hemagglutinin__InfluenzaB__AFJ91071

SEQ ID NO: 58832 - RNA, 1755 nt, Artificial Sequence
  derived and/or modified CDS sequence (wt) from hemagglutinin__InfluenzaB__AFJ91082
augaaggcaauaauuguacuacucaugguaguaacauccaaugcagaucgaaucugcacugggauaacaucuucaaacucaccucauguggucaaaacagcuacucaaggggaggucaaugugacuggcgugauaccacugacaacaacaccaacaaaaucuuauuuugcaaaucucaaaggaacaaggaccagagggaaacuaugcccggacugucucaacuguacagaucuggauguggccuugggcaggccaauguguguggggaccacaccuucugcuaaagcuucaauacuccacgaagucagaccuguuacauccgggugcuuuccuauaaugcacgacagaacaaaaaucaggcaacuacccaaucuucucagaggauaugaaaauaucagguuaucaacccaaaacguuaucgaugcagaaaaagcaccaggaggacccuacagacuuggaaccucaggaucuugcccuaacgcuaccaguaaaaucggauuuuucgcaacaauggcuugggcugucccaaaggacaacuacaaaaaugcaacgaacccacuaacaguagaaguaccauacauuuguacagaaggggaagaccaaauuacuguuuggggguuccauucagauaacaaaacccaaaugaagaaccucuauggagacucaaauccucaaaaguucaccucaucugcuaauggaguaaccacacauuauguuucucagauuggcgacuucccagaucaaacagaagacggaggacuaccacaaagcggcagaauuguuguugauuacaugaugcaaaaaccugggaaaacaggaacaauugucuaucaaagagguguuuuguugccucaaaagguguggugcgcgaguggcaggagcaaaguaauaaaagggucauugccuuuaauuggugaagcagauugccuucaugaaaaauacgguggauuaaacaaaagcaagccuuacuacacaggagaacaugcaaaagccauaggaaauugcccaauauggguaaaaacaccuuugaagcuugccaauggaaccaaauauagaccuccugcaaaacuauuaaaggaaagggguuucuucggagcuauugcugguuuccuagaaggaggaugggaaggaaugauugcagguuggcacggauacacaucucacggagcacauggaguggcaguggcggcagaccuuaagaguacacaagaagcuauaaauaagauaacaaaaaaucucaauucuuugagugagcuagaaguaaagaaccuucaaagacuaaguggugccauggaugaacuccacaacgaaauacucgagcuggaugagaaaguggaugaucucagagcugacacuauaagcucacaaauagaacuugcagucuugcuuuccaacgaaggaauaauaaacagugaagacgagcaucuauuggcacuugagagaaaacuaaagaaaaugcugggucccucugcuguagacauaggaaauggaugcuucgaaaccaaacacaaaugcaaccagaccugcuuagacaggauagcugcuggcaccuuuaaugcaggagaauuuucucuccccacuuuugauucauugaacauuacugcugcaucuuuaaaugaugauggauuggauaaccauacuauacugcucuauuacucaacugcugcuucuaguuuggcuguaacauuaaugcuagcuauuuuuauuguuuauauggucuccagagacaacguuucaugcuccaucugucuauaa

SEQ ID NO: 58833 - RNA, 1755 nt, Artificial Sequence; identical to SEQ ID NO: 58832
  derived and/or modified CDS sequence (wt) from hemagglutinin__InfluenzaB__AFJ91093

SEQ ID NO: 58834 - RNA, 1755 nt, Artificial Sequence; identical to SEQ ID NO: 58832
  derived and/or modified CDS sequence (wt) from hemagglutinin__InfluenzaB__AFJ91104

SEQ ID NO: 58835 - RNA, 1755 nt, Artificial Sequence; identical to SEQ ID NO: 58832
  derived and/or modified CDS sequence (wt) from hemagglutinin__InfluenzaB__AFJ91115

SEQ ID NO: 58836 - RNA, 1758 nt, Artificial Sequence
  derived and/or modified CDS sequence (wt) from hemagglutinin__InfluenzaB__AFJ91704
augaaggcaauaauuguacuacucaugguaguaacauccaaugcagaucgaaucugcacugggauaacaucgucaaacucaccacauguugucaaaacugcuacucaaggggaggucaaugugacugguguaauaccacugacaacaacacccaccaaaucucauuuugcaaaucucaaaggaacagaaaccagagggaaacuaugcccaaaaugccucaacugcacagaucuggacguggccuugggcagaccaaaaugcacggggaacauacccucggcaagaguuucaauacuccaugaagucagaccuguuacaucugggugcuuuccuauaaugcacgacagaacaaaaauuagacagcugccuaaccuucucagaggauacgaacauaucagguuaucaacucauaacguuaucaaugcagaaaaugcaccaggaggacccuacaaaauuggaaccucagggucuugcccuaacguuaccaauggaaaaggauuuuucgcaacaauggcuugggccgucccaaaaaacgacaacaacaaaacagcaacaaauucauuaacaauagaaguaccauacauuuguacagaaggagaagaccaaauuaccguuuggggguuccacucugauaacgaaacccaaauggcaaagcucuauggggacucaaagccccagaaguucaccucaucugccaacggagugaccacacauuacguuucacagauugguggcuucccaaaucaaacagaagacggaggacuaccacaaagugguagaauuguuguugauuacauggugcaaaaaucugggaaaacaggaacaauuaccuaucaaagagguauuuuauugccucaaaaaguguggugcgcaaguggcaggagcaagguaauaaaaggauccuugccuuuaauuggagaagcagauugccuccacgaaaaauacgguggauuaaacaaaagcaagccuuacuacacaggggaacaugcaaaggccauaggaaauugcccaauaugggugaaaacacccuugaagcuggccaauggaaccaaauauagaccuccugcaaaacuauuaaaggaaagggguuucuucggagcuauugcugguuucuuagaaggaggaugggaaggaaugauugcagguuggcacggauacacaucccauggggcacauggaguagcgguggcagcagaccuuaagagcacucaagaggccauaaacaagauaacaaaaaaucucaacucuuugagugagcuggaaguaaagaaucuucaaagacuaagcggugccauggaugaacuccacaacgaaauacuagaacuagacgagaaaguggaugaucucagagcugauacaauaagcucacaaauagaacucgcaguccugcuuuccaaugaaggaauaauaaacagugaagaugagcaucucuuggcgcuugaaagaaagcugaagaaaaugcugggccccucugcuguagagauagggaauggaugcuuugaaaccaaacacaagugcaaccagaccugucucgacagaauagcugcugguaccuuugaugcaggagaauuuucucuccccacuuuugauucacugaauauuacugcugcaucuuuaaaugacgauggauuggauaaucauacuauacugcuuuacuacucaacugcugccuccaguuuggcuguaacauugaugauagcuaucuuuguuguuuauauggucuccagagacaauguuucuugcuccaucugucuauaa

SEQ ID NO: 58837 - RNA, 1755 nt, Artificial Sequence
  derived and/or modified CDS sequence (wt) from hemagglutinin__InfluenzaB__AFK09797
augaaggcaauaauuguacuacucaugguaguaacauccaaugcagaucgaaucugcacugggauaacaucuucaaacucaccucauguagucaaaacagccacucaaggggaggucaaugugacuggugugauaccacugacaacaacaccaauaaaaucuuauuuugcaaaucucaaaggaacaaagaccagagggaaacugugcccagacugucucaacuguacagaucuggauguggccuugggcagaccaauguguguggggaccacgccuucggcaaaagcuucaauacuccacgaagucagaccuguuacauccgggugcuuuccuauaaugcacgacagaacaaaaaucagacaacuacccaaucuucucagaggauaugaaaauaucagguuaucaacccaaaacguuaucgaugcagaaaaggcaccaggaggacccuacagacuuggaaccucaggaucuugcccuaacgcuaccaguaaaagcggauuuuucgcaacaauggcuugggcugucccaaaggacaacaacaaaaaugcaacgaacccacuaacaguagaaguaccauacguuuguacagaaggggaagaccaaauuacuguuuggggguuccauucagauaacaaaaaccaaaugaagaaccucuauggagacucaaauccucaaaaguucaccucaucugcuaauggaguaaccacacauuauguuucucagauuggcggcuucccagaucaaacagaagacggaggacuaccacaaagcggcagaauuguuguugauuacauggugcaaaaaccugggaaaacaggaacaauugucuaucaaagagguguuuuguugccucaaaagguauggugcgcgaguggcaggagcaaaguaauaaaaggguccuugccuuuaauuggugaagcagauugccuucaugaaaaauacgguggauuaaacaaaagcaagccuuacuacacaggagaacaugcaaaagccauaggaaauugcccaauaugggugaaaacaccuuugaagcuugccaauggaaccaaauauagaccuccugcaaaacuauuaaaggaaagggguuucuucggagcuauugcugguuuccuagaaggaggaugggaaggaaugauugcagguuggcacggauauacaucucacggagcacauggaguggcaguggcggcagaccuuaagaguacgcaagaagcuauaaacaagauaacaaaaaaucucaauucuuugagugaacuagaaguaaagaaucuucaaagacuaaguggugccauggaugaacuccacaacgaaauacucgagcuggaugagaaaguggaugaucucagagcugacacuauaagcucgcaaauagaacuugcagucuugcuuuccaacgaaggaauaauaaacagugaagaugagcaucuauuggcacuugagagaaaacuaaagaaaaugcugggucccucugcuguagacauaggaaauggaugcuucgaaaccaaacacaagugcaaccagaccugcuuagacaggauagcugcugguaccuuuaaugcaggagaauuuucucuccccacuuuugauucacugaacauuacugcugcaucuuuaaaugaugauggauuggauaaccauaccauacugcucuauuacucaacugcugcuucuaguuuggcuguaacauugaugcuagcuauuuuuauuguuuauauggucuccagagacaacguuucaugcuccaucugucuauaa

SEQ ID NO: 58838 - RNA, 1755 nt, Artificial Sequence
  derived and/or modified CDS sequence (wt) from hemagglutinin__InfluenzaB__AFN54654
augaaggcaauaauuguacuacucaugguaguaacauccaaugcagaucgaaucugcacugggauaacaucuucaaacucaccucauguggucaaaacagcuacucaaggggaggucaaugugacuggcgugauaccacugacaacaacaccaacaaaaucuuauuuugcaaaccucaaaggaacaaggaccagagggaaacuaugcccggacugucucaacuguacagaucuggauguggccuugggcaggccaauguguguggggaccacaccuucugcuaaagcuucaauacuccacgaagucagaccuguuacauccgggugcuuuccuauaaugcacgacagaacaaaaaucaggcaacuacccaaucuucucagaggauaugaaaauaucagguuaucaacccagaacguuaucgaugcagaaaaagcaccaggaggacccuacagacuuggaaccucaggaucuugcccuaaugcuaccaguaaaaucggauuuuucgcaacaauggcuugggcugucccaaaggacaacuacaaaaaugcaacgaacccacuaacaguagaaguaccauacauuuguacagaaggggaagaccaaauuacuguuuggggguuccauucagauaacaaaacccaaaugaagaaccucuauggagacucaaauccucaaaaguucaccucaucugcuaauggaguaaccacacauuauguuucucagauuggcgacuucccagaucaaacagaagacggaggacuaccacaaagcggcagaauuguuguugauuacaugaugcaaaaaccugggaaaacaggaacaauugucuaucaaagagguguuuuguugccucaaaagguguggugcgcgaguggcaggagcaaaguaauaaaagggucauugccuuuaauuggugaagcagauugccuucaugaaaaauacgguggauuaaacaaaagcaagccuuacuacacaggagaacaugcaaaagccauaggaaauugcccaauauggguaaaaacaccuuugaagcuugccaauggaaccaaauauagaccuccugcaaaacuauuaaaggaaagggguuucuucggagcuauugcugguuuccuagaaggaggaugggaaggaaugauugcagguuggcacggauacacaucucacggagcacauggaguggcaguggcggcagaccuuaagaguacacaagaagcuauaaauaagauaacaaaaaaucucaauucuuugagugagcuagaaguaaagaaccuucaaagacuaaguggugccauggaugaacuccacaacgaaauacucgagcuggaugagaaaguggaugaucucagagcugacacuauaagcucacaaauagaacuugcagucuugcuuuccaacgaaggaauaauaaacagugaagacgagcaucuauuggcacuugagagaaaacuaaagaaaaugcugggccccucugcuguagacauaggaaauggaugcuucgaaaccaaacacaaaugcaaccagaccugcuuagacaggauagcugcuggcaccuuuaaugcaggagaauuuucucuccccacuuuugauucauugaacauuacugcugcaucuuuaaaugaugauggauuggauaaccauacuauacugcucuauuacucaacugcugcuucuaguuuggcuguaacauuaaugcuagcuauuuuuauuguuuauauggucuccagagacaacguuucaugcuccaucugucuauaa

SEQ ID NO: 58839 - RNA, 1755 nt, Artificial Sequence
  derived and/or modified CDS sequence (wt) from hemagglutinin__InfluenzaB__AFN54665
augaaggcaauaauuguacuacucaugguaguaacauccaaugcagaucgaaucugcacuggaauaacaucuucaaacucaccucacguggucaaaacagccacucaaggggaggucaaugugacuggugugauaccacuaacaacaacaccaacaaaaucuuauuuugcaaaucucaaaggaacaaggaccagagggaaacuaugcccagacugucucaacugcacagaucuggauguggcuuugggcagaccaauguguguggggaccacaccuucggcgaaagcuucaauacuccacgaagucagaccuguuacauccgggugcuuuccuauaaugcacgacagaacaaaaaucaggcaacuacccaaucuucucagaggauaugaaaauaucaggcuaucaacccaaaacgucaucgaugcggaaaaggcaccaggaggacccuacagacuuggaaccucaggaucuugcccuaacgcuaccaguaagagcggauuuuucgcaacaauggcuugggcugucccaaaggacaacaacaaaaaugcaacgaacccacuaacaguagaaguaccauacauuuguacagaaggggaagaccaaaucacuguuuggggguuccauucagauaacaaaacccaaaugaagaaccucuauggggacucaaauccucaaaaguucaccucaucugcuaauggaguaaccacacacuauguuucucagauuggcagcuucccagaucaaacagaagacggaggacuaccacaaagcggcaggauuguuguugauuacaugaugcaaaaaccugggaaaacaggaacaauugucuaccaaagagguguuuuguugccucaaaagguguggugcgcgaguggcaggagcaaaguaauaaaaggguccuugccuuuaauuggugaagcagauugccuucaugaaaaauacgguggauuaaacaaaagcaagccuuacuacacaggagaacaugcaaaagccauaggaaauugcccaauaugggugaaaacaccuuugaagcuugccaauggaaccaaauauagaccuccugcaaaacuauuaaaggaaagggguuucuucggagcuauugcugguuuccuagaaggaggaugggaaggaaugauugcaggcuggcacggauacacaucucacggagcacauggaguggcaguggcggcggaccuuaagagcacgcaagaagcuauaaacaagauaacaaaaaaucucaauucuuugagugagcuagaaguaaagaaucuucaaagacuaaguggugccauggaugaacuccacaacgaaauacucgagcuggaugagaaaguggaugaucucagagcugacacuauaagcucgcaaauagaacuugcagucuugcuuuccaacgaaggaauaauaaacagugaagaugagcaucuauuggcacuugagagaaaacuaaagaaaaugcugggucccucugcuguagagauaggaaauggaugcuucgaaaccaaacacaagugcaaccagaccugcuuagacaggauagcugcuggcaccuuuaaugcaggagaauuuucucuccccacuuuugauucacugaacauuacugcugcaucuuuaaaugaugauggauuggauaaccauacuauacugcucuauuacucaacugcugcuucuaguuuggcuguaacauugaugcuagcuauuuuuauuguuuauauggucuccagagacaacguuucaugcuccaucugucuauaa

SEQ ID NO: 58840 - RNA, 1755 nt, Artificial Sequence
  derived and/or modified CDS sequence (wt) from hemagglutinin__InfluenzaB__AFN54676
augaaggcaauaauuguacuacucaugguaguaacauccaaugcagaucgaaucugcacuggaauaacaucuucaaacucaccucacguggucaaaacagccacucaaggggaggucaaugugacuggugugauaccacuaacaacaacaccaacaaaaucuuauuuugcaaaucucaaaggaacaaggaccagagggaaacuaugcccagacugucucaacugcacagaucuggauguggcuuugggcagaccaauguguguggggaccacaccuucggcgaaagcuucaauacuccacgaagucagaccuguuacauccgggugcuuuccuauaaugcacgacagaacaaaaaucaggcaacuacccaaucuucucagaggauaugaaaauaucaggcuaucaacccaaaacgucaucgaugcggaaaaggcaccaggaggacccuacagacuuggaaccucaggaucuugcccuaacgcuaccaguaagagcggauuuuucgcaacaauggcuugggcugucccaaaggacaacaacaaaaaugcaacgaacccacuaacaguagaaguaccauacauuuguacagaaggggaagaccaaaucacuguuuggggguuccauucagauaacaaaacccaaaugaagaaccucuauggagacucaaauccucaaaaguucaccucaucugcuaauggaguaaccacacacuauguuucucagauuggcagcuucccagaucaaacagaagacggaggacuaccacaaagcggcaggauuguuguugauuacaugaugcaaaaaccugggaaaacaggaacaauugucuaccaaagagguguuuuguugccucaaaagguguggugcgcgaguggcaggagcaaaguaauaaaaggguccuugccuuuaauuggugaagcagauugccuucaugaaaaauacgguggauuaaacaaaagcaagccuuacuacacaggagaacaugcaaaagccauaggaaauugcccaauaugggugaaaacaccuuugaagcuugccaauggaaccaaauauagaccuccugcaaaacuauuaaaggaaagggguuucuucggagcuauugcugguuuccuagaaggaggaugggaaggaaugauugcaggcuggcacggauacacaucucacggagcacauggaguggcaguggcggcggaccuuaagagcacgcaagaagcuauaaacaagauaacaaaaaaucucaauucuuugagugagcuagaaguaaagaaucuucaaagacuaaguggugccauggaugaacuccacaacgaaauacucgagcuggaugagaaaguggaugaucucagagcugacacuauaagcucgcaaauagaacuugcagucuugcuuuccaacgaaggaauaauaaacagugaagaugagcaucuauuggcacuugagagaaaacuaaagaaaaugcugggucccucugcuguagagauaggaaauggaugcuucgaaaccaaacacaagugcaaccagaccugcuuagacaggauagcugcuggcaccuuuaaugcaggagaauuuucucuccccacuuuugauucacugaacauuacugcugcaucuuuaaaugaugauggauuggauaaccauacuauacugcucuauuacucaacugcugcuucuaguuuggcuguaacauugaugcuagcuauuuuuauuguuuauauggucuccagagacaacguuucaugcuccaucugucuauaa

SEQ ID NO: 58841 - RNA, 1755 nt, Artificial Sequence; identical to SEQ ID NO: 58838
  derived and/or modified CDS sequence (wt) from hemagglutinin__InfluenzaB__AFN54687

SEQ ID NO: 58842 - RNA, 1755 nt, Artificial Sequence
  derived and/or modified CDS sequence (wt) from hemagglutinin__InfluenzaB__AFN54698
augaaggcaauaauuguacuacucaugguaguaacauccaaugcagaucgaaucugcacugggauaacaucuucaaacucaccucauguggucaaaacagcuacucaaggggaggucaaugugacuggcgugauaccacugacaacaacaccaacaaaaucuuauuuugcaaaccucaaaggaacaaggaccagagggaaacuaugcccggacugucucaacuguacagaucuggauguggccuugggcaggccaauguguguggggaccacaccuucugcuaaagcuucaauacuccacgaagucagaccuguuacauccgggugcuuuccuauaaugcacgacagaacaaaaaucaggcaacuacccaaucuucucagaggauaugaaaauaucagguuaucaacccagaacguuaucgaugcagaaaaagcaccaggaggacccuacagacuuggaaccucaggaucuugcccuaaugcuaccaguaaaaucggauuuuucgcaacaauggcuugggcugucccaaaggacaacuacaaaaaugcaacgaacccacuaacaguagaaguaccauacauuuguacagaaggggaagaccaaauuacuguuuggggguuccauucagauaacaaaacccaaaugaagaaccucuauggagacucaaauccucaaaaguucaccucauuugcuaauggaguaaccacacauuauguuucucagauuggcgacuucccagaucaaacagaagacggaggacuaccacaaagcggcagaauuguuguugauuacaugaugcaaaaaccugggaaaacaggaacaauugucuaucaaagagguguuuuguugccucaaaagguguggugcgcgaguggcaggagcaaaguaauaaaagggucauugccuuuaauuggugaagcagauugccuucaugaaaaauacgguggauuaaacaaaagcaagccuuacuacacaggagaacaugcaaaagccauaggaaauugcccaauauggguaaaaacaccuuugaagcuugccaauggaaccaaauauagaccuccugcaaaacuauuaaaggaaagggguuucuucggagcuauugcugguuuccuagaaggaggaugggaaggaaugauugcagguuggcacggauacacaucucacggagcacauggaguggcaguggcggcagaccuuaagaguacacaagaagcuauaaauaagauaaccaaaaaucucaauucuuugagugagcuagaaguaaagaaccuucaaagacuaaguggugccauggaugaacuccacaacgaaauacucgagcuggaugagaaaguggaugaucucagagcugacacuauaagcucacaaauagaacuugcagucuugcuuuccaacgaaggaauaauaaacagugaagacgagcaucuauuggcacuugagagaaaacuaaagaaaaugcugggccccucugcuguagacauaggaaauggaugcuucgaaaccaaacacaaaugcaaccagaccugcuuagacaggauagcugcuggcaccuuuaaugcaggagaauuuucucuccccacuuuugauucauugaacauuacugcugcaucuuuaaaugaugauggauuggauaaccauacuauacugcucuauuacucaacugcugcuucuaguuuggcuguaacauuaaugcuagcuauuuuuauuguuuauauggucuccagagacaacguuucaugcuccaucugucuauaa

SEQ ID NO: 58843 - RNA, 1755 nt, Artificial Sequence; identical to SEQ ID NO: 58838
  derived and/or modified CDS sequence (wt) from hemagglutinin__InfluenzaB__AFN54709

SEQ ID NO: 58844 - RNA, 1755 nt, Artificial Sequence; identical to SEQ ID NO: 58838
  derived and/or modified CDS sequence (wt) from hemagglutinin__InfluenzaB__AFN54720

SEQ ID NO: 58845 - RNA, 1755 nt, Artificial Sequence; identical to SEQ ID NO: 58838
  derived and/or modified CDS sequence (wt) from hemagglutinin__InfluenzaB__AFN54731

SEQ ID NO: 58846 - RNA, 1755 nt, Artificial Sequence; identical to SEQ ID NO: 58838
  derived and/or modified CDS sequence (wt) from hemagglutinin__InfluenzaB__AFN54742

SEQ ID NO: 58847 - RNA, 1755 nt, Artificial Sequence; identical to SEQ ID NO: 58838
  derived and/or modified CDS sequence (wt) from hemagglutinin__InfluenzaB__AFN54753

SEQ ID NO: 58848 - RNA, 1755 nt, Artificial Sequence; identical to SEQ ID NO: 58838
  derived and/or modified CDS sequence (wt) from hemagglutinin__InfluenzaB__AFN54764

SEQ ID NO: 58849 - RNA, 1755 nt, Artificial Sequence
  derived and/or modified CDS sequence (wt) from hemagglutinin__InfluenzaB__AFN54775
augaaggcaauaauuguacuacucaugguaguaacauccaaugcagaucgaaucugcacugggauaacaucuucaaacucaccucauguggucaaaacagcuacucaaggggaggucaaugugacuggcgugauaccacugacaacaacaccaacaaaaucuuauuuugcaaaccucaaaggaacaaggaccagagggaaacuaugcccggacugucucaacuguacagaucuggauguggccuugggcaggccaauguguguggggaccacaccuucugcuaaagcuucaauacuccacgaagucagaccuguuacauccgggugcuuuccuauaaugcacgacagaacaaagaucaggcaacuacccaaucuucucagaggauaugaaaauaucagguuaucaacccagaacguuaucgaugcagaaaaagcaccaggaggacccuacagacuuggaaccucaggaucuugcccuaaugcuaccaguaaaaucggauuuuucgcaacaauggcuugggcugucccaaaggacaacuacaaaaaugcaacgaacccacuaacaguagaaguaccauacauuuguacagaaggggaagaccaaauuacuguuuggggguuccauucagauaacaaaacccaaaugaagaaccucuauggagacucaaauccucaaaaguucaccucaucugcuaauggaguaaccacacauuauguuucucagauuggcgacuucccagaucaaacagaagacggaggacuaccacaaagcggcagaauuguuguugauuacaugaugcaaaaaccugggaaaacaggaacaauugucuaucaaagagguguuuuguugccucaaaagguguggugcgcgaguggcaggagcaaaguaauaaaagggucauugccuuuaauuggugaagcagauugccuucaugaaaaauacgguggauuaaacaaaagcaagccuuacuacacaggagaacaugcaaaagccauaggaaauugcccaauauggguaaaaacaccuuugaagcuugccaauggaaccaaauauagaccuccugcaaaacuauuaaaggaaagggguuucuucggagcuauugcugguuuccuagaaggaggaugggaaggaaugauugcagguuggcacggauacacaucucacggagcacauggaguggcaguggcggcagaccuuaagaguacacaagaagcuauaaauaagauaacaaaaaaucucaauucuuugagugagcuagaaguaaagaaccuucaaagacuaaguggugccauggaugaacuccacaacgaaauacucgagcuggaugagaaaguggaugaucucagagcugacacuauaagcucacaaauagaacuugcagucuugcuuuccaacgaaggaauaauaaacagugaagacgagcaucuauuggcacuugagagaaaacuaaagaaaaugcugggccccucugcuguagacauaggaaauggaugcuucgaaaccaaacacaaaugcaaccagaccugcuuagacaggauagcugcuggcaccuuuaaugcaggagaauuuucucuccccacuuuugauucauugaacauuacugcugcaucuuuaaaugaugauggauuggauaaccauacuauacugcucuauuacucaacugcugcuucuaguuuggcuguaacauuaaugcuagcuauuuuuauuguuuauauggucuccagagacaacguuucaugcuccaucugucuauaa

SEQ ID NO: 58850 - RNA, 1755 nt, Artificial Sequence; identical to SEQ ID NO: 58838
  derived and/or modified CDS sequence (wt) from hemagglutinin__InfluenzaB__AFN54786

SEQ ID NO: 58851 - RNA, 1755 nt, Artificial Sequence; identical to SEQ ID NO: 58838
  derived and/or modified CDS sequence (wt) from hemagglutinin__InfluenzaB__AFN54797

SEQ ID NO: 58852 - RNA, 1755 nt, Artificial Sequence; identical to SEQ ID NO: 58838
  derived and/or modified CDS sequence (wt) from hemagglutinin__InfluenzaB__AFN54808

SEQ ID NO: 58853 - RNA, 1755 nt, Artificial Sequence
  derived and/or modified CDS sequence (wt) from hemagglutinin__InfluenzaB__AFN54819
augaaggcaauaauuguacuacucaugguaguaacauccaaugcagaucgaaucugcacuggaauaacaucuucaaacucaccucacguggucaaaacagccacucaaggggaggucaaugugacuggugugauaccacuaacaacaacaccaacaaaaucuuauuuugcaaaucucaaaggaacaaggaccagagggaaacuaugcccagacugucucaacugcacagaucuggauguggcuuugggcagaccaauguguguggggaccacaccuucggcgaaagcuucaauacuccacgaagucagaccuguuacauccgggugcuuuccuauaaugcacgacagaacaaaaaucaggcaacuacccaaucuucucagaggauaugaaaauaucaggcuaucaacccaaaacgucaucgaugcggaaaaggcaccaggaggacccuacagacuuggaaccucaggaucuugccccaacgcuaccaguaagagcggauuuuucgcaacaauggcuugggcugucccaaaggacaacaacaaaaaugcaacgaacccacuaacaguagaaguaccauacauuuguacagaaggggaagaccaaaucacuguuuggggguuccauucagauaacaaaacccaaaugaagaaccucuauggagacucaaauccucaaaaguucaccucaucugcuaauggaguaaccacacacuauguuucucagauuggcagcuucccagaucaaacagaagacggaggacuaccacaaagcggcaggauuguuguugauuacaugaugcaaaaaccugggaaaacaggaacaauugucuaccaaagagguguuuuguugccucaaaagguguggugcgcgaguggcaggagcaaaguaauaaaaggguccuugccuuuaauuggugaagcagauugccuucaugaaaaauacgguggauuaaacaaaagcaagccuuacuacacaggagaacaugcaaaagccauaggaaauugcccaauaugggugaaaacaccuuugaagcuugccaauggaaccaaauauagaccuccugcaaaacuauuaaaggaaagggguuucuucggagcuauugcugguuuccuagaaggaggaugggaaggaaugauugcaggcuggcacggauacacaucucacggagcacauggaguggcaguggcggcggaccuuaagagcacgcaagaagcuauaaacaagauaacaaaaaaucucaauucuuugagugagcuagaaguaaagaaucuucaaagacuaaguggugccauggaugaacuccacaacgaaauacucgagcuggaugagaaaguggaugaucucagagcugacacuauaagcucgcaaauagaacuugcagucuugcuuuccaacgaaggaauaauaaacagugaagaugagcaucuauuggcacuugagagaaaacuaaagaaaaugcugggucccucugcuguagagauaggaaauggaugcuucgaaaccaaacacaagugcaaccagaccugcuuagacaggauagcugcuggcaccuuuaacgcaggagaauuuucucuccccacuuuugauucacugaacauuacugcugcaucuuuaaaugaugauggauuggauaaccauacuauacugcucuauuacucaacugcugcuucuaguuuggcuguaacauugaugcuagcuauuuuuauuguuuauauggucuccagagacaacguuucaugcuccaucugucuauaa

SEQ ID NO: 58854 - RNA, 1755 nt, Artificial Sequence; identical to SEQ ID NO: 58838
  derived and/or modified CDS sequence (wt) from hemagglutinin__InfluenzaB__AFN54830

SEQ ID NO: 58855 - RNA, 1755 nt, Artificial Sequence
  derived and/or modified CDS sequence (wt) from hemagglutinin__InfluenzaB__AFN54841
augaaggcaauaauuguacuacucaugguaguaacauccaaugcagaucgaaucugcacugggauaacaucuucaaacucaccucauguggucaaaacagcuacucaaggggaggucaaugugacgggcgugauaccacugacaacaacaccaacaaaaucuuauuuugcaaaccucaaaggaacaaggaccagagggaaacuaugcccggacugucucaacuguacagaucuggauguggccuugggcaggccaauguguguggggaccacaccuucugcuaaagcuucaauacuccacgaagucagaccuguuacauccgggugcuuuccuauaaugcacgacagaacaaaaaucaggcaacuacccaaucuucucagaggauaugaaaauaucagguuaucaacccagaacguuaucgaugcagaaaaagcaccaggaggacccuacagacuuggaaccucaggaucuugcccuaaugccaccaguaaaaucggauuuuucgcaacaauggcuugggcugucccaaaggacaacuacaaaaaugcaacgaacccacuaacaguagaaguaccauacauuuguacagaaggggaagaccaaauuacuguuuggggguuccauucagauaacaaaacccaaaugaagaaccucuauggagacucaaauccucaaaaguucaccucaucugcuaauggaguaaccacacauuauguuucucagauuggcgacuucccagaucaaacagaagacggaggacuaccacaaagcggcagaauuguuguugauuacaugaugcaaaaaccugggaaaacaggaacaauugucuaucaaagagguguuuuguugccucaaaagguguggugcgcgaguggcaggagcaaaguaauaaaagggucauugccuuuaauuggugaagcagauugccuucaugaaaaauacgguggauuaaacaaaagcaagccuuacuacacaggagaacaugcaaaagccauaggaaauugcccaauauggguaaaaacaccuuugaagcuugccaauggaaccaaauauagaccuccugcaaaacuauuaaaggaaagggguuucuucggagcuauugcugguuuccuagaaggaggaugggaaggaaugauugcagguuggcacggauacacaucucacggagcacauggaguggcaguggcggcagaccuuaagaguacacaagaagcuauaaauaagauaacaaaaaaucucaauucuuugagugagcuagaaguaaagaaccuucaaagacuaaguggugccauggaugaacuccacaacgaaauacucgagcuggaugagaaaguggaugaucucagagcugacacuauaagcucacaaauagaacuugcagucuugcuuuccaacgaaggaauaauaaacagugaagacgagcaucuauuggcacuugagagaaaacuaaagaaaaugcugggccccucugcuguagacauaggaaauggaugcuucgaaaccaaacacaaaugcaaccagaccugcuuagacaggauagcugcuggcaccuuuaaugcaggagaauuuucucuccccacuuuugauucauugaacauuacugcugcaucuuuaaaugaugauggauuggauaaccauacuauacugcucuauuacucaacugcugcuucuaguuuggcuguaacauuaaugcuagcuauuuuuauuguuuauauggucuccagagacaacguuucaugcuccaucugucuauaa

SEQ ID NO: 58856 - RNA, 1755 nt, Artificial Sequence; identical to SEQ ID NO: 58838
  derived and/or modified CDS sequence (wt) from hemagglutinin__InfluenzaB__AFN54852

SEQ ID NO: 58857 - RNA, 1755 nt, Artificial Sequence; identical to SEQ ID NO: 58838
  derived and/or modified CDS sequence (wt) from hemagglutinin__InfluenzaB__AFN54863

SEQ ID NO: 58858 - RNA, 1758 nt, Artificial Sequence
  derived and/or modified CDS sequence (wt) from hemagglutinin__InfluenzaB__AFU34595
augaaggcaauaauuguacuacucaugguaguaacauccaaugcagaucgaaucugcacugggauaacaucgucaaacucaccacaugucgucaaaacugcuacucaaggggaggucaaugugacugguguaauaccacugacaacaacacccaccaaaucucauuuugcaaaucucaaaggaacagaaaccagagggaaacuaugcccaaaaugccccaacugcacagaucuggacguagccuugggcagaccaaaaugcacggggaaaauacccucggcaagaguuucaauacuccaugaagucagaccuguuacaucugggugcuuuccuauaaugcacgacagaacaaaaauuagacagcugccuaaccuucuccgaggauacgaacauaucagauuaucaacucauaacguuaucaaugcagaaaaugcaccaggaggacccuacaaaauuggaaccucagggucuugcccuaacguuaccaauggaaacggauuuuucgcaacaauggcuugggccgucccaaaaaacgacaaaaacaaaacagcaacaaauccauuaacaauagaaguaccauacauuuguacagaaggagaagaccaaauuaccguuuggggguuccacucugauaacgagacccaaauggcaaagcucuauagggacucaaagccccagaaguucaccucaucugccaacggagugaccacacauuacguuucacagauugguggcuucccaaaucaaacagaagacggaggacuaccacaaagugguagaauuguuguugauuacauggugcaaaaaucugggaaaacaggaacaauuaccuaucaaagagguauuuuacugccucaaaagguguggugcgcaaguggcaggagcaagguaauaaaaggauccuugccuuuaauuggagaagcagauugccuccacgaaaaauacgguggauuaaacaaaagcaagccuuacuacacaggggaacaugcaaaggccauaggaaauugcccaauaugggugaagacacccuugaagcuggccaauggaaccaaauauagaccuccuacaaaacuauuaaaggaaagggguuucuucggagcuauugcugguuucuuagaaggaggaugggagggaaugauugcagguuggcacggauacacgucccauggggcccauggaguagcgguggcagcagaccuuaagagcacucaagaggccauaaacaagauaacaaaaaaucucaacucuuugagugagcuggaaguaaagaaucuucaaagacuaagcggugccauggaugaacuccacaacgaaauacuagaacuagacgagaaaguggaugaucucagagcugauacaauaagcucacaaauagaacucgcaguccugcuuuccaaugaagggauaauaaacagugaagaugaacaucucuuggcgcuugaaagaaagcugaagaaaaugcugggccccucugcuguagagauagggaauggaugcuuugaaaccaaacacaagugcaaccagaccugucucgacagaauagcugcugguaccuuugaugcaggagaauuuucucuccccaccuuugauucacugaauauuacugcugcaucuuuaaaugacgauggauuggauaaucauaccauacugcuuuacuacucaacugcugccuccaguuuggcuguaacacugaugauagcuaucuuuguuguuuauauggucuccagagacaauguuucuugcuccaucugucuauaa

SEQ ID NO: 58859 - RNA, 1758 nt, Artificial Sequence
  derived and/or modified CDS sequence (wt) from hemagglutinin__InfluenzaB__AFU34606
augaaggcaauaauuguacuacucaugguaguaacauccaaugcagaucgaaucugcacugggauaacaucgucaaacucaccacaugucgucaaaacugcuacucaaggggaggucaaugugacugguguaauaccacugacaacaacacccaccaaaucucauuuugcaaaucucaagggaacagaaaccagagggaaacuaugcccaaaaugccccaacugcacagaucuggacguagccuuggacagaccaaaaugcacggggaaaauacccucggcaagaguuucaauacuccaugaagucagacuuguuacaucugggugcuuuccuauaaugcacgacagaacaaaaauuagacagcugccuaaccuucuccgaggauacgaacauaucagauuaucaacucauaacguuaucaaugcagaaaaugcaccaggaggacccuacaaaauuggaaccucagggucuugcccuaacguuaccaauggaaacggauuuuucgcaacaauggcuugggccgucccaaaaaacgacaaaaacaaaacagcaacaaauccauuaacaauagaaguaccauacauuuguacagaaggagaagaccaaauuaccguuuggggguuccacucugaugacgagacccaaauggcaaagcucuauggggacucaaagccccagaaguucaccucaucugccaacggagugaccacacauuacguuucacagauugguggcuucccaaaucaaacagaagacggaggacuaccacaaagugguagaauuguuguugauuacauggugcaaaaaucugggaaaacaggaacaauuaccuaucaaagagguauuuuauugccucaaaagguguggugcgcaaguggcaggagcaagguaauaaaaggauccuugccuuuaauuggagaagcagauugccuccacgaaaaauacgguggauuaaacaaaagcaagccuuacuacacaggggaacaugcaaaggccauaggaaauugcccaauaugggugaagacacccuugaagcuggccaauggaaccaaauauagaccuccugcaaaacuauuaaaggaaagggguuucuucggagcuauugcugguuucuuagaaggaggaugggaaggaaugauugcagguuggcacggauacacgucccauggggcacauggaguagcgguggcagcagaccuuaagagcacucaagaggccauaaacaagauaacaaaaaaucucaacucuuugagugagcuggaaguaaagaaucuucaaagacuaagcggugccauggaugaacuccacaacgaaauacuagaacuagacgagaaaguggaugaucucagagcugauacaauaagcucacaaauagaacucgcaguccugcuuuccaaugaaggaauaauaaacagugaagaugaacaucucuuggcacuugaaagaaagcugaagaaaaugcugggcccuucugcuguagagauagggaauggaugcuuugaaaccaaacacaagugcaaccagaccugucucgacagaauagcugcugguaccuuugaugcaggagaauuuucucuccccaccuuugauucacugaauauuacugcugcaucuuuaaaugacgauggauuggauaaucauaccauacugcuuuacuacucaacugcugccuccaguuuggcuguaacacugaugauagcuaucuuuguuguuuauauggucuccagagacaauguuucuugcuccaucugucuauaa

SEQ ID NO: 58860 - RNA, 1758 nt, Artificial Sequence
  derived and/or modified CDS sequence (wt) from hemagglutinin__InfluenzaB__AFU34617
augaaggcaauaauuguacuacucaugguaguaacauccaaugcagaucgaaucugcacugggauaacaucgucaaacucaccacaugucgucaaaacugcuacucaaggggaggucaaugugacugguguaauaccacugacaacaacacccaccaaaucucauuuugcaaaucucaagggaacagaaaccagagggaaacuaugcccaaaaugccccaacugcacagaucuggacguagccuugggcagaccaaaaugcacggggaaaauacccucggcaagaguuucaauacuccaugaagucagaccuguuacaucugggugcuuuccuauaaugcacgacagaacaaaaauuagacagcugccuaaccuucuccgaggauacgaacauaucagauuaucaacucauaacguuaucaaugcagaaaaugcaccaggaggacccuacaaaauuggaaccucagggucuugcccuaacguuaccaauggaaacggauuuuucgcaacaauggcuugggccgucccaaaaaacgacaaaaacaaaacagcaacaaauccauuaacaauagaaguaccauacauuuguacagaaggagaagaccaaauuaccguuuggggguuccacucugaugacgagacccaaauggcaaagcucuauggggacucaaagccccagaaguucaccucaucugccaacggagugaccacacauuacguuucacagauugguggcuucccaaaucaaacagaagacggaggacuaccacaaagugguagaauuguuguugauuacauggugcaaaaaucugggaaaacaggaacaauuaccuaucaaagagguauuuuauugccucaaaagguguggugcgcaaguggcaggagcaagguaauaaaaggauccuugccuuuaauuggagaagcagauugccuccacgaaaaauacgguggauuaaacaaaagcaagccuuacuacacaggggaacaugcaaaggccauaggaaauugcccaauaugggugaagacacccuugaagcuggccaauggaaccaaauauagaccuccugcaaaacuauuaaaggaaagggguuucuucggagcuauugcugguuucuuagaaggaggaugggaaggaaugauugcagguuggcacggauacacgucccauggggcacauggaguagcgguggcagcagaccuuaagagcacucaagaggccauaaacaagauaacaaaaaaucucaacucuuugagugagcuggaaguaaagaaucuucaaagacuaagcggugccauggaugaacuccacaacgaaauacuagaacuagacgagaaaguggaugaucucagagcugauacaauaagcucacaaauagaacucgcaguccugcuuuccaaugaaggaauaauaaacagugaagaugaacaucucuuggcacuugaaagaaagcugaagaaaaugcugggcccuucugcuguagagauagggaauggaugcuuugaaaccaaacacaagugcaaccagaccugucucgacagaauagcugcugguaccuuugaugcaggagaauuuucucuccccaccuuugauucacugaauauuacugcugcaucuuuaaaugacgauggauuggauaaucauaccauacugcuuuacuacucaacugcugccuccaguuuggcuguaacacugaugauagcuaucuuuguuguuuauauggucuccagagacaauguuucuugcuccaucugucuauaa

SEQ ID NO: 58861 - RNA, 1758 nt, Artificial Sequence
  derived and/or modified CDS sequence (wt) from hemagglutinin__InfluenzaB__AFU34628
augaaggcaauaauuguacuacucaugguaguaacauccaaugcagaucgaaucugcacugggauaacaucgucaaacucaccacaugucgucaaaacugcuacucaaggggaggucaaugugacugguguaauaccacugacaacaacacccaccaaaucucauuuugcaaaucucaagggaacagaaaccagagggaaacuaugcccaaaaugccccaacugcacagaucuggacguagccuugggcagaccaaaaugcacggggaaaauacccucggcaagaguuucaauacuccaugaagucagaccuguuacaucugggugcuuuccuauaaugcacgacagaacaaaaauuagacagcugccuaaccuucuccgaggauacgaacauaucagauuaucaacucauaacguuaucaaugcagaaaaugcaccaggaggacccuacaaaauuggaaccucagggucuugcccuaacguuaccaauggaaacggauuuuucgcaacaauggcuugggccgucccaaaaaacgacaaaaacaaaacagcaacaaauccauuaacaauagaaguaccauacauuuguacagaaggagaagaccaaauuaccguuuggggguuccacucugaugacgagacccaaauggcaaagcucuauggggacucaaagccccagaaguucaccucaucugccaacggagugaccacacauuacguuucacagauugguggcuucccaaaucaaacagaagacggaggacuaccacaaagugguagaauuguuguugauuacauggugcaaaaaucugggaaaacaggaacaauuaccuaucaaagagguauuuuauugccucaaaagguguggugcgcaaguggcaggagcaagguaauaaaaggauccuugccuuuaauuggagaagcagauugccuccacgaaaaauacgguggauuaaacaaaagcaagccuuacuacacaggggaacaugcaaaggccauaggaaauugcccaauaugggugaagacacccuugaagcuggccaauggaaccaaauauagaccuccugcaaaacuauuaaaggaaagggguuuccucggagcuauugcugguuucuuagaaggaggauggaaaggaaugauugcagguuggcacggauacacgucccauggggcacauggaguagcgguggcagcagaccuuaagagcacucaagaggccauaaacaagauaacaaaaaaucucaacucuuugagugagcuggaaguaaagaaucuucaaagacuaagcggugccauggaugaacuccacaacgaaauacuagaacuagacgagaaaguggaugaucucagagcugauacaauaagcucacaaauagaacucgcaguccugcuuuccaaugaaggaauaauaaacagugaagaugaacaucucuuggcacuugaaagaaagcugaagaaaaugcugggcccuucugcuguagagauagggaauggaugcuuugaaaccaaacacaagugcaaccagaccugucucgacagaauagcugcugguaccuuugaugcaggagaauuuucucuccccaccuuugauucacugaauauuacugcugcaucuuuaaaugacgauggauuggauaaucauaccauacugcuuuacuacucaacugcugccuccaguuuggcuguaacacugaugauagcuaucuuuguuguuuauauggucuccagagacaauguuucuugcuccaucugucuauaa

SEQ ID NO: 58862 - RNA, 1758 nt, Artificial Sequence
  derived and/or modified CDS sequence (wt) from hemagglutinin__InfluenzaB__AFU34639
augaaggcaauaauuguacuacucaugguaguaacauccaaugcagaucgaaucugcacugggauaacaucgucaaacucaccacaugucgucaaaacugcuacucaaggggaggucaaugugacugguguaauaccacugacaacaacacccaccaaaucucauuuugcaaaucucaaaggaacagaaaccagagggaaacuaugcccaaaaugccccaacugcacagaucuggacguagccuugggcagaccaaaaugcacggggaaaauacccucggcaagaguuucaauacuccaugaagucagaccuguuacaucugggugcuuuccuauaaugcacgacagaacaaaaauuagacagcugccuaaccuucuccgaggauacgaacauaucagauuaucaacucauaacguuaucaaugcagaaaaugcaccaggaggacccuacaaaauuggaaccucagggucuugcccuaacguuaccaauggaaacggauuuuucgcaacaauggcuugggccgucccaaaaaacgacaaaaacaaaacagcaacaaauccauuaacaauagaaguaccauacauuuguacagaaggagaagaccaaauuaccguuuggggguuccacucugauaacgagacccaaauggcaaagcucuauggggacucaaagccccagaaguucaccucaucugccaacggagugaccacacauuacguuucacagauugguggcuucccaaaucaaacagaagacggaggacuaccacaaagugguagaauuguuguugauuacauggugcaaaaaucugggaaaacaggaacaauuaccuaucaaagagguauuuuauugccucaaaagguguggugcgcaaguggcaggagcaagguaauaaaaggauccuugccuuuaauuggagaagcagauugccuccacgaaaaauacgguggauuaaacaaaagcaagccuuacuacacaggggaacaugcaaaggccauaggaaauugcccaauaugggugaagacacccuugaagcuggccaauggaaccaaauauagaccuccugcaaaacuauuaaaggaaagggguuucuucggagcuauugcugguuucuuagaaggaggaugggaaggaaugauugcagguuggcacggauacacgucccauggggcacauggaguagcgguggcagcagaccuuaagagcacucaagaggccauaaacaagauaacaaaaaaucucaacucuuugagugagcuggaaguaaagaaucuucaaagacuaagcggugccauggaugaacuccacaacgaaauacuagaacuagacgagaaaguggaugaucucagagcugauacaauaagcucacaaauagaacucgcaguccugcuuuccaaugaaggaauaauaaacagugaagaugaacaucucuuggcgcuugaaagaaagcugaagaaaaugcugggccccucugcuguagagauagggaauggaugcuuugaaaccaaacacaagugcaaccagaccugucucgacagaauagcugcugguaccuuugaugcaggagaauuuucucuccccaccuuugauucacugaauauuacugcugcauccuuaaaugacgauggauuggauaaucauaccauacugcuuuacuacucaacugcugccuccaguuuggcuguaacacugaugauagcuaucuucguuguuuauauggucuccagagacaauguuucuugcuccaucugucuauaa

SEQ ID NO: 58863 - RNA, 1758 nt, Artificial Sequence; identical to SEQ ID NO: 58697
  derived and/or modified CDS sequence (wt) from hemagglutinin__InfluenzaB__AGB08299

SEQ ID NO: 58864 - RNA, 1758 nt, Artificial Sequence; identical to SEQ ID NO: 58697
  derived and/or modified CDS sequence (wt) from hemagglutinin__InfluenzaB__AGB08300

SEQ ID NO: 58865 - RNA, 1755 nt, Artificial Sequence
  derived and/or modified CDS sequence (wt) from hemagglutinin__InfluenzaB__AGB97259
augaaggcaauaauuguacuacucaugguaguaacauccaaugcagaucgaaucugcacugggauaacaucuucaaacucaccucauguggucaaaacagcuacucaaggggaggucaaugugacuggcgugauaccacugacaacaacaccaacaaaaucuuauuuugcaaaucucaaaggaacaaggaccagagggaaacuaugcccggacugucucaacuguacagaucuggauguggccuugggcaggccaauguguguggggaccacaccuucugcuaaagcuucaauacuccacgaggucagaccuguuacauccgggugcuuuccuauaaugcacgacagaacaaaaaucaggcaacuacccaaucuucucagaggauaugaaaagaucagguuaucaacccaaaacguuaucgaugcagaaaaagcaccaggaggacccuacagacuuggaaccucaggaucuugcccuaacgcuaccaguaaaaucggauuuuucgcaacaauggcuugggcugucccaaaggacaacuacaaaaaugcaacgaacccacuaacaguggaaguaccauacauuuguacagaaggggaagaccaaauuacuguuuggggguuccauucagauaacaaaacccaaaugaagagccucuacggagacucaaauccucaaaaguucaccucaucugcuaauggaguaaccacacauuauguuucucagauuggcgacuucccagaucaaacagaagacggaggacuaccacaaaguggcagaauuguuguugauuacaugaugcaaaaaccugggaaaacaggaacaauugucuaucaaagagguguuuuguugccucaaaagguguggugcgcgaguggcaggagcaaaguaauaaaagggucauugccuuuaauuggugaagcagauugccuucaugaagaauacgguggauuaaacaaaagcaagccuuacuacacaggaaaacaugcaaaagccauaggaaauugcccaauauggguaaaaacaccuuugaagcuugccaauggaaccaaauauagaccuccugcaaaacuauugaaggaaagggguuucuucggagcuauugcugguuuccuagaaggaggaugggaaggaaugauugcagguuggcacggauacacaucucacggagcacauggaguggcaguggcggcagaccuuaagaguacacaagaagcuauaaauaagauaacaaaaaaucucaauucuuugagugagcuagaaguaaagaaccuucaaagacuaaguggugccauggaugaacuccacaacgaaauacucgagcuggaugagaaaguggaugaucucagagcugacacuauaagcucacaaauagaacuugcagucuugcuuuccaacgaaggaauaauaaacagugaagacgagcaucuauuggcacuugagagaaaacuaaagaaaaugcugggucccucugcuguagacauaggaaacggaugcuucgaaaccaaacacaaaugcaaccagaccugcuuagacaggauagcugcuggcaccuuuaaugcaggagaauuuucccuccccacuuuugauucauugaacauuacugcugcaucuuuaaaugaugauggauuggauaaccauacuauacugcucuauuacucaacugcugcuucuaguuuggcuguaacauuaaugcuagcuauuuuuauuguuuauauagucuccagagacaacguuucaugcuccaucugucuauaa

SEQ ID NO: 58866 - RNA, 1755 nt, Artificial Sequence
  derived and/or modified CDS sequence (wt) from hemagglutinin__InfluenzaB__AGB97265
augaaggcaauaauuguacuacucaugguaguaacauccaaugcagaucgaaucugcacugggauaacaucuucaaacucaccucauguggucaaaacagcuacucaaggggaagucaaugugacuggugugauaccacuaacaacaacaccaacaaaaucuuauuuugcaaaucucaaaggaacaaagaccagagggaaacuaugcccagacugucucaacuguacagaucuggauguggccuugggcaggccaaugugugugggaacuacaccuucugcgaaagcuucaauacuucaugaagucagaccuguuacauccgggugcuucccuauaaugcacgacagaacaaaaaucaggcaacuagccaaucuucucagaggauaugaaaauaucagguuaucaacccaaaacguuaucgaugcagaaaaagcaccaggaggacccuacagacuuggaaccucaggaucuugcccuaacgcuaccaguaaaagcggauuuuucgcaacaauggcuugggcugucccaaaggacaacaacaaaaaugcaacgaacccauuaacaguagaaguaccauacauuugugcagaaggagaagaccaaauuacuguuuggggguuccauucagauaacaaaacccaaaugaagaaccucuauggagacucaaauccucaaaaguucaccucaucugcuaauggaguaaccacacauuauguuucucagauuggcggcuucccagaucaaacagaagacggaggacuaccacaaagcggcagaauugucguugauuacaugaugcaaaaaccugggaaaacaggaacaauugucuaucaaagagguguuuuguugccucaaaagguguggugcgcgaguggcaggagcaaaguaauaaaaggguccuugccuuuaauuggugaagcagauugccuucaugaaaaauacgguggauuaaacaaaagcaagccuuacuacacaggagaacaugcaaaagccauaggaaauugcccaauaugggugaaaacaccuuugaagcuugccaauggaaccaaauauagaccuccugcaaaacuauuaaaggaaagggguuucuucggagcuauugcugguuuccuagaaggaggaugggaaggaaugauugcagguuggcacggauacacaucucacggagcacauggaguggcaguugcugcagaccuuaagagcacacaagaagcuauaaacaagauaacaaaaaaucucaacucuuugagugagcuagaaguaaagaaucuucaaaggcuaaguggugccauggaugaacuccacaacgaaauacucgagcuggaugagaaaguggaugaucucagagcugacacuauaaguucacaaauagaacuugcagucuugcuuuccaacgaaggaauaauaaacagugaagaugagcaucuauuggcacuugagagaaaacuaaagaaaaugcugggucccucugcuguagacauaggaaauggaugcuucgaaaccaaacacaaaugcaaccagaccugcuuagacaggauagcugcuggcaccuuuaaugcaggagaauuuucucuccccacuuuugauucauugaacauuacugcugcaucuuuaaaugaugauggauuggauaaccauacuauacugcucuauuacucaacugcugcuucuaguuuggcuguaacauugaugcuagcuauuuuuauuguuuauauggucuccagagacaacguuucaugcuccaucugucuauaa

SEQ ID NO: 58867 - RNA, 1755 nt, Artificial Sequence
  derived and/or modified CDS sequence (wt) from hemagglutinin__InfluenzaB__AGF44878
augaaggcaauaauuguacuacucaugguaguaacauccaaugcagaucgaaucugcacugggauaacaucuucaaacucaccucauguggucaaaacagcuacucaaggggaggucaaugugacuggugugauaccacuaacaacaacaccaacaaaaucuuauuuugcaaaucucaaaggaacaaagaccagagggaaacuaugcccagacugucucaacuguacagaucuggauguggccuugggcaggccaaugugugugggaacuacaccuucugcgaaagcuucaauacuucacgaagucagaccuguuacauccgggugcuucccuauaaugcacgacagaacaaaaaucaggcaacuagccaaucuucucagaggauaugaaaauaucagguuaucaacccaaaacguuaucgaugcagaaaaagcaccaggaggacccuacagacuuggaaccucaggaucuugcccuaacgcuaccaguaaaagcggauuuuucgcaacaauggcuugggcugucccaaaggacaacaacaaaaaugcaacgaacccauuaacaguagagguaccauacauuugugcagaaggagaagaccaaauuacuguuuggggguuccauucagauaacaaaacccaaaugaagaaccucuauggagacucaaauccucaaaaguucaccucaucugcuaauggaguaaccacacauuauguuucucagauuggcggcuucccagaucaaacagaagacggaggacuaccacaaagcggcagaauugucguugauuacaugaugcaaaaaccugggaaaacaggaacaauugucuaucaaagagguguuuuguugccucaaaagguguggugcgcgaguggcaggagcaaaguaauaaaaggguccuugccuuuaauuggugaagcagauugccuucaugaaaaauacgguggauuaaacaaaagcaagccuuacuacacaggagaacaugcaaaagccauaggaaauugcccaauaugggugaaaacaccuuugaagcuugccaauggaaccaaauauagaccuccugcaaaacuauuaaaggaaagggguuucuucggagcuauugcugguuuccuagaaggaggaugggaaggaaugauugcagguuggcacggauacacaucucacggagcacauggaguggcaguugcugcagaccuuaagagcacacaagaagcuauaaacaagauaacaaaaaaucucaacucuuugagugagcuagaaguaaagaaucuucaaaggcuaaguggugccauggaugaacuccacaacgaaauacucgagcuggaugagaaaguggaugaucucagagcugacacuauaaguucacaaauagaacuugcagucuugcuuuccaacgaaggaauaauaaacagugaagaugagcaucuauuggcacuugagagaaaacuaaagaaaaugcugggucccucugcuguagacauagggaauggaugcuucgaaaccaaacacaaaugcaaccagaccugcuuagacaggauagcugcuggcaccuuuaaugcaggagaauuuucucuccccacuuuugauucauugaacauuacugcugcaucuuuaaaugaugauggauuggauaaccauacuauacugcucuauuacucaacugcugcuucuaguuuggcuguaacauugaugcuagcuauuuuuauuguuuauauggucuccagagacaacguuucaugcuccaucugucuauaa

SEQ ID NO: 58868 - RNA, 1755 nt, Artificial Sequence
  derived and/or modified CDS sequence (wt) from hemagglutinin__InfluenzaB__AGF44879
augaaggcaauaauuguacuacucaugguaguaacauccaaugcagaucgaaucugcacugggauaacaucuucaaacucaccucauguggucaaaacagcuacucaaggggaggucaaugugacuggugugauaccacuaacaacaacaccaacaaaaucuuauuuugcaaaucucaaaggaacaaagaccagagggaaacuaugcccagacugucucaacuguacagaucuggauguggccuugggcaggccaaugugugugggaacuacaccuucugcgaaagcuucaauacuucacgaagucagaccuguuacauccgggugcuucccuauaaugcacgacagaacaaaaaucaggcaacuagccaaucuucucagaggauaugaaaauaucagguuaucaacccaaaacguuaucgaugcagaaaaagcaccaggaggacccuacagacuuggaaccucaggaucuugcccuaacgcuaccaguaaaagcggauuuuucgcaacaauggcuugggcugucccaaaggacaacaacaaaaaugcaacgaacccauuaacaguagagguaccauacauuugugcagaaggagaagaccaaauuacuguuuggggguuccauucggauaacaaaacccaaaugaagaaccucuauggagacucaaauccucaaaaguucaccucaucugcuaauggaguaaccacacauuauguuucucagauuggcggcuucccagaucaaacagaagacggaggacuaccacaaagcggcagaauugucguugauuacaugaugcaaaaaccugggaaaacaggaacaauugucuaucaaagagguguuuuguugccucaaaagguguggugcgcgaguggcaggagcaaaguaauaaaaggguccuugccuuuaauuggugaagcagauugccuucaugaaaaauacgguggauuaaacaaaagcaagccuuacuacacaggagaacaugcaaaagccauaggaaauugcccaauaugggugaaaacaccuuugaagcuugccaauggaaccaaauauagaccuccugcaaaacuauuaaaggaaagggguuucuucggagcuauugcugguuuccuagaaggaggaugggaaggaaugauugcagguuggcacggauacacaucucacggagcacauggaguggcaguugcugcagaccuuaagagcacacaagaagcuauaaacaagauaacaaaaaaucucaacucuuugagugagcuagaaguaaagaaucuucaaaggcuaaguggugccauggaugaacuccacaacgaaauacucgagcuggaugagaaaguggaugaucucagagcugacacuauaaguucacaaauagaacuugcagucuugcuuuccaacgaaggaauaauaaacagugaagaugagcaucuauuggcacuugagagaaaacuaaagaaaaugcugggucccucugcuguagacauagggaauggaugcuucgaaaccaaacacaaaugcaaccagaccugcuuagacaggauagcugcuggcaccuuuaaugcaggagaauuuucucuccccacuuuugauucauugaacauuacugcugcaucuuuaaaugaugauggauuggauaaccauacuauacugcucuauuacucaacugcugcuucuaguuuggcuguaacauugaugcuagcuauuuuuauuguuuauauggucuccagagacaacguuucaugcuccaucugucuauaa

SEQ ID NO: 58869 - RNA, 1755 nt, Artificial Sequence
  derived and/or modified CDS sequence (wt) from hemagglutinin__InfluenzaB__AGF44881
augaaggcaauaauuguacuacucaugguaguaacauccaaugcagaucgaaucugcacugggauaacaucuucaaacucaccucauguggucaaaacagcuacucaaggggaggucaaugugacuggugugauaccacuaacaacaacaccaacaaaaucuuauuuugcaaaucucaaaggaacaaagaccagagggaaacuaugcccagacugucucaacuguacagaucuggauguggccuugggcaggccaaugugugugggaacuacaccuucugcgaaagcuucaauacuucacgaagucagaccuguuacauccgggugcuucccuauaaugcacgacagaacaaaaaucaggcaacuagccaaucuucucagaggauaugaaaauaucagguuaucaacccaaaacguuaucgaugcagaaaaagcaccaggaggacccuacagacuuggaaccucaggaucuugcccuaacgcuaccaguaaaagcggauuuuucgcaacaauggcuugggcugucccaaaggacaacaacaaaaaugcaacgaacccauuaacaguagaaguaccauacauuugugcagaaggagaagaccaaauugcuguuuggggguuccauucagauaacaaaacccaaaugaagaaccucuauggagacucaaauccucaaaaguucaccucaucugcuaauggaguaaccacacauuauguuucucagauuggcggcuucccagaucaaacagaagacggaggacuaccacaaagcggcagaauugucguugauuacaugaugcaaaaaccugggaaaacaggaacaauugucuaucaaagagguguuuuguugccucaaaagguguggugcgcgaguggcaggagcaaaguaauaaaaggguccuugccuuuaauuggugaagcagauugucuucaugaaaaauacgguggauuaaacaaaagcaagccuuacuacacaggagaacaugcaaaagccauaggaaauugcccaauaugggugaaaacaccuuugaagcuugccaauggaaccaaauauagaccuccugcaaaacuauuaaaggaaagggguuucuucggagcuauugcugguuuccuagaaggaggaugggaaggaaugauugcagguuggcacggauacacaucucacggagcacauggaguggcaguugcugcagaccuuaagagcacacaagaagcuauaaacaagauaacaaaaaaucucaacucuuugagugagcuagaaguaaagaaucuucaaaggcuaaguggugccauggaugaacuccacaacgaaauacucgagcuggaugagaaaguggaugaucucagagcugacacuauaaguucacaaauagaacuugcagucuugcuuuccaacgaaggaauaauaaacagugaagaugagcaucuauuggcacuugagagaaaacuaaagaaaaugcugggucccucugcuguagacauaggaaauggaugcuucgaaaccaaacacaaaugcaaccagaccugcuuagacaggauagcugcuggcaccuuuaaugcaggagaauuuucucuccccacuuuugauucauugaacauuacugcugcaucuuuaaaugaugauggauuggauaaccauaccauacugcucuauuacucaacugcugcuucuaguuuggcuguaauauugaugcuagcuauuuuuauuguuuauauggucuccagagacaacguuucaugcuccaucugucuauaa

SEQ ID NO: 58870 - RNA, 1755 nt, Artificial Sequence
  derived and/or modified CDS sequence (wt) from hemagglutinin__InfluenzaB__AGF44882
augaaggcaauaauuguacuacucaugguaguaacauccaaugcagaucgaaucugcacugggauaacaucuucaaacucaccucauguggucaaaacagcuacucaaggggaggucaaugugacuggugugauaccacuaacaacaacaccaacaaaaucuuauuuugcaaaucucaaaggaacaaagaccagagggaaacuaugcccagacugucucaacuguacagaucuggauguggccuugggcaggccaaugugugugggaacuacaccuucugcgaaagcuucaauacuucacgaagucagaccuguuacauccgggugcuucccuauaaugcacgacagaacaaaaaucaggcaacuagccaaucuucucagaggguaugaaaauaucagguuaucaacccaaaacguuaucgaugcagaaaaagcaccaggaggacccuacagacuuggaaccucaggaucuugcccuaacgcuaccaguaaaagcggauuuuucgcaacaauggcuugggcugucccaaaggacaacaacaaaaaugcaacgaacccauuaacaguagaaguaccauacauuugugcagaaggagaagaccaaauuacuguuuggggguuccauucagauaacaaaacccaaaugaagaaccucuauggagacucaaauccucaaaaguucaccucaucugcuaauggaguaaccacacauuauguuucucagauuggcggcuucccagaucaaacagaagacggaggacuaccacaaagcggcagaauugucguugauuacaugaugcaaaaaccugggaaaacaggaacaauugucuaucaaagagguguuuuguugccucaaaagguguggugcgcgaguggcaagagcaaaguaauaaaaggguccuugccuuuaauuggugaagcagauugccuucaugaaaaauacgguggauuaaacaaaagcaagccuuacuacacaggagaacaugcaaaagccauaggaaauugcccaauaugggugaaaacaccuuugaagcuugccaauggaaccaaauauagaccuccugcaaaacuauuaaaggaaagggguuucuucggagcuauugcugguuuccuagaaggaggaugggaaggaaugauugcggguuggcacggauacacaucucacggagcacauggaguggcaguugcugcagaccuuaagagcacacaagaagcuauaaacaagauaacaaaaaaucucaacucuuugagugagcuagaaguaaagaaucuucaaaggcuaaguggugccauggaugaacuccacaacgaaauacucgagcuggaugagaaaguggaugaucucagagcugacacuauaaguucacaaauagaacuugcagucuugcuuuccaacgaaggaauaauaaacagugaagaugagcaucuauuggcacuugagagaaaacuaaagaaaaugcugggucccucugcuguagacauaggaaauggaugcuucgaaaccaaacacaaaugcaaccagaccugcuuagacaggauagcugcuggcaccuuuaaugcaggagaauuuucucuccccacuuuugauucauugaacauuacugcugcaucuuuaaaugaugauggauuggauaaccauacuauacugcucuauuacucaacugcugcuucuaguuuggcuguaacauugaugcuagcuauuuuuauuguuuauauggucuccagagacaacguuucaugcuccaucugucuauaa

SEQ ID NO: 58871 - RNA, 1755 nt, Artificial Sequence
  derived and/or modified CDS sequence (wt) from hemagglutinin__InfluenzaB__AGF44883
augaaggcaauaauuguacuacucaugguaguaacauccaaugcagaucgaaucugcacugggauaacaucuucaaacucaccucauguggucaaaacagcuacucaaggggaggucaaugugacuggugugauaccacuaacaacaacaccaacaaaaucuuauuuugcaaaucucaaaggaacaaagaccagagggaaacuaugcccagacugucucaacuguacagaucuggauguggccuugggcaggccaaugugugugggaacuacaccuucugcgaaagcuucaauacuucacgaagucagaccuguuacauccgggugcuucccuauaaugcacgacagaacaaaaaucaggcaacuagccaaucuucucagaggauaugaaaauaucagguuaucaacccaaaacguuaucgaugcagaaaaagcaccaggaggacccuacagacuuggaaccucaggaucuugcccuaacgcuaccaguaaaagcggauuuuucgcaacaauggcuugggcugucccaaaggacaacaacaaaaaugcaacgaacccauuaacaguagaaguaccauacauuugugcagaaggagaagaccaaauuacuguuuggggguuccauucagauaacaaaacccaaaugaagaaccucuauggagacucaaauccucaaaaguucaccucaucugcuaauggaguaaccacacauuauguuucucagauuggcggcuucccagaucaaacagaagacggaggacuaccacaaagcggcagaauugucguugauuacaugaugcaaaaaccugggaaaacaggaacaauugucuaucaaagagguguuuuguugccucaaaagguguggugcgcgaguggcaggagcaaaguaauaaaaggguccuugccuuuaauuggugaagcagauugccuucaugaaaaauacgguggauuaaacaaaagcaagccuuacuacacaggagaacaugcaaaagccauaggaaauugcccaauaugggugaaaacaccuuugaagcuugccaauggaaccaaauauagaccuccugcaaaacuauuaaaggaaagggguuucuucggagcuauugcugguuuccuagaaggaggaugggaaggaaugauugcagguuggcacggauacacaucucacggagcacauggaguggcaguugcugcagaccuuaagagcacacaagaagcuauaaacaagauaacaaaaaaucucaacucuuugagugagcuagaaguaaagaaucuucaaaggcuaaguggugccauggaugaacuccacaacgaaauacucgagcuggaugagaaaguggaugaucucagagcugacacuauaaguucacaaauagaacuugcagucuugcuuuccaacgaaggaauaauaaacagugaagaugagcaucuauuggcacuugagagaaaacuaaagaaaaugcugggucccucugcuguagacauaggaaauggaugcuucgaaaccaaacacaaaugcaaccagaccugcuuagacaggauagcugcuggcaccuuuaaugcaggagaauuuucucuccccacuuuugauucauugaacauuacugcugcaucuuuaaaugaugauggauuggauaaccauacuauacugcucuauuacucaacugcugcuucuaguuuggcuguaacauugaugcuagcuauuuuuauuguuuauauggucuccagagacaacguuucaugcuccaucugucuauaa

SEQ ID NO: 58872 - RNA, 1755 nt, Artificial Sequence; identical to SEQ ID NO: 58867
  derived and/or modified CDS sequence (wt) from hemagglutinin__InfluenzaB__AGF44884

SEQ ID NO: 58873 - RNA, 1755 nt, Artificial Sequence; identical to SEQ ID NO: 58868
  derived and/or modified CDS sequence (wt) from hemagglutinin__InfluenzaB__AGF44886

SEQ ID NO: 58874 - RNA, 1755 nt, Artificial Sequence; identical to SEQ ID NO: 58871
  derived and/or modified CDS sequence (wt) from hemagglutinin__InfluenzaB__AGF44887

SEQ ID NO: 58875 - RNA, 1755 nt, Artificial Sequence; identical to SEQ ID NO: 58868
  derived and/or modified CDS sequence (wt) from hemagglutinin__InfluenzaB__AGF44888

SEQ ID NO: 58876 - RNA, 1755 nt, Artificial Sequence
  derived and/or modified CDS sequence (wt) from hemagglutinin__InfluenzaB__AGL09834
augaaggcaauaauuguacuacucaugguaguaacauccaaugcagaucgaaucugcacugggauaacaucuucaaacucaccucauguggucaaaacagcuacucaaggggaggucaaugugacugguguaauaccacuaacaacaacaccaacaaaaucuuauuuugcaaaucucaaaggaacaaagaccagagggaaacuaugcccagacugucucaacuguacagaucuggauguggccuugggcaggccaaugugugugggaacuacaccuucugcgaaagcuucaauacuucacgaagucagaccuguuacauccgggugcuucccuauaaugcacgacagaacaaaaaucaggcaacuagccaaucuucucagaggauaugaaaauaucagguuaucaacccaaaacguuaucgaugcagaaaaagcaccaggaggacccuacagacuuggaaccucaggaucuugcccuaacgcuaccaguaaaagcggauuuuucgcaacaauggcuugggcugucccaaaggacaacaacaaaaaugcaacgaacccauuaacaguagaaguaccauacauuugugcagaaggagaagaccaaauugcuguuuggggguuccauucagauaacaaaacccaaaugaagaaccucuauggagacucaaauccucaaaaguucaccucaucugcuaauggaguaaccacacauuauguuucucagauuggcggcuucccagaucaaacagaagacggaggacuaccacaaagcggcagaauugucguugauuacaugaugcaaaaaccugggaaaacaggaacaauugucuaucaaagagguguuuuguugccucaaaagguguggugcgcgaguggcaggagcaaaguaauaaaaggguccuugccuuuaauuggugaagcagauugucuucaugaaaaauacgguggauuaaacaaaagcaagccuuacuacacaggagaacaugcaaaagccauaggaaauugcccaauaugggugaaaacaccuuugaagcuugccaauggaaccaaauauagaccuccugcaaaacuauuaaaggaaagggguuucuucggagcuauugcugguuuccuagaaggaggaugggaaggaaugauugcagguuggcacggauacacaucucacggagcacauggaguggcaguugcugcagaccuuaagagcacacaagaagcuauaaacaagauaacaaaaaaucucaacucuuugagugagcuagaaguaaagaaucuucaaaggcuaaguggugccauggaugaacuccacaacgaaauacucgagcuggaugagaaaguggaugaucucagagcugacacuauaaguucacaaauagaacuugcagucuugcuuuccaacgaaggaauaauaaacagugaagaugagcaucuauuggcacuugagagaaaacuaaagaaaaugcugggucccucugcuguagacauaggaaauggaugcuucgaaaccaaacacaaaugcaaccagaccugcuuagacaggauagcugcuggcaccuuuaaugcaggagauuuuucucuccccacuuuugauucauugaacauuacugcugcaucuuuaaaugaugauggauuggauaaccauacuauacugcucuauuacucaacugcugcuucuaguuuggcuguaacauugaugcuagcuauuuuuauuguuuauauggucuccagagacaacguuucaugcuccaucugucuauga

SEQ ID NO: 58877 - RNA, 1755 nt, Artificial Sequence; identical to SEQ ID NO: 58867
  derived and/or modified CDS sequence (wt) from hemagglutinin__InfluenzaB__AGL09835

SEQ ID NO: 58878 - RNA, 1755 nt, Artificial Sequence
  derived and/or modified CDS sequence (wt) from hemagglutinin__InfluenzaB__AGL09836
augaaggcaauaauuguacuacucaugguaguaacauccaaugcagaucgaaucugcacugggauaacaucuucaaacucaccucauguggucaaaacagcuacucaaggggaggucaaugugacuggugugauaccacuaacaacaacaccaacaaaaucuuauuuugcaaaucucaaaggaacaaagaccagagggaaacuaugcccagacugucucaacuguacagaucuggauguggccuugggcaggccaaugugugugggaacuacaccuucugcgaaagcuucaauacuucacgaagucagaccuguuacauccgggugcuucccuauaaugcacgacagaacaaaaaucaggcaacuagccaaucuucucagaggauaugaaaauaucagguuaucaacccaaaacguuaucgaugcaaaaaaagcaccaggaggacccuacagacuuggaaccucaggaucuugcccuaacgcuaccaguaaaagcggauuuuucgcaacaauggcuugggcugucccagaggacaacaacaaaaaugcaacgaacccauuaacaguagagguaccauacauuugugcagaaggagaagaccaaauuacuguuuggggguuccauucagauaacaaaacccaaaugaagaaccucuauggagacucaaauccucaaaaguucaccucaucugcuaauggaguaaccacacauuauguuucucagauuggcggcuucccagaucaaacagaagacggaggacuaccacaaagcggcagaauugucguugauuacaugaugcaaaaaccugggaaaacaggaacaauugucuaucaaagagguguuuuguugccucaaaagguguggugcgcgaguggcaggagcaaaguaauaaaaggguccuugccuuuaauuggugaagcagauugccuucaugaaaaauacgguggauuaaacaaaagcaagccuuacuacacaggagaacaugcaaaagccauaggaaauugcccaauaugggugaaaacaccuuugaagcuugccaauggaaccaaauauagaccuccugcaaaacuauuaaaggaaagggguuucuucggagcuauugcugguuuccuagaaggaggaugggaaggaaugauugcagguuggcacggauacacaucucacggagcacauggaguggcaguugcugcagaccuuaagagcacacaagaagcuauaaacaagauaacaaaaaaucucaacucuuugagugagcuagaaguaaagaaucuucaaaggcuaaguggugccauggaugaacuccacaacgaaauacucgagcuggaugagaaaguggaugaucucagagcugacacuauaaguucacaaauagaacuugcagucuugcuuuccaacgaaggaauaauaaacagugaagaugagcaucuauuggcacuugagagaaaacuaaagaaaaugcugggucccucugcuguagacauagggaauggaugcuucgaaaccaaacacaaaugcaaccagaccugcuuagacaggauagcugcuggcaccuuuaaugcaggagaauuuucucuccccacuuuugauucauugaacauuacugcugcaucuuuaaaugaugauggauuggauaaccauacuauacugcucuauuacucaacugcugcuucuaguuuggcuguaacauugaugcuagcuauuuuuauuguuuauauggucuccagagacaacguuucaugcuccaucugucuauaa

SEQ ID NO: 58879 - RNA, 1755 nt, Artificial Sequence; identical to SEQ ID NO: 58867
  derived and/or modified CDS sequence (wt) from hemagglutinin__InfluenzaB__AGL09837

SEQ ID NO: 58880 - RNA, 1755 nt, Artificial Sequence; identical to SEQ ID NO: 58867
  derived and/or modified CDS sequence (wt) from hemagglutinin__InfluenzaB__AGL09838

SEQ ID NO: 58881 - RNA, 1755 nt, Artificial Sequence
  derived and/or modified CDS sequence (wt) from hemagglutinin__InfluenzaB__AGL09839
augaaggcaauaauuguacuacucaugguaguaacauccaaugcagaucgaaucugcacugggauaacaucuucaaacucaccucauguggucaaaacagcuacucaaggggaggucaaugugacuggugugauaccacuaacaacaacaccaacaaaaucuuauuuugcaaaucucaaaggaacaaagaccagagggaaacuaugcccagacugucucaacuguacagaucuggauguggccuugggcaggccaaugugugugggaacuacaccuucugcgaaagcuucaauacuucacgaagucagaccuguuacauccgggugcuucccuauaaugcacgacagaacaaaaaucaggcaacuagccaaucuucucagaggauaugaaaauaucagguuaucaacccaaaacguuaucgaugcagaaaaagcaccaggaggacccuacagacuuggaaccucaggaucuugcccuaacgcuaccaguaaaagcggauuuuucgcaacaauggcuugggcugucccaaaggacaacaacaaaaaugcaacgaacccauuaacaguagagguaccauacauuugugcagaaggagaagaccaaauuacuguuuggggguuccauucagauaacaaaacccaaaugaagaaccucuauggagacucaaauccucaaaaguucaccucaucugcuaauggaguaaccacacauuauguuucucagauuggcggcuucccagaucaaacagaagacggaggacuaccacaaagcggcagaauugucguugauuacaugaugcaaaaaccugggaaaacaggaacaauugucuaucaaagagguguuuuguugccucaaaagguguggugcgcgaguggcaggagcaaaguaauaaaaggguccuugccuuuaauuggugaagcagauugccuucaugaaaaauacgguggauuaaacaaaagcaagccuuacuacacaggagaacaugcaaaagccauaggaaauugcccaauaugggugaaaacaccuuugaagcuugccaauggaaccaaauauagaccuccugcaaaacuauuaaaggaaagggguuucuucggagcuauugcugguuuccuagaaggaggaugggaaggaaugauugcagguuggcacggauacacaucucacggagcacauggaguggcaguugcugcagaccuuaagagcacacaagaagcuauaaacaagauaacaaaaaaucucaacucuuugagugagcuagaaguaaagaaucuucaaaggcuaaguggugccauggaugaacuccacaacgaaauacucgagcuggaugagaaaguggaugaucucagagcugacacuauaaguucacaaauagaacuugcagucuugcuuuccaacgaaggaauaauaaacagugaagaugagcaucuauuggcacuugagagaaaacuaaagaaaaugcuaggucccucugcuguagacauagggaauggaugcuucgaaaccaaacacaaaugcaaccagaccugcuuagacaggauagcugcuggcaccuuuaaugcaggagaauuuucucuccccacuuuugauucauugaacauuacugcugcaucuuuaaaugaugauggauuggauaaccauacuauacugcucuauuacucaacugcugcuucuaguuuggcuguaacauugaugcuagcuauuuuuauuguuuauauggucuccagagacaacguuucaugcuccaucugucuauaa

SEQ ID NO: 58882 - RNA, 1755 nt, Artificial Sequence; identical to SEQ ID NO: 58871
  derived and/or modified CDS sequence (wt) from hemagglutinin__InfluenzaB__AGL09840

SEQ ID NO: 58883 - RNA, 1755 nt, Artificial Sequence; identical to SEQ ID NO: 58871
  derived and/or modified CDS sequence (wt) from hemagglutinin__InfluenzaB__AGL09841

SEQ ID NO: 58884 - RNA, 1758 nt, Artificial Sequence
  derived and/or modified CDS sequence (wt) from hemagglutinin__InfluenzaB__AGL09842
augaaggcaauaauuguacuacucaugguaguaacauccaaugcagaucgaaucugcacugggauaacaucgucaaacucaccacaugucgucaaaacugcuacucaaggggaggucaaugugaccgguguaauaccacugacaacaacacccaccaaaucucauuuugcaaaucucaaaggaacagaaaccagggggaaacuaugcccaaaaugccuuaacugcacagaucuggacguagccuugggcagaccaaaaugcacggggaaaauacccucggcaagaguuucaauacuccaugaagucagaccuguuacaucugggugcuuuccuauaaugcacgauagaacaaaaauuagacagcugccuaaccuucuccgaggauacgaacauaucagguuaucaacucacaacguuaucaaugcagaaaaugcaccaggaggacccuacaaaauuggaaccucagggucuugcccuaacguuaccaauggaaacggauucuucgcaacaauggcuugggccgucccaaaaaacgacaaaaacaaaacagaaacaaauccauuaacaauagaaguaccauacauuuguacagaaggagaagaccaaauuaccguuuggggguuccacucugacaacgagacccaaauggcaaagcucuauggggacucaaaaccccagaaguucaccucaucugccaacggagugaccacacauuauguuucacagauugguggcuucccaaaucaaacagaagacggaggacuaccacaaagugguagaauuguuguugauuacauggugcaaaaaucugggaaaacaggaacaauuaccuaucaaagagguauuuuauugccucaaaagguguggugcgcaaguggcaggagcaagguaauaaaaggauccuugccuuuaauuggagaagcagauugccuccacgaaaaauacgguggauuaaacaaaagcaagccuuacuacacaggggaacaugcaaaggccauaggaaauugcccaauaugggugaaaacacccuugaagcuggccaauggaaccaaauauagaccuccugcaaaacuauuaaaggaaagggguuucuucggagcuauugcugguuucuuagaaggaggaugggaaggaaugauugcagguuggcacggauacacaucccauggggcacauggaguagcgguggcagcugaccuuaagagcacucaagaggccauaaacaagauaacaaaaaaucucaacucuuugagugagcuggaaguaaagaaucuucaaagacuaagcggugccauggaugaacuccacaaugaaauacuagaacuagaugagaaaguggaugaucucagagcugauacaauaagcucacaaauagaacucgcaguccugcuuuccaaugaaggaauaauaaacagugaagaugaacaucucuuggcgcuugaaagaaagcugaagaaaaugcugggccccucugcuguagagauagggaauggaugcuuugaaaccaaacacaagugcaaccagaccugucucgacagaauagcugcugguaccuuugaugcaggagaauuuucucuccccaccuuugauucacugaauauuacugcugcaucuuuaaaugacgauggauuggauaaucauacuauacugcuuuacuacucaacugcugccuccaguuuggcuguaacacugaugauagcuaucuuuguuguuuauauggucuccagagacaauguuucuugcuccaucugucuauaa

SEQ ID NO: 58885 - RNA, 1755 nt, Artificial Sequence
  derived and/or modified CDS sequence (wt) from hemagglutinin__InfluenzaB__AGL09843
augaaggcaauaauuguacuacucaugguaguaacauccaaugcagaucgaaucugcacugggauaacaucuucaaacucaccucauguggucaaaacagcuacucaaggggaggucaaugugacuggugugauaccacuaacaacaacaccaacaaaaucuuauuuugcaaaucucaaaggaacaaagaccagagggaaacuaugcccagacugucucaacuguacagaucuggauguggccuugggcaggccaaugugugugggaacuacaccuucugcgaaagcuucaauacuucacgaagucagaccuguuacauccgggugcuucccuauaaugcacgacagaacaaaaaucaggcaacuagccaaucuucucagaggauaugaaaauaucagguuaucaacccaaaacguuaucgaugcagaaaaagcaccaggaggacccuacagacuugggaccucaggaucuugcccuaacgcuaccaguaaaagcggauuuuucgcaacaauggcuugggcugucccaaaggacaacaacaaaaaugcaacgaacccauuaacaguagaaguaccauacauuugugcagaaggagaagaccaaauuacuguuuggggguuccauucagauaacaaaacccaaaugaagaaccucuauggagacucaaauccucaaaaguucaccucaucugcuaauggaguaaccacacauuauguuucucagauuggcggcuucccagaucaaacagaagacggaggacuaccacaaagcggcagaauugucguugauuacaugaugcaaaaaccugggaaaacaggaacaauugucuaucaaagagguguuuuguugccucaaaagguguggugcgcgaguggcaggagcaaaguaauaaaaggguccuugccuuuaauuggugaagcagauugccuucaugaaaaauacgguggauuaaacaaaagcaagccuuacuacacaggagaacaugcaaaagccauaggaaauugcccaauaugggugaaaacaccuuugaagcuugccaauggaaccaaauauagaccuccugcaaaacuauuaaaggaaagggguuucuucggagcuauugcugguuuccuagaaggaggaugggaaggaaugauugcagguuggcacggauacacaucucacggagcacauggaguggcaguugcugcagaccuuaagagcacacaagaagcuauaaacaagauaacaaaaaaucucaacucuuugagugagcuagaaguaaagaaucuucaaaggcuaaguggugccauggaugaacuccacaacgaaauacucgagcuggaugagaaaguggaugaucucagagcugacacuauaaguucacaaauagaacuugcagucuugcuuuccaacgaaggaauaauaaacagugaagaugagcaucuauuggcacuugagagaaagcuaaagaaaaugcugggucccucugcuguagacauaggaaauggaugcuucgaaaccaaacacaaaugcaaccagaccugcuuagacaggauagcugcuggcaccuuuaaugcaggagaauuuucucuccccacuuuugauucauugaacauuacugcugcaucuuuaaaugaugauggauuggauaaccauacuauacugcucuauuacucaacugcugcuucuaguuuggcuguaacauugaugcuagcuauuuuuauuguuuauauggucuccagagacaacguuucaugcuccaucugucuauaa

SEQ ID NO: 58886 - RNA, 1755 nt, Artificial Sequence
  derived and/or modified CDS sequence (wt) from hemagglutinin__InfluenzaB__AGL09844
augaaggcaauaauuguacuacucaugguaguaacauccaaugcagaucgaaucugcacugggauaacaucuucaaacucaccucauguggucaaaacagcuacucaaggggaggucaaugugacuggugugauaccacuaacaacaacaccaacaaaaucuuauuuugcaaaucucaaaggaacaaagaccagagggaaacuaugcccagacugucucaacuguacagaucuggauguggccuugggcaggccaaugugugugggaacuacaccuucugcgaaagcuucaauacuucacgaagucagaccuguuacauccgggugcuucccuauaaugcacgacagaacaaaaaucaggcaacuagccaaucuucucagaggauaugaaaauaucagguuaucaacccaaaacguuaucgaugcagaaaaagcaccaggaggacccuacagacuuggaaccucaggaucuugcccuaacgcuaccaguaaaagcggauuuuucgcaacaauggcuugggcugucccaaaggacaacaacaaaaaugcaacgaacccauuaacaguagaaguaccauacauuugugcagaaggagaagaccaaauuacuguuuggggguuccauucagauaacaaaacccaaaugaagaaccucuauggagacucaaauccucaaaaguucaccucaucugcuaauggaguaaccacacauuauguuucucagauuggcggcuucccagaucaaaaagaagacggaggacuaccacaaagcggcagaauugucguugauuacaugaugcaaaaaccugggaaaacaggaacaauugucuaucaaagagguguuuuguugccucaaaagguguggugcgcgaguggcaggagcaaaguaauaaaaggguccuugccuuuaauuggugaagcagauugccuucaugaaaaauacgguggauuaaacaaaagcaagccuuacuacacaggagaacaugcaaaagccauaggaaauugcccaauaugggugaaaacaccuuugaagcuugccaauggaaccaaauauagaccuccugcaaaacuauuaaaggaaagggguuuuuucggagcuauugcugguuuccuagaaggaggaugggaaggaaugauugcagguuggcacggauacacaucucacggagcacauggaguggcaguugcugcagaccuuaagagcacacaagaagcuauaaacaagauaacaaaaaaucucaacucuuugagugagcuagaaguaaagaaucuucaaaggcuaaguggugccauggaugaacuccacaacgaaauacucgagcuggaugagaaaguggaugaucucagagcugacacuauaaguucacaaauagaacuugcagucuugcuuuccaacgaaggaauaauaaacagugaagaugagcaucuauuggcacuugagagaaaacuaaagaaaaugcugggucccucugcuguagacauaggaaauggaugcuucgaaaccaaacacaaaugcaaccagaccugcuuagacaggauagcugcuggcaccuuuaaugcaggagaauuuucucuccccacuuuugauucauugaacauuacugcugcaucuuuaaaugaugauggauuggauaaccauacuauacugcucuauuacucaacugcugcuucuaguuuggcuguaacauugaugcuagcuauuuuuauuguuuauauggucuccagagacaacguuucaugcuccaucugucuauaa

SEQ ID NO: 58887 - RNA, 1755 nt, Artificial Sequence; identical to SEQ ID NO: 58871
  derived and/or modified CDS sequence (wt) from hemagglutinin__InfluenzaB__AGL09845

SEQ ID NO: 58888 - RNA, 1755 nt, Artificial Sequence
  derived and/or modified CDS sequence (wt) from hemagglutinin__InfluenzaB__AGL09846
augaaggcaauaauuguacuacucaugguaguaacauccaaugcagaucgaaucugcacugggauaacaucuucaaacucaccucauguggucaaaacagcuacucaaggggagguuaaugugacuggugugauaccacuaacaacaacaccaacaaaaucuuauuuugcaaaucucaaaggaacaaagaccagagggaaacuaugcccagacugucucaacuguacagaucuggauguggccuugggcaggccaaugugugugggaacuacaccaucugcgaaagcuucaauacuucacgaagucagaccuguuacauccgggugcuucccuauaaugcacgacagaacaaaaaucaggcaacuagccaaucuucucagaggauaugaaaauaucagguuaucaacccaaaacguuaucgaugcagaaaaagcaccaggaggacccuacagacuugggaccucaggaucuugcccuaacgcuaccaguaaaagcggauuuuucgcaacaauggcuugggcugucccaaaggacaacaacaaaaaugcaacgaacccauuaacaguagaaguaccauacauuugugcagaaggagaagaccaaauuacuguuuggggguuccauucagauaacaaaacccaaaugaagaaccucuauggagacucaaauccucaaaaguucaccucaucugcuaauggaguaaccacacauuauguuucucagauuggcggcuucccagaucaaacagaagacggaggacuaccacaaagcggcagaauugucguugauuacaugaugcaaaaaccugggaaaacaggaacaauugucuaucaaagagguguuuuguugccucaaaagguguggugcgcgaguggcaggagcaaaguaauaaaaggguccuugccuuuaauuggugaagcagauugccuucaugaaaaauacgguggauuaaacaaaagcaagccuuacuacacaggagaacaugcaaaagccauaggaaauugcccaauaugggugaaaacaccuuugaagcuugccaauggaaccaaauauaggccuccugcaaaacuauuaaaggaaagggguuucuucggagcuauugcugguuuccuagaaggaggaugggaaggaaugauugcagguuggcacggauacacaucucacggagcacauggaguggcaguugcugcagaccuuaagagcacgcaagaagcuauaaacaagauaacaaaaaaucucaacucuuugagugagcuagaaguaaagaaucuucaaaggcuaaguggugccauggaugaacuccacaacgaaauacucgagcuggaugagaaaguggaugaucucagagcugacacuauaaguucacaaauagaacuugcagucuugcuuuccaacgaaggaauaauaaacagugaagaugagcaucuauuggcacuugagagaaagcuaaagaaaaugcugggucccucugcuguagacauaggaaauggaugcuucgaaaccaaacacaaaugcaaccagaccugcuuagacaggauagcugcuggcaccuuuaaugcaggagaauuuucucuccccacuuuugauucauugaacauuacugcugcaucuuuaaaugaugauggauuggauaaccauacuauacugcucuauuacucaacugcugcuucuaguuuggcuguaacauugaugcuagcuauuuuuauuguuuauauggucuccagagacaacguuucaugcuccaucugucuauaa

SEQ ID NO: 58889 - RNA, 1755 nt, Artificial Sequence
  derived and/or modified CDS sequence (wt) from hemagglutinin__InfluenzaB__AGL09847
augaaggcaauaauuguacuacucaugguaguaacauccaaugcagaucgaaucugcacugggauaacaucuucaaacucaccucauguggucaaaacagcuacucaaggggaggucaaugugacuggugugauaccacuaacaacaacaccaacaaaaucuuauuuugcaaaucucaaaggaacaaagaccagagggaaacuaugcccagacugucucaacuguacagaucuggauguggccuugggcaggccaaugugugugggaacuacaccuucugcgaaagcuucaauacuucacgaagucagaccuguuacauccgggugcuucccuauaaugcacgacagaacaaaaaucaggcaacuagccaaucuucucagaggauaugaaaauaucagguuaucaacccaaaacguuaucgaugcagaaaaagcaccaggaggacccuacagacuuggaaccucaggaucuugcccuaacgcuaccaguaaaagcggauuuuucgcaacaauggcuugggcugucccaaaggacaacaacaaaaaugcaacgaacccauuaacaguagaaguaccauacauuugugcagaaggagaagaccaaauugcuauuuggggguuccauucagauaacaaaacccaaaugaagaaccucuauggagacucaaauccucaaaaguucaccucaucugcuaauggaguaaccacacauuauguuucucagauuggcggcuucccagaucaaacagaagacggaggacuaccacaaagcggcagaauugucguugauuacaugaugcaaaaaccugggaaaacaggaacaauugucuaucaaagagguguuuuguugccucaaaagguguggugcgcgaguggcaggagcaaaguaauaaaaggguccuugccuuuaauuggugaagcagauugucuucaugaaaaauacgguggauuaaacaaaagcaagccuuacuacacaggagaacaugcaaaagccauaggaaauugcccaauaugggugaaaacaccuuugaagcuugccaauggaaccaaauauagaccuccugcaaaacuauuaaaggaaagggguuucuucggagcuauugcugguuuccuagaaggaggaugggaaggaaugauugcagguuggcacggauacacaucucacggagcacauggaguggcaguugcugcagaccuuaagagcacacaagaagcuauaaacaagauaacaaaaaaucucaacucuuugagugagcuagaaguaaagaaucuucaaaggcuaaguggugccauggaugaacuccacaacgaaauacucgagcuggaugagaaaguggaugaucucagagcugacacuauaaguucacaaauagaacuugcagucuugcuuuccaacgaaggaauaauaaacagugaagaugagcaucuauuggcacuugagagaaaacuaaagaaaaugcugggucccucugcuguagacauaggaaauggaugcuucgaaaccaaacacaaaugcaaccagaccugcuuagacaggauagcugcuggcaccuuuaaugcaggagaauuuucucuccccacuuuugauucauugaacauuacugcugcaucuuuaaaugaugauggauuggauaaccauaccauacugcucuauuacucaacugcugcuucuaguuuggcuguaacauugaugcuagcuauuuuuauuguuuauauggucuccagagacaacguuucaugcuccaucugucuauaa

SEQ ID NO: 58890 - RNA, 1755 nt, Artificial Sequence
  derived and/or modified CDS sequence (wt) from hemagglutinin__InfluenzaB__AGL09849
augaaggcaauaauuguacuacucaugguaguaacauccaaugcagaucgaaucugcacugggauaacaucuucaaacucaccucauguggucaaaacagcuacucaaggggaggucaaugugacuggugugauaccacuaacaacaacaccaacaaaaucuuauuuugcaaaucucaaaggaacaaagaccagagggaaacuaugcccagacugucucaacuguacagaucuggauguggccuugggcaggccaaugugugugggaacuacaccuucugcgaaagcuucaauacuucacgaagucagaccuguuacauccgggugcuucccuauaaugcacgacagaacaaaaaucaggcaacuagccaaucuucucagaggauaugaaaauaucagguuaucaacccaaaacguuaucaaugcagaaaaagcaccaggaggacccuacagacuuggaaccucaggaucuugcccuaacgcuaccaguaaaagcggauuuuuugcaacaauggcuugggcugucccaaaggacaacaacaaaaaugcaacgaacccauuaacaguagagguaccauacauuugugcagaaggagaagaccaaauuacuguuuggggguuccauucagauaacaaaacccaaaugaagaaccucuauggagacucaaauccucaaaaguucaccucaucugcuaauggaguaaccacacauuauguuucucagauuggcggcuucccagaucaaacagaagacggaggacuaccacaaagcggcagaauugucguugauuacaugaugcaaaaaccugggaaaacaggaacaauugucuaucaaagagguguuuuguugccucaaaagguguggugcgcgaguggcaggagcaaaguaauaaaaggguccuugccuuuaauuggugaagcagauugccuucaugaaaaauacgguggauuaaacaaaagcaagccuuacuacacaggagaacaugcaaaagccauaggaaauugcccaauaugggugaaaacaccuuugaagcuugccaauggaaccaaauauagaccuccugcaaaacuauuaaaggaaagggguuucuucggagcuauugcugguuuccuagaaggaggaugggaaggaaugauugcagguuggcacggauacacaucucacggagcacauggaguggcaguugcugcagaccuuaagagcacacaagaagcuauaaacaagauaacaaaaaaucucaacucuuugagugagcuagaaguaaagaaucuucaaaggcuaaguggugccauggaugaacuccacaacgaaauacucgagcuggaugagaaaguggaugaucucagagcugacacuauaaguucacaaauagaacuugcagucuugcuuuccaacgaaggaauaauaaacagugaagaugagcaucuauuggcacuugagagaaaacuaaagaaaaugcugggucccucugcuguagacauagggaauggaugcuucgaaaccaaacacaaaugcaaccagaccugcuuagacaggauagcugcuggcaccuuuaaugcaggagaauuuucucuccccacuuuugauucauugaacauuacugcugcaucuuuaaaugaugauggauuggauaaccauacuauacugcucuauuacucaacugcugcuucuaguuuggcuguaacauugaugcuagcuauuuuuauuguuuauauggucuccagagacaacguuucaugcuccaucugucuauaa

SEQ ID NO: 58891 - RNA, 1755 nt, Artificial Sequence
  derived and/or modified CDS sequence (wt) from hemagglutinin__InfluenzaB__AGL09850
augaaggcaauaauuguacuacucaugguaguaacauccaaugcagaucgaaucugcacugggauaacaucuucaaacucaccucauguggucaaaacagcuacucaaggggaggucaaugugacuggugugauaccacuaacaacaacaccaacaaaaucuuauuuugcaaaucucaaaggaacaaagaccagagggaaacuaugcccagacugucucaacuguacagaucuggauguggccuugggcaggccaaugugugugggaacuacaccuucugcgaaagcuucaauacuucacgaagucagaccuguuacauccgggugcuucccuauaaugcacgacagaacaaaaaucaggcaacuagccaaucuucucagaggauaugaaaauaucagguuaucaacccaaaacguuaucgaugcagaaaaagcaccaggaggacccuacagacuuggaaccucaggaucuugcccuaacgcuaccaguaaaagcggauuuuucgcaacaauggcuugggcugucccaaaggacaacaacaaaaaugcaacgaacccauuaacaguagaaguaccauacauuugugcagaaggagaagaccaaauuacuguuuggggguuccauucagauaacaaaacccaaaugaagaaccucuauggagacucaaauccucaaaaguucaccucaucugcuaauggaguaaccacacauuauguuucucagauuggcggcuucccagaucaaacagaagacggaggacuaccacaaagcggcagaauugucguugauuacaugaugcaaaaaccugggaaaacaggaacaauugucuaucaaagagguguuuuguugccucaaaagguguggugcgcgaguggcaggagcaaaguaauaaaaggguccuugccuuuaauuggugaagcagauugccuucaugaaaaauacgguggauuaaacaaaagcaagccuuacuacacaggagaacaugcaaaagccauaggaaauugcccaauaugggugaaaacacccuugaagcuugccaauggaaccaaauauagaccuccugcaaaacuauuaaaggaaagggguuucuucggagcuauugcugguuuccuagaaggaggaugggaaggaaugauugcagguuggcacggauacacaucucacggagcacauggaguggcaguugcugcagaccuuaagagcacacaagaagcuauaaacaagauaacaaaaaaucucaacucuuugagugagcuagaaguaaagaaucuucaaaggcuaaguggugccauggaugaacuccacaacgaaauacucgagcuggaugagaaaguggaugaucucagagcugacacuauaaguucacaaauagaacuugcagucuugcuuuccaacgaaggaauaauaaacagugaagaugagcaucuauuggcacuugagagaaaacuaaagaaaaugcugggccccucugcuguagacauaggaaauggaugcuucgaaaccaaacacaaaugcaaccagaccugcuuagacaggauagcugcuggcaccuuuaaugcaggagaauuuucucuccccacuuuugauucauugaacauuacugcugcaucuuuaaaugaugauggauuggauaaccauacuauacugcucuauuacucaacugcugcuucuaguuuggcuguaacauugaugcuagcuauuuuuauuguuuauauggucuccagagacaacguuucaugcuccaucugucuauaa

SEQ ID NO: 58892 - RNA, 1755 nt, Artificial Sequence
  derived and/or modified CDS sequence (wt) from hemagglutinin__InfluenzaB__AGL09851
augaaggcaauaauuguacuacucaugguaguaacauccaaugcagaucgaaucugcacugggauaacaucuucaaacucaccucauguggucaaaacagcuacucaaggggaggucaaugugacuggugugauaccacuaacaacaacaccaacaaaaucuuauuuugcaaaucucaaaggaacaaagaccagagggaaacuaugcccagacugucucaacuguacagaucuggauguggccuugggcaggccaaugugugugggaacuacaccuucugcgaaagcuucaauacuucacgaagucagaccuguuacauccgggugcuuuccuauaaugcacgacagaacaaaaaucaggcaacuagccaaucuucucagaggauaugaaaauaucagguuaucaacccaaaacguuaucgaugcagaaaaagcaccaggaggacccuacagacuuggaaccucaggaucuugcccuaacgcuaccaguaaaagcggauuuuucgcaacaauggcuugggcugucccaaaggacaacaacaaaaaugcaacgaacccauuaacaguagaaguaccauacauuugugcagaaggagaagaccaaauuacuguuuggggguuccauucagauaacaaaacccaaaugaagaaccucuauggagacucaaauccucaaaaguucaccucaucugcuaauggaguaaccacacauuauguuucucagauuggcggcuucccagaucaaacagaagacggaggacuaccacaaagcggcagaauugucguugauuacaugaugcaaaaaccugggaaaacaggaacaauugucuaucaaagagguguuuuguugccucaaaagguguggugcgcaaguggcaggagcaaaguaauaaaaggguccuugccuuuaauuggugaagcagauugccuucaugaaaaauacgguggauuaaacaaaagcaagccuuacuacacaggagaacaugcaaaagccauaggaaauugcccaauaugggugaaaacaccuuugaagcuugccaauggaaccaaauauagaccuccugcaaaacuauuaaaggaaagggguuucuucggagcuauugcugguuuccuagaaggaggaugggaaggaaugauugcagguuggcacggauacacaucucacggagcacauggaguggcaguugcugcagaccuuaagagcacacaagaagcuauaaacaagauaacaaaaaaucucaacucguugagugagcuagaaguaaagaaucuucaaaggcuaaguggugccauggaugaacuccacaacgaaauacucgagcuggaugagaaaguggaugaucucagagcugacacuauaaguucacaaauagaacuugcagucuugcuuuccaacgaaggaauaauaaacagugaagaugagcaucuauuggcacuugagagaaaacuaaagaaaaugcugggucccucugcuguagacauaggaaauggaugcuucgaaaccaaacacaaaugcaaccagaccugcuuagacaggauagcugcuggcaccuuuaaugcaggagaauuuucucuccccacuuuugauucauugaacauuacugcugcaucuuuaaaugaugauggauuggauaaccauacuauacugcucuauuacucaacugcugcuucuaguuuggcuguaacauugaugcuagcuauuuuuauuguuuauauggucuccagagacaacguuucaugcuccaucugccuauaa

SEQ ID NO: 58893 - RNA, 1758 nt, Artificial Sequence
  derived and/or modified CDS sequence (wt) from hemagglutinin__InfluenzaB__AGL09852
augaaggcaauaauuguacuacucaugguaguaacauccaaugcagaucgaaucugcacugggauaacaucgucaaacucaccacaugucgucaaaacugcuacucaaggggaagucaaugugaccgguguaauaccacugacaacaacacccaccaaaucucauuuugcaaaucucaaaggaacagaaaccagggggaaacuaugcccaaaaugccucaacugcacagaucuggacguagccuugggcagaccaaaaugcacggggaaaauacccucggcaagaguuucaauacuccaugaagucagaccuguuacaucugggugcuuuccuauaaugcacgauagaacaaaaauuagacagcugccuaaccuucuccgaggauacgaacauaucagguuaucaacucacaacguuaucaaugcagaaaaugcaccaggaggacccuacaaaauuggaaccucagggucuugcccuaacguuaccaauggaaacggauucuucgcaacaauggcuugggccgucccaaaaaacgacaaaaacaaaacagcaacaaauccauuaacaauagaaguaccauacauuuguacagaaggagaagaccaaauuaccguuuggggguuccacucugacaacgagacccaaauggcaaagcucuauggggacucaaagccccagaaguucaccucaucugccaacggagugaccacacauuacguuucacagauugguggcuucccaaaucaaacagaagacggaggacuaccacaaagugguagaauuguuguugauuacauggugcaaaaaucugggaaaacaggaacaauuaccuaucaaagagguauuuuauugccucaaaagguguggugcgcaaguggcaggagcaagguaauaaaaggauccuugccuuuaauuggagaagcagauugccuccacgaaaaauacgguggauuaaacaaaagcaagccuuacuacacaggggaacaugcaaaggccauaggaaauugcccaauaugggugaaaacacccuugaagcuggccaauggaaccaaauauagaccuccugcaaaacuauuaaaggaaagggguuucuucggagcuauugcugguuucuuagaaggaggaugggaaggaaugauugcagguuggcacggauacacaucccauggggcacauggaguagcgguggcagcugaccuuaagagcacucaagaggccauaaacaagauaacgaaaaaucucaacucuuugagugagcuggaaguaaagaaucuucaaagacuaagcggugccauggaugaacuccacaacgaaauacuagaacuagaugagaaaguggaugaucucagagcugauacaauaagcucacaaauagaacucgcaguccugcuuuccaaugaaggaauaauaaacagugaagaugaacaucucuuggcgcuugaaagaaagcugaagaaaaugcugggccccucugcuguagagauagggaauggaugcuuugaaaccaaacacaagugcaaccagaccugucucgacagaauagcugcugguaccuuugaugcaggagaauuuucucucccaaccuuugauucacugaauauuacugcugcaucuuuaaaugacgauggauuggauaaucauacuauacugcuuuacuacucaacugcugccuccaguuuggcuguaacacugaugauagcuaucuuuguuguuuauauggucuccagagacaauguuucuugcuccaucugucuauag

SEQ ID NO: 58894 - RNA, 1755 nt, Artificial Sequence
  derived and/or modified CDS sequence (wt) from hemagglutinin__InfluenzaB__AGL09853
augaaggcaauaauuguacuacucaugguaguaacauccaaugcagaucgaaucugcacugggauaacaucuucaaacucaccucauguggucaaaacagcuacucaaggggaggucaaugugacuggugugauaccacuaacaacaacaccaacaaaaucuuauuuugcaaaucucaaaggaacaaagaccagagggaaacuaugcccagacugucucaacuguacagaucuggauguggccuugggcagaccaaugugugugggaacuacaccuucugcgaaagcuucaauacuucacgaagucagaccuguuacauccgggugcuucccuauaaugcacgacagaacaaaaaucaggcaacuagccaaucuucucagaggauaugaaaauaucagguuaucaacccaaaacguuaucgaugcagaaaaagcaccaggaggacccuacagacuugggaccucaggaucuugcccuaacgcuaccaguaaaagcggauuuuucgcaacaauggcuugggcugucccaaaggacaacaacaaaaaugcaacgaacccauuaacaguagaaguaccauacauuugugcagaaggagaagaccaaauuacuguuuggggguuccauucagauaacaaaacccaaaugaagaaccucuauggagacucaaauccucaaaaguucaccucaucugcuaauggaguaaccacacauuauguuucucagauuggcggcuucccagaucaaacagaagacggaggacuaccacaaagcggcagaauugucguugauuacaugaugcaaaaaccugggaaaacaggaacaauugucuaucaaagagguguuuuguugccucaaaagguguggugcgcgaguggcaggagcaaaguaauaaaaggguccuugccuuuaauuggugaagcagauugccuucaugaaaaauacgguggauuaaacaaaagcaagccuuacuacacaggagaacaugcaaaagccauaggaaauugcccaauaugggugaaaacaccuuugaagcuugccaauggaaccaaauauagaccuccugcaaaacuauuaaaggaaagggguuucuucggagcuauugcugguuuccuagaaggaggaugggaaggaaugauugcagguuggcacggauacacaucucacggagcacauggaguggcaguugcugcagaccuuaagagcacacaagaagcuauaaacaagauaacaaaaaaucucaacucuuugagugagcuagaaguaaagaaucuucaaaggcuaaguggugccauggaugaacuccacaacgaaauacucgagcuggaugagaaaguggaugaucucagagcugacacuauaaguucacaaauagaacuugcagucuugcuuuccaacgaaggaauaauaaacagugaagaugagcaucuauuggcacuugagagaaaacuaaagaaaaugcugggucccucugcuguagacauaggaaauggaugcuucgaaaccaaacacaaaugcaaccagaccugcuuagacaggauagcugcuggcaccuuuaaugcaggagaauuuucucuccccacuuuugauucauugaacauuacugcugcaucuuuaaaugaugauggauuggauaaccauacuauacugcucuauuacucaacugcugcuucuaguuuggcuguaacauugaugcuagcuauuuuuauuguuuauauggucuccagagacaacguuucaugcuccaucugucuauaa

SEQ ID NO: 58895 - RNA, 1755 nt, Artificial Sequence; identical to SEQ ID NO: 58871
  derived and/or modified CDS sequence (wt) from hemagglutinin__InfluenzaB__AGL09854

SEQ ID NO: 58896 - RNA, 1758 nt, Artificial Sequence
  derived and/or modified CDS sequence (wt) from hemagglutinin__InfluenzaB__AGL09855
augaaggcaauaauuguacuacucaugguaguaacauccaaugcagaucgaaucugcacugggauaacaucgucaaacucaccacaugucgucaaaacugcuacucaaggggaggucaaugugaccgguguaauaccacugacaacaacacccaccaaaucucauuuugcaaaucucaaaggaacagaaaccagggggaaacuaugcccaaaaugccuuaacugcacagaucuggacguagccuugggcagaccaaaaugcacggggaaaauacccucggcaagaguuucaauacuccaugaagucagaccuguuacaucugggugcuuuccuauaaugcacgauagaacaaaaauuagacagcugccuaaccuucuccgaggauacgaacauaucagguuaucaacucacaacguuaucaaugcagaaaaugcaccaggaggacccuacaaaauuggaaccucagggucuugcccuaacguuaccaauggaaacggauucuucgcaacaauggcuugggccgucccaaaaaacgacaaaaacaaaacagaaacaaauccauuaacaauagaaguaccauacauuuguacagaagaagaagaccaaauuaccguuuggggguuccacucugacaacgagacccaaauggcaaagcucuauggggacucaaagccccagaaguucaccucaucugccaacggagugaccacacauuacguuucacagauuggugacuucccaaaucaaacagaagacggaggacuaccacaaagugguagaauuguuguugauuacauggugcaaaaaucugggaaaacaggaacaauuaccuaucaaagagguauuuuauugccucaaaagguguggugcgcaaguggcaggagcaagguaauaaaaggauccuugccuuuaauuggagaagcagauugccuccacgaaaaauacgguggauuaaacaaaagcaagccuuacuacacaggggaacaugcaaaggccauaggaaauugcccaauaugggugaaaacacccuugaagcuggccaauggaaccaaauauagaccuccugcaaaacuauuaaaggaaagggguuucuucggagcuauugcugguuucuuagaaggaggaugggaaggaaugauugcagguuggcacggauacacaucccauggggcacauggaguagcgguggcagcugaccuuaagagcacucaagaggcuauaaacaagauaacaaaaaaucucaacucuuugagugagcuggaaguaaagaaucuucaaagacuaagcggugccauggaugaacuccacaaugaaauacuagaacuagaugagaaaguggaugaucucagagcugauacaauaagcucacaaauagaacucgcaguccugcuuucuaaugaaggaauaauaaacagugaagaugaacaucucuuggcgcuugaaagaaagcugaagaaaaugcugggccccucugcuguagagauagggaauggaugcuuugaaaccaaacacaagugcaaccagaccugucucgacagaauagcugcugguaccuuugaugcaggagaauuuucucuccccaccuuugauucacugaauauuacugcugcaucuuuaaaugacgauggauuggauaaucauacuauacugcuuuacuacucaacugcugccuccaguuuggcuguaacacugaugauagcuaucuuuguuguuuauauggucuccagagacaauguuucuugcuccaucugucuauaa

SEQ ID NO: 58897 - RNA, 1755 nt, Artificial Sequence
  derived and/or modified CDS sequence (wt) from hemagglutinin__InfluenzaB__AGL09856
augaaggcaauaauuguacuacucaugguaguaacauccaaugcagaucgaaucugcacuggaauaacaucuucaaacucaccucauguggucaaaacagcuacucaaggggaggucaaugugacuggugugauaccacuaacaacaacaccaacaaaaucuuauuuugcaaaucucaaaggaacaaagaccagagggaaacuaugcccagacugucucaacuguacagaucuggauguggccuugggcaggccaaugugugugggaacuacaccuucugcgaaagcuucaauacuucacgaagucagaccuguuacauccgggugcuucccuauaaugcacgacagaacaaaaaucaggcaacuagccaaucuucucagaggguaugaaaauaucagguuaucaacccaaaacguuaucgaugcagaaaaagcaccaggaggacccuacagacuuggaaccucaggaucuugcccuaacgcuaccaguaaaagcggauuuuucgcaacaauggcuugggcugucccaaaggacaacaacaaaaaugcaacgaacccauuaacaguagaaguaccauacauuugugcagaaggagaagaccaaauuacuguuuggggguuccauucagauaacaaaacccaaaugaagaaccucuauggagacucaaauccucaaaaguucaccucaucugcuaauggaguaaccacacauuauguuucucagauuggcggcuucccagaucaaacagaagacggaggacuaccacaaagcggcagaauugucguugauuacaugaugcaaaaaccugggaaaacaggaacaauugucuaucaaagagguguucuguugccucaaaagguguggugcgcgagugguaggagcaaaguaauaaaaggguccuugccuuuaauuggugaagcagauugccuucaugaaaaauacgguggauuaaacaaaagcaagccuuacuacacaggagaacaugcaaaagccauaggaaauugcccaauaugggugaaaacaccuuugaagcuugccaauggaaccaaauauagaccuccugcaaaacuauuaaaggaaagggguuucuucggagcuauugcugguuuccuagaaggaggaugggaaggaaugauugcagguuggcacggauacacaucucacggagcacauggaguggcaguugcugcagaccuuaagagcacacaagaagcuauaaacaagauaacaaaaaaucucaacucuuugagugagcuagaaguaaagaaucuucaaaggcuaaguggugccauggaugaacuccacaacgaaauacucgagcuggaugagaaaguggaugaucucagagcugacacuauaaguucacaaauagaacuugcagucuugcuuuccaacgaaggaauaauaaacagugaagaugagcaucuauuggcacuugagagaaaacuaaagaaaaugcugggucccucugcuguagacauaggaaauggaugcuucgaaaccaaacacaaaugcaaccagaccugcuuagacaggauagcugcuggcaccuuuaaugcaggagaauuuucucuccccacuuuugauucauugaacauuacugcugcaucuuuaaaugaugauggauuggauaaccauacuauacugcucuauuacucaacugcugcuucuaguuuggcuguaacauugaugcuagcuauuuuuauuguuuauauggucuccagagacaacguuucaugcuccaucugucuauaa

SEQ ID NO: 58898 - RNA, 1755 nt, Artificial Sequence
  derived and/or modified CDS sequence (wt) from hemagglutinin__InfluenzaB__AGL09857
augaaggcaauaauuguacuacucaugguaguaacauccaaugcagaucgaaucugcacugggauaacaucuucaaacucaccucauguggucaaaacagcuacucaaggggaggucaaugugacuggugugauaccacuaacaacaacaccaacaaaaucuuauuuugcaaaucucaaaggaacaaagaccagagggaaacuaugcccagacugucucaacuguacagaucuggauguggccuugggcaggccaaugugugugggaacuacaccuucugcgaaagcuucaauacuucacgaagucagaccuguuacauccgggugcuucccuauaaugcacgacagaacaaaaaucaggcaacuagccaaucuucucagaggauaugaaaauaucagguuaucaacccaaaaaguuaucgaugcagaaaaagcaccaggaggacccuacagacuuggaaccucaggaucuugcccuaacgcuaccaguaaaagcggauuuuucgcaacaauggcuugggcugucccaaaggacaacaacaaaaaugcaacgaacccauuaacaguagaaguaccauacauuugugcagaaggagaagaccaaauuacuguuuggggguuccauucagauaacaaaacccaaaugaagaaccucuauggagacucaaauccucaaaaguucaccucaucugcuaauggaguaaccacacauuauguuucucagauuggcggcuucccagaucaaacagaagacggaggacuaccacaaagcggaagaauugucguugauuacaugauacaaaaaccugggaaaacaggaacaauugucuaucaaagagguguuuuguugccucaaaagguguggugcgcaaguggcaggagcaaaguaauaaaaggguccuugccuuuaauuggugaagcagauugccuucaugaaaaauacgguggauuaaacaaaagcaagccuuacuacacaggagaacaugcaaaagccauaggaaauugcccaauaugggugaaaacaccuuugaagcuugccaauggaaccaaauauagaccuccugcaaaacuauuaaaggaaagggguuucuucggagcuauugcugguuuccuagaaggaggaugggaaggaaugauugcagguuggcacggauacacaucucacggagcacauggaguugcaguugcugcagaccuuaagagcacacaagaagcuauaaacaagauaacaaaaaaucucaacucuuugagugagcuagaaguaaagaaucuucaaaggcuaaguggugccauggaugaacuccacaacgaaauacucgagcuggaugagaaaguggaugaucucagagcugacacuauaaguucacaaauagaacuugcagucuugcuuuccaaugaaggaauaauaaacagugaagaugagcaucuauuggcacuugagagaaaacuaaagaaaaugcugggucccucugcuguagacauaggaaauggaugcuucgaaaccaaacacaaaugcaaccagaccugcuuagacaggauagcugcuggcaccuuuaaugcaggagaauuuucucuccccacuuuugauucauugaacauuacugcugcaucuuuaaaugaugauggauuggauaaccauacuauacugcucuauuacucaacugcugcuucuaguuuggcuguaacauugaugcuagcuauuuuuauuguuuauauggucuccagagacaacguuucaugcuccaucugucuauaa

SEQ ID NO: 58899 - RNA, 1758 nt, Artificial Sequence
  derived and/or modified CDS sequence (wt) from hemagglutinin__InfluenzaB__AGL09859
augaaggcaauaauuguacuacucaugguaguaacauccaaugcagaucgaaucugcacugggauaacaucgucaaacucaccacaugucgucaaaacugcuacucaaggggaggucaaugugaccgguguaauaccacugacaacaacacccaccaaaucucauuuugcaaaucucaaaggaacagaaaccagggggaaacuaugcccaaaaugccucaacugcacagaucuggacguagccuugggcagaccaaaaugcacagggaaaauacccucggcaagaguuucaauacuccaugaagucagaccuguuacaucugggugcuuuccuauaaugcacgauagaacaaaaauuagacagcugccuaaccuucuccgaggauacgaacauaucagguuaucaacucacaacguuaucaaugcagaagaugcaccaggaggacccuacaaaauuggaaccucagggucuugcccuaacguuaccaauggaaacggauucuucgcaacaauggcuugggccgucccaaaaaacgacaaaaacaaaacagcaacaaauccauuaacaauagaaguaccauacauuuguacagaaggagaagaccaaauuaccguuuggggguuccacucugacaacgagacccaaauggcaaagcucuauggggacucaaagccccagaaguucaccucaucugccaacggagugaccacacauuacguuucacagauugguggcuucccaaaucaaacagaagacggaggacuaccacaaagugguagaauuguuguugauuacauggugcaaaaaucuggaaaaacaggaacaauuaccuaucaaagagguauuuuauugccucaaaagguguggugcgcaaguggcaggagcaagguaauaaaaggauccuugccuuuaauuggagaagcagauugccuccacgaaaaauacgguggauuaaacaaaagcaagccuuacuacacaggggaacaugcaaaggccauaggaaauugcccaauaugggugaaaacacccuugaagcuggccaauggaaccaaauauagaccuccugcaaaacuauuaaaggaaagggguuucuucggagcuauugcugguuucuuagaaggaggaugggaaggaaugauugcagguuggcacggauacacaucccauggggcacauggaguagcgguggcagcugaccuuaagagcacucaagaggccauaaacaagauaacaaaaaaucucaacucuuugagugagcuggaaguaaagaaucuucaaagacuaagcggugccauggaugaacuccacaacgaaauacuagaacuagaugagaaaguggaugaucucagagcugauacaauaagcucacaaauagaacucgcaguccugcuuuccaaugaaggaauaauaaacagugaagaugaacaucucuuggcgcuugaaagaaagcugaagaaaaugcugggccccucugcuguagagauagggaauggaugcuuugaaaccaaacacaagugcaaccagaccugucucgacagaauagcugcugguaccuuugaugcaggagaauuuucucuccccaccuuugauucacugaauauuacugcugcaucuuuaaaugacgauggauuggauaaucauacuauacugcuuuacuacucaacugcugccuccaguuuggcuguaacacugaugauagcuaucuuuguuguuuauauggucuccagagacaauguuucuugcuccaucugucuauaa

SEQ ID NO: 58900 - RNA, 1758 nt, Artificial Sequence
  derived and/or modified CDS sequence (wt) from hemagglutinin__InfluenzaB__AGL09860
augaaggcaauaauuguacuacucaugguaguaacauccaaugcagaucgaaucugcacugggauaacaucgucaaacucaccacaugucgucaaaacugcuacucaaggggaggucaaugugaccgguguaauaccacugacaacaacacccaccaaaucucauuuugcaaaucucaaaggaacagaaaccagggggaaacuaugcccaaaaugccucaacugcacagaucuggacguagccuugggcagaccaaaaugcacagggaaaauacccucggcaagaguuucaauacuccaugaagucagaccuguuacaucugggugcuuuccuauaaugcacgauagaacaaaaauuagacagcugccuaaccuucuccgaggauacgaacauaucagauuaucaacucacaacguuaucaaugcagaagaugcaccaggaggacccuacaaaauuggaaccucagggucuugcccuaacguuaccaauggaaacggauucuucgcaacaauggcuugggccgucccaaaaaacgacaaaaacaaaacagcaacaaauccauuaacaauagaaguaccauacauuuguacagaaggagaagaccaaauuaccguuuggggguuccacucugacaacgagacccaaauggcaaagcucuauggggacucaaagccccagaaguucaccucaucugccaacggagugaccacacauuacguuucacagauugguggcuucccaaaucaaacagaagacggaggacuaccacaaagugguagaauuguuguugauuacauggugcaaaaaucuggaaaaacaggaacaauuaccuaucaaagagguauuuuauugccucaaaagguguggugcgcaaguggcaggagcaagguaauaaaaggauccuugccuuuaauuggagaagcagauugccuccacgaaaaauacgguggauuaaacaaaagcaagccuuacuacacaggggaacaugcaaaggccauaggaaauugcccaauaugggugaaaacacccuugaagcuggccaauggaaccaaauauagaccuccugcaaaacuauuaaaggaaagggguuucuucggagcuauugcugguuucuuagaaggaggaugggaaggaaugauugcagguuggcacggauacacaucccauggggcacauggaguagcgguggcagcugaccuuaagagcacucaagaggccauaaacaagauaacaaaaaaucucaacucuuugagugagcuggaaguaaagaaucuucaaagacuaagcggugccauggaugaacuccacaacgaaauacuagaacuagaugagaaaguggaugaucucagagcugauacaauaagcucacaaauagaacucgcaguccugcuuuccaaugaaggaauaauaaacagugaagaugaacaucucuuggcgcuugaaagaaagcugaagaaaaugcugggccccucugcuguagagauagggaauggaugcuuugaaaccaaacacaagugcaaccagaccugucucgacagaauagcugcugguaccuuugaugcaggagaauuuucucuccccaccuuugauucacugaauauuacugcugcaucuuuaaaugacgauggauuggauaaucauacuauacugcuuuacuacucaacugcugccuccaguuuggcuguaacacugaugauagcuaucuuuguuguuuauauggucuccagagacaauguuucuugcuccaucugucuauaa

SEQ ID NO: 58901 - RNA, 1758 nt, Artificial Sequence; identical to SEQ ID NO: 58899
  derived and/or modified CDS sequence (wt) from hemagglutinin__InfluenzaB__AGL09861

SEQ ID NO: 58902 - RNA, 1758 nt, Artificial Sequence; identical to SEQ ID NO: 58899
  derived and/or modified CDS sequence (wt) from hemagglutinin__InfluenzaB__AGL09862

SEQ ID NO: 58903 - RNA, 1758 nt, Artificial Sequence; identical to SEQ ID NO: 58899
  derived and/or modified CDS sequence (wt) from hemagglutinin__InfluenzaB__AGL09863

SEQ ID NO: 58904 - RNA, 1755 nt, Artificial Sequence
  derived and/or modified CDS sequence (wt) from hemagglutinin__InfluenzaB__AGL09864
augaaggcaauaauuguacuacucaugguaguaacauccaaugcagaucgaaucugcacugggauaacaucuucaaacucaccucauguggucaaaacagcuacucaaggggaggucaaugugacuggugugauaccacuaacaacaacaccaacaaaaucuuauuuugcaaaucucaaaggaacaaagaccagagggaaacuaugcccagacugucucaacuguacagaucuggauguggccuugggcaggccaaugugugugggaacuacaccuucugcgaaagcuucaauacuucacgaagucagaccuguuacauccgggugcuucccuauaaugcacgacagaacaaaaaucaggcagcuagccaaucuucucagaggauaugaaaauaucagguuaucaacccaaaacguuaucgaugcagaaaaagcaccaggaggacccuacagacuuggaaccucaggaucuugcccuaacgcuaccaguaaaagcggauuuuucgcaacaauggcuugggcugucccaaaggacaacaacaaaaaugcaacgaacccauuaacaguagaaguaccauacauuugugcagaaggagaagaccaaauuacuguuuggggguuccauucagauaacaaaacccaaaugaagaaccucuauggagacucaaauccucaaaaguucaccucaucugcuaauggaguaaccacacauuauguuucucagauuggcggcuucccagaucaaacagaagacggaggacuaccacaaagcggcagaauugucguugauuacaugaugcaaaaaccugggaaaacaggaacaauugucuaucaaagagguguuuuguugccucaaaagguguggugcgcgaguggcaggagcaaaguaauaaaaggguccuugccuuuaauuggugaagcagauugccuucaugaaaaauacgguggauuaaacaaaagcaagccuuacuacacaggagaacaugcaaaagccauaggaaauugcccaauaugggugaaaacaccuuugaagcuugccaauggaaccaaauauagaccuccugcaaaacuauuaaaggaaagggguuucuucggagcuauugcugguuuccuagaaggaggaugggaaggaaugauugcagguuggcacggauacacaucucacggagcacauggaguggcaguugcugcagaccuuaagagcacacaagaagcuauaaacaagauaacaaaaaaucucaacucguugagugagcuagaaguaaagaaucuucaaaggcuaaguggugccauggaugaacuccacaacgaaauacucgagcuggaugagaaaguggaugaucucagagcugacacuauaaguucacaaauagaacuugcagucuugcuuuccaacgaaggaauaauaaacagugaagaugagcaucuauuggcacuugagagaaaacuaaagaaaaugcugggucccucugcuguagacauaggaaauggaugcuucgaaaccaaacacaaaugcaaccagaccugcuuagacaggauagcugcuggcaccuuuaaugcaggagaauuuucucuccccacuuuugauucauugaacauuacugcugcaucuuuaaaugaugauggauuggauaaccauacuauacugcucuauuacucaacugcugcuucuaguuuggcuguaacauugaugcuagcuauuuuuauuguuuauauggucuccagagacaacguuucaugcuccaucugccuauaa

SEQ ID NO: 58905 - RNA, 1755 nt, Artificial Sequence; identical to SEQ ID NO: 58867
  derived and/or modified CDS sequence (wt) from hemagglutinin__InfluenzaB__AGL09866

SEQ ID NO: 58906 - RNA, 1755 nt, Artificial Sequence; identical to SEQ ID NO: 58868
  derived and/or modified CDS sequence (wt) from hemagglutinin__InfluenzaB__AGL09867

SEQ ID NO: 58907 - RNA, 1755 nt, Artificial Sequence
  derived and/or modified CDS sequence (wt) from hemagglutinin__InfluenzaB__AGL09868
augaaggcaauaauuguacuacucaugguaguaacauccaaugcagaucgaaucugcacugggauaacaucuucaaacucaccucauguagucaaaacagcuacucaaggggaggucaaugugacuggugugauaccacuaacaacaacaccaacaaaaucuuauuuugcaaaucucaaaggaacaaagaccagagggaaacuaugcccagacugucucaacuguacagaucuggauguggccuugggcaggccaaugugugugggaacuacaccuucugcgaaagcuucaauacuucacgaagucagaccuguuacauccgggugcuucccuauaaugcacgacagaacaaaaaucaggcaacuagccaaucuucucagaggauaugaaaauaucagguuaucaacccaaaacguuaucgaugcagaaaaagcaccaggaggacccuacagacuuggaaccucaggaucuugcccuaacgcuaccaguaaaagcggauuuuucgcaacaauggcuugggcugucccaaaggacaacaacaaaaaugcaacgaacccauuaacaguagaaguaccauacauuugugcagaaggagaagaccaaauuacuguuuggggguuccauucagauaacaaaacccaaaugaagaaccucuauggagacucaaauccucaaaaguucaccucaucugcuaauggaguaaccacacauuauguuucucagauuggcggcuucccagaucaaacagaagacggaggacuaccacaaagcggcagaauugucguugauuacaugaugcaaaaaccugggaaaacaggaacaauugucuaucaaagagguguuuuguugccucaaaagguguggugcgcaaguggcaggagcaaaguaauaaaaggguccuugccuuuaauuggugaagcagauugccuucaugaaaaauacgguggauuaaacaaaagcaagccuuacuacacaggagaacaugcaaaagccauaggaaauugcccaauaugggugaaaacaccuuugaagcuugccaauggaaccaaauauagaccuccugcaaaacuauuaaaggaaagggguuucuucggagcuauugcugguuuccuagaaggaggaugggaaggaaugauugcagguuggcacggauacacaucucacggagcacauggaguggcaguugcugcagaccuuaagagcacacaagaagcuauaaacaagauaacaaaaaaucucaacucuuugagugagcuagaaguaaagaaucuucaaaggcuaaguggugccauggaugaacuccacaacgaaauacucgagcuggaugagaaaguggaugaucucagagcugacacuauaaguucacaaauagaacuugcagucuugcuuuccaacgaaggaauaauaaacagugaagaugagcaucuauuggcacuugagagaaaacuaaagaaaaugcugggucccucugcuguagacauaggaaauggaugcuucgaaaccaaacacaaaugcaaccagaccugcuuagacaggauagcugcuggcaccuuuaaugcaggagaauuuucucuccccacuuuugauucauugaacauuacugcugcaucuuuaaaugaugauggauuggauaaccauacuauacugcucuauuacucaacugcugcuucuaguuuggcuguaacauugaugcuagcuauuuuuauuguuuauauggucuccagagacaacguuucaugcuccaucugucuauaa

SEQ ID NO: 58908 - RNA, 1755 nt, Artificial Sequence
  derived and/or modified CDS sequence (wt) from hemagglutinin__InfluenzaB__AGL09869
augaaggcaauaauuguacuacucaugguaguaacauccaaugcagaucgaaucugcacugggauaacaucuucaaacucaccucauguggucaaaacagcuacucaaggggaggucaaugugacuggugugauaccacuaacaacaacaccaacaaaaucuuauuuugcaaaucucaaaggaacaaagaccagagggaaacuaugcccagacugucucaacuguacagaucuggauguggccuugggcaggccaaugugugugggaacuacaccuucugcgaaagcuucaauacuucacgaagucagaccuguuacauccgggugcuucccuauaaugcacgacagaacaaaaaucaggcaacuagccaaucuucucagaggauaugaaaauaucagguuaucaacccaaaacguuaucgaugcagaaaaagcaccaggaggacccuacagacuuggaaccucaggaucuugcccuaacacuaccaguaaaagcggauuuuucgcaacaauggcuugggcugucccaaaggacaacaacaaaaaugcaacgaacccauuaacaguagagguaccauacauuugugcagaaggagaagaccaaauuacuguuuggggguuccauucggauaacaaaacccaaaugaagaaccucuauggagacucaaauccucaaaaguucaccucaucugcuaauggaguaaccacacacuauguuucucagauuggcggcuucccagaucaaacagaagacggaggacuaccacaaagcggcagaauugucguugauuacaugaugcaaaaaccugggaaaacaggaacaauugucuaucaaagagguguuuuguugccucaaaagguguggugcgcgaguggcaggagcaaaguaauaaaaggguccuugccuuuaauuggugaagcagauugccuucaugaaaaauacgguggauuaaacaaaagcaagccuuacuacacaggagaacaugcaaaagccauaggaaauugcccaauaugggugaaaacaccuuugaagcuugccaauggaaccaaauauagaccuccugcaaaacuauuaaaggaaagggguuucuuuggagcuauugcugguuuccuagaaggaggaugggaaggaaugauugcagguuggcacggauacacaucucacggagcacauggaguggcaguugcugcagaccuuaagagcacacaagaagcuauaaacaagauaacaaaaaaucucaacucuuugagugagcuagaaguaaagaaucuucaaaggcuaaguggugccauggaugaacuccacaacgaaauacucgagcuggaugagaaaguggaugaucucagagcugacacuauaaguucacaaauagaacuugcagucuugcuuuccaacgaaggaauaauaaacagugaagaugagcaucuauuggcacuugagagaaaacuaaagaaaaugcugggucccucugcuguagacauagggaauggaugcuucgaaaccaaacacaaaugcaaccagaccugcuuagacaggauagcugcuggcaccuuuaaugcaggagaauuuucucuccccacuuuugauucauugaacauuacugcugcaucuuuaaaugaugauggauuggauaaccauacuauacugcucuauuacucaacugcugcuucuaguuuggcuguaacauugaugcuagcuauuuuuauuguuuauauggucuccagagacaacguuucaugcuccaucugucuauaa

SEQ ID NO: 58909 - RNA, 1755 nt, Artificial Sequence
  derived and/or modified CDS sequence (wt) from hemagglutinin__InfluenzaB__AGL09870
augaaggcaauaauuguacuacucaugguaguaacauccaaugcagaucgaaucugcacugggauaacaucuucaaacucaccucauguggucaaaacagcuacucaaggggaggucaaugugacuggugugauaccacuaacaacaacaccaacaaaaucuuauuuugcaaaucucaaaggaacaaagaccagagggaaacuaugcccagacugucucaacuguacagaucuggauguggccuugggcaggccaaugugugugggaacuacaccuucugcgaaagcuucaauacuucacgaagucagaccuguuacauccgggugcuucccuauaaugcacgacagaacaaaaaucaggcaacuagccaaucuucucagaggauaugaaaauaucagguuaucaacccaaaacguuaucgaugcagaaaaagcaccaggaggacccuacagacuuggaaccucaggaucuugcccuaacgcuaccaguaaaagcggauuuuucgcaacaauggcuugggcugucccaaaggacaacaacaaaaaugcaacgaacccauuaacaguagaaguaccauacauuugugcagaaggagaagaccaaauuacuguuuggggguuccauucagauaacaaaacccaaaugaagaaccucuauggagacucaaauccucaaagguucaccucaucugcuaauggaguaaccacacauuauguuucucagauuggcggcuucccagaucaaacagaagacggaggacuaccacaaagcggaagaauugucguugauuacaugaugcaaaaaccugggaaaacaggaacaauugucuaucaaagagguguuuuguugccucaaaagguguggugcgcgaguggcaggagcaaaguaauaaaaggguccuugccuuuaauuggugaagcagauugccuucaugaaaaauacgguggauuaaacaaaagcaagccuuacuacacaggagaacaugcaaaagccauaggaaauugcccaauaugggugaaaacaccuuugaagcuugccaauggaaccaaauauagaccuccugcaaaacuauuaaaggaaagggguuucuucggagcuauugcugguuuccuagaaggaggaugggaaggaaugauugcagguuggcacggauacacaucucacggagcacauggaguugcaguugcugcagaccuuaagagcacacaagaagcuauaaacaagauaacaaaaaaucucaacucuuugagugagcuagaaguaaagaaucuucaaaggcuaaguggugccauggaugaacuccacaacgaaauacucgagcuggaugagaaaguggaugaucucagagcugacacuauaaguucacaaauagaacuugcagucuugcuuuccaacgaaggaauaauaaacagugaagaugagcaucuauuggcacuugagagaaaacuaaagaaaaugcugggucccucugcuguagacauaggaaauggaugcuucgaaaccaaacacaaaugcaaccagaccugcuuagacaggauagcugcuggcaccuuuaaugcaggagaauuuucucuccccacuuuugauucauugaacauuacugcugcaucuuuaaaugaugauggauuggauaaccauacuauacugcucuauuacucaacugcugcuucuagucuggcuguaacauugaugcuagcuauuuuuauuguuuauauggucuccagagacaacguuucaugcuccaucugucuauaa

SEQ ID NO: 58910 - RNA, 1755 nt, Artificial Sequence
  derived and/or modified CDS sequence (wt) from hemagglutinin__InfluenzaB__AGL09871
augaaggcaauaauuguacuacucaugguaguaacauccaaugcagaucgaaucugcacugggauaacaucuucaaacucaccucauguggucaaaacagcuacucaaggggaggucaaugugacuggugugauaccacuaacaacaacaccaacaaaaucuuauuuugcaaaucucaaaggaacaaagaccagagggaaacuaugcccagacugucucaacuguacagaucuggauguggccuugggcaggccaaugugugugggaacuacaccuucugcgaaagcuucaauacuucacgaagucagaccuguuacauccgggugcuucccuauaaugcacgacagaacaaaaaucaggcaacuagccaaucuucucagaggauaugaaaauaucagguuaucaacccaaaacguuaucgaugcagaaaaagcaccaggaggacccuacagacuuggaaccucaggaucuugcccuaacgcuaccaguaaaagcggauuuuucgcaacaauggcuugggcugucccaaaggacaacaacaaaaaugcaacgaacccauuaacaguagaaguaccauacauuugugcagaaggagaagaccaaauuacuguuuggggguuccauucagauaacaaaacccaaaugaagaaccucuauggagacucaaauccucaaaaguucaccucaucugcuaauggaguaaccacacauuauguuucucagauuggcggcuucccagaucaaacagaagacggaggacuaccacaaagcggcagaauugucguugauuacaugaugcaaaaaccugggaaaacaggaacaauugucuaucaaagagguguuuuguugccucaaaagguguggugcgcgaguggcaggagcaaaguaauaaaaggguccuugccuuuaauuggugaagcagauugccuucaugaaaaauacgguggauuaaacaaaagcaagccuuacuacacaggagaacaugcaaaagccauaggaaauugcccaauaugggugaaaacaccuuugaagcuugccaauggaaccaaauauagaccuccugcaaaacuauuaaaggaaagggguuucuucggagcuauugcugguuuccuagaaggaggaugggaaggaaugauugcagguuggcacggauacacaucgcacggagcacauggaguggcaguugcugcagaccuuaagagcacacaagaagcuauaaacaagauaacaaaaaaucucaacucuuugagugagcuagaaguaaagaaucuucaaaggcuaaguggugccauggaugaacuccacaacgaaauacucgagcuggaugagaaaguggaugaucucagagcugacacuauaaguucacaaauagaacuugcagucuugcuuuccaacgaaggaauaauaaacagugaagaugagcaucuauuggcacuugagagaaaacuaaagaaaaugcugggucccucugcuguagacauaggaaauggaugcuucgaaaccaaacacaaaugcaaccagaccugcuuagacaggauagcugcuggcaccuuuaaugcaggagaauuuucucuccccacuuuugauucauugaacauuacugcugcaucuuuaaaugaugauggauuggauaaccauacuauacugcucuauuacucaacugcugcuucuaguuuggcuguaacauugaugcuagcuauuuuuauuguuuauauggucuccagagacaacguuucaugcuccaucugucuauaa

SEQ ID NO: 58911 - RNA, 1755 nt, Artificial Sequence
  derived and/or modified CDS sequence (wt) from hemagglutinin__InfluenzaB__AGL09872
augaaggcaauaauuguacuacucaugguaguaacauccaaugcagaucgaaucugcacugggauaacaucuucaaacucaccucauguggucaaaacagcuacucaaggggaggucaaugugacuggugugauaccacuaacaacaacaccaacaaaaucuuauuuugcaaaucucaaaggaacaaagaccagagggaaacuaugcccagacugucucaacuguacagaucuggauguggccuugggcaggccaaugugugugggaacuacacccucugcgaaagcuucaauacuucacgaagucagaccuguuacauccgggugcuucccuauaaugcacgacagaacaaaaaucaggcaacuagccaaucuucucagaggauaugaaaauaucagguuaucaacccaaaacguuaucgaugcagaaaaagcaccaggaggacccuacagacuuggaaccucaggaucuugcccuaacgcuaccaguaaaagcggauuuuucgcaacaauggcuugggcugucccaaaggacaacaacaaaaaugcaacgaacccauuaacaguagaaguaccauacauuugugcagaaggagaagaccaaauugcuguuuggggguuccauucagauaacaaaacccaaaugaagaaccucuauggagacucaaauccucaaaaguucaccucaucugcuaauggaguaaccacacauuauguuucucagauuggcggcuucccagaucaaacagaagacggaggacuaccacaaagcggcagaauugucguugauuacaugaugcaaaaaccugggaaaacaggaacaauugucuaucaaagagguguuuuguugccucaaaagguguggugcgcgaguggcaggagcaaaguaauaaaaggguccuugccuuuaauuggugaagcagauugucuucaugaaaaauacgguggauuaaacaaaagcaagccuuacuacacaggagaacaugcaaaagccauaggaaauugcccaauaugggugaaaacaccuuugaagcuugccaauggaaccaaauauagaccuccugcaaaacuauuaaaggaaagggguuucuucggagcuauugcugguuuccuagaaggaggaugggaaggaaugauugcagguuggcacggauacacaucucacggagcacauggaguggcaguugcugcagaccuuaagagcacacaagaagcuauaaacaagauaacaaaaaaucucaacucuuugagugagcuagaaguaaagaaucuucaaaggcuaaguggugccauggaugaacuccacaacgaaauacucgagcuggaugagaaaguggaugaucucagagcugacacuauaaguucacaaauagaacuugcagucuugcuuuccaacgaaggaauaauaaacagugaagaugagcaucuauuggcacuugagagaaaacuaaagaaaaugcugggucccucugcuguagacauaggaaauggaugcuucgaaaccaaacacaaaugcaaccagaccugcuuagacaggauagcugcuggcaccuuuaaugcaggagaauuuucucuccccacuuuugauucauugaacauuacugcugcaucuuuaaaugaugauggauuggauaaccauacuauacugcucuauuacucaacugcugcuucuaguuuggcuguaacauugaugcuagcuaucuuuauuguuuauauggucuccagagacaacguuucaugcuccaucugucuauga

SEQ ID NO: 58912 - RNA, 1755 nt, Artificial Sequence; identical to SEQ ID NO: 58868
  derived and/or modified CDS sequence (wt) from hemagglutinin__InfluenzaB__AGL09873

SEQ ID NO: 58913 - RNA, 1758 nt, Artificial Sequence; identical to SEQ ID NO: 58899
  derived and/or modified CDS sequence (wt) from hemagglutinin__InfluenzaB__AGL09874

SEQ ID NO: 58914 - RNA, 1758 nt, Artificial Sequence
  derived and/or modified CDS sequence (wt) from hemagglutinin__InfluenzaB__AGO02695
augaaggcaauaauuguacuacucaugguaguaacauccaaugcagaucgaaucugcacugggauaacaucgucaaacucaccacaugucgucaaaacugcuacucaaggggaggucaaugugaccgguguaauaccacugacaacaacacccaccaaaucucauuuugcaaaucucaaaggaacagaaaccagggggaaacuaugcccaaaaugccuuaacugcacagaucuggacguagccuugggcagaccaaaaugcacggggaaaauacccucggcaagaguuucaauacuccaugaagucagaccuguuacaucugggugcuuuccuauaaugcacgauagaacaaaaauuagacagcugccuaaccuucuccgaggauacgaacauaucagguuaucaacucacaacguuaucaaugcagaaaaugcaccaggaggacccuacaaaauuggaaccucagggucuugcccuaacguuaccaauggaaacggauucuucgcaacaauggcuugggccgucccaaaaaacgacaaaaacaaaacagaaacaaauccauuaacaauagaaguaccauacauuuguacagaaggagaagaccaaauuaccguuuggggguuccacucugacaacgagacccaaauggcaaagcucuauggggacucaaagccccagaaguucaccucaucugccaacggagugaccacacauuacguuucacagauugguggcuucccaaaucaaacagaagacggaggacuaccacaaagugguagaauuguuguugauuacauggugcaaaaaucugggaaaacaggaacaauuaccuaucaaagagguauuuuauugccucaaaagguguggugcgcaaguggcaggagcaagguaauaaaaggauccuugccuuuaauuggagaagcagauugccuccacgaaaaauacgguggauuaaacaaaagcaagccuuacuacacaggggaacaugcaaaggccauaggaaauugcccaauaugggugaaaacacccuugaagcuggccaauggaaccaaauauagaccuccugcaaaacuauuaaaggaaagggguuucuucggagcuauugcugguuucuuagaaggaggaugggaaggaaugauugcagguuggcacggauacacaucccauggggcacauggaguagcgguggcagcugaccuuaagagcacucaagaggccauaaacaagauaacaaaaaaucucaacucuuugagugagcuggaaguaaagaaucuccaaagacuaagcggugccauggaugaacuccacaacgaaauacuagaacuagaugagaaaguggaugaucucagagcugauacaauaagcucacaaauagagcucgcaguccugcuuuccaaugaaggaauaauaaacagugaagaugaacaucucuuggcgcuugaaagaaagcugaagaaaaugcugggccccucugcuguagagauagggaauggaugcuuugaaaccaaacacaagugcaaccagaccugucucgacagaauagcugcugguaccuuugaugcaggagaauuuucucuccccaccuuugauucacugaauauuacugcugcaucuuuaaaugacgauggauuggauaaucauacuauacugcuuuacuacucaacugcugccuccaguuuggcuguaacacugaugauagcuaucuuuguuguuuauauggucuccagagacaauguuucuugcuccaucugucuauaa

SEQ ID NO: 58915 - RNA, 1755 nt, Artificial Sequence
  derived and/or modified CDS sequence (wt) from hemagglutinin__InfluenzaB__AGQ16249
augaaggcaauaauuguacuacucaugguaguaacauccaaugcagaucgaaucugcacuggaauaacaucuucaaacucaccucauguggucaaaacagcuacucaaggggaggucaaugugacuggugugauaccacuaacaacaacaccaacaaaaucuuauuuugcaaaucucaaaggaacaaagaccagagggaaacuaugcccagacugucucaacuguacagaucuggauguggccuugggcaggccaaugugugugggaacuacaccuucugcgaaagcuucaauacuucacgaagucagaccuguuacauccgggugcuucccuauaaugcacgacagaacaaaaaucaggcaacuagccaaucuucucagaggguaugaaaauaucagguuaucaacccaaaacguuaucgaugcagaaaaagcaccaggaggacccuacagacuuggaaccucaggaucuugcccuaacgcuaccaguaaaagcggauuuuucgcaacaauggcuugggcugucccaaaggacaacaacaaaaaugcaacgaacccauuaacaguagaaguaccauacauuugugcagaaggagaagaccaaauuacuguuuggggguuccauucagauaacaaaacccaaaugaagaaccucuauggagacucaaauccucaaaaguucaccucaucugcuaauggaguaaccacacauuauguuucucagauuggcggcuucccagaucaaacagaagacggaggacuaccacaaagcggcagaauugucguugauuacaugaugcaaaaaccugggaaaacaggaacaauugucuaucaaagagguguuuuguugccucaaaagguguggugcgcgagugguaggagcaaaguaauaaaaggguccuugccuuuaauuggugaagcagauugccuucaugaaaaauacgguggauuaaacaaaagcaagccuuacuacacaggagaacaugcaaaagccauaggaaauugcccaauaugggugaaaacaccuuugaagcuugccaauggaaccaaauauagaccuccugcaaaacuauuaaaggaaagggguuucuucggagcuauugcugguuuccuagaaggaggaugggaaggaaugauugcagguuggcacggauacacaucucacggagcacauggaguggcaguugcugcagaccuuaagagcacacaagaagcuauaaacaagauaacaaaaaaucucaacucuuugagugagcuagaaguaaagaaucuucaaaggcuaaguggugccauggaugaacuccacaacgaaauacucgagcuggaugagaaaguggaugaucucagagcugacacuauaaguucacaaauagaacuugcagucuugcuuuccaacgaaggaauaauaaacagugaagaugagcaucuauuggcacuugagagaaaacuaaagaaaaugcugggucccucugcuguagacauaggaaauggaugcuucgaaaccaaacacaaaugcaaccagaccugcuuagacaggauagcugcuggcaccuuuaaugcaggagaauuuucucuccccacuuuugauucauugaacauuacugcugcaucuuuaaaugaugauggauuggauaaccauacuauacugcucuauuacucaacugcugcuucuaguuuggcuguaacauugaugcuagcuauuuuuauuguuuauauggucuccagagacaacguuucaugcuccaucugucuauaa

SEQ ID NO: 58916 - RNA, 1758 nt, Artificial Sequence
  derived and/or modified CDS sequence (wt) from hemagglutinin__InfluenzaB__AGQ16250
augaaggcaauaauuguacuacucaugguaguaacauccaaugcagaucgaaucugcacugggauaacaucgucaaacucaccacaugucgucaaaacugcuacucaaggggaggucaaugugaccgguguaauaccacugacaacaacacccaccaaaucucauuuugcaaaucucaaaggaacagaaaccagggggaaacuaugcccaaaaugccucaacugcacagaucuggacguagccuugggcagaccaaaaugcacagggaaaauacccucggcaagaguuucaauacuccaugaagucagaccuguuacaucugggugcuuuccuauaaugcacgauagaacaaaaauuagacagcugccuaaccuucuccgaggauacgaacauaucagguugucaacucacaacguuaucaaugcagaagaugcaccaggaggacccuacaaaauuggaaccucagggucuugcccuaacguuaccaauggaaacggauucuucgcaacaauggcuugggccgucccaaaaaacgacaaaaacaaaacagcaacaaauccauuaacaauagaaguaccauacauuuguacagaaggagaagaccaaauuaccguuuggggguuccacucugacaacgagacccaaauggcaaagcucuauggggacucaaagccccagaaguucaccucaucugccaacggagugaccacacauuacguuucacagauugguggcuucccaaaucaaacagaagacggaggacuaccacaaagugguagaauuguuguugauuacauggugcaaaaaucuggaaaaacaggaacaauuaccuaucaaagagguauuuuauugccucaaaagguguggugcgcaaguggcaggagcaagguaauaaaaggauccuugccuuuaauuggagaagcagauugccuccacgaaaaauacgguggauuaaacaaaagcaagccuuacuacacaggggaacaugcaaaggccauaggaaauugcccaauaugggugaaaacacccuugaagcuggccaauggaaccaaauauagaccuccugcaaaacuauuaaaggaaagggguuucuucggagcuauugcugguuucuuagaaggaggaugggaaggaaugauugcagguuggcacggauacacaucccauggggcacauggaguagcgguggcagcugaccuuaagagcacucaagaggccauaaacaagauaacaaaaaaucucaacucuuugagugagcuggaaguaaagaaucuucaaagacuaagcggugccauggaugaacuccacaacgaaauacuagaacuagaugagaaaguggaugaucucagagcugauacaauaagcucacaaauagaacucgcaguccugcuuuccaaugaaggaauaauaaacagugaagaugaacaucucuuggcgcuugaaagaaagcugaagaaaaugcugggccccucugcuguagagauagggaauggaugcuuugaaaccaaacacaagugcaaccagaccugucucgacagaauagcugcugguaccuuugaugcaggagaauuuucucuccccaccuuugauucacugaauauuacugcugcaucuuuaaaugaugauggauuggauaaucauacuauacugcuuuacuacucaacugcugccuccaguuuggcuguaacacugaugauagcuaucuuuguuguuuauauggucuccagagacaauguuucuugcuccaucugucuauaa

SEQ ID NO: 58917 - RNA, 1758 nt, Artificial Sequence; identical to SEQ ID NO: 58899
  derived and/or modified CDS sequence (wt) from hemagglutinin__InfluenzaB__AGQ16251

SEQ ID NO: 58918 - RNA, 1755 nt, Artificial Sequence
  derived and/or modified CDS sequence (wt) from hemagglutinin__InfluenzaB__AGQ16252
augaaggcaauaauuguacuacucaugguaguaacauccaaugcagaucgaaucugcacugggauaacaucuucaaacucaccucauguggucaaaacagcuacucaaggggaggucaaugugacuggcgugauaccacugacaacaacaccagcaaaaucuuauuuugcaaaccucaaaggaacaaggaccagagggaaacuaugcccggacugucucaacuguacagaucuggauguggccuugggcaggccaauguguguggggaccacaccuucugcuaaagcuucaauacuccacgaagucagaccuguuacauccgggugcuuuccuauaaugcacgacagaacaaaaaucaggcaacuacccaaucuccucagaggauaugaaaauaucagguuaucaacccagaacguuaucgaugcagaaaaagcaccaggaggacccuacagacuuggaaccucaggaucuugcccuaaugcuaccaguaaaaucggauuuuucgcaacaauggcuugggcugucccaaaggacaacuacaaaaaugcaacgaacccacuaacaguagaaguaccauacauuuguaaagaaggggaagaccaaauuacuguuuggggguuccauucagauaacaaaacccaaaugaagaaccucuauggagacucaaauccucaaaaguucaccucaucugcuaauggaguaacuacacauuauguuucucagauuggcgacuucccagaucaaacagaagacggaggacuaccacaaagcggcagaauuguuguugauuacaugaugcaaaaaccugggaaaacaggaacaauugucuaucaaagagguguuuuguugccucaaaagguguggugcgcgaguggcaggagcaaaguaauaaaagggucauugccuuuaauuggugaagcagauugccuucaugaggaauacgguggauuaaacaaaagcaagccuuacuacacaggaaaacaugcaaaagccauaggaaacugcccaauauggguaaaaacaccuuugaagcuugccaaugggaccaaauauagaccuccugcaaaacuauuaaaggaaagggguuucuucggggcuauugcugguuuccuagaaggaggaugggaaggaaugauugcagguuggcacggauacacaucucacggagcacauggaguggcaguggcggcagaccuuaagaguacacaagaagcuauaaauaaaauaacaaaaaaucucaauucuuugagugagcuagaaguaaagaaccuucaaagacuaaguggugccauggaugaacuccacaacgaaauacucgagcuggaugagaaaguggaugaucucagagcugacacuauaagcucacaaauagaacuugcagucuugcuuuccaacgaaggaauaauaaacagugaagacgagcaucuauuggcacuugagagaaaacuaaagaaaaugcugggccccucugcuguagacauaggaaauggaugcuucgaaaccaaacacaaaugcaaccagaccugcuuagacaggauagcugcuggcaccuuuaaugcaggagaauuuucucuccccacuuuugauucauugaacauuacugcugcaucuuuaaaugaugauggauuggauaaccauacuauacugcucuauuacucaacugcugcuucuaguuuggcuguaacauuaaugcuagcuauuuuuauuguuuauauggucuccagagacaacguuucaugcuccaucugucuauaa

SEQ ID NO: 58919 - RNA, 1755 nt, Artificial Sequence
  derived and/or modified CDS sequence (wt) from hemagglutinin__InfluenzaB__AGQ16253
augaaggcaauaauuguacuacucaugguaguaacauccaaugcagaucgaaucugcacugggauaacaucuucaaacucaccucauguggucaaaacagcuacucaaggggaggucaaugugacuggugugauaccacuaacaacaacaccaacaaaaucuuauuuugcaaaucucaaaggaacaaagaccagagggaaacuaugcccagacugucucaacuguacagaucuggauguggccuugggcaggccaaugugugugggaacuacaccuucugcgaaagcuucaauacuucacgaagucagaccuguuacauccgggugcuucccuauaaugcacgacagaacaaaaaucaggcaacuagccaaucuucucagaggauaugaaaauaucagguuaucaacccaaaacguuaucgaugcagaaaaagcaccaggaggacccuacagacuuggaaccucaggaucuugcccuaacgcuaccaguaaaagcggauuuuucgcaacaauggcuugggcugucccaaaggacaacaacaaaaaugcaacgaacccauuaacaguagaaguaccauacauuugugcagaaggagaagaccaaauuacuguuuggggguuccauucagauaacaaaacccaaaugaagaaccucuauggagacucaaauccucaaaaguucaccucaucugcuaauggaguaaccacacauuauguuucucagauuggcggcuucccagaucaaacagaagacggaggacuaccacaaagcggcagaauugucguugauuacaugaugcaaaaaccugggaaaacaggaacaauugucuaucaaagagguguuuuguugccucaaaagguguggugcgcgaguggcaggagcaaaguaauaaaaggguccuugccuuuaauuggugaagcagauugccuucaugaaaaauacgguggauuaaacaaaagcaagccuuacuacacaggagaacaugcaaaagccauaggaaauugcccaauaugggugaaaacaccuuugaagcuugccaauggaaccaaauauagaccuccugcaaaacuauuaaaggaaagggguuucuucggagcuauugcugguuuccuagaaggaggaugggaaggaaugauugcagguuggcacggauacacaucucauggagcacauggaguggcaguugcugcagaccuuaagagcacacaagaagcuauaaacaagauaacaaaaaaucucaacucguugagugagcuagaaguaaagaaucuucaaaggcuaaguggugccauggaugaacuccacaacgaaauacucgagcuggaugagaaaguggaugaucucagagcugacacuauaaguucacaaauagaacuugcagucuugcuuuccaacgaaggaauaauaaacagugaagaugagcaucuauuggcacuugagagaaaacuaaagaaaaugcugggucccucugcuguagacauaggaaauggaugcuucgaaaccaaacacaaaugcaaccagaccugcuuagacaggauagcugcuggcaccuuuaaugcaggagaauuuucucuccccacuuuugauucauugaacauuacugcugcaucuuuaaaugaugauggauuggauaaccauacuauacugcucuauuacucaacugcugcuucuaguuuggcuguaacauugaugcuagcuauuuuuauuguuuauauggucuccagagacaacguuucaugcuccaucugccuauaa

SEQ ID NO: 58920 - RNA, 1755 nt, Artificial Sequence
  derived and/or modified CDS sequence (wt) from hemagglutinin__InfluenzaB__AGQ16255
augaaggcaauaauuguacuacucaugguaguaacauccaaugcagaucgaaucugcacuggaauaacaucuucaaacucaccucauguggucaaaacagcuacucaaggggaggucaaugugacuggugugauaccacuaacaacaacaccaacaaaaucuuauuuugcaaaucucaaaggaacaaagaccagagggaaacuaugcccagacugucucaacuguacagaucuggauguggccuugggcaggccaaugugugugggaacuacaccuucugcgaaagcuucaauacuucacgaagucagaccuguuacauccgggugcuucccuauaaugcacgacagaacaaaaaucaggcaacuagccaaucuucucagaggguaugaaaauaucagguuaucaacccaaaacguuaucgaugcagaaaaagcaccaggaggacccuacagacuuggaaccucaggaucuugcccuaacgcuaccaguaaaagcggauuuuucgcaacaauggcuugggcugucccaaaggacaacaacaaaaaugcaacgaacccauuaacaguagaaguaccauacauuugugcagaaggagaagaccaaauuacuguuuggggguuccauucagauaacaaaacccaaaugaagaaccucuauggagacucaaauccucaaaaguucaccucaucugcuaauggaauaaccacacauuauguuucucagauuggcggcuucccagaucaaacagaagacggaggacuaccacaaagcggcagaauugucguugauuacaugaugcaaaaaccugggaaaacaggaacaauugucuaucaaagagguguuuuguugccucaaaagguguggugcgcgagugguaggagcaaaguaauaaaaggguccuugccuuuaauuggugaagcagauugccuucaugaaaaauacgguggauuaaacaaaagcaagccuuacuacacaggagaacaugcaaaagccauaggaaauugcccaauaugggugaaaacaccuuugaagcuugccaauggaaccaaauauagaccuccugcaaaacuauuaaaggaaagggguuucuucggagcuauugcugguuuccuagaaggaggaugggaaggaaugauugcagguuggcacggauacacaucucacggagcacauggaguggcaguugcugcagaccuuaagagcacacaagaagcuauaaacaagauaacaaaaaaucucaacucuuugagugagcuagaaguaaagaaucuucaaaggcuaaguggugccauggaugaacuccacaacgaaauacucgagcuggaugagaaaguggaugaucucagagcugacacuauaaguucacaaauagaacuugcagucuugcuuuccaacgaaggaauaauaaacagugaagaugagcaucuauuggcacuugagagaaaacuaaagaaaaugcugggucccucugcuguagacauaggaaauggaugcuucgaaaccaaacacaaaugcaaccagaccugcuuagacaggauagcugcuggcaccuuuaaugcaggagaauuuucucuccccacuuuugauucauugaacauuacugcugcaucuuuaaaugaugauggauuggauaaccauauuauacugcucuauuacucaacugcugcuucuaguuuggcuguaacauugaugcuagcuauuuuuauuguuuauauggucuccagagacaacguuucaugcuccaucugucuauaa

SEQ ID NO: 58921 - RNA, 1755 nt, Artificial Sequence
  derived and/or modified CDS sequence (wt) from hemagglutinin__InfluenzaB__AGQ16256
augaaggcaauaauuguacuacucaugguaguaacauccaaugcagaucgaaucugcacugggauaacaucuucaaacucaccucauguggucaaaacaguuacucaaggggaggucaaugugacuggugugauaccacuaacaacaacaccaacaaaaucuuauuuugcaaaucucaaaggaacaaagaccagagggaaacuaugcccagacugucucaacuguacagaucuggauguggccuugggcaggccaaugugugugggaacuacaccuucugcgaaagcuucaauacuucacgaagucagaccuguuacauccgggugcuucccuauaaugcacgacagaacaaaaaucaggcaacuagccaaucuucucagaggauaugaaaauaucagguuaucaacccaaaacguuaucgaugcagaaaaagcaccaggaggacccuacagacuuggaaccucaggaucuugcccuaacgcuaccaguaaaagcggauuuuucgcaacaauggcuugggcugucccaaaagacagcaacaaaaaugcaacgaacccauuaacaguagaaguaccauacauuugugcagaaggagaagaccaaauuacuguuuggggguuccauucagauaacaaaacccaaaugaagaaccucuauggagacucaaauccucaaaaguucaccucaucugcuaauggaguaaccacacauuauguuucucagauuggcggcuucccagaucaaacagaagacggaggacuaccacaaagcggcagaauugucguugauuacaugaugcaaaaaccugggaaaacaggaacaauugucuaucaaagagguguuuuauugccucaaaagguguggugcgcgaguggcaggagcaaaguaauaaaaggguccuugccuuuaauuggugaagcagauugccuucaugaaaaauacgguggauuaaacaaaagcaagccuuacuacacaggagaacaugcaaaagccauaggaaauugcccaauaugggugaaaacaccuuugaagcuugccaauggaaccaaauauagaccuccugcaaaacuauuaaaggaaagggguuucuucggagcuauugcugguuuccuagaaggaggaugggaaggaaugauugcagguuggcacggauacacaucucacggagcacauggaguggcaguugcugcagaccuuaagagcacacaagaagcuauaaacaagauaacaaaaaaucucaacucuuugagugagcuagaaguaaagaaucuucaaaggcuaaguggugccauggaugaacuccacaacgaaauacucgagcuggaugagaaaguggaugaucucagagcugacacuauaaguucacaaauagaacuugcagucuugcuuuccaacgaaggaauaauaaacagugaagaugagcaucuauuggcacuugagagaaaacuaaagaaaaugcugggucccucugcuguagacauaggaaauggaugcuucgaaaccaaacacaaaugcaaccagaccugcuuagacaggauagcugcuggcaccuuuaaugcaggagaauuuucucuccccacuuuugauucauugaacauuacugcugcaucuuuaaaugaugauggauuggauaaccauacuauacugcucuauuacucaacugcugcuucuaguuuggcaguaacauugaugcuagcuauuuuuauuguuuauauggucuccagagacaacguuucaugcuccaucugucuauaa

SEQ ID NO: 58922 - RNA, 1755 nt, Artificial Sequence
  derived and/or modified CDS sequence (wt) from hemagglutinin__InfluenzaB__AGQ16257
augaaggcaauaauuguacuacucaugguaguaacauccaaugcagaucgaaucugcacugggauaacaucuucaaacucaccucauguggucaaaacagcuacucaaggggaggucaaugugacuggugugauaccacuaacaacaacaccaacaaaaucuuauuuugcaaaucucaaaggaacaaagaccagagggaaacuaugcccagacugucucaacuguacagaucuggauguggccuugggcaggccaaugugugugggaacuacaccuucugcgaaagcuucaauacuucacgaagucagaccuguuacauccgggugcuucccuauaaugcacgacagaacaaaaaucaggcaacuagccaaucuucucagaggauaugaaaauaucagguuaucaacccaaaacguuaucgaugcagaaaaagcaccaggaggacccuacagacuuggaaccucaggaucuugcccuaacgcuaccaguaaaagcggauuuuucgcaacaauggcuugggcugucccaaaggacaacaacaaaaaugcaacgaacccauuaacaguagaaguaccauacauuugugcagaaggagaagaccaaauuacuguuuggggguuccauucagauaacaaaacccaaaugaagaaccucuauggagacucaaauccucaaaaguucaccucaucugcuaauggaguaaccacacauuauguuucucagauuggcggcuucccagaucaaacagaagacggaggacuaccacaaagcggcagaauugucguugauuacaugaugcaaaaaccugggaaaacaggaacaauugucuaucaaagagguguuuuguugccucaaaagguguggugcgcgaguggcaggagcaaaguaauaaaaggguccuugccuuuaauuggugaagcagauugccuucaugaaaaauacgguggauuaaacaaaagcaagccuuacuacacaggagaacaugcaaaagccauaggaaauugcccaauaugggugaaaacaccuuugaagcuugccaauggaaccaaauauagaccuccugcaaaacuauuaaaggaaagggguuucuucggagcuauugcugguuuccuagaaggaggaugggaaggaaugauugcagguuggcacggauacacaucucacggagcacauggaguggcaguugcugcagaccuuaagagcacacaagaagcuauaaacaagauaacaaaaaaucucaacucauugagugagcuagaaguaaagaaucuucaaaggcuaaguggugccauggaugaacuccacaacgaaauacucgagcuggaugagaaaguggaugaucucagagcugacacuauaaguucacaaauagaacuugcagucuugcuuuccaacgaaggaauaauaaacagugaagaugagcaucuauuggcacuugagagaaaacuaaagaaaaugcugggucccucugcuguagacauaggaaauggaugcuucgaaaccaaacacaaaugcaaccagaccugcuuagacaggauagcugcuggcaccuuuaaugcaggagaauuuucucuccccacuuuugauucauugaacauuacugcugcaucuuuaaaugaugauggauuggauaaccauacuauacugcucuauuacucaacugcugcuucuaguuuggcuguaacauugaugcuagcuauuuuuauuguuuauauggucuccagagacaacguuucaugcuccaucugccuauaa

SEQ ID NO: 58923 - RNA, 1755 nt, Artificial Sequence
  derived and/or modified CDS sequence (wt) from hemagglutinin__InfluenzaB__AGQ16258
augaaggcaauaauuguacuacuaaugguaguaacauccaaugcagaucgaaucugcacugggauaacaucuucaaacucaccucauguggucaaaacagcuacucaaggggaggucaaugugacuggugugauaccacuaacaacaacaccaacaaaaucuuauuuugcaaaucucaaaggaacaaagaccagagggaaacuaugcccagacugucucaacuguacagaucuggauguggcccugggcaggccaaugugugugggaacuacaccuucugcgaaagcuucaauacuucacgaagucagaccugucacauccgggugcuucccuauaaugcacgacagaacaaaaaucaggcaacuagccaaucuucucagaggauaugaaaauaucagguuaucaacccaaaacguuaucgaugcagaaaaggcaccaggaggacccuacagacuuggaaccucaggaucuugcccuaacgcuaccaguaaaagcggauuuuucgcaacaauggcuugggcugucccaaaggacaacaacaaaaaugcaacgaacccauuaacaguagaaguaccauacauuugugcagaaggggaagaccaaauuacuguuuggggguuccauucagauaacaaaacccaaaugaagaaccucuauggagacucaaauccucaaaaguucaccucaucugcuaauggaguaaccacacauuauguuucucagauuggcggcuucccagaucaaacagaagacggaggacuaccacaaagcggcagaauugucguugauuacaugaugcaaaaaccugggaaaacaggaacaauugucuaucaaagagguguuuuguugccucaaaagguguggugcgcgaguggcaggagcaaaguaauaaaaggguccuugccuuuaauuggugaagcagauugccuucaugaaaaauaugguggauuaaacaaaagcaagccuuacuacacaggagaacaugcaaaagccauaggaaauugcccaauaugggugaaaacaccuuugaagcuugccaauggaaccaaauauagaccuccugcaaaacuauuaaaggaaagggguuucuucggagcuauugcugguuuccuagaaggaggaugggaaggaaugauugcagguuggcacggauacacaucucacggagcacauggaguggcaguugcugcagaccuuaagagcacacaagaagcuauaaacaagauaacaaaaaaucucaacucuuugagugagcuagaaguaaagaaucuucaaaggcuaaguggugccauggaugaacuccacaaugaaauacucgagcuggaugagaaaguggaugaccucagagcugacacuauaaguucacaaauagaacuugcugucuugcuuuccaacgaaggaauaauaaacagugaagacgagcaucuauuggcacuugagagaaaacuaaagaaaaugcugggucccucugcuguagacauaggaaauggaugcuucgaaaccaaacacaaaugcaaccagaccugcuuagacaggauagcugcuggcaccuuuaaugcaggagaguuuucucuccccacuuuugauucauugaacauuacugcugcaucuuuaaaugaugauggauuggauaaccauacuauacugcucuauuacucaacugcugcuucuaguuuggcuguaacauugaugcuagcuauuuuuauuguuuauauggucuccagagacaacguuucaugcuccaucugucuauaa

SEQ ID NO: 58924 - RNA, 1755 nt, Artificial Sequence
  derived and/or modified CDS sequence (wt) from hemagglutinin__InfluenzaB__AGQ16259
augaaggcaauaauuguacuacucaugguaguaacauccaaugcagaucgaaucugcacugggauaacaucuucaaacucaccucauguggucaaaacagcuacucaaggggaggucaaugugacuggugugauaccacuaacaacaacaccaacaaaaucuuauuuugcaaaucucaaaggaacaaagaccagagggaaacuaugcccagacugucucaacuguacagaucuggauguggccuugggcaggccaaugugugugggaacuacaccuucugcgaaagcuucaauacuucacgaagucagaccuguuacauccgggugcuucccuauaaugcacgacagaacaaaaaucaggcaacuagccaaucuucucagaggauaugaaaauaucagguuaucaacccaaaacguuaucgaugcagaaaaagcaccaggaggacccuacagacuuggaaccucaggaucuugcccuaacgcuaccaguaaaagcggauuuuucgcaacaauggcuugggcugucccaaaggacaacaacaaaaaugcaacgaacccauuaacaguagaaguaccauacauuugugcagaaggagaagaccaaauuacuguuuggggguuccauucggauaacaaaacccaaaugaagaaccucuauggagacucaaauccucaaaaguucaccucaucugcuaauggaguaaccacacauuauguuucucagauuggcggcuucccagaucaaacagaagacggaggacuaccacaaagcggcagaauugucguugauuacaugaugcaaaaaccugggaaaacaggaacaauugucuaucaaagagguguuuuguugccucaaaagguguggugcgcgaguggcaggagcaaaguaauaaaaggguccuugccuuuaauuggugaagcagauugccuucaugaaaaauacgguggauuaaacaaaagcaagccuuacuacacaggagaacaugcaaaagccauaggaaauugcccaauaugggugaaaacaccuuugaagcuugccaauggaaccaaauauagaccuccugcaaaacuauuaaaggaaagggguuucuucggagcuauugcugguuuccuagaaggaggaugggaaggaaugauugcagguuggcacggauacacaucucacggagcacauggaguggcaguugcugcagaccuuaagagcacacaagaagcuauaaacaagauaacaaaaaaucucaacucuuugagugagcuagaaguaaagaaucuucaaaggcuaaguggugccauggaugaacuccacaacgaaauacucgagcuggaugagaaaguggaugaucucagagcugacacuauaaguucacaaauagaacuugcagucuugcuuuccaacgaaggaauaauaaacagugaagaugagcaucuauuggcacuugagagaaaacuaaagaaaaugcugggucccucugcuguagacauagggaauggaugcuucgaaaccaaacacaaaugcaaccagaccugcuuagacaggauagcugcuggcaccuuuaaugcaggagaauuuucucuccccacuuuugauucauugaacauuacugcugcaucuuuaaaugaugauggauuggauaaccauacuauacugcucuauuacucaacugcugcuucuaguuuggcuguaacauugaugcuagcuauuuuuauuguuuauauggucuccagagacaacguuucaugcuccaucugucuauaa

SEQ ID NO: 58925 - RNA, 1755 nt, Artificial Sequence
  derived and/or modified CDS sequence (wt) from hemagglutinin__InfluenzaB__AGQ16260
augaagacaauaauuguacuacucaugguaguaacauccaaugcagauagaaucugcacugggauaacaucuucaaacucaccucauguggucaaaacagcuacucaaggggaggucaaugugacuggugugauaccacuaacaacaacaccaacaaaaucuuauuuugcaaaucucaaaggaacaaagaccagagggaaacuaugcccagacugucucaacuguacagaucuggauguggccuugggcaggccaaugugugugggaacuacaccuucugcgaaagcuucaauacuucacgaagucagaccuguuacauccgggugcuucccuauaaugcacgacagaacaaaaaucaggcaacuagccaaucuucucagaggauaugaaaauaucagguuaucaucccaaaacguuaucgaugcagaaaaagcaccaggaggacccuacagacuuggaaccucaggaucuugcccuaacgcuaccaguaaaagcggauuuuucgcaacaauggcuugggcugucccaaaggacaacaacaaaaaugcaacgaacccauuaacaguagaaguaccauacauuugugcagaaggagaagaccaaauuacuguuuggggguuccauucagauaacaaaacccaaaugaagaaccucuauggagacucaaauccucaaaaguucaccucaucugcuaauggaguaaccacacauuauguuucucagauuggcggcuucccagaucaaacagaagacggaggacuaccacaaagcgguagaauugucguugauuacaugaugcaaaaaccugggaaaacaggaacaauugucuaucaaagagguguuuuguugccucaaaagguguggugcgcgaguggcaggagcaaaguaauaaaaggguccuugccuuuaauuggugaagcagauugccuucaugaaaaauacgguggauuaaacaaaagcaagccuuacuacacaggagaacaugcaaaagccauaggaaauugcccaauaugggugaaaacaccuuugaagcuugccaauggaaccaaauauagaccuccugcaaaacuauuaaaggaaagggguuucuucggagcuauugcugguuuccuagaaggaggaugggaaggaaugauugcagguuggcacggauacacaucucacggagcacauggaguggcaguugcugcagaccuuaagagcacacaagaggcuauaaacaagauaacaaaaaaucucaacucuuugagugagcuagaaguaaagaaucuucaaaggcuaaguggugccauggaugaacuccacaacgaaauacucgagcuggaugagaaaguggaugaucucagagcugacacuauaaguucacaaauagaacuugcagucuugcuuuccaacgaaggaauaauaaacagugaagaugagcaucuauuggcacuugagagaaaacuaaagaaaaugcugggucccucugcuguagacauaggaaauggaugcuucgaaaccaaacacaaaugcaaccagaccugcuuagacaggauagcugcuggcaccuuuaaugcaggagaauuuucucuccccacuuuugauucauugaacauaacugcugcaucuuuaaaugaugauggauuggauaaccauacuauacugcucuauuacucaacugcugcuucuaguuuggcuguaacauugaugcuagcuauuuuuauuguuuauauggucuccagagacaacguuucaugcuccaucugucuauaa

SEQ ID NO: 58926 - RNA, 1755 nt, Artificial Sequence; identical to SEQ ID NO: 58915
  derived and/or modified CDS sequence (wt) from hemagglutinin__InfluenzaB__AGQ16261

SEQ ID NO: 58927 - RNA, 1755 nt, Artificial Sequence
  derived and/or modified CDS sequence (wt) from hemagglutinin__InfluenzaB__AGQ16262
augaaggcaauaauuguacuacucaugguaguaacauccaaugcagaucgaaucugcacugggauaacaucuucaaacucaccucauguggucaaaacagcuacucaaggggaggucaaugugacuggugugauaccacuaacaacaacaccaacaaaaucuuauuuugcaaaucucaaaggaacaaagaccagagggaaacuaugcccagacugucucaacuguacagaucuggauguggccuugggcaggccaaugugugugggaacuacaccuucugcgaaagcuucaauacuucacgaagucagaccuguuacauccgggugcuucccuauaaugcacgacagaacaaaaaucaggcaacuagccaaucuucucagaggauaugaaaauaucagguuaucaacccaaaacguuaucgaugcagaaaaagcaccaggaggacccuacagacuuggaaccucaggaucuugcccuaacgcuaccaguaaaagcggauuuuucgcaacaauggcuugggcugucccaaaggacaacaacaaaaaugcaacgaacccauuaacaguagaaguaccauacauuugugcagaaggagaagaccaaauuacuguuuggggguuccauucagauaacaaaacccaaaugaagaaccucuauggagacucaaauccucaaaaguucaccucaucugcuaauggaguaaccacacauuauguuucucagauuggcggcuucccagaccaaacagaagacggaggacuaccacaaagcggcagaauugucguugauuacaugaugcaaaaaccugggaaaacaggaacaauugucuaucaaagagguguuuuguugccucaaaagguguggugcgcgaguggcaggagcaaaguaauaaaaggguccuugccuuuaauuggugaagcagauugccuucaugaaaaauacgguggauuaaacaaaagcaagccuuacuacacaggagaacaugcaaaagccauaggaaauugcccaauaugggugaaaacaccuuugaagcuugccaauggaaccaaauauagaccuccugcaaaacuauuaaaggaaagggguuucuucggagcuauugcugguuuccuagaaggaggaugggaaggaaugauugcagguuggcacggauacacaucucacggagcacauggaguggcaguugcugcagaccuuaagagcacacaagaagcuauaaacaagauaacaaaaaaucucaacucguugagugagcuagaaguaaagaaucuucaaaggcuaaguggugccauggaugaacuccacaacgaaauacucgagcuggaugagaaaguggaugaucucagagcugacacuauaaguucacaaauagaacuugcagucuugcuuuccaacgaaggaauaauaaacagugaagaugagcaucuauuggcacuugagagaaaacuaaagaaaaugcugggucccucugcuguagacauaggaaauggaugcuucgaaaccaaacacaaaugcaaccagaccugcuuagacaggauagcugcuggcaccuuuaaugcaggagaauuuucucuccccacuuuugauucauugaacauuacugcugcaucuuuaaaugaugauggauuggauaaccauacuauacugcucuauuacucaacugcugcuucuaguuuggcuguaacauugaugcuagcuauuuuuauuguuuauauggucuccagagacaacguuucaugcuccaucugccuauaa

SEQ ID NO: 58928 - RNA, 1758 nt, Artificial Sequence
  derived and/or modified CDS sequence (wt) from hemagglutinin__InfluenzaB__AGQ16263
augaaggcaauaauuguacuacucaugguaguaacauccaaugcagaucgaaucugcacugggauaacaucgucaaacucaccacaugucgucaaaacugcuacucaaggggaggucaaugugaccgguguaauaccacugacaacaacacccaccaaaucucauuuugcaaaucucaaaggaacagaaaccagggggaaacuaugcccaaaaugccucaacugcacagaucuggacguagccuugggcagaccaaaaugcacagggaaaauacccucggcaagaguuucaauacuccaugaagucagaccuguuacaucugggugcuuuccuauaaugcacgauagaacaaaaauuagacagcugccuaaccuucuccgaggauacgaacauaucagguugucaacucacaacguuaucaaugcagaagaugcaccaggaggacccuacaaaauuggaaccucagggucuugcccuaacguuaccaauggaaacggauucuucgcaacaauggcuugggccgucccaaaaaacgacaaaaacaaaacagcaacaaauccauuaacaauagaaguaccauacauuuguacagaaggagaagaccaaauuaccguuuggggguuccacucugacaacgagacccaaauggcaaagcucuauggggacucaaagccccagaaguucaccucaucugccaacggagugaccacacauuacguuucacagauugguggcuucccaaaucaaacagaagacggaggacuaccacaaagugguagaauuguuguugauuacauggugcaaaaaucuggaaaaacaggaacaauuaccuaucaaagagguauuuuauugccucaaaagguguggugcgcaaguggcaggagcaagguaauaaaaggauccuugccuuuaauuggagaagcagauugccuccacgaaaaauacgguggauuaaacaaaagcaagccuuacuacacaggggaacaugcaaaggccauaggaaauugcccaauaugggugaaaacacccuugaagcuggccaauggaaccaaauauagaccuccugcaaaacuauuaaaggaaagggguuucuucggagcuauugcugguuucuuagaaggaggaugggaaggaaugauugcagguuggcacggauacacaucccauggggcacauggaguagcgguggcagcugaccuuaagagcacucaagaggccauaaacaagauaacaaaaaaucucaacucuuugagugagcuggaaguaaagaaucuucaaagacuaagcggugccauggaugaacuccacaacgaaauacuagaacuagaugagaaaguggaugaucucagagcugauacaauaagcucacaaauagaacucgcaguccugcuuuccaaugaaggaauaauaaacagugaagaugaacaccucuuggcgcuugaaagaaagcugaagaaaaugcugggccccucugcuguagagauagggaauggaugcuuugaaaccaaacacaagugcaaccagaccugucucgacagaauagcugcugguaccuuugaugcaggagaauuuucucuccccaccuuugauucacugaauauuacugcugcaucuuuaaaugacgauggauuggauaaucauacuauacugcuuuacuacucaacugcugccuccaguuuggcuguaacacugaugauagcuaucuuuguuguuuauauggucuccagagacaauguuucuugcuccaucugucuauaa

SEQ ID NO: 58929 - RNA, 1758 nt, Artificial Sequence; identical to SEQ ID NO: 58899
  derived and/or modified CDS sequence (wt) from hemagglutinin__InfluenzaB__AGQ16264

SEQ ID NO: 58930 - RNA, 1755 nt, Artificial Sequence
  derived and/or modified CDS sequence (wt) from hemagglutinin__InfluenzaB__AGQ16265
augaaggcaauaauuguacuacucaugguaguaacauccaaugcagaucgaaucugcacugggauaacaucuucaaacucaccucauguggucaaaacagcuacucaaggggaggucaaugugacuggugugauaccacuaacaacaacaccaacaaaaucuuauuuugcaaaucucaaaggaacaaagaccagagggaaacuaugcccagacugucucaacuguacagaucuggauguggccuugggcaggccaaugugugugggaacuacaccuucugcgaaagcuucaauacuucacgaagucagaccuguuacauccgggugcuucccuauaaugcacgacagaacaaaaaucaggcaacuagccaaucuucucagaggauaugaaaauaucagguuaucaacccaaaacguuaucgaugcagaaaaagcaccaggaggacccuacagacuuggaaccucaggaucuugcccuaacgcuaccaguaaaagcggauuuuucgcaacaauggcuugggcugucccaaaggacaacaacaaaaaugcaacgaacccauuaacaguagaaguaccauacauuugugcagaaggagaagaccaaauugcuguuuggggguuccauucagauaacaaaacccaaaugaagaaccucuauggggacucaaauccucaaaaguucaccucaucugcuaauggaguaaccacacauuauguuucucagauuggcggcuucccagaucaaacagaagacggaggacuaccacaaagcggcagaauugucguugauuacaugaugcaaaaaccugggaaaacaggaacaauugucuaucaaagagguguuuuguugccucaaaagguguggugcgcgaguggcaggagcaaaguaauaaaaggguccuugccuuuaauuggugaagcagauugucuucaugaaaaauacgguggauuaaacaaaagcaagccuuacuacacaggagaacaugcaaaagccauaggaaauugcccaauaugggugaaaacaccuuugaagcuugccaauggaaccaaauauagaccuccugcaaaacuauuaaaggaaagggguuucuucggagcuauugcugguuuccuagaaggaggaugggaaggaaugauugcagguuggcacggauacacaucucacggagcacauggaguggcaguugcugcagaccuuaagagcacacaagaagcuauaaacaagauaacaaaaaaucucaacucuuugagugagcuagaaguaaagaaucuucaaaggcuaaguggugccauggaugaacuccacaacgaaauacucgagcuggaugagaaaguggaugaucucagagcugacacuauaaguucacaaauagaacuugcagucuugcuuuccaacgaaggaauaauaaacagugaagaugagcaucuauuggcacuugagagaaaacuaaagaaaaugcugggucccucugcuguagacauaggaaauggaugcuucgaaaccaaacacaaaugcaaccagaccugcuuagacaggauagcugcuggcaccuuuaaugcaggagaauuuucucuccccacuuuugauucauugaacauuacugcugcaucuuuaaaugaugauggauuggauaaccauacuauacugcucuauuacucaacugcugcuucuaguuuggcuguaacauugaugcuagcuauuuuuauuguuuauauggucuccagagacaacguuucaugcuccaucugucuauaa

SEQ ID NO: 58931 - RNA, 1755 nt, Artificial Sequence
  derived and/or modified CDS sequence (wt) from hemagglutinin__InfluenzaB__AGQ16266
augaaggcaauaauuguacuacucaugguaguaacauccaaugcagaucgaaucugcacugggauaacaucuucaaacucaccucauguggucaaaacagcuacucaaggggaggucaaugugacuggugugauaccacuaacaacaacaccaacaaaaucuuauuuugcaaaucucaaaggaacaaagaccagagggaaacuaugcccagacugucucaacuguacagaucuggauguggccuugggcaggccaaugugugugggaacuacaccuucugcgaaagcuucaauacuucacgaagucagaccuguuacauccgggugcuucccuauaaugcacgacagaacaaaaaucaggcaacuagccaaucuucucagaggauaugaaaauaucagguuaucaacccaaaacguuaucgaugcagaaaaagcaccaggaggacccuacagacuuggaaccucaggaucuugcccuaacgcuaccagcaaaagcggauuuuucgcaacaauggcuugggcugucccaaaggacaacaacaaaaaugcaacgaacccauuaacaguagaaguaccauacauuugugcagaaggagaagaccaaauuacuguuuggggguuccauucagauaacaaaacccaaaugaagaaccucuauggagacucaaauccucaaaaguucaccucaucugcuaauggaguaaccacacauuauguuucucagguuggcggcuucccagaucaaacagaagacggaggacuaccacaaagcggcagaauuguuguugauuacaugaugcaaaaaccugggaaaacaggaacaauugucuaucaaagagguguuuuauugccucaaaagguguggugcgcgaguggcaggagcaaaguaauaaaaggguccuugccuuuaauuggugaagcagauugccuucaugaaaaauacgguggauuaaacaaaagcaagccuuacuacacaggagaacaugcaaaagccauaggaaauugcccaauaugggugaaaacaccuuugaagcuugccaauggaaccaaauauagaccuccugcaaaacuauuaaaggaaagggguuucuucggagcuauugcugguuuccuagaaggaggaugggaaggaaugauugcagguuggcacggauacacaucucacggagcacauggaguggcaguugcugcagaccuuaagagcacacaagaagcuauaaacaagauaacaaaaaaucucaacucuuugagugagcuagaaguaaagaaucuucaaaggcuaaguggugccauggaugaacuccacaacgaaauacucgagcuggaugagaaaguggaugaucucagagcugacacuauaaguucacaaauagaacuugcagucuugcuuuccaacgaaggaauaauaaacagugaagaugagcaucuauuggcacuugagagaaaacuaaagaaaaugcugggucccucugcuguagacauaggaaauggaugcuucgaaaccaaacacaaaugcaaccagaccugcuuagacaggauagcugcuggcaccuuuaaugcaggagaauuuucucuccccacuuuugauucauugaacauuacugcugcaucuuuaaaugaugauggauuggauaaccauacuauacugcucuauuacucaacugcugcuucuaguuuggcaguaacauugaugcuagcuauuuuuauuguuuauauggucuccagagacaacguuucaugcuccaucugucuauaa

SEQ ID NO: 58932 - RNA, 1755 nt, Artificial Sequence; identical to SEQ ID NO: 58930
  derived and/or modified CDS sequence (wt) from hemagglutinin__InfluenzaB__AGQ16267

SEQ ID NO: 58933 - RNA, 1755 nt, Artificial Sequence
  derived and/or modified CDS sequence (wt) from hemagglutinin__InfluenzaB__AGQ16268
augaaggcaauaauuguacuacucaugguaguaacauccaaugcagaucgaaucugcacugggauaacaucuucaaacucaccucauguggucaaaacagcuacucaaggggaggucaaugugacuggugugauaccacuaacaacaacaccaacaaaaucuuauuuugcaaaucucaaaggaacaaagaccagagggaaacuaugcccagacugucucaacuguacagaucuggauguggccuugggcaggccaaugugugugggaacuacaccuucugcgaaagcuucaauacuucacgaagucagaccuguuacauccgggugcuucccuauaaugcacgacagaacaaaaaucaggcaacuagccaaucuucucagaggauaugaaaauaucagguuaucaacccaaaacguuaucgaugcagaaaaagcaccaggaggacccuacagacuuggaaccucaggaucuugcccuaacgcuaccaguaaaagcggauuuuucgcaacaauggcuugggcugucccaaaggacaacaacaaaaaugcaacgaacccauuaacaguagaaguaccauacauuugugcagaaggagaagaccaaauugcuguuuggggguuccauucagauaacaaaacccaaaugaagaaccucuauggagacucaaauccucaaaaguucaccucaucugcuaauggaguaaccacacauuauguuucucagauuggcggcuucccagaucaaacagaagacggaggacuaccacaaagcggcagaauugucguugauuacaugaugcaaaaaccugggaaaacaggaacaauugucuaucaaagagguguuuuguugccucaaaagguguggugcgcgaguggcaggagcaaaguaauaaaaggguccuugccuuuaauuggugaagcagauugucuucaugaaaaauacgguggauuaaacaaaagcaagccuuacuacacaggagaacaugcaaaagccauaggaaauugcccaauaugggugaaaacaccuuugaagcuugccaauggaaccaaauauagaccuccugcaaaacuauuaaaggaaagggguuucuucggagcuauugcugguuuccuagaaggaggaugggaaggaaugauugcagguuggcacggauacacaucucacggagcacauggaguggcaguugcugcagaccuuaagagcacacaagaagcuauaaacaagauaacaaaaaaucucaacucuuugagugagcuagaaguaaagaaucuucaaaggcuaaguggugccauggaugaacuccacaacgaaauacucgagcuggaugagaaaguggaugaucucagagcugacacuauaaguucacaaauagaacuugcagucuugcuuuccaacgaaggaauaauaaacagugaagaugagcaucuauuggcacuugagagaaaacuaaagaaaaugcugggucccucugcuguagacauaggaaauggaugcuucgaaaccaaacacaaaugcaaccagaccugcuuagacaggauagcugcuggcaccuuuaaugcaggagaauuuucucuccccacuuuugauucauugaacauuacugcugcaucuuuaaaugaugauggauuggauaaccauacuauacugcucuauuacucaacugcugcuucuaguuuggcuguaacauugaugcuagcuauuuuuauuguuuauauggucuccagagacaacguuucaugcuccaucugucuauaa

SEQ ID NO: 58934 - RNA, 1758 nt, Artificial Sequence
  derived and/or modified CDS sequence (wt) from hemagglutinin__InfluenzaB__AGQ16269
augaaggcaauaauuguacuacucaugguaguaacauccaaugcagaucgaaucugcacugggauaacaucgucaaacucaccacaugucgucaaaacugcuacucaaggggaggucaaugugaccgguguaauaccacugacaacaacacccaccaaaucucauuuugcaaaucucaaaggaacagaaaccagggggaaacuaugcccaaaaugccuuaacugcacagaucuggacguagccuugggcagaccaaaaugcacggggaaaauacccucggcaagaguuucaauacuccaugaagucagaccuguuacaucugggugcuuuccuauaaugcacgauagaacaaaaauuagacagcugccuaaccuucuccgaggauacgaacauaucagguuaucaacucacaacguuaucaaugcagaaaaugcaccaggaggacccuacaaaauuggaaccucagggucuugcccuaacguuaccaauggaaacggauucuucgcaacaauggcuugggccgucccaaaaaacgacaaaaacaaaacagaaacaaauccauuaacaauagaaguaccauacauuuguacagaaggagaagaccaaauuaccguuuggggguuccacucugacaacgagacccaaauggcaaagcucuauggggacucaaagccccagaaguucaccucaucugccaacggagugaccacacauuacguuucacagauugguggcuucccaaaucaaacagaagacggaggacuaccacaaagugguagaauuguuguugauuacauggugcaaaaaucugggaaaacaggaacaauuaccuaucaaagagguauuuuauugccucaaaagguguggugcgcaaguggcaggagcaagguaauaaaaggauccuugccuuuaauuggagaagcagauugccuccacgaaaaauacgguggauuaaacaaaagcaagccuuacuacacaggggaacaugcaaaggccauaggaaauugcccaauaugggugaaaacacccuugaagcuggccaauggaaccaaauauagaccuccugcaaaacuauuaaaggaaagggguuucuucggagcuauugcugguuucuuggaaggaggaugggaaggaaugauugcagguuggcacggauacacaucccauggggcacauggaguagcgguggcagcugaccuuaagagcacucaagaggccauaaacaagauaacaaaaaaucucaacucuuugagugagcuggaaguaaagaaucuucaaagacuaagcggugccauggaugaacuccacaaugaaauacuagaacuagaugagaaaguggaugaucucagagcugauacaauaagcucacaaauagaacucgcaguccugcuuuccaaugaaggaauaauaaacagugaagaugaacaucucuuggcgcuugaaagaaagcugaagaaaaugcugggccccucugcuguagagauagggaauggaugcuuugaaaccaaacacaagugcaaccagaccugucucgacagaauagcugcugguaccuuugaugcaggagaauuuucucuccccaccuuugauucacugaauauuacugcugcaucuuuaaaugacgauggauuggauaaucauacuauacugcuuuacuacucaacugcugccuccaguuuggcuguaacacugaugauagcuaucuuuguuguuuauauggucuccagagacaauguuucuugcuccaucugucuauaa

SEQ ID NO: 58935 - RNA, 1755 nt, Artificial Sequence
  derived and/or modified CDS sequence (wt) from hemagglutinin__InfluenzaB__AGQ16270
augaaggcaauaauuguacuacucaugguaguaacauccaaugcagaucgaaucugcacugggauaacaucuucaaacucaccucauguggucaaaacagcuacucaaggggaggucaaugugacuggugugauaccacuaacaacaacaccaacaaaaucuuauuuugcaaaucucaaaggaacaaagaccagagggaaacuaugcccagacugucucaacuguacagaucuggauguggccuugggcaggccaaugugugugggaacuacaccuucugcgaaagcuucaauacuucacgaagucagaccuguuacauccgggugcuucccuauaaugcacgacagaacaaaaaucaggcaacuagccaaucuucucagaggauaugaaaauaucagguuaucaacccaaaacguuaucgaugcagaaaaagcaccaggaggacccuacagacuuggaaccucaggaucuugcccuaacgcuaccaguaaaagcggauuuuucgcaacaauggcuugggcugucccaaaggacaacaacaaaaaugcaacaaacccauuaacaguagaaguaccauacauuugugcagaaggagaagaccaaauugcuguuuggggguuccauucagauaacaaaacccaaaugaagaaccucuauggagacucaaauccucaaaaguucaccucaucugcuaauggaguaaccacacauuauguuucucagauuggcggcuucccagaucaaacagaagacggaggacuaccacaaagcggcagaauugucguugauuacaugaugcaaaaaccugggaaaacaggaacaauugucuaucaaagagguguuuuguugccucaaaagguguggugcgcgaguggcaggagcaaaguaauaaaaggguccuugccuuuaauuggugaagcagauugucuucaugaaaaauacgguggauuaaacaaaagcaagccuuacuacacaggagaacaugcaaaagccauaggaaauugcccaauaugggugaaaacaccuuugaagcuugccaauggaaccaaauauagaccuccugcaaaacuauuaaaggaaagggguuucuucggagcuauugcugguuuccuagaaggaggaugggaaggaaugauugcagguuggcacggauacacaucucacggagcacauggaguggcaguugcugcagaccuuaagagcacacaagaagcuauaaacaagauaacaaaaaaucucaacucuuugagugagcuagaaguaaagaaucuucaaaggcuaaguggugccauggaugaacuccacaacgaaauacucgagcuggaugagaaaguggaugaucucagagcugacacuauaaguucacaaauagaacuugcagucuugcuuuccaacgaaggaauaauaaacagugaagaugagcaucuauuggcacuugagagaaaacuaaagaaaaugcugggucccucugcuguagacauaggaaauggaugcuucgaaaccaaacacaaaugcaaccagaccugcuuagacaggauagcugcuggcaccuuuaaugcaggagaauuuucucuccccacuuuugauucauugaacauuacugcugcaucuuuaaaugaugauggauuggauaaccauaccauacugcucuauuacucaacugcugcuucuaguuuggcuguaacauugaugcuagcuauuuuuauuguuuauauggucuccagagacaacguuucaugcuccaucugucuauaa

SEQ ID NO: 58936 - RNA, 1755 nt, Artificial Sequence
  derived and/or modified CDS sequence (wt) from hemagglutinin__InfluenzaB__AGQ16272
augaaggcaauaauuguacuacucaugguaguaacauccaaugcagaucgaaucugcacugggauaacaucuucaaacucaccucauguggucaaaacagcuacucaaggggaggucaaugugacuggugugauaccacuaacaacaacaccaacaaaaucuuauuuugcaaaucucaaaggaacaaagaccagagggaaacuaugcccagacugucucaacuguacagaucuggauguggccuugggcaggccaaugugugugggaacuacaccuucugcgaaagcuucaauacuucacgaagucagaccuguuacauccgggugcuucccuauaaugcacgacagaacaaaaaucaggcaacuagccaaucuucucagaggauaugaaaauaucagguuaucaacccaaaacguuaucgaugcagaaaaagcaccaggaggacccuacagacuuggaaccucaggaucuugcccuaacgcuaccaguaaaagcggauuuuucgcaacaauggcuugggcugucccaagggacaacaacaaaaaugcaacgaacccauuaacaguagaaguaccauacauuugugaagaaggagaagaccaaauuacuguuuggggguuccauucagauaacaaaacccaaaugaagaaccucuauggagacucaaauccucaaaaguucaccucaucugcuaauggaguaaccacacauuauguuucucagauuggcggcuucccagaucaaacagaagacggaggacuaccacaaagcggcagaauugucguugauuacaugaugcaaaaaccugggaaaacaggaacaauugucuaucaaagagguguuuuguugccucaaaagguguggugcgcgaguggcaggagcaaaguaauaaaaggguccuugccuuuaauuggugaagcagauugccuucaugaaaaauacgguggauuaaacaaaagcaagccuuacuacacaggagaacaugcaaaagccauaggaaauugcccaauaugggugaaaacaccuuugaagcuugccaauggaaccaaauauagaccuccugcaaaacuauuaaaggaaagggguuucuucggagcuauugcugguuuccuagaaggaggaugggaaggaaugauugcagguuggcacggauacacaucucacggagcacauggaguggcaguugcugcagaccuuaagagcacacaagaagcuauaaacaagauaacaaaaaaucucaacucguugagugagcuagaaguaaagaaucuucaaaggcuaaguggugccauggaugaacuccacaacgaaauacucgagcuggaugagaaaguggaugaucucagagcugacacuauaaguucacaaauagaacuugcaguccugcuuuccaacgaaggaauaauaaacagugaagaugagcaucuauuggcacuugagagaaaacuaaagaaaaugcugggucccucugcuguagacauaggaaauggaugcuucgaaaccaaacacaaaugcaaccagaccugcuuagacaggauagcugcuggcaccuuuaaugcaggagaauuuucucuccccacuuuugauucauugaacauuacugcugcaucuuuaaaugaugauggauuggauaaccauacuauacugcucuauuacucaacugcugcuucuaguuuggcuguaacauugaugcuagcuauuuuuauuguuuauauggucuccagagacaacguuucaugcuccaucugccuauaa

SEQ ID NO: 58937 - RNA, 1755 nt, Artificial Sequence
  derived and/or modified CDS sequence (wt) from hemagglutinin__InfluenzaB__AGQ16273
augaaggcaauaauuguacuacucaugguaguaacauccaaugcagaucgaaucugcacugggauaacaucuucaaacucaccucauguggucaaaacagcuacucaaggggaggucaaugugacuggugugauaccacuaacaacaacaccaacaaaaucuuauuuugcaaaucucaaaggaacaaagaccagagggaaacuaugcccagacugucucaacuguacagaucuggauguggccuugggcaggccaaugugugugggaacuacaccuucugcgaaagcuucaauacuucacgaaguuagaccuguuacauccgggugcuucccuauaaugcacgacagaacaaaaaucaggcaacuagccaaucuucucagaggauaugaaaauaucagguuaucaacccaaaacguuaucgaugcagaaaaagcaccaggaggacccuacagacuuggaaccucaggaucuugcccuaacgcuaccaguaaaagcggauuuuucgcaacaauggcuugggcugucccaaaggacaacaacaaaaaugcaacgaacccauuaacaguagaaguaccauacauuugugcagaaggagaagaccaaauuacuguuuggggguuccauucagauaacaaaacccaaaugaagaaccucuauggagacucaaauccucaaaaguucaccucaucugcuaauggaguaaccacacauuauguuucucagauuggcggcuucccagaucaaacagaagacggaggacuaccacaaagcggcagaauugucguugauuacaugaugcaaaaaccugggaaaacaggaacaauugucuaucaaagagguguuuuguugccucaaaagguguggugcgcgaguggcaggagcaaaguaauaaaaggguccuugccuuuaauuggugaagcagauugccuucaugaaaaauacgguggauuaaacaaaagcaagccuuacuacacaggagaacaugcaaaagccauaggaaauugcccaauaugggugaaaacaccuuugaagcuugccaauggaaccaaauauagaccuccugcaaaacuauuaaaggaaagggguuucuucggagcuauugcugguuuccuagaaggaggaugggaaggaaugauugcagguuggcacggauacacaucucacggagcacauggaguggcaguugcugcagaccuuaagagcacacaagaagcuauaaacaagauaacaaaaaaucucaacucuuugagugagcuagaaguaaagaaucuucaaaggcuaaguggugccauggaugaacuccacaacgaaauacucgagcuggaugagaaaguggaugaucucagagcugacacuauaaguucacaaauagaacuugcagucuugcuuuccaacgaaggaauaauaaacagugaagaugagcaucuauuggcacuugagagaaaacuaaagaaaaugcugggucccucugcuguagacauaggaaauggaugcuucgaaaccaaacacaaaugcaaccagaccugcuuagacaggauagcugcuggcaccuuuaaugcaggagaauuuucucuccccacuuuugauucauugaacauuacugcugcaucuuuaaaugaugauggauuggauaaccauacuauacugcucuauuacucaacugcugcuucuaguuuggcuguaacauugaugcuagcuauuuuuauuguuuauauggucuccagagacaacguuucaugcuccaucugucuauaa

SEQ ID NO: 58938 - RNA, 1755 nt, Artificial Sequence
  derived and/or modified CDS sequence (wt) from hemagglutinin__InfluenzaB__AGQ16274
augaaggcaauaauuguacuacucaugguaguaacauccaaugcagaucgaaucugcacugggauaacaucuucaaacucaccucauguggucaaaacagcuacucaaggggaggucaaugugacuggugugauaccacuaacaacaacaccaacaaaaucuuauuuugcaaaucucaaaggaacaaagaccagagggaaacuaugcccagacugucucaacuguacagaucuggauguggccuugggcaggccaaugugugugggaacuacaccuucugcgaaagcuucaauacuucacgaagucagaccuguuacauccgggugcuucccuauaaugcacgacagaacaaaaaucaggcaacuagccaaucuucucagaggauaugaaaauaucagguuaucaacccaaaacguuaucgaugcagaaaaagcaccaggaggacccuacagacuuggaaccucaggaucuugcccuaacgcuaccaguaaaagcggauuuuucgcaacaauggcuugggcugucccaaaggacaacaacaaaaaugcaacgaacccauuaacaguagagguaccauacauuugugcagaaggagaagaccaaauuacuguuuggggguuccauucagauaacaaaacccaaaugaagaaccucuauggagacucaaauccucaaaaguucaccucaucugcuaauggaguaaccacacauuauguuucucagauuggcggcuucccagaucaaacagaagacggaggacuaccacaaagcggcagaauugucguugauuacaugaugcaaaaaccugggaaaacaggaacaauugucuaucaaagagguguuuuguugccucaaaagguguggugcgcgaguggcaggagcaaaguaauaaaaggguccuugccuuuaauuggugaagcagauugccuucaugaaaaauacgguggauuaaacaaaagcaagccuuacuacacaggagaacaugcaaaagccauaggaaauugcccaauaugggugaaaacaccuuugaagcuugccaauggaaccaaauauagaccuccugcaaaacuauuaaaggaaagggguuucuucggagcuauugcugguuuccuagaaggaggaugggaaggaaugauugcagguuggcauggauacacaucucacggagcacauggaguggcaguugcugcagaccuuaagagcacacaagaagcuauaaacaagauaacaaaaaaucucaacucuuugagugagcuagaagugaagaaucuucaaaggcuaaguggugccauggaugaacuccacaacgaaauacucgagcuggaugagaaaguggaugaucucagagcugacacuauaaguucacaaauagaacuugcagucuugcuuuccaacgaaggaauaauaaacagugaagaugagcaucuauuggcacuugagagaaaacuaaagaaaaugcugggucccucugcuguagacauaggaaauggaugcuucgaaaccaaacacaaaugcaaccagaccugcuuagacaggauagcugcuggcaccuuuaaugcaggagaauuuucucuccccacuuuugauucauugaacauuacugcugcaucuuuaaaugaugauggauuggauaaccauacuauacugcucuauuacucaacugcugcuucuaguuuggcuguaacauugaugcuagcuauuuuuauuguuuauauggucuccagagacaacguuucaugcuccaucugucuauaa

SEQ ID NO: 58939 - RNA, 1755 nt, Artificial Sequence
  derived and/or modified CDS sequence (wt) from hemagglutinin__InfluenzaB__AGQ16275
augaaggcaauaauuguacuacucaugguaguaacauccaaugcagaucgaaucugcacuggaauaacaucuucaaacucaccucauguggucaaaacagcuacucaaggggaggucaaugugacuggugugauaccacuaacaacaacaccaacaaaaucuuauuuugcaaaucucaaaggaacaaagaccagagggaaacuaugcccagacugucucaacuguacagaucuggauguggccuugggcaggccaaugugugugggaacuacaccuucugcgaaagcuucaauacuucacgaagucagaccuguuacauccgggugcuucccuauaaugcaugacagaacaaaaaucaggcaacuagccaaucuucucagaggguaugaaaauaucagguuaucaacccaaaacguuaucgaugcagaaaaagcaccaggaggacccuacagacuugggaccucaggaucuugcccuaacgcuaccaguaaaagcggauuuuucgcaacaauggcuugggcugucccaaaggacaacaacaaaaaugcaacgaacccauuaacaguagaaguaccauacauuugugcagaaggagaagaccaaauuacuguuuggggguuccauucagauaacaaaacccaaaugaagaaccucuauggagacucaaauccucaaaaguucaccucaucugcuaauggaguaaccacacauuauguuucucagauuggcggcuucccagaucaaacagaagacggaggacuaccacaaagcggcagaauugucguugauuacaugaugcaaaaaccugggaaaacaggaacaauugucuaucaaagagguguuuuguugccucaaaagguguggugcgcgagugguaggagcaaaguaauaaaaggguccuugccuuuaauuggugaagcagauugccuucaugaaaaauacgguggauuaaacaaaagcaagccuuacuacacaggagaacaugcaaaagccauaggaaauugcccaauaugggugaaaacaccuuugaagcuugccaauggaaccaaauauagaccuccugcaaaacuauuaaaggaaagggguuucuucggagcuauugcugguuuccuagaaggaggaugggaaggaaugauugcagguuggcacggauacacaucucacggagcacauggaguggcaguugcugcagaccuuaagagcacacaagaagcuauaaacaagauaacaaaaaaucucaacucuuugagugagcuagaaguaaagaaucuucaaaggcuaaguggugccauggaugaacuccacaacgaaauacucgagcuggaugagaaaguggaugaucucagagcugacacuauaaguucacaaauagaacuugcagucuugcuuuccaacgaaggaauaauaaacagugaagaugagcaucuauuggcacuugagagaaaacuaaagaaaaugcugggucccucugcuguagacauaggaaauggaugcuucgaaaccaaacacaaaugcaaccagaccugcuuagacaggauagcugcuggcaccuuuaaugcaggagaauuuucucuccccacuuuugauucauugaacauuacugcugcaucuuuaaaugaugauggauuggauaaccauacuauacugcucuauuacucaacugcugcuucuaguuuggcuguaacauugaugcuagcuauuuuuauuguuuauauggucuccagagacaacguuucaugcuccaucugucuauaa

SEQ ID NO: 58940 - RNA, 1755 nt, Artificial Sequence
  derived and/or modified CDS sequence (wt) from hemagglutinin__InfluenzaB__AGQ16276
augaaggcaauaauuguacuacucaugguaguaacauccaaugcagaucgaaucugcacugggauaacaucuucaaacucaccucauguggucaaaacagcuacucaaggggaggucaaugugacuggugugauaccacuaacaacaacaccaacaaaaucuuauuuugcaaaucucaaaggaacaaagaccagagggaaacuaugcccagacugucucaacuguacagaucuggauguggccuugggcaggccaaugugugugggaacuacaccuucugcgaaagcuucaauacuucacgaagucagaccuguuacauccgggugcuucccuauaaugcacgacagaacaaaaaucaggcaacuagccaaucuucucagaggauaugaaaauaucagguuaucaacccaaaacguuaucgaugcagaaaaagcaccaggaggacccuacagacuuggaaccucaggaucuugcccuaacgcuaccaguaaaagcggauuuuucgcaacaauggcuugggcugucccaaaggacaacaacaaaaaugcaacgaacccauuaacaguagaaguaccauacauuugugcagaaggagaagaccaaauuacuguuuggggguuccauucagauaacaaaacccaaaugaagaaccucuauggagacucaaauccucaaaaguucaccucaucugcuaauggaguaaccacacauuauguuucucagauuggcggcuucccagaucaaacagaagacggaggacuaccacaaagcggcagaauugucguugauuacaugaugcaaaaaccugggaaaacaggaacaauugucuaucaaagagguguuuuguugccucaaaagguguggugcgcgaguggcaggagcaaaguaauaaaaggguccuugccuuuaauuggugaagcagauugccuucaugaaaaauacgguggauuaaacaaaagcaagccuuacuacacaggagaacaugcaaaagccauaggaaauugcccaauaugggugaaaacacccuugaagcuugccaauggaaccaaauauagaccuccugcaaaacuauuaaaggaaagggguuucuucggagcuauugcugguuuccuagaaggaggaugggaaggaaugauugcagguuggcacggauacacaucucacggagcacauggaguggcaguugcugcagaccuuaagagcacacaagaagcuauaaacaagauaacaaaaaaucucaacucguugagugagcuagaaguaaagaaucuucaaaggcuaaguggugccauggaugaacuccacaacgaaauacucgagcuggaugagaaaguggaugaucucagagcugacacuauaaguucacaaauagaacuugcagucuugcuuuccaacgaaggaauaauaaacagugaagaugagcaucuauuggcacuugagagaaaacuaaagaaaaugcugggucccucugcuguagacauaggaaauggaugcuucgaaaccaaacacaaaugcaaccagaccugcuuagacaggauagcugcuggcaccuuuaaugcaggagaauuuucucuccccacuuuugauucauugaacauuacugcugcaucuuuaaaugaugauggauuggauaaccauacuauacugcucuauuacucaacugcugcuucuaguuuggcuguaacauugaugcuagcuauuuuuauuguuuauauggucuccagagacaacguuucaugcuccaucugccuauaa

SEQ ID NO: 58941 - RNA, 1755 nt, Artificial Sequence
  derived and/or modified CDS sequence (wt) from hemagglutinin__InfluenzaB__AGQ16277
augaaagcaauaauuguacuacucaugguaguaacauccaaugcagaucgaaucugcacugggauaacaucuucaaacucaccucauguggucaaaacagcuacucaaggggaggucaaugugacuggugugauaccacuaacaacaacaccaacaaaaucuuauuuugcaaaucucaaaggaacaaagaccagagggaaacuaugcccagacugucucaacuguacagaucuggauguggccuugggcaggccaaugugugugggaacuacaccuucugcgaaagcuucaauacuucacgaagucagaccuguuacauccgggugcuucccuauaaugcacgacagaacaaaaaucaggcaacuagccaaucuucucagaggauaugaaaauaucagguuaucaacccaaaacguuaucgaugcagaaaaagcaccaggaggacccuacagacuuggaaccucagggucuugcccuaacgcuaccaguaaaagcggauuuuucgcaacaauggcuugggcugucccaaaggacaacaacaaaaaugcaacgaacccauuaacaguagaaguaccauacauuugugcagaaggagaagaccaaauugcuguuuggggguuccauucagauaacaaaacccaaaugaagaaccucuauggggacucaaauccucaaaaguucaccucaucugcuaauggaguaaccacacauuauguuucucagauuggcggcuucccagaucaaacagaagacggaggacuaccacaaagcggcagaauugucguugauuacaugaugcaaaaaccugggaaaacaggaacaauugucuaucaaagagguguuuuguugccucaaaagguguggugcgcgaguggcaggagcaaaguaauaaaaggguccuugccuuuaauuggugaagcagauugucuucaugaaaaauacgguggauuaaacaaaagcaagccuuacuacacaggagaacaugcaaaagccauaggaaauugcccaauaugggugaaaacaccuuugaagcuugccaauggaaccaaauauagaccuccugcaaaacuauuaaaggaaagggguuucuucggagcuauugcugguuuccuagaaggaggaugggaaggaaugauugcagguuggcacggauacacaucucacggagcacauggaguggcaguugcugcagaccuuaagagcacacaagaagcuauaaacaagauaacaaaaaaucucaacucuuugagugagcuagaaguaaagaaucuucaaaggcuaaguggugccauggaugaacuccacaacgaaauacuugagcuggaugagaaaguggaugaucucagagcugacacuauaaguucacaaauagaacuugcagucuugcuuuccaacgaaggaauaauaaacagugaagaugagcaucuauuggcacuugagagaaaacuaaagaaaaugcugggucccucugcuguagacauaggaaauggaugcuucgaaaccaaacacaaaugcaaccagaccugcuuagacaggauagcugcuggcaccuuuaaugcaggagaauuuucucuccccacuuuugauucauugaacauuacugcugcaucuuuaaaugaugauggauuggauaaccauacuauacugcucuauuacucaacugcugcuucuaguuuggcuguaacauugaugcuagcuauuuuuauuguuuauauggucuccagagacaacguuucaugcuccaucugucuauaa

SEQ ID NO: 58942 - RNA, 1755 nt, Artificial Sequence
  derived and/or modified CDS sequence (wt) from hemagglutinin__InfluenzaB__AGQ16278
augaaggcaauaauuguacuacucaugguaguaacauccaaugcagaucgaaucugcacugggauaacaucuucaaacucaccucauguggucaaaacagcuacucaaggggaggucaaugugacuggugugauaccacuaacaacaacaccaacaaaaucuuauuuugcaaaucucaaaggaacaaagaccagagggaaacuaugcccagacugucucaacuguacagaucuggauguggccuugggcaggccaaugugugugggaacuacaccuucugcgaaagcuucaauacuucacgaagucagaccuguuacauccgggugcuucccuauaaugcacgacagaacaaaaaucaggcaacuagccaaucuucucagaggauaugaaaauaucagguuaucaacccaaaacguuaucgaugcagaaaaagcaccaggaggacccuacagacuuggaaccucaggaucuugcccuaacgcuaccaguaaaagcggauuuuucgcaacaauggcuugggcugucccaaaggacaacaacaaaaaugcaacgaacccauuaacaguagaaguaccauacauuugugcagaaggagaagaccaaauugcuguuuggggguuccauucagauaacaaaacccaaaugaagaaccucuauggggacucaaauccucaaaaguucaccucaucugcuaauggaguaaccacacauuauguuucucagauuggcggcuucccagaucaaacagaagacggaggacuaccacaaagcggcagaauugucguugauuacaugaugcaaaaaccugggaaaacaggaacaauugucuaucaaagagguguuuuguugccucaaaagguguggugcgcgaguggcaggagcaaaguaauaaaaggguccuugccuuuaauuggugaagcagauugucuucaugaaaaauacgguggauuaaacaaaagcaagccuuacuacacaggagaacaugcaaaagccauaggaaauugcccaauaugggugaaaacaccuuugaagcuugccaauggaaccaaauauagaccuccugcaaaacuauuaaaggaaagggguuucuucggagcuauugcugguuuccuagaaggaggaugggaaggaaugauugcagguuggcacggauacacaucucacggagcacauggaguggcaguugcugcagaccuuaagagcacacaagaagcuauaaacaagauaacaaaaaaucucaacucuuugagugagcuagaaguaaagaaucuucaaaggcuaaguggugccauggaugaacuccacaacgaaauacuugagcuggaugagaaaguggaugaucucagagcugacacuauaaguucacaaauagaacuugcagucuugcuuuccaacgaaggaauaauaaacagugaagaugagcaucuauuggcacuugagagaaaacuaaagaaaaugcugggucccucugcuguagacauaggaaauggaugcuucgaaaccaaacacaaaugcaaccagaccugcuuagacaggauagcugcuggcaccuuuaaugcaggagaauuuucucuccccacuuuugauucauugaacauuacugcugcaucuuuaaaugaugauggauuggauaaccauacuauacugcucuauuacucaacugcugcuucuaguuuggcuguaacauugaugcuagcuauuuuuauuguuuauauggucuccagagacaacguuucaugcuccaucugucuauaa

SEQ ID NO: 58943 - RNA, 1755 nt, Artificial Sequence
  derived and/or modified CDS sequence (wt) from hemagglutinin__InfluenzaB__AGQ16279
augaaggcaauaauuguacuacucaugguaguaacauccaaugcagaucgaaucugcacugggauaacaucuucaaacucaccucauguggucaaaacagcuacucaaggggaggucaaugugacuggugugauaccacuaacaacaacaccaacaaaaucuuauuuugcaaaucucaaaggaacaaagaccagagggaaacuaugcccagacugucucaacuguacagaucuggauguggccuugggcaggccaaugugugugggaacuacaccuucugcgaaagcuucaauacuucacgaagucagaccuguuacauccgggugcuucccuauaaugcacgacagaacaaaaaucaggcaacuagccaaucuucucagaggauaugaaaauaucagguuaucaacccaaaacguuaucgaugcagaaaaagcaccaggaggacccuacagacuuggaaccucaggaucuugcccuaacgcuaccaguaaaagcggauuuuucgcaacaauggcuugggcugucccaaaggacaacaacaaaaaugcaacgaacccauuaacaguagaaguaccauacauuugugcagaaggagaagaccaaauugcuguuuggggguuccauucagauaacaaaacccaaaugaagaaccucuauggggacucaaauccucaaaaguucaccucaucugcuaauggaguaaccacacauuauguuucucagauuggcggcuucccagaucaaacagaagacggaggacuaccacaaagcggcagaauugucguugauuacaugaugcaaaaaccugggaaaacaggaacaauugucuaucaaagagguguuuuguugccucaaaagguguggugcgcgaguggcaggagcaaaguaauaaaaggguccuugccuuuaauuggugaagcagauugucuucaugaaaaauacgguggauuaaacaaaagcaagccuuacuacacaggagaacaugcaaaagccauaggaaauugcccaauaugggugaaaacaccuuugaagcuugccaauggaaccaaauauagaccuccugcaaaacuauuaaaggaaagggguuucuucggagcuauugcugguuuccuagaaggaggaugggaaggaaugauugcagguuggcacggauacacaucucacggagcacauggaguggcaguugcugcagaccuuaagagcacacaagaagcuauaaacaagauaacaaaaaaucucaacucuuugagugagcuagaaguaaagaaucuucaaaggcuaaguggugccauggaugaacuccacaacgaaauacucgagcuggaugaaaaaguggaugaucucagagcugacacuauaaguucacaaauagaacuugcagucuugcuuuccaacgaaggaauaauaaacagugaagaugagcaucuauuggcacuugagagaaaacuaaagaaaaugcugggucccucugcuguagacauaggaaauggaugcuucgaaaccaaacacaaaugcaaccagaccugcuuagacaggauagcugcuggcaccuuuaaugcaggagaauuuucucuccccacuuuugauucauugaacauuacugcugcaucuuuaaaugaugauggauuggauaaccauacuauacugcucuauuacucaacugcugcuucuaguuuggcuguaacauugaugcuagcuauuuuuauuguuuauauggucuccagagacaacguuucaugcuccaucugucuauaa

SEQ ID NO: 58944 - RNA, 1755 nt, Artificial Sequence; identical to SEQ ID NO: 58930
  derived and/or modified CDS sequence (wt) from hemagglutinin__InfluenzaB__AGQ16280

SEQ ID NO: 58945 - RNA, 1755 nt, Artificial Sequence
  derived and/or modified CDS sequence (wt) from hemagglutinin__InfluenzaB__AGQ16281
augaaggcaauaauuguacuacucaugguaguaacauccaaugcagaucgaaucugcacugggauaacaucuucaaacucaccucauguggucaaaacagcuacucaaggggaggucaaugugacuggugugauaccacuaacaacaacaccaacaaaaucuuauuuugcaaaucucaaaggaacaaagaccagagggaaacuaugcccagacugucucaacuguacagaucuggauguggccuugggcaggccaaugugugugggaacuacaccuucugcgaaagcuucaauacuucacgaagucagaccuguuacauccgggugcuucccuauaaugcacgacagaacaaaaaucaggcaacuagccaaucuucucagaggauaugaaaauaucagguuaucaacccaaaacguuaucgaugcagaaaaagcaccaggaggacccuacagacuuggaaccucaggaucuugcccuaacgcuaccaguaaaagcggauuuuucgcaacaauggcuugggcugucccaaaggacaacaacaaaaaugcaacgaacccauuaacaguagagguaccauacauuugugcagaaggagaagaccaaauuacuguuuggggguuccauucagauaacaaaacccaaaugaagaaccucuauggagacucaaauccucaaaaguucaccucaucugcuaauggaguaaccacacauuauguuucucagauuggcagcuucccagaucaaacagaagacggaggacuaccacaaagcggcagaauugucguugauuacaugaugcaaaaaccugggaaaacaggaacaauugucuaucaaagagguguuuuguugccucaaaagguguggugcgcgaguggcaggagcaaaguaauaaaaggguccuugccuuuaauuggugaagcagauugccuucaugaaaaauacgguggauuaaacaaaagcaagccuuacuacacaggagaacaugcaaaagccauaggaaauugcccaauaugggugaaaacaccuuugaagcuugccaauggaaccaaauauagaccuccugcaaaacuauuaaaggaaagggguuucuucggagcuauugcuggcuuccuagaaggaggaugggaaggaaugauugcagguuggcacggauacacaucucacggagcacauggaguggcaguugcugcagaccuuaagagcacacaagaagcuauaaacaagauaacaaaaaaucucaacucuuugagugagcuagaaguaaagaaucuucaaaggcuaaguggugccauggaugaacuccacaacgaaauacucgagcuggaugagaagguggaugaucucagagcugacacuauaaguucacaaauagaacuugcagucuugcuuuccaacgaaggaauaauaaacagugaagaugagcaucuauuggcacuugagagaaaacuaaagaaaaugcuaggucccucugcuguagacauagggaauggaugcuucgaaaccaaacacaaaugcaaccagaccugcuuagacaggauagcugcuggcaccuuuaaugcaggagaauuuucucuccccacuuuugauucauugaacauuacugcugcaucuuuaaaugaugauggauuggauaaccauacuauacugcucuauuacucaacugcugcuucuaguuuggcuguaacauugaugcuagcuauuuuuauuguuuauauggucuccagagacaacguuucaugcuccaucugucuauaa

SEQ ID NO: 58946 - RNA, 1755 nt, Artificial Sequence
  derived and/or modified CDS sequence (wt) from hemagglutinin__InfluenzaB__AGQ16282
augaaggcaauaauuguacuacucaugguaguaacauccaaugcagaucgaaucugcacugggauaacaucuucaaacucaccucauguggucaaaacagcuacucaaggggaggucaaugugacuggugugauaccacuaacaacaacaccaacaaaaucuuauuuugcaaaucucaaaggaacaaagaccagagggaaacuaugcccagacugucucaacuguacagaucuggauguggccuugggcaggccaaugugugugggaacuacaccuucugcgaaagcuucaauacuucacgaagucagaccuguuacauccgggugcuucccuauaaugcacgacagaacaaaaaucaggcaacuagccaaucuucucagaggauaugaaaauaucagguuaucaacccaaaacguuaucgaugcagaaaaagcaccaggaggacccuacagacuuggaaccucaggaucuugcccuaacgcuaccaguaaaagcggauuuuucgcaacaauggcuugggcugucccaaagggcaacaacaaaaaugcaacgaacccauuaacaguagaaguaccauacauuugugcagaaggagaagaccaaauuacuguuuggggguuccauucagauaacaaaacccaaaugaagaaccucuauggagacucaaauccucaaagguucaccucaucugcuaauggaguaaccacacauuauguuucucagauuggcggcuucccagaucaaacagaagacggaggacuaccacaaagcggaagaauugucguugauuacaugaugcaaaaaccugggaaaacaggaacaauugucuaucaaagagguguuuuguugccucaaaagguguggugcgcgaguggcaggagcaaaguaauaaaaggguccuugccuuuaauuggugaagcagauugccuucaugaaaaauacgguggauuaaacaaaagcaagccuuacuacacaggagaacaugcaaaagccauaggaaauugcccaauaugggugaaaacaccuuugaagcuugccaauggaaccaaauauagaccuccugcaaaacuauuaaaggaaagggguuucuucggagcuauugcugguuuccuagaaggaggaugggaaggaaugauugcagguuggcacggauacacaucucacggagcacauggaguugcaguugcugcagaccuuaagagcacacaagaagcuauaaacaagauaacaaaaaaucucaacucuuugagugagcuagaaguaaagaaucuucaaaggcuaaguggugccauggaugaacuccacaacgaaauacucgagcuggaugagaaaguggaugaucucagagcugacacuauaaguucacaaauagaacuugcagucuugcuuuccaacgaaggaauaauaaacagugaagaugagcaucuauuggcacuugagagaaaacuaaagaaaaugcugggucccucugcuguagacauaggaaauggaugcuucgaaaccaaacacaaaugcaaccagaccugcuuagacaggauagcugcuggcaccuuuaaugcaggagaauuuucucuccccacuuuugauucauugaacauuacugcugcaucuuuaaaugaugauggauuggauaaccauacuauacugcucuauuacucaacugcugcuucuagucuggcuguaacauugaugcuagcuauuuuuauuguuuauauggucuccagagacaacguuucaugcuccaucugucuauaa

SEQ ID NO: 58947 - RNA, 1755 nt, Artificial Sequence
  derived and/or modified CDS sequence (wt) from hemagglutinin__InfluenzaB__AGQ16283
augaaggcaauaauuguacuacucaugguaguaacauccaaugcagaucgaaucugcacugggauaacaucuucaaacucaccucauguggucaaaacagcuacucacggggaggucaaugugacuggugugauaccacuaacaacaacaccaacaaaaucuuauuuugcaaaucucaaaggaacaaagaccagagggaaacuaugcccagacugucucaacuguacagaucuggauguggccuugggcaggccaaugugugugggaacuacaccuucugcgaaagcuucaauacuucacgaagucagaccuguuacauccgggugcuucccuauaaugcacgacagaacaaaaaucaggcaacuagccaaucuucucagaggauaugaaaauaucagguuaucaacccaaaacguuaucgaugcagaaaaagcaccaggaggacccuacagacuuggaaccucaggaucuugcccuaacgcuaccaguaaaagcggauuuuucgcaacaauggcuugggcugucccaaaggacaacaacaaaaaugcaacaaacccauuaacaguagaaguaccauacauuugugcagaaggagaagaccaaauugcuguuuggggguuccauucagauaacaaaacccaaaugaagaaccucuauggagacucaaauccucaaaaguucaccucaucugcuaauggaguaaccacacauuauguuucucagauuggcggcuucccagaucaaacagaagacggaggacuaccacaaagcggcagaauugucguugauuacaugaugcaaaaaccugggaaaacaggaacaauugucuaucaaagagguguuuuguugccucaaaagguguggugcgcgaguggcaggagcaaaguaauaaaaggguccuugccuuuaauuggugaagcagauugucuucaugaaaaauacgguggauuaaacaaaagcaagccuuacuacacaggagaacaugcaaaagccauaggaaauugcccaauaugggugaaaacaccuuugaagcuugccaauggaaccaaauauagaccuccugcaaaacuauuaaaggaaagggguuucuucggagcuauugcugguuuccuagaaggaggaugggaaggaaugauugcagguuggcacggauacacaucucacggagcacauggaguggcaguugcugcagaccuuaagagcacacaagaagcuauaaacaagauaacaaaaaaucucaacucuuugagugagcuagaaguaaagaaucuucaaaggcuaaguggugccauggaugaacuccacaacgaaauacucgagcuggaugagaaaguggaugaucucagagcugacacuauaaguucacaaauagaacuugcagucuugcuuuccaacgaaggaauaauaaacagugaagaugagcaucuauuggcacuugagagaaaacuaaagaaaaugcugggucccucugcuguagacauaggaaauggaugcuucgaaaccaaacacaaaugcaaccagaccugcuuagacaggauagcugcuggcaccuuuaaugcaggagaauuuucucuccccacuuuugauucauugaacauuacugcugcaucuuuaaaugaugauggauuggauaaccauaccauacugcucuauuacucaacugcugcuucuaguuuggcuguaacauugaugcuagcuauuuuuauuguuuauauggucuccagagacaacguuucaugcuccaucugucuauaa

SEQ ID NO: 58948 - RNA, 1758 nt, Artificial Sequence
  derived and/or modified CDS sequence (wt) from hemagglutinin__InfluenzaB__AGQ16284
augaaggcaauaauuguacuacucaugguaguaacauccaaugcagaucgaaucugcacugggauaacaucgucaaacucaccacaugucgucaaaacugcuacucaaggggaggucaaugugaccgguguaauaccacugacaacaacacccaccaaaucucauuuugcaaaucucaaaggaacagaaaccagggggaaacuaugcccaaaaugccucaacugcacagaucuggacguagccuugggcagacccaaaugcacggggaaaauacccucggcaagaguuucaauacuccaugaagccagaccuguuacaucugggugcuuuccuauaaugcacgauagaacaaaaauuagacagcugccuaaccuucuccgaggauacgaacauaucaaguuaucaacucacaacguuaucaaugcagaaaaugcaccaggaggacccuacaaaauuggaaccucagggucuugcccuaacguuaccaauggaaacggauucuucgcaacaauggcuugggccgucccaaaaaacgacaaaaacaaaacagcaacaaauccauuaacaauagaaguaccauacauuuguacagaaggagaagaccaaauuaccguuuggggguuccacucugacaacgagacccaaauggcaaagcucuauggggacucaaagccccagaaguucaccucaucugccaacggagugaccacacauuacguuucacagauugguggcuucccaaaucaaacagaagacggaggacuaccacaaagugguagaauuguuguugauuacauggugcaaaaaucugggaaaacaggaacaauuaccuaucaaagagguauuuuauugccucaaaagguguggugcgcaaguggcaggagcaagguaauaaaaggauccuugccuuuaauuggagaagcagauugccuccacgaaaaauacgguggauuaaacaaaagcaagccuuacuacacaggggaacaugcaaaggccauaggaaauugcccaauaugggugaaaacacccuugaagcuggccaauggaaccaaauauagaccuccugcaaaacuauuaaaggaaagggguuucuucggagcuauugcugguuucuuagaaggaggaugggaaggaaugauugcagguuggcacggauacacaucccauggggcacauggaguagcgguggcagcugaccuuaagagcacucaagaggccauaaacaagauaacaaaaaaucucaacucuuugagugagcuggaaguaaagaaucuucaaagacuaagcggugccauggaugaacuccacaacgaaauacuagaacuagaugagaaaguggaugaucucagagcugauacaauaagcucacaaauagaacucgcaguccugcuuuccaaugaaggaauaauaaacagugaagaugaacaucucuuggcgcuugaaagaaagcugaagaaaaugcugggccccucugcuguagagauagggaauggaugcuuugaaaccaaacacaagugcaaccagaccugucuugacagaauagcugcugguaccuuugaugcaggagaauuuucucuccccaccuuugauucacugaauauuacugcugcaucuuuaaaugacgauggauuggauaaucauacuauacugcuuuacuacucaacugcugccuccaguuuggcuguaacacugaugauagcuaucuuuguuguuuauauggucuccagagacaauguuucuugcuccaucugucuauag

SEQ ID NO: 58949 - RNA, 1755 nt, Artificial Sequence
  derived and/or modified CDS sequence (wt) from hemagglutinin__InfluenzaB__AGQ16285
augaaggcaauaauuguacuacucaugguaguaacauccaaugcagaucgaaucugcacugggauaacaucuucaaacucaccucauguggucaaaacagcuacucaaggggaggucaaugugacuggugugauaccacuaacaacaacaccaacaaaaucuuauuuugcaaaucucaaaggaacaaagaccagaggaaaacuaugcccagacugucucaacuguacagaucuggauguggccuugggcaggccaaugugugugggaacuacaccuucugcgaaagcuucaauacuucacgaagucagaccuguuacauccgggugcuucccuauaaugcacgacagaacaaaaaucaggcaacuagccaaucuucucagaggauaugaaaauaucagguuaucaacccaaaacguuaucgaugcagaaaaagcaccaggaggacccuacagacuuggaaccucaggaucuugcccuaacgcuaccaguaaaagcggauuuuucgcaacaauggcuugggcugucccaaaggacaacaacaaaaaugcaacgaacccauuaacaguagaaguaccauacauuugugcagaaggagaagaccaaauugcuguuuggggauuccauucagauaacaaaacccaaaugaagaaccucuauggagacucaaauccucaaaaguucaccucaucugcuaauggaguaaccacacauuauguuucucagauuggcggcuucccagaucaaacagaagacggaggacuaccacaaagcggcagaauugucguugauuacaugaugcaaaaaccugggaaaacaggaacaauugucuaucaaagagguguuuuguugccucaaaagguguggugcgcgaguggcaggagcaaaguaauaaaaggguccuugccuuuaauuggugaagcagauugucuucaugaaaaauacgguggauuaaacaaaagcaagccuuacuacacaggagaacaugcaaaagccauaggaaauugcccaauaugggugaaaacaccuuugaagcuugccaaugggaccaaauauagaccuccugcaaaacuauuaaaggaaagggguuucuucggagcuauugcugguuuccuagaaggaggaugggaaggaaugauugcagguuggcacggauacacaucucacggagcacauggaguggcaguugcugcagaccuuaagagcacacaagaagcuauaaacaagauaacaaaaaaucucaacucuuugagugagcuagaaguaaagaaucuucaaaggcuaaguggugccauggaugaacuccacaacgaaauacucgagcuggaugagaaaguggaugaucucagagcugacacuauaaguucacaaauagaacuugcagucuugcuuuccaacgaaggaauaauaaacagugaagaugagcaucuauuggcacuugagagaaaacuaaagaaaaugcugggucccucugcuguagacauaggaaauggaugcuucgaaaccaaacacaaaugcaaccagaccugcuuagacaggauagcugcuggcaccuuuaaugcaggagaauuuucucuccccacuuuugauucauugaacauuacugcugcaucuuuaaaugaugauggauuggauaaccauaccauacugcucuauuacucaacugcugcuucuaguuuggcuguaacauugaugcuagcuauuuuuauuguuuauauggucuccagagacaacguuucaugcuccaucugucuauaa

SEQ ID NO: 58950 - RNA, 1755 nt, Artificial Sequence; identical to SEQ ID NO: 58933
  derived and/or modified CDS sequence (wt) from hemagglutinin__InfluenzaB__AGQ16286

SEQ ID NO: 58951 - RNA, 1755 nt, Artificial Sequence
  derived and/or modified CDS sequence (wt) from hemagglutinin__InfluenzaB__AGQ16287
augaaggcaauaauuguacuacucaugguaguaacauccaaugcagaucgaaucugcacugggauaacaucuucaaacucaccucauguggucaaaacagcuacucaaggggaggucaaugugacuggugugauaccacuaacaacaacaccaacaaaaucuuauuuugcaaaucucaaaggaacaaagaccagagggaaacuaugcccagacugucucaacuguacagaucuggauguggccuugggcaggccaaugugugugggaacuacaccuucugcgaaagcuucaauacuucacgaagucagaccuguuacauccgggugcuucccuauaaugcacgacagaacaaaaaucaggcaacuagccaaucuucucagaggauaugaaaauaucagguuaucaacccaaaacguuaucgaugcagaaaaagcaccaggaggacccuacagacuuggaaccucaggaucuugcccuaacgcuaccaguaaaagcggauuuuucgcaacaauggcuugggcugucccaaaggacaacaacaaaaaugcaacgaacccauuaacaguagaaguaccauacauuugugaagaaggagaagaccaaauuacuguuuggggguuccauucagauaacaaaacccaaaugaagaaccucuauggagacucaaauccucaaaaguucaccucaucugcuaauggaguaaccacacauuauguuucucagauuggcggcuucccagaucaaacagaagacggaggacuaccacaaagcggcagaauugucguugauuacaugaugcaaaaaccugggaaaacaggaacaauugucuaucaaagagguguuuuguugccucaaaagguguggugcgcgaguggcaggagcaaaguaauaaaaggguccuugccuuuaauuggugaagcagauugccuucaugaaaaauaugguggauuaaacaaaagcaagccuuacuacacaggagaacaugcaaaagccauaggaaauugcccaauaugggugaaaacaccuuugaagcuugccaauggaaccaaauauagaccuccugcaaaacuauuaaaggaaagggguuucuucggagcuauugcugguuuccuagaaggaggaugggaaggaaugauugcagguuggcacggauacacaucucacggagcacauggaguggcaguugcugcagaccuuaagagcacacaagaagcuauaaacaagauaacaaaaaaucucaacucuuugagugagcuagaaguaaagaaucuucaaaggcuaaguggugccauggaugaacuccacaacgaaauacucgagcuggaugagaaaguggaugaucucagagcugacacuauaaguucacaaauagaacuugcagucuugcuuuccaacgaaggaauaauaaacagugaagaugagcaucuauuggcacuugagagaaaacuaaagaaaaugcugggucccucugcuguagacauaggaaauggaugcuucgaaaccaaacacaagugcaaccagaccugcuuagacaggauagcugcuggcaccuuuaaugcaggagaauuuucucuccccacuuuugauucauugaacauuacugcugcaucuuuaaaugaugauggauuggauaaccauacuauacugcucuauuacucaacugcugcuucuaguuuggcuguaacauugaugcuagcuauuuuuauuguuuauauggucuccagagacaacguuucaugcuccaucugucuauaa

SEQ ID NO: 58952 - RNA, 1755 nt, Artificial Sequence
  derived and/or modified CDS sequence (wt) from hemagglutinin__InfluenzaB__AGQ16289
augaaggcaauaauuguacuacucaugguaguaacauccaaugcagaucgaaucugcacugggauaacaucuucaaacucaccucauguggucaaaacagcuacucaaggggaggucaaugugacuggugugauaccacuaacaacaacaccaacaaaaucuuauuuugcaaaucucaaaggaacaaagaccagagggaaacuaugcccagacugucucaacuguacagaucuggauguggccuugggcaggccaaugugugugggaacuacaccuucugcgaaagcuucaauacuucacgaagucagaccuguuacauccgggugcuucccuauaaugcacgacagaacaaaaaucaggcaacuagccaaucuucucagaggauaugaaaauaucagguuaucaacccaaaacguuaucgaugcagaaaaagcaccaggaggacccuacagacuuggaaccucaggaucuugcccuaacgcuaccaguaaaagcggauuuuucgcaacaauggcuugggcugucccaaaggacaacaacaaaaaugcaacgaacccauuaacaguagaaguaccauacauuugugcagaaggagaagaccaaauuacuguuuggggguuccauucagauaacaaaacccaaaugaagaaccucuauggagacucaaauccucaaaaguucaccucaucugcuaauggaguaaccacacauuauguuucucagauuggcggcuucccagaucaaacagaagacggaggacuaccacaaagcggcagaauugucguugauuacaugaugcaaaaaccugggaaaacaggaacaauugucuaucaaagagguguuuuguugccucaaaagguguggugcgcgaguggcaggagcaaaguaauaaaaggguccuugccuuuaauuggugaagcagauugccuucaugaaaaauacgguggauuaaacaaaagcaagccuuacuacacaggagaacaugcaaaagccauaggaaauugcccaauaugggugaaaacaccuuugaagcuugccaauggaaccaaauauagaccuccugcaaaacuauuaaaggaaagggguuucuucggagcuauugcugguuuccuagaaggaggaugggaaggaaugauugcagguuggcacggauacacaucucacggagcacauggaguggcaguugcugcagaccuuaagagcacacaagaagcuauaaacaagauaacaaaaaaucucaacucguugagugagcuagaaguaaagaaucuucaaaggcuaaguggugccauggaugaacuccacaacgaaauacucgagcuggaugagaaaguggaugaucucagagcugacacuauaaguucacaaauagaacuugcagucuugcuuuccaacgaaggaauaauaaacagugaagaugagcaucuauuggcacuugagagaaaacuaaagaaaaugcugggucccucugcuguagacauaggaaauggaugcuucgaaaccaaacacaaaugcaaccagaccugcuuagacaggauagcugcuggcaccuuuaaugcaggagaauuuucucuccccacuuuugauucauugaacauuacugcugcaucuuuaaaugaugauggauuggauaaccauacuauacugcucuauuacucaacugcugcuucuaguuuggcuguaacauugaugcuagcuauuuuuauuguuuauauggucuccagagacaacguuucaugcuccaucugccuauaa

SEQ ID NO: 58953 - RNA, 1755 nt, Artificial Sequence; identical to SEQ ID NO: 58937
  derived and/or modified CDS sequence (wt) from hemagglutinin__InfluenzaB__AGQ16290

SEQ ID NO: 58954 - RNA, 1755 nt, Artificial Sequence
  derived and/or modified CDS sequence (wt) from hemagglutinin__InfluenzaB__AGQ16291
augaaggcaauaauuguacuacucaugguaguaacauccaaugcagaucgaaucugcacugggauaacaucuucaaacucaccucauguggucaaaacagcuacucaaggggaggucaaugugacuggugugauaccacuaacaacaacaccaacaaaaucuuauuuugcaaaucucaaaggaacaaagaccagagggaaacuaugcccagacugucucaacuguacagaucuggauguggccuugggcaggccaaugugugugggaacuacacccucugcgaaagcuucaauacuucacgaagucagaccuguuacauccgggugcuucccuauaaugcacgacagaacaaaaaucaggcaacuagccaaucuucucagaggauaugaaaauaucagguuaucaacccaaaacguuaucgaugcagaaaaagcaccaggaggacccuacagacuuggaaccucaggaucuugcccuaacacuaccaguaaaagcggauuuuucgcaacaauggcuugggcugucccaaaggacaacaacaaaaaugcaacgaacccauuaacaguagaaguaccauacauuugugcagaaggagaagaccaaauugcuguuuggggguuccauucagauaacaaaacccaaaugaagaaccucuauggagacucaaauccucaaaaguucaccucaucugcuaauggaguaaccacacauuauguuucucagauuggcggcuucccagaucaaacagaagacggaggacuaccacaaagcggcagaauugucguugauuacaugaugcaaaaaccugggaaaacaggaacaauugucuaucaaagagguguuuuguugccucaaaagguguggugcgcgaguggcaggagcaaaguaauaaaaggguccuugccuuuaauuggugaagcagauugucuucaugaaaaauacgguggauuaaacaaaagcaagccuuacuacacaggagaacaugcaaaagccauaggaaauugcccaauaugggugaaaacaccuuugaagcuugccaauggaaccaaauauagaccuccugcaaaacuauuaaaggaaagggguuucuucggagcuauugcugguuuccuagaaggaggaugggaaggaaugauugcagguuggcacggauacacaucucacggagcacauggaguggcaguugcugcagaccuuaagagcacacaagaagcuauaaacaagauaacaaaaaaucucaacucuuugagugagcuagaaguaaagaaucuucaaaggcuaaguggugccauggaugaacuccacaacgaaauacucgagcuggaugagaaaguggaugaucucagagcugacacuauaaguucacaaauagaacuugcagucuugcuuuccaacgaaggaauaauaaacagugaagaugagcaucuauuggcacuugagagaaaacuaaagaaaaugcugggucccucugcuguagacauaggaaauggauguuucgaaaccaaacacaaaugcaaccagaccugcuuagacaggauagcugcuggcaccuuuaaugcaggagaauuuucucuccccacuuuugauucauugaacauuacugcugcaucuuuaaaugaugauggauuggauaaccauacuauacugcucuauuacucaacugcugcuucuaguuuggcuguaacauugaugcuagcuaucuuuauuguuuauauggucuccagagacaacguuucaugcuccaucugucuauga

SEQ ID NO: 58955 - RNA, 1755 nt, Artificial Sequence
  derived and/or modified CDS sequence (wt) from hemagglutinin__InfluenzaB__AGQ16292
augaaggcaauaauuguacuacucaugguaguaacauccaaugcagaucgaaucugcacugggauaacaucuucaaacucaccucauguggucaaaacagcuacucaaggggaggucaaugugacuggugugauaccacuaacaacaacaccaacaaaaucuuauuuugcaaaucucaaaggaacaaagaccagagggaaacuaugcccagacugucucaacuguacagaucuggauguggccuugggcaggccaaugugugugggaacuacaccuucugcgaaagcuucaauacuucacgaagucagaccuguuacauccgggugcuucccuauaaugcacgacagaacaaaaaucaggcaacuagccaaucuucucagaggauaugaaaauaucagguuaucaacccaaaacguuaucgaugcagaaaaagcaccaggaggacccuacagacuuggaaccucaggaucuugcccuaacgcuaccaguaaaagcggauuuuucgcaacaauggcuugggcugucccaaaggacaacaacaaaaaugcaacgaacccauuaacaguagaaguaccauacauuugugcagaaggagaagaccaaauugcuguuuggggguuccauucagauaacaaaacccaaaugaagaaccucuauggagacucaaauccucaaaaguucaccucaucugcuaauggaguaaccacacauuauguuucucagauuggcggcuucccagaucaaacagaagacggaggacuaccacaaagcggcagaauugucguugauuacaugaugcaaaaaccugggaaaacaggaacaauugucuaucaaagagguguuuuguugccucaaaagguguggugcgcgaguggcaggagcaaaguaauaaaaggguccuugccuuuaauuggugaagcagauugucuucaugaaaaauacgguggauuaaacaaaagcaagccuuacuacacaggagaacaugcaaaagccauaggaaauugcccaauaugggugaaaacaccuuugaagcuugccaauggaaccaaauauagaccuccugcaaaacuauuaaaggaaagggguuucuucggagcuauugcugguuuccuagaaggaggaugggaaggaaugauugcagguuggcacggauacacaucucacggagcacauggaguggcaguugcugcagaccuuaagagcacacaagaagcuauaaacaagauaacaaaaaaucucaacucuuugagugagcuagaaauaaagaaucuucaaaggcuaaguggugccauggaugaacuccacaacgaaauacucgagcuggaugagaaaguggaugaucucagagcugacacuauaaguucacaaauagaacuugcagucuugcuuuccaacgaaggaauaauaaacagugaagaugagcaucuauuggcacuugagagaaaacuaaagaaaaugcugggucccucugcuguagacauaggaaauggaugcuucgaaaccaaacacaaaugcaaccagaccugcuuagacaggauagcugcuggcaccuuuaaugcaggagaauuuucucuccccacuuuugauucauugaacauuacugcugcaucuuuaaaugaugauggauuggauaaccauacuauacugcucuauuacucaacugcugcuucuaguuuggcuguaacauugaugcuagcuauuuuuauuguuuauauggucuccagagacaacguuucaugcuccaucugucuauaa

SEQ ID NO: 58956 - RNA, 1755 nt, Artificial Sequence; identical to SEQ ID NO: 58955
  derived and/or modified CDS sequence (wt) from hemagglutinin__InfluenzaB__AGQ16293

SEQ ID NO: 58957 - RNA, 1755 nt, Artificial Sequence; identical to SEQ ID NO: 58955
  derived and/or modified CDS sequence (wt) from hemagglutinin__InfluenzaB__AGQ16294

SEQ ID NO: 58958 - RNA, 1758 nt, Artificial Sequence
  derived and/or modified CDS sequence (wt) from hemagglutinin__InfluenzaB__AGQ16295
augaaggcaauaauuguacuacucaugguaguaacauccaaugcagaucgaaucugcacugggauaacaucgucaaacucaccacaugucgucaaaacugcuacucaaggggaggucaaugugaccggugcaauaccacugacaacaacacccaccaaaucucauuuugcaaaucucaaaggaacagaaaccagggggaaacuaugcccaaaaugccuuaacugcacagaucuggacguagccuugggcagaccaaaaugcacggggaaaauacccucggcaagaguuucaauacuccaugaagucagaccuguuacaucugggugcuuuccuauaaugcacgauagaacaaaaauuagacagcugccuaaccuucuccgaggauacgaacauaucagguuaucaacucacaacguuaucaaugcagaaaaugcaccaggaggacccuacaaaauuggaaccucagggucuugcccuaacguuaccaauggaaacggauucuucgcaacaauggcuugggccgucccaaaaaacgacaaaaacaaaacagaaacaaauccauuaacaauagaaguaccauacauuuguacagaagaagaagaccaaauuaccguuuggggguuccacucugacaacgagacccaaauggcaaagcucuauggggacucaaagccccagaaguucaccucaucugccaacggagugaccacacauuacguuucacagauugguggcuucccaaaucaaacagaagacggaggacuaccacaaagugguagaauuguuguugauuacauggugcaaaaaucugggaaaacaggaacaauuaccuaucaaagagguauuuuauugccucaaaagguguggugcgcaaguggcaggagcaagguaauaaaaggauccuugccuuuaauuggagaagcagauugccuccacgaaaaauacgguggauuaaacaaaagcaagccuuacuacacaggggaacaugcaaaggccauaggaaauugcccaauaugggugaaaacacccuugaagcuggccaauggaaccaaauauagaccuccugcaaaacuauuaaaggaaagggguuucuucggagcuauugcugguuucuuagaaggaggaugggaaggaaugauugcagguuggcacggauacacaucccauggggcacauggaguagcgguggcagcugaccuuaagagcacucaagaggccauaaacaagauaacaaaaaaucucaacucuuugagugagcuggaaguaaagaaucuucaaagacuaagcggugccauggaugaacuccacaaugaaauacuagaacuagaugagaaaguggaugaucucagagcugauacaauaagcucacaaauagaacucgcaguccugcuuucuaaugaaggaauaauaaacagugaagaugaacaucucuuggcgcuugaaagaaagcugaagaaaaugcugggccccucugcuguagagauagggaauggaugcuuugaaaccaaacacaagugcaaccagaccugucucgacagaauagcugcugguaccuuugaugcaggagaauuuucucuccccaccuuugauucacugaauauuacugcugcaucuuuaaaugacgauggauuggauaaucauacuauacugcuuuacuacucaacugcugccuccaguuuggcuguaacacugaugauagcuaucuuuguuguuuauauggucuccagagacaauguuucuugcuccaucugucuauaa

SEQ ID NO: 58959 - RNA, 1758 nt, Artificial Sequence
  derived and/or modified CDS sequence (wt) from hemagglutinin__InfluenzaB__AGQ16296
augaaggcaauaauuguacuacucaugguaguaacauccaaugcagaucgaaucugcacugggauaacaucgucaaacucaccacaugucgucaaaacugcuacucaaggggaggucaaugugaccgguguaauaccacugacaacaacacccaccaaaucucauuuugcaaaucucaaaggaacagaaaccagggggaaacuaugcccaaaaugccucaacugcacagaucuggacguagccuugggcagaccaaaaugcacagggaaaauacccucggcaagaguuucaauacuccaugaagucagaccuguuacaucugggugcuuuccuauaaugcacgauagaacaaaaauuagacagcugccuaaccuucuccgaggauacgaacauaucagguugucaacucacaacguuaucaaugcagaagaugcaccaggaggacccuacaaaauuggaaccucagggucuugcccuaacguuaccaauggaaacggauucuucgcaacaauggcuugggccgucccaaaaaacgacaaaaacaaaacagcaacaaauccauuaacaauagaaguaccauacauuuguacagaaggagaagaccaaauuaccguuuggggguuccacucugacaacgagacccaaauggcaaagcucuauggggacucaaagccccagaaguucaccucaucugccaacggagugaccacacauuacguuucacagauugguggcuucccaaaucaaacagaagacggaggacuaccacaaagugguagaauuguuguugauuacauggugcaaaaaucuggaaaaacaggaacaauuaccuaucaaagagguauuuuauugccucaaaagguguggugcgcaaguggcaggagcaagguaauaaaaggauccuugccuuuaauuggagaagcagauugccuccacgaaaaauacgguggauuaaacaaaagcaagccuuacuacacaggggaacaugcaaaggccauaggaaauugcccaauaugggugaaaacacccuugaagcuggccaauggaaccaaauauagaccuccugcaaaacuauuaaaggaaagggguuucuucggagcuauugcugguuucuuagaaggaggaugggaaggaaugauugcagguuggcacggauacacaucccauggggcacauggaguagcgguggcagcugaccuuaagagcacucaagaggccauaaacaagauaacaaaaaaucucaacucuuugagugaguuggaaguaaagaaucuucaaagacuaagcggugccauggaugaacuccacaacgaaauacuagaacuagaugagaaaguggaugaucucagagcugauacaauaagcucacaaauagaacucgcaguccugcuuuccaaugaaggaauaauaaacagugaagaugaacaucucuuggcgcuugaaagaaagcugaagaaaaugcugggccccucugcuguagagauagggaauggaugcuuugaaaccaaacacaagugcaaccagaccugucucgacagaauagcugcugguaccuuugaugcaggagaauuuucucuccccaccuuugauucacugaauauuacugcugcaucuuuaaaugacgauggauuggauaaucauacuauacugcuuuacuacucaacugcugccuccaguuuggcuguaacacugaugauagcuaucuuuguuguuuauauggucuccagagacaauguuucuugcuccaucugucuauaa

SEQ ID NO: 58960 - RNA, 1755 nt, Artificial Sequence
  derived and/or modified CDS sequence (wt) from hemagglutinin__InfluenzaB__AGQ16297
augaaggcaauaauuguacuacucaugguaguaacauccaaugcagaucgaaucugcacugggauaacaucuucaaacucaccucauguggucaaaacagcuacucaaggggaggucaaugugacuggugugauaccacuaacaacaacaccaacaaaaucuuauuuugcaaaucucaaaggaacaaagaccagagggaaacuaugcccagacugucucaacuguacagaucuggauguggccuugggcaggccaaugugugugggaacuacaccuucugcgaaagcuucaauacuucacgaagucagaccuguuacauccgggugcuucccuauaaugcacgacagaacaaaaaucaggcaacuagccaaucuucucagaggauaugaaaauaucagguuaucaacccaaaacguuaucgaugcagaaaaagcaccaggaggacccuacagacuuggaaccucaggaucuugcccuaacgcuaccaguaaaagcggauuuuucgcaacaauggcuugggcugucccaaaggacaacaacaaaaaugcaacgaacccauuaacaguagagguaccauacauuugugcagaaggagaagaccaaauuacuguuuggggguuccauucagauaacaaaacccaaaugaagaaccucuauggagacucaaauccucaaaaguucaccucaucugcuaauggaguaaccacacauuauguuucucagauuggcggcuucccagaucaaacagaagacggaggacuaccacaaagcggcagaauugucguugauuacaugaugcaaaaaccugggaaaacaggaacaauugucuaucaaagagguguuuuguugccucaaaagguguggugcgcgaguggcaggagcaaaguaauaaaaggguccuugccuuuaauuggugaagcagauugccuucaugaaaaauacgguggauuaaacaaaagcaagccuuacuacacaggagaacaugcaaaagccauaggaaauugcccaauaugggugaaaacaccuuugaagcuugccaauggaaccaaauauagaccuccugcaaaacuauuaaaggaaagggguuucuucggagcuauugcugguuuccuagaaggaggaugggaaggaaugauugcagguuggcacggauacacaucucacggagcacauggaguggcaguugcugcagaccuuaagagcacacaagaagcuauaaacaagauaacaaaaaaucucaacucuuugagugagcuagaaguaaagaaucuucaaaggcuaaguggugccauggaugaacuccacaacgaaauacucgagcuggaugagaaaguggaugaucucagagcugacacuauaaguucacaaauagaacuugcagucuugcuuuccaacgaaggaauaauaaacagugaagaugagcaucuauuggcacuugagagaaaacuaaagaaaaugcugggucccucugcuguagacauaggaaauggaugcuucgaaaccaaacacaaaugcaaccagaccugcuuagacaggauagcugcuggcaccuuuaaugcaggagaauuuucucuccccacuuuugauucauugaacauuacugcugcaucuuuaaaugaugauggauuggauaaccauacuauacugcucuauuacucaacugcugcuucuaguuuggcuguaacauugaugcuagcuauuuuuauuguuuauauggucuccagagacaacgugucaugcuccaucugucuauaa

SEQ ID NO: 58961 - RNA, 1755 nt, Artificial Sequence
  derived and/or modified CDS sequence (wt) from hemagglutinin__InfluenzaB__AGQ16298
augaaggcaauaauuguacuacucaugguaguaacauccaaugcagaucgaaucugcacuggaauaacaucuucaaacucaccucauguggucaaaacagcuacucaaggggaggucaaugugacuggugugauaccacuaacaacaacaccaacaaaaucuuauuuugcaaaucucaaaggaacaaagaccagagggaaacuaugcccagacugucucaacuguacagaucuggauguggccuugggcaggccaaugugugugggaacuacaccuucugcgaaagcuucaauacuucacgaagucagaccuguuacauccgggugcuucccuauaaugcacgacagaacaaaaaucaggcaacuagccaaucuucucagaggguaugaaaauaucagguuaucaacccaaaacguuaucgaugcagaaaaagcaccaggaggacccuacagacuuggaaccucaggaucuugcccuaacgcuaccaguaaaagcggauuuuucgcaacaauggcuugggcugucccaaaggacaacaacaaaaaugcaacgaacccauuaacaguagaaguaccauacauuugugcagaaggagaagaccaaauuacuguuuggggguuccauucagauaacaaaacccaaaugaagaaccucuauggagacucaaauccucaaaaguucaccucaucugcuaauggaguaaccacacauuauguuucucagauuggcggcuucccagaucaaacagaagacggaggacuaccacaaagcggcagaauugucguugauuacaugaugcaaaaaccugggaaaacaggaacaauugucuaucaaagagguguuuuguugccucaaaagguguggugcgcgagugguaggagcaaaguaauaaaaggguccuugccuuuaauuggugaagcagauugccuucaugaaaaauacgguggauuaaacaaaagcaagccuuacuacacaggagaacaugcaaaagccauaggaaauugcccaauaugggugaaaacaccuuugaagcuugccaauggaaccaaauauagaccuccugcaaaacuauuaaaggaaagggguuucuucggagcuauugcugguuuccuagaaggaggaugggaaggaaugauugcagguuggcacggauacacaucucacggagcacauggaguggcaauugcugcagaccuuaagagcacacaagaagcuauaaacaagauaacaaaaaaucucaacucuuugagugagcuagaaguaaagaaucuucaaaggcuaaguggugccauggaugaacuccacaacgaaauacucgagcuggaugagaaaguggaugaucucagagcugacacuauaaguucacaaauagaacuugcagucuugcuuuccaacgaaggaauaauaaacagugaagaugagcaucuauuggcacuugagagaaaacuaaagaaaaugcugggucccucugcuguagacauaggaaauggaugcuucgaaaccaaacacaaaugcaaccagaccugcuuagacaggauagcugcuggcaccuuuaaugcaggagaauuuucucuccccacuuuugauucauugaacauuacugcugcaucuuuaaaugaugauggauuggauaaccauacuauacugcucuauuacucaacugcugcuucuaguuuggcuguaacauugaugcuagcuauuuuuauuguuuauauggucuccagagacaacguuucaugcuccaucugucuauaa

SEQ ID NO: 58962 - RNA, 1755 nt, Artificial Sequence
  derived and/or modified CDS sequence (wt) from hemagglutinin__InfluenzaB__AGQ16299
augaaggcaauaauuguacuacucaugguaguaacauccaaugcagaucgaaucugcacugggauaacaucuucaaacucaccucauguggucaaaacagcuacucaaggggaggucaaugugacuggugugauaccacuaacaacaacaccaacaaaaucuuauuuugcaaaucucaaaggaacaaagaccagagggaaacuaugcccagacugucucaacuguacagaucuggauguggccuugggcaggccaaugugugugggaacuacaccuucugcgaaagcuucaauacuucacgaagucagaccuguuacauccgggugcuucccuauaaugcacgacagaacaaaaaucaggcaacuagccaaucuucucagaggauaugaaaauaucagguuaucaacccaaaacguuaucgaugcagaaaaagcaccaggaggacccuacagacuuggaaccucaggaucuugcccuaacgcuaccaguaaaagcggauuuuucgcaacaauggcuugggcugucccaaaggacaacaacaaaaaugcaacaaacccauuaacaguagaaguaccauacauuugugcagaaggagaagaccaaauugcuguuuggggguuccauucagauaacaaaacccaaaugaagaaccucuauggagacucaaauccucaaaaguucaccucaucugcuaauggaguaaccacacauuauguuucucagauuggcggcuucccagaucaaacagaagacggaggacuaccacaaagcggcagaauugucguugauuacaugaugcaaaaaccugggaaaacaggaacaauugucuaucaaagagguguuuuguugccucaaaagguguggugcgcgaguggcaggagcaaaguaauaaaaggguccuugccuuuaauuggugaagcagauugucuucaugaaaaauacgguggauuaaacaaaagcaagccuuacuacacaggagaacaugcaaaagccauaggaaauugcccaauaugggugaaaacaccuuugaagcuugccaauggaaccaaauauagaccuccugcaaaacuauuaaaggaaagggguuucuucggagcuauugcugguuuccuagaaggaggaugggaaggaaugauugcagguuggcacggauacacaucucacggagcacauggaguggcaguugcugcagaccuuaagagcacacaagaagcuauaaacaagauaacaaaaaaucucaacucucugagugagcuagaaguaaagaaucuucaaaggcuaaguggugccauggaugaacuccacaacgaaauacucgagcuggaugagaaaguggaugaucucagagcugacacuauaaguucacaaauagaacuugcagucuugcuuuccaacgaaggaauaauaaacagugaagaugagcaucuauuggcacuugagagaaaacuaaagaaaaugcugggucccucugcuguagacauaggaaauggaugcuucgaaaccaaacacaaaugcaaccagaccugcuuagacaggauagcugcuggcaccuuuaaugcaggagaauuuucucuccccacuuuugauucauugaacauuacugcugcaucuuuaaaugaugauggauuggauaaccauaccauacugcucuauuacucaacugcugcuucuaguuuggcuguaacauugaugcuagcuauuuuuauuguuuauauggucuccagagacaacguuucaugcuccaucugucuauaa

SEQ ID NO: 58963 - RNA, 1755 nt, Artificial Sequence
  derived and/or modified CDS sequence (wt) from hemagglutinin__InfluenzaB__AGQ16300
augaaggcaauaauuguacuacucaugguaguaacauccaaugcagaucgaaucugcacugggauaacaucuucaaacucaccucauguggucaaaacagcuacucaaggggaggucaaugugacuggugugauaccacuaacaacaacaccaacaaaaucuuauuuugcaaaucucaaaggaacaaagaccagagggaaacuaugcccagacugucucaacuguacagaucuggauguggccuugggcaggccaaugugugugggaacuacaccuucugcgaaagcuucaauacuucacgaagucagaccuguuacauccgggugcuucccuauaaugcacgacagaacaaaaaucaggcaacuagccaaucuucucagaggauaugaaaauaucagguuaucaacccaaaacguuaucgaugcagaaaaagcaccaggaggacccuacagacuuggaaccucaggaucuugcccuaacgcuaccaguaaaagcggauuuuucgcaacaauggcuugggcugucccaaaggacaacaacaaaaaugcaacgaacccauuaacaguagaaguaccauacauuugugcagaaggagaagaccaaauugcuguuuggggguuccauucagauaacaaaacccaaaugaagaaccucuauggagacucaaauccucaaaaguucaccucaucugcuaauggaguaaccacacauuauguuucucagauuggcggcuucccagaucaaacagaagacggaggacuaccacaaagcggcagaauugucguugauuauaugaugcaaaaaccugggaaaacaggaacaauugucuaucaaagagguguuuuguugccucaaaagguguggugcgcgaguggcaggagcaaaguaauaaaaggguccuugccuuuaauuggugaagcagauugucuucaugaaaaauacgguggauuaaacaaaagcaagccuuacuacacaggagaacaugcaaaagccauaggaaauugcccaauaugggugaaaacaccuuugaagcuugccaauggaaccaaauauagaccuccugcaaaacuauuaaaggaaagggguuucuucggagcuauugcugguuuccuagaaggaggaugggaaggaaugauugcagguuggcacggauacacaucucacggagcacauggaguggcaguugcugcagaccuuaagagcacacaagaagcuauaaacaagauaacaaaaaaucucaacucuuugagugagcuagaaguaaagaaucuucaaaggcuaaguggugccauggaugaacuccacaacgaaauacucgagcuggaugagaaaguggaugaucucagagcugacacuauaaguucacaaauagaacuugcagucuugcuuuccaacgaaggaauaauaaacagugaagaugagcaucuauuggcacuugagagaaaacuaaagaaaaugcugggucccucugcuguagacauaggaaauggaugcuucgaaaccaaacacaaaugcaaccagaccugcuuagacaggauagcugcuggcaccuuuaaugcaggagaauuuucucuccccacuuuugauucauugaacauuacugcugcaucuuuaaaugaugauggauuggauaaccauacuauacugcucuauuacucaacugcugcuucuaguuuggcuguaacauugaugcuagcuauuuuuauuguuuauauggucuccagagacaacguuucaugcuccaucugucuauaa

SEQ ID NO: 58964 - RNA, 1755 nt, Artificial Sequence
  derived and/or modified CDS sequence (wt) from hemagglutinin__InfluenzaB__AGQ16301
augaaggcaauaauuguacuacucaugguaguaacauccaaugcagaucgaaucugcacugggauaacaucuucaaacucaccucauguggucaaaacagcuacucaaggggaggucaaugugacuggugugauaccacuaacaacaacaccaacaaaaucuuauuuugcaaaucucaaaggaacaaagaccagagggaaacuaugcccagacugucucaacuguacagaucuggauguggccuugggcaggccaaugugugugggaacuacaccuucugcgaaagcuucaauacuucacgaagucagaccuguuacauccgggugcuucccuauaaugcacgacagaacaaaaaucaggcaacuagccaaucuucucagaggauaugaaaauaucagguuaucaacccaaaacguuaucgaugcagaaaaagcaccaggaggacccuacagacuuggaaccucaggaucuugcccuaacgcuaccaguaaaagcggauuuuucgcaacaauggcuugggcugucccaaaggacaacaacaaaaaugcaacgaacccauuaacaguagagguaccauacauuugugcagaaggagaagaccaaauuacuguuuggggguuccauucagauaacaaaacccaaaugaagaaccucuauggagacucaaauccucaaaaguucaccucaucugcuaauggaguaaccacacauuauguuucucagauuggcggcuucccagaucaaacagaagacggaggacuaccacaaagcggcagaauugucguugauuacaugaugcaaaaaccugggaaaacaggaacaauugucuaucaaagagguguuuuguugccucaaaagguguggugcgcgaguggcaggagcaaaguaauaaaaggguccuugccuuuaauuggugaagcagauugccuucaugaaaaauacgguggauuaaacaaaagcaagccuuacuacacaggagaacaugcaaaagccauaggaaauugcccaauaugggugaaaacaccuuugaagcuugccaauggaaccaaauauagaccuccugcaaaacuauuaaaggaaagggguuucuucggagcuauugcugguuuccuagaaggaggaugggaaggaaugauugcagguuggcacggauacacaucucacggagcacauggaguggcaguugcugcagaccuuaagagcacacaagaagcuauaaacaagauaacaaaaaaucucaacucuuugagugagcuagaaguaaagaaucuucaaaggcuaaguggugccauggaugaacuccacaacgaaauacucgagcuggaugagaaaguggaugaucucagagcugacacuauaaguucacaaauagaacuugcagucuugcuuuccaacgaaggaauaauaaacagugaagaugagcaucuauuggcacuugagagaaaacuaaagaaaaugcugggucccucugcuguagacauaggaaauggaugcuucgaaaccaaacacaaaugcaaccagaccugcuuagacaggauagcugcuggcaccuuuaaugcaggagaauuuucucuccccacuuuugauucauugaacauuacugcugcaucuuuaaaugaugauggauuggauaaccauacuauacugcucuauuacucaacugcugcuucuaguuuggcuguaacauugaugcuagcuauuuuuauuguuuauauggucuccagagacaacguuucaugcuccaucugucuauaa

SEQ ID NO: 58965 - RNA, 1755 nt, Artificial Sequence; identical to SEQ ID NO: 58919
  derived and/or modified CDS sequence (wt) from hemagglutinin__InfluenzaB__AGQ16302

SEQ ID NO: 58966 - RNA, 1755 nt, Artificial Sequence
  derived and/or modified CDS sequence (wt) from hemagglutinin__InfluenzaB__AGQ16303
augaaggcaauaauuguacuacucaugguaguaacauccaaugcagaucgaaucugcacugggauaacaucuucaaacucaccucauguggucaaaacagcuacucaaggggaggucaaugugacuggugugauaccacuaacaacaacaccaacaaaaucuuauuuugcaaaucucaaaggaacaaagaccagagggaaacuaugcccagacugucucaacuguacagaucuggauguggccuugggcaggccaaugugugugggaacuacaccuucugcgaaagcuucaauacuucacgaagucagaccuguuacauccgggugcuucccuauaaugcacgacagaacaaaaaucaggcagcuagccaaucuucucagaggauaugaaaauaucagguuaucaacccaaaacguuaucgaugcagaaaaagcaccaggaggacccuacagacuuggaaccucaggaucuugcccuaacgcuaccaguaaaagcggauuuuucgcaacaauggcuugggcugucccaaaggacaacaacaaaaaugcaacgaacccauuaacaguagaaguaccauacauuugugcagaaggagaagaccaaauuacuguuuggggguuccauucagauaacaaaacccaaaugaagaaccucuauggagacucaaauccucaaaaguucaccucaucugcuaauggaguaaccacacauuauguuucucagauuggcggcuucccagaucaaacagaagacggaggacuaccacaaagcggcagaauugucguugauuacaugaugcaaaaaccugggaaaacaggaacaauugucuaucaaagagguguuuuguugccucaaaagguguggugcgcgaguggcaggagcaaaguaauaaaaggguccuugccuuuaauuggugaagcagauugccuucaugaaaaauacgguggauuaaacaaaagcaagccuuacuacacaggagaacaugcaaaagccauaggaaauugcccaauaugggugaaaacaccuuugaagcuugccaauggaaccaaauauagaccuccugcaaaacuauuaaaggaaagggguuucuucggagcuauugcugguuuccuagaaggaggaugggaaggaaugauugcagguuggcacggauacacaucucacggagcacauggaguggcaguugcugcagaccuuaagagcacacaagaagcuauaaacaagauaacaaaaaaucucaacucguugagugagcuagaaguaaagaaucuucaaaggcuaaguggugccauggaugaacuccacaacgaaauacucgagcuggaugagaaaguggaugaucucagagcugacacuauaaguucacaaauagaacuugcagucuugcuuuccaacgaaggaauaauaaacagugaagaugagcaucuauuggcacuugagagaaaacuaaagaaaaugcugggucccucugcuguagacauaggaaauggaugcuucgaaaccaaacacaaaugcaaccagaccugcuuagacaggauagcugcuggcaccuuuaaugcaggagaauuuucucuccccacuuuugauucauugaacauuacugcugcaucuuugaaugaugauggauuggauaaccauacuauacugcucuauuacucaacugcugcuucuaguuuggcuguaacauugaugcuagcuauuuuuauuguuuauauggucuccagagacaacguuucaugcuccaucugccuauaa

SEQ ID NO: 58967 - RNA, 1755 nt, Artificial Sequence
  derived and/or modified CDS sequence (wt) from hemagglutinin__InfluenzaB__AGQ16305
augaaggcaauaauuguacuacucaugguaguaacauccaaugcagaucgaaucugcacugggauaacaucuucaaacucaccucauguggucaaaacagcuacucaaggggaggucaaugugacuggugugauaccacuaacaacaacaccaacaaaaucuuauuuugcaaaucucaaaggaacaaagaccagaggaaaacuaugcccagacugucucaacuguacagaucuggauguggccuugggcaggccaaugugugugggaacuacaccuucugcgaaagcuucaauacuucacgaagucagaccuguuacauccgggugcuucccuauaaugcacgacagaacaaaaaucaggcaacuagccaaucuucucagaggauaugaaaauaucagguuaucaacccaaaacguuaucgaugcagaaaaagcaccaggaggacccuacagacuuggaaccucaggaucuugcccuaacgcuaccaguaaaagcggauuuuucgcaacaauggcuugggcugucccaaaggacaacaacaaaaaugcaacgaacccauuaacaguagaaguaccauacauuugugcagaaggagaagaccaaauuacuguuuggggguuccauucagauaacaaaacccaaaugaagaaccucuauggagacucaaauccucaaaaguucaccucaucugccaauggaguaaccacacauuauguuucucagauuggcggcuucccagaucaaacagaagacggagggcuaccacaaagcggcagaauugucguugauuacaugaugcaaaaaccugggaaaacaggaacaauugucuaucaaagagguguuuuguugccucaaaagguguggugcgcaaguggcaggagcaaaguaauaaaaggguccuugccuuuaauuggugaagcagauugccuucaugaaaaauacgguggauuaaacaaaagcaagccuuacuacacaggagaacaugcaaaagccauaggaaauugcccaauaugggugaaaacaccuuugaagcuugccaauggaaccaaauauagaccuccugcaaaacuauuaaaggaaagggguuucuucggagcuauugcugguuuccuagaaggaggaugggaaggaaugauugcagguuggcacggauacacaucucacggagcacauggaguggcaguugcugcagaccuuaagagcacacaagaagcuauaaacaagauaacaaaaaaucucaacucuuugagugagcuagaaguaaagaaucuucaaaggcuaaguggugccauggaugaacuccacaacgaaauacucgagcuggaugagaaaguggaugaucucagagcugacacuauaaguucacaaauagaacuugcagucuugcuuuccaacgaaggaauaauaaacagugaagaugagcaucuauuggcacuugagagaaaacuaaagaaaaugcugggucccucugcuguagacauaggaaauggaugcuucgaaaccaaacacaaaugcaaccagaccugcuuagacaggauagcugcuggcaccuuuaaugcaggagaauuuucucuccccacuuuugauucauugaacauuacugcugcaucuuuaaaugaugauggguuggauaaccauacuauacugcucuauuacucaacugcugcuucuaguuuggcuguaacauugaugcuagcuauuuuuauuguuuauauggucuccagagacaacguuucaugcuccaucugucuauaa

SEQ ID NO: 58968 - RNA, 1758 nt, Artificial Sequence
  derived and/or modified CDS sequence (wt) from hemagglutinin__InfluenzaB__AGQ16306
augaaggcaauaauuguacuacucaugguaguaacauccaaugcagaucgaaucugcacugggauaacaucgucaaacucaccacaugucgucaaaacugcuacucaaggggaggucaaugugaccgguguaauaccacugacaacaacacccaccaaaucucauuuugcaaaucucaaaggaacagaaaccagggggaaacuaugcccaaaaugccuuaacugcacagaucuggacguagccuugggcagaccaaaaugcacggggaaaauacccucggcaagaguuucaauacuccaugaagucagaccuguuacaucugggugcuuuccuauaaugcacgauagaacaaaaauuagacagcugccuaaccuucuccgaggauacgaacauaucagguuaucaacucacaacguuaucaaugcagaaaaugcaccaggaggacccuacaaaauuggaaccucagggucuugcccuaacguuaccaauggaaacggauucuucgcaacaauggcuugggccgucccaaaaaacgacaaaaacaaaacggaaacaaauccauuaacaauagaaguaccauacauuuguaaagaaggagaagaccaaauuaccguuuggggguuccacucugacaacgagacccaaauggcaaagcucuauggggacucaaagccccagaaguucaccucaucugccaacggagugaccacacauuacguuucacagauugguggcuucccaaaucaaacagaagacggaggacuaccacaaagugguagaauuguuguugauuacauggugcaaaaaucugggaaaacaggaacaauuaccuaucaaagagguauuuuauugccucaaaagguguggugcgcaaguggcaggagcaagguaauaaaaggauccuugccuuuaauuggagaagcagauugccuccacgaaaaauacgguggauuaaacaaaagcaagccuuacuacacaggggaacaugcaaaggccauaggaaauugcccaauaugggugaaaacacccuugaagcuggccaauggaaccaaauauagaccuccugcaaaacuauuaaaggaaagggguuucuucggagcuauugcugguuucuuagaaggaggaugggaaggaaugauugcagguuggcacggauacacaucccauggggcacauggaguagcgguggcagcugaccuuaagagcacucaagaggccauaaacaagauaacaaaaaaucucaacucuuugagugagcuggaaguaaagaaucuucaaagacuaagcggugccauggaugaacuccacaaugaaauacuagaacuagaugagaaaguggaugaucucagagcugauacaauaagcucacaaauagaacucgcaguccugcuuuccaaugaaggaauaauaaacagugaagaugaacaucucuuggcgcuugaaagaaagcugaagaaaaugcugggccccucugcuguagagauagggaauggaugcuuugaaaccaaacacaagugcaaccagaccugucucgacagaauagcugcugguaccuuugaugcaggagaauuuucucuccccaccuuugauucacugaauauuacugcugcaucuuuaaaugacgauggauuggauaaucauacuauacugcuuuacuacucaacugcugccuccaguuuggcuguaacacugaugauagcuaucuuuguuguuuauauggucuccagagacaauguuucuugcuccaucugucuauaa

SEQ ID NO: 58969 - RNA, 1755 nt, Artificial Sequence; identical to SEQ ID NO: 58867
  derived and/or modified CDS sequence (wt) from hemagglutinin__InfluenzaB__AGQ16307

SEQ ID NO: 58970 - RNA, 1758 nt, Artificial Sequence
  derived and/or modified CDS sequence (wt) from hemagglutinin__InfluenzaB__AGQ16308
augaaggcaauaauuguacuacucaugguaguaacauccaaugcagaucgaaucugcacugggauaacaucgucaaacucaccacaugucgucaaaacugcuacucaaggggaggucaaugugaccgguguaauaccacugacaacaacacccaccaaaucucauuuugcaaaucucaaaggaacagaaaccagggggaaacuaugcccaaaaugccucaacugcacagaucuggacguagccuugggcagaccaaaaugcacagggaaaauacccucggcaagaguuucaauacuccaugaagucagaccugugacaucugggugcuuuccuauaaugcacgauagaacaaaaauuagacagcugccuaaccuucuccgaggauacgaacauaucagguuaucaacucacaacguuaucaaugcagaagaugcaccaggaggacccuacaaaauuggaaccucagggucuugcccuaacguuaccaauggaaacggauucuucgcaacaauggcuugggccgucccaaaaaacgacaaaaacaaaacagcaacaaauccauuaacaauagaaguaccauacauuuguacagaaggagaagaccaaauuaccguuuggggguuccacucugacaacgagacccaaauggcaaagcucuauggggacucaaagccccagaaguucaccucaucugccaacggagugaccacacauuacguuucacagauugguggcuucccaaaucaaacagaagacggaggacuaccacaaagugguagaauuguuguugauuacauggugcaaaaaucuggaaaaacaggaacaauuaccuaucaaagagguauuuuauugccucaaaagguguggugcgcaaguggcaggagcaagguaauaaaaggauccuugccuuuaauuggagaagcagauugccuccacgaaaaauacgguggauuaaacaaaagcaagccuuacuacacaggggaacaugcaaaggccauaggaaauugcccaauaugggugaaaacacccuugaagcuggccaauggaaccaaauauagaccuccugcaaaacuauuaaaggaaagggguuucuucggagcuauugcugguuucuuagaaggaggaugggaaggaaugauugcagguuggcacggauacacaucccauggggcacauggaguagcgguggcagcugaccuuaagagcacucaagaggccauaaacaagauaacaaaaaaucucaacucuuugagugagcuggaaguaaagaaucuucaaagacuaagcggugccauggaugaacuccacaacgaaauacuagaacuagaugagaaaguggaugaucucagagcugauacaauaagcucacaaauagaacucgcaguccugcuuuccaaugaaggaauaauaaacagugaagaugaacaucucuuggcgcuugaaagaaagcugaagaaaaugcugggccccucugcuguagagauagggaauggaugcuuugaaaccaaacacaagugcaaccagaccugucucgacagaauagcugcugguaccuuugaugcaggagaauuuucucuccccaccuuugauucacugaauauuacugcugcaucuuuaaaugacgauggauuggauaaucauacuauacugcuuuauuacucaacugcugccuccaguuuggcuguaacacugaugauagcuaucuuuguuguuuauauggucuccagagacaauguuucuugcuccaucugucuauaa

SEQ ID NO: 58971 - RNA, 1755 nt, Artificial Sequence
  derived and/or modified CDS sequence (wt) from hemagglutinin__InfluenzaB__AGQ16309
augaaggcaauaauuguacuacucaugguaguaacauccaaugcagaucgaaucugcacugggauaacaucuucaaacucaccucauguggucaaaacagcuacucaaggggaggucaaugugacuggugugauaccacuaacaacaacaccaacaaaaucuuauuuugcaaaucucaaaggaacaaagaccagagggaaacuaugcccagacugucucaacuguacagaucuggauguggccuugggcaggccaaugugugugggaacuacaccuucugcgaaagcuucaauacuucacgaagucagaccuguuacauccgggugcuucccuauaaugcacgacagaacaaaaaucaggcaacuagccaaucuucucagaggauaugaaaauaucagguuaucaacccaaaacguuaucgaugcagaaaaagcaccaggaggacccuacagacuuggaaccucaggaucuugcccuaacgcuaccaguaaaagcggauuuuucgcaacaauggcuugggcugucccaaaggacaacaacaaaaaugcaacgaacccauuaacaguagagguaccauacauuugugcagaaggagaagaccaaauuacuguuuggggguuccauucagauaacaaaacccaaaugaagaaccucuauggagacucaaauccucaaaaguucaccucaucugcuaauggaguaaccacacauuauguuucucagauuggcggcuucccagaucaaacagaagacggaggacuaccacaaagcggcagaauugucgcugauuacaugaugcaaaaaccugggaaaacaggaacaauugucuaucaaagagguguuuuguugccucaaaagguguggugcgcgaguggcaggagcaaaguaauaaaaggguccuugccuuuaauuggugaagcagauugccuucaugaaaaauacgguggauuaaacaaaagcaagccuuacuacacaggagaacaugcaaaagccauaggaaauugcccaauaugggugaaaacaccuuugaagcuugccaauggaaccaaauauagaccuccugcaaaacuauuaaaggaaagggguuucuucggagcuauugcugguuuccuagaaggaggaugggaaggaaugauugcagguuggcacggauacacaucucacggagcacauggaguggcaguugcugcagaccuuaagagcacacaagaagcuauaaacaagauaacaaaaaaucucaacucuuugagugagcuagaaguaaagaaucuucaaaggcuaaguggugccauggaugaacuccacaacgaaauacucgagcuggaugagaaaguggaugaucucagagcugacacuauaaguucacaaauagaacuugcagucuugcuuuccaacgaaggaauaauaaacagugaagaugagcaucuauuggcacuugagagaaaacuaaagaaaaugcugggucccucugcuguagacauagggaauggaugcuucgaaaccaaacacaaaugcaaccagaccugcuuagacaggauagcugcuggcaccuuuaaugcaggagaauuuucucuccccacuuuugauucauugaacauuacugcugcaucuuuaaaugaugauggauuggauaaccauacuauacugcucuauuacucaacugcugcuucuaguuuggcuguaacauugaugcuagcuauuuuuauuguuuauauggucuccagagacaacguuucaugcuccaucugucuauaa

SEQ ID NO: 58972 - RNA, 1755 nt, Artificial Sequence
  derived and/or modified CDS sequence (wt) from hemagglutinin__InfluenzaB__AGQ16310
augaaggcaauaauuguacuacucaugguaguaacauccaaugcagaucgaaucugcacuggaauaacaucuucaaacucaccucauguggucaaaacagcuacucaaggggaggucaaugugacuggugugauaccacuaacaacaacaccaacaaaaucuuauuuugcaaaucucaaaggaacaaagaccagagggaaacuaugcccagacugucucaacuguacagaucuggauguggccuugggcaggccaaugugugugggaacuacaccuucugcgaaagcuucaauacuucacgaagucagaccuguuacauccgggugcuucccuauaaugcacgacagaacaaaaaucaggcaacuagccaaucuucucagaggauaugaaaauaucagguuaucaacccaaaacguuaucgaugcagaaaaagcaccaggaggacccuacagacuuggaaccucaggaucuugcccuaacgcuaccaguaaaagcggauuuuucgcaacaauggcuugggcugucccaaaggacaacaacaaaaaugcaacgaacccauugacaguagaaguaccauacauuugugcagaaggagaagaccaaauuacuguuuggggguuccauucagauaacaaaacccaaaugaagaaccucuauggagacucaaauccucaaaaguucaccucaucugcuaauggaguaaccacacauuauguuucucagauuggcggcuucccagaucaaacagaagacggaggacuaccacaaagcggcagaauugucguugauuacaugaugcaaaaaccugggaaaacaggaacaauugucuaucaaagagguguuuuguugccucaaaagguguggugcgcgaguggcaggagcaaaguaauaaaaggguccuugccuuuaauuggugaagcagauugccuucaugaaaaauacgguggauuaaacaaaagcaagccuuacuacacaggagaacaugcaaaagccauaggaaauugcccaauaugggugaaaacaccuuugaagcuugccaauggaaccaaauauagaccuccugcaaaacuauuaaaggaaagggguuucuucggagcuauugcugguuuccuagaaggaggaugggaaggaaugguugcagguuggcacggauacacaucucacggagcacauggaguggcaguugcugcagaccuuaagagcacacaagaagcuauaaacaagauaacaaaaaaucucaacucuuugagugagcuagaaguaaagaaucuucaaaggcuaaguggugccauggaugaacuccacaacgaaauacucgagcuggaugagaaaguggaugaucucagagcugacacuauaaguucacaaauagaacuugcagucuuacuuuccaacgaaggaauaauaaacagugaagaugagcaucuguuggcacuugagagaaaacuaaagaaaaugcugggucccucugcuguagacauaggaaauggaugcuucgaaaccaaacacaaaugcaaccagaccugcuuagacaggauagcugcuggcaccuuuaaugcaggagaauuuucucuccccacuuuugauucauugaacauuacugcugcaucuuuaaaugaugauggauuggauaaccauacuauacugcucuauuacucaacugcugcuucuaguuuggcuguaacauugaugcuagcuauuuuuauuguuuauauggucuccagagacaacguuucaugcuccaucugucuauaa

SEQ ID NO: 58973 - RNA, 1758 nt, Artificial Sequence
  derived and/or modified CDS sequence (wt) from hemagglutinin__InfluenzaB__AGQ16311
augaaggcaauaauuguacuacucaugguaguaacauccaaugcagaucgaaucugcacugggauaacaucgucaaacucaccacaugucgucaaaacugcuacucaaggggaggucaaugugaccgguguaauaccacugacaacaacacccaccaaaucucauuuugcaaaucucaaaggaacagaaaccagggggaaacuaugcccaaaaugccucaacugcacagaucuggacguagccuugggcagaccaaaaugcacagggaaaauacccucggcaagaguuucaauacuccaugaagucagaccuguuacaucugggugcuuuccuauaaugcacgauagaacaaaaauuagacagcugccuaaccuucuccgaggauacgaacauaucagguuaucaacucacaacguuaucaaugcagaagaugcuccaggaggacccuacaaaauuggaaccucagggucuugcccuaacguuaccaauggaaacggauucuucgcaacaauggcuugggccgucccaaaaaacgacaaaaacaaaacagcaacaaauccauuaacaauagaaguaccauacauuuguacagaaggagaagaccaaauuaccguuuggggguuccacucugacaacgagacccaaauggcaaagcucuauggggacucaaagccccagaaguucaccucaucugccaacggagugaccacacauuacguuucacagauugguggcuucccaaaucaaacagaagacggaggacuaccacaaagugguagaauuguuguugauuacauggugcaaaaaucuggaaaaacaggaacaauuaccuaucaaagagguauuuuauugccucaaaagguguggugcgcaaguggcaggagcaagguaauaaaaggauccuugccuuuaauuggagaagcagauugccuccacgaaaaauacgguggauuaaacaaaagcaagccuuacuacacaggggaacaugcaaaggccauaggaaauugcccaauaugggugaaaacacccuugaagcuggccaauggaaccaaauauagaccuccugcaaaacuauuaaaggaaagggguuucuucggagcuauugcugguuucuuagaaggaggaugggaaggaaugauugcagguuggcacggauacacaucccauggggcacauggaguagcgguggcagcugaccuuaagagcacucaagaggccauaaacaagauaacaaaaaaucucaacucuuugagugagcuggaaguaaagaaucuucaaagacuaagcggugccauggaugaacuccacaacgaaauacuagaacuagaugagaaaguggaugaucucagagcugauacaauaagcucacaaauagaacucgcaguccugcuuuccaaugaaggaauaauaaacagugaagaugaacaucucuuggcgcuugaaagaaagcugaagaaaaugcugggccccucugcuguagagauagggaauggaugcuuugaaaccaaacacaagugcaaccagaccugucucgacagaauagcugcugguaccuuugaugcaggagaauuuucucuccccaccuuugauucacugaauauuacugcugcaucuuuaaaugacgauggauuggauaaucauacuauacugcuuuacuacucaacugcugccuccaguuuggcuguaacacugaugauagcuaucuuuguuguuuauauggucuccagagacaauguuucuugcuccaucugucuauaa

SEQ ID NO: 58974 - RNA, 1755 nt, Artificial Sequence; identical to SEQ ID NO: 58937
  derived and/or modified CDS sequence (wt) from hemagglutinin__InfluenzaB__AGQ16312

SEQ ID NO: 58975 - RNA, 1755 nt, Artificial Sequence
  derived and/or modified CDS sequence (wt) from hemagglutinin__InfluenzaB__AGQ16313
augaaggcaauaauuguacuacucaugguaguaacauccaaugcagaucgaaucugcacugggauaacaucuucaaacucaccucauguggucaaaacagcuacucaaggggaggucaaugugacuggugugauaccacuaacaacaacaccaacaaaaucuuauuuugcaaaucucaaaggaacaaagaccagagggaaacuaugcccagacugucucaacuguacagaucuggauguggccuugggcaggccaaugugugugggaacuacaccuucugcgaaagcuucaauacuucacgaagucagaccuguuacauccgggugcuucccuauaaugcacgacagaacaaaaaucaggcaacuagccaaucuucucagaggauaugaaaauaucagguuaucaacccaaaacguuaucgaugcagaaaaagcaccaggaggacccuacagacuuggaaccucaggaucuugcccuaacgcuaccaguaaaagcggauuuuucgcaacaauggcuugggcugucccaaaggacaacaacaaaaaugcaacgaacccauuaacaguagaaguaccauacauuugugcagaaggagaagaccaaauugcuguuuggggguuccauucagauaacaaaacccaaaugaagaaccucuauggggacucaaauccucaaaaguucaccucaucugcuaauggaguaaccacacauuauguuucucagauuggcggcuucccagaucaaacagaagacggaggacuaccacaaagcggcagaauugucguugauuacaugaugcaaaaaccugggaaaacaggaacaauugucuaucaaagagguguuuuguugccucaaaagguguggugcgcgaguggcaggagcaaaguaauaaaaggguccuugccuuuaauuggugaagcagauugucuucaugaaaaauacgguggauuaaacaaaagcaagccuuacuacacaggagaacaugcaaaagccauaggaaauugcccaauaugggugaaaacaccuuugaagcuugccaauggaaccaaauauagaccuccugcaaaacuauuaaaggaaaaggguuucuucggagcuauugcugguuuccuagaaggaggaugggaaggaaugauugcagguuggcacggauacacaucucacggagcacauggaguggcaguugcugcagaccuuaagagcacacaagaagcuauaaacaagauaacaaaaaaucucaacucuuugagugagcuagaaguaaagaaucuucaaaggcuaaguggugccauggaugaacuccacaacgaaauacucgagcuggaugagaaaguggaugaucucagagcugacacuauaaguucacaaauagaacuugcagucuugcuuuccaacgaaggaauaauaaacagugaagaugagcaucuauuggcacuugagagaaaacuaaagaaaaugcugggucccucugcuguagacauaggaaauggaugcuucgaaaccaaacacaaaugcaaccagaccugcuuagacaggauagcugcuggcaccuuuaaugcaggagaauuuucucuccccacuuuugauucauugaacauuacugcugcaucuuuaaaugaugauggauuggauaaccauacuauacugcucuauuacucaacugcugcuucuaguuuggcuguaacauugaugcuagcuauuuuuauuguuuauauggucuccagagacaacguuucaugcuccaucugucuauaa

SEQ ID NO: 58976 - RNA, 1758 nt, Artificial Sequence
  derived and/or modified CDS sequence (wt) from hemagglutinin__InfluenzaB__AGQ16314
augaaggcaauaauuguacuacucaugguaguaacauccaaugcagaucgaaucugcacugggauaacaucgucaaacucaccacaugucgucaaaacugcuacucaaggggaggucaaugugaccgguguaauaccacugacaacaacacccaccaaaucucauuuugcaaaucucaaaggaacagaaaccagggggaaacuaugcccaaaaugccuuaacugcacagaucuggacguagccuugggcagaccaaaaugcacggggaaaauacccucggcaagaguuucaauacuccaugaagucagaccuguuacaucugggugcuuuccuauaaugcacgauagaacaaaaauuagacagcugccuaaccuucuccgaggauacgaacauaucagguuaucaacucacaacguuaucaaugcagaaaaugcaccaggaggacccuacaaaauuggaaccucagggucuugcccuaacguuaccaauggaaacggauucuucgcaacaauggcuugggccgucccaaaaaacgacaaaaacaaaacagaaacaaauccauuaacaauagaaguaccauacauuuguacagaagaagaagaccaaauuaccguuuggggguuccacucugacaacgagacccaaauggcaaagcucuauggggacucaaagccccagaaguucaccucaucugccaacggagugaccacacauuacguuucacagauugguggcuucccaaaucaaacagaagacggaggacuaccacaaagugguagaauuguuguugauuacauggugcaaaaaucugggaaaacaggaacaauuaccuaucaaagagguauuuuauugccucaaaagguguggugcgcaaguggcaggagcaagguaauaaaaggauccuugccuuuaauuggagaagcagauugccuccacgaaaaauacgguggauuaaacaaaagcaagccuuacuacacaggggaacaugcaaaggccauaggaaauugcccaauaugggugaaaacacccuugaagcuggccaauggaaccaaauauagaccuccugcaaaacuauuaaaggaaagggguuucuucggagcuauugcugguuucuuagaaggaggaugggaaggaaugauugcagguuggcacggauacacaucccauggggcacauggaguagcgguggcagcugaccuuaagagcacucaagaggccauaaacaagauaacaaaaaaucucaacucuuugagugagcuggaaguaaagaaucuucaaagacuaagcggugccauggaugaacuccacaaugaaauacuagaacuagaugagaaaguggaugaucucagagcugauacaauaagcucacaaauagaacucgcaguccugcuuucuaaugaaggaauaauaaacagugaagaugaacaucucuuggcgcuugaaagaaagcugaagaaaaugcugggccccucugcuguagagauagggaauggaugcuuugaaaccaaacacaagugcaaccagaccugucucgacagaauagcugcugguaccuuugaugcaggagaauuuucucuccccaccuuugauucacugaauauuacugcugcaucuuuaaaugacgauggauuggauaaucauacuauacugcuuuacuacucaacugcugccuccaguuuggcuguaacacugaugauagcuaucuuuguuguuuauauggucuccagagacaauguuucuugcuccaucugucuauaa

SEQ ID NO: 58977 - RNA, 1755 nt, Artificial Sequence
  derived and/or modified CDS sequence (wt) from hemagglutinin__InfluenzaB__AGQ16315
augaaggcaauaauuguacuacucaugguaguaacauccaaugcagaucgaaucugcacuggaauaacaucuucaaacucaccucauguggucaaaacagcuacucaaggggaggucaaugugacuggugugauaccacuaacaacaacaccaacaaaaucuuauuuugcaaaucucaaaggaacaaagaccagagggaaacuaugcccagacugucucaacuguacagaucuggauguggccuugggcaggccaaugugugugggaacuacaccuucugcgaaagcuucaauacuucacgaagucagaccuguuacauccgggugcuucccuauaaugcacgacagaacaaaaaucaggcaacuagccaaucuucucagaggguaugaaaauaucagguuaucaacccaaaccguuaucgaugcagaaaaagcaccaggaggacccuacagacuuggaaccucaggaucuugcccuaacgcuaccaguaaaagcggauuuuucgcaacaauggcuugggcugucccaaaggacaacaacaaaaaugcaacgaacccauuaacaguagaaguaccauacauuugugcagaaggagaagaccaaauuacuguuuggggguuccauucagauaacaaaacccaaaugaagaaccucuauggagacucaaauccucaaaaguucaccucaucugcuaauggaauaaccacacauuauguuucucagauuggcggcuucccagaucaaacagaagacggaggacuaccacaaagcggcagaauugucguugauuacaugaugcaaaaaccugggaaaacaggaacaauugucuaucaaagagguguuuuguugccucaaaagguguggugcgcgagugguaggagcaaaguaauaaaaggguccuugccuuuaauuggugaagcagauugccuucaugaaaaauacgguggauuaaacaaaagcaagccuuacuacacaggagaacaugcaaaagccauaggaaauugcccaauaugggugaaaacaccuuugaagcuugccaauggaaccaaauauagaccuccugcaaaacuauuaaaggaaagggguuucuucggagcuauugcugguuuccuagaaggaggaugggaaggaaugauugcagguuggcacggauacacaucucacggagcacauggaguggcaguugcugcagaccuuaagagcacacaagaagcuauaaacaagauaacaaaaaaucucaacucuuugagugagcuagaaguaaagaaucuucaaaggcuaaguggugccauggaugaacuccacaacgaaauacucgagcuggaugagaaaguggaugaucucagagcugacacuauaaguucacaaauagaacuugcagucuugcuuuccaacgaaggaauaauaaacagugaagaugagcaucuauuggcacuugagagaaaacuaaagaaaaugcugggucccucugcuguagacauaggaaauggaugcuucgaaaccaaacacaaaugcaaccagaccugcuuagacaggauagcugcuggcaccuuuaaugcaggagaauuuucucuccccacuuuugauucauugaacauuacugcugcaucuuuaaaugaugauggauuggauaaccauauuauacugcucuauuacucaacugcugcuucuaguuuggcuguaacauugaugcuagcuauuuuuauuguuuauauggucuccagagacaacguuucaugcuccaucugucuauaa

SEQ ID NO: 58978 - RNA, 1755 nt, Artificial Sequence
  derived and/or modified CDS sequence (wt) from hemagglutinin__InfluenzaB__AGQ16316
augaaggcaauaauuguacuacucaugguaguaacauccaaugcagauagaaucugcacugggauaacaucuucaaacucaccucauguggucaaaacagcuacucaaggggaggucaaugugacuggugugauaccacuaacaacaacaccaacaaaaucuuauuuugcaaaucucaaaggaacaaagaccagagggaaacuaugcccagacugucucaacuguacagaucuggauguggccuugggcaggccaaugugugugggaacuacaccuucugcgaaagcuucaauacuucacgaagucagaccuguuacauccgggugcuucccuauaaugcacgacagaacaaaaaucaggcaacuagccaaucuucucagaggauaugaaaauaucagguuaucaacccaaaacguuaucgaugcagaaaaagcaccaggaggacccuacagacuuggaaccucaggaucuugcccuaacgcuaccaguaaaagcggauuuuucgcaacaauggcuugggcugucccaaaggacaacaacaaaaaugcaacgaacccauuaacaguagaaguaccauacauuugugcagaaggagaagaccaaauuacuguuuggggguuccauucagauaacaaaacccaaaugaagaaccucuauggagacucaaauccucaaaaguucaccucaucugcuaauggaguaaccacacauuauguuucucagauuggcggcuucccagaucaaacagaagacggaggacuaccacaaagcggcagaauugucguugauuacaugaugcaaaaaccugggaaaacaggaacaauugucuaucaaagagguguuuuguugccucaaaagguguggugcgcgaguggcaggagcaaaguaauaaaaggguccuugccuuuaauuggugaagcagauugccuucaugaaaaauacgguggauuaaacaaaagcaagccuuacuacacaggagaacaugcaaaagccauaggaaauugcccaauaugggugaaaacaccuuugaagcuugccaauggaaccaaauauagaccuccugcaaaacuauuaaaggaaagggguuucuucggagcuauugcugguuuccuagaaggaggaugggaaggaaugauugcagguuggcacggauacacaucucacggagcacauggaguggcaguugcugcagaccuuaagagcacacaagaagcuauaaacaagauaacaaaaaaucucaacucuuugagugagcuagaaguaaagaaucuucaaaggcuaaguggugccauggaugaacuccacaacgagauacucgagcuggaugagaaaguggaugaucucagagcugacacuauaagcucacaaauagaacuugcagucuugcuuuccaacgaaggaauaauaaacagugaagaugagcaucuauuggcacuugagagaaaacuaaagaaaaugcugggucccucugcuguagacauaggaaauggaugcuucgaaaccaaacacaaaugcaaccagaccugcuuagacaggauagcugcuggcaccuuuaaugcaggagaauuuucucuccccacuuuugauucauugaacauuacugcugcaucuuuaaaugaugauggauuggauaaccauacuauacugcucuauuacucaacugcugcuucuaguuuggcuguaacauugaugcuagcuauuuuuauuguuuauauggucuccagagacaacguuucaugcuccaucugucuauaa

SEQ ID NO: 58979 - RNA, 1755 nt, Artificial Sequence; identical to SEQ ID NO: 58915
  derived and/or modified CDS sequence (wt) from hemagglutinin__InfluenzaB__AGQ16317

SEQ ID NO: 58980 - RNA, 1758 nt, Artificial Sequence
  derived and/or modified CDS sequence (wt) from hemagglutinin__InfluenzaB__AGQ16318
augaaggcaauaauuguacuacucaugguaguaacauccaaugcagaucgaaucugcacugggauaacaucgucaaacucaccacaugucgucaaaacugcuacucaaggggaggucaaugugaccgguguaauaccacugacaacaacacccaccaaaucucauuuugcaaaucucaaaggaacagaaaccagggggaaacuaugcccaaaaugccucaacugcacagaucuggacguagccuugggcagaccaaaaugcacggggaaaauacccucggcaagaguuucaauacuccaugaagucagaccuguuacaucugggugcuuuccuauaaugcacgauagaacaaaaauuagacagcugccuaaccuucuccgaggcuacgaacauaucagguuaucaacucacaacguuaucaaugcagaaaaugcaccaggaggacccuacaaaauuggaaccucagggucuugcccuaauguuaccaauggaaacggauucuucgcaacaauggcuugggccgucccaaaaaacgacaaaaacaaaacagcaacaaauccauuaacaauagaagugccauacauuuguacagaaggagaagaccaaauuaccguuuggggguuccacucugacaacgaaacccaaauggcaaagcucuauggggacucaaagccccagaaguucaccucaucugccaacggagugaccacacauuacguuucacagauugguggcuucccaaaucaaacagaagacggaggacuaccacaaagugguagaauuguuguugauuacauggugcaaaaaucugggaaaacaggaacaauuaccuaucaaagagguauuuuauugccucaaaagguguggugcgcaaguggcaggagcaagguaauaaaaggauccuugccuuuaauuggagaagcagauugccuccacgaaaaauacgguggauuaaacaaaagcaagccuuacuacacaggggaacaugcaaaggccauaggaaauugcccaauaugggugaaaacacccuugaagcuggccaauggaaccaaauauagaccuccugcaaaacuauuaaaggaaagggguuucuucggagcuauugcugguuucuuagaaggaggaugggaaggaaugauugcagguuggcacggauacacaucccauggggcacauggaguagcgguggcagcugaccuuaagagcacucaagaggccauaaacaagauaacaaaaaaucucaacucuuugagugagcuggaaguaaagaaucuucaaagacuaagcggugccauggaugaacuccacaacgaaauacuagaacuagaugagaaaguggaugaucucagagcugauacaauaagcucacaaauagaacucgcaguccugcuuuccaaugaaggaauaauaaacagugaagaugaacaucucuuggcgcuugaaagaaagcugaagaaaaugcugggccccucugcuguagagauagggaauggaugcuuugaaaccaaacacaaaugcaaccagaccugucucgacagaauagcugcugguaccuuugaugcaggagaauuuucucuccccaccuuugauucacugaauauuacugcugcaucuuuaaaugacgauggauuggauaaucauacuauacugcuuuacuacucaacugcugccuccaguuuggcuguaacacugaugauagcuaucuuuguuguuuauauggucuccagagacaauguuucuugcuccaucugucuauaa

SEQ ID NO: 58981 - RNA, 1755 nt, Artificial Sequence
  derived and/or modified CDS sequence (wt) from hemagglutinin__InfluenzaB__AGQ16319
augaaggcaauaauuguacuacucaugguaguaacauccaaugcagaucgaaucugcacugggauaacaucuucaaacucaccucauguggucaaaacagcuacucaaggggaggucaaugugacuggugugauaccacuaacaacaacaccaacaaaaucuuauuuugcaaaucucaaaggaacaaagaccagagggaaacuaugcccaggcugucucaacuguacagaucuggauguggccuugggcaggccaaugugugugggaacuacaccuucugcgaaagcuucaauacuucacgaagucagaccuguuacauccgggugcuucccuauaaugcacgacagaacaaaaaucaggcaacuagccaaucuucucagaggauaugaaaauaucagguuaucaacccaaaacguuaucgaugcagaaaaagcaccaggaggacccuacagacuuggaaccucaggaucuugcccuaaugcuaccaguaaaagcggauuuuucgcaacaauggcuugggcugucccaaaggacaacaacaaaaaugcaacgaacccauuaacaguagaaguaccauacauuugugcagaaggagaagaccaaauugcuguuuggggguuccauucagauaacaaaacccaaaugaagaaccucuauggagacucaaauccucaaaaguucaccucaucugcuaauggaguaaccacacauuauguuucucagauuggcggcuucccagaucaaacagaagacggaggacuaccacaaagcggcagaauugucguugauuacaugaugcaaaaaccugggaaaacaggaacaauugucuaucaaagagguguuuuguugccucaaaagguguggugcgcgaguggcaggagcaaaguaauaaaaggguccuugccuuuaauuggugaagcagauugucuucaugaaaaauacgguggauuaaacaaaagcaagccuuacuacacaggagaacaugcaaaagccauaggaaauugcccaauaugggugaaaacaccuuugaagcuugccaauggaaccaaauauagaccuccugcaaaacuauuaaaggaaagggguuucuucggagcuauugcugguuuccuagaaggaggaugggaaggaaugauugcagguuggcacggauacacaucucacggagcacauggaguggcaguugcugcagaccuuaagagcacacaagaagcuauaaacaagauaacaaaaaaucucaacucuuugagugagcuagaaguaaagaaucuucaaaggcuaaguggugccauggaugaacuccacaacgaaauacucgagcuggaugagaaaguggaugaucucagagcugacacuauaaguucacaaauagaacuugcagucuugcuuuccaacgaaggaauaauaaacagugaagaugagcaucuauuggcacuugagagaaaacuaaagaaaaugcugggucccucugcuguagacauaggaaauggaugcuucgaaaccaaacacaaaugcaaccagaccugcuuagacaggauagcugcuggcaccuuuaaugcaggagaauuuucucuccccacuuuugauucauugaacauuacugcugcaucuuuaaaugaugauggauuggauaaccauacuauacugcucuauuacucaacugcugcuucuaguuuggcuguaacauugaugcuagcuauuuuuauuguuuauauggucuccagagacaacguuucaugcuccaucugucuauaa

SEQ ID NO: 58982 - RNA, 1755 nt, Artificial Sequence
  derived and/or modified CDS sequence (wt) from hemagglutinin__InfluenzaB__AGQ16320
augaaggcaauaauuguacuacucaugguaguaacauccaaugcagaucgaaucugcacugggauaacaucuucaaacucaccucauguggucaaaacagcuacucaaggggaggucaaugugacuggugugauaccacuaacaacaacaccaacaaaaucuuauuuugcaaaucucaaaggaacaaagaccagagggaaacuaugcccagacugucucaacuguacagaucuggauguggccuugggcaggccaaugugugugggaacuacaccuucugcgaaagcuucaauacuucacgaagucagaccuguuacauccgggugcuucccuauaaugcacgacagaacaaaaaucaggcaacuagccaaucuucucagaggauaugaaaauaucagguuaucaacccaaaacguuaucgaugcagaaaaagcaccaggaggacccuacagacuuggaaccucaggaucuugcccuaacgcuaccaguaaaagcggauuuuucgcaacaauggcuugggcugucccaaaggacaacaacaaaaaugcaacgaacccauuaacaguagaaguaccauacauuugugcagaaggagaagaccaaauugcuguuuggggguuccauucagauaacaaaacccaaaugaagaaccucuauggagacucaaauccucaaaaguucaccucaucugcuaauggaguaaccacacauuauguuucucagauuggcggcuucccagaucaaacagaagacggaggacuaccacaaagcggcagaauugucguugauuacaugaugcaaaaaccugggaaaacaggaacaauugucuaucaaagagguguuuuguugccucaaaagguguggugcgcgaguggcaggagcaaaguaauaaaaggguccuugccuuuaauuggugaagcagauugucuucaugaaaaauacgguggauuaaacaaaagcaagccuuacuacacaggagaacaugcaaaagccauaggaaauugcccaauaugggugaaaacaccuuugaagcuugccaauggaaccaaauauagaccuccugcaaaacuauuaaaggaaagggguuucuucggagcuauugcugguuuccuagaaggaggaugggaaggaaugauugcagguuggcacggauacacaucucacggagcacauggaguggcaguugcugcagaccuuaagagcacacaagaagcuauaaacaagauaacaaaaaaucucaacucuuugagugagcuagaaguaaagaaucuucaaaggcuaaguggugccauggaugaacuccacaacgaaauacucgagcuggaugagaaaguggaugaucucagagcugacacuauaaguucacaaauagaacuugcagucuugcuuuccaacgaaggaauaauaaacagugaagaugagcaucuauuggcacuugagagaaaacuaaagaaaaugcugggucccucugcuguagacauaggaaauggaugcuucgaaaccaaacacaaaugcaaccagaccugcuuagacaggauagcugcuggcaccuuuaaugcaggagaauuuucucuccccacuuuugauucauugaacauuacugcugcaucuuuaaaugaugauggauuggauaaccauacuauacugcucuauuacucaacugcugccucuaguuuggcuguaacauugaugcuagcuauuuuuauuguuuauauggucuccagagacaacguuucaugcuccaucugccuauaa

SEQ ID NO: 58983 - RNA, 1755 nt, Artificial Sequence
  derived and/or modified CDS sequence (wt) from hemagglutinin__InfluenzaB__AGQ16321
augaaggcaauaauuguacuacucaugguaguaacauccaaugcagaucgaaucugcacugggauaacaucuucaaacucaccucauguggucaaaacagcuacucaaggggaggucaaugugacuggugugauaccacuaacaacaacaccaacaaaaucuuauuuugcaaaucucaaaggaacaaagaccagagggaaacuaugcccagacugucucaacuguacagaucuggauguggccuugggcaggccaaugugugugggaacuacaccuucugcgaaagcuucaauacuucacgaagucagaccuguuacauccgggugcuucccuauaaugcacgacagaacaaaaaucaggcaacuagccaaucuucucagaggauaugaaaauaucagguuaucaacccaaaacguuaucgaugcagaaaaagcaccaggaggacccuacagacuuggaaccucaggaucuugcccuaacgcuaccaguaaaagcggauuuuucgcaacaauggcuugggcugucccaaaggacaacaacaaaaaugcaacgaacccauuaacaguagaaguaccauacauuugugcagaaggagaagaccaaauuacuguuuggggguuccauucagauaacaaaacccaaaugaagaaccucuauggagacucaaauccucaaaaguucaccucaucugcuaauggaguaaccacacauuauguuucucagauuggcggcuucccagaucaaacagaagacggaggacuaccacaaagcggcagaauugucguugauuacaugaugcaaaaaccugggaaaacaggaacaauugucuaucaaagagguguuuuguugccucaaaagguguggugcgcgaguggcaggagcaaaguaauaaaaggguccuugccuuuaauuggugaagcagauugccuucaugaaaaauacgguggauuaaacaaaagcaagccuuacuacacaggagaacaugcaaaagccauaggaaauugcccaauaugggugaaaacaccuuugaagcuugccaauggaaccaaauauagaccuccugcaaaacuauuaaaggaaagggguuucuuuggagcuauugcugguuuccuagaaggaggaugggaaggaaugauugcagguuggcacggauacacaucucacggagcacauggaguggcaguugcugcagaccuuaagagcacacaagaagcuauaaacaagauaacaaaaaaucucaacucuuugagugagcuagaaguaaagaaucuucaaaggcuaaguggugccauggaugaacuccacaacgaaauacucgagcuggaugagaaaguggaugaucucagagcugacacuauaaguucacaaauagaacuugcagucuugcuuuccaacgaaggaauaauaaacagugaagaugagcaucuauuggcacuugagagaaaacuaaagaaaaugcugggucccucugcuguagacauaggaaauggaugcuucgaaaccaaacacaaaugcaaccagaccugcuuagacaggauagcugcuggcaccuuuaaugcaggagaauuuucucuccccacuuuugauucauugaacauuacugcugcaucuuuaaaugaugauggauuggauaaccauacuauacugcucuauuacucaacugcugcuucuaguuuggcuguaacauugaugcuagcuauuuuuauuguuuauauggucuccagagacaacguuucaugcuccaucugucuauaa

SEQ ID NO: 58984 - RNA, 1755 nt, Artificial Sequence
  derived and/or modified CDS sequence (wt) from hemagglutinin__InfluenzaB__AGQ16322
augaaggcaauaauuguacuacucaugguaguaacauccaaugcagaucgaaucugcacugggauaacaucuucaaacucaccucauguggucaaaacagcuacucaaggggaggucaaugugacuggugugauaccacuaacaacaacaccaacaaaaucuuauuuugcaaaucucaaaggaacaaagaccagagggaaacuaugcccagacugucucaacuguacagaucuggauguggccuugggcaggccaaugugugugggaacuacaccuucugcgaaagcuucaauacuucacgaagucagaccuguuacauccgggugcuucccuauaaugcacgacagaacaaaaaucaggcaacuagccaaucuucucagaggauaugaaaauaucagguuaucaacccaaaacguuaucgaugcagaaaaagcaccaggaggacccuacagacuuggaaccucaggaucuugcccuaacgcuaccaguaaaagcggauuuuucgcaacaauggcuugggcuguuccaaaggacaacaacaaaaaugcaacgaacccauuaacaguagagguaccauacauuugugcagaaggagaagaccaaauuacuguuuggggguuccauucagauaacaaaacccaaaugaagaaccucuauggagacucaaauccucaaaaguucaccucaucugcuaauggaguaaccacacauuauguuucucagauuggcggcuucccagaucaaacagaagacggaggacuaccacaaagcggcagaauugucguugauuacaugaugcaaaaaccugggaaaacaggaacaauugucuaucaaagagguguuuuguugccucaaaagguguggugcgcgaguggcaggagcaaaguaauaaaaggguccuugccuuuaauuggugaagcagauugccuucaugaaaaauacgguggauuaaacaaaagcaagccuuacuacacaggagaacaugcaaaagccauaggaaauugcccaauaugggugaaaacaccuuugaagcuugccaauggaaccaaauauagaccuccugcaaaacuauuaaaggaaagggguuucuucggagcuauugcugguuuccuagaaggaggaugggaaggaaugauugcagguuggcacggauacacaucucacggagcacauggaguggcaguugcugcagaccuuaagagcacacaagaagcuauaaacaagauaacaaaaaaucucaacucuuugagugagcuagaaguaaagaaucuucaaaggcuaaguggugccauggaugaacuccacaacgaaauacucgagcuggaugagaaaguggaugaucucagagcugacacuauaaguucacaaauagaacuugcagucuugcuuuccaacgaaggaauaauaaacagugaagaugagcaucuauuggcacuugagagaaaacuaaagaaaaugcugggucccucugcuguagacauaggaaauggaugcuucgaaaccaaacacaaaugcaaccagaccugcuuagacaggauagcugcuggcaccuuuaaugcaggagaauuuucucuccccacuuuugauucauugaacauuacugcugcaucuuuaaaugaugauggauuggauaaccauacuauacugcucuauuacucaacugcugcuucuaguuuagcuguaacauugaugcuagcuauuuuuauuguuuauauggucuccagagacaacguuucaugcuccaucugucuauaa

SEQ ID NO: 58985 - RNA, 1758 nt, Artificial Sequence
  derived and/or modified CDS sequence (wt) from hemagglutinin__InfluenzaB__AGQ16323
augaaggcaauaauuguacuacucaugguaguaacauccaaugcagaucgaaucugcacugggauaacaucgucaaacucaccacaugucgucaaaacugcuacucaaggggaggucaaugugaccgguguaauaccacugacaacaacacccaccaaaucucauuuugcaagucucaaaggaacagaaaccagggggaaacuaugcccaaaaugccucaacugcacagaucuggacguagccuugggcagaccaaaaugcacagggaaaauacccucggcaagaguuucaauacuccaugaagucagaccuguuacaucugggugcuuuccuauaaugcacgauagaacaaaaauuagacagcugccuaaccuucuccgaggauacgaacauaucagguuaucaacucacaacguuaucaaugcagaagaugcaccaggaggacccuacaaaauuggaaccucagggucuugcccuaacguuaccaauggaaacggauucuucgcaacaauggcuugggccgucccaaaaaacgacaaaaacaaaacagcaacaaauccauuaacaauagaaguaccauacauuuguacagaaggagaagaccaaauuaccguuuggggguuccacucugacaacgagacccaaauggcaaagcucuauggggacucaaagccccagaaguucaccucaucugccaacggagugaccacacauuacguuucacagauugguggcuucccaaaucaaacagaagacggaggacuaccacaaagugguagaauuguuguugauuacauggugcaaaaaucuggaaaaacaggaacaauuaccuaucaaagagguauuuuauugccucaaaagguguggugcgcaaguggcaggagcaagguaauaaaaggauccuugccuuuaauuggagaagcagauugccuccacgaaaaauacgguggauuaaacaaaagcaagccuuacuacacaggggaacaugcaaaggccauaggaaauugcccaauaugggugaaaacacccuugaagcuggccaauggaaccaaauauagaccuccugcaaaacuauuaaaggaaagggguuucuucggagcuauugcugguuucuuagaaggaggaugggaaggaaugauugcagguuggcacggauacacaucccauggggcacauggaguagcgguggcagcugaccuuaagagcacucaagaggccauaaacaagauaacaaaaaaucucaacucuuugagugagcuggaagugaagaaucuucaaagacuaagcggugccauggaugaacuccacaacgaaauacuagaacuagaugagaaaguggaugaucucagagcugauacaauaagcucacaaauagaacucgcaguccugcuuuccaaugaaggaauaauaaacagugaagaugaacaucucuuggcgcuugaaagaaagcugaagaaaaugcugggccccucugcuguagagauagggaauggaugcuuugaaaccaaacacaagugcaaccagaccugucucgacagaauagcugcugguaccuuugaugcaggagaauuuucucuccccaccuuugauucacugaauauuacugcugcaucuuuaaaugacgauggauuggauaaucauacuauacugcuuuacuacucaacugcugccuccaguuuggcuguaacacugaugauagcuaucuuuguuguuuauauggucuccagagacaauguuucuugcuccaucugucuauaa

SEQ ID NO: 58986 - RNA, 1755 nt, Artificial Sequence
  derived and/or modified CDS sequence (wt) from hemagglutinin__InfluenzaB__AGQ16324
augaaggcaauaauuguacuacucaugguaguaacauccaaugcagaucgaaucugcacugggauaacaucuucaaacucaccucauguggucaaaacagcuacucaaggggaggucaaugugacuggugugauaccacuaacaacaacaccaacaaaaucuuauuuugcaaaucucaaaggaacaaagaccagagggaaacuaugcccagacugucucaacuguacagaucuggauguggccuugggcaggccaaugugugugggaacuacaccuucugcgaaagcuucaauacuucacgaagucagaccuguuacauccgggugcuucccuauaaugcacgacagaacaaaaaucaggcaacuagccaaucuucucagaggauaugaaaauaucagguuaucaacccaaaacguuaucgaugcagaaaaagcaccaggaggacccuacagacuuggaaccucaggaucuugcccuaacgcuaccaguaaaagcggauuuuucgcaacaauggcuugggcugucccaaaggacaacaacaaaaaugcaacgaacccauuaacaguagagguaccauacauuugugcagaaggagaagaccaaauuacuguuuggggguuccauucagauaacaaaacccaaaugaagaaccucuauggagacucaaauccucaaaaguucaccucauccgcuaauggaguaaccacacauuauguuucucagauuggcggcuucccagaucaaacagaagacggaggacuaccacaaagcggcagaauugucguugauuacaugaugcaaaaaccugggaaaacaggaacaauugucuaucaaagagguguuuuguugccucaaaagguguggugcgcgaguggcaggagcaaaguaauaaaaggguccuugccuuuaauuggugaagcagauugccuucaugaaaaauacgguggauuaaacaaaagcaagccuuacuacacaggagaacaugcaaaagccauaggaaauugcccaauaugggugaaaacaccuuugaagcuugccaauggaaccaaauauagaccuccugcaaaacuauuaaaggaaagggguuucuucggagcuauugcugguuuccuagaaggaggaugggaaggaaugauugcagguuggcacggauacacaucucacggagcacauggaguggcaguugcugcagaccuuaagagcacacaagaagcuauaaacaagauaacaaaaaaucucaacucuuugagugagcuagaaguaaagaaucuucaaaggcuaaguggugccauggaugaacuccacaacgaaauacucgagcuggaugagaaaguggaugaucucagagcugacacuauaaguucacaaauagaacuugcagucuugcuuuccaacgaaggaauaauaaacagugaagaugagcaucuauuggcacuugagagaaaacuaaagaaaaugcugggucccucugcuguagacauagggaauggaugcuucgaaaccaaacacaaaugcaaccagaccugcuuagacaggauagcugcuggcaccuuuaaugcaggagaauuuucucuccccacuuuugauucauugaacauuacugcugcaucuuuaaaugaugauggauuggauaaccauacuauacugcucuauuacucaacugcugcuucuaguuuggcuguaacauugaugcuagcuauuuuuauuguuuauauggucuccagagacaacguuucaugcuccaucugucuauaa

SEQ ID NO: 58987 - RNA, 1755 nt, Artificial Sequence
  derived and/or modified CDS sequence (wt) from hemagglutinin__InfluenzaB__AGQ16325
augaaggcaauaauuguacuacucaugguaguaacauccaaugcagaucgaaucugcacugggauaacaucuucaaacucaccucauguggucaaaacagcuacucaaggggaggucaaugugacuggugugauaccacuaacaacaacaccaacaaaaucuuauuuugcaaaucucaaaggaacaaagaccagagggaaacuaugcccagacugucucaacuguacagaucuggauguggccuugggcaggccaaugugugugggaacuacaccuucugcgaaagcuucaauacuucacgaagucagaccuguuacauccgggugcuucccuauaaugcacgacagaacaaaaaucaggcagcuagccaaucuucucagaggauaugaaaauauuagguuaucaacccaaaacguuaucgaugcagaaaaagcaccaggaggacccuacagacuuggaaccucaggaucuugcccuaacgcuaccaguaaaagcggauuuuucgcaacaauggcuugggcugucccaaaggacaacaacaaaaaugcaacgaacccauuaacaguagaaguaccauacauuugugcagaaggagaagaccaaaucacuguuuggggguuccauucagauaacaaaacccaaaugaagaaccucuauggagacucaaauccucaaaaguucaccucaucugcuaauggaguaaccacacauuauguuucucagauuggcggcuucccagaucaaacagaagacggaggacuaccacaaagcggcagaauugucguugauuacaugaugcaaaaaccugggaaaacaggaacaauugucuaucaaagagguguuuuguugccucaaaagguguggugcgcgaguggcaggagcaaaguaauaaaaggguccuugccuuuaauuggugaagcagauugccuucaugaaaaauacgguggauuaaacaaaagcaagccuuacuacacaggagaacaugcaaaagccauaggaaauugcccaauaugggugaaaacaccuuugaagcuugccaauggaaccaaauauagaccuccugcaaaacuauuaaaggaaagggguuucuucggagcuauugcugguuuccuagaaggaggaugggaaggaaugauugcagguuggcacggauacacaucucacggagcacauggaguggcaguugcugcagaccuuaagagcacacaagaagcuauaaacaagauaacaaaaaaucucaacucguugagugagcuagaaguaaagaaucuucaaaggcuaaguggugccauggaugaacuccacaacgaaauacucgagcuggaugagaaaguggaugaucucagagcugacacuauaaguucacaaauagaacuugcagucuugcuuuccaacgaaggaauaauaaacagugaagaugagcaucuauuggcacuugagagaaaacuaaagaaaaugcugggucccucugcuguagacauaggaaauggaugcuucgaaaccaaacacaaaugcaaccagaccugcuuagacaggauagcugcuggcaccuuuaaugcaggagaauuuucucuccccacuuuugauucauugaacauuacugcugcaucuuuaaaugaugauggauuggauaaccauacuauacugcucuauuacucaacugcugcuucuaguuuggcuguaacauugaugcuagcuauuuuuauuguuuauauggucuccagagacaacguuucaugcuccaucugccuauaa

SEQ ID NO: 58988 - RNA, 1755 nt, Artificial Sequence
  derived and/or modified CDS sequence (wt) from hemagglutinin__InfluenzaB__AGQ16326
augaaggcaauaauuguacuacucaugguaguaacauccaaugcagaucgaaucugcacugggauaacaucuucaaacucaccucauguggucaaaacagcuacucaaggggaggucaaugugacuggugugauaccacuaacaacaacaccaacaaaaucuuauuuugcaaaucucaaaggaacaaagaccagagggaaacuaugcccagacugucucaacuguacagaucuggauguggccuugggcaggccaaugugugugggaacuacaccuucugcgaaagcuucaauacuucacgaagucagaccuguuacauccgggugcuucccuauaaugcacgacagaacaaagaucaggcaacuagccaaucuucucagaggauaugaaaauaucagguuaucaacccaaaauguuaucgaugcagaaaaagcaccaggaggacccuacagacuuggaaccucaggaucuugcccuaacgcuaccaguaaaagcggauuuuucgcaacaauggcuugggcugucccaaaggacaacaacaaaaaugcaacgaacccauuaacaguagaaguaccauacauuugugcagaaggagaagaccaaauuacuguuuggggguuccauucagauaacaaaacccaaaugaagaaccucuauggagacucaaauccucaaaaguucaccucaucugcuaauggaguaaccacacauuauguuucucagauuggcggcuucccagaucaaacagaagacggaggacuaccacaaagcggcagaauugucguugauuacaugaugcaaaaaccugggaaaacaggaacaauugucuaucaaagagguguuuuguugccucaaaagguguggugcgcgaguggcaggagcaaaguaauaaaaggguccuugccuuuaauuggugaagcagauugccuucaugaaaaauacgguggauuaaacaaaagcaagccuuacuacacaggagaacaugcaaaagccauaggaaauugcccaauaugggugaaaacaccuuugaagcuugccaauggaaccaaauauagaccuccugcaaaacuauuaaaggaaagggguuucuucggagcuauugcugguuuccuagaaggaggaugggaaggaaugauugcagguuggcacggauacacaucucacggagcacauggaguggcaguugcugcagaccuuaagagcacacaagaagcuauaaacaagauaacaaaaaaucucaacucguugagugagcuagaaguaaagaaucuucaaaggcuaaguggugccauggaugaacuccacaacgaaauacucgagcuggaugagaaaguggaugaucucagagcugacacuauaaguucacaaauagaacuugcagucuugcuuuccaacgaaggaauaauaaacagugaagaugagcaucuauuggcacuugagagaaaacuaaagaaaaugcugggucccucugcuguagacauaggaaauggaugcuucgaaaccaaacacaaaugcaaccagaccugcuuagacaggauagcugcuggcaccuuuaaugcaggagaauuuucucuccccacuuuugauucauugaacauuacugcugcaucuuuaaaugaugauggauuggauaaccauacuauacugcucuauuacucaacugcugcuucuaguuuggcuguaacauugaugcuagcuauuuuuauuguuuauauggucuccagagacaacguuucaugcuccaucugccuauaa

SEQ ID NO: 58989 - RNA, 1755 nt, Artificial Sequence; identical to SEQ ID NO: 58983
  derived and/or modified CDS sequence (wt) from hemagglutinin__InfluenzaB__AGQ16327

SEQ ID NO: 58990 - RNA, 1758 nt, Artificial Sequence
  derived and/or modified CDS sequence (wt) from hemagglutinin__InfluenzaB__AGQ16328
augaaggcaauaauuguacuacucaugguaguaacauccaaugcagaucgaaucugcacugggauaacaucgucaaacucaccacaugucgucaaaacugcuacucaaggggaggucaaugugaccgguguaauaccacugacaacaacacccaccaaaucucauuuugcaaaucucaaaggaacagaaaccagggggaaacuaugcccaaaaugccucaacugcacagaucuggacguagccuugggcagaccaaaaugcacggggaaaacacccucggcaagaguuucaauacuccaugaagucagaccuguuacaucugggugcuuuccuauaaugcacgauagaacaaaaauuagacagcugccuaaccuucuccgaggauacgaacauaucagguuaucaacucacaacguuaucaaugcagaaaaugcaccaggaggacccuacaaaauuggaaccucagggucuugcccuaacguuaccaauggaaacggauucuucgcaacaauggcuugggccgucccaaaaaacgacaaaaacaaaacagcaacaaauccauuaacaauagaaguaccauacauuuguacagaaggagaagaccaaauuaccguuuggggguuccacucugacaacgagacccaaauggcaaagcucuauggggacucaaauccccagaaguucaccucaucugccaacggagugaccacacauuacguuucacagauugguggcuucccaaaucaaacagaagacggaggacuaccacaaagugguagaauuguuguugauuacauggugcaaaaaucugggaaaacaggaacaauuaccuaucaaagagguauuuuauugccucaaaagguguggugcgcaaguggcaggagcaagguaauaaaaggauccuugccuuuaauuggagaagcagauugccuccacgaaaaauacgguggguuaaacaaaagcaagccuuacuacacaggggaacaugcaaaggccauaggaaauugcccaauaugggugaaaacacccuugaagcuggccaacggaaccaaauauagaccuccugcaaaacuauuaaaggaaagggguuucuucggagcuauugcugguuucuuagaaggaggaugggaaggaaugauugcagguuggcacggauacacaucccauggggcacauggaguagcaguggcagcugaccuuaagagcacucaagaggccauaaacaagauaacaaaaaaucucaacucuuugagugagcuggaaguaaagaaucuucaaagacuaagcggugccauggaugaacuccacaacgaaauacuagaacuagaugagaaaguggaugaucucagagcugauacaauaagcucacaaauagaacucgcaguccugcuuuccaaugaaggaauaauaaacagugaagaugaacaccucuuggcgcuugaaagaaagcugaagaaaaugcugggccccucugcuguagagauagggaauggaugcuuugaaaccaaacacaagugcaaccagaccugucucgacagaauagcugcugguaccuuugaugcaggagaauuuucucuccccacuuuugauucacugaacauuacugcugcaucuuuaaaugacgauggauuggauaaucauacuauacugcuuuacuacucaacugcugccuccaguuuggcuguaacacugaugauagcuaucuuuguuguuuauauggucuccagagacaauguuucuugcuccaucugucuauaa

SEQ ID NO: 58991 - RNA, 1758 nt, Artificial Sequence
  derived and/or modified CDS sequence (wt) from hemagglutinin__InfluenzaB__AGX15487
augaaggcaauaauuguacuacucaugguaguaacauccaaugcagaucgaaucugcacugggauaacaucgucaaacucaccccauguggucaaaacugccacucaaggggaggucaaugugacuggugugauaccacugacaacaacacccaccaaaucucauuuugcaaaucucaaaggaacaaaaaccagagggaaacuaugcccaaaaugccucaacugcacagaucuggacguggccuugggcagaccaaaaugcacggggaacauacccucggcaaaaguuucaauacuccaugaagucagaccuguuacaucugggugcuuuccuauaaugcacgacagaacaaaaauuagacagcugcccaaccuucucagaggauacgaacauaucagguuaucaacucauaacguuaucaaugcagaaaaggcaccaggaggacccuacaaaauuggaaccucagggucuugcccuaacguuaccaauggaaacggauuuuucgcaacaauggcuugggccgucccaaaaaacgacaacaacaaaacagcaacaaauucauuaacaauagaaguaccauacauuuguacagaaggagaagaccaaauuaccguuuggggguuccacucugauaacgaaacccaaauggcaaaacucuauggggacucaaagccccagaaguucaccucaucugccaacggagugaccacacauuacguuucacagauugguggcuucccaaaucaaacagaagacggaggacuaccacaaagugguagaauuguuguugauuacauggugcaaaaaucugggaaaacaggaacaauuaccuaucaaagagguauuuuauugccucaaaaaguguggugcgcaaguggcaggagcaagguaauaaaaggauccuugccuuuaauuggagaagcagauugccuccacgaaaaauacgguggauuaaacaaaagcaagccuuacuacacaggggaacaugcaaaggccauaggaaauugcccaauaugggugaaaacacccuugaagcuggccaauggaaccaaauauagaccuccugcaaaacuauuaaaggaaagggguuucuucggagcuauugcugguuucuuagaaggaggaugggaaggaaugauugcagguuggcacggauacacaucccauggggcacauggaguagcaguggcagcagaccuuaagagcacucaagaagccauaaacaagauaacaaaaaaucucaacucuuugagugagcuggaaguaaagaaucuucaaagacuaagcggugccauggaugaacuccacaacgaaauacuagaacuagacgagaaaguggaugaucucagagcugauacaauaagcucacaaauagaacucgcaguccugcuuuccaaugaaggaauaauaaacagugaagaugagcaucucuuggcgcuugaaagaaagcugaagaaaaugcugggccccucugcuguagagauagggaauggaugcuucgaaaccaaacacaagugcaaccagaccugucucgacagaauagcugcugguaccuuugaugcaggagaauuuucucuccccacuuuugauucacugaauauuacugcugcaucuuuaaaugacgauggauuggauaaucauacuauacugcuuuauuacucaacugcugccuccaguuuggcuguaacauugaugauagcuaucuuuguuguuuauauggucuccagagacaauguuucuugcuccaucugucuauaa

SEQ ID NO: 58992 - RNA, 1758 nt, Artificial Sequence
  derived and/or modified CDS sequence (wt) from hemagglutinin__InfluenzaB__AGX15496
augaaggcaauaauuguacuacucaugguaguaacauccaaugcagaucgaaucugcacugggauaacaucgucaaacucaccccauguggucaaaacugcuacucaaggggaggucaaugugacuggugugauaccacugacaacaacacccaccaaaucucauuuugcaaaucucaaaggaacaaaaaccagagggaaacuaugcccaaaaugccucaacugcacagaucuggacguggccuugggcagaccaaaaugcacggggaacauacccucggcaaaaguuucaauacuccaugaagucagaccuguuacaucugggugcuuuccuauaaugcacgacagaacaaaaauuagacagcugcccaaucuucucagaggauacgaacauaucagguuaucaacucauaacguuaucaaugcagaaaaggcaccaggaggacccuacaaaauuggaaccucagggucuugcccuaacguuaccaauggaaacggauuuuucgcaacaauggcuugggccgucccaaaaaacgacaacaacaaaacagcaacaaauucauuaacaauagaaguaccauacauuuguacagaaggagaagaccaaauuaccguuuggggguuccacucugauaacgaaacccaaauggcaaaacucuauggggacucaaagccccagaaguucaccucaucugccaacggagugaccacacauuacguuucacagauugguggcuucccaaaucaaacagaagacggaggacuaccacaaagugguagaauuguuguugauuacauggugcaaaaaucugggaaaacaggaacaauuaccuaucaaagagguauuuuauugccucaaaaaguguggugcgcaaguggcaggagcaagguaauaaaaggauccuugccuuuaauuggagaagcagauugccuccacgaaaaauacgguggauuaaacaaaagcaagccuuacuacacaggggaacaugcaaaggccauaggaaauugcccaauaugggugaaaacacccuugaagcuggccaauggaaccaaauauagaccuccugcaaaacuauuaaaggaaagggguuucuucggagcuauugcugguuucuuagaaggaggaugggaaggaaugauugcagguuggcacggauacacaucccauggggcacauggaguagcaguggcagcagaccuuaagaguacucaagaagccauaaacaagauaacaaaaaaucucaacucuuugagugagcuggaaguaaagaaucuucaaagacuaagcggugccauggaugaacuccacaacgaaauacuagaacuagacgagaaaguggaugaucucagagcugauacaauaagcucacaaauagaacucgcagucuugcuuuccaaugaaggaauaauaaacagugaagaugagcaucucuuggcgcuugaaagaaagcugaagaaaaugcugggccccucugcuguggagauagggaauggaugcuucgaaaccaaacacaagugcaaccagaccugucucgacagaauagcugcugguaccuuugaugcaggagaauuuucucucccuacuuuugauucacugaauauuacugcugcaucuuuaaaugacgauggauuggauaaucauacuauacugcuuuacuacucaacugcugccuccaguuuggcuguaacauugaugauagcuaucuuuguuguuuauauggucuccagagacaauguuucuugcuccaucugucuauaa

SEQ ID NO: 58993 - RNA, 1758 nt, Artificial Sequence
  derived and/or modified CDS sequence (wt) from hemagglutinin__InfluenzaB__AGX15518
augaaggcaauaauuguacuacucaugguaguaacauccaaugcagaucgaaucugcacugggauaacaucgucaaacucaccccauguggucaaaacugcuacucaaggggaggucaaugugacuggugugauaccacugacaacagcacccaccaaaucucauuuugcaaaucucaaaggaacaaaaaccagagggaaacuaugcccaaaaugccucaacugcacagaucuggacguggccuugggcagaccaaaaugcacggggaacauacccucggcagaaguuucaauacuccaugaagucagaccuguuaccucugggugcuuuccuauaaugcacgacagaacaaaaauuagacagcugcccaaccuucucagaggauacgaacauaucagauuaucaacucauaacguuaucaaugcagaaaaggcaccaggaggacccuacaaaauuggaaccucagggucuugcccuaauguuaccaauggaaacggauuuuucgcaacaauggcuugggccgucccaaaaaacgacaacaacaaaacagcaacaaauucauuaacaauagaaguaccauacauuuguacagaaggagaagaccaaauuaccauuuggggguuccacucugauaacgaaacccaaauggcaaaacucuauggggacucaaagccccagaaguucaccucaucugccaacggagugaccacacauuacguuucacagauugguggcuucccaaaucaaacagaagacggaggacuaccacaaagugguagaauuguuguugauuacauggugcaaaaaccugggaaaacaggaacaauuaccuaucaaagagguauuuuauugccucaaaaaguguggugugcaaguggcaggagcaagguaauaaaaggauccuugcccuuaauuggagaagcagauugccuccacgaaaaauacgguggauuaaacaaaagcaagccuuacuacacaggggaacaugcaaaggccauaggaaauugcccaauaugggugaaaacacccuugaagcuggccaauggaaccaaauauagaccuccugcaaaacuauuaaaggaaagggguuucuucggagcuauugcugguuucuuagaaggaggaugggaaggaaugauugcagguuggcacggauacacaucccauggggcacauggaguagcaguggcagcagaccuuaagagcacucaagaagccauaaacaagauaacaaaaaaucucaacucuuugagugagcuggaaguaaagaaucuucaaagacuaagcagugccauggaugaacuccacaacgaaauacuagaacuagacgagaaaguggaugaucucagagcugauacaauaagcucacaaauagaacucgcaguccugcuuuccaaugaaggaauaauaaacagugaagaugagcaucucuuggcgcuugaaagaaagcugaagaaaaugcugggccccucugcuguagagauagggaauggaugcuucgaaaccaaacacaagugcaaccagaccugucuugacagaauagcugcugguaccuuugaugcaggagaauuuucucuccccacuuuugauucacugaauauuacugcugcaucuuuaaaugaugauggauuggauaaucauacuauacugcuuuacuacucaacugcugccuccaguuuggcuguaacauugaugauagcuaucuuuguuguuuauauggucuccagagacaauguuucuugcuccaucugucuauaa

SEQ ID NO: 58994 - RNA, 1758 nt, Artificial Sequence
  derived and/or modified CDS sequence (wt) from hemagglutinin__InfluenzaB__AGX15529
augaaggcaauaauuguacuacucaugguaguaacauccaaugcagaucgagucugcacugggauaacaucgucaaacucaccccauguggucaaaacugcuacucaaggggaggucaaugugacuggugugauaccacugacaacaacacccaccaaaucucauuuugcaaaucucaaaggaacaaaaaccagagggaaacuaugcccaaaaugccucaacugcacagaucuggacguggccuugggcagaccaaaaugcacggggaacauacccucggcagaaguuucaauacucuaugaagucagaccuguuaccucugggugcuuuccuauaaugcacgacagaacaaaaauuagacagcugcccaaccuucucagaggauacgaacauaucagauuaucaacucauaacguuaucaaugcagaaaaggcaccaggaggacccuacaaaauuggaaccucagggucuugcccuaauguuaccaauggaaacggauuuuucgcaacaauggcuugggccgucccaaaaaacgacaacaacaaaacagcaacaaauucauuaacaauagaaguaccauacauuuguacagaaggagaagaccaaauuaccauuuggggguuccacucugauaacgaaacccaaauggcaaaacucuauggggacucaaagccccagaaguucaccucaucugccaacggagugaccacacauuacguuucacagauugguggcuucccaaaucaaacagaagacggaggacuaccacaaagugguagaauuguuguugauuacauggugcaaaaaucugggaaaacaggaacaauuaccuaucaaagagguauuuuauugccucaaaaaguguggugcgcaaguggcaggagcaagguaauaaaaggaaccuugcccuuaauuggagaagcagauugccuccacgaaaaauacgguggauuaaacaaaagcaagccuuacuacacaggggaacaugcaaaggccauaggaaauugcccaauaugggugaaaacacccuugaagcuggccaauggaaccaaauauagaccuccugcaaaacuauuaaaggaaagggguuucuucggagcuauugcugguuucuuagaaggaggaugggaaggaaugauugcagguuggcacggauacacaucccauggggcacauggaguagcaguggcagcagaccuuaagagcacucaagaagccauaaacaagauaacaaaaaaucucaacucuuugagugagcuggaaguaaagaaucuucaaagacuaagcggugccauggaugaacuccacaacgaaauacuagaacuagacgagaaaguggaugaucucagagcugauacaauaagcucacaaauagaacucgcaguccugcuuuccaaugaaggaauaauaaacagugaagaugagcaucucuuggcgcuugaaagaaagcugaagaaaaugcugggccccucugcuguagagauagggaauggaugcuucgaaaccaaacacaagugcaaccagaccugucuugacagaauagcugcugguaccuuugaugcaggagaauuuucucuccccacuuuugauucacugaauauuacugcugcaucuuuaaaugacgauggauuggauaaucauacuauacugcuuuacuacucaacugcugccuccaguuuggcuguaacauugaugauagcuaucuuuguuguuuauauggucuccagagacaauguuucuugcuccaucugucuauaa

SEQ ID NO: 58995 - RNA, 1758 nt, Artificial Sequence
  derived and/or modified CDS sequence (wt) from hemagglutinin__InfluenzaB__AGX15541
augaaggcaauaauuguacuacucaugguaguaacauccaaugcagaucgaaucugcacugggauaacaucgucaaacucaccacauguugucaaaacugcuacucaaggggaggucaaugugacugguguaauaccacugacaacaacacccaccaaaucucauuuugcaaaucucaaaggaacagaaaccagagggaaacuaugcccaaaaugccucaacugcacagaucuggacguggccuugggcagaccaaaaugcacggggaacauacccucggcaagaguuucaauacuccaugaagucagaccuguuacaucugggugcuuuccuauaaugcacgacagaacaaagauuagacagcugccuaaccuucucagaggauacgaacauaucagguuaucaacucauaacguuaucaaugcagaaaaugcaccaggaggacccuacaaaauuggaaccucagggucuugcccuaacguuaccaauggaaacggauuuuucacaacaauggcuugggccgucccaaaaaacgacaacaacaaaacagcaacaaauucauuaacaauagaaguaccauacauuuguacagaaggagaagaccaaauuaccguuuggggguuccacucugauaacgagacccaaauggcaaagcucuauggggacucaaagccccagaaguucaccucaucugccaacggagugaccacacauuacguuucacagauugguggcuucccaaaucaaacagaagacggaggacuaccacaaagugguagaauuguuguugauuacauggugcaaaaaucugggaaaacaggaacaauuaccuaucaaagagguauuuuauugccucaaaagguguggugcgcaaguggcaggagcaagguaauaaaaggauccuugccuuuaauuggagaagcagauugccuccacgaaaaauacgguggauuaaacaaaagcaagccuuacuacacaggggaacaugcaaaggccauaggaaauugcccaauaugggugaaaacacccuugaagcuggccaauggaaccaaauauagaccuccugcaaaacuauuaaaggaaagggguuucuucggagcuauugcugguuucuuagaaggaggaugggaaggaaugauugcagguuggcacggauacacaucccauggggcacauggaguagcgguggcagcagaccuuaagagcacucaagaggccauaaacaagauaacaaaaaaucucaacucuuugagugagcuggaaguaaagaaucuucaaagacuaagcggugccauggaugaacuccacaacgaaauacuagaacuagacgagaaaguggaugaucucagagcugauacaauaagcucacaaauagaacucgcaguccugcuuuccaaugaaggaauaauaaacagugaagaugagcaucucuuggcgcuugaaagaaagcugaagaaaaugcugggccccucugcuguagagauagggaauggaugcuuugaaaccaaacacaagugcaaccagaccugucucgacagaauagcugcugguaccuuugaugcaggagaauuuucucuccccaccuuugauucacugaauauuacugcugcaucuuuaaaugacgauggauuggauaaucauacuauacugcuuuauuacucaacugcugccuccaguuuggcuguaacauugaugauagcuaucuuuguuguuuauauggucuccagagacaauguuucuugcuccaucugucuauaa

SEQ ID NO: 58996 - RNA, 1758 nt, Artificial Sequence
  derived and/or modified CDS sequence (wt) from hemagglutinin__InfluenzaB__AGX15552
augaaggcaauaauuguacuacucaugguaguaacauccaaugcagaucgaaucugcacugggauaacaucgucaaacucaccacauguugucaaaacugcuacucaaggggaggucaaugugacugguguaauaccacugacaacaacacccaccaaaucucauuuugcaaaucucaaaggaacagaaaccagagggaaacuaugcccaaaaugccucaacugcacagaucuggacguggccuugggcagaccaaaaugcacggggaacauacccucggcaagaguuucaauacuccaugaagucagaccuguuacaucugggugcuuuccuauaaugcacgacagaacaaagauuagacagcugccuaaccuucucagaggauacgaacauaucagguuaucaacucauaacguuaucaaugcaaaaaaugcaccaggaggacccuacaaaauuggaaccucagggucuugcccuaacguuaccaauggaaacggauuuuucgcaacaauggcuugggccgucccaaaaaacgacaacaacaaaacagcaacaaauucauuaacaauagaaguaccauacauuuguacagaaggagaagaccaaauuaccguuuggggguuccacucugauaacgagacccaaauggcaaagcucuauggggacucaaagccccagaaguucaccucaucugccaacggagugaccacacauuacguuucacagauugguggcuucccaaaucaaacagaagacggaggacuaccacaaagugguagaauuguuguugauuacauggugcaaaaaucugggaaaacaggaacaauuaccuaucaaagagguauuuuauugccucaaaagguguggugcgcaaguggcaggagcaagguaauaaaaggauccuugccuuuaauuggagaagcagauugccuccacgaaaaauacgguggauuaaacaaaagcaagccuuacuacacaggggaacaugcaaaggccauaggaaauugcccaauaugggugaaaacacccuugaagcuggccaauggaaccaaauauagaccuccugcaaaacuauuaaaggaaagggguuucuucggagcuauugcugguuucuuagaaggaggaugggaaggaaugauugcagguuggcacggauacacaucccauggggcacauggaguagcgguggcagcagaccuuaagagcacucaagaggccauaaacaagauaacaaaaaaucucaacucuuugagugagcuggaaguaaagaaucuucaaagacuaagcggugccauggaugaacuccacaacgaaauacuagaacuagacgagaaaguggaugaucucagagcugauacaauaagcucacaaauagaacucgcaguccugcuuuccaaugaaggaauaauaaacagugaagaugagcaucucuuggcgcuugaaagaaagcugaagaaaaugcugggccccucugcuguagagauagggaauggaugcuuugaaaccaaacacaagugcaaccagaccugucucgacagaauagcugcugguaccuuugaugcaggagaauuuucucuccccaccuuugauucacugaauauuacugcugcaucuuuaaaugacgauggauuggauaaucauacuauacugcuuuauuacucaacugcugccuccaguuuggcuguaacauugaugauagcuaucuuuguuguuuauauggucuccagagacaauguuucuugcuccaucugucuauaa

SEQ ID NO: 58997 - RNA, 1758 nt, Artificial Sequence
  derived and/or modified CDS sequence (wt) from hemagglutinin__InfluenzaB__AGX15563
augaaggcaauaauuguacuacucaugguaguaacauccaaugcagaucgaaucugcacugggauaacaucgucaaacucaccacauguugucaaaacugcuacucaaggggaggucaaugugacugguguaauaccacugacaacaacacccaccaaaucucauuuugcaaaucucaaaggaacagaaaccagagggaaacuaugcccaaaaugccucaacugcacagaucuggacguggccuugggcagaccaaaaugcacggggaacauacccucggcaagaguuucaauacuccaugaagucagaccuguuacaucugggugcuuuccuauaaugcacgacagaacaaaaauuagacagcugccuaaccuucucagaggauacgaacauaucagguuaucaacucauaacguuaucaaugcagaaaaugcaccaggaggacccuacaaaauuggaaccucagggucuugcccuaacguuaccaauggaaacggauuuuucgcaacaauggcuugggccgucccaaaaaacgacaacaacaaaacagcaacaaauucauugacaauagaaguaccauacauuuguacagaaggagaagaccaaauuaccguuuggggguuccacucugauaacgaagcccaaauggcaaagcucuauggggacucaaagccccagaaguucaccucaucugccaacggagugaccacacauuacguuucacagauugguggcuucccaaaucaaacagaagacggaggacuaccacaaagugguagaauuguuguugauuacauggugcaaaaaucugggaaaacaggaacaauuaccuaucaaagagguauuuuauugccucaaaaaguguggugcgcaaguggcaggagcaagguaauaaaaggauccuugccuuuaauuggagaagcagauugccuccacgaaaaauacgguggauuaaacaaaagcaagccuuacuacacaggggaacaugcaaaggccauaggaaauugcccaauaugggugaaaacacccuugaagcuggccaauggaaccaaauauagaccuccugcaaaacuauuaaaggaaagggguuucuucggagcuauugcugguuucuuagaaggaggaugggaaggaaugauugcagguuggcacggauacacaucccauggggcacauggaguagcgguggcagcagaccuuaagagcacucaagaggccauaaacaagauaacaaaaaaucucaacucuuugagugagcuggaaguaaagaaucuucaaagacuaagcggugccauggaugaacuccacaacgaaauacuagaacuagacgagaaaguggaugaucucagagcugauacaauaagcucacaaauagaacucgcaguccugcuuuccaaugaaggaauaauaaacagugaagaugagcaucucuuggcgcuugaaagaaagcugaagaaaaugcugggccccucugcuguagagauagggaauggaugcuuugagaccaaacacaaaugcaaccagaccugucucgacagaauagcugcugguaccuuugaugcaggagaauuuucucuccccacuuuugauucacugaauauuacugcugcaucuuuaaaugacgauggauuggauaaucauacuauacugcuuuacuacucaacugcugccuccaguuuggcuguaacauugaugauagcuaucuuuguuguuuauauggucuccagagacaauguuucuugcuccaucugucuauaa

SEQ ID NO: 58998 - RNA, 1758 nt, Artificial Sequence
  derived and/or modified CDS sequence (wt) from hemagglutinin__InfluenzaB__AGX15574
augaaggcaauaauuguacuacucaugguaguaacauccaaugcagaucgaaucugcacugggauaacaucgucaaacucaccacauguugucaaaacugcuacucaaggggaggucaaugugacugguguaauaccacugacaacaacacccaccaaaucucauuuugcgaaucucaaaggaacagaaaccagagggaaacuaugcccaaaaugccucaacugcacagaucuggacguggccuugggcagaccaaaaugcacggggaacauacccucggcaagaguuucaauacuccaugaagucagaccuguuacaucugggugcuuuccuauaaugcacgacagaacaaagauuagacagcugccuaaccuucucagaggauacgaacauaucagguuaucaacucauaacguuaucaaugcagaaaaugcaccaggaggacccuacaaaauuggaaccucagggucuugcccuaacguuaccaauggaaacggauuuuucgcaacaauggcuugggccgucccaaaaaacgacaacaacaaaacagcaacaaauucauuaacaauagaaguaccauacauuuguacagaaggagaagaccaaauuaccguuuggggguuccacucugauaacgaggcccaaauggcaaagcucuauggggacucaaagccccagaaguucaccucaucugccaacggagugaccacacauuacguuucacagauugguggcuucccaaaucaaacagaagacggaggacuaccacaaagugguagaauuguuguugauuacauggugcaaaaaucugggaaaacaggaacaauuaccuaucaaagagguauuuuauugccucaaaagguguggugcgcaaguggcaggagcaagguaauaaaaggauccuugccuuuaauuggagaagcagauugccuccacgaaaaauacgguggauuaaacaaaagcaagccuuacuacacaggggaacaugcaaaggccauaggaaauugcccaauaugggugaaaacacccuugaagcuggccaauggaaccaaauauagaccuccugcaaaacuauuaaaggaaagggguuucuucggagcuauugcugguuucuuagaaggaggaugggaaggaaugauugcagguuggcacggauacacaucccauggggcacauggaguagcgguggcagcagaccuuaagagcacucaagaggccauaaacaagauaacaaaaaaucucaacucuuugagugagcuggaaguaaagaaucuucaaagacuaagcggugccauggaugaacuccacaacgaaauacuagaacuagacgagaaaguggaugaucucagagcugauacaauaagcucacaaauagaacucgcaguccugcuuuccaaugaaggaauaauaaacagugaagaugagcaucucuuggcgcuugaaagaaagcugaagaaaaugcugggccccucugcuguagagauagggaauggaugcuuugaaaccaaacacaagugcaaccagaccugucucgacagaauagcugcugguaccuuugaugcaggagaauuuucucuccccaccuuugauucacugaauauuacugcugcaucuuuaaaugacgauggauuggauaaucauacuauacugcuuuauuacucaacugcugccuccaguuuggcuguaacauugaugauagcuaucuuuguuguuuauauggucuccagagacaauguuucuugcuccaucugucuauaa

SEQ ID NO: 58999 - RNA, 1758 nt, Artificial Sequence
  derived and/or modified CDS sequence (wt) from hemagglutinin__InfluenzaB__AGX15607
augaaggcaauaauuguacuacucaugguaguaacauccaaugcagaucgaaucugcacugggauaacaucgucaaacucaccacauguugucaaaacugcuacucaaggggaggucaaugugacugguguaauaccacugacaacaacacccaccaaaucucauuuugcaaaucucaaaggaacagaaaccagagggaaacuaugcccaaaaugccucaacugcacagaucuggacguggccuugggcagaccaaaaugcacggggaacacacccucggcaagaguuucaauacuccaugaagucagaccuguuacaucugggugcuuuccuauaaugcacgacagaacaaaaauuagacagcugccuaaccuucucagaggauacgaacauaucagguuaucaacucauaacguuaucaaugcagagaaugcaccaggaggacccuacaaaauuggaaccucagggucuugcccuaacguuaccaauggaaacggauuuuucgcaacaauggcuugggccgucccaaaaaacgacaacaacaaaacagcaacaaauucauuaacaauagaaguaccauacauuuguacagaaggagaagaccaaauuaccguuuggggguuccacucugauaacgaaacccaaauggcaaagcucuauggggacucaaagccccagaaguucaccucaucugccaacggaguaaccacacauuacguuucacagauugguggcuucccaaaucaaacagaagacggaggacuaccacaaagugguagaauuguuguugauuacauggugcaaaaaucugggaaaacaggaacaauuaccuaucaaagagguauuuuauugccucaaaaaguguggugugcaaguggcaggagcaagguaauaaaaggauccuugccuuuaauuggagaagcagauugccuccacgaaaaauacgguggauuaaacaaaagcaagccuuacuacacaggggaacaugcaaaggccauaggaaauugcccaauaugggugaaaacacccuugaagcuggccaauggaaccaaauauagaccuccugcaaaacuauuaaaggaaagggguuucuucggagcuauugcugguuucuuagaaggaggaugggaaggaaugauugcagguuggcacggauacacaucccauggggcacauggaguagcgguggcagcagaccuuaaaagcacucaagaggccauaaacaagauaacaaaaaaucucaacucuuugagugagcuggaaguaaagaaucuucaaagacuaagcggugccauggaugaacuccacaacgaaauacuagaacuagacgagaaaguggaugaucucagagcugauacaauaagcucacaaauagaacucgcaguccugcuuuccaaugaaggaauaauaaacagugaagaugagcaucucuuggcgcuugaaagaaagcugaagaaaaugcugggccccucugcuguagagauagggaauggaugcuuugaaaccaaacacaagugcaaccagaccugucucgacagaauagcugcugguaccuuugaugcaggggaauuuucucuccccaccuuugauucacuaaauauuacugcugcaucuuuaaaugacgauggauuggauaaucauacuauacugcuuuacuacucaacugcugccuccaguuuggcuguaacauugaugauagcuaucuuuguuguuuauauggucuccagagacaauguuucuugcuccaucugucuauaa

SEQ ID NO: 59000 - RNA, 1758 nt, Artificial Sequence
  derived and/or modified CDS sequence (wt) from hemagglutinin__InfluenzaB__AGX15629
augaaggcaauaauuguacuacucaugguaguaacauccaaugcagaucgaaucugcacugggauaacaucgucaaacucaccacauguugucaaaacugcuacucaaggggaggucaaugugacugguguaauaccacugacaacaacacccaccaaaucucauuuugcaaaucucaaaggaacagaaaccagagggaaacuaugcccaaaaugccucaacugcacagaucuggacguggccuugggcagaccaaaaugcacggggaacauacccucggcaagaguuucaauacuccaugaagucagaccuguuacaucugggugcuuuccuauaaugcacgacagaacaaaaauuagacagcugccuaaccuucucagaggauacgaacauaucagguuaucaacucauaacguuaucaaugcagaaaaugcaccaggaggacccuacaaaauuggaaccucagggucuugcccuaacguuaccaauggaaacggauuuuuugcaacaauggcuugggcugucccaaaaaacgacaacaacaaaacagcaacaaauucauuaacaauagaaguaccauacauuuguacagagggagaagaccaaauuaccguuuggggguuccacucugauaacgaaauccaaauggcaaagcucuauggggacucaaagccccagaaguucaccucaucugccaacggagugaccacacauuacguuucacagauugguggcuucccaaaucaaacagaagacggaggacuaccacaaagugguagaauuguuguugauuacauggugcaaaaaucugggaaaacaggaacaauuaccuaucaaagagguauuuuauugccucaaaaaguguggugcacaaguggcaggagcaagguaauaaaaggauccuugccuuuaauuggagaagcagauugccuccacgaaaaauacgguggauuaaacaaaagcaagcccuacuacacaggggaacaugcaaaggccauaggaaauugcccaauaugggugaaaacacccuugaagcuggccaauggaaccaaauauagaccuccugcaaaacuauuaaaggaaagggguuucuucggagcuauugcugguuucuuagaaggaggaugggaaggaaugauugcagguuggcacggauacacaucccauggggcacauggaguagcgguggcagcagaccuuaaaagcacucaagaggccauaaacaagauaacaaaaaaucucaacucuuugagugagcuggaaguaaagaaucuucaaagacuaaguggugccauggaugaacuccacaacgaaauacuagaacuagacgagaaaguggaugaucucagagcugauacaauaagcucacaaauagaacucgcaguccugcuuuccaaugaaggaauaauaaacagugaagaugagcaucucuuggcgcuugaaagaaagcugaagaaaaugcugggccccucugcuguagagauagggaauggaugcuuugaaaccaaacacaagugcaaccagaccugucucgacagaauagcugcugguaccuuugaugcaggagaauuuucucuccccaccuuugauucacugaauauuacugcugcaucuuuaaaugacgauggauuggauaaucauacuauacugcuuuacuacucaacugcugccuccaguuuggcuguaacauugaugauagcuaucuuuguuguuuauauggucuccagagacaauguuucuugcuccaucugucuauaa

SEQ ID NO: 59001 - RNA, 1758 nt, Artificial Sequence
  derived and/or modified CDS sequence (wt) from hemagglutinin__InfluenzaB__AGX15651
augaaggcaauaauuguacuacucaugguaguaacauccaaugcagaucgaaucugcacugggauaacaucgucaaacucaccacaugucgucaaaacugcuacucaaggggaggucaaugugacugguguaauaccacugacaacaacacccaccaaaucucauuuugcaaaucucaaaggaacagaaaccagggggaaacuaugcccaaaaugccucaacugcacagaucuggacguagccuugggcagaccaaaaugcacggggaaaauacccucggcaagaguuucaauacuccaugaagucagaccuguuacaucugggugcuuuccuauaaugcacgacagaacaaaaauuagacagcugccuaaccuucuccgaggauacgaacauaucagguuaucaacucauaacguuaucaaugcagaaaaugcaccaggaggacccuacaaaauuggaaccucagggucuugcccuaacauuaccaauggaaacggauuuuucgcaacaauggcuugggccgucccaaaaaacgacaaaaacaaaacagcaacaaauccauuaacaauagaaguaccauacauuuguacagaaggagaagaccaaauuaccguuuggggguuccacucugacaacgagacccaaauggcaaagcucuauggggacucaaagccccagaaguucaccucaucugccaacggagugaccacacauuacguuucacagauugguggcuucccaaaucaaacagaagacgggggacuaccacaaagugguagaauuguuguugauuacauggugcaaaaaucugggaaaacaggaacaauuaccuaucaaagggguauuuuauugccucaaaagguguggugcgcaaguggcaggagcaagguaauaaaaggauccuugccuuuaauuggagaagcagauugccuccacgaaaaauacgguggauuaaacaaaagcaagccuuacuacacaggggaacaugcaaaggccauaggaaauugcccaauaugggugaaaacacccuugaagcuggccaauggaaccaaauauagaccuccugcaaaacuauuaaaggaaagggguuucuucggagcuauugcugguuucuuagaaggaggaugggaaggaaugauugcagguuggcacggauacacaucccauggggcacauggaguagcgguggcagcagaccuuaagagcacucaagaggccauaaacaagauaacaaaaaaucucaacucuuugagugagcuggaaguaaagaaucuucaaagacuaagcggugccauggaugaacuccacaacgaaauacuagaacuagaugagaaaguggaugaucucagagcugauacaauaagcucacaaauagaacucgcaguccugcuuuccaaugaaggaauaauaaacagugaagaugaacaucucuuggcgcuugaaagaaagcugaagaaaaugcugggccccucugcuguagagauagggaauggaugcuuugaaaccaaacacaagugcaaccagaccugucucgacagaauagcugcugguaccuuugaugcaggagaauuuucucuccccaccuuugauucacugaauauuacugcugcaucuuuaaaugacgauggauuggauaaucauacuauacugcuuuacuacucaacugcugccuccaguuuggcuguaacacugaugauagcuaucuuuguuguuuauauggucuccagagacaauguuucuugcuccaucugucuauaa

SEQ ID NO: 59002 - RNA, 1758 nt, Artificial Sequence
  derived and/or modified CDS sequence (wt) from hemagglutinin__InfluenzaB__AGX15675
augaaggcaauaauuguacuacucaugguaguaacauccaaugcagaucgaaucugcacugggauaacaucgucaaacucaccacaugucgucaaaacugcuacucaaggggaggucaaugugacugguguaauaccacugacaacaacacccaccaaaucucauuuugcaaaucucaaaggaacagaaaccagggggaaacuaugcccaaaaugccucaacugcacagaucuggacguagccuugggcagaccaaaaugcacggggaaaauacccucggcaagaguuucaauacuccaugaagucagaccuguuacaucugggugcuuuccuauaaugcacgacagaacaaaaauuagacagcugccuaaccuucuccgaggauacgaacauaucagguuaucaacucauaacguuaucaaugcagaaaaugcaccaggaggacccuacaaaauuggaaccucagggucuugcccuaacauuaccaauggaaacggauuuuucgcaacaauggcuugggccgucccaaaaaacgacaaaaacaaaacagcaacaaauccauuaacaauagaaguaccauacauuuguacagaaggagaagaccaaauuaccguuuggggguuccacucugacaacgagacccaaauggcaaagcucuauggggacucaaagccccagaaguucaccucaucugccaacggagugaccacacauuacguuucacagauugguggcuucccaaaucaaacagaagacggagggcuaccacaaagugguagaauuguuguugauuacauggugcaaaaaucugggaaaacaggaacaauuaccuaucaaagagguauuuuauugccucaaaagguguggugcgcaaguggcaggagcaagguaauaaaaggauccuugccuuuaauuggagaagcagauugccuccacgaaaaauacgguggauuaaacaaaagcaagccuuacuacacaggggaacaugcaaaggccauaggaaauugcccaauaugggugaaaacacccuugaagcuggccaauggaaccaaauauagaccuccugcaaaacuauuaaaggaaagggguuucuucggagcuauugcugguuucuuagaaggaggaugggaaggaaugauugcagguuggcacggauacacaucccauggggcacauggaguagcgguggcagcagaccuuaagagcacucaagaggccauaaacaagauaacaaaaaaucucaacucuuugagugagcuggaaguaaagaaucuucaaagacuaagcggugccauggaugaacuccacaacgaaauacuagaacuagaugagaaaguggaugaucucagagcugauacaauaagcucacaaauagaacucgcaguccugcuuuccaaugaaggaauaauaaacagugaagaugaacaucucuuggcgcuugaaagaaagcugaagaaaaugcugggccccucugcuguagagauagggaauggaugcuuugaaaccaaacacaagugcaaccagaccugucucgacagaauagcugcugguaccuuugaugcaggagaauuuucucuccccaccuuugauucacugaauauuacugcugcaucuuuaaaugacgauggauuggauaaucauacuauacugcuuuacuacucaacugcugccuccaguuuggcuguaacacugaugauagcuaucuuuguuguuuauauggucuccagagacaauguuucuugcuccaucugucuauaa

SEQ ID NO: 59003 - RNA, 1758 nt, Artificial Sequence
  derived and/or modified CDS sequence (wt) from hemagglutinin__InfluenzaB__AGX15686
augaaggcaauaauuguacuacucaugguaguaacauccaaugcagaucgaaucugcacugggauaacaucgucaaacucaccacaugucgucaaaacugcuacucaaggggaggucaaugugacugguguaauaccacugacaacaacacccaccaaaucucauuuugcaaaucucaaaggaacagaaaccagggggaaacuaugcccaaaaugccucaacugcacagaucuggacguagccuugggcagaccaaaaugcacggggaaaauacccucggcaagaguuucaauacuccaugaagucagaccuguuacaucugggugcuuuccuauaaugcacgacagaacaaaaauuagacagcugccuaaccuucuccgaggauacgaacauaucagguuaucaacucauaacguuaucaaugcagaaaaugcaccaggaggacccuacaaaauuggaaccucagggucuugcccuaacauuaccaauggaaacggauuuuucgcaacaauggcuugggccgucccaaaaaacgacaaaaacaaaacagcaacaaauccauuaacaauagaaguaccauacauuuguacagaaggagaagaccaaauuaccguuuggggguuccacucugacaacgagacccaaauggcaaagcucuauggggacucaaagccccagaaguucaccucaucugccaacggagugaccacacauuacguuucacagauugguggcuucccaaaucaaacagaagacggaggacuaccacaaagugguagaauuguuguugauuacauggugcaaaaaucugggaaaacaggaacaauuaccuaucaaagggguauuuuauugccucaaaagguguggugcgcaaguggcaggagcaagguaauaaaaggauccuugccuuuaauuggagaagcagauugccuccacgaaaaauacgguggauuaaacaaaagcaagccuuacuacacaggggaacaugcaaaggccauaggaaauugcccaauaugggugaaaacacccuugaagcuggccaauggaaccaaauauagaccuccugcaaaacuauuaaaggaaagggguuucuucggagcuauugcugguuucuuagaaggaggaugggaaggaaugauugcagguuggcacggauacacaucccauggggcacauggaguagcgguggcagcagaccuuaagagcacucaagaggccauaaacaagauaacaaaaaaucucaacucuuugagugagcuggaaguaaagaaucuucaaagacuaagcggugccauggaugaacuccacaacgaaauacuagaacuagaugagaaaguggaugaucucagagcugauacaauaagcucacaaauagaacucgcaguccugcuuuccaaugaaggaauaauaaacagugaagaugaacaucucuuggcgcuugaaagaaagcugaagaaaaugcugggccccucugcuguagagauagggaauggaugcuuugaaaccaaacacaagugcaaccagaccugucucgacagaauagcugcugguaccuuugaugcaggagaauuuucucuccccaccuuugauucacugaauauuacugcugcaucuuuaaaugacgauggauuggauaaucauacuauacugcuuuacuacucaacugcugccuccaguuuggcuguaacacugaugauagcuaucuuuguuguuuauauggucuccagagacaauguuucuugcuccaucugucuauaa

SEQ ID NO: 59004 - RNA, 1758 nt, Artificial Sequence
  derived and/or modified CDS sequence (wt) from hemagglutinin__InfluenzaB__AGX15697
augaaggcaauaauuguacuacucaugguaguaacauccaaugcagaucgaaucugcacugggauaacaucgucaaacucaccacaugucgucaaaacugcuacucaaggggaggucaaugugacugguguaauaccacugacaacaacacccaccaaaucucauuuugcaaaucucaaaggaacagaaaccagggggaaacuaugcccaaaaugccucaacugcacagaucuggacguagccuugggcagaccaaaaugcacggggaaaauacccucggcaagaguuucaauacuccaugaagucagaccuguuacaucugggugcuuuccuauaaugcacgacagaacaaaaauuagacagcugccuaaccuucuccgaggauacgaacauaucagguuaucaacucauaacguuaucaaugcagaaaaugcaccaggaggacccuacaaaauuggaaccucagggucuugcccuaacauuaccaauggaaacggauuuuuugcaacaauggcuugggccgucccaaaaaacgacaaaaacaaaacagcaacaaauccauuaacaauagaaguaccauacauuuguacagaaggagaagaccaaauuaccguuuggggguuccacucugacaacgagaaccaaauggcaaagcucuauggggacucaaagccccagaaguucaccucaucugccaacggagugaccacacauuacguuucacagauugguggcuucccaaaucaaacagaagacggaggacuaccacaaagugguagaauuguuguugauuacauggugcaaaaaucugggaaaacaggaacaauuaccuaucaaagggguauuuuauugccucaaaagguguggugcgcaaguggcaggagcaagguaauaaaaggauccuugccuuuaauuggagaagcagauugccuccacgaaaaauacgguggauuaaacaaaagcaagccuuacuacacaggggaacaugcaaaggccauaggaaauugcccaauaugggugaaaacacccuugaagcuggccaauggaaccaaauauagaccuccugcaaaacuauuaaaggaaagggguuucuucggagcuauugcugguuucuuagaaggaggaugggaaggaaugauugcagguuggcacggauacacaucccauggggcacauggaguagcgguggcagcagaccuuaagagcacucaagaggccauaaacaagauaacaaaaaaucucaacucuuugagugagcuggaaguaaagaaucuucaaagacuaagcggugccauggaugaacuccacaacgaaauacuagaacuagaugagaaaguggaugaucucagagcugauacaauaagcucacaaauagaacucgcaguccugcuuuccaaugaaggaauaauaaacagugaagaugaacaucucuuggcgcuugaaagaaagcugaagaaaaugcugggccccucugcuguagagauagggaauggaugcuuugaaaccaaacacaagugcaaccagaccugucucgacagaauagcugcugguaccuuugaugcaggagaauuuucucuccccaccuuugauucacugaauauuacugcugcaucuuuaaaugacgauggauuggauaaucauacuauacugcuuuacuacucaacugcugccuccaguuuggcuguaacacugaugauagcuaucuuuguuguuuauauggucuccagagacaauguuucuugcuccaucugucuauaa

SEQ ID NO: 59005 - RNA, 1758 nt, Artificial Sequence
  derived and/or modified CDS sequence (wt) from hemagglutinin__InfluenzaB__AGX15708
augaaggcaauaauuguacuacucaugguaguaacauccaaugcagaucgaaucugcacugggauaacaucgucaaacucaccacaugucgucaaaacugcuacucaaggggaggucaaugugacugguguaauaccacugacaacaacacccaccaaaucucauuuugcaaaucucaaaggaacagaaaccagggggaaacuaugcccaaaaugccucaacugcacagaucuggacguagccuugggcagaccaaaaugcacugggaaaauacccucggcaagaguuucaauacuccaugaagucagaccuguuacaucuggguguuuuccuauaaugcacgacagaacaaaaauuagacagcugccuaaccuucuccgaggauacgaacauaucagguuaucaacucauaacguuaucaaugcagaaaaugcaccaggaggacccuacaaaauuggaaccucagggucuugcccuaacauuaccaauggaaacggauuuuucgcaacaauggcuugggccgucccaaaaaacgacaaaaacaaaacagcaacaaauccauuaacaauagaaguaccauacauuuguacagaaggagaagaccaaauuaccguuuggggguuccacucugacaacgagacccaaauggcaaagcucuauggggacucaaagccccagaaguucaccucaucugccaacggagugaccacacauuacguuucacagauugguggcuucccaaaucaaacagaagacggaggacuaccacaaagugguagaauuguuguugauuacauggugcaaaaaucugggaaaacaggaacaauuaccuaucaaagggguauuuuauugccucaaaagguguggugcgcaaguggcaggagcaagguaauaaaaggauccuugccuuuaauuggagaagcagauugccuccacgaaaaauacgguggauuaaacaaaagcaagccuuacuacacaggggaacaugcaaaggccauaggaaauugcccaauaugggugaaaacacccuugaagcuggccaauggaaccaaauauagaccuccugcaaaacuauuaaaggaaagggguuucuucggagcuauugcugguuucuuagaaggaggaugggaaggaaugauugcagguuggcacggauacacaucccauggggcacauggaguagcgguggcagcagaccuuaagagcacucaagaggccauaaacaagauaacaaaaaaucucaacucuuugagugagcuggaaguaaagaaucuucaaagacuaagcggugccauggaugaacuccacaacgaaauacuagaacuagaugagaaaguggaugaucucagagcugauacaauaagcucacaaauagaacucgcaguccugcuuuccaaugaaggaauaauaaacagugaagaugaacaucucuuggcgcuugaaagaaagcugaagaaaaugcugggccccucugcuguagagauagggaauggaugcuuugaaaccaaacacaagugcaaccagaccugucucgacagaauagcugcugguaccuuugaugcaggagaauuuucucuccccaccuuugauucacugaauauuacugcugcaucuuuaaaugacgauggauuggauaaucauacuauacugcuuuacuacucaacugcugccuccaguuuggcuguaacacugaugauagcuaucuuuguuguuuauauggucuccagagacaauguuucuugcuccaucugucuauaa

SEQ ID NO: 59006 - RNA, 1758 nt, Artificial Sequence
  derived and/or modified CDS sequence (wt) from hemagglutinin__InfluenzaB__AGX15719
augaaggcaauaauuguacuacucaugguaguaacauccaaugcagaucgaaucugcacugggauaacaucgucaaacucaccacaugucgucaaaacugcuacucaaggggaggucaaugugacugguguaauaccacugacaacaacacccaccaaaucucauuuugcaaaucucaaaggaacagaaaccagagggaaacuaugcccaaaaugccucaacugcacagaucuggacguagccuugggcagaccaaaaugcacggggaaaauacccucggcaagaguuucaauacuccaugaagucagaccuguuacaucugggugcuuuccuauaaugcacgacagaacaaaaauuagacagcugccuaaccuucuccgaggauacgaacauaucagguuaucaacucauaacguuaucaaugcagaaaaugcaccaggaggacccuacaaaauuggaaccucagggucuugcccuaacauuaccaauggaaacggauuuuucgcaacaauggcuugggccgucccaaaaaacgacaaaaacaaaacagcaacaaauccauuaacaauagaaguaccauacauuuguacagaaggagaagaccaaauuaccguuuggggguuccacucugacaaugagacccaaauggcaaagcucuauggggacucaaagccccagaaguucaccucaucugccaacggagugaccacacauuacguuucacagauugguggcuucccaaaucaaacagaagacggaggacuaccacaaagugguagaauuguuguugauuacauggugcaaaaaucugggaaaacaggaacaauuaccuaucaaagggguauuuuauugccucaaaagguguggugcgcaaguggcaggagcaagguaauaaaaggauccuugccuuuaauuggagaagcagauugccuccacgaaaaauacgguggauuaaacaaaagcaagccuuacuacacaggggaacaugcaaaggccauaggaaauugcccaauaugggugaaaacacccuugaagcuggccaauggaaccaaauauagaccuccugcaaaacuauuaaaggaaagggguuucuucggagcuauugcugguuucuuagaaggaggaugggaaggaaugauugcagguuggcacggauacacaucccauggggcacauggaguagcgguggcagcagaccuuaagagcacucaagaggccauaaacaagauaacaaaaaaucucaacucuuugagugagcuggaaguaaagaaucuucaaagacuaagcggugccauggaugaacuccacaacgaaauacuagaacuagaugagaaaguggaugaucucagagcugauacaauaagcucacaaauagaacucgcaguccugcuuuccaaugaaggaauaauaaacagugaagaugaacaucucuuggcgcuugaaagaaagcugaagaaaaugcugggccccucugcuguagagauagggaauggaugcuuugaaaccaaacacaagugcaaccagaccugucucgacagaauagcugcugguaccuuugaugcaggagaauuuucucuccccaccuuugauucacugaauauuacugcugcaucuuuaaaugacgauggauuggauaaucauacuauacugcuuuacuacucaacugcugccuccaguuuggcuguaacacugaugauagcuaucuuuguuguuuauauggucuccagagacaauguuucuugcuccaucugucuauaa

SEQ ID NO: 59007 - RNA, 1758 nt, Artificial Sequence
  derived and/or modified CDS sequence (wt) from hemagglutinin__InfluenzaB__AGX15730
augaaggcaauaauuguacuacucaugguaguaacauccaaugcagaucgaaucugcacugggauaacaucgucaaacucaccacauguugucaaaacugcuacucaaggggaggucaaugugacugguguaauaccacugacaacaacacccaccaaaucucauuuugcaaaucucaaaggaacagaaaccagagggaaacuaugcccaaaaugccucaacugcacagaucuggacguggccuugggcagaccaaaaugcacggggaacauacccucggcaagaguuucaauacuccaugaagucagaccuguuacaucugggugcuuuccuauaaugcacgacagaacaaaaauuagacagcugccuaaccuucucagaggauacgaacauaucagguuaucaacucauaacguuaucaaugcagaaaaugcaccaggaggacccuacaaaauuggaaccucagggucuugcccuaacguuaccaauggaaacggauuuuuugcaacaauggcuugggcugucccaaaaaacgacaacaacaaaacagcaacaaauucauuaacaauagaaguaccauacauuuguacagagggagaagaccaaauuaccguuuggggguuccacucugauaacgaaacccaaauggcaaagcucuauggggacucaaagccccagaaguucaccucaucugccaacggagugaccacacauuacguuucacagauugguggcuucccaaaucaaacagaagacggaggacuaccacaaagugguagaauuguuguugauuacauggugcaaaaaucugggaaaacaggaacaauuaccuaucaaagagguauuuuauugccucaaaaaguguggugcgcaaguggcaggagcaagguaauaaaaggauccuugccuuuaauuggagaagcagauugccuccacgaaaaauacgguggauuaaacaaaagcaagccuuacuacacaggggaacaugcaaaggccauaggaaauugcccaauaugggugaaaacacccuugaagcuggccaauggaaccaaauauagaccuccugcaaaacuauuaaaggaaagggguuucuucggagcuauugcugguuucuuagaaggaggaugggaaggaaugauugcagguuggcacggauacacaucccauggggcacauggaguagcgguggcagcagaccuuaaaagcacucaagaggccauaaacaagauaacaaaaaaucucaacucuuugagugagcuggaaguaaagaaucuucaaagacuaagcggugccauggaugaacuccacaacgaaauacuagaacuagacgagaaaguggaugaucucagagcugauacaauaagcucacaaauagaacucgcaguccugcuuuccaaugaaggaauaauaaacagugaagaugagcaucucuuggcgcuugaaagaaagcugaagaaaaugcugggccccucugcuguagagauagggaauggaugcuuugaaaccaaacacaagugcaaccagaccugucucgacagaauagcugcugguaccuuugaugcaggagaauuuucucuccccaccuuugauucacugaauauuacugcugcaucuuuaaaugacgauggauuggauaaucauacuauacugcuuuacuacucaacugcugccuccaguuuggcuguaacauugaugauagcuaucuuuguuguuuauauggucuccagagacaauguuucuugcuccaucugucuauaa

SEQ ID NO: 59008 - RNA, 1758 nt, Artificial Sequence
  derived and/or modified CDS sequence (wt) from hemagglutinin__InfluenzaB__AGX15741
augaaggcaauaauuguacuacucaugguaguaacauccaaugcagaucgaaucugcacugggauaacaucgucaaacucaccacaugucgucaaaacugcuacucaaggggaggucaaugugacugguguaauaccacugacaacaacacccaccaaaucucauuuugcaaaucucaaaggaacagaaaccagggggaaacuaugcccaaaaugccucaacugcacagaucuggacguagccuugggcagaccaaaaugcacggggaaaauacccucggcaagaguuucaauacuccaugaagucagaccuguuacaucugggugcuuuccuauaaugcacgacagaacaaaaauuagacagcugccuaaccuucuccgaggauacgaacauaucagguuaucaacucauaacguuaucaaugcagaaaaugcaccaggaggacccuacaaaauuggaaccucagggucuugcccuaacauuaccaauggaaacggauuuuucgcaacaauggcuugggccgucccaaaaaacgacaaaaacaaaacagcaacaaauccauuaacaauagaaguaccauacauuuguacagaaggagaagaccaaauuaccguuuggggguuccacucugacaaugagacccaaauggcaaagcucuauggggacucaaagccccagaaguucaccucaucugccaacggagugaccacacauuacguuucacagauugguggcuucccaaaucaaacagaagacggaggacuaccacaaagugguagaauuguuguugauuacauggugcaaaaaucugggaaaacaggaacaauuaccuaucaaagggguauuuuauugccucaaaagguguggugcgcaaguggcaggagcaagguaauaaaaggauccuugccuuuaauuggagaagcagauugccuccacgaaaaauacgguggauuaaacaaaagcaagccuuacuacacaggggaacaugcaaaggccauaggaaauugcccaauaugggugaaaacacccuugaagcuggccaauggaaccaaauauagaccuccugcaaaacuauuaaaggaaagggguuucuucggagcuauugcugguuucuuagaaggaggaugggaaggaaugauugcagguuggcacggauacacaucccauggggcacauggaguagcgguggcagcagaccuuaagagcacucaagaggccauaaacaagauaacaaaaaaucucaacucuuugagugagcuggaaguaaagaaucuucaaagacuaagcggugccauggaugaacuccacaacgaaauacuagaacuagaugagaaaguggaugaucucagagcugauacaauaagcucacaaauagaacucgcaguccugcuuuccaaugaaggaauaauaaacagugaagaugaacaucucuuggcgcuugaaagaaagcugaagaaaaugcugggccccucugcuguagagauagggaauggaugcuuugaaaccaaacacaagugcaaccagaccugucucgacagaauagcugcugguaccuuugaugcaggagaauuuucucuccccaccuuugauucacugaauauuacugcugcaucuuuaaaugacgauggauuggauaaucauacuauacugcuuuacuacucaacugcugccuccaguuuggcuguaacacugaugauagcuaucuuuguuguuuauauggucuccagagacaauguuucuugcuccaucugucuauaa

SEQ ID NO: 59009 - RNA, 1758 nt, Artificial Sequence
  derived and/or modified CDS sequence (wt) from hemagglutinin__InfluenzaB__AGX15753
augaaggcaauaauuguacuacucaugguaguaacauccaaugcagaucgaaucugcacugggauaacaucgucaaacucaccacaugucgucaaaacugcuacucaaggggaggucaaugugacugguguaauaccacugacaacaacacccaccaaaucucauuuugcaaaucucaaaggaacagaaaccagggggaaacuaugcccaaaaugccucaacugcacagaucuggacguagccuugggcagaccaaaaugcacggggaaaauacccucggcaagaguuucaauacuccaugaagucagaccuguuacaucugggugcuuuccuauaaugcacgacagaacaaaaauuagacagcugccuaaccuucuccgaggauacgaacauaucagguuaucaacucauaacguuaucaaugcagaaaaugcaccaggaggacccuacaaaauuggaaccucagggucuugcccuaacauuaccaauggaaacggauuuuucgcaacaauggcuugggccgucccaaaaaacgacaaaaacaaaacagcaacaaauccauuaacaauagaaguaccauacauuuguacagaaggagaagaccaaauuaccguuuggggguuccacucugacaacgagacccaaauggcaaagcucuauggggacucaaagccccagaaguucaccucaucugccaacggagugaccacacauuacguuucacagauugguggcuucccaaaucaaacagaagacggaggacuaccacaaagugguagaauuguuguugauuacauggugcaaaaaucugggaaaacaggaacaauuaccuaucaaagggguauuuuauugccucaaaagguguggugcgcaaguggcaggagcaagguaauaaaaggauccuugccuuuaauuggagaagcagauugccuccacgaaaaauacgguggauuaaacaaaagcaagccuuacuacacaggggaacaugcaaaggcaauaggaaauugcccaauaugggugaaaacacccuugaagcuggccaauggaaccaaauauagaccuccugcaaaacuauuaaaggaaagggguuucuucggagcuauugcugguuucuuagaaggaggaugggaaggaaugauugcagguuggcacggauacacaucccauggggcacauggaguagcgguggcagcagaccuuaagagcacucaagaggccauaaacaagauaacaaaaaaucucaacucuuugagugagcuggaaguaaagaaucuucaaagacuaagcggugccauggaugaacuccacaacgaaauacuagaacuagaugagaaaguggaugaucucagagcugauacaauaagcucacaaauagaacucgcaguccugcuuuccaaugaaggaauaauaaacagugaagaugaacaucucuuggcgcuugaaagaaagcugaagaaaaugcugggccccucugcuguagagauagggaauggaugcuuugaaaccaaacacaagugcaaccagaccugucucgacagaauagcugcugguaccuuugaugcaggagaauuuucucuccccaccuuugauucacugaauauuacugcugcaucuuuaaaugacgauggauuggauaaucauacuauacugcuuuacuacucaacugcugccuccaguuuggcuguaacacugaugauagcuaucuuuguuguuuauauggucuccagagacaauguuucuugcuccaucugucuauaa

SEQ ID NO: 59010 - RNA, 1758 nt, Artificial Sequence
  derived and/or modified CDS sequence (wt) from hemagglutinin__InfluenzaB__AGX15764
augaaggcaauaauuguacuacucaugguaguaacauccaaugcagaucgaaucugcacugggauaacaucgucaaacucaccacaugucgucaaaacugcuacucaaggggaggucaaugugacugguguaauaccacugacaacaacacccaccaaaucucauuuugcaaaucucaaaggaacagaaaccagggggaaacuaugcccaaaaugccucaacugcacagaucuggacguagccuugggcagaccaaaaugcacggggaaaauacccucggcaagaguuucaauacuccaugaagucagaccuguuacaucugggugcuuuccuauaaugcacgacagaacaaaaauuagacagcugccuaaccuucuccgaggauacgaacauaucagguuaucaacucauaacguuaucaaugcagaaaaugcaccaggaggacccuacaaaauuggaaccucagggucuugcccuaacauuaccaauggaaacggauuuuucgcaacaauggcuugggccgucccaaaaaacgacaaaaacaaaacagcaacaaauccauuaacaauagaaguaccauacauuuguacagaaggagaagaccaaauuaccguuuggggguuccacucugacaacgagacccaaauggcaaagcucuauggggacucaaagccccagaaguucaccucaucugccaacggagugaccacacauuacguuucacagauugguggcuucccaaaucaaacagaagacgggggacuaccacaaagugguagaauuguuguugauuacauggugcaaaaaucugggaaaacaggaacaauuaccuaucaaagggguauuuuauugccucaaaagguguggugcgcaaguggcaggagcaagguaauaaaaggauccuugccuuuaauuggagaagcagauugccuccacgaaaaauacgguggauuaaacaaaagcaagccuuacuacacaggggaacaugcaaaggccauaggaaauugcccaauaugggugaaaacacccuugaagcuggccaauggaaccaaauauagaccuccugcaaaacuauuaaaggaaagggguuucuucggagcuauugcugguuucuuagaaggaggaugggaaggaaugauugcagguuggcacggauacacaucccauggggcacauggaguagcgguggcagcagaccuuaagagcacucaagaggccauaaacaagauaacaaaaaaucucaacucuuugagugagcuggaaguaaagaaucuucaaagacuaagcggugccauggaugaacuccacaacgaaauacuagaacuagaugagaaaguggaugaucucagagcugauacaauaagcucacaaauagaacucgcaguccugcuuuccaaugaaggaauaauaaacagugaagaugaacaucucuuggcgcuugaaagaaagcugaagaaaaugcugggccccucugcuguagagauagggaauggaugcuuugaaaccaaacacaagugcaaccagaccugucucgacagaauagcugcugguaccuuugaugcaggagaauuuucucuccccaccuuugauucacugaauauuacugcugcaucuuuaaaugacgauggauuggauaaucauacuauacugcuuuacuacucaacugcugccuccaguuuggcuauaacacugaugauagcuaucuuuguuguuuauauggucuccagagacaauguuucuugcuccaucugucuauaa

SEQ ID NO: 59011 - RNA, 1755 nt, Artificial Sequence
  derived and/or modified CDS sequence (wt) from hemagglutinin__InfluenzaB__AGX15775
augaaggcaauaauuguacuacucaugguaguaacauccaaugcagaucgaaucugcacuggaauaacauccucaaacucaccucauguggucaaaacagccacucaaggggaggucaaugugacuggugugauaccacuaacaacaacaccaacaaaaucuuauuuugcaaaucucaaaggaacaaggaccagagggaaacuaugcccagacugucucaacugcacagaucuggauguggcuuugggcagaccaauguguguggggaccacaccuucggcgaaagcuucaauacuccacgaagucagaccuguuacauccgggugcuuuccuauaaugcacgacagaacaaaaaucaggcaacuacccaaucuucucagaggauaugaaaauaucaggcuaucaacccaaaacgucaucgaugcggaaaaggcaccaggaggacccuacagacuuggaaccucaggaucuugcccuaacgcuaccaguaagagcggauuuuucgcaacaauggcuugggcugucccaaaggacaacaacaaaaaugcaacgaacccacuaacaguagaaguaccauacauuuguacagaaggggaagaccaaaucacuguuuggggguuccauucagauaacaaaauccaaaugaagaaccucuauggagacucaaauccucaaaaguucaccucaucugcuaauggaguaaccacacacuauguuucucagauuggcagcuucccagaucaaacagaagacggaggacuaccacaaagcggcaggauuguuguugauuacaugaugcaaaaaccugggaaaacaggaacaauugucuaccaaagagguguuuuguugccucaaaggguguggugcgcgaguggcaggagcaaaguaauaaaaggguccuugccuuuaauuggugaagcagauugccuucaugaaaaauacgguggauuaaacaaaagcaagccuuacuacacaggagaacaugcaaaagccauaggaaauugcccaauaugggugaaaacaccuuugaagcuugccaauggaaccaaauauagaccuccugcaaaacuauuaaaggaaagggguuucuucggagcuauugcugguuuccuagaaggaggaugggaaggaaugauugcaggcuggcacggauacacaucucacggagcacauggaguggcaguggcggcggaccuuaagaguacgcaagaagcuauaaauaagauaacaaaaaaucucaauucuuugagugagcuagaaguaaagaaucuucaaagacuaaguggugccauggaugaacuccacaacgaaauacucgagcuggaugagaaaguggaugaucucagagcugacacuauaagcucgcaaauagaacuugcagucuugcuuuccaacgaaggaauaauaaacagugaagaugagcaucuauuggcacuugagagaaaacuaaagaaaaugcugggucccucugcuguagagauaggaaauggaugcuucgaaaccaaacacaagugcaaccagaccugcuuagacaggauagcugcuggcaccuuuaaugcaggagaauuuucucuccccacuuuugauucacugaacauuacugcugcaucuuuaaaugaugauggauuggauaaccauacuauacugcucuauuacucaacugcugcuucuaguuuggcuguaacauugaugcuagcuauuuuuauuguuuauauggucuccagagacaacguuucaugcuccaucugucuauaa

SEQ ID NO: 59012 - RNA, 1758 nt, Artificial Sequence
  derived and/or modified CDS sequence (wt) from hemagglutinin__InfluenzaB__AGX15786
augaaggcaauaauuguacuacucaugguaguaacauccaaugcagaucgaaucugcacugggauaacaucgucaaacucaccacaugucgucaaaacugcuacucaaggggaggucaaugugacugguguaauaccacugacaacaacacccaccaaaucucauuuugcaaaucucaaaggaacagaaaccagggggaaacuaugcccaaaaugccucaacugcacagaucuggacguagccuugggcagaccaaaaugcacggggaaaauacccucggcaagaguuucaauacuccaugaagucagaccuguuacaucugggugcuuuccuauaaugcacgacagaacaaaaauuagacagcugccuaaccuucuccgaggauacgaacauaucagguuaucaacucauaacguuaucaaugcagaaaaugcaccaggaggacccuacaaaauuggaaccucagggucuugcccuaacauuaccaauggaaacggauuuuucgcaacaauggcuugggccgucccaaaaaacgacaaaaacaaaacagcaacaaauccauuaacaauagaaguaccauacauuuguacagaaggagaagaccaaauuaccguuuggggguuccacucugacaacgagacccaaauggcaaagcucuauggggacucaaagccccagaaguucaccucaucugccaacggagugaccacacauuacguuucacagauugguggcuucccaaaucaaacagaagacgggggacuaccacaaagugguagaauuguuguugauuacauggugcaaaaaucugggaaaacaggaacaauuaccuaucaaagggguauuuuauugccucaaaagguguggugcgcaaguggcaggagcaagguaauaaaaggauccuugccuuuaauuggagaagcagauugccuccacgaaaaauacgguggauuaaacaaaagcaagccuuacuacacaggggaacaugcaaaggccauaggaaauugcccaauaugggugaaaacacccuugaagcuggccaauggaaccaaauauagaccuccugcaaaacuauuaaaggaaagggguuucuucggagcuauugcugguuucuuagaaggaggaugggaaggaaugauugcagguuggcacggauacacaucccauggggcacauggaguagcgguggcagcagaccuuaagagcacucaagaggccauaaacaagauaacaaaaaaucucaacucuuugagugagcuggaaguaaagaaucuucaaagacuaagcggugccauggaugaacuccacaacgaaauacuagaacuagaugagaaaguggaugaucucagagcugauacaauaagcucacaaauagaacucgcaguccugcuuuccaaugaaggaauaauaaacagugaagaugaacaucucuuggcgcuugaaagaaagcugaagaaaaugcugggccccucugcuguagagauagggaauggaugcuuugaaaccaaacacaagugcaaccagaccugucucgacagaauagcugcugguaccuuugaugcaggagaauuuuuucuccccaccuuugauucacugaauauuacugcugcaucuuuaaaugacgauggauuggauaaucauacuauacugcuuuacuacucaacugcugccuccaguuuggcuguaacacugaugauagcuaucuuuguuguuuauauggucuccagagacaauguuucuugcuccaucugucuauaa

SEQ ID NO: 59013 - RNA, 1758 nt, Artificial Sequence; identical to SEQ ID NO: 59009
  derived and/or modified CDS sequence (wt) from hemagglutinin__InfluenzaB__AGX15797

SEQ ID NO: 59014 - RNA, 1758 nt, Artificial Sequence
  derived and/or modified CDS sequence (wt) from hemagglutinin__InfluenzaB__AGX15808
augaaggcaauaauuguacuacucaugguaguaacauccaaugcagaucgaaucugcacugggauaacaucgucaaacucaccacaugucgucaaaacugcuacucaaggggaggucaaugugacugguguaauaccacugacaacaacacccaccaaaucucauuuugcaaaucucaaaggaacagaaaccagggggaaacuaugcccaaaaugccucaacugcacagaucuggacguagccuugggcagaccaaaaugcacggggaaaauacccucggcaagaguuucaauacuccaugaagucagaccuguuacaucugggugcuuuccuauaaugcacgacagaacaaaaauuagacagcugccuaaccuucuccgaggauacgaacauaucagguuaucaacucauaacguuaucaaugcagaaaaugcaccaggaggacccuacaaaauuggaacaucagggucuugcccuaacguuaccaauggaaacggauuuuucgcaacaauggcuugggccgucccaaaaaacgacaaaaacaaaacagcaacaaauccauuaacaauagaaguaccauacauuuguacagaaggagaagaccaaauuaccguuuggggguuccacucugacaacgagacccaaauggcaaagcucuauggggacucaaagccccagaaguucaccucaucugccaacggagugaccacacauuacguuucacagauugguggcuucccaaaucaaacagaagacggaggacuaccacaaagugguagaauuguuguugauuacauggugcaaaaaucugggaaaacaggaacaauuaccuaucaaagagguauuuuauugccucaaaagguguggugcgcaauuggcaggagcaagguaauaaaaggauccuugccuuuaauuggagaagcagauugccuccacgaaaaauacgguggauuaaacaaaagcaagccuuacuacacaggggaacaugcaaaggccauaggaaauugcccaauaugggugaaaacacccuugaagcuggccaauggaaccaaauauagaccuccugcaaaacuauuaaaggaaagggguuucuucggagcuauugcugguuucuuagaaggaggaugggaaggaaugauugcagguuggcacggauacacaucccauggggcacauggaguagcgguggcagcagaccuuaagagcacucaagaggccauaaacaagauaacaaaaaaucucaacucuuugagugagcuggaaguaaagaaucuucaaagacuaagcggugccauggaugaacuccacaacgaaauacuagaacuagaugagaaaguggaugaucucagagcugauacaauaagcucacaaauagaacucgcaguccugcuuuccaaugaaggaauaauaaacagugaagaugaacaucucuuggcgcuugaaagaaagcugaagaaaaugcugggccccucugcuguagagauagggaauggaugcuuugaaaccaaacacaagugcaaccagaccugucucgacagaauagcugcugguaccuuugaugcaggagaauuuucucuccccaccuuugauucacugaauauuacugcugcaucuuuaaaugacgauggauuggauaaucauacuauacugcuuuacuacucaacugcugccuccaguuuggcuguaacacugaugauagcuaucuuuguuguuuauauggucuccagagacaauguuucuugcuccaucugucuauaa

SEQ ID NO: 59015 - RNA, 1758 nt, Artificial Sequence
  derived and/or modified CDS sequence (wt) from hemagglutinin__InfluenzaB__AGX15830
augaaggcaauaauuguacuacucaugguaguaacauccaaugcagaucgaaucugcacugggauaacaucgucaaacucaccacaugucgucaaaacugcuacucaaggggaagucaaugugacugguguaauaccacugacaacaacacccacgaaaucucauuuugcaaaucucaaaggaacagaaaccagagggaaacuaugcccaaaaugccccaacugcacagaucuggacguagccuugggcagaccaaaaugcacggggaaaauacccucggcaagaguuucaauacuccaugaagucagaccuguuacaucugggugcuuuccuauaaugcacgacagaacaaaaauuagacagcugccuaaccuucuccgaggauacgaacauaucagguuaucaacucauaacguuaucaaugcagaaaaugcaccaggaggacccuacaaaauuggaaccucagggucuugcccuaacguuaccaauggaaacggauuuuucgcaacaauggcuugggccgucccaaaaaacgacaaaaacaaaacagcaacaaauccauuaacaauagaaguaccauacauuuguacagaaggagaagaccaaauuaccguuuggggguuccacucugauaacgagacccaaauggcaaagcuuuauggggacucaaagccccagaaguucaccucaucugccaacggagugaccacacauuacguuucacagauuggcggcuucccaaaucaaacagaagacggaggacuaccacaaagugguagaauuguuguugauuacauggugcaaaaaucugggaaaacaggaacaauuaccuaucaaagagguauuuuauugccucaaaagguguggugcgcaaguggcaggagcaagguaauaaaaggauccuugccuuuaauuggagaagcagauugccuccacgaaaaauacgguggauuaaacaaaagcaagccuuacuacacaggggaacaugcaaaggccauaggaaauugcccaauaugggugaagacacccuugaagcuggccaauggaaccaaauauagaccuccugcaaaacuauuaaaggaaagggguuucuucggagcuauugcugguuucuuggaaggaggaugggaaggaaugauugcagguuggcacggauacacgucccauggggcacauggaguagcgguggcagcagaccuuaagagcacucaagaggccauaaacaagauaacaaaaaaucuuaacucuuugagugaacuggaaguaaagaaucuucaaagacuaagcggugccauggaugaacuccacaacgaaauacuagaacuagacgagaaaguggaugaucucagagcugauacaauaagcucacaaauagagcucgcaguccugcuuuccaaugaaggaauaauaaacagugaagaugaacaucucuuggcgcuugaaagaaagcugaagaaaaugcugggccccucugcuguagagauagggaauggaugcuuugaaaccaaacacaagugcaaccagaccugucucgacagaauagcugcugguaccuuugaugcaggagaauuuucucuccccaccuuugauucacugaauauuacugcugcaucuuuaaaugacgauggauuggauaaucauacuauacugcuuuacuacucaacugcugccuccaguuuggcuguaacacugaugauagcuaucuuuguuguuuauauggucuccagagacaauguuucuugcuccaucugucuauaa

SEQ ID NO: 59016 - RNA, 1758 nt, Artificial Sequence; identical to SEQ ID NO: 58652
  derived and/or modified CDS sequence (wt) from hemagglutinin__InfluenzaB__AGX15841

SEQ ID NO: 59017 - RNA, 1758 nt, Artificial Sequence; identical to SEQ ID NO: 58620
  derived and/or modified CDS sequence (wt) from hemagglutinin__InfluenzaB__AGX15852

SEQ ID NO: 59018 - RNA, 1758 nt, Artificial Sequence
  derived and/or modified CDS sequence (wt) from hemagglutinin__InfluenzaB__AGX15863
augaaggcaauaauuguacuacucaugguaguaacauccaaugcagaucgaaucugcacugggauaacaucgucaaacucaccacaugucgucaaaacugcuacucaaggggaggucaaugugacugguguaauaccacugacaacaacacccaccaaaucucauuuugcaaaucucaaaggaacagaaaccagagggaaacuaugcccaaaaugccccaacugcacagaucuggacguagccuugggcagaccaaaaugcacggggaaaauacccucggcaagaguuucaauacuccaugaagucagaccuguuacaucugggugcuuuccuauaaugcacgacagaacaaaaauuagacagcugccuaaccuucuccgaggauacgaacauaucagauuaucaacucauaacguuaucaaugcagaaaaugcaccaggaggacccuacaaaauuggaaccucagggucuugcccuaacguuaccaauggaaacggauuuuucgcaacaauggcuugggccgucccaaaaaacgacaaaaacaaaacagcaacaaauccauuaacaauagaaguaccauacauuuguacagaaggagaagaccaaauuaccguuuggggguuccacucugauaacgagacccaaauggcaaagcucuauggggacucaaagccccagaaguucaccucaucugccaacggagugaccacacauuacguuucacagauugguggcuucccaaaucaaacagaagacggaggacuaccacaaagugguagaauuguuguugauuacauggugcaaaaaucugggaaaacaggaacaauuaccuaucaaagagguauuuuauugccucaaaagguguggugcgcaaguggcaggagcaagguaauaaaaggauccuugccuuuaauuggagaagcagauugccuccacgaaaaauacgguggauuaaacaaaagcaagccuuacuacacaggggaacaugcaaaggccauaggaaauugcccaauaugggugaagacacccuugaagcuggccaauggaaccaaauauagaccuccugcaaaacuauuaaaggaaagggguuucuucggagcuauugcugguuucuuagaaggaggaugggaaggaaugauugcagguuggcacggauacacgucccauggggcacauggaguagcaguggcagcagaccuuaagagcacucaagaggccauaaacaagauaacaaaaaaucucaacucuuugagugagcuggaaguaaagaaucuucaaagacuaaguggugccauggaugaacuccacaacgaaauacuggaacuagacgagaaaguggaugaucucagagcugauacaauaagcucacaaauagaacucgcaguccugcuuuccaaugaaggaauaauaaacagugaagaugaacaucucuuggcacuugaaagaaagcugaagaaaaugcugggcccuucugcuguagagauagggaauggaugcuuugaaaccaaacacaagugcaaccagaccugucucgacagaauagcugcugguaccuuugaugcaggagaauuuucucuccccaccuuugauucacugaauauuacugcugcaucuuuaaaugacgauggauuggauaaucauaccauacugcuuuacuacucaacugcugccuccaguuuggcuguaacacugaugauagcuaucuuuguuguuuauauggucuccagagacaauguuucuugcuccaucugucuauaa

SEQ ID NO: 59019 - RNA, 1758 nt, Artificial Sequence
  derived and/or modified CDS sequence (wt) from hemagglutinin__InfluenzaB__AGX15874
augaaggcaauaauuguacuacucaugguaguaacauccaaugcagaucgaaucugcacugggauaacaucgucaaacucaccacaugucgucaaaacugcuacucaaggggaggucaaugugacugguguaauaccacugacaacaacacccaccaaaucucauuuugcaaaucucaaaggaacagaaaccagagggaaacuaugcccaaaaugccccaacugcacagaucuggacguagccuugggcagaccaaaaugcacggggaaaauacccucggcaagaguuucaauacuccaugaagucagaccuguuacaucugggugcuuuccuauaaugcacgacagaacaaaaauuagacagcugccuaaccuucuccgaggauacgaacauaucagauuaucaacucauaacguuaucaaugcagaaaaugcaccaggaggacccuacaaaauuggaaccucagggucuugcccuaacguuaccaauggaaacggauuuuucgcaacaauggcuugggccgucccaaaaaacgacaaaaacaaaacagcaacaaauccauuaacaauagaaguaccauacauuuguacagaaggagaagaccaaauuaccguuuggggguuccacucugauaacgagacccaaauggcaaagcucuauggggacucaaagccccagaaguucaccucaucugccaacggagugaccacacauuacguuucacagauugguggcuucccaaaucaaacagaagacggaggacuaccacaaagugguagaauuguuguugauuacauggugcaaaaaucugggaaaacaggaacaauuaccuaucaaagagguauuuuauugccucaaaagguguggugcgcaaguggcaggagcaagguaauaaaaggauccuugccuuuaauuggagaagcagauugccuccacgaaaaauacgguggauuaaacaaaagcaagccuuacuacacaggggaacaugcaaaggccauaggaaauugcccaauaugggugaagacacccuugaagcuggccaauggaaccaaauauagaccuccugcaaaacuauuaaaggaaagggguuucuucggagcuauugcugguuucuuagaaggaggaugggaaggaaugauugcagguuggcacggauacacgucccauggggcacauggaguagcgguggcagcagaccuuaagagcacucaagaggccauaaacaagauaacaaaaaaucucaacucuuugagugagcuggaaguaaagaaucuucaaagacuaaguggugccauggaugaacuccacaacgaaauacuagaacuagacgagaaaguggaugaucucagagcugauacaauaagcucacaaauagaacucgcaguccugcuuuccaaugaaggaauaauaaacagugaagaugaacaucucuuggcacuugaaagaaagcugaagaaaaugcugggcccuucugcuguagagauagggaauggaugcuuugaaaccaaacacaagugcaaccagaccugucucgacagaauagcugcugguaccuuugaugcaggagaauuuucucuccccaccuuugauucacugaauauuacugcugcaucuuuaaaugacgauggauugaauaaucauaccauacugcuuuacuacucaacugcugccuccaguuuggcuguaacacugaugauagccaucuuuguuguuuauauggucuccagagacaauguuucuugcuccaucugucuauaa

SEQ ID NO: 59020 - RNA, 1758 nt, Artificial Sequence
  derived and/or modified CDS sequence (wt) from hemagglutinin__InfluenzaB__AGX15885
augaaggcaauaauuguacuacucaugguaguaacauccaaugcagaucgaaucugcacugggauaacaucgucaaacucaccacaugucgucaaaacugcuacucaaggggaggucaaugugacugguguaauaccacugacaacaacacccaccaaaucucauuuugcaaaucucaaaggaacagaaaccagagggaaacuaugcccaaaaugccccaacugcacagaucuggacguagccuugggcagaccaaaaugcacggggaaaauacccucggcaagaguuucaauacuccaugaagucagaccuguuacaucugggugcuuuccuauaaugcacgacagaacaaaaauuagacagcugccuaaccuucuccgaggauacgaacauaucagauuaucaacucauaacguuaucaaugcagaaaaugcaccaggaggacccuacaaaauuggaaccucagggucuugcccuaacguuaccaauggaaacggauuuuucgcaacaauggcuugggccgucccaaaaaacgacaaaaacaaaacagcaacaaauccauuaacaauagaaguaccauacauuuguacagaaggagaagaccaaauuaccguuuggggguuccacucugauaacgagacccaaauggcaaagcucuauggggacucaaagccccagaaguucaccucaucugccaacggagugaccacacauuacguuucacagauugguggcuucccaaaucaaacagaagauggaggacuaccacaaagugguagaauuguuguugauuacauggugcaaaaaucugggaaaacaggaacaauuaccuaucaaagagguauuuuauugccucaaaagguguggugcgcaaguggcaggagcaagguaauaaaaggauccuugccuuuaauuggagaagcagauugccuccacgaaaaauacgguggauuaaacaaaagcaagccuuacuacacaggggaacaugcaaaggccauaggaaauugcccaauaugggugaagacacccuugaagcuggccaauggaaccaaauauagaccuccugcaaaacuauuaaaggaaagggguuucuucggagcuauugcugguuucuuagaaggaggaugggaaggaaugauugcagguuggcacggauacacgucccauggggcacauggaguagcgguggcagcagaccuuaagagcacucaagaggccauaaacaagauaacaaaaaaucucaacucuuugagugagcuggaaguaaagaaucuucaaagacuaaguggugccauggaugaacuccacaacgaaauacuagaacuagacgagaaaguggaugaucucagagcugauacaauaagcucacaaauagaacucgcaguccugcuuuccaaugaaggaauaauaaacagugaagaugaacaucucuuggcacuugaaagaaagcugaagaaaaugcugggcccuucugcuguagagauagggaauggaugcuuugaaaccaaacacaagugcaaccagaccugucucgacagaauagcugcugguaccuuugaugcaggagaauuuucucuccccaccuuugauucacugaauauuacugcugcaucuuuaaaugacgauggauuggauaaucauaccauacugcuuuacuacucaacugcugccuccaguuuggcuguaacacugaugauagcuaucuuuguuguuuauauggucuccagagacaauguuucuugcuccaucugucuauaa

SEQ ID NO: 59021 - RNA, 1758 nt, Artificial Sequence
  derived and/or modified CDS sequence (wt) from hemagglutinin__InfluenzaB__AGX15896
augaaggcaauaauuguacuacucaugguaguaacauccaaugcagaucgaaucugcacugggauaacaucgucaaacucaccacaugucgucaaaacugcuacucaaggggaggucaaugugacugguguaauaccacugacaacaacacccaccaaaucucauuuugcaaaucucaaaggaacagaaaccagagggaaacuaugcccaaaaugccccaacugcacagaucuggacguagccuugggcagaccaaaaugcacggggaaaauacccucggcaagaguuucaauacuccaugaagucagaccuguuacaucugggugcuuuccuauaaugcacgacagaacaaaaauuagacagcugccuaaccuucuccgaggauacgaacauaucagauuaucaacucauaacguuaucaaugcagaaaaugcaccaggaggacccuacaaaauuggaaccucagggucuugcccuaacguuaccaauggaaacggauuuuucgcaacaauggcuugggccgucccaaaaaacgacaaaaacaaaacagcaacaaauccauuaacaauagaaguaccauacauuuguacagaaggagaagaccaaauuaccguuuggggguuccacucugauaacgagacccaaauggcaaagcucuauggggacucaaagccccagaaguucaccucaucugccaacggagugaccgcacauuacguuucacagauugguggcuucccaaaucaaacagaagacggaggacuaccacaaagugguagaauuguuguugauuacauggugcaaaaaucugggaaaacaggaacaauuaccuaucaaagagguauuuuauugccucaaaagguguggugcgcaaguggcaggagcaagguaauaaaaggauccuugccuuuaauuggagaagcagauugccuccacgaaaaauacgguggauuaaacaaaagcaagccuuacuacacaggggaacaugcaaaggccauaggaaauugcccaauaugggugaagacacccuugaagcuggccaauggaaccaaauauagaccuccugcaaaacuauuaaaggaaagggguuucuucggagcuauugcugguuucuuagaaggaggaugggaaggaaugauugcagguuggcacggauacacgucccauggggcacauggaguagcgguggcagcagaccuuaagagcacucaagaggccauaaacaagauaacaaaaaaucucaacucuuugagugagcuggaaguaaagaaucuucaaagacuaagcggugccauggaugaacuccacggcgaaauacuagaacuagacgagaaaguggaugaucucagagcugauacaauaagcucgcaaauagaacucgcaguccugcuuuccaaugaaggaauaauaaacagugaagaugaacaucucuuggcacuugaaagaaagcugaagaaaaugcugggcccuucugcuguagagauagggaauggaugcuuugaaaccaaacacaagugcaaccagaccugucucgacagaauagcugcugguaccuuugaugcaggagaauuuucucuccccaccuuugauucacugaauauuacugcugcaucuuuaaaugacgauggauuggauaaucauaccauacugcuuuacuacucaacugcugccuccaguuuggcuguaacacugaugauagcuaucuuuguuguuuauauggucuccagagacaauguuucuugcuccaucugucuauaa

SEQ ID NO: 59022 - RNA, 1758 nt, Artificial Sequence
  derived and/or modified CDS sequence (wt) from hemagglutinin__InfluenzaB__AGX15907
augaaggcaauaauuguacuacucaugguaguaacauccaaugcagaucgaaucugcacugggauaacaucgucaaacucaccacaugucgucaaaacugcuacucaaggggaggucaaugugacugguguaauaccacugacaacaacacccaccaaaucucauuuugcaaaucucaaaggaacagaaaccagagggaaacuaugcccaaaaugccccaacugcacagaucuggacguagccuugggcagaccaaaaugcacggggaaaauacccucggcaagaguuucaauacuccaugaagucagaccuguuacaucuggaugcuuuccuauaaugcacgacagaacaaaaauuagacagcugccuaaccuucuccgaggauacgaacauaucagauuaucaacucauaacguuaucaaugcagaaaaugcaccaggaggacccuacaaaauuggaaccucagggucuugcccuaacguuaccaauggaaacggauuuuucgcaacaauggcuugggccgucccaaaaaacgacaaaaacaaaacagcaacaaauccauuaacaauagaaguaccauacauuuguacagaaggagaagaccaaauuaccguuuggggguuccacucugauaacgagacccaaauggcaaagcucuauggggacucaaagccccagaaguucaccucaucugccaacggagugaccacacauuacguuucacagauugguggcuucccaaaucaaacagaagacggaggacuaccacaaagugguagaauuguuguugauuacauggugcaaaaaucugggaaaacaggaacaauuaccuaucaaagagguauuuuauugccucaaaagguguggugcgcaaguggcaggagcaagguaauaaaaggauccuugccuuuaauuggagaagcagauugccuccacgaaaaauacgguggauuaaacaaaagcaagccuuacuacacaggggaacaugcaaaagccauaggaaauugcccaauaugggugaagacacccuugaagcuggccaauggaaccaaauauagaccuccugcaaaacuauuaaaggaaagggguuucuucggagcuauugcugguuucuuagaaggaggaugggaaggaaugauugcagguuggcacggauacacgucccauggggcacauggaguagcgguggcagcagaccuuaagagcacucaagaggccauaaacaagauaacaaaaaaucucaacucuuugagugagcuggaaguaaagaaucuucaaagacuaaguggugccauggaugaacuccacaacgaaauacuagaacuagacgagaaaguggaugaucucagagcugauacaauaagcucacaaauagaacucgcaguccugcuuuccaaugaaggaauaauaaacagugaagaugaacaucucuuggcacuugaaagaaagcugaagaaaaugcugggcccuucugcuguagagauagggaauggaugcuuugaaaccaaacacaagugcaaccagaccugucucgacagaauagcugcugguaccuuugaugcaggagaauuuucucuccccaccuuugauucacugaauauuacugcugcaucuuuaaaugacgauggauuggauaaucauaccauacugcuuuacuacucaacugcugccuccaguuuggcuguaacacugaugauagcuaucuuuguuguuuauauggucuccagagacaauguuucuugcuccaucugucuauaa

SEQ ID NO: 59023 - RNA, 1758 nt, Artificial Sequence
  derived and/or modified CDS sequence (wt) from hemagglutinin__InfluenzaB__AGX15918
augaaggcaauaauuguacuacucaugguaguaacauccaaugcagaucgaaucugcacugggauaacaucgucaaacucaccacaugucgucaaaacugcuacucaaggggaggucaaugugacugguguaauaccacugacaacaacacccaccaaaucucauuuugcaaaucucaaaggaacagaaaccagagggaaacuaugcccaaaaugccccaacugcacagaucuggacguagccuugggcagaccaaaaugcacggggaaaauacccucggcaagaguuucaauacuccaugaagucagaccuguuacaucugggugcuuuccuauaaugcacgacagaacaaaaauuagacagcugccuaaccuucucagaggauacgaacauaucagauuaucaacucauaacguuaucaaugcagaaaaugcaccaggaggacccuacaaaauuggaaccucagggucuugcccuaacguuaccaauggaaacggauuuuuugcaacaauggcuugggccgucccaaaaaacgacaaaaacaaaacagcaacaaauccauuaacaauagaaguaccauacauuuguacagaaggagaagaccaaauuaccguuuggggguuccacucugauaacgagacccaaauggcaaagcucuauggggacucaaagccccagaaguucaccucaucugccaacggagugaccacacauuacguuucacagauugguggcuucccaaaucaaacagaagacggaggacuaccacaaagugguagaauuguuguugauuacauggugcaaaaaucugggaaaacaggaacaauuaccuaucaaagagguauuuuauugccucaaaagguguggugcgcaaguggcaggagcaagguaauaaaaggauccuugccuuuaauuggagaagcagauugccuccacgaaaaauacgguggauuaaacaaaagcaagccuuacuacacaggggaacaugcaaaggccauaggaaauugcccaauaugggugaagacacccuugaagcuggccaauggaaccaaauauagaccuccugcaaaacuauuaaaggaaagggguuucuucggagcuauugcugguuucuuagaaggaggaugggaaggaaugauugcagguuggcacggauacacgucccauggggcacauggaguagcgguggcagcagaccuuaagagcacucaagaggccauaaacaagauaacaaaaaaucucaacucuuugagugagcuggaaguaaagaaucuucaaagacuaagcggugccauggaugaacuccacaacgaaauacuagaacuagacgaaaaaguggaugaucucagagcugauacaauaagcucacaaauagaacucgcaguccugcuuuccaaugaaggaauaauaaacagugaagaugaacaucucuuggcgcuugaaagaaagcugaagaaaaugcugggcccuucugcuguagagauagggaauggaugcuuugaaaccaaacacaagugcaaccagaccugucucgacagaauagcugcugguaccuuugaugcaggagaauuuucucuccccaccuuugauucacugaauauuacugcugcaucuuuaaaugacgauggauuggauaaucauaccauacugcuuuacuacucaacugcugccuccaguuuggcuguaacacugaugauagcuaucuuuguuguuuauauggucuccagagacaauguuucuugcuccaucugucuauaa

SEQ ID NO: 59024 - RNA, 1758 nt, Artificial Sequence
  derived and/or modified CDS sequence (wt) from hemagglutinin__InfluenzaB__AGX15929
augaaggcaauaauuguacuacucaugguaguaacauccaaugcagaucggaucugcacugggauaacaucgucaaacucaccacaugucgucaaaacugcuacucaaggggaggucaaugugaccgguguaauaccacugacaacaacacccaccaaaucucauuuugcaaaucucaaaggaacagaaaccagggggaaacuaugcccaaaaugccucaacugcacagaucuggacguagccuugggcagaccaaaaugcacugggaaaauacccucggcaagaguuucaauacuccaugaagucagaccuguuacaucugggugcuuuccuauaaugcacgauagaacaaaaauuagacagcugccuaaccuucuccgaggauacgaacauaucagguuaucaacuaauaacguuaucaaugcagaaaaugcaccaggaggacccuacaaaauuggaacaucagggucuugcccuaacguuaccaauggaaacggauucuucgcaacaauggccugggccgucccaaaaaacgacaaaaacaaaacagcaacaaauccauuaacaauagaaguaccauacauuuguacagaaggagaagaccaaauuaccguuuggggguuccacucugacaacgagacccaaauggcaaagcucuauggggacucaaagccccagaaguucaccucaucugccaacggagugaccacacauuacguuucacagauugguggcuucccaaaucaaacagaagacggaggacuaccacaaagugguagaauuguuguugauuacauggugcaaaaaucugagaaaacaggaacaauuaccuaucaaagagguauuuuauugccucaaaagguguggugcgcaaguggcaggagcaagguaauaaaaggauccuugccuuuaauuggagaagcagauugccuccacgaaaaauacgguggauuaaacaaaagcaagccuuacuacacaggggaacaugcaaaggccauaggaaauugcccaauaugggugaaaacacccuugaagcuggccaauggaaccaaauauagaccuccugcaaaacuauuaaaggaaagggguuucuucggagcuauugcugguuucuuagaaggaggaugggaaggaaugauugcagguuggcacggauacacaucccauggggcacauggaguagcgguggcagcagaccuuaagagcacucaagaggccauaaacaagauaacaaaaaaucucaacucuuugagugagcuggaaguaaagaaucuccaaagacuaagcggugccauggaugaacuccacaacgaaauacuagaacuagaugagaaaguggaugaucucagagcugauacaauaagcucacaaauagagcucgcaguccugcuuuccaaugaaggaauaauaaacagugaagaugaacaucucuuggcgcuugaaagaaagcugaagaaaaugcugggccccucugcuguagagauagggaauggaugcuuugaaaccaaacacaagugcaaccagaccugucucgacagaauagcugcugguaccuuugaugcaggagaauuuucucuccccaccuuugauucacugaauauuacugcugcaucuuuaaaugacgauggauuggauaaucauacuauacugcuuuacuacucaacugcugccuccaguuuggcuguaacacugaugauagcuaucuuuguuguuuauauggucuccagagacaauguuucuugcuccaucugucuauag

SEQ ID NO: 59025 - RNA, 1758 nt, Artificial Sequence
  derived and/or modified CDS sequence (wt) from hemagglutinin__InfluenzaB__AGX15940
augaaggcaauaauuguacuacuuaugguaguaacauccaaugcagaucgaaucugcacugggauaacaucgucaaacucaccacauguagucaaaacugcuacucaaggggaggucaaugugacugguguaauaccacugacaacaacacccaccaaaucucauuuugcaaaucucaaaggaacagaaaccagagggaaacuaugcccaaaaugccccaacugcacagauuuggacguagccuugggcagaccaaaaugcacggggaaaauacccucugcaagaguuucaauacuccaugaagucagaccuguuacaucugggugcuuuccuauaaugcacgacagaacaaaaauuagacagcugccuaaccuucuccgaggauacgaacauaucagauuaucaacucauaacguuaucaaugcagaaaaugcaccaggaggacccuacaaaauuggaaccucagggucuugcccuaacguuaccaauggaaacggauuuuucgcaacaauggcuugggccgucccaaaaaacgacaaaaacaaaacagcaacaaauccauuaacaauagaaguaccauacauuuguacagaaggagaagaccaaauuaccguuuggggguuccacucugauaacgagacccaaauggcaaagcucuauggggacucaaagccccagaaguucaccucaucugccaacggagugaccacacauuacguuucacagauuggcggcuucccaaaucaaacagaagauggaggacuaccacaaagugguagaauuguuguugauuacauggugcaaaaaucugggaaaacaggaacaauuaccuaucaaagagguauuuuauugccucaaaagguguggugcgcaaguggcaggagcaagguaauaaaaggauccuugccuuuaauuggagaagcagauugccuccacgaaaaauacgguggauuaaacaaaagcaagccuuacuacacaggggaacaugcaaaggccauaggaaauugcccaauaugggugaagacacccuugaagcuggccaauggaaccaaauauagaccuccugcaaaacuauuaaaggaaagggguuucuucggagcuauugcugguuucuuagaaggaggaugggaaggaaugauugcagguuggcacggauacacgucccauggggcacauggaguagcgguggcagcagaccuuaagagcacucaagaggccauaaacaagauaacaaaaaaucucaacucuuugagugagcuggaaguaaagaaucuucaaagacuaaguggugccauggaugaacuccacaacgaaauacuagaacuagacgagaaaguggaugaucucagagcugauacaauaagcucacaaauagaacucgcaguccugcuuucuaaugaaggaauaauaaacagugaagaugaacaucucuuggcacuugaaagaaagcugaagaaaaugcugggcccuucugcuguagagauagggaauggaugcuuugaaaccaaacacaagugcaaccagaccugucucgacagaauagcugcugguaccuuugaugcaggagaauuuucucuccccaccuuugauucacugaauauuacugcugcaucuuuaaaugacgauggauuggauaaucauaccauacugcuuuacuacucaacugcugccuccaguuuggcuguaacacugaugauagcuaucuuuguuguuuauauggucuccagagacaauguuucuugcuccaucugucuauaa

SEQ ID NO: 59026 - RNA, 1758 nt, Artificial Sequence
  derived and/or modified CDS sequence (wt) from hemagglutinin__InfluenzaB__AGX15962
augaaggcaauaauuguacuacucaugguaguaacauccaaugcagaucgaaucugcacugggauaacaucgucaaacucaccacauaucgucaaaacugccacucaaggggaggucaaugugacugguguaauaccacugacaacaacacccaccaaaucucauuuugcaaaucucaaaggaacagaaaccagggggaaacuaugcccaaaaugccucaacugcacagaucuggacguagccuugggcagaccaaaaugcacggggaaaauacccucggcaagaguuucaauacuccaugaagucagaccuguuacaucugggugcuuuccuauaaugcacgacagaacaaaaauuagacagcugccuaaccuucucagaggauacgaacauaucagguuaucaacucauaacguuaucaaugcagaaaaugcaccaggaggacccuacaaaauuggaaccucagggucuugcccuaacauuaccaauggaaacggauuuuucgcaacaauggcuugggccgucccaaaaaacgacaaaaacaaaacagcaacaaauccauuaacaauagaaguaccauacauuuguacagaaggagaagaccaaauuaccguuuggggguuccacucugacaaugaaacccaaauggcaaagcucuauggggacucaaagccccagaaguucaccucaucugccaacggagugaccacacauuacguuucacagauugguggcuucccaaaucaaacagaagacggaggacuaccacaaagugguagaauuguuguugauuacaugaugcaaaaaucugggaaaacaggaacaauuaccuaucaaagggguauuuuauugccucaaaagguguggugcgcaaguggcaggagcaagguaauaaaaggauccuugccuuuaauuggagaagcagauugccuccacgaaaaauacgguggauuaaacaaaagcaagccuuacuacacaggggaacaugcaaaggccauaggaaauugcccaauaugggugaaaacacccuugaagcuggccaauggaaccaaauauagaccuccugcaaaacuauuaaaggaaagggguuucuucggugcuauugcuggcuucuuagaaggaggaugggaaggaaugauugcagguuggcacggauacacaucccauggggcacauggaguagcgguggcagcagaccuuaagagcacucaagaggccauaaacaagauaacaaaaaaucucaacucuuugagugagcuggaaguaaagaaucuucaaagacuaagcggugccauggaugaacuccacaaugaaauacuagaauuagaugagaaaguggaugaucucagagcugauacaauaagcucacaaauagaacucgcaguccugcuuuccaaugaaggaauaauaaacagugaagaugaacaucucuuggcgcuugaaagaaagcugaagaaaaugcugggccccucugcuguagagauagggaauggaugcuuugaaaccaaacacaagugcaaccagaccugucucgacagaauagcugcugguaccuuugaugcaggagaauuuucucuccccacuuuugauucacugaauauuacugcugcaucuuuaaaugacgauggauuggauaaucauacuauacugcuuuacuacucaacugcugccuccaguuuggcuguaacacugaugauagcuaucuuuguuguuuauauggucuccagagacaauguuucuugcuccaucugucuauaa

SEQ ID NO: 59027 - RNA, 1758 nt, Artificial Sequence
  derived and/or modified CDS sequence (wt) from hemagglutinin__InfluenzaB__AGX15973
augaaggcaauaauuguacuacucaugguaguaacauccaaugcagaucgaaucugcacugggauaacaucgucaaacucaccacaugucgucaaaacugcuacucaaggggaggucaaugugaccgguguaauaccacugacaacaacacccaccaaaucucauuuugcaaaucucaaaggaacagaaaccagggggaaacuaugcccaaaaugccuaaacugcacagaucuggacguagccuugggcagaccaaaaugcacggggaaaauacccucggcaagaguuucaauacuccaugaagucagaccuguuacaucugggugcuuuccuauaaugcacgauagaacaaaaauuagacagcugccuaaccuucuccgaggauacgaacauaucagguuaucaacucauaacguuaucaaugcagaaaaugcaccaggaggacccuacaaaauuggaaccucagggucuugcccuaacguuaccaauggaaacggauucuucgcaacaauggcuugggccgucccaaaaaacgacaaaaacaaaacagcaacaaauccauuaacaauagaaguaccauacauuuguacagaaggagaagaccaaauuaccguuuggggguuccacucugacaacgagacccaaauggcaaagcucuauggggacucaaagccccagaaguucaccucaucugccaacggagugaccacacauuacguuucacagauugguggcuucccaaaucaaacagaagacggaggacuaccacaaagugguagaauuguuguugauuacauggugcaaaaaucugggaaaacaggaacaauuaccuaucaaagagguauuuuauugccucaaaagguguggugcgcaaguggcaggagcaagguaauaaaaggauccuugccuuuaauuggagaagcagauugccuccacgaaaaauacgguggauuaaacaaaagcaagccuuacuacacaggggaacaugcaaaggcuauaggaaauugcccaauaugggugaaaacacccuugaagcuggccaauggaaccaaauauagaccuccugcaaaacuauuaaaggaaagggguuucuucggagcuauugcugguuucuuagaaggaggaugggaaggaaugauugcagguuggcacggauacacaucccauggggcacauggaguagcgguggcagcagaccuuaagagcacucaagaggccauaaacaagauaacaaaaaaucucaacucuuugagugagcuggaaguaaagaaucuucaaagacuaagcggugccauggaugaacuccacaacgaaauacuagaacuagaugagaaaguggaugaucucagagcugauacaauaagcucacaaauagagcucgcaguccugcuuuccaaugaaggaauaauaaacagugaagaugaacaucucuuggcgcuugaaagaaagcugaagaaaaugcugggccccucugcuguagagauagggaaugggugcuuugaaaccaaacacaagugcaaccagaccugucucgacagaauagcugcugguaccuuugaugcaggagaauuuucucuccccaccuuugauucacugaauauuacugcugcaucuuuaaaugacgauggauuggauaaucauacuauacugcuuuacuacucaacugcugccuccaguuuggcuguaacacugaugauagcuaucuuuguuguuuauauggucuccagagacaauguuucuugcuccaucugucuauaa

SEQ ID NO: 59028 - RNA, 1758 nt, Artificial Sequence
  derived and/or modified CDS sequence (wt) from hemagglutinin__InfluenzaB__AGX15984
augaaggcaauaauuguacuacucaugguaguaacauccaaugcagaucgaaucugcacugggauaacaucgucaaacucaccacaugucgucaaaacugcuacucaaggggaggucaaugugaccgguguaauaccacugacaacaacacccaccaaaucucauuuugcaaaucucaaaggaacagaaaccagggggaaacuaugcccaaaaugccuaaacugcacagaucuggacguagccuugggcagaccaaaaugcacggggaaaauacccucggcaagaguuucaauacuccaugaagucagaccuguuacaucugggugcuuuccuauaaugcacgauagaacaaaaauuagacagcugccuaaccuucuccgaggauacgaacauaucagguuaucaacucauaacguuaucaaugcagaaaaugcaccaggaggacccuacaaaauuggaaccucagggucuugcccuaacguuaccaauggaaacggauucuucgcaacaauggcuugggccgucccaaaaaacgacaaaaacaaaacagcaacaaauccauuaacaauagaaguaccauacauuuguacagaaggagaagaccaaauuaccguuuggggguuccacucugacaacgagacccaaauggcaaagcucuauggggacucaaagccccagaaguucaccucaucugccaacggagugaccacacauuacguuucacagauugguggcuucccaaaucaaacagaagacggaggacuaccacaaagugguagaauuguuguugauuacauggugcaaaaaucugggaaaacaggaacaauuaccuaucaaagagguauuuuauugccucaaaagguguggugcgcaaguggcaggagcaagguaauaaaaggauccuugccuuuaauuggagaagcagauugccuccacgaaaaauacgguggauuaaacaaaagcaagccuuacuacacaggggaacaugcaaaggcuauaggaaauugcccaauauggguaaaaacacccuugaagcuggccaauggaaccaaauauagaccuccugcaaaacuauuaaaggaaagggguuucuucggagcuauugcugguuucuuagaaggaggaugggaaggaaugauugcagguuggcacggauacacaucccauggggcacauggaguagcgguggcagcagaccuuaagagcacucaagaggccauaaacaagauaacaaaaaaucucaacucuuugagugagcuggaaguaaagaaucuucaaagacuaagcggugccauggaugaacuccacaacgaaauacuagaacuagaugagaaaguggaugaccucagagcugauacaauaagcucacaaauagagcucgcaguccugcuuuccaaugaaggaauaauaaacagugaagaugaacaucucuuggcgcuugaaagaaagcugaagaaaaugcugggccccucugcuguagagauagggaaugggugcuuugaaaccaaacacaagugcaaccagaccugucucgacagaauagcugcugguaccuuugaugcaggagaauuuucucuccccaccuuugauucacugaauauuacugcugcaucuuuaaaugacgauggauuggauaaucauacuauacugcuuuacuacucaacugcugccuccaguuuggcuguaacacugaugauagcuaucuuuguuguuuauauggucuccagagacaauguuucuugcuccaucugucuauaa

SEQ ID NO: 59029 - RNA, 1758 nt, Artificial Sequence
  derived and/or modified CDS sequence (wt) from hemagglutinin__InfluenzaB__AGX15995
augaaggcaauaauuguacuacucaugguaguaacauccaaugcagaucgaaucugcacugggauaacaucgucaaacucaccacauaucgucaaaacugccacucaaggggaggucaaugugacugguguaauaccacugacaacaacacccaccaaaucucauuuugcaaaucucaaaggaacagaaaccagggggaaacuaugcccaaaaugccucaacugcacagaucuggacguagccuugggcagaccaaaaugcacggggaaaauacccucggcaagaguuucaauacuccaugaagucagaccuguuacaucugggugcuuuccuauaaugcacgacagaacaaaaauuagacagcugccuaaccuucucagaggauacgaacauaucagguuaucaacucauaacguuaucaaugcagaaaaugcaccaggaggacccuacaaaauuggaaccucagggucuugcccuaacauuaccaauggaaacggauuuuucgcaacaauggcuugggccgucccaaaaaacgacaaaaacaaaacagcaacaaauccauuaacaauagaaguaccauacauuuguacagaaggagaagaccaaauuaccguuuggggguuccacucugacaaugaaacccaaauggcaaagcucuauggggacucaaagccccagaaguucaccucaucugccaacggagugaccacacauuacguuucacagauugguggcuucccaaaucaaacagaagacggaggacuaccacaaagugguagaauuguuguugauuacauggugcaaaaaucugggaaaacaggaacaauuaccuaucaaagggguauuuuauugccucaaaagguguggugcgcaaguggcaggagcaagguaauaaaaggauccuugccuuuaauuggagaagcagauugccuccacgaaaaauacgguggauuaaacaaaagcaagccuuacuacacaggggaacaugcaaaggccauaggaaauugcccaauaugggugaaaacacccuugaagcuggccaauggaaccaaauauagaccuccugcaaaacuauuaaaggaaagggguuucuucggugcuauugcuggcuucuuagaaggaggaugggaaggaaugauugcagguuggcacggauacacaucccauggggcacacggaguagcgguggcagcagaccuuaagagcacucaagaggccauaaacaagauaacaaaaaaucucaacucuuugagugagcuggaaguaaagaaucuucaaagacuaagcggugccauggaugaacuccacaaugaaauacuagaauuagaugagaaaguggaugaucucagagcugauacaauaagcucacaaauagaacucgcaguccugcuuuccaaugaaggaauaauaaacagugaagaugaacaucucuuggcgcuugaaagaaagcugaagaaaaugcugggccccucugcuguagagauagggaauggaugcuuugaaaccaaacacaagugcaaccagaccugucucgacagaauagcugcugguaccuuugaugcaggagaauuuucucuccccacuuuugauucacugaauauuacugcugcaucuuuaaaugacgauggauuggauaaucauacuauacugcuuuacuacucaacugcugccuccaguuuggcuguaacacugaugauagcuaucuuuguuguuuauauggucuccagagacaauguuucuugcuccaucugucuauaa

SEQ ID NO: 59030 - RNA, 1758 nt, Artificial Sequence; identical to SEQ ID NO: 58738
  derived and/or modified CDS sequence (wt) from hemagglutinin__InfluenzaB__AGX16006

SEQ ID NO: 59031 - RNA, 1758 nt, Artificial Sequence
  derived and/or modified CDS sequence (wt) from hemagglutinin__InfluenzaB__AGX16017
augaaggcaauaauuguacuacucaugguaguaacauccaaugcagaucgaaucugcacugggauaacaucgucaaacucaccacauaucgucaaaacugcuacucaaggggaggucaaugugacugguguaauaccacugacaacaacacccaccaaaucucauuuugcaaaucucaaaggaacagaaaccagggggaaacuaugcccaaaaugccucaacugcacagaucuggacguagccuugggcagaccaaaaugcacggggaaaauacccucggcaagaguuucaauacuccaugaagucagaccuguuacaucugggugcuuuccuauaaugcacgacagaacaaaaauuagacagcugccuaaccuucucagaggauacgaacauaucagguuaucaacucauaacguuaucaaugcagaaaaugcaccaggaggacccuacaaaauuggaaccucagggucuugcccuaacauuaccaauggaaacggauuuuucgcaacaauggcuugggccgucccaaaaaacgacaaaaacaaaacagcaacaaauccauuaacaauagaaguaccauacauuuguacagaaggagaagaccaaauuaccguuuggggguuccacucugacaaugaaauccaaauggcaaagcucuauggggacucaaagccccagaaguucaccucaucugccaacggagugaccacacauuacguuucacagauugguggcuucccaaaucaaacagaagacggaggacuaccacaaagugguagaauuguuguugauuacauggugcaaaaaucugggaaaacaggaacaauuaccuaucaaagggguauuuuauugccucaaaagguguggugcgcaaguggcaggagcaagguaauaaaaggauccuugccuuuaauuggagaagcagauugccuccacgaaaaauacgguggauuaaacaaaagcaagccuuacuacacaggggaacaugcaaaggccauaggaaauugcccaauaugggugaaaacacccuugaagcuggccaauggaaccaaauauagaccuccugcaaaacuauuaaaggaaagggguuucuucggugcuauugcuggcuucuuagaaggaggaugggaaggaaugauugcagguuggcacggauacacaucccauggggcacauggaguagcgguggcagcagaccuuaagagcacucaagaggccauaaacaagauaacaaaaaaucucaacucuuugagugagcuggaaguaaagaaucuucaaagacuaagcggugccauggaugaacuccacaaugaaauacuagaauuagaugagaaaguggaugaucucagagcugauacaauaagcucacaaauagaacucgcaguccugcuuuccaaugaaggaauaauaaacagugaagaugaacaucucuuggcgcuugaaagaaagcugaagaaaaugcugggccccucugcuguagagauagggaauggaugcuuugaaaccaaacacaagugcaaccagaccugucucgacagaauagcugcugguaccuuugaugcaggagaauuuucucuccccacuuuugauucacugaauauuacugcugcaucuuuaaaugacgauggauuggauaaucauacuauacugcuuuacuacucaacugcugccuccaguuuggcuguaacacugaugauagcuaucuuuguuguuuauauggucuccagagacaauguuucuugcuccaucugucuauaa

SEQ ID NO: 59032 - RNA, 1755 nt, Artificial Sequence; identical to SEQ ID NO: 58667
  derived and/or modified CDS sequence (wt) from hemagglutinin__InfluenzaB__AGX16028

SEQ ID NO: 59033 - RNA, 1755 nt, Artificial Sequence
  derived and/or modified CDS sequence (wt) from hemagglutinin__InfluenzaB__AGX16039
augaaggcaauaauuguacuacucaugguaguaacauccaaugcagaucgaaucugcacugggauaacaucuucaaacucaccucauguggucaaaacagcuacucaaggggaggucaaugugacuggugugauaccacugacaacaacaccaacaaagucuuauuuugcaaaucucaaaggaacaaggaccagagggaaacuaugcccagacugucucaacuguacagaucuggauguggccuugggcaggccaauguguguggggaccacaccuucugcgaaagcuucaauacuccacgaagucagaccuguuacauccgggugcuuuccuauaaugcacgacagaacaaaaaucagacaacuacccaaucuucucagaggauaugaaaauaucagguuaucaacccaaaacguuaucgaugcagaaaaggcaccaggaggacccuacagacuuggaaccucaggaucuugcccuaacgcuaccaguaaaagcggauuuuucgcaacaauggcuugggcugucccaaaggacaacaacaaaaaugcaacgaacccacuaacaguagaaguaccauacauuuguacagaaggggaagaccaaauuacuguuuggggguuccauucagauaacaaaacccaaaugaagaaccucuauggagacucaaauccucaaaaguucaccucaucugcuaauggaguaaccacacauuauguuucucagauuggcggcuucccagaucaaacagaagacggaggacuaccacaaagcggcagaauuguuguugauuacaugaugcaaaaaccugggaaaacaggaacaauugucuaucaaagagguguuuuguugccucaaaagguguggugcgcgaguggcaggagcaaaguaauaaaaggguccuugccuuuaauuggugaagcagauugccuucaugaaaaauacgguggauuaaacaaaagcaagccuuacuacacaggagaacaugcaaaagccauaggaaauugcccaauaugggugaaaacaccuuugaagcuugccaauggaaccaaauauagaccuccugcaaaacuauuaaaggaaagggguuucuucggagcuauugcugguuuccuagaaggaggaugggaaggaaugauugcagguuggcacggauacacaucucacggagcacauggaguggcaguggcggcagaccuuaagaguacacaagaagcuauaaacaagauaacaaaaaaucucaauucuuugagugagcuagaaguaaagaaucuucaaagacuaaguggugccguggaugaacuccacaacgaaauacucgagcuggaugagaaaguggaugaucucagagcugacacuauaagcucacaaauagaacuugcagucuugcuuuccaacgaaggaauaauaaacagugaagacgagcaucuauuggcacuugagagaaaacuaaagaaaaugcugggucccucugcuguagacauaggaaauggaugcuucgaaaccaaacacaaaugcaaccagaccugcuuagacaggauagcugcuggcaccuuuaaugcaggagaauuuucucuccccacuuuugauucauugaacauuacugcugcaucuuuaaaugaugauggauuggauaaccauacuauacugcucuauuacucaacugcugcuucuaguuuggcuguaacauugaugcuagcuauuuuuauuguuuauauggucuccagagacaacguuucaugcuccaucugucuauaa

SEQ ID NO: 59034 - RNA, 1755 nt, Artificial Sequence
  derived and/or modified CDS sequence (wt) from hemagglutinin__InfluenzaB__AGX16050
augaaggcaauaauuguacuacucaugguaguaacauccaaugcagaucgaaucugcacugggauaacaucuucaaacucaccucauguggucaaaacagcuacucaaggggaggucaaugugacugguguaauaccacugacaacaacaccaacaaaaucuuauuuugcaaaucucaaaggaacaaggaccagagggaaacuauguccagacugucucaacuguacagaucuggauguggccuugggcagaccaaugugugugggaaccacaccuucggcaaaagcuucaauacuccacgaagucagaccuguuacauccgggugcuuuccuauaaugcacgacagaacaaaaaucagacaacuacccaaucuucucagaggauaugaaaauaucagauuaucaacccaaaacguuaucgaugcagaaaaugcaccaggaggacccuacagacuuggaaccucaggaucuugcccuaacgcuaccaguaaaagcggauuuuucgcaacaauggcuugggcugucccaaaggacaacaacaaaaaugcaacgaacccacuaacaguagaaguaccauacauuuguacagaaggagaagaccaaauuacuguuuggggguuccauucagauaacaaaacccaaaugaagaaccucuauggagacucaaauccucaaaaguucaccucaucugcuaauggaguaaccacacauuauguuucucagauuggcggcuucccagcucaaacagaagacggaggacuaccacaaagcggcagaauuguuguugauuacauggugcaaaaaccuaggaaaacaggaacaauugucuaucaaagagguguuuuguugccucaaaagguguggugcgcgaguggcaggagcaaaguaauaaaaggguccuugccuuuaauuggugaagcagauugccuucaugaaaaauacgguggauuaaacaaaagcaagccuuacuacacaggagaacaugcaaaagccauaggaaauugcccaauaugggugaaaacaccuuugaagcuugccaauggaaccaaauauagaccuccugcaaaacuauuaaaggaaagggguuucuucggagcuauugcugguuuccuagaaggaggaugggaaggaaugauugcagguuggcacggauacacaucucacggagcacauggaguggcaguggcggcagaccuuaagaguacgcaagaagcuauaaacaagauaacaaaaaaucucaauucuuugagugagcuagaaguaaagaaucuucaaagacuaaguggugccauggaugaacuccacaacgaaauacucgagcuggaugagaaaguggaugaucucagagcugacacuauaagcucgcaaauagaacuugcagucuugcuuuccaaugaaggaauaauaaacagugaagaugagcaucuauuggcacuugagagaaaacuaaagaaaaugcugggucccucugcuguagacauaggaaauggaugcuucgaaaccaaacacaagugcaaccagaccugcuuagacaggauagcugcuggcaccuuuaaugcaggagaauuuucucuccccacuuuugauucacugaacauuacugcugcaucuuuaaaugaugauggauuggauaaccauacuauacugcucuauuacucaacugcugcuucuaguuuggcuguaacauugaugcuagcuauuuuuauuguuuauauggucuccagagacaacguuucaugcuccaucugucuauaa

SEQ ID NO: 59035 - RNA, 1755 nt, Artificial Sequence
  derived and/or modified CDS sequence (wt) from hemagglutinin__InfluenzaB__AGX16061
augaaggcaauaauuguacuacucaugguaguaacauccaaugcagaucgaaucugcacugggauaacaucuucaaacucaccucauguggucaaaacagccacucaaggggaggucaaugugacuggugugauaccacugacaacaacaccaacaaaaucuuauuuugcaaaucucaaaggaacaaggaccagagggaaacuaugcccagacugucucaacuguacagaucuggauguggccuugggcagaccaauguguguggggaccacaccuucugcgaaagcuucaauacuccacgaagucagaccuguuacaucugggugcuuuccuauaaugcacgacagaacaaaaaucaggcaacuacccaaucuucucagaggauaugaaaauaucagguuaucaacccaaaacguuaucgaugcagaaaaggcaccaggaggacccuacagacuuggaaccucaggaucuugcccuaacgcuaccaguaaaagcggauuuuucgcaacaauggcuugggcugucccaaaggacaacaacaaaaaugcaacgaacccacuaacaguagaaguaccauacauuuguacagaaggggaagaccaaauuacuguuuggggguuccauucagauaacaaaacccaaaugaagaaccucuauggggacucaaauccucaaaaguucaccucaucugcuaauggaguaaccacacauuauguuucucagauuggcggcuucccagaucaaacagaagacggaggacuaccacaaagcggcagaauuguuguugauuacaugaugcaaaaaccugggaaaacaggaacaauugucuaucaaagagguguuuuguugccucaaaagguguggugcgcgaguggcaggagcaaaguaauaaaaggguccuugcccuuaauuggugaagcagauugccuucaugaaaaauacgguggauuaaacaaaagcaagccuuacuacacaggagaacaugcaaaagccauaggaaauugcccaauaugggugaaaacaccuuugaaacuugccaauggaaccaaauauagacccccugcaaaacuauuaaaggaaagggguuucuucggagcuauugcugguuuccuagaaggaggaugggaaggaaugauugcagguuggcacggauacacaucucacggagcacauggaguggcaguggcggcagaccuuaagaguacacaagaagcuauaaacaagauaacaaaaaaucucaauucuuugagugagcuagaaguaaagaaucuucaaagacuaaguggugccauggaugaacuccacaacgaaauacucgagcuggaugagaaaguggaugaucucagagcugacacuauaagcucacaaauagaacuugcagucuugcuuuccaacgaaggaauaauaaacagugaagaugagcaucuauuggcacuugagagaaaacuaaagaaaaugcugggucccucugcuguagacauaggaaauggauguuucgaaaccaaacacaagugcaaccagaccugcuuagacaggauagcugcuggcaccuuuaaugcaggagaauuuucucuccccacuuuugauucacugaacauuacugcugcaucuuuaaaugaugauggauuggauaaccauacuauacugcucuauuacucaacugcugcuucuaguuuggcuguaacauugaugcuagcuauuuuuauuguuuauauggucuccagagacaacguuucaugcuccaucugucuauaa

SEQ ID NO: 59036 - RNA, 1755 nt, Artificial Sequence
  derived and/or modified CDS sequence (wt) from hemagglutinin__InfluenzaB__AGX16083
augaaggcaauaauuguacuacucaugguaguaacauccaaugcagaucgaaucugcacugggauaacaucuucaaacucaccucauguggucaaaacagcuacucaaggggaggucaaugugacuggugugauaccacuaacaacaacaccaacaaaaucuuauuuugcaaaucucaaaggaacaaggaccagagggaaacuaugcccagacugucucaacuguacagaucuggauguggccuugggcagaccaauguguguggggaccacaccuucggcgaaagcuucaauacuccacgaagucagaccuguuacauccgggugcuuuccuauaaugcacgacagaacaaaaaucaggcaacuacccaaucuucucagaggauaugaaaauaucagguuaucaacccaaaacgucaucgaugcagaaaaggcaccaggaggacccuacagacuuggaaccucaggaucuugcccuaacgcuaccaguaaaagcggauuuuucgcaacaauggcuugggcugucccaaaggacaacaacaaaaaugcaacgaacccacuaacaguagaaguaccauacauuuguacagaaggggaagaccaaaucacuguuuggggguuccauucagauaacaaaacccaaaugaagaaccucuauggagacucaaauccucaaaaguucaccucaucugcuaauggaguaaccacacacuauguuucucagauuggcggcuucccagaucaaacagaagacggaggacuaccacaaagcggcaggauuguuguugauuacaugaugcaaaaaccugggaaaacaggaacaauugucuaccaaagagguguuuuguugccucaaaagguguggugcgcgaguggcaggagcaaaguaauaaaaggguccuugccuuuaauuggugaagcagauugccuucaugaaaaauacgguggauuaaacaaaagcaagccuuacuacacaggagaacaugcaaaagccauaggaaauugcccaauaugggugaaaacaccuuugaagcuugccaauggaaccaaauauagaccuccugcaaaacuauuaaaggaaagggguuucuucggagcuauugcugguuuccuagaaggaggaugggaaggaaugauugcaggcuggcacggauacacaucucacggagcacauggaguggcaguggcggcggaccuuaagaguacgcaagaagcuauaaacaagauaacaaaaaaucucaauucuuugagugagcuagaaguaaagaaucuucaaagacuaaguggugccauggaugaacuccacaacgaaauacucgagcuggaugagaaaguggaugaucucagagcugacacuauaagcucgcaaauagaacuugcagucuugcuuuccaacgaaggaauaauaaacagugaagaugagcaucuauuggcacuugagagaaaacuaaagaaaaugcugggucccucugcuguagagauaggaaauggaugcuucgaaaccaaacacaagugcaaccagaccugcuuagacaggauagcugcuggcaccuuuaaugcaggagaauuuucucuccccacuuuugauucacugaacauuacugcugcaucuuuaaaugaugauggauuggauaaccauacuauacugcucuauuacucaacugcugcuucuaguuuggcuguaacauugaugcuagcuauuuuuauuguuuauauggucuccagagacaacguuucaugcuccaucugucuauaa

SEQ ID NO: 59037 - RNA, 1755 nt, Artificial Sequence
  derived and/or modified CDS sequence (wt) from hemagglutinin__InfluenzaB__AGX16105
augaaggcaauaauuguacuacucaugguaguaacauccaaugcagaucgaaucugcacugggauaacaucuucaagcucaccucauguggucaaaacagcuacucaaggggaggucaaugugacuggugugauaccacugacaacaacaccaacaaaaucuuauuuugcaaaucucaaaggaacaaggaccagagggaaacuaugcccagacugucucaacuguacagaucuggauguggccuugggcagaccaauguguguggggaccacaccuucagcgaaagcuucaauacuccacgaagucagaccuguuacauccgggugcuuuccuauaaugcacgacagaacaaaaaucaggcaacuacccaaucuucucagaggauaugaaaauaucagguuaucaacccaaaacguuaucgaugcagaaaaggcaccaggaggacccuacagacuuggaaccucaggaucuugcccuaacgcuaccaguaaaagcggauuuuucgcaacaauggcuugggcugucccaaaggacaacaacaaaaaugcaacgaacccacuaacaguagaaguaccauacauuuguacagaaggggaagaccaaauuacuguuuggggguuccauucagauaacaaaacccaaaugaagaaccucuauggagacucaaauccucaaaaguucaccucaucugcuaauggaguaaccacacauuauguuucucagauuggcggcuucccagaucaaacagaagacggaggacuaccacaaagcggcagaauuguuguugauuacaugaugcaaaaaccugggaaaacaggaacaauugucuaccaaagagguguuuuguugccucaaaagguguggugcgcgaguggcaggagcaaaguaauaaaaggguccuugccuuuaauuggugaagcagauugccuucaugaaaaauacgguggauuaaacaaaagcaagccuuacuacacaggagaacaugcaaaagccauaggaaauugcccaauaugggugaaaacaccuuugaagcuugccaauggaaccaaauauagaccuccugcaaaacuauuaaaggaaagggguuucuucggagcuauugcugguuuccuagaaggaggaugggaaggaaugauugcaggcuggcacggauacacaucucacggagcacauggaguggcaguggcggcagaccuuaagaguacgcaagaagcuauaaacaagauaacaaaaaaucucaauucuuugagugagcuagaaguaaagaaucuucaaagacuaaguggugccauggaugaacuccacagugaaauacucgagcuggaugagaaaguggaugaucucagagcugacacuauaagcucgcaaauagaacuugcagucuugcuuuccaacgaaggaauaauaaacagugaagaugagcaucuacuggcacuugagagaaagcuaaagaaaaugcugggucccucugcuguagacauaggaaauggaugcuucgaaaccaaacacaagugcaaccagaccugcuuagacaggauagcugcuggcaccuuuaaugcaggagaauuuucucuccccacuuuugauucacugaacauuacugcugcaucuuuaaaugaugauggauuggauaaccauacuauacugcucuauuacucaacugcugcuucuaguuuggcuguaacauugaugcuagcuauuuuuauuguuuauauggucuccagagacaacguuucaugcuccaucugucuauaa

SEQ ID NO: 59038 - RNA, 1755 nt, Artificial Sequence
  derived and/or modified CDS sequence (wt) from hemagglutinin__InfluenzaB__AGX16116
augaaggcaauaauuguacuacucaugguaguaacauccaaugcagaucgaaucugcacugggauaacaucuucaaacucaccucauguggucaaaacagcuacacaaggggaggucaaugugacugguguaauaccacugacaacaacaccaacaaaaucuuauuuugcaaaucucaaaggaacaaggaccagagggaaacuauguccagacugucucaacuguacagaucuagauguggccuugggcagaccaaugugugugggaaccacaccuucggcaaaagcuucaauacuccacgaagucagaccuguuacauccgggugcuuuccuauaaugcacgacagaacaaaaaucagacaacuacccaaucuucucagaggauaugaaaauaucagauuaucaacccaaaacguuaucgaugcagaaaaugcaccaggaggacccuacagacuuggaaccucaggaucuugcccuaacgcuaccaguaaaagcggauucuucgcaacaauggcuugggcugucccaaaggacaacaacaaaaaugcaacgaacccacuaacaguagaaguaccauacguuuguacggaaggggaagaccaaauuacuguuuggggguuccauucagauaacaaaacccaaaugaagaaccucuauggagacucaaauccucaaaaguucaccucaucugcuaauggaguaaccacacauuauguuucucagauuggcggcuucccagcucaaacagaagacggaggacuaccacaaagcggcagaauuguuguugauuacauggugcaaaaaccuaggaaaacaggaacaauugucuaucaaagagguguuuuguugccucaaaagguguggugcgcgaguggcaggagcaaaguaauaaaaggguccuugccuuuaauuggugaagcagauugccuucaugaaaaauacgguggauuaaacaaaagcaagccuuacuacacaggagaacaugcaaaagccauaggaaauugcccaauaugggugaaaacaccuuugaagcuugccaauggaaccaaauauagaccuccugcaaaacuauuaaaggaaagggguuucuucggagcuauugcugguuuccuagaaggaggaugggaaggaaugauugcagguuggcacggauacacaucucacggagcacauggaguggcaguggcggcagaccuuaagaguacgcaagaagcuauaaacaagauaacaaaaaaucucaauucuuugagugagcuagaaauaaagaaucuucaaagacuaaguggugccauggaugaacuccacaacgaaauacucgagcuggaugagaaaguggaugaucucagagcugacacuauaagcucgcaaauagaacuugcagucuugcuuuccaaugaaggaauaauaaacagugaagaugagcaucuauuggcacuugagagaaaacuaaagaaaaugcugggucccucugcuguagacauaggaaauggaugcuucgaaaccaaacacaagugcaaccagaccugcuuagacaggauagcugcuggcaccuuuaaugcaggagaauuuucucuccccacuuuugauucacugaacauuacugcugcaucuuuaaaugaugauggauuggauaaccauacuauacugcucuauuacucaacugcugcuucuaguuuggcuguaacauugaugcuagcuauuuuuauuguuuauauggucuccagagacaacguuucaugcuccaucugucuauaa

SEQ ID NO: 59039 - RNA, 1755 nt, Artificial Sequence
  derived and/or modified CDS sequence (wt) from hemagglutinin__InfluenzaB__AGX16127
augaaggcaauaauuguacuacucaugguaguaacauccaaugcagaucgaaucugcacugggauaacaucuucaaacucaccucauguggucaaaacagcuacucaaggggaggucaaugugacugguguaauaccacugacaacaacaccaacaaaaucuuauuuugcaaaucucaaaggaacaaggaccagagggaaacuauguccagacugucucaacuguacagaucuagauguggccuugggcagaccaaugugugugggaaccacaccuucggcaaaagcuucaauacuccacgaagucagaccuguuacauccgggugcuuuccuauaaugcacgacagaacaaaaaucagacaacuacccaaucuucucagaggauaugaaaauaucagauuaucaacccaaaacguuaucgaugcagaaaaugcaccaggaggacccuacagacuuggaaccucaggaucuugcccuaacgcuaccaguaaaagcggauucuucgcaacaauggcuugggcugucccaaaggacaacaacaaaaaugcaacgaacccacuaacaguagaaguaccauacguuuguacggaaggggaagaccaaauuacuguuuggggguuccauucagauaacaaaauccaaaugaagaaccucuauggagacucaaauccucaaaaguucaccucaucugcuaauggaguaaccacacauuauguuucucagauuggcggcuucccagcucaaacagaagacggaggacuaccacaaagcggcagaauuguuguugauuacauggugcaaaaaccuaggaaaacaggaacaauugucuaucaaagagguguuuuguugccucaaaagguguggugcgcgaguggcaggagcaaaguaauaaaaggguccuugccuuuaauuggugaagcagauugccuucaugaaaaauacgguggauuaaacaaaagcaagccuuacuacacaggagaacaugcaaaagccauaggaaauugcccaauaugggugaaaacaccuuugaagcuugccaauggaaccaaauauagaccuccugcaaaacuauuaaaggaaagggguuucuucggagcuauugcugguuuccuagaaggaggaugggaaggaaugauugcagguuggcacggauacacaucucacggagcacauggaguggcaguggcggcagaccuuaagaguacgcaagaagcuauaaacaagauaacaaaaaaucucaauucuuugagugagcuagaaauaaagaaucuucaaagacuaaguggugccauggaugaacuccacaacgaaauacucgagcuggaugagaaaguggaugaucucagagcugacacuauaagcucgcaaauagaacuugcagucuugcuuuccaaugaaggaauaauaaacagugaagaugagcaucuauuggcacuugagagaaaacuaaagaaaaugcugggucccucugcuguagacauaggaaauggaugcuucgaaaccaaacacaagugcaaccagaccugcuuagacaggauagcugcuggcaccuuuaaugcaggagaauuuucucuccccacuuuugauucacugaacauuacugcugcaucuuuaaaugaugauggauuggauaaccauacuauacugcucuauuacucaacugcugcuucuaguuuggcuguaacauugaugcuagcuauuuuuauuguuuauauggucuccagagacaacguuucaugcuccaucugucuauaa

SEQ ID NO: 59040 - RNA, 1755 nt, Artificial Sequence; identical to SEQ ID NO: 59038
  derived and/or modified CDS sequence (wt) from hemagglutinin__InfluenzaB__AGX16138

SEQ ID NO: 59041 - RNA, 1755 nt, Artificial Sequence
  derived and/or modified CDS sequence (wt) from hemagglutinin__InfluenzaB__AGX16149
augaaggcaauaauuguacuacucaugguaguaacauccaaugcagaucgaaucugcacugggauaacaucuucaaacucaccucauguggucaaaacagcuacucaaggggaggucaaugugacuggugugauaccacugacaacaacaccaacaaaaucuuauuuugcaaaucucaaaggaacaaggaccagagggaaacuaugcccagacugucucaacuguacagaucuggauguggccuugggcaggccaauguguguggggaccacaccuucugcgaaagcuucaauacuccacgaagucagaccuguuacauccgggugcuuuccuauaaugcacgacagaacaaaaaucaggcaacuacccaaucuucucagaggauaugaaaauaucagguuaucaacccaaaacguuaucgaugcagaaaaggcaccaggaggacccuacagacuuggaaccucaggaucuugcccuaacgcuaccaguaaaagcggauuuuucgcaacaauggcuugggcugucccaaaggacaacaacaaaaaugcaacgaacccacuaacaguagaaguaccauacauuuguacagaaggggaagaccaaauuacuguuuggggguuccauucagauaacaaaacccaaaugaagaaccucuauggagacucaaauccucaaaaguucaccucaucugcuaauggaguaaccacacauuauguuucucagauuggcggcuucccagaucaaacagaagacggaggacuaccacaaagcggcagaauuguuguugauuacaugaugcaaaaaccugggaaaacaggaacaauugucuaucaaagagguguuuuguugccucaaaagguguggugcgcgaguggcaggagcaaaguaauaaaaggguccuugccuuuaauuggugaagcagauugccuucaugaaaaauacgguggauuaaacaaaagcaagccuuacuacacaggagaacaugcaaaagccauaggaaauugcccaauaugggugaaaacaccuuugaagcuugccaauggaaccaaauauagaccuccugcaaaacuauuaaaggaaagggguuucuuuggagcuauugcugguuuccuagaaggaggaugggaaggaaugauugcagguuggcacggauacacaucucacggagcacauggaguggcaguggcggcagaccuuaagaguacacaagaagcuauaaacaagauaacaaaaaaucucaauucuuugagugagcuagaaguaaagaaucuucaaagacuaaguggugccauggaugaacuccacaacgaaauacucgagcuggaugagaaaguggaugaucucagagcugacacuauaagcucacaaauagaacuugcagucuugcuuuccaacgaaggaauaauaaacagugaagacgagcaucuauuggcacuugagagaaaacuaaagaaaaugcugggucccucugcuguagacauaggaaauggaugcuucgaaaccaaacacaaaugcaaccagaccugcuuagacaggauagcugcuggcaccuuuaaugcaggagaauuuucucuccccaccuuugauucauugaacauuacugcugcaucuuuaaaugaugauggauuggauaaccauacuauacugcucuauuacucaacugcugcuucuaguuuggcuguaacauugaugcuagcuauuuuuauuguuuauauggucuccagagacaacguuucaugcuccaucugucuauaa

SEQ ID NO: 59042 - RNA, 1755 nt, Artificial Sequence; identical to SEQ ID NO: 59036
  derived and/or modified CDS sequence (wt) from hemagglutinin__InfluenzaB__AGX16160

SEQ ID NO: 59043 - RNA, 1755 nt, Artificial Sequence
  derived and/or modified CDS sequence (wt) from hemagglutinin__InfluenzaB__AGX16182
augaaggcaauaauuguacuacucaugguaguaacauccaaugcagaucgaaucugcacugggauaacaucuucaaacucaccucauguggucaaaacagcuacucaaggggaggucaaugugacuggugugauaccacuaacaacaacaccaacaaaaucuuauuuugcaaaucucaaaggaacaaggaccagagggaaacuaugcccagacugucucaacuguacagaucuggauguggccuugggcagaccaauguguguggggaccacaccuucggcgaaagcuucaauacuccacgaagucagaccuguuacauccgggugcuuuccuauaaugcacgacagaacaaaaaucaggcaacuacccaaucuucucagaggauaugaaaauaucaggcuaucaacccaaaacgucaucgaugcagaaaaggcaccaggaggacccuacagacuuggaaccucaggaucuugcccuaacgcuaccaguaaaagcggauuuuucgcaacaauggcuugggcugucccaaaggacaacaacaaaaaugcaacgaacccacuaacaguagaaguaccauacauuuguacagaaggggaagaccaaaucacuguuuggggguuccauucugauaacaaaacccaaaugaagaaccucuauggagacucaaauccucaaaaguucaccucaucugcuaauggaguaaccacacacuauguuucucagauuggcggcuucccagaucaaacagaagacggagggcuaccacaaagcggcaggauuguuguugauuacaugaugcaaaaaccugggaaaacaggaacaauugucuaccaaagagguguuuuguugccucaaaagguguggugcgcgaguggcaggagcaaaguaauaaaaggguccuuaccuuuaauuggugaagcagauugccuucaugaaaaauacgguggauuaaacaaaagcaagccuuacuacacaggagaacaugcaaaagccauaggaaauugcccaauaugggugaaaacaccuuugaagcuugccaauggaaccaaauauagaccuccugcaaaacuauuaaaggaaagggguuucuucggagcuauugcugguuuccuagaaggaggaugggaaggaaugauugcaggcuggcacggauacacaucucacggagcacauggaguggcaguggcggcggaccuuaagaguacgcaagaagcuauaaacaagauaacaaaaaaucucaauucuuugagugagcuagaaguaaagaaucuucaaagacuaaguggugccauggaugaacuccacaacgaaauacucgagcuggaugagaaaguggaugaucucagagcugacacuauaagcucgcaaauagaacuugcagucuugcuuuccaaugaaggaauaauaaacagugaagaugagcaucuauuggcacuugaaagaaaacuaaagaaaaugcugggucccucugcuguagagauaggaaauggaugcuucgaaaccaaacacaagugcaaccagaccugcuuagacaggauagcugcuggcaccuuuaaugcaggagaauuuucucuccccacuuuugauucacugaacauuacugcugcaucuuuaaaugaugauggauuggauaaccauacuauacugcucuauuacucaacugcugcuucuaguuuggcuguaacauugaugcuagcuauuuuuauuguuuauauggucuccagagacaacguuucaugcuccaucugucuauaa

SEQ ID NO: 59044 - RNA, 1755 nt, Artificial Sequence
  derived and/or modified CDS sequence (wt) from hemagglutinin__InfluenzaB__AGX16193
augaaggcaauaauuguacuacucaugguaguaacauccaaugcagaucgaaucugcacugggauaacaucuucaaacucaccucauguggucaaaacagcuacucaaggggaggucaaugugacuggugugauaccacuuacaacaacaccaacaaaaucuuauuuugcaaaucucaaaggaacaaggaccagagggaaacuaugcccagacugucucaacuguacagaucuggauguggccuugggcagaccaauguguguggggaccacaccuucugcgaaagcuucaauacuccacgaagucagaccuguuacauccgggugcuuuccuauaaugcacgacagaacaaaaaucaggcaacuagccaaucuucucagaggauaugaaaauaucagguuaucaacccaaaacguuaucgaugcagaaaaggcaccaggaggacccuacagacuuggaaccucaggaucuugcccuaacgcuaccaguaaaagcggauuuuucgcaacaauggcuugggcugucccaaaggacaacaacaaaaaugcaacgaacccacuaacaguagaaguaccauacauuuguacagaaggggaagaccaaauuacuguuuggggguuccauucagauaacaaaacccaaaugaagaaccucuauggagacucaaauccucaaaaguucaccucaucugcuaauggaguaaccacacauuauguuucucagauuggcggcuucccagaucaaacagaagacggaggacuaccacaaagcggcagaauugucguugauuacaugaugcaaaaaccugggaaaacaggaacaauugucuaucaaagagguguuuuguugccucaaaagguguggugcgcgaguggcaggagcaaaguaauaaaaggguccuugccuuuaauuggugaagcagauugccuucaugaaaaauacgguggauuaaacaaaagcaagccuuacuacacaggagaacaugcaaaagccauaggaaauugcccaauaugggugaaaacaccuuugaagcuugccaauggaaccaaauauagaccuccugcaaaacuauuaaaggaaagggguuucuucggagcuauugcugguuuccuagaaggaggaugggaaggaaugauugcagguuggcacggauacacaucucacggagcacauggaguggcaguugcggcagaccuuaagaguacacaagaagcuauaaacaagauaacaaaaaaucucaacucuuugagugagcuagaaguaaagaaucuucaaagacuaaguggugccauggaugaacuccacaacgaaauacucgagcuggaugagaaaguggaugaucucagagcugacacuauaagcucacaaauagaacuugcagucuugcuuuccaacgaaggaauaauaaacagugaagacgagcaucuauuggcacuugagagaaaacuaaagaaaaugcugggucccucugcuguagacauaggaaauggaugcuucgaaaccaaacacaaaugcaaccagaccugcuuagacaggauagcugcuggcaccuuuaaugcaggagaauuuucucuccccacuuuugauucauugaacauuacugcugcaucuuuaaaugaugauggauuggauaaccauacuauacugcucuauuacucaacugcugcuucuaguuuggcuguaacauugaugcuagcuauuuuuauuguuuauauggucuccagagacaacguuucaugcuccaucugucuauaa

SEQ ID NO: 59045 - RNA, 1755 nt, Artificial Sequence
  derived and/or modified CDS sequence (wt) from hemagglutinin__InfluenzaB__AGX16215
augaaggcaauaauuguacuacucaugguaguaacauccaaugcagaucgaaucugcacugggauaacaucuucaaacucaccucauguggucaaaacagcuacucaaggggaggucaaugugacuggugugauaccacugacaacaacaccaacaaaaucuuauuuugcaaaucucaaaggaacaaggaccagagggaaacuaugcccagacugucucaacuguacagaucuggauguggccuugggcagaccaauguguguggggaccacaccuucugcgaaagcuucaauacuccacgaagucagaccuguuacauccgggugcuuuccuauaaugcacgacagaacaaaaaucaggcaacuagccaaucuucucagaggauaugaaaauaucagguuaucaacccaaaacguuaucgaugcagaaaaggcaccaggaggacccuacagacuuggaaccucaggaucuugcccuaacgcuaccaguaaaagcggauuuuucgcaacaauggcuugggcugucccaaaggacaacaacaaaaaugcaacgaacccacuaacaguagaaguaccauacauuuguacagaaggggaagaccaaauuacuguuuggggguuccauucagauaacaaaacccaaaugaagaaccucuauggagacucaaauccucaaaaguucaccucaucugcuaauggaguaaccacacauuauguuucucagauuggcggcuucccagaucaaacagaagacggaggacuaccacaaagcggcagaauugucguugauuacaugaugcaaaaaccugggaaaacaggaacaauugucuaucaaagagguguuuuguugccucaaaagguguggugcgcgaguggcaggagcaaaguaauaaaaggguccuugccuuuaauuggugaagcagauugccuucaugaaaaauacgguggauuaaacaaaagcaagccuuacuacacaggagaacaugcaaaagccauaggaaauugcccaauaugggugaaaacaccuuugaagcuugccaauggaaccaaauauagaccuccugcaaaacuauuaaaggaaagggguuucuucggagcuauugcugguuuccuagaaggaggaugggaaggaaugauugcagguuggcacggauacacaucucacggagcacauggaguggcaguugcggcagaccuuaagaguacacaagaagcuauaaacaagauaacaaaaaaucucaacucuuugagugagcuagaaguaaagaaucuucaaagacuaaguggugccauggaugaacuccacaacgaaauacucgagcuggaugagaaaguggaugaucucagagcugacacuauaagcucacaaauagaacuugcagucuugcuuuccaacgaaggaauaauaaacagugaagacgagcaucuauuggcacuugagagaaaacuaaagaaaaugcugggucccucugcuguagacauaggaaauggaugcuucgaaaccaaacacaaaugcaaccagaccugcuuagacaggauagcugcuggcaccuuuaaugcaggagaauuuucucuccccacuuuugauucauugaacauuacugcugcaucuuuaaaugaugauggauuggauaaccauacuauacugcucuauuacucaacugcugcuucuaguuuggcuguaacauugaugcuagcuauuuuuauuguuuauauggucuccagagacaacguuucaugcuccaucugucuauaa

SEQ ID NO: 59046 - RNA, 1755 nt, Artificial Sequence
  derived and/or modified CDS sequence (wt) from hemagglutinin__InfluenzaB__AGX16226
augaaggcaauaauuguacuacucaugguaguaacauccaaugcagaucgaaucugcacugggauaacaucuucaaacucaccucauguggucaaaacagcuacucaaggggaggucaaugugacuggugugauaccacugacaacaacaccaacaaaaucuuauuuugcaaaucucaaaggaacaaggaccagagggaaacuaugcccagacugucucaacuguacagaucuggauguggccuugggcaggccaauguguguggggaccacaccuucugcgaaagcuucaauacuccacgaagucagaccuguuacauccgggugcuuuccuauaaugcacgacagaacaaaaaucaggcaacuagccaaucuucucagaggauaugaaaauaucagguuaucaacccaaaacguuaucgaugcagaaaaggcaccaggaggacccuacagacuuggaaccucaggaucuugcccuaacgcuaccaguaaaagcggauuuuucgcaacaauggcuugggcugucccaaaggacaacaacaaaaaugcaacgaacccacuaacaguagaaguaccauacauuuguacagaaggggaagaccaaauuacuguuuggggguuccauucagauaacaaaacccaaaugaagaaccucuauggagacucaaauccucaaaaguucaccucaucugcuaauggaguaaccacacauuauguuucucagauuggcggcuucccagaucaaacagaagacggaggacuaccacaaagcggcagaauuguuguugauuacaugaugcaaaaaccugggaaaacaggaacaauugucuaucaaagagguguuuuguugccucaaaagguguggugcgcgaguggcaggagcaaaguaauaaaaggguccuugccuuuaauuggugaagcagauugccuucaugaaaaauacgguggauuaaacaaaagcaagccuuacuacacaggagaacaugcaaaagccauaggaaauugcccaauaugggugaaaacaccuuugaagcuugccaauggaaccaaauauagaccuccugcaaaacuauuaaaggaaagggguuucuucggagcuauugcugguuuccuagaaggaggaugggaaggaaugauugcagguuggcacggauacacaucucacggagcacauggaguggcaguggcggcagaccuuaagaguacacaagaagcuauaaacaagauaacaaaaaaucucaauucuuugagugagcuagaaguaaagaaucuucaaagacuaaguggugccauggaugaacuccacaacgaaauacucgagcuggaugagaaaguggaugaucucagagcugacacuauaagcucacaaauagaacuugcagucuugcuuuccaacgaaggaauaauaaacagugaagacgagcaucuauuggcacuugagagaaaacuaaagaaaaugcugggucccucugcuguagacauaggaaauggaugcuucgaaaccaaacacaaaugcaaccagaccugcuuagacaggauagcugcuggcaccuuuaaugcaggagaauuuucucuccccacuuuugauucauugaacauuacugcugcaucuuuaaaugaugauggauuggauaaccauacuauacugcucuauuacucaacugcugcuucuaguuuggcuguaacauugaugcuagcuauuuuuauuguuuauauggucuccagagacaacguuucaugcuccauaugucuauaa

SEQ ID NO: 59047 - RNA, 1755 nt, Artificial Sequence
  derived and/or modified CDS sequence (wt) from hemagglutinin__InfluenzaB__AGX16237
augaaggcaauaauuguacuacucaugguaguaacauccaaugcagaucgaaucugcacugggauaacaucuucaaacucaccucauguggucaaaacagccacucaaggggaggucaaugugacuggugugauaccacugacaacaacaccaacaaaaucuuauuuugcaaaucucaaaggaacaaggaccagagggaaacuaugcccagacugucucaacuguacagaucuggauguggccuugggcagaccaauguguguggggaccacaccuucugcgaaagcuucaauacuccacgaagucagaccuguuacaucugggugcuuuccuauaaugcacgacagaacaaaaaucaggcaacuacccaaucuucucagaggauaugaaaauaucagguuaucaacccaaaacguuaucgaugcagaaaaggcaccaggaggacccuacagacuuggaaccucaggaucuugcccuaacgcuaccaguaaaagcggauuuuucgcaacaauggcuugggcugucccaaaggacaacaacaaaaaugcaacgaacccacuaacaguagaaguaccauacauuuguacagaaggggaagaccaaauuacuguuuggggguuccauucagauaacaaaacccaaaugaagaaccucuauggggacucaaauccucaaaaguucaccucaucugcuaauggaguaaccacacauuauguuucucagauuggcggcuucccagaucaaacagaagacggaggacuaccacaaagcggcagaauuguuguugauuacaugaugcaaaaaccugggaaaacaggaacaauugucuaucaaagagguguuuuguugccucaaaagguguggugcgcgaguggcaggagcaaaguaauaaaagggucacugcccuuaauuggugaagcagauugccuucaugaaaaauacgguggauuaaacaaaagcaagccuuacuacacaggagaacaugcaaaagccauaggaaauugcccaauaugggugaaaacaccuuugaagcuugccaauggaaccaaauauagaccuccugcaaaacuauuaaaggaaagggguuucuucggagcuauugcugguuucuuagaaggaggaugggaaggaaugauugcagguuggcacggauacacaucucacggagcacauggaguggcaguggcggcagaccucaagaguacacaagaagcuauaaacaagauaacaaaaaaucucaauucuuugagugagcuagaaguaaagaaucuucaaagacuaaguggugccauggaugaacuccacaacgaaauacucgagcuggaugagaaaguggaugaucucagagcugacacuauaagcucacaaauagaacuugcagucuugcuuuccaacgaaggaauaauaaacagugaagaugagcaucuauuggcacuugagagaaaacuaaagaaaaugcugggucccucugcuguagacauaggaaauggauguuucgaaaccaaacacaagugcaaccagaccugcuuagacaggauagcugcuggcaccuuuaaugcaggagaauuuucucuccccacuuuugauucacugaacauuacugcugcaucuuuaaaugaugauggauuggauaaccauacuauacugcucuauuacucaacugcugcuucuaguuuggcuauaacauugaugcuagcuauuuuuauuguuuauauggucuccagagacaacguuucaugcuccaucugucuauaa

SEQ ID NO: 59048 - RNA, 1755 nt, Artificial Sequence
  derived and/or modified CDS sequence (wt) from hemagglutinin__InfluenzaB__AGX16248
augaaggcaauaauuguacuacucaugguaguaacauccaaugcagaucgaaucugcacugggauaacaucuucaaacucaccucauguggucaaaacagcuacucaaggggaggucaaugugacuggugugauaccacugacaacaacaccaacaaaaucuuauuuugcaaaucucaaaggaacaaggaccagagggaaacuaugcccagacugucucaacuguacagaucuggauguggccuugggcaggccaauguguguggggaccacaccuucugcgaaagcuucaauacuccacgaagucagaccuguuacauccgggugcuuuccuauaaugcacgacagaacaaaaaucaggcaacuagccaaucuucucagaggauaugaaaauaucagguuaucaacccaaaacguuaucgaugcagaaaaggcaccaggaggacccuacagacuuggaaccucaggaucuugcccuaacgcuaccaguaaaagcggauuuuucgcaacaauggcuugggcugucccaaaggacaacaacaaaaaugcaacgaacccacuaacaguagaaguaccauacauuuguacagaaggggaagaccaaauuacuguuuggggguuccauucagauaacaaaacccaaaugaagaaccucuauggagacucaaauccucaaaaguucaccucaucugcuaauggaguaaccacacauuauguuucucagauuggcggcuucccagaucaaacagaagacggaggacuaccacaaagcggcagaauugucguugauuacaugaugcaaaaaccugggaaaacaggaacaauugucuaucaaagagguguuuuguugccucaaaagguguggugcgcgaguggcaggagcaaaguaauaaaaggguccuugccuuuaauuggugaagcagauugccuucaugaaaaauacgguggauuaaacaaaagcaagccuuacuacacaggagaacaugcaaaagccauaggaaauugcccaauaugggugaaaacaccuuugaagcuugccaauggaaccaaauauagaccuccugcaaaacuauuaaaggaaagggguuucuucggagcuauugcugguuuccuagaaggaggaugggaaggaaugauugcagguuggcacggauacacaucucacggagcacauggaguggcaguugcggcagaccuuaagaguacacaagaagcuauaaacaagauaacaaaaaaucucaacucuuugagugagcuagaaguaaagaaucuucaaagacuaaguggugccauggaugaacuccacaacgaaauacucgagcuggaugagaaaguggaugaucucagagcugacacuauaagcucacaaauagaacuugcagucuugcuuuccaacgaaggaauaauaaacagugaagacgagcaucuauuggcacuugagagaaaacuaaagaaaaugcugggucccucugcuguagacauaggaaauggaugcuucgaaaccaaacacaaaugcaaccagaccugcuuagacaggauagcugcuggcaccuuuaaugcaggagaauuuucucuccccacuuuugauucauugaacauuacugcugcaucuuuaaaugaugauggauuggauaaccauacuauacugcucuauuacucaacugcugcuucuaguuuggcuguaacauugaugcuagcuauuuuuauuguuuauauggucuccagagacaacguuucaugcuccaucugucuauaa

SEQ ID NO: 59049 - RNA, 1755 nt, Artificial Sequence
  derived and/or modified CDS sequence (wt) from hemagglutinin__InfluenzaB__AGX16259
augaaggcaauaauuguacuacucaugguaguaacauccaaugcagaucgaaucugcacugggauaacaucuucaaacucaccucauguggucaaaacagcuacucaaggggaggucaaugugacuggugugauaccacugacaacaacaccaacaaaaucuuauuuugcaaaucucaaaggaacaaggaccagagggaaacuaugcccagacugucucaacuguacagaucuggauguggccuugggcaggccaauguguguggggaccacaccuucugcgaaagcuucaauacuccacgaagucagaccugucacauccgggugcuuuccuauaaugcacgacagaacaaaaaucaggcaacuagccaaucuucucagaggauaugaaaauaucagguuaucaacccaaaacguuaucgaugcagaaaaggcaccaggaggacccuacagacuuggaaccucaggaucuugcccuaacgcuaccaguaaaagcggauuuuucgcaacaauggcuugggcugucccaaaggacaacaacaaaaaugcaacgaacccacuaacaguagaaguaccauacauuuguacagaaggggaagaccaaauuacuguuuggggguuccauucagauaacaaaacccaaaugaagaaccucuauggagacucaaauccucaaaaguucaccucaucugcuaauggaguaaccacacauuauguuucucagauuggcggcuucccagaucaaacagaagacggaggacuaccacaaagcggcagaauugucguugauuacaugaugcaaaaaccugggaaaacaggaacaauugucuaucaaagagguguuuuguugccucaaaagguguggugcgcgaguggcaggagcaaaguaauaaaaggguccuugccuuuaauuggugaagcagauugccuucaugaaaaauacgguggauuaaacaaaagcaagccuuacuacacaggagaacaugcaaaagccauaggaaauugcccaauaugggugaaaacaccuuugaagcuugccaauggaaccaaauauagaccuccugcaaaacuauuaaaggaaagggguuucuucggagcuauugcugguuuccuagaaggaggaugggaaggaaugauugcagguuggcacggauacacaucucacggagcacauggaguggcaguugcggcagaccuuaagaguacacaagaagcuauaaacaagauaacaaaaaaucucaacucuuugagugagcuagaaguaaagaaucuucaaagacuaaguggugccauggaugaacuccacaacgaaauacucgagcuggaugagaaaguggaugaucucagagcugacacuauaagcucacaaauagaacuugcagucuugcuuuccaacgaaggaauaauaaacagugaagacgagcaucuauuggcacuugagagaaaacuaaagaaaaugcugggucccucugcuguagacauaggaaauggaugcuucgaaaccaaacacaaaugcaaccagaccugcuuagacaggauagcugcuggcaccuuuaaugcaggagaauuuucucuccccacuuuugauucauugaacauuacugcugcaucuuuaaaugaugauggauuggauaaccauacuauacugcucuauuacucaacugcugcuucuaguuuggcuguaacauugaugcuagcuauuuuuauuguuuauauggucuccagagacaacguuucaugcuccaucugucuauaa

SEQ ID NO: 59050 - RNA, 1755 nt, Artificial Sequence
  derived and/or modified CDS sequence (wt) from hemagglutinin__InfluenzaB__AGX16270
augaaggcaauaauuguacuacucaugguaguaacauccaaugcagaucgaaucugcacugggauaacaucuucaaacucaccucauguggucaaaacagcuacucaaggggaggucaaugugacuggugugauaccacugacaacaacaccaacaaaaucuuauuuugcaaaucucaaaggaacaaggaccagagggaaacuaugcccagacugucucaacuguacagaucuggauguggccuugggcaggccaauguguguggggaccacaccuucugcgaaagcuucaauacuccacgaagucagaccuguuacauccgggugcuuuccuauaaugcacgacagaacaaaaaucaggcaacuagccaaucuucucagaggauaugaaaauaucagguuaucaacccaaaacguuaucgaugcagaaaaggcaccaggaggacccuacagacuuggaaccucaggaucuugcccuaacgcuaccaguaaaagcggauuuuucgcaacaauggcuugggcugucccaaaggacaacaacaaaaaugcaacgaacccacuaacaguagagguaccauacauuuguaaagaaggggaagaccaaauuacuguuuggggguuccauucagauaacaaaacccaaaugaagaaccucuauggagacucaaauccucaaaaguucaccucaucugcuaauggaguaaccacacauuauguuucucagauuggcggcuucccagaucaaacagaagacggaggacuaccacaaagcggcagaauugucguugauuacaugauacaaaaaccugggaaaacaggaacaauugucuaucaaagagguguuuuguugccucaaaagguguggugcgcgaguggcaggagcaaaguaauaaaaggguccuugccuuuaauuggugaagcagauugccuucaugaaaaauacgguggauuaaacaaaagcaagccuuacuacacaggagaacaugcaaaagccauaggaaauugcccaauaugggugaaaacaccuuugaagcuugccaauggaaccaaauauagaccuccugcaaaacuauuaaaggaaagggguuucuucggagcuauugcugguuuccuagaaggaggaugggaaggaaugauugcagguuggcacggauacacaucucacggagcacauggaguggcaguugcggcagaccuuaagaguacacaagaagcuauaaacaagauaacaaaaaaucucaacucuuugagugagcuagaaguaaagaaucuucaaagacuaaguggugccauggaugaacuccacaacgaaauacucgagcuggaugagaaaguggaugaucucagagcugacacuauaagcucacaaauagaacuugcagucuugcuuuccaacgaaggaauaauaaacagugaagacgagcaucuauuggcacuugagagaaaacuaaagaaaaugcugggucccucugcuguagacauaggaaacggaugcuucgaaaccaaacacaaaugcaaccagaccugcuuagacaggauagcugcuggcaccuuuaaugcaggagaauuuucucuccccacuuuugauucauugaacauuacugcugcaucuuuaaaugaugauggauuggauaaccauacuauacugcucuauuacucaacugcugcuucuaguuuggcuguaacauugaugcuagcuauuuuuauuguuuauauggucuccagagacaacguuucaugcuccaucugucuauaa

SEQ ID NO: 59051 - RNA, 1755 nt, Artificial Sequence; identical to SEQ ID NO: 59050
  derived and/or modified CDS sequence (wt) from hemagglutinin__InfluenzaB__AGX16281

SEQ ID NO: 59052 - RNA, 1755 nt, Artificial Sequence
  derived and/or modified CDS sequence (wt) from hemagglutinin__InfluenzaB__AGX16292
augaaggcaauaauuguacuacucaugguaguaacauccaaugcagaucgaaucugcacugggauaacaucuucaaacucaccccauguggucaaaacagcuacucaaggggaggucaaugugacuggugugauaccacugacaacaacaccaacaaaaucuuauuuugcaaaucucaaaggaacaaggaccagagggaaacuaugcccagacugucucaacuguacagaucuggauguggccuugggcaggccaauguguguggggaccacaccuucugcgaaagcuucaauacuccacgaagucagaccuguuacauccgggugcuuuccuauaaugcacgacagaacaaaaaucaggcaacuagccaaucuucucagaggauaugaaaauaucagguuaucaaaccaaaacguuaucgaugcagaaaaggcaccaggaggacccuacagacuuggaaccucaggaucuugcccuaacgcuaccaguaaaagcggauuuuucgcaacaauggcuugggcugucccaaaggacaacaacaaaaaugcaacgaacccacuaacaguagaaguaccauacauuuguacagaaggggaagaccaaauuacuguuuggggguuccauucagauaacaaaacccaaaugaagaaccucuauggagacucaaauccucaaaaguucaccucaucugcuaauggaguaaccacacauuauguuucucaaauuggcggcuucccagaucaaacagaagacggaggacuaccacaaagcggcagaauugucguugauuacaugaugcaaaaaccugggaaaacaggaacaauugucuaucaaagagguguuuuguugccucaaaagguguggugcgcgaguggcaggagcaaaguaauaaaaggggccuugccuuuaauuggugaagcagauugccuucaugaaaaauacgguggauuaaacaaaagcaagccuuacuacacaggagaacaugcaaaagccauaggaaauugcccaauaugggugaaaacaccuuugaagcuugccaauggaaccaaauauagaccuccugcaaaacuauuaaaggaaagggguuucuucggagcuauugcugguuuccuagaaggaggaugggaaggaaugauugcagguuggcacggauacacaucucacggagcacauggaguggcaguggcggcagaccuuaagaguacacaagaagcuauaaacaagauaacaaaaaaucucaacucuuugagugagcuagaaguaaagaaucuucaaagacuaaguggugccauggaugaacuccacaacgaaauacucgagcuggaugagaaaguggaugaucucagagcugacacuauaagcucacaaauagaacuugcagucuugcuuuccaacgaaggaauaauaaacagugaagacgagcaucuauuggcacuugagagaaaacuaaagaaaaugcugggucccucugcuguagacauaggaaauggaugcuucgaaaccaaacacaaaugcaaccagaccugcuuagacaggauagcugcuggcaccuuuaaugcaggagaauuuucucuccccacuuuugauucauugaacauuacugcugcaucuuuaaaugaugauggauuggauaaccauacuauacugcucuauuacucaacugcugcuucuaguuuggcuguaacauugaugcuagcuauuuuuauuguuuauauggucuccagagacaacguuucaugcuccaucugucuauaa

SEQ ID NO: 59053 - RNA, 1758 nt, Artificial Sequence
  derived and/or modified CDS sequence (wt) from hemagglutinin__InfluenzaB__AGX16303
augaaggcaauaauuguacuacucaugguaguaacauccaaugcagaucgaaucugcacugggauaacaucgucaaacucaccacauguugucaaaacugcuacucaaggggaggucaaugugacugguguaauaccacugacaacaacacccaccaaaucucauuuugcaaaucucaaaggaacagaaaccagagggaaacuaugcccaaaaugccucaacuguacagaucuggacguggccuugggcagaccaaaaugcacggggaacauacccucagcaagaguuucaauacuccaugaagucaggccuguuacaucugggugcuuuccuauaaugcacgacagaacaaaaauuagacagcugccuaaccuucucagaggauacgaacauaucagguuaucaacucauaacguuaucaaugcagaaaaugcaccaggaggacccuacaaaauuggaaccucagggucuugcccuaacguuaccaauggaaacggauuuuucgcaacaauggcuugggccgucccaaaaaacgacaacaacaaaacagcaacaaauucauuaacaauagaaguaccauacauuuguacagaaggagaagaccaaauuaccguuuggggguuccacucugauaacgagacccaaauggcaaagcucuauggggacucaaagccccagaaguucaccucaucugccaacggagugaccacacauuacguuucacagauugguggcuucccaaaucaaacagaagacggaggacuaccacaaagugguagaauuguuguugauuacauggugcaaaaaucugggaaaacaggaacaauuaccuaucaaagagguauuuuauugccucaaaagguguggugcgcaaguggcaggagcaagguaauaaaaggauccuugccuuuaauuggagaagcagauugccuccacgaaaaauacgguggauuaaacaaaagcaagccuuacuacacaggggaacaugcaaaggccauaggaaauugcccaauaugggugaaaacacccuugaagcuggccaaugggaccaaauauagaccuccugcaaaacuauuaaaggaaagggguuucuucggagcuauugcugguuucuuagaaggaggaugggaaggaaugauugcagguuggcacggauacacaucccauggggcacauggaguagcgguggcagcagaccuuaagagcacucaagaggccauaaacaagauaacaaaaaaucucaacucuuugagugagcuggaaguaaagaaucuucaaagacuaagcggugccauggaugaacuccacaacgaaauacuagaacuagacgagaaaguggaugaucucagagcugauacaauaagcucacaaauagaacucgcaguccugcuuuccaaugaaggaauaauaaacagugaagaugagcaucucuuggcgcuugaaagaaagcugaagaaaaugcugggccccucugcuguagagauagggaauggaugcuuugaaaccaaacacaagugcaaccagaccugucucgacagaauagcugcugguaccuuugaugcaggagaauucucucuccccaccuuugauucacugaauauuacugcugcaucuuuaaaugacgauggauuggauaaucauacuauacugcuuuacuacucaacugcugccuccaguuuggcuguaacauugaugauagcuaucuuuguuguuuauauggucuccagagacaauguuucuugcuccaucugucuauaa

SEQ ID NO: 59054 - RNA, 1755 nt, Artificial Sequence
  derived and/or modified CDS sequence (wt) from hemagglutinin__InfluenzaB__AGX16314
augaaggcaauaauuguacuacucaugguaguaacauccaaugcagaucgaaucugcacugggauaacaucuucaaacucaccucauguggucaaaacagcuacucaaggggaggucaaugugacuggugugauaccacuaacaacaacaccaacaaaaucuuauuuugcaaaucucaaaggaacaaggaccagagggaaacuaugcccagacugucucaacuguacagaucuggauguggccuugggcagaccaauguguguggggaccacaccuucugcgaaagcuucaauacuccacgaagucagaccuguuacauccgggugcuuuccuauaaugcacgacaggacaaaaaucaggcaacuagccaaucuucucagaggauaugaaaauaucagguuaucaacccaaaacguuaucgaugcagaaaaggcaccaggaggacccuacagacuuggaaccucaggaucuugcccuaacgcuaccaguaaaagcggauuuuucgcaacaauggcuugggcugucccaaaggacaacaacaaaaacgcaacgaacccacuaacaguagaaguaccauacauuuguacagaaggggaagaccaaauuacuguuuggggauuccauucagauaacaaaacccaaaugaagaaccucuauggagacucaaauccucaaaaguucaccucaucugcuaauggaguaaccacacauuauguuucucagauuggcggcuucccagaucaaacagaagacggaggacuaccacaaagcggcagaauugucguugauuacaugaugcaaaaaccugggaaaacaggaacaauugucuaucaaagagguguuuuguugccucaaaagguguggugcgcgaguggcaggagcaaaguaauaaaaggguccuugccuuuaauuggugaagcagauugccuucaugaaaaauacgguggauuaaauaaaagcaagccuuacuacacaggagaacaugcaaaagccauaggaaauugcccaauaugggugaaaacaccuuugaagcuugccaauggaaccaaauauagaccuccugcaaaacuauuaaaggaaagggguuucuucggagcuauugcugguuuccuagaaggaggaugggaaggaaugauugcagguuggcacggauacacaucucacggagcacauggaguggcaguugcggcagaccuuaagaguacacaagaagcuauaaacaagauaacaaaaaaucucaacucuuugagugagcuagaaguaaagaaucuucaaagacuaaguggugccauggaugaacuccacaacgaaauacucgagcuggaugagaaaguggaugaucucagagcugacacuauaagcucacaaauagaacuugcaguuuugcuuuccaacgaaggaauaauaaacagugaagacgagcaucuauuggcacuugagagaaaacugaagaaaaugcugggucccucugcuguagacauaggaaauggaugcuucgaaaccaaacacaaaugcaaccagaccugcuuagacaggauagcugcuggcaccuuuaaugcaggagaauuuucucucccuacuuuugauucauugaacauuacugcugcaucuuuaaaugaugauggauuggauaaccauacuauacugcucuauuacucaacugcugcuucuaguuuggcuguaacauugaugcuagccauuuuuauuguuuauauggucuccagagacaacguuucaugcuccaucugucuauaa

SEQ ID NO: 59055 - RNA, 1755 nt, Artificial Sequence
  derived and/or modified CDS sequence (wt) from hemagglutinin__InfluenzaB__AGX16325
augaaggcaauaauuguacuacucaugguaguaacauccaaugcagaccgaaucugcacugggauaacaucuucaaacucaccucauguggucaaaacagcuacucaaggggaggucaaugugacuggugugauaccacugacaacaacaccaacaaaaucuuauuuugcaaaucucaaagggacaaggaccagagggaaacuaugcccagacugucucaacuguacagaucuggauguggccuugggcaggccaauguguguggggaccacaccuucugcgaaagcuucaauacuccacgaagucagaccuguuacauccgggugcuuuccuauaaugcacgacagaacaaaaaucaggcaacuagccaaucuucucagaggauaugaaaauaucagguuaucaacccaaaacguuaucgaugcagaaaaggcaccaggaggacccuacagacuuggaaccucaggaucuugcccuaacgcuaccaguaaaagcggauuuuucgcaacaauggcuugggcugucccaaaggacaacaacaaaaaugcaacgaacccacuaacaguagaaguaccauacauuuguacagaaggggaagaccaaauuacuguuuggggguuccauucagauaacaaaacccaaaugaagaaccucuauggagacucaaauccucaaaaguucaccucaucugcuaauggaguaaccacacauuauguuucucagauuggcggcuucccagaucaaacagaagacggaggacuaccacaaagcggcagaauugucguugauuacaugaugcaaaaaccugggaaaacaggaacaauugucuaucaaagagguguuuuguugccucaaaagguguggugcgcgaguggcaggagcaaaguaauaaaaggguccuugccuuuaauuggugaagcagauugccuucaugaaaaauacgguggauuaaacaaaagcaagccuuacuacacaggagaacaugcaaaagccauaggaaauugcccaauaugggugaaaacaccuuugaagcuugccaauggaaccaaauauagaccuccugcaaaacuauuaaaggaaagggguuucuucggagcuauugcugguuuccuagaaggaggaugggaaggaaugauugcagguuggcacggauacacaucucacggagcacauggaguggcaguggcggcagaccuuaagaguacacaagaagcuauaaacaagauaacaaaaaaucucaacucuuugagugagcuagaaguaaaaaaccuucaaagacuaaguggugccauggaugaacuccacaacgaaauacucgagcuggaugagaaaguggaugaucucagagcugacacuauaagcucacaaauagaacuugcagucuugcuuuccaacgaaggaauaauaaacagugaagaugagcaucuauuggcacuugagagaaaacuaaagaaaaugcugggucccucugcuguagacauaggaaauggaugcuucgaaaccaaacacaaaugcaaccagaccugcuuagacaggauagcugcuggcaccuuuaaugcaggagaauuuucucuccccacuuuugauucauugaacauuacugcugcaucuuuaaaugaugauggauuggauaaccauacuauacugcucuauuacucaacugcugcuucuaguuuggcuguaacauugaugcuagcuauuuuuauuguuuauauggucuccagagacaacguuucaugcuccaucugucuauaa

SEQ ID NO: 59056 - RNA, 1755 nt, Artificial Sequence
  derived and/or modified CDS sequence (wt) from hemagglutinin__InfluenzaB__AGX16336
augaaggcaauaauuguacuacucaugguaguaacauccaaugcagaucgaaucugcacugggauaacaucuucaaacucaccucauguggucaaaacagcuacucaaggggaggucaaugugacuggugugauaccacugacaacaacaccaacaaaaucuuauuuugcaaaucucaaaggaacaaagaccagagggaaacuaugcccagacugucucaacuguacagaucuggauguggccuugggcaggccaaugugugugggaaccacaccuucugcgaaagcuucaauacuccacgaagucagaccuguuacauccgggugcuuuccuauaaugcacgacagaacaaaaaucaggcaacuagccaaucuucucagaggauaugaaaauaucagguuaucaacccaaaacguuaucgaugcagaaaaggcaccgggaggacccuacagacuuggaaccucaggaucuugcccuaacgcuaccaguaaaagcggauuuuucgcaacaauggcuugggcugucccaaaggacaacaacaaaaaugcaacgaacccacuaacaguagaaguaccauacauuuguacagaaggggaagaccaaauuacuguuuggggguuccauucagauaacaaaacccaaaugaagaaccucuauggagacucaaauccucaaaaguucaccucaucugcuaauggaguaaccacacauuauguuucucagauuggcggcuucccagaucaaacagaagacggaggacuaccacaaagcggcagaauugucguugauuacaugaugcaaaaaccugggaaaacaggaacaauugucuaucaaagagguguuuuguugccucaaaagguguggugcgcgaguggcaggagcaaaguaauaaaaggguccuugccuuuaauuggugaagcagauugccuucaugaaaaauacgguggauuaaacaaaagcaagccuuacuacacaggagaacaugcaaaagccauaggaaauugcccaauaugggugaaaacaccuuugaagcuugccaauggaaccaaauauagaccuccugcaaaacuauuaaaggaaagggguuucuucggagcuauugcugguuuccuagaaggaggaugggaaggaaugauugcagguuggcacggauacacaucucacggagcacauggaguggcaguugcggcagaccuuaagaguacacaagaagcuauaaacaagauaacaaaaaaucucaacucuuugagugagcuagaaguaaagaaucuucaaagacuaaguggugccauggaugaacuccacaacgaaauacucgagcuggaugagaaaguggaugaucucagagcugacacuauaagcucacaaauagaacuugcagucuugcuuuccaacgaaggaauaauaaacagugaagacgagcaucuauuggcacuugagagaaaacuaaagaaaaugcugggucccucugcuguagacauaggaaauggaugcuucgaaaccaaacacaaaugcaaccagaccugcuuagacaggauagcugcuggcaccuuuaaugcaggagaguuuucucuccccacuuuugauucauugaacauuacugcugcaucuuuaaaugaugauggauuggauaaccauacuauacugcucuauuacucaacugcugcuucuaguuuggcuguaacauugaugcuagcuauuuuuauuguuuauauggucuccagagacaacguuucaugcuccaucugucuauaa

SEQ ID NO: 59057 - RNA, 1755 nt, Artificial Sequence; identical to SEQ ID NO: 59056
  derived and/or modified CDS sequence (wt) from hemagglutinin__InfluenzaB__AGX16347

SEQ ID NO: 59058 - RNA, 1755 nt, Artificial Sequence; identical to SEQ ID NO: 59056
  derived and/or modified CDS sequence (wt) from hemagglutinin__InfluenzaB__AGX16358

SEQ ID NO: 59059 - RNA, 1755 nt, Artificial Sequence
  derived and/or modified CDS sequence (wt) from hemagglutinin__InfluenzaB__AGX16369
augaaggcaauaauuguacuacucaugguaguaacauccaaugcagaucgaaucugcacuggaauaacaucuucaaacucaccucauguggucaaaacagccacucaaggggaggucaaugugacuggugugauaccacuaacaacaacaccaacaaaaucuuauuuugcaaaucucaaaggaacaaggaccagagggaaacuaugcccagacugucucaacugcacagaucuggauguggcuuugggcagaccaauguguguggggaccacaccuucggcgaaagcuucaauacuccacgaagucagaccuguuacauccgggugcuuuccuauaaugcacgacagaacaaaaaucaggcaacuacccaaucuucucagaggauaugaaaauaucaggcuaucaacccaaaacgucaucgaugcggaaaaggcaccaggagggcccuacagacuuggaaccucaggaucuugcccuaacgcuaccaguaagagcggauuuuucgcaacaauggcuugggcugucccaaaggacaacaacaaaaaugcaacgaacccacuaacaguagaaguaccauacauuuguacagaaggggaagaccaaaucacuguuuggggguuccauucagauaacaaaacccaaaugaagaaccucuauggagacucaaauccucaaaaguucaccucaucugcuaauggaguaaccacacacuauguuucucagauuggcagcuucccagaucaaacagaagacggaggacuaccacaaagcggcaggauuguuguugauuacaugaugcaaaaaccugggaaaacaggaacaauugucuaccaaagagguauuuuguugccucaaaagguguggugcgcgaguggcaggagcaaaguaauaaaaggguccuugccuuuaauuggugaagcagauugucuucaugaaaaauacgguggauuaaacaaaagcaagccuuacuacacaggagaacaugcaaaagccauaggaaauugcccaauaugggugaaaacaccuuugaagcuugccaauggaaccaaauauagaccuccugcaaaacuauuaaaggaaagggguuucuucggagcuauugcugguuuccuagaaggaggaugggaaggaaugauugcaggcuggcacggauacacaucucacggagcacauggaguggcaguggcggcggaccuuaagaguacgcaagaagcuauaaacaagauaacaaaaaaucucaauucuuugagugagcuagaaguaaagaaucuucaaagacuaaguggugccauggaugaacuccacaacgaaauacucgagcuggaugagaaaguggaugaucucagagcugacacuauaagcucgcaaauagaacuugcagucuugcuuuccaacgaaggaauaauaaacagugaagaugagcaucuauuggcacuugagagaaaacuaaagaaaaugcugggucccucugcuguagagauaggaaauggaugcuucgaaaccaaacacaagugcaaccagaccugcuuagacaggauagcugcuggcaccuuuaaugcaggagaauuuucucuccccacuuuugauucacugaacauuacugcugcaucuuuaaaugaugauggauuggauaaccauacuauacugcucuauuacucaacugcugcuucuaguuuggcuguaacauugaugcuagcuauuuuuauuguuuauauggucuccagagacaacguuucaugcuccaucugucuauaa

SEQ ID NO: 59060 - RNA, 1755 nt, Artificial Sequence
  derived and/or modified CDS sequence (wt) from hemagglutinin__InfluenzaB__AGX16380
augaaggcaauaguuguacuacucaugguaguaacauccaaugcagaucgaaucugcacuggaauaacaucuucaaacucaccucauguggucaaaacagccacucaaggggaggucaaugugacuggugugauaccacuaacaacaacaccaacaaaaucuuauuuugcaaaucucaaaggaacaaggaccagagggaaacuaugcccagacugucucaacugcacagaucuggauguggcuuugggcagaccaaugugugugggggccacaccuucggcgaaagcuucaauacuccaugaagucagaccuguuacauccgggugcuuuccuaugaugcacgacagaacaaaaaucaggcaacuacccaaucuucucagaggauaugaaaauaucagguuaucaacccaaaacgucaucgaugcggaaaaggcaccaggaggacccuacagacuuggaaccucaggaucuugcccuaacgcuaccaguaagagcggauuuuucgcaacaauggcuugggcugucccaaaggacaacaacaaaaaugcaacgaacccacuaacaguagaaguaccauacauuuguacagaaggggaagaccaaaucacuguuuggggguuccacucagauaacaaaacccaaaugaagaaccucuauggagacucaaauccucaaaaguucaccucaucugcuaauggaguaaccacacacuauguuucucagauuggcagcuucccagaucaaacagaagacggaggacuaccacaaagcggcaggauuguuguugauuacaugaugcaaaaaccugggaaaacaggaacaauugucuaccaaagagguguuuuguugccucaaaagguguggugcgcgaguggcaggagcaaaguaauaaaaggguccuugccuuuaauuggugaagcagauugccuucaugaaaaauacgguggauuaaacaaaagcaagccuuacuacacaggagaacaugcaaaagccauaggaaauugcccaauaugggugaaaacaccuuugaagcuugccaauggaaccaaauauagaccuccugcaaaacuauuaaaagaaagggguuucuucggagcuauugcugguuuccuagaaggaggaugggaaggaaugauugcaggcuggcacggauacacaucucacggagcacauggaguggcaguggcggcggaccuuaagagcacgcaagaagcuauaaacaagauaacaaaaaaucucaauucuuugagugagcuagaaguaaagaaucuucaaagacuaaguggugccauggaugaacuccacaacgaaauacucgagcuggaugagaaaguggaugaucucagagcugacacuauaagcucgcaaauagaacuugcagucuugcuuuccaacgaaggaauaauaaacagugaagaugagcaucuauuggcacuugagagaaaacuaaagaaaaugcugggucccucugcuguagagauaggaaauggaugcuucgaaaccaaacacaagugcaaccagaccugcuuagacaggauagcugcuggcaccuuuaaugcaggagaauuuucucuccccacuuuugauucacugaacauuacugcugcaucuuuaaaugaugauggauuggauaaccauacuauacugcucuauuacucaacugcugcuucuaguuuggcuguaacauugaugcuagcuauuuuuauuguuuauauggucuccagagacaacguuucaugcuccaucugucuauaa

SEQ ID NO: 59061 - RNA, 1755 nt, Artificial Sequence
  derived and/or modified CDS sequence (wt) from hemagglutinin__InfluenzaB__AGX16391
augaaggcaauaauuguacuacucaugguaguaacauccaaugcagaucgaaucugcacuggaauaacaucuucaaacucaccucauguggucaaaacagccacucaaggggaggucaaugugacuggugugauaccacuaacaacaacaccaacaaaaucuuauuuugcaaaucucaaaggaacaaggaccagagggaaacuaugcccagacugucucaacugcacagaucuggauguggcuuugggcagaccaauguguguggggacuacaccuucggcgaaagcuucaauacuccacgaagucagaccuguuacauccgggugcuuuccuauaaugcacgacagaacaaaaaucaggcaacuacccaaucuucucagaggauaugaaaauaucaggcuaucaacccaaaacgucaucgaugcggaaaaggcaccaggaggacccuacagacuuggaaccucaggaucuuguccuaacgcuaccaguaagagcggauuuuucgcaacaauggcuugggcugucccaaaggacaacaacaaaaaugcaacgaacccacuaacaguagaaguaccauacauuuguacagaaggggaagaccaaaucacuguuuggggguuccauucagauaacaaaacccaaaugaagaaccucuauggagacucaaauccucaaaaguucaccucaucugcuaauggaguaaccacacacuauguuucucagauuggcagcuucccagaucaaacagaagacggaggacuaccacaaagcggcaggauuguuguugauuacaugaugcaaaaaccugggaaaacaggaacaauugucuaccaaagagguguuuuguugccucaaaagguguggugcgcgaguggcaggagcaaaguaauaaaaggguccuugccuuuaauuggugaagcagauugccuucaugaaaaauacgguggauuaaacaaaagcaagccuuacuacacaggagaacaugcaaaagccauaggaaauugcccaauaugggugaaaacgccuuugaagcuugccaauggaaccaaauauagaccuccugcaaaacuauuaaaggaaagggguuucuucggagcuauugcugguuuccuagaaggaggaugggaaggaaugauugcaggcuggcacggauacacaucucacggagcacauggaguggcaguggcggcggaccuuaagaguacgcaagaagcuauaaacaagauaacaaaaaaucucaauucuuugagugagcuagaaguaaagaaucuucaaagacuaaguggugccauggaugaacuccacaacgaaauacucgagcuggaugagaaaguggaugaucucagagcugacacuauaagcucgcaaauagaacuugcagucuugcuuuccaacgaaggaauaauaaacagugaagaugagcaucuauuggcacuugagagaaaacuaaagaaaaugcugggucccucugcuguagagauaggaaauggaugcuucgaaaccaaacacaagugcaaccagaccugcuuagacaggauagcugcuggcaccuuuaaugcaggagaauuuucucuccccacuuuugauucacugaacauuacugcugcaucuuuaaaugaugauggauuggauaaccauacuauacugcucuauuacucaacugcugcuucuaguuuggcuguaacauugaugcuagcuauuuuuauuguuuauauggucuccagagacaacguuucaugcuccaucugucuauaa

SEQ ID NO: 59062 - RNA, 1755 nt, Artificial Sequence
  derived and/or modified CDS sequence (wt) from hemagglutinin__InfluenzaB__AGX16402
augaaggcaauaauuguacuacucaugguaguaacauccaaugcagaucgaaucugcacugggauaacaucuucaaacucaccucauguggucaaaacagcuacucaaggggaggucaaugugacuggugugauaccacugacaacaacaccaacaaaaucuuauuuugcaaaucucaaaggaacaaggaccagagggaaacuaugcccggacugucucaacuguacagaucuggauguggccuugggcaggccaauguguguggggaccacaccuucugcuaaggcuucaauacuccacgaagucagaccuguuacauccgggugcuuuccuauaaugcacgacagaacaaaaaucaggcaacuacccaaucuucucagaggauaugaaaauaucagguuaucaacccaaaacguuaucgaugcagaaaaagcaccaggaggacccuacagacuuggaaccucaggaucuugcccuaacgcuaccaguaaaaucggauuuuucgcaacaauggcuugggcugucccaaaggacaacuacaaaaaugcaacgaacccacuaacaguagaaguaccauacauuuguacagaaggggaagaccaaauuacuguuuggggguuccauucagauaacaaaccccaaaugaagaaccucuauggagacucaaauccucaaaaguucaccucaucugcuaauggaguaaccacacauuauguuucucagauuggcgacuucccagaucaaacagaagacggaggacuaccacaaagcggcagaauuguuguugauuacaugaugcaaaaaccugggaaaacaggaacaauugucuaucaaagagguguuuuguugccucaaaagguguggugcgcgaguggcaggagcaaaguaauaaaagggucauugccuuuaauuggugaagcagauugccuucaugaaaaauacgguggauuaaacaaaagcaagccuuacuacacaggagaacaugcaaaagccauaggaaauugcccaauauggguaaaaacaccuuugaagcuugccaauggaaccaaauauagaccuccugcaaaacuauuaaaggaaagggguuucuucggagcuauugcugguuuccuagaaggaggaugggaaggaaugauugcagguuggcacggauacacaucucacggagcacauggaguggcaguggcggcagaccuuaagaguacacaagaagcuauaaauaagauaacaaaaaaucucaauucuuugagugagcuagaaguaaagaaccuucaaagacuaaguggugccauggaugaacuccacaacgaaauacucgagcuggaugagaaaguggaugaucucagagcugacacuauaagcucacaaauagaacuugcagucuugcuuuccaacgaaggaauaauaaacagugaagacgagcaucuauuggcacuugagagaaaacuaaagaaaaugcugggucccucugcuguagacauaggaaauggaugcuucgaaaccaaacacaaaugcaaccagaccugcuuagacaggauagcugcuggcaccuuuaaugcaggagaauuuucucuccccacuuuugauucauugaacauuacugcugcaucuuuaaaugaugauggauuggauaaccauacuauacugcucuauuacucaacugcugcuucuaguuuggcuguaacauuaaugcuagcuauuuuuauuguuuauauggucuccagagacaacguuucaugcuccaucugucuauaa

SEQ ID NO: 59063 - RNA, 1755 nt, Artificial Sequence
  derived and/or modified CDS sequence (wt) from hemagglutinin__InfluenzaB__AGX16413
augaaggcaauaauuguacuacucaugguaguaacauccaaugcagaucgaaucugcacugggauaacaucuucaaacucaccucauguggucaaaacagcuacucaaggggaggucaaugugacuggcgugauaccacugacaacaacaccaacaaaaucuuauuuugcaaaucucaaaggaacaaggaccagagggaaacuaugcccggacugucucaacuguacagaucuggauguggccuugggcaggccaauguguguggggaccacaccuucugcuaaagcuucaauacuccacgaagucagaccuguuacauccgggugcuuuccuauaaugcacgacagaacaaaaaucaggcaacuacccaaucuucucagaggauaugaaaauaucagguuaucaacccagaacguuaucgaugcagaaaaagcaccaggaggacccuacagacuuggaaccucaggaucuugcccuaaugcuaccaguaaaaucggauuuuucgcaacaauggcuugggcugucccaaaggacaacuacaaaaaugcaacgaacccacuaacaguagaaguaccauacauuuguacagaaggggaagaccaaauuacuguuuggggguuccauucagauaacaaaacccaaaugaagaaccucuauggagacucaaauccucaaaaguucaccucaucugcuaauggaguaaccacacauuauguuucucagauuggcgacuucccagaucaaacagaagacggaggacuaccacaaagcggcagaauuguuguugauuacaugaugcaaaaaccugggaaaacaggaacaauugucuaucaaagagguguuuuguugccucaaaagguguggugcgcgaguggcaggagcaaaguaauaaaagggucauugccuuuaauuggugaagcagauugccuucaugaaaaauacgguggauuaaacaaaagcaagccuuacuacacaggagaacaugcaaaagccauaggaaauugcccaauauggguaaaaacaccuuugaagcuugccaauggaaccaaauauagaccuccugcaaaacuauuaaaggaaagggguuucuucggagcuauugcugguuuccuagaaggaggaugggaaggaaugauugcagguuggcacggauacacaucucacggagcacauggaguggcaguggcggcagaccuuaagaguacacaagaagcuauaaauaagauaacaaaaaaucucaauucuuugagugagcuagaaguaaagaaccuucaaagacuaaguggugccauggaugaacuccacaacgaaauacucgagcuggaugagaaaguggaugaucucagagcugacacuauaagcucacaaauagaacuugcagucuugcuuuccaacgaaggaauaauaaacagugaagacgagcaucuauuggcacuugagagaaaacuaaagaaaaugcugggccccucugcuguagacauaggaaauggaugcuucgaaaccaaacacaaaugcaaccagaccugcuuagacaggauagcugcuggcaccuuuaaugcaggagaauuuucucuccccacuuuugauucauugaacauuacugcugcaucuuuaaaugaugauggauuggauaaccauacuauacugcucuauuacucaacugcugcuucuaguuuggcuguaacauuaaugcuagcuauuuuuauuguuuauauggucuccagagacaacguuucaugcuccaucugucuauaa

SEQ ID NO: 59064 - RNA, 1755 nt, Artificial Sequence
  derived and/or modified CDS sequence (wt) from hemagglutinin__InfluenzaB__AGX16423
augaaggcaauaauuguacuacucaugguaguaacauccaaugcagaucgaaucugcacugggauaacaucuucaaacucaccucauguggucaaaacagcuacucaaggggaggucaaugugacuggcgugauaccacugacaacaacaccaacaaaaucuuauuuugcaaaucucaaaggaacaaggaccagagggaaacuaugcccggacugucucaacuguacagaucuggauguggccuugggcaggccaauguguguggggaccacaccuucugcuaaagcuucaauacuccacgaagucagaccuguuacauccgggugcuuuccuauaaugcacgacagaacaaaaaucaggcaacuacccaaucuucucagaggauaugaaaauaucagguuaucaacccaaaacguuaucgaugcagaaaaagcaccaggaggacccuacagacuuggaaccucaggaucuugcccuaacgcuaccaguaaaaucggauuuuucgcaacaauggcuugggcugucccaaaggacaacuacaaaaaugcaacgaacccacuaacaguagaaguaccauacauuuguacagaaggggaagaccaaauuacuguuuggggguuccauucagauaacaaaacccaaaugaagaaccucuauggagacucaaauccucaaaaguucaccucaucugcuaauggaguaaccacacauuauguuucucagauuggugacuucccagaucaaacagaagacggaggacuaccacaaagcggcagaauuguuguugauuacaugaugcaaaaaccugggaaaacaggaacaauugucuaucaaagagguguuuuguugccucaaaagguguggugcgcgaguggcaggagcaaaguaauaaaagggucauugccuuuaauuggugaagcagauugccuucaugaaaaauacgguggauuaaacaaaagcaagccuuacuacacaggagaacaugcaaaagccauaggaaauugcccaauauggguaaaaacaccuuugaagcuugccaauggaaccaaauauagaccuccugcaaaacuauuaaaggaaagggguuucuucggagcuauugcugguuuccuagaaggaggaugggaaggaaugauugcagguuggcacggauacacaucucacggagcacauggaguggcaguggcggcagaccuuaagaguacacaagaagcuauaaauaagauaacaaaaaaucucaauucuuugagugagcuagaaguaaagaaccuucaaagacuaaguggugccauggaugaacuccacaacgaaauacucgagcuggaugagaaaguggaugaucucagagcugacacuauaagcucacaaauagaacuugcagucuugcuuuccaacgaaggaauaauaaacagugaagacgagcaucuauuggcacuugagagaaaacuaaagaaaaugcugggucccucugcuguagacauaggaaauggaugcuucgaaaccaaacacaaaugcaaccagaccugcuuagacaggauagcugcuggcaccuuuaaugcaggagaauuuucucuccccacuuuugauucauugaacauuacugcugcaucuuuaaaugaugauggauuggauaaccauacuauacugcucuauuacucaacugcugcuucuaguuuggcuguaacauuaaugcuagcuauuuuuauuguuuauauggucuccagagacaacguuucaugcuccaucugucuauaa

SEQ ID NO: 59065 - RNA, 1755 nt, Artificial Sequence
  derived and/or modified CDS sequence (wt) from hemagglutinin__InfluenzaB__AGX16434
augaaggcaauaauuguacuacucaugguaguaacauccaaugcagaucgaaucugcacugggauaacaucuucaaacucaccucauguggucaaaacagcuacucaaggggaggucaaugugacuggcgugauaccacugacaacaacaccaacaaaaucuuauuuugcaaaccucaaaggaacaaggaccagagggaaacuaugcccggacugucucaacuguacagaucuggauguggccuugggcaggccaauguguguggggaccacaccuucugcuaaagcuucaauacuccacgaagucagaccuguuacauccgggugcuuuccuauaaugcacgacagaacaaaaaucaggcaacuacccaaucuucucagaggauaugaaaauaucagguuaucaacccagaacguuaucgaugcagaaaaagcaccaggaggacccuacagacuuggaaccucaggaucuugcccuaaugcuaccaguaaaaucggauuuuucgcaacaauggcuugggcugucccaaaggacaacuacaaaaaugcaacgaacccacuaacaguagaaguaccauacauuuguacagaaggggaagaccaaauuacuguuuggggguuccauucagauaacaaaacccaaaugaagaaccucuauggagacucaaacccucaaaaguucaccucaucugcuaauggaguaaccacacauuauguuucucagauuggcgacuucccagaucaaacagaagacggaggacuaccacaaagcggcagaauuguuguugauuacaugaugcaaaaaccugggaaaacaggaacaauugucuaucaaagagguguuuuguugccucaaaagguguggugcgcgaguggcaggagcaaagugauaaaagggucauugccuuuaauuggugaagcagauugccuucaugaaaaauacgguggauuaaacaaaagcaagccuuacuacacaggagaacaugcaaaagccauaggaaauugcccaauauggguaaaaacaccuuugaagcuugccaauggaaccaaauauagaccuccugcaaaacuauuaaaggaaagggguuucuucggagcuauugcugguuuccuagaaggaggaugggaaggaaugauugcagguuggcacggauacacaucucacggagcacauggaguggcaguggcggcagaccuuaagaguacacaagaagcuauaaauaagauaacaaaaaaucucaauucuuugagugagcuagaaguaaagaaccuucaaagacuaaguggugccauggaugaacuccacaacgaaauacucgagcuggaugagaaaguggaugaucucagagcugacacuauaagcucacaaauagaacuugcagucuugcuuuccaacgaaggaauaauaaacagugaagacgagcaucuauuggcacuugagagaaaacuaaagaaaaugcugggccccucugcuguagacauaggaaauggaugcuucgaaaccaaacacaaaugcaaccagaccugcuuagacaggauagcugcuggcaccuuuaaugcaggagaauuuucucuccccacuuuugauucauugaacauuacugcugcaucuuuaaaugaugauggauuggauaaccauacuauacugcucuauuacucaacugcugcuucuaguuuggcuguaacauuaaugcuagcuauuuuuauuguuuauauggucuccagagacaacguuucaugcuccaucugucuauaa

SEQ ID NO: 59066 - RNA, 1755 nt, Artificial Sequence; identical to SEQ ID NO: 58838
  derived and/or modified CDS sequence (wt) from hemagglutinin__InfluenzaB__AGX16445

SEQ ID NO: 59067 - RNA, 1755 nt, Artificial Sequence
  derived and/or modified CDS sequence (wt) from hemagglutinin__InfluenzaB__AGX16456
augaaggcaauaauuguacuacucaugguaguaacauccaaugcagaucgaaucugcacugggauaacaucuucaaacucaccucauguggucaaaacagcuacucaaggggaggucaaugugacuggcgugauaccacugacaacaacaccaacaaaaucuuauuuugcaaaucucaaaggaacaaggaccagagggaaacuaugcccggacugucucaacuguacagaucuggauguggccuugggcaggccaauguguguggggaccacaccuucugcuaaagcuucaauacuccacgaagucagaccuguuacauccgggugcuuuccuauaaugcacgacagaacaaaaaucaggcaacuacccaaucuucucagaggauaugaaaauaucagguuaucaacccaaaacguuaucgaugcagaaaaagcaccaggaggacccuacagacuuggaaccucaggaucuugcccuaacgcuaccaguaaaaucggauuuuucgcaacaauggcuugggcugucccaaaggacaacuacaaaaaugcaacgaacccacuaacaguagaaguaccauacauuuguacagaaggggaagaccaaauuacuguuuggggguuccauucagauaacaaaacccaaaugaagaaccucuauggagacucaaauccucaaaaguucaccucaucugcuaauggaguaaccacacauuauguuucucagauuggcgacuucccagaucaaacagaagacggaggacuaccacaaagcggcagaauuguuguugauuacaugaugcaaaaaccugggaagacaggaacaauugucuaucaaagagguguuuuguugccucaaaagguguggugcgcgaguggcaggagcaaaguaauaaaagggucauugccuuuaauuggugaagcagauugccuucaugaaaaauacgguggauuaaacaaaagcaagccuuacuacacaggagaacaugcaaaagccauaggaaauugcccaauauggguaaaaacaccuuugaagcuugccaauggaaccaaauauagaccuccugcaaaacuauuaaaggaaagggguuucuucggagcuauugcugguuuccuagaaggaggaugggaaggaaugauugcagguuggcacggauacacaucucacggagcacauggaguggcaguggcggcagaccuuaagaguacacaagaagcuauaaauaagauaacaaaaaaucucaauucuuugagugagcuagaaguaaagaaccuucaaagacuaaguggugccauggaugaacuccacaacgaaauacucgagcuggaugagaaaguggaugaucucagagcugacacuauaagcucacaaauagaacuugcagucuugcuuuccaacgaaggaauaauaaacagugaagacgagcaucuauuggcacuugagagaaaacuaaagaaaaugcugggucccucugcuguagacauaggaaauggaugcuucgaaaccaaacacaaaugcaaccagaccugcuuagacaggauagcugcuggcaccuuuaaugcaggagaauuuucucuccccacuuuugauucauugaacauuacugcugcaucuuuaaaugaugauggauuggauaaccauacuauacugcucuauuacucaacugcugcuucuaguuuggcuguaacauuaaugcuagcuauuuuuauuguuuauauggucuccagagacaacguuucaugcuccaucugucuauaa

SEQ ID NO: 59068 - RNA, 1755 nt, Artificial Sequence
  derived and/or modified CDS sequence (wt) from hemagglutinin__InfluenzaB__AGX16467
augaaggcaauaauuguacuacucaugguaguaacauccaaugcagaucgaaucugcacuggaauaacauccucaaacucaccucauguggucaaaacagccacucaaggggaggucaaugugacuggugugauaccacuaacaacaacaccaacaaaaucuuauuuugcaaaucucaaaggaacaaggaccagagggaaacuaugcccagacugucucaacugcacagaucuggauguggcuuugggcagaccaauguguguggggaccacaccuucggcgaaagcuucaauacuccacgaagucagaccuguuacauccgggugcuuuccuauaaugcacgacagaacaaaaaucaggcaacuacccaaucuucucagaggauaugaaaauaucagguuaucaacccaaaacgucaucgaugcggaaaaggcaccaggaggacccuacagacuuggaaccucaggaucuugcccuaacgcuaccaguaagagcggauuuuucgcaacaauggcuugggcugucccaaaggacaacaacaaaaaugcaacgaacccacuaacaguagaaguaccauacauuuguacagaaggggaagaccaaaucacuguuuggggguuccauucagauaacaaaacccaaaugaagaaccucuauggagacucaaauccucaaaaguucaccucaucugcuaauggaguaaccacacacuauguuucucagauuggcagcuucccagaucaaacagaagacggaggacuaccacaaagcggcaggauuguuguugauuacaugaugcaaaaaccugggaaaacaggaacaauugucuaccaaagagguguuuuguugccucaaaggguguggugcgcgaguggcaggagcaaaguaauaaaaggguccuugccuuuaauuggugaagcagauugccuucaugaaaaauacgguggauuaaacaaaagcaagccuuacuacacaggagaacaugcaaaagccauaggaaauugcccaauaugggugaaaacaccuuugaagcuugccaauggaaccaaauauagaccuccugcaaaacuauuaaaggaaagggguuucuucggagcuauugcugguuuccuagaaggaggaugggaaggaaugauugcaggcuggcacggauacacaucucacggagcacauggaguggcaguggcggcggaccuuaagaguacgcaagaagcuauaaauaagauaacaaaaaaucucaauucuuugagugagcuagaaguaaagaaucuucaaagacuaaguggugccauggaugaacuccacaacgaaauacucgagcuggaugagaaaguggaugaucucagagcugacacuauaagcucgcaaauagaacuugcagucuugcuuuccaacgaaggaauaauaaacagugaagaugagcaucuauuggcacuugagagaaaacuaaagaaaaugcugggucccucugcuguagagauaggaaauggaugcuucgaaaccaaacacaagugcaaccagaccugcuuagacaggauagcugcuggcaccuuuaaugcaggagaauuuucucuccccacuuuugauucacugaacauuacugcugcaucuuuaaaugaugauggauuggauaaccauacuauacugcucuauuacucaacugcugcuucuaguuuggcuguaacauugaugcuagcuauuuuuauuguuuauauggucuccagagacaacguuucaugcuccaucugucuauaa

SEQ ID NO: 59069 - RNA, 1755 nt, Artificial Sequence
  derived and/or modified CDS sequence (wt) from hemagglutinin__InfluenzaB__AGX16478
augaaggcaauaauuguacuacucaugguaguaacauccaaugcagaucgaaucugcacugggauaacaucuucaaacucaccucauguggucaaaacagcuacucaaggggaggucaaugugacuggcgugauaccacugacaacaacaccaacaaaaucuuauuuugcaaaucucaaaggaacaaggaccagagggaaacuaugcccggacugucucaacuguacagaucuggauguggccuugggcaggccaauguguguggggaccacaccuucugcuaaagcuucaauacuccacgaagucagaccuguuacauccgggugcuuuccuauaaugcacgacagaacaaaaaucaggcaacuacccaaucuucucagaggauaugaaaauaucagguuaucaacccaaaacguuaucgaugcagaaaaagcaccaggaggacccuacagacuuggaaccucaggaucuugcccuaacgcuaccaguaaaaucggauuuuuugcaacaauggcuugggcugucccaaaggacaacuacaaaaaugcaacgaacccacuaacaguagaaguaccauacauuuguacagaaggggaagaccaaauuacuguuuggggguuccauucagauaacaaaacccaaaugaagaaccucuauggagacucaaauccucaaaaguucaccucaucugcuaauggaguaaccacacauuauguuucucagauuggcgacuucccagaucaaacagaagacggaggacuaccacaaagcggcagaauuguuguugauuacaugaugcaaaaaccugggaaaacaggaacaauugucuaucaaagagguguuuuguugccucaaaagguguggugcgcgaguggcaggagcaaaguaauaaaagggucauugccuuuaauuggugaagcagauugccuucaugaaaaauacgguggauuaaacaaaagcaagccuuacuacacaggagaacaugcaaaagccauaggaaauugcccaauauggguaaaaacaccuuugaagcuugccaauggaaccaaauauagaccuccugcaaaacuauuaaaggaaagggguuucuucggagcuauugcugguuuccuagaaggaggaugggaaggaaugauugcagguuggcacggauacacaucucacggagcacauggaguggcaguggcggcagaccuuaagaguacacaagaagcuauaaauaagauaacaaaaaaucucaauucuuugagugagcuagaaguaaagaaccuucaaagacuaaguggugccauggaugaacuccacaacgaaauacucgagcuggaugagaaaguggaugaucucagagcugacacuauaagcucacaaauagaacuugcagucuugcuuuccaacgaaggaauaauaaacagugaagacgagcaucuauuggcacuugagagaaaacuaaagaaaaugcugggucccucugcuguagacauaggaaauggaugcuucgaaaccaaacacaaaugcaaccagaccugcuuagacaggauagcugcuggcaccuuuaaugcaggagaauuuucucuccccacuuuugauucauugaacauuacugcugcaucuuuaaaugaugauggauuggauaaccauacuauacugcucuauuacucaacugcugcuucuaguuuggcuguaacauuaaugcuagcuauuuuuauuguuuauauggucuccagagacaacguuucaugcuccaucugucuauaa

SEQ ID NO: 59070 - RNA, 1755 nt, Artificial Sequence
  derived and/or modified CDS sequence (wt) from hemagglutinin__InfluenzaB__AGX16489
augaaggcaauaauuguacuacucaugguaguaacauccaaugcagaucgaaucugcacuggaauaacaucuucaaacucaccucacguggucaaaacagccacucaaggggaggucaaugugacuggugugauaccacuaacaacaacaccaacaaaaucuuauuuugcaaaucucaaaggaacaaggaccagaggaaaacuaugcccagacugucucaacugcacagaucuggauguggcuuugggcagaccaauguguguggggaccacaccuucggcgaaagcuucaauacuccacgaagucagaccuguuacauccgggugcuuuccuauaaugcacgacagaacaaaaaucaggcaacuacccaaucuucucagaggauaugaaaauaucaggcuaucaacccaaaacgucaucgaugcggaaaaggcaccaggaggacccuacagacuuggaaccucaggaucuugcccuaacgcuaccaguaagagcggauuuuucgcaacaauggcuugggcugucccaaaggacaacaacaaaaaugcaacgaacccacuaacaguagaaguaccauacauuuguacagaaggggaagaccaaaucacuguuuggggguuccauucagauaacaaaacccaaaugaagaaccucuauggagacucaaauccucaaaaguucaccucaucugcuaauggaguaaccacacacuauguuucucagauuggcagcuucccagaucaaacagaagacggaggacuaccacaaagcggcaggauuguuguugauuacaugaugcaaaaaccugggaaaacaggaacaauugucuaccaaagagguguuuuguugccucaaaagguguggugcgcgaguggcaggagcaaaguaauaaaaggguccuugccuuuaauuggugaagcagauugccuucaugaaaaauacgguggauuaaacaaaagcaagccuuacuacacaggagaacaugcaaaagccauaggaaauugcccaauaugggugaaaacaccuuugaagcuugccaauggaaccaaauauagaccuccugcaaagcuauuaaaggaaagggguuucuucggagcuauugcugguuuccuagaaggaggaugggaaggaaugauugcaggcuggcacggauacacaucucacggagcacauggaguggcaguggcggcggaccuuaagagcacacaagaagcuauaaacaagauaacaaaaaaucucaauucuuugagugagcuagaaguaaagaaucuucaaagacuaaguggugccauggaugaacuccacaacgaaauacucgagcuggaugagaaaguggaugaucucagagcugacacuauaagcucgcaaauagaacuugcagucuugcuuuccaacgaaggaauaauaaacagugaagaugagcaucuauuggcacuugagagaaaacuaaagaaaaugcugggucccucugcuguagagauaggaaauggaugcuucgaaaccaaacacaagugcaaccagaccugcuuagacaggauagcugcuggcaccuuuaaugcaggagaauuuucucuccccacuuuugauucacugaacauuacugcugcaucuuuaaaugaugauggauuggauaaccauacuauacugcucuauuacucaacugcugcuucuaguuuggcuguaacauugaugcuagcuauuuuuauuguuuauauggucuccagagacaacguuucaugcuccaucugucuauaa

SEQ ID NO: 59071 - RNA, 1758 nt, Artificial Sequence
  derived and/or modified CDS sequence (wt) from hemagglutinin__InfluenzaB__AGX16500
augaaggcaauaauuguacuacucaugguaguaacauccaaugcagaucgaaucugcacugggauaacaucgucaaacucaccccauguggucaaaacugcuacucaaggggaggucaaugugacuggugugauaccacugacaacaacacccaccaaaucucauuuugcaaaucucaaaggaacaaaaaccagagggaaacuaugcccaaaaugccucaacugcacagaucuggacguggccuugggcagaccaaaaugcacggggaacauacccucggcaaaaguuucaauacuccaugaagucagaccuguuacaucugggugcuuuccuauaaugcacgacagaacaaaaauuagacagcugcccaaucuucucagaggauacgaacauaucagguuaucaacucauaacguuaucaaugcagaaaaggcaccaggaggacccuacaaaauuggaaccucagggucuugcccuaacguuaccaauggaaacggauuuuucgcaacaauggcuugggccgucccaaaaaacgacaacaacaaaacagcaacaaauucauuaacaauagaaguaccauacauuuguacagaaggagaagaccaaauuaccguuuggggguuccacucugauaacgaaacccaaauggcaaaacucuauggggacucaaagccccagaaguucaccucaucugccaacggagugaccacacauuacguuucacagauugguggcuucccaaaucaaacagaagacggaggacuaccacaaagugguagaauuguuguugauuacauggugcaaaaaucugggaaaacaggaacaauuaccuaucaaagagguauuuuauugccucaaaaaguguggugcgcaaguggcaggagcaagguaauaaaaggauccuugccuuuaauuggagaagcagauugccuccacgaaaaauacgguggauuaaacaaaagcaagccuuacuacacaggggaacaugcaaaggccauaggaaauugcccaauaugggugaaaacacccuugaagcuggccaauggaaccaaauauagaccuccugcaaaacuauuaaaggaaagggguuucuucggagcuauugcugguuucuuagaaggaggaugggaaggaaugauugcagguuggcacggauacacaucccauggggcacauggaguagcaguggcagcagaccuuaagaguacucaagaagccauaaacaagauaacaaaaaaucucaacucuuugagugagcuggaaguaaagaaucuucaaagacuaagcggugccauggaugaacuccacaacgaaauacuagaacuagacgagaaaguggaugaucucagagcugauacaauaagcucacaaauagaacucgcagucuugcuuuccaaugaaggaauaauaaacagugaagaugagcaucucuuggcgcuugaaagaaagcugaagaaaaugcugggccccucugcuguagagauagggaauggaugcuucgaaaccaaacacaagugcaaccagaccugucucgacagaauagcugcugguaccuuugaugcaggagaauuuucucuccccacuuuugauucacugaauauuacugcugcaucuuuaaaugacgauggauuggauaaucauacuauacugcuuuacuacucaacugcugccuccaguuuggcuguaacauugaugauagcuaucuuuguuguuuauauggucuccagagacaauguuucuugcuccaucugucuauaa

SEQ ID NO: 59072 - RNA, 1758 nt, Artificial Sequence; identical to SEQ ID NO: 59071
  derived and/or modified CDS sequence (wt) from hemagglutinin__InfluenzaB__AGX16511

SEQ ID NO: 59073 - RNA, 1758 nt, Artificial Sequence; identical to SEQ ID NO: 59071
  derived and/or modified CDS sequence (wt) from hemagglutinin__InfluenzaB__AGX16522

SEQ ID NO: 59074 - RNA, 1758 nt, Artificial Sequence
  derived and/or modified CDS sequence (wt) from hemagglutinin__InfluenzaB__AGX16533
augaaggcaauaauuguacuacucaugguaguaacauccaaugcagaucgaaucugcacugggauaacaucgucaaacucaccccauguggucaaaacugcuacucaaggggaggucaaugugacuggugugauaccacugacaacaacacccaccaaaucucauuuugcaaaucucaaaggaacaaaaaccagagggaaacuaugcccaaaaugccucaacugcacagaucuggacguggccuugggcagaccaaaaugcacggggaacauacccucggcaaaaguuucaauacuccaugaagucagaccuguuacaucugggugcuuuccuauaaugcacgacagaacaaaaauuagacagcugcccaaucuucucagaggauacgaacauaucagguuaucaacucauaacguuaucaaugcagaaaaggcaccaggaggacccuacaaaauuggaaccucagggucuugcccuaacguuaccaauggaaacggauuuuucgcaacaauggcuugggccgucccaaaaaacgacaacaacaaaacagcaacaaauucauuaacaauagaaguaccauacauuuguacagaaggagaagaccaaauuaccguuuggggguuccacucugauaaagaaacccaaauggcaaaacucuauggggacucaaagccccagaaguucaccucaucugccaacggagugaccacacauuacguuucacagauugguggcuucccaaaucaaacagaagacggaggacuaccacaaagugguagaauuguuguugauuacauggugcaaaaaucugggaaaacaggaacaauuaccuaucaaagagguauuuuauugccucaaaaaguguggugcgcaaguggcaggagcaagguaauaaaaggauccuugccuuuaauuggagaagcagauugccuccacgaaaaauacgguggauuaaacaaaagcaagccuuacuacacaggggaacaugcaaaggccauaggaaauugcccaauaugggugaaaacacccuugaagcuggccaauggaaccaaauauagaccuccugcaaaacuauuaaaggaaaggggcuucuucggagcuauugcugguuucuuagaaggaggaugggaaggaaugauugcagguuggcacggauacacaucccauggggcacauggaguagcaguggcagcagaccuuaagaguacucaagaagccauaaacaagauaacaaaaaaucucaacucuuugagugagcuggaaguaaagaaucuucaaagacuaagcggugccauggaugaacuccacaacgaaauacuagaacuagacgagaaaguggaugaucucagagcugauacaauaagcucacaaauagaacucgcagucuugcuuuccaaugaaggaauaauaaacagugaagaugagcaucucuuggcgcuugaaagaaagcugaagaaaaugcugggccccucugcuguagagauagggaauggaugcuucgaaaccaaacacaagugcaaccagaccugucucgacagaauagcugcugguaccuuugaugcaggagaauuuucucuccccacuuuugauucacugaauauuacugcugcaucuuuaaaugacgauggauuggauaaucauacuauacugcuuuauuacucaacugcugccuccaguuuggcuguaacauugaugauagcuaucuuuguuguuuauauggucuccagagacaauguuucuugcuccaucugucuauaa

SEQ ID NO: 59075 - RNA, 1758 nt, Artificial Sequence
  derived and/or modified CDS sequence (wt) from hemagglutinin__InfluenzaB__AGX16555
augaaggcaauaauuguacuacucaugguaguaacauccaaugcagaucgaaucugcacugggauaacaucgucaaacucaccccauguggucaaaacugcuacucaaggggaggucaaugugacuggugugauaccacugacaacaacacccaccaaaucucauuuugcaaaucucaaaggaacaaaaaccagagggaaacuaugcccaaaaugccucaacugcacagaucuggacguggccuugggcagaccaaaaugcacggggaacauacccucggcaaaaguuucaauacuccaugaagucagaccuguuacaucugggugcuuuccuauaaugcacgacagaacaaaaauuagacagcugcccaaucuucucagaggauacgaacauaucagguuaucaacucauaacguuaucaaugcagaaaaggcaccaggaggacccuacaaaauuggaaccucagggucuugcccuaacguuaccaauggaaacggauuuuucgcaacaauggcuugggccgucccaaaaaacgacaacaacaaaacagcaacaaauucauuaacaauagaaguaccauacauuuguacagaaggagaagaccaaauuaccguuuggggguuccacucugauaacgaagcccaaauggcaaaacucuauggggacucaaagccccagaaguucaccucaucugccaacggagugaccacacauuacguuucacagauugguggcuucccaaaucaaacagaagacggaggacuaccacaaagugguagaauuguuguugauuacauggugcaaaaaucugggaaaacaggaacaauuaccuaucaaagagguauuuuauugccucaaaaaguguggugcgcaaguggcaggagcaagguaauaaaaggauccuugccuuuaauuggagaagcagauugccuccacgaaaaauacgguggauuaaacaaaagcaagccuuacuacacaggggaacaugcaaaggccauaggaaauugcccaauaugggugaaaacacccuugaagcuggccaauggaaccaaauauagaccuccugcaaaacuauuaaaggaaagggguuucuucggagcuauugcugguuucuuagaaggaggaugggaaggaaugauugcagguuggcacggauacacaucccauggggcacauggaguagcaguggcagcagaccuuaagaguacucaagaagccauaaacaagauaacaaaaaaucucaacucuuugagugagcuggaaguaaagaaucuucaaagacuaagcggugccauggaugaacuccacaacgaaauacuagaacuagacgagaaaguggaugaucucagagcugauacaauaagcucacaaauagaacucgcagucuugcuuuccaaugaaggaauaauaaacagugaagaugagcaucucuuggcgcuugaaagaaagcugaagaaaaugcugggccccucugcuguagagauagggaauggaugcuucgaaaccaaacacaagugcaaccagaccugucucgacagaauagcugcugguaccuuugaugcaggagaauuuucucuccccacuuuugauucacugaauauuacugcugcaucuuuaaaugacgauggauuggauaaucauacuauacugcuuuacuacucaacugcugccuccaguuuggcuguaacauugaugauagcuaucuuuguuguuuauauggucuccagagacaauguuucuugcuccaucugucuauaa

SEQ ID NO: 59076 - RNA, 1758 nt, Artificial Sequence
  derived and/or modified CDS sequence (wt) from hemagglutinin__InfluenzaB__AGX16566
augaaggcaauaauuguacuacucaugguaguaacauccaaugcagaucgaaucugcacugggauaacaucgucaaacucaccccauguggucaaaacugcuacucaaggggaggucaaugugacuggugugauaccacugacaacaacacccaccaaaucucauuuugcaaaucucaaaggaacaaaaaccagagggaaacuaugcccaaaaugccucaacugcacagaucuggacguggccuugggcagaccaaaaugcacggggaacauacccucggcaaaaguuucaauacuccaugaagucagaccuguuacaucugggugcuuuccuauaaugcacgacagaacaaaaauuagacagcugcccaaucuucucagaggauacgaacauaucagguuaucaacucauaacguuaucaaugcagaaaaggcaccaggaggacccuacaaaauuggaaccucagggucuugcccuaacguuaccaauggaaacggauuuuucgcaacaauggcuugggccgucccaaaaaacgacaacaacaaaacagcaacaaauucauuaacaauagaaguaccauacauuuguacagaaggagaagaccaaauuaccguuuggggguuccacucugauaacgaaauccaaauggcaaaacucuauggggacucaaagccccagaaguucaccucaucugccaacggagugaccacacauuacguuucacagauugguggcuucccaaaucaaacagaagacggaggacuaccacaaagugguagaauuguuguugauuacauggugcaaaaaucugggaaaacaggaacaauuaccuaucaaagagguauuuuauugccucaaaaaguguggugcgcaaguggcaggagcaagguaauaaaaggauccuugccuuuaauuggagaagcagauugccuccacgaaaaauacgguggauuaaacaaaagcaagccuuacuacacaggggaacaugcaaaggccauaggaaauugcccaauaugggugaaaacacccuugaagcuggccaauggaacuaaauauagaccuccugcaaaacuauuaaaggaaagggguuucuucggggcuauugcugguuucuuagaaggaggaugggaaggaaugauugcagguuggcacggauacacaucccauggggcacauggaguagcaguggcagcagaccuuaagaguacucaagaagccauaaacaagauaacaaaaaaucucaacucuuugagugagcuggaaguaaagaaucuucaaagacuaagcggugccauggaugaacuccacaacgaaauacuagaacuagacgagaaaguggaugaucucagagcugauacaauaagcucacaaauagaacucgcagucuugcuuuccaaugaaggaauaauaaacagugaagaugagcaucucuuggcgcuugaaagaaagcugaagaaaaugcugggccccucugcuguagagauagggaauggaugcuucgaaaccaaacacaagugcaaccagaccugucucgacagaauagcugcugguaccuuugaugcaggagaauuuucucuccccacuuuugauucacugaauauuacugcugcaucuuuaaaugacgauggauuggauaaucauacuauacugcuuuacuacucaacugcugccuccaguuuggcuguaacauugaugauagcuaucuuuguuguuuauauggucuccagagacaauguuucuugcuccaucugucuauaa

SEQ ID NO: 59077 - RNA, 1758 nt, Artificial Sequence
  derived and/or modified CDS sequence (wt) from hemagglutinin__InfluenzaB__AGX16577
augaaggcaauaauuguacuacucaugguaguaacauccaaugcagaucgaaucugcacugggauaacaucgucaaacucaccccauguggucaaaacugcuacucaaggggaggucaaugugacuggugugauaccacugacaacaacacccaccaaaucucauuuugcaaaucucaaaggaacaaaaaccagagggaaacuaugcccaaaaugccucaacugcacagaucuggacguggccuugggcagaccaaaaugcacggggaacauacccucggcaaaaguuucaauacuccaugaagucagaccuguuacaucugggugcuuuccuauaaugcacgacagaacaaaaauuagacagcugcccaaucuucucagaggauacgaacauaucagguuaucaacucauaacguuaucaaugcagaaaaggcaccaggaggacccuacaaaauuggaaccucagggucuugcccuaacguuaccaauggaaacggauuuuucgcaacaauggcuugggccgucccaaaaaacgacaacaacaaaacagcaacaaauucauuaacaauagaaguaccauacauuuguacagaaggagaagaccaaauuaccguuuggggguuccacucugauaacgaaacccaaauggcaaaacucuauggggacucaaagccccagaaguucaccucaucugccaacggagugaccacacauuacguuucacagauugguggcuucccaaaucaaacagaagacggaggacuaccacaaagugguagaauuguuguugauuacauggugcaaaaaucugggaaaacaggaacaauuaccuaucaaagagguauuuuauugccucaaaaaguguggugcgcaaguggcaggagcaagguaauaaaaggauccuugccuuuaauuggagaagcagauugccuccacgaaaaauacgguggauuaaacaaaagcaagccuuacuacacaggggaacaugcaaaggccauaggaaauugcccaauaugggugaaaacacccuugaagcuggccaauggaacuaaauauagaccuccugcaaaacuauuaaaggaaagggguuucuucggggcuauugcugguuucuuagaaggaggaugggaaggaaugauugcagguuggcacggauacacaucccauggggcacauggaguagcaguggcagcagaccuuaagaguacucaagaagccauaaacaagauaacaaaaaaucucaacucuuugagugagcuggaaguaaagaaucuucaaagacuaagcggugccauggaugaacuccacaacgaaauacuagaacuagacgagaaaguggaugaucucagagcugauacaauaagcucacaaauagaacucgcagucuugcuuuccaaugaaggaauaauaaacagugaagaugagcaucucuuggcgcuugaaagaaagcugaagaaaaugcugggccccucugcuguagagauagggaauggaugcuucgaaaccaaacacaagugcaaccagaccugucucgacagaauagcugcugguaccuuugaugcaggagaauuuucucuccccacuuuugauucacugaauauuacugcugcaucuuuaaaugacgauggauuggauaaucauacuauacugcuuuacuacucaacugcugccuccaguuuggcuguaacauugaugauagcuaucuuuguuguuuauauggucuccagagacaauguuucuugcuccaucugucuauaa

SEQ ID NO: 59078 - RNA, 1758 nt, Artificial Sequence
  derived and/or modified CDS sequence (wt) from hemagglutinin__InfluenzaB__AGX16588
augaaggcaauaauuguacuacucaugguaguaacauccaaugcagaucgaaucugcacugggauaacaucgucaaacucaccccauguggucaaaacugcuacucaaggggaggucaaugugacuggugugauaccacugacaacaacacccaccaaaucucauuuugcaaaucucaaaggaacaaaaaccagagggaaacuaugcccaaaaugccucaacugcacagaucuggacguggccuugggcagaccaaaaugcacggggaacauacccucggcaaaaguuucaauacuccaugaagucagaccuguuacaucugggugcuuuccuauaaugcacgacagaacaaaaauuagacagcugcccaaucuucucagaggauacgaacauaucagguuaucaacucauaacguuaucaaugcagaaaaggcaccaggaggacccuacaaaauuggaaccucagggucuugcccuaacguuaccaauggaaacggauuuuucgcaacaauggcuugggccgucccaaaaaacgacaacaacaaaacagcaacaaauucauuaacaauagaaguaccauacauuuguacagaaggagaagaccaaauuaccguuuggggguuccacucugauaacgaaauccaaauggcaaaacucuauggggacucaaagccccagaaguucaccucaucugccaacggagugaccacacauuacguuucacagauugguggcuucccaaaucaaacagaagacggaggacuaccacaaagugguagaauuguuguugauuacauggugcaaaaaucugggaaaacaggaacaauuaccuaucaaagagguauuuuauugccucaaaaaguguggugcgcaaguggcaggagcaagguaauaaaaggauccuugccuuuaauuggagaagcagauugccuccacgaaaaauacgguggauuaaacaaaagcaagccuuacuacacaggggaacaugcaaaggccauaggaaauugcccaauaugggugaaaacacccuugaagcuggccaauggaacuaaauauagaccuccugcaaaacuauuaaaggaaagggguuucuucggggcuauugcugguuucuuagaaggaggaugggaaggaaugauugcagguuggcacggauacacaucccauggggcacauggaguagcaguggcagcagaccuuaagaguacucaagaagccauaaacaagauaacaaaaaaucucaacucuuugagugagcuggaaguaaagaaucuucaaagacuaagcggugccauggaugaacuccacaacgaaauacuagaacuagacgagaaaguggaugaucucagagcugauacaauaagcucacaaauagaacucgcagucuugcuuuccaaugaaggaauaauaaacagugaagaugagcaucucuuggcgcuugaaagaaagcugaagaaaaugcugggccccucugcuauagagauagggaauggaugcuucgaaaccaaacacaagugcaaccagaccugucucgacagaauagcugcugguaccuuugaugcaggagaauuuucucuccccacuuuugauucacugaauauuacugcugcaucuuuaaaugacgauggauuggauaaucauacuauacugcuuuacuacucaacugcugccuccaguuuggcuguaacauugaugauagcuaucuuuguuguuuauauggucuccagagacaauguuucuugcuccaucugucuauaa

SEQ ID NO: 59079 - RNA, 1758 nt, Artificial Sequence
  derived and/or modified CDS sequence (wt) from hemagglutinin__InfluenzaB__AGX16599
augaaggcaauaauuguacuacucaugguaguaacauccaaugcagaucgaaucugcacugggauaacaucgucaaacucaccccauguggucaaaacugcuacucaaggggaggucaaugugacuggugugauaccacugacaacaacacccaccaaaucucauuuugcaaaucucaaaggaacaaaaaccagagggaaacuaugcccaaaaugccucaacugcacagaucuggacguggccuugggcagaccaaaaugcacggggaacauacccucggcaaaaguuucaauacuccaugaagucagaccuguuacaucugggugcuuuccuauaaugcacgacagaacaaaaauuagacagcugcccaaucuucucagaggauacgaacauaucagguuaucaacucauaacguuaucaaugcagaaaaggcaccaggaggacccuacaaaauuggaaccucagggucuugcccuaacguuaccaauggaaacggauuuuucgcaacaauggcuugggccgucccaaaaaacgacaacaacaaaacagcaacaaauucauuaacaauagaaguaccauacauuuguacagaaggagaagaccaaauuaccguuuggggguuccacucugauaacgaaacccaaauggcaaaacucuauggggacucaaagccccagaaguucaccucaucugccaacggagugaccacacauuacgugucacagauugguggcuucccaaaucaaacagaagacggaggacuaccacaaagugguagaauuguuguugauuacauggugcaaaaaucugggaaaacaggaacaauuaccuaucaaagagguauuuuauugccucaaaaaguguggugcgcaaguggcaggagcaagguaauaaaaggauccuugccuuuaauuggagaagcagauugccuccacgaaaaauacgguggauuaaacaaaagcaagccuuacuacacaggggaacaugcaaaggccauaggaaauugcccaauaugggugaaaacacccuugaagcuggccaauggaaccaaauauagaccuccugcaaaacuauuaaaggaaaggggcuucuucggagcuauugcugguuucuuagaaggaggaugggaaggaaugauugcagguuggcacggauacacaucccauggggcacauggaguagcaguggcagcagaccuuaagaguacucaagaagccauaaacaagauaacaaaaaaucucaacucuuugagugagcuggaaguaaagaaucuucaaagacuaagcggugccauggaugaacuccacaacgaaauacuagaacuagacgagaaaguggaugaucucagagcugauacaauaagcucacaaauagaacucgcagucuugcuuuccaaugaaggaauaauaaacagugaagaugagcaucucuuggcgcuugaaagaaagcugaagaaaaugcugggccccucugcuguagagauagggaauggaugcuucgaaaccaaacacaagugcaaccagaccugucucgacagaauagcugcugguaccuuugaugcaggagaauuuucucuccccacuuuugauucacugaauauuacugcugcaucuuuaaaugacgauggauuggauaaucauacuauacugcuuuauuacucaacugcugccuccaguuuggcuguaacauugaugauagcuaucuuuguuguuuauauggucuccagagacaauguuucuugcuccaucugucuauaa

SEQ ID NO: 59080 - RNA, 1758 nt, Artificial Sequence
  derived and/or modified CDS sequence (wt) from hemagglutinin__InfluenzaB__AGX16610
augaaggcaauaauuguacuacucaugguaguaacauccaaugcagaucgaaucugcacugggauaacaucgucaaacucaccccauguggucaaaacugcuacucaaggggaggucaaugugacuggugugauaccacugacaacaacacccaccaaaucucauuuugcaaaucucaaaggaacaaaaaccagagggaaacuaugcccaaaaugccucaacugcacagaucuggacguggccuugggcagaccaaaaugcacggggaacauacccucggcaaaaguuucaauacuccaugaagucagaccuguuacaucugggugcuuuccuauaaugcacgacagaacaaaaauuagacagcugcccaaccuucucagaggauacgaacauaucagguuaucaacucauaacguuaucaaugcagaaaaggcaccaggaggacccuacaaaauuggaaccucagggucuugcccuaacguuaccaauggaaacggauuuuucgcaacaauggcuugggccgucccaaaaaacgacaacaacaaaacagcaacaaauucauuaacaauagaaguaccauacauuuguacagaaggagaagaccaaauuaccguuuggggguuccacucugauaaagaaacccaaauggcaaaacucuauggggacucaaagccccagaaguucaccucaucugccaacggagugaccacacauuacguuucacagauugguggcuucccaaaucaaacagaagacggaggacuaccacaaagugguagaauuguuguugauuacauggugcaaaaaucugggaaaacaggaacaauuaccuaucaaagagguauuuuauugccucaaaaaguguggugcgcaaguggcaggagcaagguaauaaaaggauccuugccuuuaauuggagaagcagauugccuccacgaaaaauacgguggauuaaacaaaagcaagccuuacuacacaggggaacaugcaaaggccauaggaaauugcccaauaugggugaaaacacccuugaagcuggccaauggaaccaaauauagaccuccugcaaaacuauuaaaggaaagggguuucuucggagcuauugcugguuucuuagaaggaggaugggaaggaaugauugcagguuggcacggauacacaucccauggggcacauggaguagcaguggcagcagaccuuaagagcacucaagaagccauaaacaagauaacaaaaaaucucaacucuuugagugagcuggaaguaaagaaucuucaaagacuaagcggugccauggaugaacuccacaacgaaauacuagaacuagacgagaaaguggaugaucucagagcugauacaauaagcucacaaauagaacucgcaguccugcuuuccaaugaaggaauaauaaacagugaagaugagcaucucuuggcgcuugaaagaaagcugaagaaaaugcugggccccucugcuguagagauagggaauggaugcuucgaaaccaaacacaagugcaaccagaccugucucgacagaauagcugcugguaccuuugaugcaggagaauuuucucuccccacuuuugauucacugaauauuacugcugcaucuuuaaaugacgauggauuggauaaucauacuauacugcuuuacuacucaacugcugccuccaguuuggcuguaacauugaugauagcuaucuuuguuguuuauauggucuccagagacaauguuucuugcuccaucugucuauaa

SEQ ID NO: 59081 - RNA, 1758 nt, Artificial Sequence
  derived and/or modified CDS sequence (wt) from hemagglutinin__InfluenzaB__AGX16621
augaaggcaauaauuguacuacucaugguaguaacauccaaugcagaucgaaucugcacugggauaacaucgucaaacucaccccauguggucaaaacugcuacucaaggggaggucaaugugacuggugugauaccacugacaacaacacccaccaaaucucauuuugcaaaucucaaaggaacaaaaaccagagggaaacuaugcccaaaaugccucaacugcacagaucuggacguggccuugggcagaccaaaaugcacggggaacauacccucggcaaaaguuucaauacuccaugaagucagaccuguuacaucugggugcuuuccuauaaugcacgacagaacaaaaauuagacagcugcccaaucuucucagaggauacgaacauaucagguuaucaacucauaacguuaucaaugcagaaaaggcaccaggaggacccuacaaaauuggaaccucagggucuugcccuaacguuaccaauggaaacggauuuuuugcaacaauggcuugggccgucccaaaaaacgacaacaacaaaacagcaacaaauucauuaacaauagaaguaccauacauuuguacagaaggagaagaccaaauuaccguuuggggguuccacucugauaacgaaacccaaauggcaaaacucuauggggacucaaagccccagaaguucaccucaucugccaacggaguuaccacacauuacguuucacagauugguggcuucccaaaucaaacagaagacggaggacuaccacaaagugguagaauuguuguugauuacauggugcaaaaaucugggaaaacaggaacaauuaccuaucaaagagguauuuuauugccucaaaaaguguggugcgcaaguggcaggagcaagguaauaaaaggauccuugccuuuaauuggagaagcagauugccuccacgaaaaauacgguggauuaaacaaaagcaagccuuacuacacaggggaacaugcaaaggccauaggaaauugcccaauaugggugaaaacacccuugaagcuggccaauggaaccaaauauagaccuccugcaaaacuauuaaaggaaaggggcuucuucggagcuauugcugguuucuuagaaggaggaugggaaggaaugauugcagguuggcacggauacacaucccauggggcacauggaguagcaguggcagcagaccuuaagaguacucaagaagccauaaacaagauaacaaaaaaucucaacucuuugagugagcuggaaguaaagaaucuucaaagacuaagcggugccauggaugaacuccacaacgaaauacuagaacuagacgagaaaguggaugaucucagagcugauacaauaagcucacaaauagaacucgcagucuugcuuuccaaugaaggaauaauaaacagugaagaugagcaucucuuggcgcuugaaagaaagcugaagaaaaugcugggccccucugcuguagagauagggaauggaugcuucgaaaccaaacacaagugcaaccagaccugucucgacagaauagcugcugguaccuuugaugcaggagaauuuucucuccccacuuuugauucacugaauauuacugcugcaucuuuaaaugacgauggauuggauaaucauacuauacugcuuuauuacucaacugcugccuccaguuuggcuguaacauugaugauagcuaucuuuguuguuuauauggucuccagagacaauguuucuugcuccaucugucuauaa

SEQ ID NO: 59082 - RNA, 1758 nt, Artificial Sequence
  derived and/or modified CDS sequence (wt) from hemagglutinin__InfluenzaB__AGX16654
augaaggcaauaauuguacuacucaugguaguaacauccaaugcagaucgaaucugcacugggauaacaucgucaaacucaccccauguggucaaaacugcuacucaaggggaggucaaugugacuggugugauaccacugacaacaacacccaccaaaucucauuuugcaaaucucaaaggaacaaaaaccagagggaaacuaugcccaaaaugccucaacugcacagaucuggacguggccuugggcagaccaaaaugcacggggaacauacccucggcaaaaguuucaauacuccaugaagucagaccuguuacaucugggugcuuuccuauaaugcacgacagaacaaaaauuagacagcugcccaaucuucucagaggauacgaacauaucagguuaucaacucauaacguuaucaaugcagaaaaggcaccaggaggacccuacaaaauuggaaccucagggucuugcccuaacguuaccaauggaaacggauuuuucgcaacaauggcuugggccgucccaaaaaacgacaacaacaaaacagcaauaaauucauuaacaauagaaguaccauacauuuguacagaaggagaagaccaaauuaccguuuggggguuccacucugauaacgaaacccaaauggcaaaacucuauggggacucaaagccccagaaguucaccucaucugccaacggagugaccacacauuacguuucacagauugguggcuucccaaaucaaacagaagacggaggacuaccacaaagugguagaauuguuguugauuacaugguacaaaaaucuggaaaaacaggaacaauuaccuaucaaagagguauuuuauugccucaaaaaguguggugcgcaaguggcaggagcaagguaauaaaaggauccuugccuuuaauuggagaagcagauugccuccacgaaaaauacgguggauuaaacaaaagcaagccuuacuacacaggggaacaugcaaaggccauaggaaauugcccaauaugggugaaaacacccuugaagcuggccaauggaacuaaauauagaccuccugcaaaacuauuaaaggaaagggguuucuucggggcuauugcugguuucuuagaaggaggaugggaaggaaugauugcagguuggcacggauacacaucccauggggcacauggaguagcaguggcagcagaccuuaagaguacucaagaagccauaaacaagauaacaaaaaaucucaacucuuugagugagcuggaaguaaagaaucuucaaagacuaagcggugccauggaugaacuccacaacgaaauacuagaacuagacgagaaaguggaugaucucagagcugauacaauaagcucacaaauagaacucgcagucuugcuuuccaaugaaggaauaauaaacagugaagaugagcaucucuuggcgcuugaaagaaagcugaagaaaaugcugggccccucugcuauagagauagggaauggaugcuucgaaaccaaacacaagugcaaccagaccugucucgacagaauagcugcugguaccuuugaugcaggagaauuuucucuccccacuuuugauucacugaauauuacugcugcaucuuuaaaugacgauggauuggauaaucauacuauacugcuuuacuacucaacugcugccuccaguuuggcuguaacauugaugauagcuaucuuuguuguuuauauggucuccagagacaauguuucuugcuccaucugucuauaa

SEQ ID NO: 59083 - RNA, 1758 nt, Artificial Sequence
  derived and/or modified CDS sequence (wt) from hemagglutinin__InfluenzaB__AGX16665
augaaggcaauaauuguacuacucaugguaguaacauccaaugcagaucgaaucugcacugggauaacaucgucaaacucaccccauguggucaaaacugcuacucaaggggaggucaaugugacuggugugauaccacugacaacaacacccaccaaaucucauuuugcaaaucucaaaggaacaaaaaccagagggaaacuaugcccaaaaugccucaacugcacagaucuggacguggccuugggcagaccaaaaugcacggggaacauacccucggcaaaaguuucaauacuccaugaagucagaccuguuacaucugggugcuuuccuauaaugcacgacagaacaaaaauuagacagcugcccaaucuucucagaggauacgaacauaucagguuaucaacucauaacguuaucaaugcagaaaaggcaccaggaggacccuacaaaauuggaaccucagggucuugcccuaacguuaccaauggaaacggauuuuucgcaacaauggcuugggccgucccaaaaaacgacaacaacaaaacagcaacaaauucauuaacaauagaaguaccauacauuuguacagaaggagaagaccaaauuaccguuuggggguuccacucugauaacgaaacccaaauggcaaaacucuauggggacucaaagccccagaaguucaccucaucugccaauggagugaccacacauuacguuucacagauugguggcuucccaaaucaaacagaagacggaggacuaccacaaagugguagaauuguuguugauuacauggugcaaaaaucugggaaaacaggaacaauuaccuaucaaagagguauuuuauugccucaaaaaguguggugcgcaaguggcaggagcaagguaauaaaaggauccuugccuuuaauuggagaagcagauugccuccacgaaaaauacgguggauuaaacaaaagcaagccuuacuacacaggggaacaugcaaaggccauaggaaauugcccaauaugggugaaaacacccuugaagcuggccaauggaaccaaauauagaccuccugcaaaacuauuaaaggaaagggguuucuucggagcuauugcugguuucuuagaaggaggaugggaaggaaugauugcagguuggcacggauacacaucccauggggcacauggaguagcaguggcagcagaccuuaagaguacucaagaagccauaaacaagauaacaaaaaaucucaacucuuugagugagcuggaaguaaagaaucuucaaagacuaagcggugccauggaugaacuccacaacgaaauacuagaacuagacgagaaaguggaugaucucagagcugauacaauaagcucacaaauagaacucgcagucuugcuuuccaaugaaggaauaauaaacagugaagaugagcaucucuuggcgcuugaaagaaagcugaagaagaugcugggccccucugcuguagagauagggaauggaugcuucgaaaccaaacacaagugcaaccagaccugucucgacagaauagcugcugguaccuuugaugcaggagaauuuucucuccccacuuuugauucacugaauauuacugcugcaucuuuaaaugacgauggauuggauaaucauacuauacugcuuuacuacucaacugcugccuccaguuuggcuguaacauugaugauagcuaucuuuguuguuuauauggucuccagagacaauguuucuugcuccaucugucuauaa

SEQ ID NO: 59084 - RNA, 1758 nt, Artificial Sequence
  derived and/or modified CDS sequence (wt) from hemagglutinin__InfluenzaB__AGX16676
augaaggcaauaauuguacuacucaugguaguaacauccaaugcagaucgaaucugcacugggauaacaucgucaaacucaccccauguggucaaaacugcuacucaaggggaggucaaugugacuggugugauaccacugacaacaacacccaccaaaucucauuuugcaaaucucaaaggaacaaaaaccagagggaaacuaugcccaaaaugccucaacugcacagaucuggacguggccuugggcagaccaaaaugcacggggaacauacccucggcaaaaguuucaauacuccaugaagucagaccuguuacaucugggugcuuuccuauaaugcacgacagaacaaaaauuagacagcugcccaaccuucucagaggauacgaacauaucagguuaucaacucauaacguuaucaaugcagaaaaggcaccaggaggacccuacaaaauuggaaccucagggucuugcccuaacguuaccaauggaaacggauuuuucgcaacaauggcuugggccgucccaaaaaacgacaacaacaaaacagcaacaaauucauuaacaauagaaguaccauacauuuguacagaaggagaagaccaaauuaccguuuggggguuccacucugauaacgaaacccaaauggcaaaacucuauggggacucaaagccccagaaguucaccucaucugccaacggagugaccacacauuacguuucacagauugguggcuucccaaaucaaacagaagacggaggacuaccacaaagugguagaauuguuguugauuacauggugcaaaaaucugggaaaacaggaacaauuaccuaucaaagagguauuuuauugccucaaaaaguguggugcgcaaguggcaggagcaagguaauaaaaggauccuugccuuuaauuggagaagcagauugccuccacgaaaaauacgguggauuaaacaaaagcaagccuuacuacacaggggaacaugcaaaggccauaggaaauugcccaauaugggugaaaacacccuugaagcuggccaauggaaccaaauauagaccuccugcaaaacuauuaaaggaaagggguuucuucggagcuauugcugguuucuuagaaggaggaugggaaggaaugauugcagguuggcacggauacacaucccauggggcacauggaguagcaguggcagcagaccuuaagagcacucaagaagccauaaacaagauaacaaaaaaucucaacucuuugagugagcuggaaguaaagaaucuucaaagacuaagcggugccauggaugaacuccacaacgaaauacuagaacuagacgagaaaguggaugaucucagagcugauacaauaagcucacaaauagaacucgcaguccugcuuuccaaugaaggaauaauaaacagugaagaugagcaucucuuggcgcuugaaagaaagcugaagaaaaugcugggccccucugcuguagagauagggaauggaugcuucgaaaccaaacacaagugcaaccagaccugucucgacagaauagcugcugguaccuuugaugcaggagaauuuucucuccccacuuuugauucacugaauauuacugcugcaucuuuaaaugacgauggauuggauaaucauacuauacugcuuuacuacucaacugcugccuccaguuuggcuguaacauugaugauagcuaucuuuguuguuuauauggucuccagagacaauguuucuugcuccaucugucuauaa

SEQ ID NO: 59085 - RNA, 1758 nt, Artificial Sequence
  derived and/or modified CDS sequence (wt) from hemagglutinin__InfluenzaB__AGX16687
augaaggcaauaauuguacuacucaugguaguaacauccaaugcagaucgaaucugcacugggauaacaucgucaaacucaccccauguggucaaaacugcuacucaaggggaggucaaugugacuggugugauaccacugacaacaacacccaccaaaucucauuuugcaaaucucaaaggaacaaaaaccagagggaaacuaugcccaaaaugccucaacugcacagaucuggacguggccuugggcagaccaaaaugcacggggaacauacccucggcaaaaguuucaauacuccaugaagucagaccuguuacaucugggugcuuuccuauaaugcacgacagaacaaaaauuagacagcugcccaaucuucucagaggauacgaacauaucagguuaucaacucauaacguuaucaaugcagaaaaggcaccaggaggacccuacaaaauuggaaccucagggucuugcccuaacguuaccaauggaaacggauuuuucgcaacaauggcuugggccgucccaaaaaacgacaacaacaaaacagcaacaaauucauuaacaauagaaguaccauacauuuguacagaaggagaagaccaaauuaccguuuggggguuccacucugauaacgaaacccaaauggcaaaacucuauggggacucaaagccccagaaguucaccucaucugccaacggagugaccacacauuacguuucacagauugguggcuucccaaaucaaacagaagacggaggacuaccacaaagugguagaauuguuguugauuacauggugcaaaaaucugggaaaacaggaacaauuaccuaucaaagagguauuuuauugccucaaaaaguguggugcgcaaguggcaggagcaagguaauaaaaggauccuugccuuuaauuggagaagcagauugccuccacgaaaaauacgguggauuaaacaaaagcaagccuuacuacacaggggaacaugcaaaggccauaggaaauugcccaauaugggugaaaacacccuugaagcuggccaauggaaccaaauauagaccuccugcaaaacuauuaaaggaaaggggcuucuucggagcuauugcugguuucuuagaaggaggaugggaaggaaugauugcagguuggcacggauacacaucccauggggcacauggaguagcaguggcagcagaccuuaagaguacucaagaagccauaaacaagauaacaaaaaaucucaacucuuugagugagcuggaaguaaagaaucuucaaagacuaagcggugccauggaugaacuccacaacgaaauacuagaacuagacgagaaaguggaugaucucagagcugauacaauaagcucacaaauagaacucgcagucuugcuuuccaaugaaggaauaauaaacagugaagaugagcaucucuuggcgcuugaaagaaagcugaagaaaaugcugggccccucugcuguagagauagggaauggaugcuucgaaaccaaacacaagugcaaccagaccugucucgacagaauagcugcugguaccuuugaugcaggagaauuuucucuccccacuuuugauucacugaauauuacugcugcaucuuuaaaugacgauggauuggauaaucauacuauacugcuuuauuacucaacugcugccuccaguuuggcuguaacauugaugauagcuaucuuuguuguuuauauggucuccagagacaauguuucuugcuccaucugucuauaa

SEQ ID NO: 59086 - RNA, 1758 nt, Artificial Sequence; identical to SEQ ID NO: 59079
  derived and/or modified CDS sequence (wt) from hemagglutinin__InfluenzaB__AGX16698

SEQ ID NO: 59087 - RNA, 1758 nt, Artificial Sequence
  derived and/or modified CDS sequence (wt) from hemagglutinin__InfluenzaB__AGX16709
augaaggcaauaauuguacuacucaugguaguaacauccaaugcagaucgaaucugcacugggauaacaucgucaaacucaccccauguggucaaaacugcuacucaaggggaggucaaugugacuggugugauaccacugacaacaacacccaccaaaucucauuuugcaaaucucaaaggaacaaaaaccagagggaaacuaugcccaaaaugccucaacugcacagaucuggacguggccuugggcagaccaaaaugcacggagaacauacccucggcaaaaguuucaauacuccaugaagucagaccuguuacaucugggugcuuuccuauaaugcacgacagaacaaaaauuagacagcugcccaaucuucucagaggauacgaacauaucagguuaucaacucauaacguuaucaaugcagaaaaggcaccaggaggacccuacaaaauuggaaccucagggucuugcccuaacguuaccaauggaaacggauuuuucgcaacaauggcuugggccgucccaaaaaacgacaacaacaaaacagcaacaaauucauuaacaauagaaguaccauacauuuguacagaaggagaagaccaaauuaccguuuggggguuccacucugauaacgaaacccaaauggcaaaacucuauggggacucaaagccccagaaguucaccucaucugccaacggagugaccacacauuacguuucacagauugguggcuucccaaaucaaacagaagacggaggacuaccacaaagugguagaauuguuguugauuacauggugcaaaaaucugggaaaacaggaacaauuaccuaucaaagagguauuuuauugccucaaaaaguguggugcgcaagugguaggagcaagguaauaaaaggauccuugccuuuaauuggagaagcagauugccuccacgaaaaauacgguggauuaaacaaaagcaagccuuacuacacaggggaacaugcaaaggccauaggaaauugcccaauaugggugaaaacacccuugaagcuggccaauggaaccaaauauagaccuccugcaaaacuauuaaaggaaagggguuucuucggagcuauugcugguuucuuagaaggaggaugggaaggaaugauugcagguuggcacggauacacaucccauggggcacauggaguagcaguggcagcagaccuuaagaguacucaagaagccauaaacaagauaacaaaaaaucucaacucuuugagugagcuggaaguaaagaaucuucaaagacuaagcggugccauggaugaacuccacaacgaaauacuagaacuagacgagaaaguggaugaucucagagcugauacaauaagcucacaaauagaacucgcagucuugcuuuccaaugaaggaauaauaaacagugaagaugagcaucucuuggcacuugaaagaaagcugaagaaaaugcugggccccucugcuguagagauagggaauggaugcuucgaaaccaaacacaagugcaaccagaccugucucgacagaauagcugcugguaccuuugaugcaggagaauuuucucuccccacuuuugauucacugaauauuacugcugcaucuuuaaaugacgauggauuggauaaucauacuauacugcuuuacuacucaacugcugccuccaguuuggcuguaacauugaugauagcuaucuuuguuguuuauauggucuccagagacaauguuucuugcuccaucugucuauaa

SEQ ID NO: 59088 - RNA, 1758 nt, Artificial Sequence; identical to SEQ ID NO: 59085
  derived and/or modified CDS sequence (wt) from hemagglutinin__InfluenzaB__AGX16720

SEQ ID NO: 59089 - RNA, 1758 nt, Artificial Sequence; identical to SEQ ID NO: 59077
  derived and/or modified CDS sequence (wt) from hemagglutinin__InfluenzaB__AGX16731

SEQ ID NO: 59090 - RNA, 1758 nt, Artificial Sequence
  derived and/or modified CDS sequence (wt) from hemagglutinin__InfluenzaB__AGX16742
augaaggcaauaauuguacuacucaugguaguaacauccaaugcagaucgaaucugcacugggauaacaucgucaaacucaccccauguggucaaaacugcuacucaaggggaggucaaugugacuggugugauaccacugacaacaacacccaccaaaucucauuuugcaaaucucaaaggaacaaaaaccagagggaaacuaugcccaaaaugccucaacugcacagaucuggacguggccuugggcagaccaaaaugcacggggaacauacccucggcaaaaguuucaauaauccaugaagucagaccuguuacaucugggugcuuuccuauaaugcacgacagaacaaaaauuagacagcugcccaaucuucucagaggauacgaacauaucagguuaucaacucauaacguuaucaaugcagaaaaggcaccaggaggacccuacaaaauuggaaccucagggucuugcccuaauguuaccaauggaaacggauuuuucgcaacaauggcuugggccgucccaaaaaacgacaacaacaaaacagcaacaaauucauuaacaauagaaguaccauacauuuguacagaaggagaagaccaaauuaccguuuggggguuccacucugauaacgaaacccaaauggcaaaacucuauggggacucaaagccccagaaguucaccucaucugccaacggagugaccacacauuacguuucacagauugguggcuucccaaaucaaacagaagacggaggacuaccacaaagugguagaauuguuguugauuacauggugcaaaaaucugggaaaacaggaacaauuaccuaucaaagagguauuuuauugccucaaaaaguguggugcgcaaguggcaggagcaagguaauaaaaggauccuugccuuuaauuggagaagcagauugccuccacgaaaaauacgguggauuaaacaaaagcaagccuuacuacacaggggaacaugcaaaggccauaggaaauugcccaauaugggugaaaacacccuugaagcuggccaauggaacuaaauauagaccuccugcaaaacuauuaaaggaaagggguuucuucggggcuauugcugguuucuuagaaggaggaugggaaggaaugauugcagguuggcacggauacacaucccauggggcacauggaguagcaguggcagcagaccuuaagaguacucaagaagccauaaacaagauaacaaaaaaucucaacucuuugagugagcuggaaguaaagaaucuucaaagacuaagcggugccauggaugaacuccacaacgaaauacuagaacuagacgagaaaguggaugaucucagagcugauacaauaagcucacaaauagaacucgcagucuugcuuuccaaugaaggaauaauaaacagugaagaugagcaucucuuggcgcuugaaagaaagcugaagaaaaugcugggccccucugcuguagagauagggaauggaugcuucgaaaccaaacacaagugcaaccagaccugucucgacagaauagcugcugguaccuuugaugcaggagaauuuucucuccccacuuuugauucacugaauauuacugcugcaucuuuaaaugacgauggauuggauaaucauacuauacugcuuuacuacucaacugcugccuccaguuuggcuguaacauugaugauagcuaucuuuguuguuuauauggucuccagagacaauguuucuugcuccaucugucuauaa

SEQ ID NO: 59091 - RNA, 1758 nt, Artificial Sequence; identical to SEQ ID NO: 59071
  derived and/or modified CDS sequence (wt) from hemagglutinin__InfluenzaB__AGX16753

SEQ ID NO: 59092 - RNA, 1758 nt, Artificial Sequence; identical to SEQ ID NO: 59077
  derived and/or modified CDS sequence (wt) from hemagglutinin__InfluenzaB__AGX16764

SEQ ID NO: 59093 - RNA, 1758 nt, Artificial Sequence
  derived and/or modified CDS sequence (wt) from hemagglutinin__InfluenzaB__AGX16775
augaaggcaauaauuguacuacucaugguaguaacauccaaugcagaucgaaucugcacugggauaacaucgucaaacucaccccauguggucaaaacugcuacucaaggggaggucaaugugacuggugugauaccacugacaacaacacccaccaaaucucauuuugcaaaucucaaaggaacaaaaacuagagggaaacuaugcccaaaaugccucaacugcacagauuuggacguggccuugggcagaccaaaaugcacggggaacauacccucggcaaaaguuucaauacuccaugaagucagaccuguuacaucugggugcuuuccuauaaugcacgacagaacaaaaauuagacagcugcccaaccuucucagaggauacgaacauaucagguuaucaacucauaacguuaucaaugcagaaaaggcaccaggaggacccuacaaaauuggaaccucagggucuugcccuaacguuaccaauggaaacggauuuuucgcaacaauggcuugggccgucccaaaaaacgacaacaacaaaacagcaacaaauucauuaacaauagaaguaccauacauuuguacagaaggagaagaccaaauuaccguuuggggguuccacucugauaacgaaacccaaauggcaaaacucuauggggacucaaagccccagaaguucaccucaucugccaacggagugaccacacauuacguuucacagauugguggcuucccaaaucaaacagaagacggaggacuaccacaaagugguagaauuguuguugauuacauggugcaaaaaucugggaaaacaggaacaauuaccuaucaaagagguauuuuauugccucaaaaaguguggugcgcaaguggcaggagcaagguaauaaaaggauccuugccuuuaauuggagaagcagauugccuccacgaaaaauacgguggacuaaacaaaagcaagccuuacuacacaggggaacaugcaaaggccauaggaaauugcccaauaugggugaaaacacccuugaagcuggccaauggaaccaaauauagaccuccugcaaaacuauuaaaggaaagggguuucuucggagcuauugcugguuucuuagaaggaggaugggaaggaaugauugcagguuggcacggauacacaucccauggggcacauggaguagcaguggcagcagaccuuaagagcacucaagaagccauaaacaagauaacaaaaaaucucaacucuuugagugagcuggaaguaaagaaucuucaaagacuaagcggugccauggaugaacuccacaacgaaauacuagaacuagacgagaaaguggaugaucucagagcugauacaauaagcucacaaauagaacucgcaguccugcuuuccaaugaaggaauaauaaacagugaagaugagcaucucuuggcgcuugaaagaaagcugaagaaaaugcugggccccucugcuguagagauagggaauggaugcuucgaaaccaaacacaagugcaaccagaccugucucgacagaauagcugcugguaccuuugaugcaggagaauuuucucuccccacuuuugauucacugaauauuacugcugcaucuuuaaaugacgauggauuggauaaucauacuauacugcuuuacuacucaacugcugccuccaguuuggcuguaacauugaugauagcuaucuuuguuguuuauauggucuccagagacaauguuucuugcuccaucugucuauaa

SEQ ID NO: 59094 - RNA, 1758 nt, Artificial Sequence
  derived and/or modified CDS sequence (wt) from hemagglutinin__InfluenzaB__AGX16797
augaaggcaauaauuguacuacucaugguaguaacauccaaugcagaucgaaucugcacugggauaacaucgucaaacucaccccauguggucaaaacugcuacucaaggggaggucaaugugacuggugugauaccacugacaacaacacccaccaaaucucauuuugcaaaucucaaaggaacaaaaaccagagggaaacuaugcccaaaaugccucaacugcacagaucuggacguggccuugggcagaccaaaaugcacggggaacaugcccucggcaaaaguuucaauacuccaugaagucagaccuguuacaucugggugcuuuccuauaaugcacgacagaacaaaaauuagacagcugcccaaucuucucagaggauacgaacauaucagguuaucaacucauaacguuaucaaugcagaaaaggcaccaggaggacccuacaaaauuggaaccucagggucuugcccuaacguuaccaauggaaacggauuuuucgcaacaauggcuugggccgucccaaaaaacgacaacaacaaaacagcaacaaauucauuaacaauagaaguaccauacauuuguacagaaggagaagaccaaauuaccguuuggggguuccacucugauaacgaaacccaaauggcaaaacucuauggggacucaaagccccagaaguucaccucaucugccaacggagugaccacacauuacguuucacagauugguggcuucccaaaucaaacagaagacggaggacuaccacaaagugguagaauuguuguugauuacauggugcaaaaaucugggaaaacaggaacaauuaccuaucaaagagguauuuuauugccucaaaaaguguggugcgcaaguggcaggagcaagguaauaaaaggauccuugccuuuaauuggagaagcagauugccuccacgaaaaauacgguggauuaaacaaaagcaagccuuacuacacaggggaacaugcaaaggccauaggaaauugcccaauaugggugaaaacacccuugaagcuggccaauggaacuaaauauagaccuccugcaaaacuauuaaaggaaagggguuucuucggggcuauugcugguuucuuagaaggaggaugggaaggaaugauugcagguuggcacggauacacaucccauggggcacauggaguagcaguggcagcagaccuuaagaguacucaagaagccauaaacaagauaacaaaaaaucucaacucuuugagugagcuggaaguaaagaaucuucaaagacuaagcggugccauggaugaacuccacaacgaaauacuagaacuagacgagaaaguggaugaucucagagcugauacaauaagcucacaaauagaacucgcagucuugcuuuccaaugaaggaauaauaaacagugaagaugagcaucucuuggcgcuugaaagaaagcugaagaaaaugcugggccccucugcuguagagauagggaauggaugcuucgaaaccaaacacaagugcaaccagaccugucucgacagaauagcugcugguaccuuugaugcaggagaauuuucucuccccacuuuugauucacugaauauuacugcugcaucuuuaaaugacgauggauuggauaaucauacuauacugcuuuacuacucaacugcugccuccaguuuggcuguaacauugaugauagcuaucuuuguuguuuauauggucuccagagacaauguuucuugcuccaucugucuauaa

SEQ ID NO: 59095 - RNA, 1758 nt, Artificial Sequence; identical to SEQ ID NO: 59079
  derived and/or modified CDS sequence (wt) from hemagglutinin__InfluenzaB__AGX16808

SEQ ID NO: 59096 - RNA, 1758 nt, Artificial Sequence
  derived and/or modified CDS sequence (wt) from hemagglutinin__InfluenzaB__AGX16819
augaaggcaauaauuguacuacucaugguaguaacauccaaugcagaucgaaucugcacugggauaacaucgucaaacucaccccauguggucaaaacugcuacucaaggggaggucaaugugacuggugugauaccacugacaacaacacccaccaaaucucauuuugcaaaucucaaaggaacaaaaaccagagggaaacuaugcccaaaaugccucaacugcacagaucuggacguggccuugggcagaccaaagugcacggggaacauacccucggcaaaaguuucaauacuccaugaagucagaccuguuacaucugggugcuuuccuauaaugcacgacagaacaaaaauuagacagcugcccaaucuucucagaggauacgaacauaucagguuaucaacucauaacguuaucaaugcagaaaaggcaccaggaggacccuacaaaauuggaaccucagggucuugcccuaacguuaccaauggaaacggauuuuuugcaacaauggcuugggccgucccaaaaaacgacaacaacaaaacagcaacaaauucauuaacaauagaaguaccauacauuuguacagaaggagaagaccaaauuaccguuuggggguuccacucugauagcgaaacccaaauggcaaaacucuauggggacucaaagccccagaaguucaccucaucugccaacggagugaccacacauuacguuucacagauugguggcuucccaaaucaaacagaagacggaggacuaccacaaagugguagaauuguuguugauuacauggugcaaaaaucugggaaaacaggaacaauuaccuaucaaagagguauuuuauugccucaaaaaguguggugcgcaaguggcaggagcaagguaauaaaaggauccuugccuuuaauuggagaagcagauugccuccacgaaaaauacgguggauuaaacaaaagcaagccuuacuacacaggggaacaugcaaaggccauaggaaauugcccaauaugggugaaaacacccuugaagcuggccaauggaaccaaauauagaccuccugcaaaacuauuaaaggaaagggguuucuucggagcuauugcugguuucuuagaaggaggaugggaaggaaugauugcagguuggcacggauacacaucccauggggcacauggaguagcaguggcagcagaccuuaagaguacucaagaagccauaaacaagauaacaaaaaaucucaacucuuugagugagcuggaaguaaagaaucuucaaagacuaagcggugccauggaugaacuccacaacgaaauacuagaacuagacgagaaaguggaugaucucagagcugauacaauaagcucacaaauagaacucgcagucuugcuuuccaaugaaggaauaauaaacagugaagaugagcaucucuuggcgcuugaaagaaagcugaagaaaaugcuaggccccucugcuguagagauagggaauggaugcuucgaaaccaaacacaagugcaaccagaccugucucgacagaauagcugcugguaccuuugaugcaggagaauuuucucuccccacuuuugauucacugaauauuacugcugcaucuuuaaaugacgauggauuggauaaucauacuauacugcuuuacuacucaacugcugccuccaguuuggcuguaacauugaugauagcuaucuuuauuguuuauauggucuccagagacaauguuucuugcuccaucugucuauaa

SEQ ID NO: 59097 - RNA, 1758 nt, Artificial Sequence; identical to SEQ ID NO: 59079
  derived and/or modified CDS sequence (wt) from hemagglutinin__InfluenzaB__AGX16830

SEQ ID NO: 59098 - RNA, 1758 nt, Artificial Sequence
  derived and/or modified CDS sequence (wt) from hemagglutinin__InfluenzaB__AGX16841
augaaagcaauaauuguacuacucaugguaguaacauccaaugcagaucgaaucugcacugggauaacaucgucaaacucaccccauguggucaaaacugcuacucaaggggaggucaaugugacuggugugauaccacugacaacaacacccaccaaaucucauuuugcaaaucucaaaggaacaaaaaccagagggaaacuaugcccaaaaugccucaacugcacagaucuggacguggccuugggcagaccaaaaugcacggggaacauacccucggcaaaaguuucaauacuccaugaagucagaccuguuacaucugggugcuuuccuauaaugcacgacagaacaaaaauuagacagcugcccaaucuucucagaggauacgaacauaucagguuaucaacucauaacguuaucaaugcagaaaaggcaccaggaggacccuacaaaauuggaaccucagggucuugcccuaacguuaccaauggaaacggauuuuuugcaacaauggcuugggccgucccaaaaaacgacaacaacaaaacagcaacaaauucauuaacaauagaaguaccauacauuuguacagaaggagaagaccaaauuaccguuuggggguuccacucugauaacgaaacccaaauggcaaaacucuauggggacucaaagccccagaaguucaccucaucugccaacggaaugaccacacauuacguuucacagauugguggcuucccaaaucaaacagaagacggaggacuaccacaaagugguagaauuguuguugauuacauggugcaaaaaucugggaaaacaggaacaauuaccuaucaaagagguauuuuauugccucaaaaaguguggugcgcaaguggcaggagcaagguaauaaaaggauccuugccuuuaauuggagaagcagauugccuccacgaaaaauacgguggauuaaacaaaagcaagccuuacuacacaggggaacaugcaaaggccauaggaaauugcccaauaugggugaaaacacccuugaagcuggccaauggaaccaaauauagaccuccugcaaaacuauuaaaggaaagggguuucuucggagcuauugcugguuucuuagaaggaggaugggaaggaaugauugcagguuggcacggauacacaucccauggggcacauggaguagcaguggcagcagaccuuaagaguacucaagaagccauaaacaagauaacaaaaaaucucaacucuuugagugagcuggaaguaaagaaucuucaaagacuaagcggugccauggaugaacuccacaacgaaauacuagaacuagacgagaaaguggaugaucucagagcugauacaauaagcucacaaauagaacucgcagucuugcuuuccaaugaaggaauaauaaacagugaagaugagcaccucuuggcgcuugaaagaaagcugaagaaaaugcugggccccucugcuguagagauagggaauggaugcuucgaaaccaaacacaagugcaaccagaccugucucgacagaauagcugcugguaccuuugaugcaggagaauuuucucuccccacuuuugauucacugaauauuacugcugcaucuuuaaauggcgauggauuggauaaucauacuauacugcuuuacuacucaacugcugccuccaguuuggcuguaacauugaugauagcuaucuuuguuguuuauauggucuccagagacaauguuucuugcuccaucugucuauaa

SEQ ID NO: 59099 - RNA, 1758 nt, Artificial Sequence
  derived and/or modified CDS sequence (wt) from hemagglutinin__InfluenzaB__AGX16852
augaaggcaauaauuguacuacucaugguaguaacauccaaugcagaucgaaucugcacugggauaacaucgucaaacucaccccauguggucaaaacugcuacucaaggggaggucaaugugacuggugugauaccacugacaacaacacccaccaaaucucauuuugcaaaucucaaaggaacaaaaaccagagggaaacuaugcccaaaaugccucaacugcacagaucuggacguggccuugggcagaccaaaaugcacggggaacauacccucggcaaaaguuucaauacuccaugaagucagaccuguuacaucugggugcuuuccuauaaugcacgacagaacaaaaauuagacagcugcccaaucuucucagaggauacgaacauaucagguuaucaacucauaacguuaucaaugcagaaaaggcaccaggaggacccuacaaaauuggaaccucagggucuugcccuaacguuaccaauggaaacggauuuuucgcaacaauggcuugggccgucccaaaaaacgacaacaacaaaacagcaacaaauucauuaacaauagaaguaccauacauuuguacagaaggagaagaccaaauuaccguuuggggguuccacucugauaacgaaacccaaauggcaaaacucuauggggacucaaagccccagaaguucaccucaucugccaacggagugaccacacauuacguuucacagauugguggcuucccaaaucaaacagaagacggaggacuaccacaaagugguagaauuguuguugauuacauggugcaaaaaucugggaaaacaggaacaauuaccuaucaaagagguauuuuauugccucaaaaaguguggugcgcaaguggcaggagcaagguaauaaaaggauccuugccuuuaauuggagaagcagauugccuccacgaaaaauacgguggauuaaacaaaagcaagccuuacuacacaggggaacaugcaaaggccauaggaaauugcccaauaugggugaaaacacccuugaagcuggccaauggaaccaaauauagaccuccugcaaaacuauuaaaggaaagggguuucuucggagcuauugcugguuucuuagaaggaggaugggaaggaaugauugcagguuggcacggauacacaucccauggggcacauggaguagcaguggcagcagaccuuaagaguacucaagaagccauaaacaagauaacaaaaaaucucaacucuuugagugagcuggaaguaaagaaucuucaaagaauaagcggugccauggaugaacuccacaacgaaauacuagaacuagacgagaaaguggaugaucucagagcugauacaauaagcucacaaauagaacucgcagucuugcuuuccaaugaaggaauaauaaacagugaagaugagcaucucuuggcgcuugaaagaaagcugaagaaaaugcugggccccucugcuguagagauagggaauggaugcuucgaaaccaaacacaagugcaaccagaccugucucgacagaauagcugcugguaccuuugaugcaggagaauuuucucuccccacuuuugauucacugaauauuacugcugcaucuuuaaaugacgauggauuggauaaucauacuauacugcuuuacuacucaacugcugccuccaguuuggcuguaacauugaugauagcuaucuuuguuguuuauauggucuccagagacaauguuucuugcuccaucugucuauaa

SEQ ID NO: 59100 - RNA, 1758 nt, Artificial Sequence; identical to SEQ ID NO: 59079
  derived and/or modified CDS sequence (wt) from hemagglutinin__InfluenzaB__AGX16863

SEQ ID NO: 59101 - RNA, 1758 nt, Artificial Sequence; identical to SEQ ID NO: 59085
  derived and/or modified CDS sequence (wt) from hemagglutinin__InfluenzaB__AGX16874

SEQ ID NO: 59102 - RNA, 1758 nt, Artificial Sequence
  derived and/or modified CDS sequence (wt) from hemagglutinin__InfluenzaB__AGX16885
augaaggcaauaauuguacuacucaugguaguaacauccaaugcagaucgaaucugcacugggauaacaucgucaaacucaccccauguggucaaaacugcuacucaaggggaggucaaugugacuggugugauaccacugacaacaacacccaccaaaucucauuuugcaaaucucaaaggaacaaaaaccagagggaaacuaugcccaaaaugccucaacugcacagaucuggacguggccuugggcagaccaaaaugcacggggaacauacccucggcaaaaguuucaauacuccaugaagucagaccuguuacaucugggugcuuuccuauaaugcacgacagaacaaaaauuagacagcugcccaaucuucucagaggauacgaacauaucagguuaucaacucauaacguuaucaaugcagaaaaggcaccaggaggacccuacaaaauuggaaccucagggucuugcccuaacguuaccaauggaaacggauuuuucgcaacaauggcuugggccgucccaaaaaacgacaacaacaaaacagcaacaaauucauuaacaauagaaguaccauacauuuguacagaaggagaagaccaaauuaccguuuggggguuccacucugauaacgaaacccaaauggcaaaacucuauggggacucaaagccccagaaguucaccucaucugccaacggagugaccacacauuacguuucacagauugguggcuucccaaaucaaacagaagacggaggacuaccacaaagugguagaauuguuguugauuacauggugcaaaaaucugggaaaacaggaacaauuaccuaucaaagagguauuuuauugccucaaaaaguguggugcgcaaguggcaggagcaagguaauaaaaggauccuugccuuuaauuggagaagcagauugccuccacgaaaaauacgguggauuaaacaaaagcaagccuuacuacacaggggaacaugcaaaggccauaggaaauugcccaauaugggugaaaacacccuugaagcuggccaauggaacuaaauauagaccuccugcaaaacuauuaaaggaaagggguuucuucggggcuauugcugguuucuuagaaggaggaugggaaggaaugauugcagguuggcacggauacacaucccauggggcacauggaguagcaguggcagcagaccuuaagaguacucaagaagccauaaacaagauaacaaaaaaucucaacucuuugagugagcuggaaguaaagaaucuucaaagacuaagcggugccauggaugaacuccacaacgaaauacuagaacuagacgagaaaguggaugaucucagagcugauacaauaagcucacaaauagaacucgcagucuugcuuuccaaugaaggaauaauaaacagugaagaugagcaucucuuggcgcuugaaagaaagcugaagaaaaugcugggccccucugcuauagagauagggaauggaugcuucgaaaccaaacacaagugcaaccagaccugucucgacagaauagcugcugguaccuuugaugcaggagaauuuucucuccccacuuuugauucacugaauauuacugcugcaucuuuaaaugacgauggauuggauaaucauacuauacugcuuuacuacucaacugcugccuccaguuuggcuguaacauugaugauagcuaucuuuguuguuuauauggucuccagagacaauguuucuugcuccaucugucuauaa

SEQ ID NO: 59103 - RNA, 1758 nt, Artificial Sequence; identical to SEQ ID NO: 59102
  derived and/or modified CDS sequence (wt) from hemagglutinin__InfluenzaB__AGX16896

SEQ ID NO: 59104 - RNA, 1758 nt, Artificial Sequence
  derived and/or modified CDS sequence (wt) from hemagglutinin__InfluenzaB__AGX16907
augaaggcaauaauuguacuacucaugguaguaacauccaaugcagauagaaucugcacugggauaacaucgucaaacucaccccauguggucaaaacugcuacucaaggggaggucaaugugacuggugugauaccacugacaacaacacccaccaaaucucauuuugcaaaucucaaaggaacaaaaaccagagggaaacuaugcccaaaaugccucaacugcacagaucuggacguggccuugggcagaccaaaaugcacggggaacauacccucggcaaaaguuucaauacuccaugaagucagaccuguuacaucugggugcuuuccuauaaugcacgacagaacaaaaauuagacagcugcccaaucuucucagaggauacgaacauaucagguuaucaacucauaacguuaucaaugcagaaaaggcaccaggaggacccuacaaaauuggaaccucagggucuugcccuaacguuaccaauggaaacggauuuuucgcaacaauggcuugggccgucccaaaaaacgacaacaacaaaacagcaacaaauucauuaacaauagaaguaccauacauuuguacagaaggagaagaccaaauuaccguuuggggguuccacucugauaacgaaacccaaauggcaaaacucuauggggacucaaagccccagaaguucaccucaucugccaacggagugaccacacauuacgugucacagauugguggcuucccaaaucaaacagaagacggaggacuaccacaaagugguagaauuguuguugauuacauggugcaaaaaucugggaaaacaggaacaauuaccuaucaaagagguauuuuauugccucaaaaaguguggugcgcaaguggcaggagcaagguaauaaaaggauccuugccuuuaauuggagaagcagauugccuccacgaaaaauacgguggauuaaacaaaagcaagccuuacuacacaggggaacaugcaaaggccauaggaaauugcccaauaugggugaaaacacccuugaagcuggccaauggaaccaaauauagaccuccugcaaaacuauuaaaggaaaggggcuucuucggagcuauugcugguuucuuagaaggaggaugggaaggaaugauugcagguuggcacggauacacaucccauggggcacauggaguagcaguggcagcagaccuuaagaguacucaagaagccauaaacaagauaacaaaaaaucucaacucuuugagugagcuggaaguaaagaaucuucaaagacuaagcggugccauggaugaacuccacaacgaaauacuagaacuagacgagaaaguggaugaucucagagcugauacaauaagcucacaaauagaacucgcagucuugcuuuccaaugaaggaauaauaaacagugaagaugagcaucucuuggcgcuugaaagaaagcugaagaaaaugcugggccccucugcuguagagauagggaauggaugcuucgaaaccaaacacaagugcaaccagaccugucucgacagaauagcugcugguaccuuugaugcaggagaauuuucucuccccacuuuugauucacugaauauuacugcugcaucuuuaaaugacgauggauuggauaaucauacuauacugcuuuauuacucaacugcugccuccaguuuggcuguaacauugaugauagcuaucuuuguuguuuauauggucuccagagacaauguuucuugcuccaucugucuauaa

SEQ ID NO: 59105 - RNA, 1758 nt, Artificial Sequence
  derived and/or modified CDS sequence (wt) from hemagglutinin__InfluenzaB__AGX16918
augaaggcaauaauuguacuacucaugguaguaacauccaaugcagaucgaaucugcacugggauaacaucgucaaacucaccccauguggucaaaacugcuacucaaggggaggucaaugugacuggugugauaccacugacaacaacacccaccaaaucucauuuugcaaaucucaaaggaacaaaaaccagagggaaacuaugcccaaaaugccucaacugcacagaucuggacguggccuugggcagaccaaaaugcacggggaacauacccucggcaaaaguuucaauacuccaugaagucagaccuguuacaucugggugcuuuccuauaaugcacgacagaacaaaaauuagacagcugcccaaucuucucagaggauacgaacauaucagguuaucaacucauaacguuaucaaugcagaaaaggcaccaggaggacccuacaaaauuggaaccucagggucuugcccuaacguuaccaauggaaacggauuuuucgcaacaauggcuugggccgucccaaaaaacgacaacaacaaaacagcaacaaauucauuaacaauagaaguaccauacauuuguacagaaggagaagaccaaauuaccguuuggggguuccacucugauaacgaaauccaaauggcaaaacucuauggggacucaaagccccagaaguucaccucaucugccaacggagugaccacacauuacgugucacagauugguggcuucccaaaucaaacagaagacggaggacuaccacaaagugguagaauuguuguugauuacauggugcaaaaaucugggaaaacaggaacaauuaccuaucaaagagguauuuuauugccucaaaaaguguggugcgcaaguggcaggagcaagguaauaaaaggauccuugccuuuaauuggagaagcagauugccuccacgaaaaauacgguggauuaaacaaaagcaagccuuacuacacaggggaacaugcaaaggccauaggaaauugcccaauaugggugaaaacacccuugaagcuggccaauggaaccaaauauagaccuccugcaaaacuauuaaaggaaaggggcuucuucggagcuauugcugguuucuuagaaggaggaugggaaggaaugauugcagguuggcacggauacacaucccauggggcacauggaguagcaguggcagcagaccuuaagaguacucaagaagccauaaacaagauaacaaaaaaucucaacucuuugagugagcuggaaguaaagaaucuucaaagacuaagcggugccauggaugaacuccacaacgaaauacuagaacuagacgagaaaguggaugaucucagagcugauacaauaagcucacaaauagaacucgcagucuugcuuuccaaugaaggaauaauaaacagugaagaugagcaucucuuggcgcuugaaagaaagcugaagaaaaugcugggccccucugcuguagagauagggaauggaugcuucgaaaccaaacacaagugcaaccagaccugucucgacagaauagcugcugguaccuuugaugcaggagaauuuucucuccccacuuuugauucacugaauauuacugcugcaucuuuaaaugacgauggauuggauaaucauacuauacugcuuuauuacucaacugcugccuccaguuuggcuguaacauugaugauagcuaucuuuguuguuuauauggucuccagagacaauguuucuugcuccaucugucuauaa

SEQ ID NO: 59106 - RNA, 1758 nt, Artificial Sequence; identical to SEQ ID NO: 59071
  derived and/or modified CDS sequence (wt) from hemagglutinin__InfluenzaB__AGX16940

SEQ ID NO: 59107 - RNA, 1758 nt, Artificial Sequence; identical to SEQ ID NO: 59102
  derived and/or modified CDS sequence (wt) from hemagglutinin__InfluenzaB__AGX16951

SEQ ID NO: 59108 - RNA, 1758 nt, Artificial Sequence
  derived and/or modified CDS sequence (wt) from hemagglutinin__InfluenzaB__AGX16962
augaaggcaauaauuguacuacucaugguaguaacauccaaugcagaucgaaucugcacugggauaacaucgucaaacucaccccauguggucaaaacugcuacucaaggggaggucaaugugacuggugugauaccacuaacaacaacacccaccgaaucucauuuugcaaaucucaaaggaacaaaaaccagagggaaacuaugcccaaaaugccucaacugcacagaucuggacguggccuugggcagaccaaaaugcacggggaacauacccucggcaaaaguuucaauacuccaugaagucagaccuguuacaucugggugcuuuccuauaaugcacgacagaacaaaaauuagacagcugcccaaucuucucagaggauacgaacauaucagguuaucaacucauaacguuaucaaugcagaaaaggcaccaggaggacccuacaaaauuggaaccucagggucuugcccuaacguuaccaauggaaacggauuuuucgcaacaauggcuugggccgucccaaaaaacgacaacaacaaaacagcaacaaauucauuaacaauagaaguaccauacauuuguacagaaggagaagaccaaauuaccguuuggggguuccacucugauaacgaaacccaaauggcaaaacucuauggggacucaaagccccagaaguucaccucaucugccaacggagugaccacacauuacguuucacagauugguggcuucccaaaucaaaaagaagacggaggacuaccacaaagugguagaauuguuguugauuacauggugcaaaaaucugggaacacaggaacaauuaccuaucaaagagguauuuuauugccucaaaaaguguggugcgcaaguggcaggagcaagguaauaaaaggauccuugccuuuaauuggagaagcagauugccuccacgaaaaauacgguggauuaaacaaaagcaagccuuacuacacaggggaacaugcaaaggccauaggaaauugcccaauaugggugaaaacacccuugaagcuggccaauggaaccaaauauagaccuccugcaaaacuauuaaaggaaagggguuucuucggagcuauugcugguuucuuagaaggaggaugggaaggaaugauugcagguuggcacggauacacaucccauggggcacauggaguagcaguggcagcagaccuuaagaguacucaagaagccauaaacaagauaacaaaaaaucucaacucuuugagugagcuggaaguaaagaaucuucaaagacuaagcggugccauggaugaacuccacaacgaaauacuagaacuagacgagaaaguggaugaucucagagcugauacaauaagcucacaaauagaacucgcagucuugcuuuccaaugaaggaauaauaaacagugaagaugagcaucucuuggcgcuugaaagaaagcugaagaaaaugcugggccccucugcuguagagauagggaauggaugcuucgaaaccaaacacaagugcaaccagaccugucucgacagaauagcugcugguaccuuugaugcaggagaauuuucucuccccacuuuugauucacugaauauuacugcugcaucuuuaaaugacgauggauuggauaaucauacuauacugcuuuacuacucaacugcugccuccaguuuggcuguaacauugaugauagcuaucuuuguuguuuauauggucuccagagacaauguuucuugcuccaucugucuauaa

SEQ ID NO: 59109 - RNA, 1758 nt, Artificial Sequence
  derived and/or modified CDS sequence (wt) from hemagglutinin__InfluenzaB__AGX16973
augaaggcaauaauuguacuacucaugguaguaacauccaaugcagaucgaaucugcacugggauaacaucgucaaacucaccccauguggucaaaacugcuacucaaggggaggucaaugugacuggugugauaccacugacaacaacacccaccaaaucucauuuugcaaaucucaaaggaacaaaaaccagagggaaacuaugcccaaaaugccucaacugcacagaucuggacguggccuugggcagaccaaaaugcacggggaacauacccucggcaaaaguuucaauacuccaugaagucagaccuguuacaucugggugcuuuccuauaaugcacgacagaacaaaaauuagacagcugcccaaucuucucagaggauacgaacauaucagguuaucaacucauaauguuaucaaugcagaaaaggcaccaggaggacccuacaaaauuggaaccucagggucuugcccuaacguuaccaauggaaacggauuuuucgcaacaauggcuugggccgucccaaaaaacgacaacaacaaaacagcaacaaauucauuaacaauagaaguaccauacauuuguacagaaggagaagaccaaauuaccguuuggggguuccacucugauaacgaaacccaaauggcaaaacucuauggggacucaaagccccagaaguucaccucaucugccaacggagugaccacacauuacgugucacagauugguggcuucccaaaucaaacagaagacggaggacuaccacaaagugguagaauuguuguugauuacauggugcaaaaaucugggaaaacaggaacaauuaccuaucaaagagguauuuuauugccucaaaaaguguggugcgcaaguggcaggagcaagguaauaaaaggauccuugccuuuaauuggagaagcagauugccuccacgaaaaauacgguggauuaaacaaaagcaagccuuacuacacaggggaacaugcaaaggccauaggaaauugcccaauaugggugaaaacacccuugaagcuggccaauggaaccaaauauagaccuccugcaaaacuauuaaaggaaaggggcuucuucggagcuauugcugguuucuuagaaggaggaugggaaggaaugauugcagguuggcacggauacacaucccauggggcacauggaguagcaguggcagcagaccuuaagaguacucaagaagccauaaacaagauaacaaaaaaucucaacucuuugagugagcuggaaguaaagaaucuucaaagacuaagcggugccauggaugaacuccacaacgaaauacuagaacuagacgagaaaguggaugaucucagagcugauacaauaagcucacaaauagaacucgcagucuugcuuuccaaugaaggaauaauaaacagugaagaugagcaucucuuggcgcuugaaagaaagcugaagaaaaugcugggccccucugcuguagagauagggaauggaugcuucgaaaccaaacacaagugcaaccagaccugucucgacagaauagcugcugguaccuuugaugcaggagaauuuucucuccccacuuuugauucacugaauauuacugcugcaucuuuaaaugacgauggguuggauaaucauacuauacugcuuuauuacucaacugcugccuccaguuuggcuguaacauugaugauagcuaucuuuguuguuuauauggucuccagagacaauguuucuugcuccaucugucuauaa

SEQ ID NO: 59110 - RNA, 1758 nt, Artificial Sequence
  derived and/or modified CDS sequence (wt) from hemagglutinin__InfluenzaB__AGX16995
augaaggcaauaauuguacuacucaugguaguaacauccaaugcagaucgaaucugcacugggauaacaucgucaaacucaccccauguggucaaaacugcuacucaaggggaggucaaugugacuggugugauaccacugacaacaacacccaccaaaucucauuuugcaaaucucaaaggaacaaaaaccagagggaaacuaugcccaaaaugccucaacugcacagaucuggacguggccuugggcagaccaaaaugcacggggaacauacccucggcaaaaguuucaauacuccaugaagucagaccuguuacaucugggugcuuuccuauaaugcacgacagaacaaaaauuagacagcugcccaaucuucucagaggauacgaacauaucagguuaucaacucauaacguuaucaaugcagaaaaggcaccaggaggaccuuacaaaauuggaaccucagggucuugcccuaacguuaccaauggaaacggauuuuuugcaacaauggcuugggccgucccaaaaaacgacaacaacaaaacagcaacaaauucauuaacaguagaaguaccauacauuuguacagaaggagaagaccaaauuaccguuuggggguuccacucugauaacgaaauccaaauggcaaaacucuauggggacucaaagccccagaaguucaccucaucugccaacggaguuaccacacauuacguuucacagauugguggcuucccaaaucaaacagaagacggaggacuaccacaaagugguagaauuguuguugauuacauggugcaaaaaucugggaaaacaggaacaauuaccuaucaaagagguauuuuauugccucaaaaaguguggugcgcaaguggcaggagcaagguaauaaaaggauccuugccuuuaauuggagaagcagauugccuccacgaaaaauacgguggauuaaacaaaagcaagccuuacuacacaggggaacaugcaaaggccauaggaaauugcccaauaugggugaaaacacccuugaagcuggccaauggaaccaaauauagaccuccugcaaaacuauuaaaggaaaggggcuucuucggagcuauugcugguuucuuagaaggaggaugggaaggaaugauugcagguuggcacggauacacaucccauggggcacauggaguagcaguggcagcagaccuuaagaguacucaagaagccauaaacaagauaacaaaaaaucucaacucuuugagugagcuggaaguaaagaaucuucaaagacuaagcggugccauggaugaacuccacaacgaaauacuagaacuagacgagaaaguggaugaucucagagcugauacaauaagcucacaaauagaacucgcagucuugcuuuccaaugaaggaauaauaaacagugaagaugagcaucucuuggcgcuugaaagaaagcugaagaaaaugcugggccccucugcuguagagauagggaauggaugcuucgaaaccaaacacaagugcaaccagaccugucucgacagaauagcugcugguaccuuugaugcaggagaauuuucucuccccacuuuugauucacugaauauuacugcugcaucuuuaaaugacgauggauuggauaaucauacuauacugcuuuauuacucaacugcugccuccaguuuggcuguaacauugaugauagcuaucuuuguuguuuauauggucuccagagacaauguuucuugcuccaucugucuauaa

SEQ ID NO: 59111 - RNA, 1758 nt, Artificial Sequence
  derived and/or modified CDS sequence (wt) from hemagglutinin__InfluenzaB__AGX17006
augaaggcaauaauuguacuacucaugguaguaacauccaaugcagaucgaaucugcacugggauaacaucgucaaacucaccccauguggucaaaacugcuacucaaggggaggucaaugugacuggugugauaccacugacaacaacacccaccaaaucucauuuugcaaaucucaaaggaacaaaaaccagagggaaacuaugcccaaaaugccucaacugcacagaucuggacguggccuugggcagaccaaaaugcacggggaacauacccucggcaaaaguuucaauacuccaugaagucagaccuguuacaucugggugcuuuccuauaaugcacgacagaacaaaaauuagacagcugcccaaucuucucagaggauacgaacauaucagguuaucaacucauaacguuaucaaugcagaaaaggcaccaggaggacccuacaaaauuggaaccucagggucuugcccuaacguuaccaauggaaacggauuuuucgcaacaauggcuugggccgucccaaaaaacgacaacaacaaaacagcaacaaauucauuaacaauagaaguaccauacauuuguacagaaggagaagaccaaauuaccguuuggggguuccacucugauaacgaaaaccaaauggcaaaacucuauggggacucaaagccccagaaguucaccucaucugccaacggagugaccacacauuacgugucacagauugguggcuucccaaaucaaacagaagacggaggacuaccacaaagugguagaauuguuguugauuacauggugcaaaaaucugggaaaacaggaacaauuaccuaucaaagagguauuuuauugccucaaaaaguguggugcgcaaguggcaggagcaagguaauaaaaggauccuugccuuuaauuggagaagcagauugccuccacgaaaaauacgguggauuaaacaaaagcaagccuuacuacacaggggaacaugcaaaggccauaggaaauugcccaauaugggugaaaacacccuugaagcuggccaauggaaccaaauauagaccuccugcaaaacuauuaaaggaaaggggcuucuucggagcuauugcugguuucuuagaaggaggaugggaaggaaugauugcagguuggcacggauacacaucccauggggcacauggaguagcaguggcagcagaccuuaagaguacucaagaagccauaaacaagauaacaaaaaaucucaacucuuugagugagcuggaaguaaagaaucuucaaagacuaagcggugccauggaugaacuccacaacgaaauacuagaacuagacgagaaaguggaugaucucagagcugauacaauaagcucacaaauagaacucgcagucuugcuuucuaaugaaggaauaauaaacagugaagaugagcaucucuuggcgcuugaaagaaagcugaagaaaaugcugggccccucugcuguagagauagggaauggaugcuucgaaaccaaacacaagugcaaccagaccugucucgacagaauagcugcugguaccuuugaugcaggagaauuuucucuccccacuuuugauucacugaauauuacugcugcaucuuuaaaugacgauggauuggauaaucauacuauacugcuuuauuacucaacugcugccuccaguuuggcuguaacauugaugauagcuaucuuuguuguuuauauggucuccagagacaauguuucuugcuccaucugucuauaa

SEQ ID NO: 59112 - RNA, 1758 nt, Artificial Sequence; identical to SEQ ID NO: 59077
  derived and/or modified CDS sequence (wt) from hemagglutinin__InfluenzaB__AGX17017

SEQ ID NO: 59113 - RNA, 1758 nt, Artificial Sequence
  derived and/or modified CDS sequence (wt) from hemagglutinin__InfluenzaB__AGX17028
augaaggcaauaauuguacuacucaugguaguaacauccaaugcagaucgaaucugcacugggauaacaucgucaaacucaccccauguggucaaaacugcuacucaaggggaggucaaugugacuggugugauaccacugacaacaacacccaccaaaucucauuuugcaaaucucaaaggaacaaaaaccagagggaaacuaugcccaaaaugccucaacugcacagaucuggacguggccuugggcagaccaaaaugcacggggaacauacccucggcaaaaguuucaauacuccaugaagucagaccuguuacaucugggugcuuuccuauaaugcacgacagaacaaaaauuagacagcugcccaaucuucucagaggauacgaacauaucagguuaucaacucauaacguuaucaaugcagaaaaggcaccaggaggacccuacaaaauuggaaccucagggucuugcccuaacguuaccaauggaaacggauuuuucgcaacaauggcuugggccgucccaaaaaacgacaacaacaaaacagcaacaaauucauuaacaauagaaguaccauacauuuguacagaaggagaagaccaaauuaccguuuggggguuccacucugauaacgaaacccaaauggcaaaacucuauggggacucaaagccccagaaguucaccucaucugccaacggagugaccacacauuacguuucacagauugguggcuucccaaaucaaacagaagacggaggacuaccacaaagugguagaauuguuguugauuacauggugcaaaaaucugggaaaacaggaacaauuaccuaucaaagagguauuuuauugccucaaaaaguguggugcgcaaguggcaggagcaagguaauaaaaggauccuugccuuuaauuggagaagcagauugccuccacgaaaaauacgguggauuaaacaaaagcaagccuuacuacacaggggaacaugcaaaggccauaggaaauugcccaauaugggugaaaacacccuugaagcuggccaauggaaccaaauauagaccuccugcaaaacuauuaaaggaaagagguuucuucggagcuauugcugguuucuuagaaggaggaugggaaggaaugauugcagguuggcacggauacacaucccauggggcacauggaguagcaguggcagcagaccuuaagaguacucaagaagccauaaacaagauaacaaaaaaucucaacucuuugagugagcuggaaguaaagaaucuucaaagacuaagcggugccauggaugaacuccacaacgaaauacuagaacuagacgagaaaguggaugaucucagagcugauacaauaagcucacaaauagaacucgcagucuugcuuuccaaugaaggaauaauaaacagugaagaugagcaucucuuggcgcuugaaagaaagcugaagaaaaugcugggccccucugcuguagagauagggaauggaugcuucgaaaccaaacacaagugcaaccagaccugucucgacagaauagcugcugguaccuuugaugcaggagaauuuucucuccccacuuuugauucacugaauauuacugcugcaucuuuaaaugacgauggauuggauaaucauacuauacugcuuuacuacucaacugcugccuccaguuuggcuguaacauugaugauagcuaucuuuguuguuuauauggucuccagagacaauguuucuugcuccaucugucuauaa

SEQ ID NO: 59114 - RNA, 1758 nt, Artificial Sequence
  derived and/or modified CDS sequence (wt) from hemagglutinin__InfluenzaB__AGX17039
augaaggcaauaauuguacuacucaugguaguaacauccaaugcagaucgaaucugcacugggauaacaucgucaaacucaccccauguggucaaaacugcuacucaaggggaggucaaugugacuggugugauaccacugacaacaacacccaccgaaucucauuuugcaaaucucaaaggaacaaaaaccagagggaaacuaugcccaaaaugccucaacugcacagaucuggacguggccuugggcagaccaaaaugcacggggaacauacccucggcaaaaguuucaauacuccaugaagucagaccuguuacaucugggugcuuuccuauaaugcacgacagaacaaaaauuagacagcugcccaaucuucucagaggauacgaacauaucagguuaucaacucauaacguuaucaaugcagaaaaggcaccaggaggacccuacaaaauuggaaccucagggucuugcccuaacguuaccaauggaaacggauuuuucgcaacaauggcuugggccgucccaaaaaacgacaacaacaaaacagcaacaaauucauuaacaauagaaguaccauacauuuguacagaaggagaagaccaaauuaccguuuggggguuccacucugauaacgaaacccaaauggcaaaacucuauggggacucaaagccccagaaguucaccucaucugccaacggagugaccacacacuacguuucacagauugguggcuucccaaaucaaacagaagacggaggacuaccacaaagugguagaauuguuguugauuacauggugcaaaaaucugggaacacaggaacaauuaccuaucaaagagguauuuuauugccucaaaaaguguggugcgcaaguggcaggagcaagguaauaaaaggauccuugccuuuaauuggagaagcagauugccuccacgaaaaauacgguggauuaaacaaaagcaagccuuacuacacaggggaacaugcaaaggccauaggaaauugcccaauaugggugaaaacacccuugaagcuggccaauggaaccaaauauagaccuccugcaaaacuauuaaaggaaagggguuucuucggagcuauugcugguuucuuagaaggaggaugggaaggaaugauugcagguuggcacggauacacaucccauggggcacauggaguagcaguggcagcagaccuuaagaguacucaagaagccauaaacaagauaacaaaaaaucucaacucuuugagugagcuggaaguaaagaaucuucaaagacuaagcggugccauggaugaacuccacaacgaaauacuagaacuagacgagaaaguggaugaucucagagcugauacaauaagcucacaaauagaacucgcagucuugcuuuccaaugaaggaauaauaaacagugaagaugagcaucucuuggcgcuugaaagaaagcugaagaaaaugcugggccccucugcuguagagauagggaauggaugcuucgaaaccaaacacaagugcaaccagaccugucucgacagaauagcugcugguaccuuugaugcaggagaauuuucucuccccacuuuugauucacugaauauuacugcugcaucuuuaaaugacgauggauuggauaaucauacuauaaugcuuuacuacucaacugcugccuccaguuuggcuguaacauugaugauagcuaucuuuguuguuuauauggucuccagagacaauguuucuugcuccaucugucuauaa

SEQ ID NO: 59115 - RNA, 1758 nt, Artificial Sequence
  derived and/or modified CDS sequence (wt) from hemagglutinin__InfluenzaB__AGX17050
augaaggcaauaauuguacuacucaugguaguaacauccaaugcagaucgaaucugcacugggauaacaucgucaaacucaccccauguggucaaaacugcuacucaaggggaggucaaugugacuggugugauaccacugacaacaacacccaccaaaucucauuuugcaaaucucaaaggaacaaaaaccagagggaaacuaugcccaaaaugccucaacugcacagaucuggacguggccuugggcagaccaaaaugcacggggaacauacccucggcaaaaguuucaauacuccaugaagucagaccuguuacaucugggugcuuuccuauaaugcacgacagaacaaaaauuagacaguugcccaaucuucucagaggauacgaacauaucagguuaucaacucauaacguuaucaaugcagaaaaggcaccaggaggacccuacaaaauuggaaccucagggucuugcccuaacguuaccaauggaaacggauuuuuugcaacaauggcuugggccgucccaaaaaacgacaacaacaaaacagcaacaaauucauuaacaauagaaguaccauacauuuguacagaaggagaagaccaaauuaccguuuggggguuccacucugauaacgaaacccaaauggcaaaacucuauggggacucaaagccccagaaguucaccucaucugccaacggagugaccacacauuacguuucacagauugguggcuucccaaaucaaacagaagacggaggacuaccacaaagugguagaauuguuguugauuacauggugcaaaaaucugggaaaacaggaacaauuaccuaucaaagagguauuuuauugccucaaaaaguguggugcgcaaguggcaggagcaagguaauaaaaggauccuugccuuuaauuggagaagcagauugccuccacgaaaaauacgguggauuaaacaaaagcaagccuuacuacacaggggaacaugcaaaggccauaggaaauugcccaauaugggugaaaacacccuugaagcuggccaauggaaccaaauauagaccuccugcaaaacuauuaaaggaaaggggcuucuucggagcuauugcugguuucuuagaaggaggaugggaaggaaugauugcagguuggcacggauacacaucccauggggcacauggaguagcaguggcagcagaccuuaagaguacucaagaagccauaaacaagauaacaaaaaaucucaacucuuugagugagcuggaaguaaagaaucuucaaagacuaagcggugccauggaugaacuccacaacgaaauacuagaacuagacgagaaaguggaugaucucagagcugauacaauaagcucacaaauagaacucgcagucuugcuuuccaaugaaggaauaauaaacagugaagaugagcaucucuuggcgcuugaaagaaagcugaagaaaaugcugggccccucugcuguagagauagggaauggaugcuucgaaaccaaacacaagugcaaccagaccugucucgacagaauagcugcugguaccuuugaugcaggagaauuuucucuccccacuuuugauucacugaauauuacugcugcaucuuuaaaugacgauggauuggauaaucauacuauacugcuuuauuacucaacugcugccuccaguuuggcuguaacauugaugauagcuaucuuuguuguuuauauggucuccagagacaauguuucuugcuccaucugucuauaa

SEQ ID NO: 59116 - RNA, 1758 nt, Artificial Sequence
  derived and/or modified CDS sequence (wt) from hemagglutinin__InfluenzaB__AGX17061
augaaggcaauaauuguacuacucaugguaguaacauccaaugcagaucgaaucugcacuggaauaacaucgucaaacucaccccauguggucaaaacugcuacucaaggggaagucaaugugacuggugugauaccacugacaacaacacccaccaaaucucauuuugcaaaucucaaaggaacaaaaaccagagggaaacuaugcccaaaaugucucaacugcacugaucuggacguggccuugggcagaccaaaaugcacggggaauauaccuucggcaaaaguuucaauacuccaugaaguaagaccuguuacaucugggugcuuuccuauaaugcacgacagaacaaaaauuagacagcugcccaaucuucucagaggauacgaacguaucagguuaucaaaccauaacguuaucaaugcagaaaaagcaccaggaggacccuacaaaauuggaaccucagggucuugcccuaacguuaccaauggaaacggauucuucgcaacaauggcuugggcugucccaaaaaacgaaaacaacaaaacagcaacaaauucauuaacaauagaaguaccauacauuuguacagaaggagaagaccaaauuaccguuuggggguuccacucugauaacgaaacccaaauggcaaaacucuauggagacucaaagccucagaaauucacuucaucugccaacggagugaccacacauuacguuucacagauugguggcuucccaaaucaaacagaagacggaggacuaccacaaagugguagaauuguuguugauuacauggugcaaaaaucuggaaaaacaggaacaauuaccuaucaaagagguauuuuauugccucaaaaaguguggugcgcaaguggcaggagcaagguaauaaaaggauccuugccuuuaauuggagaagcagauugccuccacgaaaaauacgguggauuaaacaaaagcaagccuuacuauacaggggaacaugcaaaagccauaggaaauugcccaauaugggugaaaacacccuugaagcuggccaauggaaccaaauauagaccuccugcaaaacuauuaaaggaaagggguuucuucggagcuauugcugguuucuuagaaggaggaugggaaggaaugauugcagguuggcacggauacacaucccauggagcacauggaguagcaguggcagcagaccuuaagaguacucaagaagccauaaacaagaucacaaaaaaucucaacucuuugagugagcuggaaguaaagaaucuucaaagacuaagcggagccauggaugaacuccacaacgaaauacuagaacuagaugagaaaguggaugaucucagagcugauacaauaagcucgcaaauagaacucgcagucuugcuuuccaaugaaggaauaauaaacagugaagaugagcaucucuuggcgcuugaaagaaaacugaagaaaaugcugggccccucugcuguagagauagggaauggaugcuucgaaaccaaacacaagugcaaccagaccugccucgacagaauagcugcuggcaccuuuaaugcaggagaauuuucucuccccaccuuugauucacuaaauauuacugcugcaucuuuaaaugacgauggauuggauaaucauacuauacugcuuuacuacucaacugcugcuuccaguuuggcuguaacauugaugauagcuaucuuuguuguuuauauggucuccagagacaauguuuccuguuccaucugucuauaa

SEQ ID NO: 59117 - RNA, 1758 nt, Artificial Sequence
  derived and/or modified CDS sequence (wt) from hemagglutinin__InfluenzaB__AGX17072
augaaggcaauaauuguacuacucaugguaguaacauccaaugcagaucgaaucugcacugggauaacaucgucaaacucaccccauguggucaaaacugcuacucaaggggaggucaaugugacuggugugauaccacugacaacaacacccaccgaaucucauuuugcaaaucucaaaggaacaaaaaccagagggaaacuaugcccaaaaugccucaacugcacagaucuggacguggccuugggcagaccaaaaugcacggggaacauacccucggcaaaaguuucaauacuccaugaagucagaccuguuacaucugggugcuuuccuauaaugcacgacagaacaaaaauuagacagcugcccaaucuucucagaggauacgaacauaucagguuaucaacucauaacguuaucaaugcagaaaaggcaccaggaggacccuacaaaauuggaaccucagggucuugcccuaacguuaccaauggaaacggauuuuucgcaacaauggcuugggccgucccaaaaaacgacaacaacaaaacagcaacaaauucauuaacaauagaaguaccauacauuuguacagaaggagaagaccaaauuaccguuuggggguuccacucugauaacgaaacccaaauggcaaaacucuauggggacucaaagccccagaaguucaccucaucugccaacggagugaccacacauuacguuucacagauugguggcuucccaaaucaaacagaagacggaggacuaccacaaagugguagaauuguuguugauuacauggugcaaaaaucugggaacacaggaacaauuaccuaucaaagagguauuuuauugccucaaaaaguguggugcgcaaguggcaggagcaagguaauaaaaggauccuugccuuuaauuggagaagcagauugccuccacgaaaaauacgguggauuaaacaaaagcaagccuuacuacacaggggaacaugcaaaggccauaggaaauugcccaauaugggugaaaacacccuugaagcuggccaauggaaccaaauauagaccuccugcaaaacuauuaaaggaaagggguuucuucggagcuauugcugguuucuuagaaggaggaugggaaggaaugauugcagguuggcacggauacacaucccauggggcacauggaguagcaguggcagcagaccuuaagaguacucaagaagccauaaacaagauaacaaaaaaucucaacucuuugagugagcuggaaguaaagaaucuucaaagacuaagcggugccauggaugaacuccacaacgaaauacuagaacuagacgagaaaguggaugaucucagagcugauacaauaagcucacaaauagaacucgcagucuugcuuuccaaugaaggaauaauaaacagugaagaugagcaucucuuggcgcuugaaagaaagcugaagaaaaugcugggccccucugcuguagagauagggaauggaugcuucgaaaccaaacacaagugcaaccagaccugucucgacagaauagcugcugguaccuuugaugcaggagaauuuucucuccccacuuuugauucacugaauauuacugcugcaucuuuaaaugacgauggauuggauaaucauacuauacugcuuuacuacucaacugcugccuccaguuuggcuguaacauugaugauagcuaucuuuguuguuuauauggucuccagagacaauguuucuugcuccaucugucuauaa

SEQ ID NO: 59118 - RNA, 1758 nt, Artificial Sequence; identical to SEQ ID NO: 59102
  derived and/or modified CDS sequence (wt) from hemagglutinin__InfluenzaB__AGX17083

SEQ ID NO: 59119 - RNA, 1758 nt, Artificial Sequence
  derived and/or modified CDS sequence (wt) from hemagglutinin__InfluenzaB__AGX17094
augaaggcaauaauuguacuacucaugguaguaacauccaaugcagaucgaaucugcacugggauaacaucgucaaacucaccccauguggucaaaacugcuacucaaggggaggucaaugugacuggugugauaccacugacaacaacacccaccaaaucucauuuugcaaaucucaaaggaacaaaaaccagagggaaacuaugcccaaaaugccucaacugcacagaucuggacguggccuugggcagaccaaaaugcacggggaacauacccucggcaaaaguuucaauacuccaugaagucagaccuguuacaucugggugcuuuccuauaaugcacgacagaacaaaaauuagacagcugcccaaucuucucagaggauacgaacauaucagguuaucaacucauaacguuaucaaugcagaaaaggcaccaggaggacccuacaaaauuggaaccucagggucuugcccuaacguuaccaauggaaacggauuuuucgcaacaauggcuugggccgucccaaaaaacgacaacaacaaaacagcaacaaauucauuaacaauagaaguaccauacauuuguacagaaggagaagaccaaauuaccguuuggggguuccacucugauagcgaaacccaaauggcaaaacucuauggggacucaaagccccagaaguucaccucaucugccaacggagugaccacacauuacguuucacagauugguggcuucccaaaucaaacagaagacggaggacuaccacaaagugguagaauuguuguugauuacauggugcaaaaaucugggaaaacaggaacaauuaccuaucaaagagguauuuuauugccucaaaaaguguggugcgcaaguggcaggagcaagguaauaaaaggauccuugccuuuaauuggagaagcagauugccuccacgaaaaauacgguggauuaaacaaaagcaagccuuacuacacaggggaacaugcaaaggccauaggaaauugcccaauaugggugaaaacacccuugaagcuggccaauggaacuaaauauagaccuccugcaaaacuauuaaaggaaagggguuucuucggggcuauugcugguuucuuagaaggaggaugggaaggaaugauugcagguuggcacggauacacaucccauggggcacauggaguagcaguggcagcagaccuuaagaguacucaagaagccauaaacaagauaacaaaaaaucucaacucuuugagugagcuggaaguaaagaaucuucaaagacuaagcggugccauggaugaacuccacaacgaaauacuagaacuagacgagaaaguggaugaucucagagcugauacaauaagcucacaaauagaacucgcagucuugcuuuccaaugaaggaauaauaaacagugaagaugagcaucucuuggcgcuugaaagaaagcugaagaaaaugcugggccccucugcuguagagauagggaauggaugcuucgaaaccaaacacaagugcaaccagaccugucucgacagaauagcugcugguaccuuugaugcaggagaauuuucucuccccacuuuugauucacugaauauuacugcugcaucuuuaaaugacgauggauuggauaaucauacuauacugcuuuacuacucaacugcugccuccaguuuggcuguaacauugaugauagcuaucuuuguuguuuauauggucuccagagacaauguuucuugcuccaucugucuauaa

SEQ ID NO: 59120 - RNA, 1758 nt, Artificial Sequence
  derived and/or modified CDS sequence (wt) from hemagglutinin__InfluenzaB__AGX17105
augaaggcaauaauuguacuacucaugguaguaacauccaaugcagaucgaaucugcacugggauaacaucgucaaacucaccccauguggucaaaacugcuacucaaggggagaucaaugugacuggugugauaccacugacaacaacacccaccaaaucucauuuugcaaaucucaaaggaacaaaaaccagagggaaacuaugcccaaaaugccucaacugcacagaucuggacguggccuugggcagaccaaaaugcacggggaacauacccucggcaaaaguuucaauacuccaugaagucagaccuguuacaucugggugcuuuccuauaaugcacgacagaacaaaaauuagacagcugcccaaucuucucagaggauacgaacauaucagguuaucaacucauaacguuaucaaugcagaaaaggcaccaggaggacccuacaaaauuggaaccucagggucuugcccuaacguuaccaauggaaacggauuuuucgcaacaauggcuugggccgucccaaaaaacgacaacaacaaaacagcaacaaauucauuaacaauagaaguaccacacauuuguacagaaggagaagaccaaauuaccguuuggggguuccacucugauaacgaaauccaaauggcaaaacucuauggggacucaaagccccagaaguucaccucaucugccaacggagugaccacacauuacauuucacagauugguggcuucccaaaucaaacagaagacggaggacuaccacaaagugguagaauuguuguugauuacauggugcaaaaaucugggaaaacaggaacaauuaccuaucaaagagguauuuuauugccucaaaaaguguggugcgcaaguggcaggagcaagguaauaaaaggauccuugccuuuaauuggagaagcagauugccuccacgaaaaauacgguggauuaaacaaaagcaagccuuacuacacaggggaacaugcaaaggccauaggaaauugcccaauaugggugaaaacacccuugaagcuggccaauggaacuaaauauagaccuccugcaaaacuauuaaaggaaagggguuucuucggggcuauugcugguuucuuagaaggaggaugggaaggaaugauugcagguuggcacggauacacaucccauggggcacauggaguagcaguggcagcagaccuuaagaguacucaagaagccauaaacaagauaacaaaaaaucucaacucuuugagugagcuggaaguaaagaaucuucaaagacuaagcggugccauggaugaacuccacaacgaaauacuagaacuagacgagaaaguggaugaucucagagcugauacaauaagcucacaaauagaacucgcagucuugcuuuccaaugaaggaauaauaaacagugaagaugagcaucucuuggcgcuugaaagaaagcugaagaaaaugcugggccccucugcuauagagauagggaauggaugcuucgaaaccaaacacaagugcaaccagaccugucucgacagaauagcugcugguaccuuugaugcaggagaauuuucucuccccacuuuugauucacugaauauuacugcugcaucuuuaaaugacgauggauuggauaaucauacuauacugcuuuacuacucaacugcugccuccaguuuggcuguaacauugaugauagcuaucuuuguuguuuauauggucuccagagacaauguuucuugcuccaucugucuauaa

SEQ ID NO: 59121 - RNA, 1758 nt, Artificial Sequence; identical to SEQ ID NO: 59102
  derived and/or modified CDS sequence (wt) from hemagglutinin__InfluenzaB__AGX17116

SEQ ID NO: 59122 - RNA, 1758 nt, Artificial Sequence
  derived and/or modified CDS sequence (wt) from hemagglutinin__InfluenzaB__AGX17127
augaaggcaauaauuguacuacucaugguaguaacauccaaugcagaucgaaucugcacugggauaacaucgucaaacucaccccauguggucaaaacugcuacucaaggggaggucaaugugacuggugugauaccacugacaacaacacccaccgaaucucauuuugcaaaucucaaaggaacaaaaaccagagggaaacuaugcccaaaaugccucaacugcacagaucuggacguggccuugggcagaccaaaaugcacggggaacauacccucggcaaaaguuucaauacuccaugaagucagaccuguuacaucugggugcuuuccuauaaugcacgacagaacaaaaauuagacagcugcccaaucuucucagaggauacgaacauaucagguuaucaacucauaacguuaucaaugcagaaaaggcaccaggaggacccuacaaaauuggaaccucagggucuugcccuaacguuaccaauggaaacggauuuuucgcaacaauggcuugggccgucccaaaaaacgacaacaacaaaacagcaacaaauucauuaacaauagaaguaccauacauuuguacagaaggagaagaccaaauuaccguuuggggguuccacucugauaacgaaaaccaaauggcaaaacucuauggggacucaaagccccagaaguucaccucuucugccaacggagugaccacacauuacguuucacagauugguggcuucccaaaucaaacagaagacggaggacuaccacaaagugguagaauuguuguugauuacauggugcaaaaaucugggaacacaggaacaauuaccuaucaaagagguauuuuauugccucaaaaaguguggugcgcaaguggcaggagcaagguaauaaaaggauccuugccuuuaauuggagaagcagauugccuccacgaaaaauacgguggauuaaacaaaagcaagccuuacuacacaggggaacaugcaaaggccauaggaaauugcccaauaugggugaaaacacccuugaagcuggccaauggaaccaaauauagaccuccugcaaaacuauuaaaggaaagggguuucuucggagcuauugcugguuucuuagaaggaggaugggaaggaaugauugcagguuggcacggauacacaucccauggggcacauggaguagcaguggcagcagaccuuaagaguacucaagaagccauaaacaagauaacaaaaaaucucaacucuuugagugagcuggaaguaaagaaucuucaaagacuaagcggugccauggaugaacuccacaacgaaauacuagaacuagacgagaaaguggaugaucucagagcugauacaauaagcucacaaauagaacucgcagucuugcuuuccaaugaaggaauaauaaacagugaagaugagcaucucuuggcgcuugaaagaaagcugaagaaaaugcugggccccucugcuguagagauagggaauggaugcuucgaaaccaaacacaagugcaaccagaccugucucgacagaauagcugcugguaccuuugaugcaggagaauuuucucuccccacuuuugauucacugaauauuacugcugcaucuuuaaaugacgauggguuggauaaucauacuauacugcuuuacuacucaacugcugccuccaguuuggcuguaacauugaugauagcuaucuuuguuguuuauauggucuccagagacaauguuucuugcuccaucugucuauaa

SEQ ID NO: 59123 - RNA, 1758 nt, Artificial Sequence
  derived and/or modified CDS sequence (wt) from hemagglutinin__InfluenzaB__AGX17138
augaaggcaauaauuguacuacucaugguaguaacauccaaugcagaucgaaucugcacugggauaacaucgucaaacucaccccauguggucaaaacugcuacucaaggggaggucaaugugacuggugugauaccauugacaacaacacccaccaaaucucauuuugcaaaucucaaaggaacaaaaaccagagggaaacuaugcccaaaaugccucaacugcacagaucuggacguggccuugggcagaccaaaaugcacggggaacauacccucggcaaaagucucaauacuccaugaagucagaccuguuacaucugggugcuuuccuauaaugcacgacagaacaaaaauuagacagcugcccaaucuucucagaggauacgaacauaucagguuaucaacucauaacguuaucaaugcagaaaaggcaccaggaggacccuacaaaauuggaaccucagggucuugcccuaacguuaccaauggaaacggauuuuucgcaacaauggcuugggccgucccaaaaaacgacaacaacaaaacagcaacaaauucauuaacaauagaaguaccauacauuuguacagaaggagaagaccaaaucaccguuuggggguuccacucugauaacgaaaaccaaauggcaaaacucuauggggacucaaagccccagaaguucaccucaucugccaacggagugaccacacauuacguuucacagauugguggcuucccaaaucaaacagaagacggaggacuaccacaaagugguagaauuguuguugauuacauggugcaaaaaucugggaaaacaggaacaauuaccuaucaaagagguauuuuauugccucaaaaaguguggugcgcaaguggcaggagcaagguaauaaaaggauccuugccuuuaauuggagaagcagauugccuccacgaaaaauacgguggauuaaacaaaagcaagccuuacuacacaggggaacaugcaaaggccauaggaaauugcccaauaugggugaaaacacccuugaagcuggccaauggaaccaaauauagaccuccugcaaaacuauuaaaggaaaggggcuucuucggagcuauugcugguuucuuagaaggaggaugggaaggaaugauugcagguuggcacggauacacaucccauggggcacauggaguagcaguggcagcagaccuuaagaguacucaagaagccauaaacaagauaacaaaaaaucucaacucuuugagugagcuggaaguaaagaaucuucaaagacuaagcggugccauggaugaacuccacaacgaaauacuagaacuagacgagaaaguggaugaucucagagcugauacaauaagcucacaaauagaacucgcagucuugcuuuccaaugaaggaauaauaaacagugaagaugagcaucucuuggcgcuugaaagaaagcugaagaaaaugcugggccccucugcuguagagauagggaauggaugcuucgaaaccaaacacaagugcaaccagaccugucucgacagaauagcugcugguaccuuugaugcaggagaauuuucucuccccacuuuugauucacugaauauuacugcugcaucuuuaaaugacgauggauuggauaaucauacuauacugcuuuauuacucaacugcugccuccaguuuggcuguaacauugaugauagcuaucuuuguuguuuauauggucuccagagacaauguuucuugcuccaucugucuauaa

SEQ ID NO: 59124 - RNA, 1758 nt, Artificial Sequence
  derived and/or modified CDS sequence (wt) from hemagglutinin__InfluenzaB__AGX17149
augaaggcaauaauuguacuacucaugguaguaacauccaaugcagaucgaaucugcacugggauaacaucgucaaacucaccccauguggucaaaacugcuacucaaggggaggucaaugugacuggugugauaccacugacaacaacacccaccaaaucucauuuugcaaaucucaaaggaacaaaaaccagagggaaacuaugcccaaaaugccucaacugcacagaucuggacguggccuugggcagaccaaaaugcacggggaacauacccucggcaaaaguuucaauacuccaugaagucagaccuguuacaucugggugcuuuccuauaaugcacgacagaacaaaaauuagacagcugcccaaucuucucagaggauacgaacauaucagguuaucaacucauaacguuaucaaugcagaaaaggcaccaggaggacccuacaaaauuggaaccucagggucuugcccuaacguuaccaauggaaacggauuuuucgcaacgauggcuugggccgucccaaaaaacgacaacaacaaaacagcaacaaauucauuaacaauagaaguaccauacauuuguacagaaggagaagaccaaauuaccguuuggggguuccacucugauaacgaaaaccaaauggcaaaacucuauggggacucaaagccccagaaguucaccucaucugccaacggagugaccacacauuacguuucacagauugguggcuucccaaaucaaacagaagacggaggacuaccacaaagugguagaauuguuguugauuacauggugcaaaaaucugggaaaacaggaacaauuaccuaucaaagagguauuuuauugccucaaaaaguguggugcgcaaguggcaggagcaagguaauaaaaggauccuugccuuuaauuggagaagcagauugccuccacgaaaaauacgguggauuaaacaaaagcaagccuuacuacacaggggaacaugcaaaggccauaggaaauugcccaauaugggugaaaacacccuugaagcuggccaauggaaccaaauauagaccuccugcaaaacuauuaaaggaaagggguuucuucggagcuauugcugguuucuuagaaggaggaugggaaggaaugauugcagguuggcacggauacacaucccauggggcacauggaguagcaguggcagcagaccuuaagaguacucaagaagccauaaacaagauaacaaaaaaucucaacucuuugagugagcuggaaguaaagaaucuucaaagacuaagcggugccauggaugaacuccacaacgaaauacuagaacuagacgagaaaguggaugaucucagagcugauacaauaagcucacaaauagaacucgcagucuugcuuuccaaugaaggaauaauaaacagugaagaugagcaucucuuggcgcuugaaagaaagcugaagaaaaugcugggccccucugcuguagagauagggaauggaugcuucgaaaccaaacacaagugcaaccagaccugucucgacagaauagcugcugguaccuuugaugcaggagaauuuucucuccccacuuuugauucacugaauauuacugcugcaucuuuaaaugacgauggauuggauaaucauacuauacugcuuuacuacucaacugcugccuccaguuuggcuguaacauugaugauagcuaucuuuguuguuuauauggucuccagagacaauguuucuugcuccaucugucuauaa

SEQ ID NO: 59125 - RNA, 1758 nt, Artificial Sequence
  derived and/or modified CDS sequence (wt) from hemagglutinin__InfluenzaB__AGX17160
augaaggcaauaauuguacuacucaugguaguaacauccaaugcagaucgaaucugcacugggauaacaucgucaaacucaccccauguggucaaaacugcuacucaaggggaggucaaugugacugguaugauaccacugacaacaacacccaccaaaucucauuuugcaaaucucaaaggaacaaaaaccagagggaaacuaugcccaaaaugccucaacugcacagaucuggacguggccuugggcagaccaaaaugcacggggaacauacccucggcaaaaguuucaauacuccaugaagucagaccuguuacaucugggugcuuuccuauaaugcacgacagaacaaaaauuagacagcugcccaaucuucucagaggauacgaacauaucagguuaucaacucauaacguuaucaaugcagaaaaggcaccaggaggacccuacaaaauuggaaccucagggucuugcccuaacguuaccaauggaaacggauuuuucgcaacaauggcuugggccgucccaaaaaacgacaacaacaaaacagcaacaaauucauuaacaauagaaguaccauacauuuguacagaaggagaagaccaaauuaccguuuggggguuccacucugauaacgaaacccaaauggcaaaacucuauggggacucaaagccccagaaguucaccucaucugccaacggagugaccacacauuacguuucacagauugguggcuucccaaaucaaacagaagacggaggacuaccacaaagugguagaauuguuguugauuacauggugcaaaaaucugggaaaacaggaacaauuaccuaucaaagagguauuuuauugccucaaaaaguguggugcgcaaguggcaggagcaagguaauaaaaggauccuugccuuuaauuggagaagcagauugccuccacgaaaaauacgguggauuaaacaaaagcaagccuuacuacacaggggaacaugcaaaggccauaggaaauugcccaauaugggugaaaacacccuugaagcuggccaauggaacuaaauauagaccuccugcaaaacuauuaaaggaaagggguuucuucggggcuauugcugguuucuuagaaggaggaugggaaggaaugauugcagguuggcacggauacacaucccauggggcacauggaguagcaguggcagcagaccuuaagaguacucaagaagccauaaacaagauaacaaaaaaucucaacucuuugagugagcuggaaguaaagaaucuucaaagacuaagcggugccauggaugaacuccacaacgaaauacuagaacuagacgagaaaguggaugaucucagagcugauacaauaagcucacaaauagaacucgcagucuugcuuuccaaugaaggaauaauaaacagugaagaugagcaucucuuggcgcuugaaagaaagcugaagaaaaugcugggccccucugcuguagagauagggaauggaugcuucgaaaccaaacacaagugcaaccagaccugucucgacagaauagcugcugguaccuuugaugcaggagaauuuucucuccccacuuuugauucacugaauauuacugcugcaucuuuaaaugacgauggauuggauaaucauacuauacugcuuuacuacucaacugcugccuccaguuuggcuguaacauuaaugauagcuaucuuuguuguuuauauggucuccagagacaauguuucuugcuccaucugucuauaa

SEQ ID NO: 59126 - RNA, 1758 nt, Artificial Sequence
  derived and/or modified CDS sequence (wt) from hemagglutinin__InfluenzaB__AGX17171
augaaggcaauaauuguacuacucaugguaguaacauccaaugcagaucgaaucugcacugggauaacaucgucaaacucaccccauguggucaaaacugcuacucaaggggaggucaaugugacuggugugauaccacugacaacaacacccaccgaaucucauuuugcaaaucucaaaggaacaaaaaccagagggaaacuaugcccaaaaugccucaacugcacagaucuggacguggcuuugggcagaccaaaaugcacggggaacauacccucggcaaaaguuucaauacuccaugaagucagaccuguuacaucugggugcuuuccuauaaugcacaacagaacaaaaauuagacagcugcccaaucuucucagaggauacgaacauaucagguuaucaacucauaacguuaucaaugcagaaaaggcaccaggaggacccuacaaaauuggaaccucagggucuugcccuaacguuaccaauggaaacggauuuuucgcaacaauggcuugggccgucccaaaaaacgacaacaacaaaacagcaacaaauucauuaacaauagaaguaccauacauuuguacagaaggagaagaccaaauuaccguuuggggguuccacucugauaacgaagcccaaauggcaaaacucuauggggacucaaagccccagaaguucaccucaucugccaacggagugaccacacauuacguuucacagauugguggcuucccaaaucaaacagaagacggaggacuaccacaaagugguagaauuguuguugauuacauggugcaaaaaucugggaacacaggaacaauuaccuaucaaagagguauuuuauugccucaaaaaguguggugcgcaaguggcaggagcaagguaauaaaaggauccuugccuuuaauuggagaagcagauugccuccacgaaaaauacgguggauuaaacaaaagcaagccuuacuacacaggggaacaugcaaaggccauaggaaauugcccaauaugggugaaaacacccuugaagcuggccaauggaaccaaauauagaccuccugcaaaacuauuaaaggaaagggguuucuucggagcuauugcugguuucuuagaaggaggaugggaaggaaugauugcagguuggcacggauacacaucccauggggcacauggaguagcaguggcagcagaccuuaagaguacucaagaagccauaaacaagauaacaaaaaaucucaacucuuugagugagcuggaaguaaagaaucuucaaagacuaagcggugccauggaugaacuccacaacgaaauacuagaacuagacgagaaaguggaugaucucagagcugauacaauaagcucacaaauagaacucgcagucuugcuuuccaaugaaggaauaauaaacagugaagaugagcaucucuuggcgcuugaaagaaagcugaagaaaaugcugggccccucugcuguagagauagggaauggaugcuucgaaaccaaacacaagugcaaccagaccugucucgacagaauagcugcugguaccuuugaugcaggagaauuuucucuccccacuuuugauucacugaauauuacugcugcaucuuuaaaugacgauggauuggauaaucauacuauacugcuuuacuacucaacugcugccuccaguuuggcuguaacauugaugauagcuaucuuuguuguuuauauggucuccagagacaauguuucuugcuccaucugucuauaa

SEQ ID NO: 59127 - RNA, 1758 nt, Artificial Sequence
  derived and/or modified CDS sequence (wt) from hemagglutinin__InfluenzaB__AGX17182
augaaggcaauaauuguacuacucaugguaguaacauccaaugcagaucgaaucugcacugggauaacaucgucaaacucaccccauguggucaaaacugcuacucaaggggaggucaaugugacuggugugauaccacugacaacaacacccaccaaaucucauuuugcaaaucucaaaggaacaaaaaccagagggaaacuaugcccaaaaugccucaacugcacagaucuggacguggccuugggcagaccaaaaugcacggggaacauacccucggcaaaaguuucaauacuccaugaagucagaccuguuacaucugggugcuuuccuauaaugcacgacagaacaaaaauuagacagcugcccaaccuucucagaggauacgaacauaucagguuaucaacucauaacguuaucaaugcagaaaaggcaccaggaggacccuacaaaauuggaaccucagggucuugcccuaacguuaccaauggaaacggauuuuucgcaacaauggcuugggccgucccaaaaaacgacaacaacaaaacagcaacaaauucauuaacaauagaaguaccauacauuuguacagaaggagaagaccaaauuaccguuuggggguuccacucugauaacgaaacccaaauggcaaaacucuauggggacucaaagccccagaaguucaccucaucugccaacggagugaccacacauuacguuucacagauugguggcuucccaaaucaaacagaagacggaggacuaccacaaagugguagaauuguuguugauuacauggugcaaaaaucugggaaaacaggaacaauuaccuaucaaagagguauuuuauugccucaaaaaguguggugcgcaaguggcaggagcaagguaauaaaaggauccuugccuuuaauuggagaagcagauugccuccacgaaaaauacgguggauuaaacaaaagcaagccuuacuacacaggggaacaugcaaaggccauaggaaauugcccaauaugggugaaaacacccuugaagcuggccaauggaaccaaauauagaccuccugcaaaacuauuaaaggaaagggguuucuucggagcuaucgcugguuucuuagaaggaggaugggaaggaaugauugcagguuggcacggauacacaucccauggggcacauggaguagcaguggcagcagaccuuaagaguacucaagaagccauaaacaagauaacaaaaaaucucaacucuuugagugagcuggaaguaaagaaucuucaaagacuaagcggugccauggaugaacuccacaacgaaauacuagaacuagacgagaaaguggaugaucucagagcugauacaauaagcucacaaauagaacucgcagucuugcuuuccaaugaaggaauaauaaacagugaagaugagcaucucuuggcgcuugaaagaaagcugaagaaaaugcugggccccucugcuguagagauagggaauggaugcuucgaaaccaaacacaagugcaaccagaccugucucgacagaauagcugcugguaccuuugaugcaggagaauuuucucuccccacuuuugauucacugaauauuacugcugcaucuuuaaaugacgauggauuggauaaucauacuauacugcuuuacuacucaacugcugccuccaguuuggcuguaacauugaugauagcuaucuuuguuguuuauauggucuccagagacaauguuucuugcuccaucugucuauaa

SEQ ID NO: 59128 - RNA, 1758 nt, Artificial Sequence; identical to SEQ ID NO: 59071
  derived and/or modified CDS sequence (wt) from hemagglutinin__InfluenzaB__AGX17193

SEQ ID NO: 59129 - RNA, 1758 nt, Artificial Sequence; identical to SEQ ID NO: 59127
  derived and/or modified CDS sequence (wt) from hemagglutinin__InfluenzaB__AGX17204

SEQ ID NO: 59130 - RNA, 1758 nt, Artificial Sequence
  derived and/or modified CDS sequence (wt) from hemagglutinin__InfluenzaB__AGX17215
augaaggcaauaauuguacuacucaugguaguaacauccaaugcagaucgaaucugcacugggauaacaucgucaaacucaccccauguggucaaaacugcuacucaaggggaggucaaugugacuggugugauaccacugacaacaacacccaccaaaucucauuuugcaaaucucaaaggaacaaaaaccagagggaaacuaugcccaaaaugccucaacugcacagaucuggacguggccuugggcagaccaaaaugcacggggaacauacccucggcaaaaguuucaauacuccaugaagucagaccuguuacaucugggugcuuuccuauaaugcacgacagaacaaaaauuagacagcugcccaaucuucucagaggauacgaacauaucagguuaucaacucauaacguuaucaaugcagaaaaggcaccaggaggacccuacaaaauuggaaccucagggucuugcccuaacguuaccaauggaaacggauuuuucgcaacaauggcuugggccgucccaaaaaacgacaacaacaaaacagcaacaaauucauuaacaauagaaguaccauacauuuguacagaaggagaagaccaaauuaccguuuggggguuccacucugauaacgaagcccaaauggcaaaacucuauggggacucaaagccccagaaguucaccucaucugccaacggagugaccacacauuacguuucacagauugguggcuucccaaaucaaacagaagacggaggacuaccacaaagugguagaauuguuguugauuacauggugcaaaaaucugggaaaacaggaacaauuaccuaucaaagagguauuuuauugccucaaaaaguguggugcgcaaguggcaggagcaagguaauaaaaggauccuugccuuuaauuggagaagcagauugccuccacgaaaaauacgguggauuaaacaaaagcaagccuuacuacacaggggaacaugcaaaggccauaggaaauugcccaauaugggugaaaacacccuugaagcuggccaauggaacuaaauauagaccuccugcaaaacuauuaaaggaaagggguuucuucggggcuauugcugguuucuuagaaggaggaugggaaggaaugauugcagguuggcacggauacacaucccauggggcacauggaguagcaguggcagcagaccuuaagaguacucaagaagccauaaacaagauaacaaaaaaucucaacucuuugagugagcuggaaguaaagaaucuucaaagacuaagcggugccauggaugaacuccacaacgaaauacuagaacuagacgagaaaguggaugaucucagagcugauacaauaagcucacaaauagaacucgcagucuugcuuuccaaugaaggaauaauaaacagugaagaugagcaucucuuggcgcuugaaagaaagcugaagaaaaugcugggccccucugcuauagagauagggaauggaugcuucgaaaccaaacacaagugcaaccagaccugucucgacagaauagcugcugguaccuuugaugcaggagaauuuucucuccccacuuuugauucacugaauauuacugcugcaucuuuaaaugacgauggauuggauaaucauacuauacugcuuuacuacucaacugcugccuccaguuuggcuguaacauugaugauagcuaucuuuguuguuuauauggucuccagagacaauguuucuugcuccaucugucuauaa

SEQ ID NO: 59131 - RNA, 1758 nt, Artificial Sequence
  derived and/or modified CDS sequence (wt) from hemagglutinin__InfluenzaB__AGX17226
augaaggcaauaauuguacuacucaugguaguaacauccaaugcagaucgaaucugcacugggauaacaucgucaaacucaccccauguggucaaaacugcuacucaaggggaggucaaugugacuggugugauaccacugacaacaacacccaccaaaucucauuuugcaaaucucaaaggaacaaaaaccagagggaaacuaugcccaaaaugccucaacugcacagaucuggacguggccuugggcagaccaaaaugcacggggaacauacccucggcaaaaguuucaauacuccaugaagucagaccuguuacaucugggugcuuuccuauaaugcacgacagaacaaaaauuagacagcugcccaaucuucucagaggauacgaacauaucagguuaucaacucauaacguuaucaaugcagaaaaggcaccaggaggacccuacaaaauuggaaccucagggucuugcccuaacguuaccaauggaaacggauuuuucgcaacaauggcuugggccgucccaaaaaacgacaacaacaaaacagcaacaaauucauuaacaauagaaguaccauacauuuguacagaaggagaagaccaaauuaccguuuggggguuccacucugauaacgaaacccaaauggcaaaacucuauggggacucaaagccccagaaguucaccucaucugccaacggagugaccacacauuacguuucacagauugguggcuucccaaaucaaacagaagacggaggacuaccacaaagugguagaauuguuguugauuacauggugcaaaaaucugggaaaacaggaacaauuaccuaucaaagagguauuuuauugccucaaaaaguguggugcgcaaguggcaggagcaagguaauaaaaggauccuugccuuuaauuggagaagcagauugccuccacgaaaaauacgguggauuaaacaaaagcaagccuuacuacacaggggaacaugcaaaggccauaggaaauugcccaauaugggugaaaacacccuugaagcuggccaauggaaccaaauauagaccuccugcaaaacuauuaaaggaaagagguuucuucggagcuauugcugguuucuuagaaggaggaugggaaggaaugauugcagguuggcacggauacacaucccauggggcacauggaguagcaguggcagcagaccuuaagaguacucaagaagccauaaacaagauaacaaaaaaucucaacucuuugagugagcuggaaguaaagaaucuucaaagacuaagcggugccauggaugaacuccacaacgaaauacuagaacuagacgagaaaguggaugaucucagagcugauacaauaagcucacaaauagaacucgcagucuugcuuuccaaugaaggaauaauaaacagugaagaugagcaucucuuggcgcuugaaagaaagcuaaagaaaaugcugggccccucugcuguagagauagggaauggaugcuucgaaaccaaacacaagugcaaccagaccugucucgacagaauagcugcugguaccuuugaugcaggagaauuuucucuccccacuuuugauucacugaauauuacugcugcaucuuuaaaugacgauggauuggauaaucauacuauacugcuuuacuacucaacugcugccuccaguuuggcuguaacauugaugauagcuaucuuuguuguuuauauggucuccagagacaauguuucuugcuccaucugucuauaa

SEQ ID NO: 59132 - RNA, 1758 nt, Artificial Sequence
  derived and/or modified CDS sequence (wt) from hemagglutinin__InfluenzaB__AGX17237
augaaggcaauaauuguacuacucaugguaguaacauccaaugcagaucgaaucugcacugggauaacaucgucaaacucaccccauguggucaaaacugcuacucaaggggaggucaaugugacuggugugauaccacugacaacaacacccaccaaaucucauuuugcaaaucucaaaggaacaaaaaccagagggaaacuaugcccaaaaugccucaacugcacagaucuggacguggccuugggcagaccaaaaugcacggggaacauacccucggcaaaaguuucaauacuccaugaagucagaccuguuacaucugggugcuuuccuauaaugcacgacagaacaaaaauuagacagcugcccaaucuucucagaggauacgaacauaucagguuaucaacucauaacguuaucaaugcagaaaaggcaccaggaggacccuacaaaauuggaaccucagggucuugcccuaacauuaccaauggaaacggauuuuucgcaacaauggcuugggccgucccaaaaaacgacaacaacaaaacagcaacaaauucauuaacaauagaaguaccauacauuuguacagaaggagaagaccaaauuaccguuuggggguuccacucugauaacgaaauccaaauggcaaaacucuauggggacucaaagccccagaaguucaccucaucugccaacggagugaccacacauuacguuucacagauugguggcuucccaaaucaaacagaagacggaggacuaccacaaagugguagaauuguuguugauuacauggugcaaaaaucugggaaaacaggaacaauuaccuaucaaagagguauuuuauugccucaaaaaguguggugcgcaaguggcaggagcaagguaauaaaaggauccuugccuuuaauuggagaagcagauugccuccacgaaaaauacgguggauuaaacaaaagcaagccuuacuacacaggggaacaugcaaaggccauaggaaauugcccaauaugggugaaaacacccuugaagcuggccaauggaacuaaauauagaccuccugcaaaacuauuaaaggaaagggguuucuucggggcuauugcugguuucuuagaaggaggaugggaaggaaugauugcagguuggcacggauacacaucccauggggcacauggaguagcaguggcagcagaccuuaagaguacucaagaagccauaaacaagauaacaaaaaaucucaacucuuugagugagcuggaaguaaagaaucuucaaagacuaagcggugccauggaugaacuccacaacgaaauacuagaacuagacgagaaaguggaugaucucagagcugauacaauaagcucacaaauagaacucgcagucuugcuuuccaaugaaggaauaauaaacagugaagaugagcaucucuuggcgcuugaaagaaagcugaagaaaaugcugggccccucugcuguagagauagggaauggaugcuucgaaaccaaacacaagugcaaccagaccugucucgacagaauagcugcugguaccuuugaugcaggagaauuuucucuccccacuuuugauucacugaauauuacugcugcaucuuuaaaugacgauggauuggauaaucauacuauacugcuuuacuacucaacugcugccuccaguuuggcuguaacauugaugauagcuaucuuuguuguuuauauggucuccagagacaauguuucuugcuccaucugucuauaa

SEQ ID NO: 59133 - RNA, 1758 nt, Artificial Sequence
  derived and/or modified CDS sequence (wt) from hemagglutinin__InfluenzaB__AGX17248
augaaggcaauaauuguacuacucaugguaguaacauccaaugcagaucgaaucugcacugggauaacaucgucaaacucaccccauguggucaaaacugcuacucaaggggaggucaaugugacuggugugauaccacugacaacaacacccaccaaaucucauuuugcaaaucucaaaggaacaaaaaccagagggaaacuaugcccaaaaugccucaacugcacagaucuggacguggccuugggcagaccaaaaugcacggggaacauacccucggcaaaaguuucaauacuccaugaagucagaccuguuacaucugggugcuuuccuauaaugcacgacagaacaaaaauuagacagcugcccaaucuucucagaggauacgaacauaucagguuaucaacucauaacguuaucaaugcagaaaaggcaccaggaggacccuacaaaauuggaaccucagggucuugcccuaacguuaccaauggaaacggauuuuuugcaacaauggcuugggccgucccaaaaaacgacaacaacaaaacagcaacaaauucauuaacaauagaaguaccauacauuuguacagaaggagaagaccaaauuaccguuuggggguuccacucugauaacgaaacccaaauggcaaaacucuauggggacucaaagccccagaaguucaccucaucugccaacggagugaccacacauuacguuucacagauugguggcuucccaaaucaaacagaagacggaggacuaccacaaagugguagaauuguuguugauuacauggugcaaaaaucugggaaaacaggaacaauuaccuaucaaagagguauuuuauugccucaaaaaguguggugcacaaguggcaggagcaagguaauaaaaggauccuugccuuuaauuggagaagcagauugccuccacgaaaaauacgguggauuaaacaaaagcaagccuuacuacacaggggaacaugcaaaggccauaggaaauugcccaauaugggugaaaacacccuugaagcuggccaauggaaccaaauauagaccuccugcaaaacuauuaaaggaaagggguuucuucggagcuauugcugguuucuuagaaggaggaugggaaggaaugauugcagguuggcacggauacacaucccauggggcacauggaguagcaguggcagcagaccuuaagaguacucaagaagccauaaacaagauaacaaaaaaucucaacucuuugagugagcuggaaguaaagaaucuucaaagacuaagcggugccauggaugaacuccacaacgaaauacuagaacuagacgagaaaguggaugaucucagagcugauacaauaagcucacaaauagaacucgcagucuugcuuuccaaugaaggaauaauaaacagugaagaugagcaucucuuggcgcuugaaagaaagcugaagaaaaugcugggccccucugcuguagagauagggaauggaugcuucgaaaccaaacacaagugcaaccagaccugucucgacagaauagcugcugguaccuuugaugcaggagaauuuucucuccccacuuuugauucacugaauauuacugcugcaucuuuaaaugacgauggauuggauaaucauacuauacugcuuuacuacucaacugcugccuccaguuuggcuguaacauugaugauagcuaucuuuguuguuuauauggucuccagagacaauguuucuugcuccaucugucuauaa

SEQ ID NO: 59134 - RNA, 1758 nt, Artificial Sequence
  derived and/or modified CDS sequence (wt) from hemagglutinin__InfluenzaB__AGX17270
augaaggcaauaauuguacuacucaugguaguaacauccaaugcagaucgaaucugcacugggauaacaucgucaaacucaccccauguggucaaaacugcuacucaaggggaggucaaugugacuggugugauaccacugacaacaacacccaccaaaucucauuuugcaaaucucaaaggaacaaaaaccagagggaaacuaugcccaaaaugccucaacugcacagaucuggacguggccuugggcagaccaaaaugcacggggaacauacccucggcaaaaguuucaauacuccaugaagucagaccuguuacaucugggugcuuuccuauaaugcacgacagaacaaaaauuagacagcugcccaaucuucucagaggauacgaacauaucagguuaucaacucauaacguuaucaaugcagaaaaggcaccaggaggacccuacaaaauuggaaccucagggucuugcccuaacguuaccaauggaaacggauuuuucgcaacaauggcuugggccgucccaaaaaacgacaacaacaaaacagcaacaaauucauuaacaauagaaguaccauacauuuguacagaaggagaagaccaaauuaccguuuggggguuccacucugauaacgaagcccaaauggcaaaacucuauggggacucaaagccccagaaguucaccucaucugccaacggagugaccacacauuacguuucacagauugguggcuucccaaaucaaacagaagacggaggacuaccacaaagugguagaauuguuguugauuacauggugcaaaaaucugggaaaacaggaacaauuaccuaucaaagagguauuuuauugccucaaaaaguguggugcgcaaguggcaggagcaagguaauaaaaggauccuugccuuuaauuggagaagcagauugccuccacgaaaaauacgguggauuaaacaaaagcaagccuuacuacacaggggaacaugcaaaggccauaggaaauugcccaauaugggugaaaacacccuugaagcuggccaauggaaccaaauauagaccuccugcaaaacuauuaaaggaaagggguuucuucggagcuauugcugguuucuuagaaggaggaugggaaggaaugauugcagguuggcacggauacacaucccauggggcacauggaguagcaguggcagcagaccuuaagaguacucaagaagccauaaacaagauaacaaaaaaucucaacucuuugagugagcuggaaguaaagaaucuucaaagacuaagcggugccauggaugaacuccacaacgaaauacuagaacuagacgagaaaguggaugaucucagagcugauacaauaagcucacaaauagaacucgcagucuugcuuucuaaugaaggaauaauaaacagugaagaugagcaucucuuggcgcuugaaagaaagcugaagaaaaugcugggccccucugcuguagagauagggaauggaugcuucgaaaccaaacacaagugcaaccagaccugucucgacagaauagcugcugguaccuuugaugcaggagaauuuucucuccccacuuuugauucacugaauauuacugcugcaucuuuaaaugacgauggauuggauaaucauacuauacugcuuuacuacucaacugcugccuccaguuuggcuguaacauugaugauagcuaucuuuguuguuuauauggucuccagagacaauguuucuugcuccaucugucuauaa

SEQ ID NO: 59135 - RNA, 1758 nt, Artificial Sequence
  derived and/or modified CDS sequence (wt) from hemagglutinin__InfluenzaB__AGX17281
augaaggcaauaauuguacuacucaugguaguaacauccaaugcagaucgaaucugcacugggauaacaucgucaaacucaccccauguggucaaaacugcuacucaaggggaggucaaugugacuggugugauaccacugacaacaacacccaccaaaucucauuuugcaaaucucaaaggaacaaaaaccagagggaaacuaugcccaaaaugccucaacugcacagaucuggacguggccuugggcagaccaaaaugcacggggaacauacccucggcaaaaguuucaauacuccaugaagucagaccuguuacaucugggugcuuuccuauaaugcacgacagaacaaaaauuagacagcugcccaaucuucucagaggauacgaacauaucagguuaucaacucauaacguuaucaaugcagaaaaggcaccuggaggacccuacaaaauuggaaccucagggucuugcccuaacguuaccaauggaaacggauuuuucgcaacaauggcuugggccgucccaaaaaacgacaacaacaaaacagcaacaaauucauuaacaauagaaguaccauacauuuguacagaaggagaagaccaaauuaccguuuggggguuccacucugauaacgaaacccaaauggcaaaacucuauggggacucaaagccccagaaguucaccucaucugccaacggagugaccacacauuacguuucacagauugguggcuucccaaaucaaacagaagacggaggacuaccacaaagugguagaauuguuguugauuacauggugcaaaaaucugggaaaacaggaacaauuaccuaucaaagagguauuuuauugccucaaaaaguguggugcgcaaguggcaggagcaagguaauaaaaggauccuugccuuuaauuggagaagcagauugccuccacgaaaaauacgguggauuaaacaaaagcaagccuuacuacacaggggaacaugcaaaggccauaggaaauugcccaauaugggugaaaacacccuugaagcuggccaauggaaccaaauauagaccuccugcaaaacuauuaaaggaaaggggcuucuucggagcuauugcugguuucuuagaaggaggaugggaaggaaugauugcagguuggcacggauacacaucccauggggcacauggaguagcaguggcagcagaccuuaagaguacucaagaagccauaaacaagauaacaaaaaaucucaacucuuugagugagcuggaaguaaagaaucuucaaagacuaagcggugccauggaugaacuccacaacgaaauacuagaacuagacgagaaaguggaugaucucagagcugauacaauaagcucacaaauagaacucgcagucuugcuuuccaaugaaggaauaauaaacagugaagaugagcaucucuuggcgcuugaaagaaagcugaagaaaaugcugggccccucugcuguagagauagggaauggaugcuucgaaaccaaacacaagugcaaccagaccugucucgacagaauagcugcugguaccuuugaugcaggagaauuuucucuccccacuuuugauucacugaauauuacugcugcaucuuuaaaugacgauggauuggauaaucauacuauacugcuuuauuacucaacugcugccuccaguuuggcuguaacauugaugauagcuaucuuuguuguuuauauggucuccagagacaauguuucuugcuccaucugucuauaa

SEQ ID NO: 59136 - RNA, 1758 nt, Artificial Sequence; identical to SEQ ID NO: 59135
  derived and/or modified CDS sequence (wt) from hemagglutinin__InfluenzaB__AGX17292

SEQ ID NO: 59137 - RNA, 1758 nt, Artificial Sequence
  derived and/or modified CDS sequence (wt) from hemagglutinin__InfluenzaB__AGX17303
augaaggcaauaauuguacuacucaugguaguaacauccaaugcagaucgaaucugcacugggauaacaucgucaaacucaccccauguggucaaaacugcuacucaaggggaggucaaugugacuggugugauaccacugacaacaacacccaccaaaucucauuuugcaaaucucaaaggaacaaaaaccagagggaaacuaugcccaaaaugccucaacugcacagaucuggacguggccuugggcagaccaaaaugcacggggaacauacccucggcaaaaguuucaauacuccaugaagucagaccuguuacaucugggugcuuuccuauaaugcacgacagaacaaaaauuagacagcugcccaaucuucucagaggauacgaacauaucagguuaucaacucauaacguuaucaaugcagaaaaggcaccaggaggacccuacaaaauuggaaccucagggucuugcccuaacguuaccaauggaaacggauuuuuugcaacaauggcuugggccgucccaaaaaacgacaacaacaaaacagcaacaaauucauuaacaauagaaguaccauacauuuguacagaaggagaagaccaaauuaccguuuggggguuccacucugauaacgaaacccaaauggcaaaacucuauggggacucaaagccccagaaguucaccucaucugccaacggaguuaccacacauuacguuucacagauugguggcuucccaaaucaaacagaagacggaggacuaccacaaagugguagaauuguuguugauuacauggugcaaaaaucugggaaaacaggaacaauuaccuaucaaagagguauuuuauugccucaaaaaguguggugcgcaaguggcaggagcaagguaauaaaaggauccuugccuuuaauuggagaagcagauugccuccacgaaaaauacgguggauuaaacaaaagcaagccuuacuacacaggggaacaugcaaaggccauaggaaauugcccaauaugggugaaaacacccuugaagcuggccaauggaaccaaauauagaccuccugcaaaacuauuaaaggaaaggggcuucuucggagcuauugcugguuucuuagaaggaggaugggaaggaaugauugcagguuggcacggauacacaucccauggggcacauggaguagcaguggcagcagaccuuaagaguacucaagaagccauaaacaagauaacaaaaaaucucaacucuuugagugagcuggaaguaaagaaucuucaaagacuaagcggugccauggaugaacuccacaacgaaauacuagaacuagacgagaaaguggaugaucucagagcugauacaauaagcucacaaauagaacucgcagucuugcuuuccaaugaaggaauaauaaacagugaagaugagcaucucuuggcgcuugaaagaaaacugaagaaaaugcugggccccucugcuguagagauagggaauggaugcuucgaaaccaaacacaagugcaaccagaccugucucgacagaauagcugcugguaccuuugaugcaggagaauuuucucuccccacuuuugauucacugaauauuacugcugcaucuuuaaaugacgauggauuggauaaucauacuauacugcuuuauuacucaacugcugccuccaguuuggcuguaacauugaugauagcuaucuuuguuguuuauauggucuccagagacaauguuucuugcuccaucugucuauaa

SEQ ID NO: 59138 - RNA, 1758 nt, Artificial Sequence; identical to SEQ ID NO: 59117
  derived and/or modified CDS sequence (wt) from hemagglutinin__InfluenzaB__AGX17314

SEQ ID NO: 59139 - RNA, 1758 nt, Artificial Sequence; identical to SEQ ID NO: 59071
  derived and/or modified CDS sequence (wt) from hemagglutinin__InfluenzaB__AGX17325

SEQ ID NO: 59140 - RNA, 1758 nt, Artificial Sequence; identical to SEQ ID NO: 59102
  derived and/or modified CDS sequence (wt) from hemagglutinin__InfluenzaB__AGX17336

SEQ ID NO: 59141 - RNA, 1758 nt, Artificial Sequence; identical to SEQ ID NO: 59113
  derived and/or modified CDS sequence (wt) from hemagglutinin__InfluenzaB__AGX17347

SEQ ID NO: 59142 - RNA, 1758 nt, Artificial Sequence
  derived and/or modified CDS sequence (wt) from hemagglutinin__InfluenzaB__AGX17358
augaaggcaauaauuguacuacucaugguaguaacauccaaugcagaucgaaucugcacugggauaacaucgucaaacucaccccauguggucaaaacugcuacucaaggggaggucaaugugacuggugugauaccacugacaacaacacccaccaaaucucauuuugcaaaucucaaaggaacaaaaaccagagggaaacuaugcccaaaaugccucaacugcacagaucuggacguggccuugggcagaccaaaaugcacggggaacauacccucggcaaaaguuucaauacuccaugaagucagaccuguuacaucugggugcuuuccuauaaugcacgacagaacaaaaauuagacagcugcccaaucuucucagaggauacgaacauaucagguuaucaacucauaacguuaucaaugcagaaaaggcaccaggaggacccuacaaaauuggaaccucagggucuugcccuaacguuaccaauggaaacggauuuuucgcaacaauggcuugggccgucccaaaaaacgacaacaacaaaacagcaacaaauucauuaacaauagaaguaccauacauuuguacagaaggagaagaccaaauuaccguuuggggguuccacucugauaacgaaacccaaauggcaaaacucuauggggacucaaagccccagaaguucaccucaucugccaacggagugaccacacauuacguuucacagauugguggcuucccaaaucaaacagaagacggaggacuaccacaaagugguagaauuguuguugauuacauggugcaaaaaucugggaaaacaggaacaauuaccuaucaaagagguauuuuauugccucaaaaaguguggugcgcaaguggcaggagcaagguaauaaaaggauccuugccuuuaauuggagaagcagauugccuccacgaaaaauacgguggauuaaacaaaagcaagccuuacuacacaggggaacaugcaaaggccauaggaaauugcccaauaugggugaaaacacccuugaagcuggccaauggaaccaaauauagaccuccugcaaaacuauuaaaggaaagggguuucuucggagcuauugcugguuucuuagaaggaggaugggaaggaaugauugcagguuggcacggauacacaucccauggggcacauggaguagcaguggcagcagaccuuaagaguacucaagaagccauaaacaagauaacaaaaaaucucaacucuuugagugagcuggaaguaaagaaucuucaaagacuaagcggugcuauggaugaacuccacaacgaaauacuagaacuagacgagaaaguggaugaucucagagcugauacaauaagcucacaaauagaacucgcagucuugcuuuccaaugaaggaauaauaaacagugaagaugagcaucucuuggcgcuugaaagaaagcugaagaaaaugcugggccccucugcuguagagauagggaauggaugcuucgaaaccaaacacaagugcaaccagaccugucucgacagaauagcugcugguaccuuugaugcaggagaauuuucucuccccacuuuugauucacugaauauuacugcugcaucuuuaaaugacgauggauuggauaaucauacuauacugcuuuacuacucaacugcugccuccaguuuggcuguaacauugaugauagcuaucuuuguuguuuauauggucuccagagacaauguuucuugcuccaucugucuauaa

SEQ ID NO: 59143 - RNA, 1758 nt, Artificial Sequence
  derived and/or modified CDS sequence (wt) from hemagglutinin__InfluenzaB__AGX17369
augaaggcaauaauuguacuacucaugguaguaacauccaaugcagaucgaaucugcacugggauaacaucgucaaacucaccccauguggucaaaacugcuacucaaggggaggucaaugugacuggugugauaccacugacaacaacacccaccaaaucucauuuugcaaaucucaaaggaacaaaaaccagagggaaacuaugcccaaaaugccucaacugcacagaucuggacguggccuugggcagaccaaaaugcacggggaacauacccucggcaaaaguuucaauacuccaugaagucagaccuguuacaucugggugcuuuccuauaaugcacgacagaacaaaaauuagacagcugcccaaccuucucagaggauacgaacauaucagguuaucaacucauaacguuaucaaugcagaaaaggcaccaggaggacccuacaaaauuggaaccucaggaucuugcccuaacguuaccaauggaaacggauuuuucgcaacaauggcuugggccgucccaaaaaacgacaacaacaaaacagcaacaaauucauuaacaauagaaguaccauacauuuguacagaaggagaagaccaaauuaccguuuggggguuccacucugauaacgaaacccaaauggcaaaacucuauggggacucaaagccccagaaguucaccucaucugccaacggagugaccacacauuacguuucacagauugguggcuucccaaaucaaacagaagacggaggacuaccacaaagugguagaauuguugcugauuacauggugcaaaaaucugggaaaacaggaacaauuaccuaucaaagagguauuuuauugccucaaaaaguguggugcgcaaguggcaggagcaagguaauaaaaggauccuugccuuuaauuggagaagcagauugccuccacgaaaaauacgguggauuaaacaaaagcaagccuuacuacacaggggaacaugcaaaggccauaggaaauugcccaauaugggugaaaacacccuugaagcuggccaauggaaccaaauauagaccuccugcaaaacuauuaaaggaaagggguuucuucggagcuauugcugguuucuuagaaggaggaugggaaggaaugauugcagguuggcacggauacacaucccauggggcacauggaguagcaguggcagcagaccuuaagagcacucaagaagccauaaacaagauaacaaaaaaucucaacucuuugagugagcuggaaguaaagaaucuucaaagacuaagcggugccauggaugaacuccacaacgaaauacuagaacuagacgagaaaguggaugaucucagagcugauacaauaagcucacaaauagaacucgcaguccugcuuuccaaugaaggaauaauaaacagugaagaugagcaucucuuggcgcuugaaagaaagcugaagaaaaugcugggccccucugcuguagagauagggaauggaugcuucgaaaccaaacacaagugcaaccagaccugucucgacagaauagcugcugguaccuuugaugcaggagaauuuucucuccccacuuuugauucacugaauauuacugcugcaucuuuaaaugacgauggauuggauaaucauacuauacugcuuuacuacucaacugcugccuccaguuuggcuguaacauugaugauagcuaucuuuguuguuuauauggucuccagagacaauguuucuugcuccaucugucuauaa

SEQ ID NO: 59144 - RNA, 1758 nt, Artificial Sequence; identical to SEQ ID NO: 59117
  derived and/or modified CDS sequence (wt) from hemagglutinin__InfluenzaB__AGX17380

SEQ ID NO: 59145 - RNA, 1758 nt, Artificial Sequence; identical to SEQ ID NO: 58991
  derived and/or modified CDS sequence (wt) from hemagglutinin__InfluenzaB__AGX17391

SEQ ID NO: 59146 - RNA, 1758 nt, Artificial Sequence
  derived and/or modified CDS sequence (wt) from hemagglutinin__InfluenzaB__AGX17400
augaaggcaauaauuguacuacucaugguaguaacauccaaugcagaucgaaucugcacugggauaacaucgucaaacucaccccauauggucaaaacugcuacucaaggggaggucaaugugacuggugugauaccacugacaacaacacccaccaaaucucauuuugcaaaucucaaaggaacaaaaaccagagggaaacuaugcccaaaaugccucaacugcacagaucuggacguggccuugggcagaccaaaaugcacggggaacauacccucggcaaaaguuucaauacuccaugaagucagaccuguuacaucugggugcuuuccuauaaugcacgacagaacaaaaauuagacagcugcccaaucuucucagaggauacgaacauaucagguuaucaacucauaacguuaucaaugcagaaaaggcaccaggaggacccuacaaaauuggaaccucagggucuugcccuaacguuaccaauggaaacggauuuuucgcaacaauggcuugggccgucccaaaaaacgacaacaacaaaacagcaacaaauucauuaacaauagaaguaccauacauuuguacagaaggagaagaccaaauuaccguuuggggguuccacucugauaacgaaacccaaauggcaaaacucuauggggacucaaagccccagaaguucaccucaucugccaacggagugaccacacauuacguuucacagauugguggcuucccaaaucaaacagaagacggaggacuaccacaaagugguagaauuguuguugauuacauggugcaaaaaucugggaaaacaggaacaauuaccuaucaaagagguauuuuauugccucaaaaaguguggugcgcaaguggcaggagcaagguaauaaaaggauccuugccuuuaauuggagaagcagauugccuccacgaaaaauacgguggauuaaacaaaagcaagccuuacuacacaggggaacaugcaaaggccauaggaaauugcccaauaugggugaaaacacccuugaagcuggccaauggaaccaaauauagaccuccugcaaaacuauuaaaggaaagagguuucuucggagcuauugcugguuucuuagaaggaggaugggaaggaaugauugcagguuggcacggauacacaucccauggggcacauggaguagcaguggcagcagaccuuaagaguacucaagaagccauaaacaagauaacaaaaaaucucaacucuuugagugagcuggaaguaaagaaucuucaaagacuaagcggugccauggaugaacuccacaacgaaauacuagaacuagacgagaaaguggaugaucucagagcugauacaauaagcucacaaauagaacucgcagucuugcuuuccaaugaaggaauaauaaacagugaagaugagcaucucuuggcgcuugaaagaaagcugaagaaaaugcugggccccucugcuguagagauagggaauggaugcuucgaaaccaaacacaagugcaaccagaccugucucgacagaauagcugcugguaccuuugaugcaggagaauuuucucuccccacuuuugauucacugaauauuacugcugcaucuuuaaaugacgauggauuggauaaucauacuauacugcuuuacuacucaacugcugccuccaguuuggcuguaacauugaugauagcuaucuuuguuguuuauauggucuccagagacaauguuucuugcuccaucugucuauaa

SEQ ID NO: 59147 - RNA, 1758 nt, Artificial Sequence
  derived and/or modified CDS sequence (wt) from hemagglutinin__InfluenzaB__AGX17411
augaaggcaauaauuguacuacucaugguaguaacauccaaugcagaucgaaucugcacugggauaacaucgucaaacucaccccauguggucaaaacugcuacucaaggggaggucaaugugacuggugugauaccacuaacaacaacacccaccaaaucucauuuugcaaaucucaaaggaacaaaaaccagagggaaacuaugcccaaaaugccucaacugcacagaucuggacguggccuugggcagaccaaaaugcacggggaacauacccucggcaaaaguuucaauacuccaugaagucagaccuguuacaucugggugcuuuccuauaaugcacgacagaacaaaaauuagacagcugcccaaucuucucagaggauacgaacauaucagguuaucaacucauaacguuaucaaugcagaaaaggcaccaggaggacccuacaaaauuggaaccucagggucuugcccuaacguuaccaauggaaacggauuuuucgcaacaauggcuugggccgucccaaaaaacgacaacaacaaaacagcaacaaauucauuaacaauagaaguaccauacauuuguacagaaggagaagaccaaauuaccguuuggggguuccacucugauaacgaaacccaaauggcaaaacucuauggggacucaaagccccagaaguucaccucaucugccaacggagugaccacacauuacguuucacagauugguggcuucccaaaucaaacagaagacggaggacuaccacaaagugguagaauuguuguugauuacauggugcaaaaaucugggaaaacaggaacaauuaccuaucaaagagguauuuuauugccucaaaaaguguggugcgcaaguggcaggagcaagguaauaaaaggauccuugccuuuaauuggagaagcagauugccuccacgaaaaauacgguggauuaaacaaaagcaagccuuacuacacaggggaacaugcaaaggccauaggaaauugcccaauaugggugaaaacacccuugaagcuggccaauggaaccaaauauagaccuccugcaaaacuauuaaaggaaagggguuucuucggagcuauugcugguuucuuagaaggaggaugggaaggaaugauugcagguuggcacggauacacaucccauggggcacauggaguagcaguggcagcagaccuuaagaguacucaagaagccauaaacaagauaacaaaaaaucucaacucuuugagugagcuggaaguaaagaaucuucaaagacuaagcggugccauggaugaacuccacaacgaaauacuagaacuagacgagaaaguggaugaucucagagcugauacaauaagcucacaaauagaacucgcagucuugcuuuccaaugaaggaauaauaaacagugaagaugagcaucucuuggcgcuugaaagaaagcugaagaaaaugcugggccccucugcuguagagauagggaauggaugcuucgaaaccaaacacaagugcaaccagaccugucucgacagaauagcugcugguaccuuugaugcaggagaauuuucucuccccacuuuugauucacugaauauuacugcugcaucuuuaaaugacgauggauuggauaaucauacuauacugcuuuacuacucaacugcugccuccaguuuggcuguaacauugaugauagcuaucuuuguuguuuauauggucuccagagacaauguuucuugcuccaucugucuauaa

SEQ ID NO: 59148 - RNA, 1758 nt, Artificial Sequence
  derived and/or modified CDS sequence (wt) from hemagglutinin__InfluenzaB__AGX17422
augaaagcaauaauuguacuacucaugguaguaacauccaaugcagaucgaaucugcacugggauaacaucgucaaacucaccccauguggucaaaacugcuacucaaggggaggucaaugugacuggugugauaccacugacaacaacacccaccaaaucucauuuugcaaaucucaaaggaacaaaaaccagagggaaacuaugcccaaaaugccucaacugcacagaucuggacguggccuugggcagaccaaaaugcacggggaacauacccucggcaaaaguuucaauacuccaugaagucagaccuguuacaucugggugcuuuccuauaaugcacgacagaacaaaaauuagacagcugcccaaucuucucagaggauacgaacauaucagguuaucaacucauaacguuaucaaugcagaaaaggcaccaggaggacccuacaaaauuggaaccucagggucuugcccuaacguuaccaauggaaacggauuuuucgcaacaauggcuugggccgucccaaaaaacgacaacaacaaaacagcaacaaauucauuaacaauagaaguaccauacauuuguacagaaggagaagaccaaauuaccguuuggggguuccacucugauaacgaaacccaaauggcaaaacucuauggggacucaaagccccagaaguucaccucaucugccaacggagugaccacacauuacguuucacagauugguggcuucccaaaucaaacagaagacggaggacuaccacaaagugguagaauuguuguugauuacauggugcaaaaaucugggaaaacaggaacaauuaccuaucaaagagguauuuuauugccucaaaaaguguggugcgcaaguggcaggagcaagguaauaaaaggauccuugccuuuaauuggagaagcagauugccuccacgaaaaauacgguggauuaaacaaaagcaagccuuacuacacaggggaacaugcaaaggccauaggaaauugcccaauaugggugaaaacacccuugaagcuggccaauggaaccaaauauagaccuccugcaaaacuauuaaaggaaagagguuucuucggagcuauugcugguuucuuagaaggaggaugggaaggaaugauugcagguuggcacggauacacaucccauggggcacauggaguagcaguggcagcagaccuuaagaguacucaagaagccauaaacaagauaacaaaaaaucucaacucuuugagugagcuggaaguaaagaaucuucaaagacuaagcggugccauggaugaacuccacaacgaaauacuagaacuagacgagaaaguggaugaucucagagcugauacaauaagcucacaaauagaacucgcagucuugcuuuccaaugaaggaauaauaaacagugaagaugagcaucucuuggcgcuugaaagaaagcugaagaaaaugcugggccccucugcuguagagauagggaauggaugcuucgaaaccaaacacaagugcaaccagaccugucucgacagaauagcugcugguaccuuugaugcaggagaauuuucucuccccacuuuugauucacugaauauuacugcugcaucuuuaaaugacgauggauuggauaaucauacuauacugcuuuacuacucaacugcugccuccaguuuggcuguaacauugaugauagcuaucuuuguuguuuauauggucuccagagacaauguuucuugcuccaucugucuauaa

SEQ ID NO: 59149 - RNA, 1758 nt, Artificial Sequence
  derived and/or modified CDS sequence (wt) from hemagglutinin__InfluenzaB__AGX17433
augaaggcaauaauuguacuacucaugguaguaacauccaaugcagaucgaaucugcacugggauaacaucgucaaacucaccccauguggucaaaacugcuacucaaggggaggucaaugugacuggugugauaccacugacaacaacacccaccaaaucucauuuugcaaaucucaaaggaacaaaaaccagggggaaacuaugcccaaaaugccucaacugcacagaucuggacguggccuugggcagaccgaaaugcacggggaacauacccucggcaaaaguuucaauacuccaugaagucagaccuguuacaucugggugcuuuccuauaaugcacgacagaacaaaaauuagacagcugcccaaucuucucagaggauacgaacauaucagguuaucaacucauaacguuaucaaugcagaaaaggcaccaggaggacccuacaaaauuggaaccucagggucuugcccuaacguuaccaauggaaacggauuuuucgcaacaauggcuugggccgucccaaaaaacgacaacaacaaaacagcaacaaauucauuaacaauagaaguaccauacauuuguacagaaggagaagaccaaauuaccguuuggggguuccacucugauaaagaaacccaaauggcaaaacucuauggggacucaaagccccagaaguucaccucaucugccaacggagugaccacacauuacguuucacagauugguggcuucccaaaucaaacagaagacggaggacuaccacaaagugguagaauuguuguugauuacauggugcaaaaaucugggaaaacaggaacaauuaccuaucaaagagguauuuuauugccucaaaaaguguggugcgcaagugguaggagcaagguaauaaaaggauccuugccuuuaauuggagaagcagauugccuccacgaaaaauacgguggauuaaacaaaagcaagccuuacuacacaggggaacaugcaaaggccauaggaaauugcccaauaugggugaaaacacccuugaagcuggccaauggaaccaaauauagaccuccugcaaaacuauuaaaggaaagggguuucuucggagcuauugcugguuucuuagaaggaggaugggaaggaaugauugcagguuggcacggauacacaucccauggggcacauggaguagcaguggcagcagaccuuaagaguacucaagaagccauaaacaagauaacaaaaaaucucaacucuuugagugagcuggaaguaaagaaucuucaaagacuaagcggugccauggaugaacuccacaacgaaauacuagaacuagacgagaaaguggaugaucucagagcugauacaauaagcucacaaauagaacucgcagucuugcuuuccaaugaaggaauaauaaacagugaagaugagcaucucuuggcgcuugaaagaaagcugaagaaaaugcugggccccucugcuguagagauagggaauggaugcuucgaaaccaaacacaagugcaaccagaccugucucgacagaauagcugcugguaccuuugaugcaggagaauuuucucuccccacuuuugauucacugaauauuacugcugcaucuuuaaaugacgauggauuggauaaucauacuauacugcuuuacuacucaacugcugccuccaguuuggcuguaacauugaugauagcuaucuuuguuguuuauauggucuccagagacaauguuucuugcuccaucugucuauaa

SEQ ID NO: 59150 - RNA, 1758 nt, Artificial Sequence; identical to SEQ ID NO: 59113
  derived and/or modified CDS sequence (wt) from hemagglutinin__InfluenzaB__AGX17444

SEQ ID NO: 59151 - RNA, 1758 nt, Artificial Sequence
  derived and/or modified CDS sequence (wt) from hemagglutinin__InfluenzaB__AGX17455
augaaggcaauaauuguacuacucaugguaguaacauccaaugcagaucgaaucugcacugggauaacaucgucaaacucaccccauguggucaaaacugcuacucaaggggaggucaaugugacuggugugauaccacuaacaacaacacccaccaaaucucauuuugcaaaucucaaaggaacaaaaaccagagggaaacuaugcccaaaaugccucaacugcacagaucuggacguggccuugggcagaccaaaaugcacggggaacauacccucggcaaaaguuucaauacuccaugaagucagaccuguuacaucugggugcuuuccuauaaugcacgacagaacaaaaauuagacagcugcccaaucuucucagaggauacgaacauaucagguuaucaacucauaacguuaucaaugcagaaaaggcaccaggaggacccuacaaaauuggaaccucagggucuugcccuaacguuaccaauggaaacggauuuuucgcaacaauggcuugggccgucccaaaaaacgacaacaacaaaacagcaacaaauucauuaacaauagaaguaccauacauuuguacagaaggagaagaccaaauuaccguuuggggguuccacucggauaaagaaacccaaauggcaaaacucuauggggacucaaagccccagaaguucaccucaucugccaacggagugaccacacauuacguuucacagauugguggcuucccaaaucaaacagaagacggaggacuaccacaaagugguagaauuguuguugauuacauggugcaaaaaucugggaaaacaggaacaauuaccuaucaaagagguauuuuauugccucaaaaaguguggugcgcaaguggcaggagcaagguaauaaaaggauccuugccuuuaauuggagaagcagauugccuccacgaaaaauacgguggauuaaacaaaagcaagccuuacuacacaggggaacaugcaaaggccauaggaaauugcccaauaugggugaaaacacccuugaagcuggccaauggaaccaaauauagaccuccugcaaaacuauuaaaggaaagggguuucuucggagcuauugcugguuucuuagaaggaggaugggaaggaaugauugcagguuggcacggauacacaucccauggggcacauggaguagcaguggcagcagaccuuaagaguacucaagaagccauaaacaagauaacaaaaaaucucaacucuuugagugagcuggaaguaaagaaucuucaaagacuaagcggugccauggaugaacuccacaacgaaauacuagaacuagacgagaaaguggaugaucucagagcugauacaauaagcucacaaauagaacucgcagucuugcuuuccaaugaaggaauaauaaacagugaagaugagcaucucuuggcgcuugaaagaaagcugaagaaaaugcugggccccucugcuguagagauagggaauggaugcuucgaaaccaaacacaagugcaaccagaccugucucgacagaauagcugcugguaccuuugaugcaggagaauuuucucuccccacuuuugauucacugaauauuacugcugcaucuuuaaaugacgauggauuggauaaucauacuauacugcuuuacuacucaacugcugccuccaguuuggcuguaacauugaugauagcuaucuuuguuguuuauauggucuccagagacaauguuucuugcuccaucugucuauaa

SEQ ID NO: 59152 - RNA, 1758 nt, Artificial Sequence; identical to SEQ ID NO: 59117
  derived and/or modified CDS sequence (wt) from hemagglutinin__InfluenzaB__AGX17466

SEQ ID NO: 59153 - RNA, 1758 nt, Artificial Sequence
  derived and/or modified CDS sequence (wt) from hemagglutinin__InfluenzaB__AGX17477
augaaggcaauaauuguacuacucaugguaguaacauccaaugcagaucgaaucugcacugggauaacaucgucaaacucaccccauguggucaaaacugcuacucaaggggaggucaaugugacuggugugauaccacugacaacaacacccaccaaaucucauuuugcaaaucucaaaggaacaaaaaccagaggaaaacuaugcccaaaaugccucaacugcacagaucuggacguggccuugggcagaccaaaaugcacggggaacauacccucggcaaaaguuucaauacuccaugaagucagaccuguuacaucugggugcuuuccuauaaugcacgacagaacaaaaauuagacagcugcccaaucuucucagaggauacgaacauaucagguuaucaacucauaacguuaucaaugcagaaaaggcaccaggaggacccuacaaaauuggaaccucagggucuugcccuaacguuaccaauggaaacggauuuuucgcaacaauggcuugggccgucccaaaaaacgacaacaacaaaacagcaacaaauucauuaacaauagaaguaccauacauuuguacagaaggagaagaccaaauuaccguuuggggauuccacucugauaacgaaacccaaauggcaaaacucuauggggacucaaagccccagaaguucaccucaucugccaacggagugaccacacauuacguuucacagauugguggcuucccaaaucaaacagaagacggaggacuaccacaaagugguagaauuguuguugauuacauggugcaaaaaucugggaaaacaggaacaauuaccuaucaaagagguauuuuauugccucaaaaaguguggugcgcaaguggcaggagcaagguaauaaaaggauccuugccuuuaauuggagaagcagauugccuccacgaaaaauacgguggauuaaacaaaagcaagccuuacuacacaggggaacaugcaaaggccauaggaaauugcccaauaugggugaaaacacccuugaagcuggccaauggaaccaaauauagaccuccugcaaaacuauuaaaggaaagggguuucuucggagcuauugcugguuucuuagagggaggaugggaaggaaugauugcagguuggcacggauacacaucccauggggcacauggaguagcaguggcagcagaccuuaagaguacucaagaagccauaaacaagauaacaaaaaaucucaacucuuugagugagcuggaaguaaagaaucuucaaagacuaagcggugccauggaugaacuccacaacgaaauacuagaacuagacgagaaaguggaugaucucagagcugauacaauaagcucacaaauagaacucgcagucuugcuuuccaaugaaggaauaauaaacagugaagaugagcaucucuuggcgcuugaaagaaagcugaagaaaaugcugggccccucugcuguagagauagggaauggaugcuucgaaaccaaacacaagugcaaccagaccugucucgacagaauagcugcugguaccuuugaugcaggagaauuuucucuccccacuuuugauucacugaauauuacugcugcaucuuuaaaugacgauggauuggauaaucauacuauacugcuuuacuacucaacugcugccuccaguuuggcuguaacauugaugauagcuaucuuuguuguuuauauggucuccagagacaauguuucuugcuccaucugucuauaa

SEQ ID NO: 59154 - RNA, 1758 nt, Artificial Sequence
  derived and/or modified CDS sequence (wt) from hemagglutinin__InfluenzaB__AGX17488
augaaggcaauaauuguacuacucaugguaguaacauccaaugcagaucgaaucugcacugggauaacaucgucaaacucaccccauguggucaaaacugcuacucaaggggaggucaaugugacuggugugauaccacugacaacaacacccaccaaaucucauuuugcaaaucucaaaggaacaaaaaccagagggaaacuaugcccaaaaugccucaacugcacagaucuggacguggccuugggcagaccaaaaugcacggggaacauacccucggcaaaaguuucaauacuccaugaagucagaccuguuacaucugggugcuuuccuauaaugcacgacagaacaaaaauuagacagcugcccaaucuucucagaggauaugaacauaucagguuaucaacucauaacguuaucaaugcagaaaaggcaccaggaggacccuacaaaauuggaaccucagggucuugcccuaacguuaccaauggaaacggauuuuucgcaacaauggcuugggccgucccaaaaaacgacaacaacaaaacagcaacaaauucauuaacaauagaaguaccauacauuuguacagaaggagaagaccaaauuaccguuuggggguuccacucugauaacgaaauccaaauggcaaaacucuauggggacucaaagccccagaaguucaccucaucugccaacggagugaccacacauuacgugucacagauugguggcuucccaaaucaaacagaagacggaggacuaccacaaagugguagaauuguuguugauuacauggugcaaaaaucugggaaaacaggaacaauuaccuaucaaagagguauuuuauugccucaaaaaguguggugcgcaaguggcaggagcaagguaauaaaaggauccuugccuuuaauuggagaagcagauugccuccacgaaaaauacgguggauuaaacaaaagcaagccuuacuacacaggggaacaugcaaaggccauaggaaauugcccaauaugggugaaaacacccuugaagcuggccaauggaaccaaauauagaccuccugcaaaacuauuaaaggaaaggggcuucuucggagcuauugcugguuucuuagaaggaggaugggaaggaaugauugcagguuggcacggauacacaucccauggggcacauggaguagcaguggcagcagaccuuaagaguacucaagaagccauaaacaagauaacaaaaaaucucaacucuuugagugagcuggaaguaaagaaucuucaaagacuaagcggugccauggaugaacuccacaacgaaauacuagaacuagacgagaaaguggaugaucucagagcugauacaauaagcucacaaauagaacucgcagucuugcuuuccaaugaaggaauaauaaacagugaagaugagcaucucuuggcgcuugaaagaaagcugaagaaaaugcugggccccucugcuguagagauagggaauggaugcuucgaaaccaaacacaagugcaaccagaccugucucgacagaauagcugcugguaccuuugaugcaggagaauuuucucuccccacuuuugauucacugaauauuacugcugcaucuuuaaaugacgauggauuggauaaucauacuauacugcuuuauuacucaacugcugccuccaguuuggcuguaacauugaugauagcuaucuuuguuguuuauauggucuccagagacaauguuucuugcuccaucugucuauaa

SEQ ID NO: 59155 - RNA, 1758 nt, Artificial Sequence
  derived and/or modified CDS sequence (wt) from hemagglutinin__InfluenzaB__AGX17499
augaaggcaauaauuguacuacucaugguaguaacauccaaugcagaucgaaucugcacugggauaacaucgucaaacucaccccauguggucaaaacugcuacucaaggggaggucaaugugacuggugugauaccacugacaacaacacccaccaaaucucauuuugcaaaucucaaaggaacaaaaaccagagggaaacuaugcccaaaaugccucaacugcacagaucuggacguggccuugggcagaccaaaaugcacggggaacauacccucggcaaaaguuucaauacuccaugaagucagaccuguuacaucugggugcuuuccuauaaugcacgacagaacaaaaaucagacagcugcccaaucuucucagaggauacgaacauaucagguuaucaacucauaacguuaucaaugcagaaaaggcaccaggaggacccuacaaaauuggaaccucagggucuugcccuaacguuaccaauggaaacggauuuuucgcaacaauggcuugggccgucccaaaaaacgacaacaacaaaacagcaacaaauucauuaacaauagaaguaccauacauuuguacagaaggagaagaccaaauuaccguuuggggguuccacucugauaacgaaacccaaauggcaaaacucuauggggacucaaagccccagaaguucaccucaucugccaacggagugaccacacauuacguuucacagauugguggcuucccaaaucaaacagaagacggaggacuaccacaaagugguagaauuguuguugauuacauggugcaaaaaucugggaaaacaggaacaauuaccuaucaaagagguauuuuauugccucaaaaaguguggugcgcaaguggcaggagcaagguaauaaaaggauccuugccuuuaauuggagaagcagauugccuccacgaaaaauacgguggauuaaacaaaagcaagccuuacuacacaggggaacaugcaaaggccauaggaaauugcccaauaugggugaaaacacccuugaagcuggccaauggaaccaaauauagaccuccugcaaaacuauuaaaggaaagggguuucuucggagcuauugcugguuucuuagaaggaggaugggaaggaaugauugcagguuggcacggauacacaucccauggggcacauggaguagcaguggcagcagaccuuaagaguacucaagaagccauaaacaagauaacaaaaaaucucaacucuuugagugagcuggaaguaaagaaucuucaaagacuaagcggugccauggaugaacuccacaacgaaauacuagaacuagacgagaaaguggaugaucucagagcugauacaauaagcucacaaauagaacucgcagucuugcuuuccaaugaaggaauaauaaacagugaagaugagcaucucuuggcgcuugaaagaaagcugaagaaaaugcugggccccucugcuguagagauagggaauggaugcuucgaaaccaaacacaagugcaaccagaccugucucgacagaauagcugcugguaccuuugaugcaggggaauuuucucuccccacuuuugauucacugaauauuacugcugcaucuuuaaaugacgauggauuggauaaucauacuauacugcuuuacuacucaacugcugccuccaguuuggcuguaacauugaugauagcuaucuuuguuguuuauauggucuccagagacaauguuucuugcuccaucugucuauag

SEQ ID NO: 59156 - RNA, 1758 nt, Artificial Sequence
  derived and/or modified CDS sequence (wt) from hemagglutinin__InfluenzaB__AGX17510
augaaggcaauaauuguacuacucaugguaguaacauccaaugcagaucgaaucugcacugggauaacaucgucaaacucaccccauguggucaaaacugcuacucaaggggaggucaaugugacuggugugauaccacugacaacaacacccaccgaaucucauuuugcaaaucucaaaggaacaaaaaccagagggaaacuaugcccaaaaugccucaacugcacagaucuggacguggccuugggcagaccaaaaugcacggggaacauacccucggcaaaaguuucaauacuccaugaagucagaccuguuacaucugggugcuuuccuauaaugcacgacagaacaaaaauuagacagcugcccaaucuucucagaggauacgaacauaucagguuaucaacucauaacguuaucaaugcagaaaaggcaccaggaggacccuacaaaauuggaaccucagggucuugcccuaacguuaccaauggaaacggauuuuucgcaacaauggcuugggccgucccaaaaaacgacaacaacaaaacagcaacaaauucauuaacaauagaaguaccauacauuuguacagaaggagaagaccaaauuaccguuuggggguuccacucugauaacgaaacccaaauggcaaaacucuauggggacucaaagccccagaaguucaccucaucugccaacggagugaccacacauuacguuucacagauugguggcuucccaaaucaaacagaagacggaggacuaccacaaagugguagaauuguuguugauuacauggugcaaaaaucugggaacacaggaacaauuaccuaucaaagagguauuuuauugccucaaaaaguguggugcgcaaguggcaggagcaagguaauaaaaggauccuugccuuuaauuggagaagcagauugccuccacgaaaaauacgguggauuaaacaaaagcaagccuuacuacacaggggaacaugcaaaggccauaggaaauugcccaauaugggugaaaacacccuugaagcuggccaauggaaccaaauauagaccuccugcaaaacuauuaaaggaaagggguuucuucggagcuauugcugguuucuuagaaggaggaugggaaggaaugauugcagguuggcacggauacacaucccauggggcacauggaguagcaguggcagcagaccuuaagaguacucaagaagccauaaacaagauaacaaaaaaucucaacucuuugagugagcuagaaguaaagaaucuucaaagacuaagcggugccauggaugaacuccacaacgaaauacuagaacuagacgagaaaguggaugaucucagagcugauacaauaagcucacaaauagaacucgcagucuugcuuuccaaugaaggaauaauaaacagugaagaugagcaucucuuggcgcuugaaagaaagcugaagaaaaugcugggccccucugcuguagagauagggaauggaugcuucgaaaccaaacacaagugcaaccagaccugucucgacagaauagcugcugguaccuuugaugcaggagaauuuucucuccccacuuuugauucacugaauauuacugcugcaucuuuaaaugacgauggauuggauaaucauacuauacugcuuuacuacucaacugcugccuccaguuuggcuguaacauugaugauagcuaucuuuguuguuuauauggucuccagagacaauguuucuugcuccaucugucuauaa

SEQ ID NO: 59157 - RNA, 1758 nt, Artificial Sequence; identical to SEQ ID NO: 59117
  derived and/or modified CDS sequence (wt) from hemagglutinin__InfluenzaB__AGX17521

SEQ ID NO: 59158 - RNA, 1758 nt, Artificial Sequence
  derived and/or modified CDS sequence (wt) from hemagglutinin__InfluenzaB__AGX17532
augaaggcaauaauuguacuacucaugguaguaacauccaaugcagaucgaaucugcacugggauaacaucgucaaacucaccccauguggucaaaacugcuacucaaggggaggucaaugugacuggugugauaccacugacaacaacacccaccaaaucucauuuugcaaaucucaaaggaacaaaaaccagagggaaacuaugcccaaaaugccucaacugcacagaucuggacguggccuugggcagaccaaaaugcacggggaacauacccucggcaaaaguuucaauacuccaugaagucagaccuguuacaucugggugcuuuccuauaaugcacgacagaacaaaaauuagacagcugcccaaucuucucagaggauacgaacauaucagguuaucaacucauaacguuaucaaugcagaaaaggcaccaggaggacccuacaaaauuggaaccucagggucuugcccuaacguuaccaauggaaacggauuuuucgcaacaauggcuugggccgucccaaaaaacgacaacaacaaaacagcaacaaauucauuaacaauagaaguaccauacauuuguacagaaggagaagaccaaauuaccguuuggggguuccacucugauagcgaaacccaaauggcaaaacucuauggggacucaaagccccagaaguucaccucaucugccaacggagugaccacacauuacgugucacagauugguggcuucccaaaucaaacagaagacggaggacuaccacaaagugguagaauuguuguugauuacauggugcaaaaaucugggaaaacaggaacaauuaccuaucaaagagguauuuuauugccucaaaaaguguggugcgcaaguggcaggagcaagguaauaaaaggauccuugccuuuaauuggagaagcagauugccuccacgaaaaauacgguggauuaaacaaaagcaagccuuacuacacaggggaacaugcaaaggccauaggaaauugcccaauaugggugaaaacacccuugaagcuggccaauggaaccaaauauagaccuccugcaaaacuauuaaaggaaaggggcuucuucggagcuauugcugguuucuuagaaggaggaugggaaggaaugauugcagguuggcacggauacacaucccauggggcacauggaguagcaguggcagcagaccuuaagaguacucaagaagccauaaacaagauaacaaaaaaucucaacucuuugagugagcuggaaguaaagaaucuucaaagacuaagcggugccauggaugaacuccacaacgaaauacuagaacuagacgagaaaguggaugaucucagagcugauacaauaagcucacaaauagaacucgcagucuugcuuuccaaugaaggaauaauaaacagugaagaugagcaucucuuggcgcuugaaagaaagcugaagaaaaugcugggccccucugcuguagagauagggaauggaugcuucgaaaccaaacacaagugcaaccagaccugucucgacagaauagcugcugguaccuuugaugcaggagaauuuucucuccccacuuuugauucacugaauauuacugcugcaucuuuaaaugacgauggauuggauaaucauacuauacugcuuuauuacucaacugcugccuccaguuuggcuguaacauugaugauagcuaucuuuguuguuuauauggucuccagagacaauguuucuugcuccaucugucuauaa

SEQ ID NO: 59159 - RNA, 1758 nt, Artificial Sequence
  derived and/or modified CDS sequence (wt) from hemagglutinin__InfluenzaB__AGX17543
augaaggcaauaauuguacuacuaaugguaguaacauccaaugcagaucgaaucugcacugggauaacaucgucaaacucaccccauguggucaaaacugcuacucaaggggaggucaaugugacuggggugauaccacugacaacaacacccaccaaaucucauuuugcaagucucaaaggaacaaaaaccagagggaaacuaugcccaaaaugccucaacugcacagaucuggacguggccuugggcagaccaaaaugcacggggaacauacccucggcaaaaguuucaauacuccaugaagucagaccuguuacaucugggugcuuuccuauaaugcacgacagaacaaaaauuagacagcugcccaaucuucucagaggauacgaacauaucagguuaucaacucauaacguuaucaaugcagaaaaggcaccaggaggacccuacaaaauuggaaccucagggucuugcccuaacguuaccaauggaaacggauuuuucgcaacaauggcuugggccgucccaaaaaacgacaacaacaaaacagcaacaaauucauuaacaauagaaguaccauacauuuguacagaaggagaagaccaaauuaccguuuggggguuccacucugauaacgaaacccaaauggcaaaacucuauggggacucaaagccccagaaguucaccucaucugccaacggagugaccacacauuacguuucacagauugguggcuucccaaaucaaacagaagacggaggacuaccacaaagugguagaauuguuguugauuacauggugcaaaaaucugggaaaacaggaacaauuaccuaucaaagagguauuuuauugccucaaaaaguguggugcgcaaguggcaggagcaagguaauaaaaggauccuugccuuuaauuggagaagcagauugccuccacgaaaaauacgguggauuaaacaaaagcaagccuuacuacacaggggaacaugcaaaggccauaggaaauugcccaauaugggugaaaacacccuugaagcuggccaauggaaccaaauauagaccuccugcaaaacuauuaaaggaaagggguuucuucggagcuauugcugguuucuuagaaggaggaugggaaggaaugauugcagguuggcacggauacacaucccauggggcacauggaguagcaguggcagcagaccuuaagaguacucaagaagccauaaacaagauaacaaaaaaucucaacucuuugagugagcuggaaguaaagaaucuucaaagacuaagcggugccaugaaugaacuccacaacgaaauacuagaacuagacgagaaaguggaugaucucagagcugauacaauaagcucacaaauagaacucgcagucuugcuuuccaaugaaggaauaauaaacagugaagaugagcaucucuuggcgcuugaaagaaagcugaagaaaaugcugggccccucugcuguagagauagggaauggaugcuucgaaaccaaacacaagugcaaccagaccugucucgacagaauagcugcugguaccuuugaugcaggagaauuuucucucccuacuuuugauucacugaauauuacugcugcaucuuuaaaugacgauggauuggauaaucauacuauacugcuuuacuacucaacugcugccuccaguuuggcuguaacauugaugauagcuaucuuuguuguuuauauggucuccagagacaauguuucuugcuccaucugucuauag

SEQ ID NO: 59160 - RNA, 1758 nt, Artificial Sequence
  derived and/or modified CDS sequence (wt) from hemagglutinin__InfluenzaB__AGX17554
augaaggcaauaauuguacuacucuugguaguaacauccaaugcagaucgaaucugcacugggauaacaucgucaaacucaccccauguggucaaaacugcuacucaaggggaggucaaugugacuggugugauaccacugacaacaacacccaccaaaucucauuuugcaaaucucaaaggaacaaaaaccagagggaaacuaugcccaaaaugccucaacugcacagaucuggacguggccuugggcagaccaaaaugcacggggaacauacccucggcaaaaguuucaauacuccaugaagucagaccuguuacaucugggugcuuuccuauaaugcacgacagaacaaaaauuagacagcugcccaaccuucucagaggauacgaacauaucagguuaucaacucauaacguuaucaaugcagaaaaggcaccaggaggacccuacaaaauuggaaccucagggucuugcccuaacguuaccaauggaaacggauuuuucgcaacaauggcuugggccgucccaaaaaacgacaacaacaaaacagcaacaaauucauuaacaauagaaguaccauacauuuguacagaaggagaagaccaaauuaccguuuggggguuccacucugauaacgaaacccaaauggcaaaacucuauggggacucaaagccccagaaguucaccucaucugccaacggagugaccacacauuacguuucacagauugguggcuucccaaaucaaacagaagacggaggacuaccacaaagugguagaauuguuguugauuacauggugcaaaaaucugggaaaacaggaacaauuaccuaucaaagagguauuuuauugccucaaaaaguguggugcgcaaguggcaggagcaagguaauaaaaggauccuugccuuuaauuggagaagcagauugccuccacgaaaaauacgguggguuaaacaaaagcaagccuuacuacacaggggaacaugcaaaggccauaggaaauugcccaauaugggugaaaacacccuugaagcuggccaauggaaccaaauauagaccuccugcaaaacuauuaaaggaaagggguuucuucggagcuauugcugguuucuuagaaggaggaugggaaggaaugauugcagguuggcacggauacacaucccauggggcacauggaguagcaguggcagcagaccuuaagagcacucaagaagccauaaacaagauaacaaaaaaucucaacucuuugagugagcuggaaguaaagaaucuucaaagacuaagcggugccauggaugaacuccacaacgaaauacuagaacuagacgagaaaguggaugaucucagagcugauacaauaagcucacaaauagaacucgcaguccugcuuuccaaugaaggaauaauaaacagugaagaugagcaucucuuggcgcuugaaagaaagcugaagaaaaugcugggccccucugcuguagagauagggaauggaugcuucgaaaccaaacacaagugcaaccagaccugucucgacagaauagcugcugguaccuuugaugcaggagaauuuucucuccccacuuuugauucacugaauauuacugcugcaucuuuaaaugacgauggauuggauaaucauacuauacugcuuuacuacucaacugcugccuccaguuuggcuguaacauugaugauagcuaucuuuguuguuuauauggucuccagagacaauguuucuugcuccaucugucuauaa

SEQ ID NO: 59161 - RNA, 1755 nt, Artificial Sequence; identical to SEQ ID NO: 59041
  derived and/or modified CDS sequence (wt) from hemagglutinin__InfluenzaB__AGX17565

SEQ ID NO: 59162 - RNA, 1758 nt, Artificial Sequence
  derived and/or modified CDS sequence (wt) from hemagglutinin__InfluenzaB__AGX17576
augaaggcaauaauuguacuacucaugguaguaacauccaaugcagaucgaaucugcacugggauaacaucgucaaacucaccccauguggucaaaacugcuacucaaggggaggucaaugugacuggugugauaccacugacaacaacacccaccaaaucucauuuugcaaaucucaaaggaacaaaaaccagagggaaacuaugcccaaaaugccucaacugcacagaucuggacguggccuugggcagaccaaaaugcacggggaacauacccucggcagaaguuucaauacuccaugaagucagaccuguuaccucugggugcuuuccuauaaugcacgacagaacaaaaauuagacagcugcccaaccuucucagaggauacgaacacaucagauuaucaacucauaacguuaucaaugcagaaaaggcaccaggaggacccuacaaaauuggaaccucagggucuugcccuaauguuaccaauggaaacggauuuuucgcaacaauggcuugggccgucccaaaaaacgacaacaacaaaacagcaacaaauucauuaacaauagaaguaccauacauuuguacagaaggagaagaccaaauuaccauuuggggguuccacucugauaacgaaacccaaauggcaaaacucuauggggacucaaagccccagaaguucaccucaucugccaacggagugaccacacauuacguuucacagauugguggcuucccaaaucaaacagaagacggaggacuaccacaaagugguagaauuguuguugauuacauggugcaaaaaucugggaaaacaggaacaauuaccuaucaaagagguauuuuauugccucaaaaaguguggugcgcaaguggcaggagcaagguaauaaaaggauccuugcccuuaauuggagaagcagauugccuccacgaaaaauacgguggauuaaacaaaagcaagccuuacuacacaggggaacaugcaaaggccauaggaaauugcccaauaugggugaaaacacccuugaagcuggccaauggaaccaaauauagaccuccugcaaaacuauuaaaggaaagagguuucuucggagcuauugcugguuucuuagaaggaggaugggaaggaaugauugcagguuggcacggauacacaucccauggggcacauggaguagcaguggcagcagaccuuaagagcacucaagaagccauaaacaagauaacaaaaaaucucaacucuuugagugagcuggaaguaaagaaucuucaaagacuaagcggugccauggaugaacuccacaacgaaauacuagaacuagacgagaaaguggaugaucucagagcugauacaauaagcucacaaauagaacucgcaguccugcuuuccaaugaaggaauaauaaacagugaagaugagcaucucuuggcgcuugaaagaaagcugaagaaaaugcugggccccucugcuguagagauagggaauggaugcuucgaaaccaaacacaagugcaaccagaccugucuugacagaauagcugcugguaccuuugaugcaggagaauuuucucuccccacuuuugauucacugaauauuacugcugcaucuuuaaaugacgauggauuggauaaucauacuauacugcuuuacuacucaacugcugccuccaguuuggcuguaacauugaugauggcuaucuuuguuguuuauauggucuccagagacaauguuucuugcuccaucugucuauaa

SEQ ID NO: 59163 - RNA, 1758 nt, Artificial Sequence
  derived and/or modified CDS sequence (wt) from hemagglutinin__InfluenzaB__AGX17598
augaaggcaauaauuguacuacucaugguaguaacauccaaugcagaucgaaucugcacugggauaacaucgucaaacucaccacauguugucaaaacugcuacucaaggggaggucaaugugacugguguaauaccacugacaacaacacccaccaagucucauuuugcaaaucucaaaggaacagaaaccagagggaaacuaugcccaaaaugccucaacugcacagaucuggacguggccuugggcaggccaaaaugcacggggaacauacccucggcaagaguuucaauacuccaugaagucagaccuguuacaucugggugcuuuccuauaaugcacgacagaacaaaaauuagacagcugccuaaccuucucagaggauacgaacauaucagguuaucaacucauaacguuaucaaugcagaaaaugcaccaggaggacccuacaaaauuggaaccucagggucuugcccuaacguuaccaauggaaacggauuuuucgcaacaauggcuugggccgucccaaaaaacgacaacaacaaaacagcaacaaauucauuaacaauagaaguaccauacauuuguacagaaggagaagaccaaauuaccguuuggggguuccacucugauaacgaaacccaaauggcaaagcucuauggggacucaaagccccagaaguucaccucaucugccaacggagugaccacacauuacguuucacagauugguggcuucccaaaucaaacagaagacggaggacuaccacaaagugguagaauuguuguugauuacauggugcaaaaaucugggaaaacaggaacaauuaccuaucaaagagguauuuuauugccucaaaaaguguggugcgcaaguggcaggagcaagguaauaaaaggauccuugccuuuaauuggagaagcagauugccuccacgaaaaauacgguggauuaaacaaaagcaagccuuacuacacaggggaacaugcaaaggccauaggaaauugcccaauaugggugaaaacacccuugaagcuggccaauggaaccaaauauagaccuccugcaaaacuauuaaaggaaagggguuucuucggagcuauugcugguuucuuagaaggaggaugggaaggaaugauugcagguuggcacggauacacaucccauggggcacauggaguagcgguggcagcagaccuuaagagcacucaagaggccauaaacaagauaacaaaaaaccucaacucuuugagugagcuggaaguaaagaaucuucaaagacuaagcggugccauggaugaacuccacaacgaaauacuagaacuagacgagaaaguggaugaucucagagcugauacaauaagcucacaaauagaacucgcaguccugcuuuccaaugaaggaauaauaaacagugaagaugagcaucucuuggcgcuugaaagaaagcugaagaaaaugcugggccccucugcuguagagauagggaauggaugcuuugaaaccaaacacaagugcaaccagaccugucucgacagaauagcugcugguaccuuugaugcaggagaauuuucucuccccacuuuugauucacugaauauuacugcugcaucuuuaaaugacgauggauuggauaaucauacuauacugcuuuacuacucaacugcugccuccaguuuggcuguaacauugaugauagcuaucuuuguuguuuauauggucuccagagacaauguuucuugcuccaucugucuauaa

SEQ ID NO: 59164 - RNA, 1758 nt, Artificial Sequence
  derived and/or modified CDS sequence (wt) from hemagglutinin__InfluenzaB__AGX17609
augaaggcaauaauuguacuacucaugguaguaacauccaaugcagaucgaaucugcacugggauaacaucgucaaacucaccacauguugucaaaacugcuacucaaggggaggucaaugugacugguguaauaccacugacaacaacacccaccaaaucucauuuugcaaaucucaaaggaacagaaaccagagggaaacuaugcccaaaaugccucaacugcacagaucuggacguggccuugggcagaccaaaaugcacggggaaaauacccucggcaagaguuucaauacuccaugaagucagaccuguuacaucugggugcuuuccuauaaugcacgacagaacaaaaauuagacagcugccuaaccuucucagaggauacgaacauaucagguuaucaacucauaacguuaucaaugcagaaaaugcaccaggaggacccuacaaaauuggaaccucagggucuugcccuaacguuaccaauggaaacggauuuuucgcaacaauggcuugggccgucccaaaaaacgacaacaacaaaacagcaacaaauucauuaacaauagaaguaccauacauuuguacagaaggagaagaccaaauuaccguuuggggguuccacucugauaacgaaacccaaauggcaaagcucuauggggacucaaagccccagaaguucaccucaucugccaacggagugaccacacauuacguuucacagauugguggcuucccaaaucaaacagaagacggaggacuaccacaaagugguagaauuguuguugauuacauggugcaaaaaucugggaaaacagggacaauuaccuaucaaagagguauuuuauugccucaaaaaguguggugcgcaaguggcaggagcaagguaauaaaaggauccuugccuuuaauuggagaagcagauugccuccacgaaaaauacgguggauuaaacaaaagcaagccuuacuacacaggggaacaugcaaaggccauaggaaauugcccaauaugggugaaaacacccuugaagcuggccaauggaaccaaauauagaccuccugcaaaacuauuaaaggaaagggguuucuucggagcuauugcugguuucuuagaaggaggaugggaaggaaugauugcagguuggcacggauacacaucccauggggcacauggaguagcgguggcagcagaccuuaagagcacucaagaggccauaaacaagauaacaaaaaaucucaacucuuugagugagcuggaaguaaagaaucuucaaagacuaagcggugccauggaugaacuccacaacgaaauacuagaacuagacgagaaaguggaugaucucagagcugauacaauaagcucacaaauagaacucgcaguccugcuuuccaaugaaggaauaauaaacagugaagaugagcaucucuuggcgcuugaaagaaagcugaagaaaaugcugggccccucugcuguagagauagggaauggaugcuuugaaaccaaacacaagugcaaccagaccugucucgacagaauagcugcugguaccuuugaugcaggagaauuuucucuccccacuuuugauucacugaauauuacugcugcaucuuuaaaugacgauggauuggauaaccauacuauacugcuuuacuacucaacugcugccuccaguuuggcuguaacauugaugauagcuaucuuuguuguuuauauggucuccagagacaauguuucuugcuccaucugucuauaa

SEQ ID NO: 59165 - RNA, 1758 nt, Artificial Sequence; identical to SEQ ID NO: 58993
  derived and/or modified CDS sequence (wt) from hemagglutinin__InfluenzaB__AGX17620

SEQ ID NO: 59166 - RNA, 1758 nt, Artificial Sequence
  derived and/or modified CDS sequence (wt) from hemagglutinin__InfluenzaB__AGX17631
augaaggcaauaauuguacuacucaugguaguaacauccaaugcagaucgaaucugcacugggauaacaucgucaaacucaccacauguugucaaaacugcuacucaaggggaggucaaugugacugguguaauaccacugacaacaacacccaccaaaucucauuuugcaaaucucaaaggaacagaaaccagagggaaacuaugcccaaaaugccucaacugcacagaucuggacguggccuugggcagaccaaaaugcacggggaacauacccucggcaagaguuucaauacuccaugaagucagaccuguuacaucugggugcuuuccuauaaugcacgacagaacaaaaauuagacagcugccuaaccuucucagaggauacgaacauaucagguuaucaacucauaacguuaucaaugcagaaaaugcaccaggaggacccuacaaaauuggaaccucagggucuugcccuaacguuaccaauggaaacggauuuuucgcaacaauggcuugggccgucccaaaaaacgacaacaacaaaacagcaacaaauucauuaacaauagaaguaccauacauuuguacagaaggagaagaccaaauuaccguuuggggguuccacucugauaacgaaacccaaauggcaaagcucuauggggacucaaagccccagaaguucaccucaucugccaacggagugaccacacauuacguuucacagauugguggcuucccaaaucaaacagaagacggaggacuaccacaaagugguagaauuguuguugauuacauggugcaaaaaucugggaaaacagggacaauuaccuaucaaagagguauuuuauugccucaaaaaguguggugcgcaaguggcaggagcaagguaauaaaaggauccuugccuuuaauuggagaagcagauugccuccacgaaaaauacgguggauuaaacaaaagcaagccuuacuacacaggggaacaugcaaaggccauaggaaauugcccaauaugggugaaaacacccuugaagcuggccaauggaaccaaauauagaccuccugcaaaacuauuaaaggaaagggguuucuucggagcuauugcugguuucuuagaaggaggaugggaaggaaugauugcagguuggcacggauacacaucccauggggcacauggaguagcgguggcagcagaccuuaagagcacucaagaggccauaaacaagauaacaaaaaaucucaacucuuugagugagcuggaaguaaagaaucuucaaagacuaagcggugccauggaugaacuccacaacgaaauacuagaacuagacgagaaaguggaugaucucagagcugauacaauaagcucacaaauagaacucgcaguccugcuuuccaaugaaggaauaauaaacagugaagaugagcaucucuuggcgcuugaaagaaagcugaagaaaaugcugggccccucugcuguagagauagggaauggaugcuuugaaaccaaacacaagugcaaccagaccugucucgacagaauagcugcugguaccuuugaugcaggagaauuuucucuccccacuuuugauucacugaauauuacugcugcaucuuuaaaugacgauggauuggauaaccauacuauacugcuuuacuacucaacugcugccuccaguuuggcuguaacauugaugauagcuaucuuuguuguuuauauggucuccagagacaauguuucuugcuccaucugucuauaa

SEQ ID NO: 59167 - RNA, 1758 nt, Artificial Sequence
  derived and/or modified CDS sequence (wt) from hemagglutinin__InfluenzaB__AGX17642
augaaggcaauaauuguacuacucaugguaguaacauccaaugcagaucgaaucugcacugggauaacaucgucaaacucaccccauguggucaaaacugcuacucaaggggaggucaaugugacuggugugauaccacugacaacaacacccaccaaaucucauuuugcaaaucucaaaggaacaaaaaccagagggaaacuaugcccaaaaugccucaacugcacagaucuggacguggccuugggcagaccaaaaugcacggggaacauacccucggcagaaguuucaauacuccaugaagucagaccuguuaccucugggugcuuuccuauaaugcacgacagaacaaaaauuagacagcugcccaaccuucucagaggauacgaacauaucagauuaucaacucauaacguuaucaaugcagaaaaggcaccaggaggacccuacaaaauuggaaccucagggucuugcccuaauguuaccaauggaaacggauuuuucgcaacaauggcuugggccgucccaaaaaacgacaacaacaaaacagcaacaaauucauuaacaauagaaguaccauacauuuguacagaaggagaagaccaaauuaccauuuggggguuccacucugauaacgaaacccaaauggcaaaacucuauggggacucaaagccccagaaguucaccucaucugccaacggagugaccacacauuacguuucacagauugguggcuucccaaaucaaacagaagacggaggacuaccacaaagugguagaauuguuguugauuacauggugcaaaaaucugggaaaacaggaacaauuaccuaucaaagagguauuuuauugccucaaaaaguguggugcgcaaguggcaggagcaagguaauaaaaggauccuugcccuuaauuggagaagcagauugccuccacgaaaaauacgguggauuaaacaaaagcaagccuuacuacacaggggaacaugcaaaggccauaggaaauugcccaauaugggugaaaacacccuugaagcuggccaauggaaccaaauauagaccuccugcaaaacuauuaaaggaaagggguuucuucggagcuauugcugguuucuuagaaggaggaugggaaggaaugauugcagguuggcacggauacacaucccauggggcacauggaguagcaguggcagcagaccuuaagagcacucaagaagccauaaacaagauaacaaaaaaucucaacucuuugagugagcuggaaguaaagaaucuucaaagacuaagcggugccauggaugaacuccacaacgaaauacuagaacuagacgagaaaguggaugaucucagagcugauacaauaagcucacaaauagaacucgcaguccugcuuuccaaugaaggaauaauaaacagugaagaugagcaucucuuggcgcuugaaagaaagcugaagaaaaugcugggccccucugcuguagagauagggaauggaugcuucgaaaccaaacacaagugcaaccagaccugucuugacagaauagcugcugguaccuuugaugcaggagaauuuucucuccccacuuuugauucacugaauauuacugcugcaucuuuaaaugacgauggauuggauaaucauacuauacugcuuuacuacucaacugcugccuccaguuuggcuguaacauugaugauagcuaucuuuguuguuuauauggucuccagagacaauguuucuugcuccaucugucuauaa

SEQ ID NO: 59168 - RNA, 1758 nt, Artificial Sequence
  derived and/or modified CDS sequence (wt) from hemagglutinin__InfluenzaB__AGX17653
augaaggcaauaauuguacuacucaugguaguaacauccaaugcagaucgaaucugcacugggauaacaucgucaaacucaccccauguggucaaaacugcuacucaaggggaggucaaugugacuggugugauaccacugacaacagcacccaccaaaucucauuuugcaaaucucaaaggaacaaaaaccagagggaaacuaugcccaaaaugccucaacugcacagaucuggacguggccuugggcagaccaaaaugcacggggaacauacccucggcagaaguuucaauacuccaugaagucagaccuguuaccucugggugcuuuccuauaaugcacgacagaacaaaaauuagacagcugcccaaccuucucagaggauacgaacauaucagauuaucaacucauaacguuaucaaugcagaaaaggcaccaggaggacccuacaaaauuggaaccucagggucuugcccuaauguuaccaauggaaacggauuuuucgcaacaauggcuugggccgucccaaaaaacgacaacaacaaaacagcaacaaauucauuaacaauagaaguaccauacauuuguacagaaggagaagaccaaauuaccauuuggggguuccacucugauaacgaaacccaaauggcaaaacucuauggggacucaaagccccagaaguucaccucaucugccaacggagugaccacacauuacguuucacagauugguggcuucccaaaucaaacagaagacggaggacuaccacaaagugguagaauuguuguugauuacauggugcaaaaaccugggaaaacaggaacaauuaccuaucaaagagguauuuuauuaccucaaaaaguguggugugcaaguggcaggagcaagguaauaaaaggauccuugcccuuaauuggagaagcagauugccuccacgaaaaauacgguggauuaaacaaaagcaagccuuacuacacaggggaacaugcaaaggccauaggaaauugcccaauaugggugaaaacacccuugaagcuggccaauggaaccaaauauagaccuccugcaaaacuauuaaaggaaagggguuucuucggagcuauugcugguuucuuagaaggaggaugggaaggaaugauugcagguuggcacggauacacaucccauggggcacauggaguagcaguggcagcagaccuuaagagcacucaagaagccauaaacaagauaacaaaaaaucucaacucuuugagugagcuggaaguaaagaaucuucaaagacuaagcagugccauggaugaacuccacaacgaaauacuagaacuagacgagaaaguggaugaucucagagcugauacaauaagcucacaaauagaacucgcaguccugcuuuccaaugaaggaauaauaaacagugaagaugagcaucucuuggcgcuugaaagaaagcugaagaaaaugcugggccccucugcuguagagauagggaauggaugcuucgaaaccaaacacaagugcaaccagaccugucuugacagaauagcugcugguaccuuugaugcaggagaauuuucucuccccacuuuugauucacugaauauuacugcugcaucuuuaaaugaugauggauuggauaaucauacuauacugcuuuacuacucaacugcugccuccaguuuggcuguaacauugaugauagcuaucuuuguuguuuauauggucuccagagacaauguuucuugcuccaucugucuauaa

SEQ ID NO: 59169 - RNA, 1758 nt, Artificial Sequence; identical to SEQ ID NO: 59166
  derived and/or modified CDS sequence (wt) from hemagglutinin__InfluenzaB__AGX17664

SEQ ID NO: 59170 - RNA, 1758 nt, Artificial Sequence
  derived and/or modified CDS sequence (wt) from hemagglutinin__InfluenzaB__AGX17675
augaaggcaauaauuguacuacucaugguaguaacauccaaugcagaucgaaucugcacugggauaacaucgucaaacucaccccauguggucaaaacugcuacucaaggggaggucaaugugacuggugugauaccacugacaacaacacccaccaaaucucauuuugcaaaucucaaaggaacaaaaaccagagggaaacuaugcccaaaaugccucaacugcacagaucuggacguggccuugggcagaccaaaaugcacggggaacauacccucggcagaaguuucaauacuccaugaagucagaccuguuaccucugggugcuuuccuauaaugcacgacagaacaaaaauuagacagcugcccaaccuucucagaggauacgaacauaucagauuaucaacucauaacguuaucaaugcagaaaaggcaccaggaggacccuacaaaauuggaaccucagggucuugcccuaauguuaccaauggaaacggauuuuucgcaacaauggcuugggccgucccaaaaaacgacaacaacaaaacagcaacaaauucauuaacaauagaaguaccauacauuuguacagaaggagaagaccaaauuaccauuuggggguuccacucugauaacgaaacccaaauggcaaaacucuauggggacucaaagccccagaaguucaccucaucugccaacggagugaccacacauuacguuucacagauugguggcuucccaaaucaaacagaagacggaggacuaccacaaagugguagaauuguuguugauuacauggugcaaaaaucugggaaaacaggaacaauuaccuaucaaagagguauuuuauugccucaaaaaguguggugcgcaaguggcaggagcaagguaauaaaaggauccuugcccuuaauuggagaagcagauugccuccacgaaaaauacgguggauuaaacaaaagcaagccuuacuacacaggggaacaugcaaaggccauaggaaauugcccaauaugggugaaaacacccuugaagcuggccaauggaaccaaauauagaccuccugcaaaacuauuaaaggaaagagguuucuucggagcuauugcugguuucuuagaaggaggaugggaaggaaugauugcagguuggcacggauacacaucccauggggcacauggaguagcaguggcagcagaccuuaagagcacucaagaagccauaaacaagauaacaaaaaaucucaacucuuugagugagcuggaaguaaagaaucuucaaagacuaagcggugccauggaugaacuccacaacgaaauacuagaacuagacgagaaaguggaugaucucagagcugauacaauaagcucacaaauagaacucgcaguccugcuuuccaaugaaggaauaauaaacagugaagaugagcaucucuuggcgcuugaaagaaagcugaagaaaaugcugggccccucugcuguagagauagggaauggaugcuucgaaaccaaacacaagugcaaccagaccugucuugacagaauagcugcugguaccuuugaugcaggagaauuuucucuccccacuuuugauucacugaauauuacugcugcaucuuuaaaugacgauggauuggauaaucauacuauacugcuuuacuacucaacugcugccuccaguuuggcuguaacauugaugauagcuaucuuuguuguuuauauggucuccagagacaauguuucuugcuccaucugucuauaa

SEQ ID NO: 59171 - RNA, 1758 nt, Artificial Sequence; identical to SEQ ID NO: 58993
  derived and/or modified CDS sequence (wt) from hemagglutinin__InfluenzaB__AGX17686

SEQ ID NO: 59172 - RNA, 1758 nt, Artificial Sequence
  derived and/or modified CDS sequence (wt) from hemagglutinin__InfluenzaB__AGX17697
augaaggcaauaauuguacuacucaugguaguaacauccaaugcagaucgaaucugcacugggauaacaucgucaaacucaccacauguugucaaaacugcuacucaaggggaggucaaugugacugguguaauaccacugacaacaacacccaccaaaucucauuuugcaaaucucaaaggaacagaaaccagagggaaacuaugcccaaaaugccucaacugcacagaucuggacguggccuugggcagaccaaaaugcacgggggaaauacccucggcaagaguuucaauacuccaugaagucagaccuguuacaucugggugcuuuccuauaaugcacgacagaacaaaaauuagacagcugccuaaccuucucagaggauacgaacauaucagguuaucaacucauaacgcuaucaaugcagaaaaugcaccaggaggacccuacaaaauuggaaccucagggucuugcccuaacguuaccaauggaaacggauuuuucgcaacaauggcuugggccgucccaaaaaacgacaacaacaaaacagcaacaaauucauuaacaauagaaguaccauacauuuguacagaaggagaagaccaaauuaccguuuggggguuccacucugauaacgaaacccaaauggcaaagcucuauggggacucaaagccccagaaguucaccucaucugccaacggagugaccacacauuacguuucacagauugguggcuucccaaaucaaacagaagacggaggacuaccacaaagugguagaauuguuguugauuacauggugcaaaaaucugggaaaacagggacaauuaccuaucaaagagguauuuuauugccucaaaaaguguggugcgcaaguggcaggagcaagguaauaaaaggauccuugccuuuaauuggagaagcagauugccuccacgaaaaauacgguggauuaaacaaaagcaagccuuacuacacaggggaacaugcaaaggccauaggaaauugcccaauaugggugaaaacacccuugaagcuggccaauggaaccaaauauagaccuccugcaaaacuauuaaaggaaagggguuucuucggagcuauugcugguuucuuagaaggaggaugggaaggaaugauugcagguuggcacggauacacaucccauggggcacauggaguagcgguggcagcagaccuuaagagcacucaagaggccauaaacaagauaacaaaaaaucucaacucuuugagugagcuggaaguaaagaaucuucaaagacuaagcggugccauggaugaacuccacaacgaaauacuagaacuagacgagaaaguggaugaucucagagcugauacaauaagcucacaaauagaacucgcaguccugcuuuccaaugaaggaauaauaaacagugaagaugagcaucucuuggcgcuugaaagaaagcugaagaaaaugcugggccccucugcuguagagauagggaauggaugcuuugaaaccaaacacaagugcaaccagaccugucucgacagaauagcugcugguaccuuugaugcaggagaauuuucucuccccacuuuugauucacugaauauuacugcugcaucuuuaaaugacgauggauuggauaaccauacuauacugcuuuacuacucaacugcugccuccaguuuggcuguaacauugaugauagcuaucuuuguuguuuauauggucuccagagacaauguuucuugcuccaucugucuauaa

SEQ ID NO: 59173 - RNA, 1758 nt, Artificial Sequence; identical to SEQ ID NO: 59167
  derived and/or modified CDS sequence (wt) from hemagglutinin__InfluenzaB__AGX17708

SEQ ID NO: 59174 - RNA, 1758 nt, Artificial Sequence
  derived and/or modified CDS sequence (wt) from hemagglutinin__InfluenzaB__AGX17719
augaaggcaauaauuguacuacucaugguaguaacauccaaugcagaucgaaucugcacugggauaacaucgucaaacucaccccauguggucaaaacugcuacucaaggggaggucaaugugacuggugugauaccacugacaacagcacccaccaaaucucauuuugcaaaucucaaaggaacaaaaaccagagggaaacuaugcccaaaaugccucaacugcacagaucuggacguggccuugggcagaccaaaaugcacggggaacauacccucggcagaaguuucaauacuccaugaagucagaccuguuaccucugggugcuuuccuauaaugcacgacagaacaaaaauuagacagcugcccaaccuucucagaggauacgaacauaucagauuaucaacucauaacguuaucaaugcagaaaaggcaccaggaggacccuacaaaauuggaaccucagggucuugcccuaauguuaccaauggaaacggauuuuucgcaacaauggcuugggcagucccaaaaaacgacaacaacaaaacagcaacaaauucauuaacaauagaaguaccauacauuuguacagaaggagaagaccaaauuaccauuuggggguuccacucugauaacgaaacccaaauggcaaaacucuauggggacucaaagccccagaaguucaccucaucugccaacggagugaccacacauuacguuucacagauugguggcuucccaaaucaaacagaagacggaggacuaccacaaagugguagaauuguuguugauuacauggugcaaaaaccugggaaaacaggaacaauuaccuaucaaagagguauuuuauugccucaaaaaguguggugugcaaguggcaggagcaagguaauaaaaggauccuugcccuuaauuggagaagcagauugccuccacgaaaaauacgguggauuaaacaaaagcaagccuuacuacacaggggaacaugcaaaggccauaggaaauugcccaauaugggugaaaacacccuugaagcuggccaauggaaccaaauauagaccuccugcaaaacuauuaaaggaaagggguuucuucggagcuauugcugguuucuuagaaggaggaugggaaggaaugauugcagguuggcacggauacacaucccauggggcacauggaguagcaguggcagcagaccuuaagagcacucaagaagccauaaacaagauaacaaaaaaucucaacucuuugagugagcuggaaguaaagaaucuucaaagacuaagcagugccauggaugaacuccacaacgaaauacuagaacuagacgagaaaguggaugaucucagagcugauacaauaagcucacaaauagaacucgcaguccugcuuuccaaugaaggaauaauaaacagugaagaugagcaucucuuggcgcuugaaagaaagcugaagaaaaugcugggccccucugcuguagagauagggaauggaugcuucgaaaccaaacacaagugcaaccagaccugucuugacagaauagcugcugguaccuuugaugcaggagaauuuucucuccccacuuuugauucacugaauauuacugcugcaucuuuaaaugaugauggauuggauaaucauacuauacugcuuuacuacucaacugcugccuccaguuuggcuguaacauugaugauagcuaucuuuguuguuuauauggucuccagagacaauguuucuugcuccaucugucuauaa

SEQ ID NO: 59175 - RNA, 1758 nt, Artificial Sequence; identical to SEQ ID NO: 59170
  derived and/or modified CDS sequence (wt) from hemagglutinin__InfluenzaB__AGX17730

SEQ ID NO: 59176 - RNA, 1758 nt, Artificial Sequence; identical to SEQ ID NO: 59166
  derived and/or modified CDS sequence (wt) from hemagglutinin__InfluenzaB__AGX17741

SEQ ID NO: 59177 - RNA, 1758 nt, Artificial Sequence; identical to SEQ ID NO: 58993
  derived and/or modified CDS sequence (wt) from hemagglutinin__InfluenzaB__AGX17752

SEQ ID NO: 59178 - RNA, 1758 nt, Artificial Sequence
  derived and/or modified CDS sequence (wt) from hemagglutinin__InfluenzaB__AGX17774
augaaggcaauaauuguacuacucaugguaguaacauccaaugcagaucgaaucugcacugggauaacaucgucaaacucaccccauguggucaaaacugcuacucaaggggaggucaaugugacuggugugauaccacugacaacagcacccaccaaaucucauuuugcaaaucucaaaggaacaaaaaccagagggaaacuaugcccaaaaugccucaacugcacagaucuggacguggccuugggcagaccaaaaugcacggggaacauacccucggcagaaguuucaauacuccaugaagucagaccuguuaccucugggugcuuuccuauaaugcacgacagaacaaaaauuagacagcugcccaaccuucucagaggauacgaacauaucagauuaucaacucauaacguuaucaaugcagaaaaggcaccaggaggacccuacaaaauuggaaccucagggucuugcccuaauguuaccaauggaaacggauuuuucgcaacaauggcuugggccgucccaaaaaacgacaacaacaaaacagcaacaaauucauuaacaauagaaguaccauacauuuguacagaaggagaagaccaaauuaccauuuggggguuccacucugauaacgaaacccaaauggcaaaacucuauggggacucaaagccccagaaguucaccucaucugccaacggagugaccacacauuacguuucacagauugguggcuucccaaaucaaacagaagacggaggacuaccacaaagugguagaauuguuguugauuacauggugcaaaaaccugggaaaacaggaacaauuaccuaucaaagagguauuuuauugccucaaaaaguguggugugcaaguggcaggagcaagguaauaaaaggauccuugcccuuaauuggagaagcagauugccuccacgaaaaauacgguggauuaaacaaaagcaagccuuacuacacaggggaacaugcaaaggccauaggaaauugcccaauaugggugaaaacacccuugaagcuggccaauggaaccaaauauagaccuccugcaaaacuauuaaaggaaagggguuucuucggagcuauugcugguuucuuagaaggaggaugggaaggaaugauugcagguuggcacggauauacaucccauggggcacauggaguagcaguggcagcagaccuuaagagcacucaagaagccauaaacaagauaacaaaaaaucucaacucuuugagugagcuggaaguaaagaaucuucaaagacuaagcagugccauggaugaacuccacaacgaaauacuagaacuagacgagaaaguggaugaucucagagcugauacaauaagcucacaaauagaacucgcaguccugcuuuccaaugaaggaauaauaaacagugaagaugagcaucucuuggcgcuugaaagaaagcugaagaaaaugcugggccccucugcuguagagauagggaauggaugcuucgaaaccaaacacaagugcaaccagaccugucuugacagaauagcugcugguaccuuugaugcaggagaauuuucucuccccacuuuugauucacugaauauuacugcugcaucuuuaaaugaugauggauuggauaaucauacuauacugcuuuacuacucaacugcugccuccaguuuggcuguaacauugaugauagcuaucuuuguuguuuauauggucuccagagacaauguuucuugcuccaucugucuauaa

SEQ ID NO: 59179 - RNA, 1758 nt, Artificial Sequence
  derived and/or modified CDS sequence (wt) from hemagglutinin__InfluenzaB__AGX17785
augaaggcaauaauuguacuacucaugguaguaacauccaaugcagaucgaaucugcacugggauaacaucgucaaacucaccccauguggucaaaacugcuacucaaggggaggucaaugugacuggugugauaccacugacaacaacacccaccaaaucucauuuugcaaaucucaaaggaacaaaaaccagagggaaacuaugcccaaaaugccucaacugcacagaucuggacguggccuugggcagaccaaaaugcacggggaacauacccucggcagaaguuucaauacuccaugaagucagaccuguuaccucugggugcuuuccuauaaugcacgacagaacaaaaauuagacagcugcccaaccuucucagaggauacgaacaugucagauuaucaacucauaacguuaucaaugcagaaaaggcaccaggaggacccuacaaaauuggaaccucagggucuugcccuaauguuaccaauggaaacggauuuuucgcaacaauggcuugggccgucccaaaaaacgacaacaacaaaacagcaacaaauucauuaacaauagaaguaccauacauuuguacagaaggagaagaccaaauuaccauuuggggguuccacucugauaacgaaacccaaauggcaaaacucuauggggacucaaagccccagaaguucaccucaucugccaacggagugaccacacauuacguuucacagauugguggcuucccaaaucaaacagaagacggaggacuaccacaaagugguagaauuguuguugauuacauggugcaaaaaucugggaaaacaggaacaauuaccuaucaaagagguauuuuauugccucaaaaaguguggugcgcaaguggcaggagcaagguaauaaaaggauccuugcccuuaauuggagaagcagauugccuccacgaaaaauacgguggauuaaacaaaagcaagccuuacuacacaggggaacaugcaaaggccauaggaaauugcccaauaugggugaaaacacccuugaagcuggccaauggaaccaaauauagaccuccugcaaaacuauuaaaggaaagggguuucuucggagcuauugcugguuucuuagaaggaggaugggaaggaaugauugcagguuggcacggauacacaucccauggggcacauggaguagcaguggcagcagaccuuaagagcacucaagaagccauaaacaagauaacaaaaaaucucaacucuuugagugagcuggaaguaaagaaucuucaaagacuaagcggugccauggaugaacuccacaacgaaauacuagaacuagacgagaaaguggaugaucucagagcugauacaauaagcucacaaauagaacucgcaguccugcuuuccaaugaaggaauaauaaacagugaagaugagcaucucuuggcgcuugaaagaaagcugaagaaaaugcugggccccucugcuguagagauagggaauggaugcuucgaaaccaaacacaagugcaaccagaccugucuugacagaauagcugcugguaccuuugaugcaggagaauuuucucuccccacuuuugauucacugaauauuacugcugcaucuuuaaaugacgauggauuggauaaucauacuauacugcuuuacuacucaacugcugccuccaguuuggcuguaacauugaugauagcuaucuuuguuguuuauauggucuccagagacaauguuucuugcuccaucugucuauaa

SEQ ID NO: 59180 - RNA, 1758 nt, Artificial Sequence; identical to SEQ ID NO: 58993
  derived and/or modified CDS sequence (wt) from hemagglutinin__InfluenzaB__AGX17796

SEQ ID NO: 59181 - RNA, 1758 nt, Artificial Sequence
  derived and/or modified CDS sequence (wt) from hemagglutinin__InfluenzaB__AGX17807
augaaggcaauaauuguacuacucaugguaguaacauccaaugcagaucgaaucugcacugggauaacaucgucaaacucaccacauguugucaaaacugcuacucaaggggaggucaaugugacugguguaauaccacugacaacaacacccaccaaaucucauuuugcaaaucucaaaggaacagaaaccagagggaaacuaugcccaaaaugccucaacugcacagaucuggacguggccuugggcagaccaaaaugcacggggaacauacccucggcaagaguuucaauacuccaugaagucagaccuguuacaucugggugcuuuccuauaaugcacgacagaacaaaaauuagacagcugccuaaccuucucagaggauacgaacauaucagguuaucaacucauaacguuaucaaugcagaaaaugcaccaggaggacccuacaaaauuggaaccucagggucuugcccuaacguuaccaauggaaacggauuuuucgcaacaauggcuugggccgucccaaaaaacgacaacaacaaaacagcaacaaauucauuaacaauagaaguaccauacauuuguacagaaggagaagaccaaauuaccguuuggggguuccacucugauaacgaaauccaaauggcaaagcucuauggggacucaaagccccagaaguucaccucaucugccaacggagugaccacacauuacguuucacagauugguggcuucccaaaucaaacagaagacggaggacuaccacaaagugguagaauuguuguugauuacauggugcaaaaaucugggaaaacagggacaauuaccuaucaaagagguauuuuauugccucaaaaaguguggugcgcaaguggcaggagcaagguaauaaaaggauccuugccuuuaauuggagaagcagauugccuccacgaaaaauacgguggauuaaacaaaagcaagccuuacuacacaggggaacaugcaaaggccauaggaaauugcccaauaugggugaaaacacccuugaagcuggccaauggaaccaaauauagaccuccugcaaaacuauuaaaggaaagggguuucuucggagcuauugcugguuucuuagaaggaggaugggaaggaaugauugcagguuggcacggauacacaucccauggggcacauggaguagcgguggcagcagaccuuaagagcacucaagaggccauaaacaagauaacaaaaaaucucaacucuuugagugagcuggaaguaaagaaucuucaaagacuaagcggugccauggaugaacuccacaacgaaauacuagaacuagacgagaaaguggaugaucucagagcugauacaauaagcucacaaauagaacucgcaguccugcuuuccaaugaaggaauaauaaacagugaagaugagcaucucuuggcgcuugaaagaaagcugaagaaaaugcugggccccucugcuguagagauagggaauggaugcuuugaaaccaaacacaagugcaaccagaccugucucgacagaauagcugcugguaccuuugaugcaggagaauuuucucuccccacuuuugauucacugaauauuacugcugcaucuuuaaaugacgauggauuggauaaccauacuauacugcuuuacuacucaacugcugccuccaguuuggcuguaacauugaugauagcuaucuuuguuguuuauauggucuccagagacaauguuucuugcuccaucugucuauaa

SEQ ID NO: 59182 - RNA, 1758 nt, Artificial Sequence
  derived and/or modified CDS sequence (wt) from hemagglutinin__InfluenzaB__AGX17818
augaaggcaauaauuguacuacucaugguaguaacauccaaugcagaucgaaucugcacugggauaacaucgucaaacucaccacauguugucaaaacugcuacucaaggggaggucaaugugacugguguaauaccacugacaacaacacccaccaaaucucauuuugcaaaucucaaaggaacagaaaccagagggaaacuaugcccaaaaugccucaacugcacagaucuggacguggccuugggcagaccaaaaugcacggggaaaauacccucggcaagaguuucaauacuccaugaagucagaccuguuacaucugggugcuuuccuauaaugcacgacagaacaaaaauuagacagcugccuaaccuucucagaggauaugaacauaucagguuaucaacucauaacguuaucaaugcagaaaaugcaccaggaggacccuacaaaauuggaaccucagggucuugcccuaacguuaccaauggaaacggauuuuucgcaacaauggcuugggccgucccaaaaaacgacaacaacaaaacagcaacaaauucauuaacaauagaaguaccauacauuuguacagaaggagaagaccaaauuaccguuuggggguuccacucugauaacgaaacccaaauggcaaagcucuauggggacucaaagccccagaaguucaccucaucugccaacggagugaccacacauuacguuucacagauugguggcuucccaaaucaaacagaagacggaggacuaccacaaagugguagaauuguuguugauuacauggugcaaaaaucugggaaaacagggacaauuaccuaucaaagagguauuuuauugccucaaaaaguguggugcgcaaguggcaggagcaagguaauaaaaggauccuugccuuuaauuggagaagcagauugccuccacgaaaaauacgguggauuaaacaaaagcaagccuuacuacacaggggaacaugcaaaggccauaggaaauugcccaauaugggugaaaacacccuugaagcuggccaauggaaccaaauauagaccuccugcaaaacuauuaaaggaaagggguuucuucggagcuauugcugguuucuuagaaggaggaugggaaggaaugauugcagguuggcacggauacacaucccauggggcacauggaguagcgguggcagcagaccuuaagagcacucaagaggccauaaacaagauaacaaaaaaucucaacucuuugagugagcuggaaguaaagaaucuucaaagacuaagcggugccauggaugaacuccacaacgaaauacuagaacuagacgagaaaguggaugaucucagagcugauacaauaagcucacaaauagaacucgcaguccugcuuuccaaugaaggaauaauaaacagugaagaugagcaucucuuggcgcuugaaagaaagcugaagaaaaugcugggccccucugcuguagagauagggaauggaugcuuugaaaccaaacacaagugcaaccagaccugucucgacagaauagcugcugguaccuuugaugcaggagaauuuucucuccccacuuuugauucacugaauauuacugcugcaucuuuaaaugacgauggauuggauaaccauacuauacugcuuuacuacucaacugcugccuccaguuuggcuguaacauugaugauagcuaucuuuguuguuuauauggucuccagagacaauguuucuugcuccaucugucuauaa

SEQ ID NO: 59183 - RNA, 1758 nt, Artificial Sequence
  derived and/or modified CDS sequence (wt) from hemagglutinin__InfluenzaB__AGX17829
augaaggcaauaauuguacuacucaugguaguaacauccaaugcagaucgaaucugcacugggauaacaucgucaaacucaccacauguugucaaaacugcuacucaaggggaggucaaugugacugguguaauaccacugacaacaacacccaccaaaucucauuuugcaaaucucaaaggaacagaaaccagagggaaacuaugcccaaaaugccucaacugcacagaucuggacguggccuugggcagaccaaaaugcacggggaaaauacccucggcaagaguuucaauacuccaugaagucagaccuguuacaucugggugcuuuccuauaaugcacgacagaacaaaaauuagacagcugccuaaccuucucagaggauacgaacauaucagguuaucaacucauaacguuaucaaugcagaaaaugcaccaggaggacccuacaaaauuggaaccucagggucuugcccuaacguuaccaauggaaacggauuuuucgcaacaauggcuugggccgucccaaaaaacgacaacaacaaaacagcaacaaauucauuaacaauagaaguaccauacauuuguacagaaggagaagaccaaauuaccguuuggggguuccacucugauaacgaaacccaaauggcaaagcucuauggggacucaaagccccagaaguucaccucaucugccaacggagugaccacacauuacguuucacagauugguggcuucccaaaucaaacagaagacggaggacuaccacaaagugguagaauuguuguugauuacauggugcaaaaaucugggaaaacagggacaauuaccuaucaaagagguauuuuauugccucaaaaaguguggugcgcaaguggcaggagcaagguaauaaaaggauccuugccuuuaauuggagaagcagauugccuccacgaaaaauacgguggauuaaacaaaagcaagccuuacuacacaggggaacaugcaaaggccauaggaaauugcccaauaugggugaaaacacccuugaagcuggccaauggaaccaaauauagaccuccugcaaaacuauuaaaggaaagggguuucuucggagcuauugcugguuucuuagaaggaggaugggaaggaaugauugcagguuggcacggauacacaucccauggggcacauggaguagcgguggcagcagaccuuaagagcacucaagaggccguaaacaagauaacaaaaaaucucaacucuuugagugagcuggaaguaaagaaucuucaaagacuaagcggugccauggaugaacuccacaacgaaauacuagaacuagacgagaaaguggaugaucucagagcugauacaauaagcucacaaauagaacucgcaguccugcuuuccaaugaaggaauaauaaacagugaagaugagcaucucuuggcgcuugaaagaaagcugaagaaaaugcugggccccucugcuguagagauagggaauggaugcuuugaaaccaaacacaagugcaaccagaccugucucgacagaauagcugcugguaccuuugaugcaggagaauuuucucuccccacuuuugauucacugaauauuacugcugcaucuuuaaaugacgauggauuggauaaccauacuauacugcuuuacuacucaacugcugccuccaguuuggcuguaacauugaugauagcuaucuuuguuguuuauauggucuccagagacaauguuucuugcuccaucugucuauaa

SEQ ID NO: 59184 - RNA, 1758 nt, Artificial Sequence
  derived and/or modified CDS sequence (wt) from hemagglutinin__InfluenzaB__AGX17840
augaaggcaauaauuguacuacucaugguaguaacauccaaugcagaucgaaucugcacugggauaacaucgucaaacucaccccauguggucaaaacugcuacucaaggggaggucaaugugacuggugugauaccacugacaacaacacccaccaaaucucauuuugcaaaucucaaaggaacaaaaaccagagggaaacuaugcccaaaaugccucaacugcacagaucuggacguggccuugggcagaccaaaaugcacggggaacauacccucggcagaaguuucaauacuccaugaagucagaccuguuaccucugggugcuuuccuauaaugcacgacagaacaaaaauuagacagcugcccaaccuucucagaggauacgaacauaucagauuaucaacucauaacguuaucaaugcagaaaaggcaccaggaggacccuacaaaauuggaaccucagggucuugcccuaauguuaccaauggaaacggauuuuucgcaacaauggcuugggccgucccaaaaaacgacaacaacaaaacagcaacaaauucauuaacaauagaaguaccauacauuuguacagaaggagaagaccaaauuaccauuuggggguuccacucugauaacgaaacccaaauggcaaaacucuauggggacucaaagccccagaaguucaccucaucugccaacggagugaccacacauuacguuucacagauugguggcuucccaaaucaaacagaagacggaggacugccacaaagugguagaauuguuguugauuacauggugcaaaaaucugggaaaacaggaacaauuaccuaucaaagagguauuuuauugccucaaaaaguguggugcgcaaguggcaggagcaagguaauaaaaggauccuugcccuuaauuggagaagcagauugccuccacgaaaaauacgguggauuaaacaaaagcaagccuuacuacacaggggaacaugcaaaggccauaggaaauugcccaauaugggugaaaacacccuugaagcuggccaauggaaccaaauauagaccuccugcaaaacuauuaaaggaaagggguuucuucggagcuauugcugguuucuuagaaggaggaugggaaggaaugauugcagguuggcacggauacacaucccauggggcacauggaguagcaguggcagcagaccuuaagagcacucaagaagccauaaacaagauaacaaaaaaucucaacucuuugagugagcuggaaguaaagaaucuucaaagacuaagcggugccauggaugaacuccacaacgaaauacuagaacuagacgagaaaguggaugaucucagagcugauacaauaagcucacaaauagaacucgcaguccugcuuuccaaugaaggaauaauaaacagugaagaugagcaucucuuggcgcuugaaagaaagcugaagaaaaugcugggccccucugcuguagagauagggaauggaugcuucgaaaccaaacacaagugcaaccagaccugucuugacagaauagcugcugguaccuuugaugcaggagaauuuucucuccccacuuuugauucacugaauauuacugcugcaucuuuaaaugacgauggauuggauaaucauacuauacugcuuuacuacucaacugcugccuccaguuuggcuguaacauugaugauagcuaucuuuguuguguauauggucuccagagacaauguuucuugcuccaucugucuauaa

SEQ ID NO: 59185 - RNA, 1758 nt, Artificial Sequence; identical to SEQ ID NO: 59178
  derived and/or modified CDS sequence (wt) from hemagglutinin__InfluenzaB__AGX17851

SEQ ID NO: 59186 - RNA, 1758 nt, Artificial Sequence
  derived and/or modified CDS sequence (wt) from hemagglutinin__InfluenzaB__AGX17862
augaaggcaauaauuguacuacucaugguaguaacauccaaugcagaucgaaucugcacugggauaacaucgucaaacucaccccauguggucaaaacugcuacucaaggggaggucaaugugacuggugugauaccacugacaacaacacccaccaaaucucauuuugcaaaucucaaaggaacaaaaaccagagggaaacuaugcccaaaaugccucaacugcacagaucuggacguggccuugggcagaccaaaaugcacggggaacauacccucggcagaaguuucaauacuccaugaagucagaccuguuaccucugggugcuuuccuauaaugcacgacagaacaaaaauuagacagcugcccaaccuucucagaggauacgaacauaucagauuaucaacucauaacguuaucaaugcagaaaaggcaccaggaggacccuacaaaauuggaaccucagggucuugcccuaauguuaccaauggaaacggauuuuucgcaacaauggcuugggccgucccaaaaaacgacaacaacaaaacagcaacaaauucauuaacaauagaaguaccauacauuuguacagaaggagaagaccaaauuaccauuuggggguuccacucugauaacgaaacccaaauggcaaaacucuauggggacucaaagccccagaaguucaccucaucugccaacggagugaccacacauuacguuucacagauugguggcuucccaaaucaaacagaagacggaggacuaccacaaagugguagaauuguuguugauuacauggugcaaaaaucugggaaaacaggaacaauuaccuaucaaagagguauuuuauugccucaaaaaguguggugcgcaaguggcaggagcaagguaauaaaaggaaccuugcccuuaauuggagaagcagauugccuccacgaaaaauacgguggauuaaacaaaagcaagccuuacuacacaggggaacaugcaaaggccauaggaaauugcccaauaugggugaaaacacccuugaagcuggccaauggaaccaaauauagaccuccugcaaaacuauuaaaggaaagggguuucuucggagcuauugcugguuucuuagaaggaggaugggaaggaaugauugcagguuggcacggauacacaucccauggggcacauggaguagcaguggcagcagaccuuaagagcacucaagaagccauaaacaagauaacaaaaaaucucaacucuuugagugagcuggaaguaaagaaucuucaaagacuaagcggugccauggaugaacuccacaacgaaauacuagaacuagacgagaaaguggaugaucucagagcugauacaauaagcucacaaauagaacucgcaguccugcuuuccaaugaaggaauaauaaacagugaagaugagcaucucuuggcgcuugaaagaaagcugaagaaaaugcugggccccucugcuguagagauagggaauggaugcuucgaaaccaaacacaagugcaaccagaccugucuugacagaauagcugcugguaccuuugaugcaggagaauuuucucuccccacuuuugauucacugaauauuacugcugcaucuuuaaaugacgauggauuggauaaucauacuauacugcuuuacuacucaacugcugccuccaguuuggcuguaacauugaugauagcuaucuuuguuguuuauauggucuccagagacaauguuucuugcuccaucugucuauaa

SEQ ID NO: 59187 - RNA, 1758 nt, Artificial Sequence
  derived and/or modified CDS sequence (wt) from hemagglutinin__InfluenzaB__AGX17873
augaaggcaauaauuguacuacucaugguaguaacauccaaugcagaucgaaucugcacugggauaacaucgucaaacucaccacauguugucaaaacugcuacucaaggggaggucaaugugacugguguaauaccacugacaacaacacccaccaaaucucauuuugcaaaucucaaaggaacagaaaccagagggaaacuaugcccaaaaugccucgacugcacagaucuggacguggccuugggcagaccaaaaugcacggggaacauacccucggcaagaguuucaauacuccaugaagucagaccuguuacaucugggugcuuuccuauaaugcacgacagaacaaaaauuagacagcugccuaaccuucucagaggauacgaacauaucagguuaucaacucauaacguuaucaaugcagaaaaugcaccaggaggacccuacaaaauuggaaccucagggucuugcccuaacguuaccaauggaaacggauuuuucgcaacaauggcuugggccgucccaaaaaacgacaacaacaaaacagcaacaaauucauuaacaauagaaguaccauacauuuguacagaaggagaagaccaaauuaccguuuggggguuccacucugauaacgaaacccaaauggcaaagcucuauggggacucaaagccccagaaguucaccucaucugccaacggagugacaacacauuacguuucacagauugguggcuucccaaaucaaacagaagacggaggacuaccacaaagugguagaauuguuguugauuacauggugcaaaaaucugggaaaacagggacaauuaccuaucaaagagguauuuuauugccucaaaaaguguggugcgcaaguggcaggagcaagguaauaaaaggauccuugccuuuaauuggagaagcagauugccuccacgaaaaauacgguggauuaaacaaaagcaagccuuacuacacaggggaacaugcaaaggccauaggaaauugcccaauaugggugaaaacacccuugaagcuggccaauggaaccaaauauagaccuccugcaaaacuauuaaaggaaagggguuucuucggagcuauugcuggcuucuuagaaggaggaugggaaggaaugauugcagguuggcacggauacacaucccauggggcacauggaguagcgguggcagcagaccuuaagagcacucaagaggccauaaacaagauaacaaaaaaucucaacucuuugagugagcuggaaguaaagaaucuucaaagacuaagcggugccauggaugaacuccacaacgaaauacuagaacuagacgagaaaguggaugaucucagagcugauacaauaagcucacaaauagaacucgcaguccugcuuuccaaugaaggaauaauaaacagugaagaugagcaucucuuggcgcuugaaagaaagcugaagaaaaugcugggccccucugcuguagagauagggaauggaugcuuugaaaccaaacacaagugcaaccagaccugucucgacagaauagcugcugguaccuuugaugcaggagaauuuucucuccccacuuuugauucacugaauauuacugcugcaucuuuaaaugacgauggauuggauaaccauacuauacugcuuuacuacucaacugcugccuccaguuuggcuguaacauugaugauagcuaucuuuguuguuuauauggucuccagagacaauguuucuugcuccaucugucuauaa

SEQ ID NO: 59188 - RNA, 1758 nt, Artificial Sequence; identical to SEQ ID NO: 59167
  derived and/or modified CDS sequence (wt) from hemagglutinin__InfluenzaB__AGX17884

SEQ ID NO: 59189 - RNA, 1758 nt, Artificial Sequence
  derived and/or modified CDS sequence (wt) from hemagglutinin__InfluenzaB__AGX17895
augaaggcaauaauuguacuacucaugguaguaacauccaaugcagaucgaaucugcacugggauaacaucgucaaacucaccacauguugucaaaacugcuacucaaggggaggucaaugugacugguguaauaccacugacaacaacacccaccaaaucucauuuugcaaaucucaaaggaacagaaaccagagggaaacuaugcccaaaaugccucaacugcacagaucuggacguggccuugggcagaccaaaaugcacggggaacauacccucggcaagaguuucaauacuccaugaagucagaccuguuacaucugggugcuuuccuauaaugcacgacagaacaaaaauuagacagcugccuaaccuucucagaggauacgaacauaucagguuaucaacucauaacguuaucaaugcagaaaaugcaccaggaggacccuacaaaauuggaaccucagggucuugcccuaacguuaccaauggaaacggauuuuucgcaacaauggcuugggcagucccaaaaaacgacaacaacaaaacagcaacaaauucauuaacaauagaaguaccauacauuuguacagaaggagaagaccaaauuaccguuuggggguuccacucugauaacgaaaaccaaauggcaaagcucuauggggacucaaagccccagaaguucaccucaucugccaacggagugaccacacauuacguuucacagauugguggcuucccaaaucaaacagaagacggaggacuaccacaaagugguagaauuguuguugauuacauggugcaaaaaucugggaaaacagggacaauuaccuaucaaagagguauuuuauugccucaaaaaguguggugcgcaaguggcaggagcaagguaauaaaaggauccuugccuuuaauuggagaagcagauugccuccacgaaaaauacgguggauuaaacaaaagcaagccuuacuacacaggggaacaugcaaaggccauaggaaauugcccaauaugggugaaaacacccuugaagcuggccaauggaaccaaauauagaccuccugcaaaauuauuaaaggaaagggguuucuucggagcuauugcugguuucuuagaaggaggaugggaaggaaugauugcagguuggcacggauacacaucccauggggcacauggaguagcgguggcagcagaccuuaagagcacucaagaggccauaaacaagauaacaaaaaaucucaacucuuugagugagcuggaaguaaagaaucuucaaagacuaagcggugccauggaugaacuccacaacgaaauacuagaacuagacgagaaaguggaugaucucagagcugauacaauaagcucacaaauagaacucgcaguccugcuuuccaaugaaggaauaauaaacagugaagaugagcaucucuuggcgcuugaaagaaagcugaagaaaaugcugggccccucugcuguagagauagggaauggaugcuuugaaaccaaacacaagugcaaccagaccugucucgacagaauagcugcugguaccuuugaugcaggagaauuuucucuccccacuuuugauucacugaauauuacugcugcaucuuuaaaugacgauggauuggauaaccauacuauacugcuuuacuacucaacugcugccuccaguuuggcuguaacauugaugauagcuaucuuuguuguuuauauggucuccagagacaauguuucuugcuccaucugucuauaa

SEQ ID NO: 59190 - RNA, 1758 nt, Artificial Sequence
  derived and/or modified CDS sequence (wt) from hemagglutinin__InfluenzaB__AGX17906
augaaggcaauaauuguacuacucaugguaguaacauccaaugcagaucgaaucugcacugggauaacaucgucaaacucaccccauguggucaaaacugcuacucaaggggaggucaaugugacuggugugauaccacugacaacaacacccaccaaaucucauuuugcaaaucucaaaggaacaaaaaccagagggaaacuaugcccaaaaugccucaacugcacagaucuggacguggccuugggcagaccaaaaugcacggggaacauacccucggcagaaguuucaauacuccaugaagucagaccuguuaccucugggugcuuuccuauaaugcacgacagaacaaaaauuagacagcugcccaaccuucucagaggauacgaacauaucagauuaucaacucauaacguuaucaaugcagaaaaggcaccaggaggacccuacaaaauuggaaccucagggucuugcccuaauguuaccaauggaaacggauuuuucgcaacaauggcuugggccgucccaaaaaacgacaacaacaaaacagcaacaaauucauuaacaauagaaguaccauacauuuguacagaaggagaagaccaaauuaccauuuggggguuccacucugauaacgaaacccaaauggcaaaacucuauggggacucaaagccccagaaguucaccucaucugccaacggagugaccacacauuacguuucacagauugguggcuucccaaaucaaacagaagacggaggacuaccacaaagugguagaauuguuguugauuacauggugcaaaaaucugggaaaacaggaacaauuaccuaucaaagagguauuuuauugccucaaaaaguguggugcgcaaguggcaggagcaagguaauaaaaggauccuugcccuuaauuggagaagcagauugccuccacgaaaaauacgguggauuaaacaaaagcaagccuuacuauacaggggaacaugcaaaggccauaggaaauugcccaauaugggugaaaacacccuugaagcuggccaauggaaccaaauauagaccuccugcaaaacuauuaaaggaaagggguuucuucggagcuauugcugguuucuuagaaggaggaugggaaggaaugauugcagguuggcacggauacacaucccauggggcacauggaguagcaguggcagcagaccuuaagagcacucaagaagccauaaacaagauaacaaaaaaucucaacucuuugagugagcuggaaguaaagaaucuucaaagacuaagcggugccauggaugaacuccacaacgaaauacuagaacuagacgagaaaguggaugaucucagagcugauacaauaagcucacaaauagaacucgcaguccugcuuuccaaugaaggaauaauaaacagugaagaugagcaucucuuggcgcuugaaagaaagcugaagaaaaugcugggccccucugcuguagagauagggaauggaugcuucgaaaccaaacacaagugcaaccagaccugucuugacagaauagcugcugguaccuuugaugcaggagaauuuucucuccccacuuuugauucacugaauauuacugcugcaucuuuaaaugacgauggauuggauaaucauacuauacugcuuuacuacucaacugcugccuccaguuuggcuguaacauugaugauagcuaucuuuguuguuuauauggucuccagagacaauguuucuugcuccaucugucuauaa

SEQ ID NO: 59191 - RNA, 1758 nt, Artificial Sequence; identical to SEQ ID NO: 59167
  derived and/or modified CDS sequence (wt) from hemagglutinin__InfluenzaB__AGX17917

SEQ ID NO: 59192 - RNA, 1758 nt, Artificial Sequence
  derived and/or modified CDS sequence (wt) from hemagglutinin__InfluenzaB__AGX17928
augaagacaauaauuguacuacucaugguaguaacauccaaugcagaucgaaucugcacugggauaacaucgucaaacucaccccauguggucaaaacugcuacucaaggggaggucaaugugacuggugugauaccacugacaacaacacccaccaaaucucauuuugcaaaucucaaaggaacaaaaaccagagggaaacuaugcccaaaaugccucaacugcacagaucuggacguggccuugggcagaccaaaaugcacggggaacauacccucggcagaaguuucaauacuccaugaagucagaccuguuaccucugggugcuuuccuauaaugcacgacagaacaaaaauuagacagcugcccaaccuucucagaggauacgaacauaucagauuaucaacucauaacguuaucaaugcagaaaaggcaccaggaggacccuacaaaauuggaaccucagggucuugcccuaauguuaccaauggaaacggauuuuucgcaacaauggcuugggccgucccaaaaaacgacaacaacaaaacagcaacaaauucauuaacaauagaaguaccauacauuuguacagaaggagaagaccaaauuaccauuuggggguuccacucugauaacgaaacccaaauggcaaaacucuauggggacucaaagccccagaaguucaccucaucugccaacggagugaccacacauuacguuucacagauugguggcuucccaaaucaaacagaagacggaggacuaccacaaagugguagaauuguuguugauuacauggugcaaaaaucugggaaaacaggaacaauuaccuaucaaagagguauuuuauugccucaaaaaguguggugcgcaaguggcaggagcaagguaauaaaaggaaccuugcccuuaauuggagaagcagauugccuccacgaaaaauacgguggauuaaacaaaagcaagccuuacuacacaggggaacaugcaaaggccauaggaaauugcccaauaugggugaaaacacccuugaagcuggccaauggaaccaaauauagaccuccugcaaaacuauuaaaggaaagggguuucuucggagcuauugcugguuucuuagaaggaggaugggaaggaaugauugcagguuggcacggauacacaucccauggggcacauggaguagcaguggcagcagaccuuaagagcacucaagaagccauaaacaagauaacaaaaaaucucaacucuuugagugagcuggaaguaaagaaucuucaaagacuaagcggugccauggaugaacuccacaacgaaauacuagaacuagacgagaaaguggaugaucucagagcugauacaauaagcucacaaauagaacucgcaguccugcuuuccaaugaaggaauaauaaacagugaagaugagcaucucuuggcgcuugaaagaaagcugaagaaaaugcugggccccucugcuguagagauagggaauggaugcuucgaaaccaaacacaagugcaaccagaccugucuugacagaauagcugcugguaccuuugaugcaggagaauuuucucuccccacuuuugauucacugaauauuacugcugcaucuuuaaaugacgauggauuggauaaucauacuauacugcuuuacuacucaacugcugccuccaguuuggcuguaacauugaugauagcuaucuuuguuguuuauauggucuccagagacaauguuucuugcuccaucugucuauaa

SEQ ID NO: 59193 - RNA, 1758 nt, Artificial Sequence
  derived and/or modified CDS sequence (wt) from hemagglutinin__InfluenzaB__AGX17939
augaaggcaauaauuguacuacucaugguaguaacauccaaugcagaucgaaucugcacugggauaacaucgucaaacucaccacauguugucaaaacugcuacucaaggggaggucaaugugacugguguaauaccacugacaacaacacccaccaaaucucauuuugcaaaucucaaaggaacagaaaccagagggaaacuaugcccaaaaugccucaacugcacagaucuggacguggccuugggcagaccaaaaugcacggggaacauacccucggcaagaguuucaauacuccaugaagucagaccuguuacaucugggugcuuuccuauaaugcacgacagaacaaaaauuagacagcugccuaaccuucucagaggauacgaacauaucagguuaucaacucauaacguuaucaaugcagaaaaugcaccaggaggacccuacaaaauuggaaccucagggucuugcccuaacguuaccaauggaaacggauuuuucgcaacaauggcuugggccgucccaaaaaacgacaacaacaaaacagcaacaaauucauuaacaauagaaguaccauacauuuguacagaaggagaagaccaaauuaccguuuggggguuccacucugauaacgaaacccaaauggcaaagcucuauggggacucaaagccccagaaguucaccucaucugccaacggagugaccacacauuacguuucacagauugguggcuucccaaaucaaacagaagacggaggacuaccacaaagugguagaauuguuguugauuacauggugcaaaaaucugggaaaacagggacaauuaccuaucaaagagguauuuuauugccucaaaaaguguggugcgcaaguggcaggagcaagguaauaaaaggauccuugccuuuaauuggagaagcagauugccuccacgaaaaauacgguggauuaaacaaaagcaagccuuacuacacaggggaacaugcaaaggccauaggaaauugcccaauaugggugaaaacacccuugaagcuggccaauggaaccaaauauagaccuccugcaaaacuauuaaaggaaagggguuucuucggagcuauugcugguuucuuagaaggaggaugggaaggaaugauugcagguuggcacggauacacaucccauggggcacauggaguagcgguggcagcagaccuuaagagcacucaagaggccauaaacaagauaacaaaaaaucucaacucuuugagugagcuggaaguaaagaaucuucaaagacuaagcggugccauggaugaacuccacaacgaaauacuagaacuagacgagaaaguggaugaucucagagcugauacaauaagcucacaaauagaacucgcaguccugcuuuccaaugaaggaauaauaaacagugaagaugagcaucucuuggcgcuugaaagaaaguugaagaaaaugcugggccccucugcuguagagauagggaauggaugcuuugaaaccaaacacaagugcaaccagaccugucucgacagaauagcugcugguaccuuugaugcaggagaauuuucucuccccacuuuugauucacugaauauuacugcugcaucuuuaaaugacgauggauuggauaaccauacuauacugcuuuacuacucaacugcugccuccaguuuggcuguaacauugaugauagcuaucuuuguuguuuauauggucuccagagacaauguuucuugcuccaucugucuauaa

SEQ ID NO: 59194 - RNA, 1758 nt, Artificial Sequence; identical to SEQ ID NO: 59166
  derived and/or modified CDS sequence (wt) from hemagglutinin__InfluenzaB__AGX17950

SEQ ID NO: 59195 - RNA, 1758 nt, Artificial Sequence; identical to SEQ ID NO: 59166
  derived and/or modified CDS sequence (wt) from hemagglutinin__InfluenzaB__AGX17961

SEQ ID NO: 59196 - RNA, 1758 nt, Artificial Sequence
  derived and/or modified CDS sequence (wt) from hemagglutinin__InfluenzaB__AGX17972
augaaggcaauaauuguacuacucaugguaguaacauccaaugcagaucgaaucugcacugggauaacaucgucaaacucaccccauguggucaaaacugcuacucaaggggaggucaaugugacuggugugauaccacugacaacagcacccaccaaaucucauuuugcaaaucucaaaggaacaaaaaccagagggaaacuaugcccaaaaugccucaacugcacagaucuggacguggccuugggcagaccaaaaugcacggggaacauacccucggcagaaguuucaauacuccaugaagucagaccuguuaccucugggugcuuuccuauaaugcacgacagaacaaaaauuagacagcugcccaaccuucucagaggauacgaacauaucagauuaucaacucauaacguuaucaaugcagaaaaggcaccaggaggacccuacaaaauuggaaccucagggucuugcccuaauguuaccaauggaaacggauuuuucgcaacaauggcuugggccgucccaaaaaacgacaacaacaaaacagcaacaaauucauuaacaauagaaguaccauacauuuguacagaaggagaagaccaaauuaccauuuggggguuccacucugauaacgaaacccaaauggcaaaacucuauggggacucaaagccccagaaguucaccucaucugccaacggagugaccacacauuacguuucacagauugguggauucccaaaucaaacagaagacggaggacuaccacaaagugguagaauuguuguugauuacauggugcaaaaaccugggaaaacaggaacaauuaccuaucaaagagguauuuuauugccucaaaaaguguggugugcaaguggcaggagcaagguaauaaaaggauccuugcccuuaauuggagaagcagauugccuccacgaaaaauacgguggauuaaacaaaagcaagccuuacuacacaggggaacaugcaaaggccauaggaaauugcccaauaugggugaaaacacccuugaagcuggccaauggaaccaaauauagaccuccugcaaaacuauuaaaggaaagggguuucuucggagcuauugcugguuucuuagaaggaggaugggaaggaaugauugcagguuggcacggauacacaucccauggggcacauggaguagcaguggcagcagaccuuaagagcacucaagaagccauaaacaagauaacaaaaaaucucaacucuuugagugagcuggaaguaaagaaucuucaaagacuaagcagugccauggaugaacuccacaacgaaauacuagaacuagacgagaaaguggaugaucucagagcugauacaauaagcucacaaauagaacucgcaguccugcuuuccaaugaaggaauaauaaacagugaagaugagcaucucuuggcgcuugaaagaaagcugaagaaaaugcugggccccucugcuguagagauagggaauggaugcuucgaaaccaaacacaagugcaaccagaccugucuugacagaauagcugcugguaccuuugaugcaggagaauuuucucuccccacuuuugauucacugaauauuacugcugcaucuuuaaaugaugauggauuggauaaucauacuauacugcuuuacuacucaacugcugccuccaguuuggcuguaacauugaugauagcuaucuuuguuguuuauauggucuccagagacaauguuucuugcuccaucugucuauaa

SEQ ID NO: 59197 - RNA, 1758 nt, Artificial Sequence; identical to SEQ ID NO: 59166
  derived and/or modified CDS sequence (wt) from hemagglutinin__InfluenzaB__AGX17983

SEQ ID NO: 59198 - RNA, 1758 nt, Artificial Sequence; identical to SEQ ID NO: 59167
  derived and/or modified CDS sequence (wt) from hemagglutinin__InfluenzaB__AGX17994

SEQ ID NO: 59199 - RNA, 1758 nt, Artificial Sequence
  derived and/or modified CDS sequence (wt) from hemagglutinin__InfluenzaB__AGX18005
augaaggcaauaauuguacuacucaugguaguaacauccaaugcagaucgaaucugcacugggauaacaucgucaaacucaccacauguugucaaaacugcuacucaaggggaggucaaugugacugguguaauaccacugacaacaacacccaccaaaucucauuuugcaaaucucaaaggaacagaaaccagagggaaacuaugcccaaaaugccucaacugcacagaucuggacguggccuugggcagaccaaaaugcacggggaacauacccucggcaagaguuucaauacuccaugaagucagaccuguuacaucugggugcuuuccuauaaugcacgacagaacaaaaauuagacagcugccuaaccuucucagaggauacgaacauaucagguuaucaacucauaacguuaucaaugcagaaaaugcaccaggaggacccuacaaaauuggaaccucagggucuugcccuaacguuaccaauggaaacggauuuuucgcaacaauggcuugggccgucccaaaaaacgacaacaacaaaacagcaacaaauucauuaacaauagaaguaccauacauuuguacagaaggagaagaccaaauuaccguuuggggguuccacucugauaacgaaacccaaauggcaaagcucuauggggacucaaagccccagaaguucaccucaucugccaacggagugaccacacauuacguuucacagauugguggcuucccaaaucaaacagaagacggaggacuaccacaaagugguagaauuguuguugauuacauggugcaaaaaucugggaaaacagggacaauuaccuaucaaagagguauuuuauugccucaaaaaguguggugcgcaaguggcaggagcaagguaauaaaaggauccuugccuuuaauuggagaagcagauugccuccacgaaaaauacgguggauuaaacaaaagcaagccuuacuacacaggggaacaugcaaaggccauaggaaauugcccaauaugggugaaaacacccuugaagcuggccaauggaaccaaauauagaccuccugcaaaacuacuaaaggaaagggguuucuucggagcuauugcugguuucuuagaaggaggaugggaaggaaugauugcagguuggcacggauacacaucccauggggcacauggaguagcgguggcagcagacauuaagagcacucaagaggccauaaacaagauaacaaaaaaucucaacucuuugagugagcuggaaguaaagaaucuucaaagacuaagcggugccauggaugaacuccacaacgaaauacuagaacuagacgagaaaguggaugaucucagagcugauacaauaagcucacaaauagaacucgcaguccugcuuuccaaugaaggaauaauaaacagugaagaugagcaucucuuggcgcuugaaagaaagcugaagaaaaugcugggccccucugcuguagagauagggaauggaugcuuugaaaccaaacacaagugcaaccagaccugucucgacagaauagcugcugguaccuuugaugcaggagaauuuucucuccccacuuuugauucacugaauauuacugcugcaucuuuaaaugacgauggauuggauaaccauacuauacugcuuuacuacucaacugcugccuccaguuuggcuguaacauugaugauagcuaucuuuguuguuuauauggucuccagagacaauguuucuugcuccaucugucuauaa

SEQ ID NO: 59200 - RNA, 1758 nt, Artificial Sequence
  derived and/or modified CDS sequence (wt) from hemagglutinin__InfluenzaB__AGX18016
augaaggcaauaauuguacuacucaugguaguaacauccaaugcagaucgaaucugcacugggauaacaucgucaaacucaccacauguugucaaaacugcuacucaaggggaggucaaugugacugguguaauaccacugacaacaacacccaccaaaucucauuuugcaaaucucaaaggaacagaaaccagagggaaacuaugcccaaaaugccucaacugcacagaucuggacguggccuugggcagaccaaaaugcacggggaacauacccucggcaagaguuucaauacuccaugaagucagaccuguuacaucugggugcuuuccuauaaugcacgacagaacaaaaauuagacagcugccuaaccuucucagaggauacgaacauaucagguuaucaacucauaacguuaucaaugcagaaaaugcaccaggaggacccuacaaaauuggaaccucagggucuugcccuaacguuaccaauggaaacggauuuuucgcaacaauggcuugggccgucccaaaaaacgacaacaacaaaacagcaacaaauucauuaacaauagaaguaccauacauuuguauagaaggagaagaccaaauuaccguuuggggguuccacucugauaacgaaacccaaauggcaaagcucuauggggacucaaagccccagaaguucaccucaucugccaacggagugaccacacauuacguuucacagauugguggcuucccaaaucaaacagaagacggaggacuaccacaaagugguagaauuguuguugauuacauggugcaaaaaucugggaaaacagggacaauuaccuaucaaagagguauuuuauugccucaaaaaguguggugcgcaaguggcaggagcaagguaauaaaaggauccuugccuuuaauuggagaagcagauugccuccacgaaaaauacgguggauuaaacaaaagcaagccuuacuacacaggggaacaugcaaaggccauaggaaauugcccaauaugggugaaaacacccuugaagcuggccaauggaaccaaauauagaccuccugcaaaacuauuaaaggaaagggguuucuucggagcuauugcugguuucuuagaaggaggaugggaaggaaugauugcagguuggcacggauacacaucccauggggcacauggaguagcgguggcagcagaccuuaagagcacucaagaggccauaaacaagauaacaaaaaaucucaacucuuugagugagcuggaaguaaagaaucuucaaagacuaagcggugccauggaugaacuccacaacgaaauacuagaacuagacgagaaaguggaugaucucagagcugauacaauaagcucacaaauagaacucgcaguccugcuuuccaaugaaggaauaauaaacagugaagaugagcaucucuuggcgcuugaaagaaagcugaagaaaaugcugggccccucugcuguagagauagggaauggaugcuuugaaaccaaacacaagugcaaccagaccugucucgacagaauagcugcugguaccuuugaugcaggagaauuuucucuccccacuuuugauucacugaauauuacugcugcaucuuuaaaugacgauggauuggauaaccauacuauacugcuuuacuacucaacugcugccuccaguuuggcuguaacauugaugauagcuaucuuuguuguuuauauggucuccagagacaauguuucuugcuccaucugucuauaa

SEQ ID NO: 59201 - RNA, 1758 nt, Artificial Sequence
  derived and/or modified CDS sequence (wt) from hemagglutinin__InfluenzaB__AGX18027
augaaggcaauaauuguacuacucaugguaguaacauccaaugcagaucgaaucugcacugggauaacaucgucaaacucaccacauguugucaaaacugcuacucaaggggaggucaaugugacugguguaauaccacugacaacaacacccaccaaaucucauuuugcaaaucucaaaggaacagaaaccagagggaaacuaugcccaaaaugccucaacugcacagaucuggacguggccuugggcagaccaaaaugcacggggaaaauacccucggcaagaguuucaauacuccaugaagucagaccuguuacaucugggugcuuuccuauaaugcacgacagaacaaaaaucagacagcugccuaaccuucucagaggauacgaacauaucagguuaucaacucauaacguuaucaaugcagaaaaugcaccaggaggacccuacaaaauuggaaccucagggucuugcccuaacguuaccaauggaaacggauuuuucgcaacaauggcuugggccgucccaaaaaacgacaacaacaaaacagcaacaaauucauuaacaauagaaguaccauacauuuguacagaaggagaagaccaaauuaccguuuggggguuccacucugauaacgaaacccaaauggcaaagcucuauggggacucaaagccccagaaguucaccucaucugccaacggagugaccacacauuacguuucacagauugguggcuucccaaaucaaacagaagacggaggacuaccacaaagugguagaauuguuguugauuacauggugcaaaaaucugggaaaacagggacaauuaccuaucaaagagguauuuuauugccucaaaaaguguggugcgcaaguggcaggagcaagguaauaaaaggauccuugccuuuaauuggagaagcagauugccuccacgaaaaauacgguggauuaaacaaaagcaagccuuacuacacaggggaacaugcaaaggccauaggaaauugcccaauaugggugaaaacacccuugaagcuggccaauggaaccaaauauagaccuccugcaaaacuauuaaaggaaagggguuucuucggagcuauugcugguuucuuagaaggaggaugggaaggaaugauugcagguuggcacggauacacaucccauggggcacauggaguagcgguggcagcagaccuuaagagcacucaagaggccauaaacaagauaacaaaaaaucucaacucuuugagugagcuggaaguaaagaaucuucaaagacuaagcggugccauggaugaacuccacaacgaaauacuagaacuagacgagaaaguggaugaucucagagcugauacaauaagcucacaaauagaacucgcaguccugcuuuccaaugaaggaauaauaaacagugaagaugagcaucucuuggcgcuugaaagaaagcugaagaaaaugcugggccccucugcuguagagauagggaauggaugcuuugaaaccaaacacaagugcaaccagaccugucucgacagaauagcugcugguaccuuugaugcaggagaauuuucucuccccacuuuugauucacugaauauuacugcugcaucuuuaaaugacgauggauuggauaaccauacuauacugcuuuacuacucaacugcugccuccaguuuggcuguaacauugaugauagcuaucuuuguuguuuauauggucuccagagacaauguuucuugcuccaucugucuauaa

SEQ ID NO: 59202 - RNA, 1758 nt, Artificial Sequence
  derived and/or modified CDS sequence (wt) from hemagglutinin__InfluenzaB__AGX18038
augaaggcaauaauuguacuacucaugguaguaacauccaaugcagaucgaaucugcacugggauaacaucgucaaacucaccccauguggucaaaacugcuacucaaggggaggucaaugugacuggugugauaccacugacaacaacacccaccaaaucucauuuugcaaaucucaaaggaacaaaaaccagagggaaacuaugcccaaaaugccucaacugcacagaucuggacguggccuugggcagaccaaaaugcacggggaacauacccucggcagaaguuucaauacuccaugaagucagaccuguuaccucugggugcuuuccuauaaugcacgacagaacaaaaauuagacagcugcccaaccuucucagaggauacgaacauaucagauuaucaacucauaacguuaucaaugcagaaaaggcaccaggaggacccuacaaaauuggaaccucagggucuugcccuaauguuaccaauggaaacggauuuuucgcaacaauggcuugggccgucccaaaaaacgacaacaacaaaacagcaacaaauucauuaacaauagaaguaccauacauuuguacagaaggagaagaccaaauuaccauuuggggguuccacucugauaacgaaacccaaauggcaaaacucuauggggacucaaagccccagaaguucaccucaucugccaacggagugaccacacauuacguuucacagauugguggcuucccaaaucaaacagaagacggaggacuaccacaaagugguagaauuguuguugauuacauggugcaaaaaucugggaaaacaggaacaauuaccuaucaaagagguauuuuauugccucaaaaaguguggugcgcaaguggcaggagcaagguaauaaaaggauccuugcccuuaauuggagaagcagauugccuccacgaaaaauaugguggauuaaacaaaagcaagccuuacuacacaggggaacaugcaaaggccauaggaaauugcccaauaugggugaaaacacccuugaagcuggccaauggaaccaaauauagaccuccugcaaaacuauuaaaggaaagggguuucuucggagcuauugcugguuucuuagaaggaggaugggaaggaaugauugcagguuggcacggauacacaucccauggggcacauggaguagcaguggcagcagaccuuaagagcacucaagaagccauaaacaagauaacaaaaaaucucaacucuuugagugagcuggaaguaaagaaucuucaaagacuaagcggugccauggaugaacuccacaacgaaauacuagaacuagacgagaaaguggaugaucucagagcugauacaauaagcucacaaauagaacucgcaguccugcuuuccaaugaaggaauaauaaacagugaagaugagcaucucuuggcgcuugaaagaaagcugaagaaaaugcugggccccucugcuguagagauagggaauggaugcuucgaaaccaaacacaagugcaaccagaccugucuugacagaauagcugcugguaccuuugaugcaggagaauuuucucuccccacuuuugauucacugaauauuacugcugcaucuuuaaaugacgauggauuggauaaucauacuauacugcuuuacuacucaacugcugccuccaguuuggcuguaacauugaugauagcuaucuuuguuguuuauauggucuccagagacaauguuucuugcuccaucugucuauaa

SEQ ID NO: 59203 - RNA, 1758 nt, Artificial Sequence
  derived and/or modified CDS sequence (wt) from hemagglutinin__InfluenzaB__AGX18049
augaaggcaauaauuguacuacucaugguaguaacauccaaugcagaucgaaucugcacugggauaacaucgucaaacucaccccauguggucaaaacugcuacucaaggggaggucaaugugacuggugugauaccacugacaacaacacccaccaaaucucauuuugcaaaucucaaaggaacaaaaaccagaggaaaacuaugcccaaaaugccucaacugcacagaucuggacguggccuugggcagaccaaaaugcacggggaacauacccucggcagaaguuucaauacuccaugaagucagaccuguuaccucugggugcuuuccuauaaugcacgacagaacaaaaauuagacagcugcccaaccuucucagaggauacgaacauaucagauuaucaacucauaacguuaucaaugcagaaaaggcaccaggaggacccuacaaaauuggaaccucagggucuugcccuaauguuaccaauggaaacggauuuuucgcaacaauggcuugggccgucccaaaaaacgacaacaacaaaacagcaacaaauucauuaacaauagaaguaccauacauuuguacagaaggagaagaccaaauuaccauuuggggguuccacucugauaacgaaacccaaauggcaaaacucuauggggacucaaagccccagaaguucaccucaucugccaacggagugaccacacauuacguuucacagauugguggcuucccaaaucaaacagaagacggaggacuaccacaaagugguagaauuguuguugauuacauggugcaaaaaucugggaaaacaggaacaauuaccuaucaaagagguauuuuauugccucaaaaaguguggugcgcaaguggcaggagcaagguaauaaaaggauccuugcccuuaauuggagaagcagauugccuccaugaaaaauacgguggauuaaacaaaagcaagccuuacuacacaggggaacaugcaaaggccauaggaaauugcccaauaugggugaaaacacccuugaagcuggccaauggaaccaaauauagaccuccugcaaaacuauuaaaggaaagggguuucuucggagcuauugcugguuucuuagaaggaggaugggaaggaaugauugcagguuggcacggauacacaucccauggggcacauggaguagcaguggcagcagaccuuaagagcacucaagaagccauaaacaagauaacaaaaaaucucaacucuuugagugagcuggaaguaaagaaucuucaaagacuaagcggugccauggaugaacuccacaacgaaauacuagaacuagacgagaaaguggaugaucucagagcugauacaauaagcucacaaauagaacucgcaguccugcuuuccaaugaaggaauaauaaacagugaagaugagcaucucuuggcgcuugaaagaaagcugaagaaaaugcugggccccucugcuguagagauagggaauggaugcuucgaaaccaaacacaagugcaaccagaccugucuugacagaauagcugcugguaccuuugaugcaggagaauuuucucuccccacuuuugauucacugaauauuacugcugcaucuuuaaaugacgauggauuggauaaucauacuauacugcuuuacuacucaacugcugccuccaguuuggcuguaacauugaugauagcuaucuuuguuguuuauauggucuccagagacaauguuucuugcuccaucugucuauaa

SEQ ID NO: 59204 - RNA, 1758 nt, Artificial Sequence; identical to SEQ ID NO: 59170
  derived and/or modified CDS sequence (wt) from hemagglutinin__InfluenzaB__AGX18060

SEQ ID NO: 59205 - RNA, 1758 nt, Artificial Sequence; identical to SEQ ID NO: 59166
  derived and/or modified CDS sequence (wt) from hemagglutinin__InfluenzaB__AGX18071

SEQ ID NO: 59206 - RNA, 1758 nt, Artificial Sequence
  derived and/or modified CDS sequence (wt) from hemagglutinin__InfluenzaB__AGX18082
augaaggcaauaauuguacuacucaugguaguaacauccaaugcagaucgaaucugcaccgggauaacaucgucaaacucaccccauguggucaaaacugcuacucaaggggaggucaaugugacuggugugauaccacugacaacaacacccaccaaaucucauuuugcaaaucucaaaggaacaaaaaccagagggaaacuaugcccaaaaugccucaacugcacagaucuggacguggccuugggcagaccaaaaugcacggggaacauacccucggcagaaguuucaauacuccaugaagucagaccuguuaccucugggugcuuuccuauaaugcacgacagaacaaaaauuagacagcugcccaaccuucucagaggauacgaacauaucagauuaucaacucauaacguuaucaaugcagaaaaggcaccaggaggacccuacaaaauuggaaccucagggucuugcccuaauguuaccaauggaaacggauuuuucgcaacaauggcuugggccgucccaaaaaacgacaacaacaaaacagcaacaaauucauuaacaauagaaguaccauacauuuguacagaaggagaagaccaaauuaccauuuggggguuccacucugauaacgaaacccaaauggcaaaacucuauggggacucaaagccccagaaguucaccucaucugccaacggagugaccacacauuacguuucacagauugguggcuucccaaaucaaacagaagacggaggacuaccacaaagugguagaauuguuguugauuacauggugcaaaaaucugggaaaacaggaacaauuaccuaucaaagagguauuuuauugccucaaaaaguguggugcgcaaguggcaggagcaagguaauaaaaggaaccuugcccuuaauuggagaagcagauugccuccacgaaaaauacgguggauuaaacaaaagcaagccuuacuacacaggggaacaugcaaaggccauaggaaauugcccaauaugggugaaaacacccuugaagcuggccaauggaaccaaauauagaccuccugcaaaacuauuaaaggaaagggguuucuucggagcuauugcugguuucuuagaaggaggaugggaaggaaugauugcagguuggcacggauacacaucccauggggcacauggaguagcaguggcagcagaccuuaagagcacucaagaagccauaaacaagauaacaaaaaaucucaacucuuugagugagcuggaaguaaagaaucuucaaagacuaagcggugccauggaugaacuccacaacgaaauacuagaacuagacgagaaaguggaugaucucagagcugauacaauaagcucacaaauagaacucgcaguccugcuuuccaaugaaggaauaauaaacagugaagaugagcaucucuuggcgcuugaaagaaagcugaagaaaaugcugggccccucugcuguagagauagggaauggaugcuucgaaaccaaacacaagugcaaccagaccugucuugacagaauagcugcugguaccuuugaugcaggagaauuuucucuccccacuuuugauucacugaauauuacugcugcaucuuuaaaugacgauggauuggauaaucauacuauacugcuuuacuacucaacugcugccuccaguuuggcuguaacauugaugauagcuaucuuuguuguuuauauggucuccagagacaauguuucuugcuccaucugucuauaa

SEQ ID NO: 59207 - RNA, 1758 nt, Artificial Sequence
  derived and/or modified CDS sequence (wt) from hemagglutinin__InfluenzaB__AGX18093
augaaggcaauaauuguacuacucaugguaguaacauccaaugcagaucgaaucugcacugggauaacaucgucaaacucaccccauguggucaaaacugcuacucaaggggaggucaaugugacuggugugauaccacugacaacaacacccaccaaaucucauuuugcaaaucucaaaggaacaaaaaccagagggaaacuaugcccaaaaugccucaacugcacagaucuggacguggccuugggcagaccaaaaugcacggggaacauacccucggcagaaguuucaauacuccaugaagucagaccuguuaccucugggugcuuuccuauaaugcacgacagaacaaaaauuagacagcugcccaaccuucucagaggauacgaacauaucagauuaucaacucauaacguuaucaaugcagaaaaggcaccaggaggacccuacaaaauuggaaccucagggucuugcccuaauguuaccaauggaaacggauuuuucgcaacaauggcuugggccgucccaaaaaacgacaacaacaaaacagcaacaaauucauuaacaauagaaguaccauacauuuguacagaaggagaagaccaaauuaccauuuggggguuccacucugauaacgaaacccaaauggcaaaacucuauggggacucaaagccccagaaguucaccucaucugccaacggagugaccacacauuacguuucacagauugguggcuucccaaaucaaacagaagacggaggacuaccacaaagugguagaauuguuguugauuacauggugcaaaaaucugggaaaacaggaacaauuaccuaucaaagagguauuuuauugccucaaaaaguguggugcgcaaguggcaggagcaagguaauaaaaggaaccuugcccuuaauuggagaagcagauugccuccacgaaaaauacgguggauuaaacaaaagcaagccuuacuacacaggggaacaugcaaaggccauaggaaauugcccaauaugggugaaaacacccuugaagcuggccaauggaaccaaauauagaccuccugcaaaacuauuaaaggaaagggguuucuucggagcuauugcugguuucuuagaaggaggaugggaaggaaugauugcagguuggcacggauacacaucccauggggcacauggaguagcaguggcagcagaccuuaagagcacucaagaagccauaaacaagauaacaaaaaaucucaacucuuugagugagcuggaaguaaagaaucuucaaagacuaagcggugccauggaugaacuccacaacgaaauacuagaacuagacgagaaaguggaugaucucagagcugauacaauaagcucacaaauagaacucgcaguccugcuuuccaaugaaggaauaauaaacagugaagaugagcaucucuuggcgcuugaaagaaagcugaagaaaaugcugggccccucugcuguagagauagggaauggaugcuucgaaaccaaacacaagugcaaccagaccugucuugacagaauagcugcugguaccuuugaugcaggagaauuuucucucccaacuuuugauucacugaauauuacugcugcaucuuuaaaugacgauggauuggauaaucauacuauacugcuuuacuacucaacugcugccuccaguuuggcuguaacauugaugauagcuaucuuuguuguuuauauggucuccagagacaauguuucuugcuccaucugucuauaa

SEQ ID NO: 59208 - RNA, 1758 nt, Artificial Sequence
  derived and/or modified CDS sequence (wt) from hemagglutinin__InfluenzaB__AGX18104
augaaggcaauaauuguacuacucaugguaguaacauccaaugcagaucgaaucugcacugggauaacaucgucaaacucaccccauguggucaaaacugcuacucaaggggaggucaaugugacuggugugauaccacugacaacagcacccaccaaaucucauuuugcaaaucucaaaggaacaaaaaccagagggaaacuaugcccaaaaugccucaacugcacagaucuggacguggccuugggcagaccaaaaugcacggggaacauacccucggcagaaguuucaauacuccaugaagucagaccuguuaccucugggugcuuuccuauaaugcacgacagaacaaaaauuagacagcugcccaaccuucucagaggauacgaacauaucagauuaucaacucauaacguuaucaaugcagaaaaggcaccaggaggacccuacaaaauuggaaccucagggucuugcccuaauguuaccaauggaaacggauuuuucgcaacaauggcuugggccgucccaaaaaacgacaacaacaaaacagcaacaaauucauuaacaauagaaguaccauacauuuguacagaaggagaagaccaaauuaccauuuggggguuccacucugauaacgaaacccaaauggcaaaacucuauggggacucaaagccccagaaguucaccucaucugccaacggagugaccacacauuacguuucacagauugguggcuucccaaaucaaacagaagacggaggacuaccacaaagugguagaauuguuguugauuacauggugcaaaaaccugggaaaacaggaacaauuaccuaucaaagagguauuuuauugccucaaaaaguguggugugcaaguggcaggagcaagguaauaaaaggauccuugcccuuaauuggagaagcagauugccuccacgaaaaauacgguggauuaaacaaaagcaagccuuacuacacaggggaacaugcaaaggccauaggaaauugcccaauaugggugaaaacacccuugaagcuggccaauggaaccaaauauagaccuccugcaaaacuauuaaaggaaagggguuucuucggagcuauugcugguuucuuagaaggaggaugggaaggaaugauugcagguuggcacggauacacaucccauggggcacauggaguagcaguggcagcagaccuuaagagcacucaagaagccauaaacaagauaacaaaaaaucucaacucuuugagugagcuggaaguaaagaaucuucaaagacuaagcagugccauggaugaacuccacaacgaaauacuagaacuagacgagaaaguggaugaucucagagcugauacaauaagcucacaaauagaacucgcaguccugcuuuccaaugaaggaauaauaaacagugaagaugagcaucucuuggcgcuugaaagaaagcugaagaaaaugcugggccccucugcuguagagauagggaauggaugcuucgaaaccaaacacaagugcaaccagaccugucuugacagaauagcugcugguaccuuugaugcaggagaauuuucucuccccacuuuugauucacugaauauuacugcugcaucuuuaaaugaugauggauuggauaaucauacuauacugcuuuacuacucaacugcugccuccaguuuggcuguaacauuaaugauagcuaucuuuguuguuuauauggucuccagagacaauguuucuugcuccaucugucuauaa

SEQ ID NO: 59209 - RNA, 1758 nt, Artificial Sequence
  derived and/or modified CDS sequence (wt) from hemagglutinin__InfluenzaB__AGX18115
augaaggcaauaauuguacuacucaugguaguaacauccaaugcagaucgaaucugcacugggauaacaucgucaaacucaccccauguggucaaaacugcuacucaaggggaggucaaugugacuggugugauaccacugacaacaacacccaccaaaucucauuuugcaaaucucaaaggaacaaaaaccagagggaaacuaugcccaaaaugccucaacugcacagaucuggacguggccuugggcagaccaaaaugcacggggaacauacccucggcagaaguuucaauacuccaugaagucagaccuguuaccucugggugcuuuccuauaaugcacgacagaacaaaaauuagacagcugcccaaccuucucagaggauacgaacauaucagauuaucaacucauaacguuaucaaugcagaaaaggcaccaggaggacccuacaaaauuggaaccucagggucuugcccuaauguuaccaauggaaacggauuuuucgcaacaauggcuugggccgucccaaaaaacgacaacaacaaaacagcaacaaauucauuaacaauagaaguaccauacauuuguacagaaggagaagaccaaauuaccauuuggggguuccacucugauaacgaaacccaaauggcaaaacucuauggggacucaaagccccagaaguucaccucaucugccaacggagugaccacacauuacguuucacagauugguggcuucccaaaucaaacagaagacggaggacuaccacaaagugguagaauuguuguugauuacauggugcaaaaaucugggaaaacaggaacaauuaccuaucaaagagguauuuuauugccucaaaaaguguggugcgcaaguggcaggagcaagguaauaaaaggauccuugcccuuaauuggagaagcagauugccuccacgaaaaauacgguggauuaaacaaaagcaagccuuacuacacaggggaacaugcaaaggccauaggaaauugcccaauaugggugaaaacacccuugaagcuggccaauggaaccaaauauagaccuccugcaaaacuauuaaaggaaagggguuucuuuggagcuauugcugguuucuuagaaggaggaugggaaggaaugauugcagguuggcacggauacacaucccauggggcacauggaguagcaguggcagcagaccuuaagagcacucaagaagccauaaacaagauaacaaaaaaucucaacucuuugagugagcuggaaguaaagaaucuucaaagacuaagcggugccauggaugaacuccacaacgaaauacuagaacuagacgagaaaguggaugaucucagagcugauacaauaagcucacaaauagaacucgcaguccugcuuuccaaugaaggaauaauaaacagugaagaugagcaucucuuggcgcuugaaagaaagcugaagaaaaugcugggccccucugcuguagagauagggaauggaugcuucgaaaccaaacacaagugcaaccagaccugucuugacagaauagcugcugguaccuuugaugcaggagaauuuucucuccccacuuuugauucacugaauauuacugcugcaucuuuaaaugacgauggauuggauaaucauacuauacugcuuuacuacucaacugcugccuccaguuuggcuguaacauugaugauagcuaucuuuguuguuuauauggucuccagagacaauguuucuugcuccaucugucuauaa

SEQ ID NO: 59210 - RNA, 1758 nt, Artificial Sequence; identical to SEQ ID NO: 59170
  derived and/or modified CDS sequence (wt) from hemagglutinin__InfluenzaB__AGX18126

SEQ ID NO: 59211 - RNA, 1758 nt, Artificial Sequence
  derived and/or modified CDS sequence (wt) from hemagglutinin__InfluenzaB__AGX18137
augaaggcaauaauuguacuacucaugguaguaacauccaaugcagaucgaaucugcacugggauaacaucgucaaacucaccacauguugucaaaacugcuacucaaggggaggucaaugugacugguguaauaccacugacaacaacacccaccaaaucucauuuugcaaaucucaaaggaacagaaaccagagggaaacuaugcccaaaaugccucaacugcacagaucuggacguggccuugggcagaccaaaaugcacggggaacauacccucggcaagaguuucaauacuccaugaagucagaccuguuacaucugggugcuuuccuauaaugcacgacagaacaaaaauuagacagcugccuaaccuucucagaggauacgaacauaucagguuaucaacucauaacguuaucaaugcagaaaaugcaccaggaggacccuacaaaauuggaaccucagggucuugcccuaacguuaccaauggaaacggauuuuucgcaacaauggcuugggccgucccaaaaaacgacaacaacaaaacagcaacaaauucauuaacaauagaaguaccauacauuuguacagaaggagaagaccaaauuaccguuuggggguuccacucugauaacgaaacccaaauggcaaagcucuauggggacucaaagccccagaaguucaccucaucugccaacggagugaccacacauuacguuucgcagauugguggcuucccaaaucaaacagaagacggaggacuaccacaaagugguagaauuguuguugauuacauggugcaaaaaucugggaaaacaggaacaauuaccuaucaaagagguauuuuauugccucaaaaaguguggugcgcaaguggcaggagcaagguaauaaaaggauccuugccuuuaauuggagaagcagauugccuccacgaaaaauacgguggauuaaacaaaagcaagccuuacuacacaggggaacaugcaaaggccauaggaaauugcccaauaugggugaaaacacccuugaagcuggccaauggaaccaaauauagaccuccugcaaaacuauuaaaggaaagggguuucuucggagcuauugcugguuucuuagaaggaggaugggaaggaaugauugcagguuggcacggauacacaucccauggggcacauggaguagcgguggcagcagaccuuaagagcacucaagaggccauaaacaagauaacaaaaaaucucaacucuuugagugagcuggaaguaaagaaucuucaaagacuaagcggugccauggaugaacuccacaacgaaauacuagaacuagacgagaaaguggaugaucucagagcugauacaauaagcucacaaauagaacucgcaguccugcuuuccaaugaaggaauaauaaacagugaagaugagcaucucuuggcgcuugaaagaaagcugaagaaaaugcugggccccucugcuguagagauagggaauggaugcuuugaaaccaaacacaagugcaaccagaccugucucgacagaauagcugcugguaccuuugaugcaggagaauuuucucuccccacuuuugauucacugaauauuaccgcugcaucuuuaaaugacgauggauuagauaaucauacuauacugcuuuacuacucaacugcugccuccaguuuggcuguaacauugaugauagcuaucuuuguuguuuauauggucuccagagacaauguuucuugcuccaucugucuauaa

SEQ ID NO: 59212 - RNA, 1758 nt, Artificial Sequence
  derived and/or modified CDS sequence (wt) from hemagglutinin__InfluenzaB__AGX18148
augaaggcaauaauuguacuacucaugguaguaacauccaaugcagaucgaaucugcacugggauaacaucgucaaacucaccccauguggucaaaacugcuacucaaggggaggucaaugugacuggugugauaccacugacaacaacacccaccaaaucucauuuugcaaaucucaaaggaacaaaaaccagagggaaacuaugcccaaaaugccucaacugcacagaucuggacguggccuugggcagaccaaaaugcacggggaacauacccucggcagaaguuucaauacuccaugaagucagaccuguuaccucugggugcuuuccuauaaugcacgacagaacaaaaauuagacagcugcccaaccuucucagaggauacgaacauaucagauuaucaacucauaacguuaucaaugcagaaaaggcaccaggaggacccuacaaaauuggaaccucagggucuugcccuaauguuaccaauggaaacggauuuuucgcaacaauggcuugggccgucccaaaaaacgacaacaacaaaacagcaacaaauucauuaacaauagaaguaccauacauuuguacagaaggagaagaccaaauuaccauuuggggguuccacucugauaacgaaacccaaauggcaaaacucuauggggacucaaagccccagaaguucaccucaucugccaacggagugaccacacauuacguuucacagauugguggcuucccaaaucaaacagaagacggaggacuaccacaaagugguagaauuguuguugauuacauggugcaaaaaucugggaaaacaggaacaauuaccuaucaaagagguauuuuauugccucaaaaaguguggugcgcaaguggcaggagcaagguaauaaaaggaaccuugcccuuaauuggagaagcagauugccuccacgaaaaauacgguggauuaaacaaaagcaagccuuacuacacaggggaacaugcaaaggccauaggaaauugcccaauaugggugaaaacacccuugaagcuggccaauggaaccaaauauagaccuccugcaaaacuauuaaaggaaagggguuucuucggagcuauugcugguuucuuagaaggaggaugggaaggaaugauugcagguuggcacggauacacaucccauggggcacauggaguagcaguggcagcagaccuuaagagcacucaagaagccauaaacaagauaacaaaaaaucucaacucuuugagugagcuggaaguaaagaaucuucaaagacuaagcggugccauggaugaacuccacaacgaaauacuagaacuagacgagaaaguggaugaucucagagcugauacaauaagcucacaaauagaacucgcaguccugcuuuccaaugaaggaauaauaaacagugaagaugagcaucucuuggcgcuugaaagaaagcugaagaaaaugcugggccccucugcuguagagauagggaauggaugcuucgaaaccaaacacaagugcaaccagaccugucuugacagaauagcugcugguaccuuugaugcaggagaauuuucucuccccacuuuugauucacugaauauuacugcugcaucuuuaaaugacgauggauuggauaaucauacuauacugcuuuacuacucaacugcugccuccaguuuggcuguaacauugaugauagcuaucuuuguuguuuauauggucuccagagacaauguuucuugcuccaucugucuauag

SEQ ID NO: 59213 - RNA, 1758 nt, Artificial Sequence
  derived and/or modified CDS sequence (wt) from hemagglutinin__InfluenzaB__AGX18159
augaaggcaauaauuguacuacucaugguaguaacauccaaugcagaucgaaucugcacugggauaacaucgucaaacucaccacauguugucaaaacugcuacucaaggggaggucaaugugacugguguaauaccacugacaacaacacccaccaaaucucauuuugcaaaucucaaaggaacagaaaccagagggaaacuaugcccaaaaugccucaacugcacagaucuggacguggccuugggcagaccaaaaugcacggggaacauacccucggcaagaguuucaauacuccaugaagucagaccuguuacaucugggugcuuuccuauaaugcacgacagaacaaaaauuagacagcugccuaaccuucucagaggauacgaacauaucagguuaucaacucauaacguuaucaaugcagaaaaugcaccaggaggacccuacaaaauuggaaccucagggucuugcccuaacguuaccaauggaaacggauuuuucgcaacaauggcuugggccgucccaaaaaacgacaacaacaaaacagcaacaaauucauuaacaauagaaguaccauacauuuguacagaaggagaagaccaaauuaccguuuggggguuccacucugauaacgaaacccaaauggcaaagcucuauggggacucaaagccccagaaguucaccucaucugccaacggagugaccacacauuacguuucacagauugguggcuucccaaaucaaacagaagacggaggacuaccacaaagugguagaauuguuguugauuacauggugcaaaaaucugggaaaacaggaacaauuaccuaucaaagagguauuuuauugccucaaaaaguguggugcgcaaguggcaggagcaagguaauaaaaggauccuugccuuuaauuggagaagcagauugccuccacgaaaaauacgguggauuaaacaaaagcaagccuuacuacacaggggaacaugcaaaggccauaggaaauugcccaauaugggugaaaacacccuugaagcuggccaauggaaccaaauauagaccuccugcaaaacuauuaaaggaaagggguuucuucggagcuauugcugguuucuuagaaggaggaugggaaggaaugauugcagguuggcacggauacacaucccauggggcacauggaguagcgguggcagcagaccuuaagagcacucaagaggccauaaacaagauaacaaaaaaucucaacucuuugagugagcuggaaguaaagaaucuucaaagacuaagcggugccauggaugaacuccacaacgaaauacuagaacuagacgagaaaguggaugaucucagagcugauacaauaagcucacaaauagaacucgcaguccugcuuuccaaugaaggaauaauaaacagugaagaugagcaucucuuggcgcuugaaagaaagcugaagaaaaugcugggccccucugcuguagagauagggaauggaugcuuugaaaccaaacacaagugcaaccagaccugucucgacagaauagcugcugguaccuuugaugcaggagaauuuucucuccccacuuuugauucacugaauauuacugcugcaucuuuaaaugacgauggauuagauaaucauacuauacugcuuuacuacucaacugcugccuccaguuuggcuguaacauugaugauagcuaucuuuguuguuuauauggucuccagagacaauguuucuugcuccaucugucuauaa

SEQ ID NO: 59214 - RNA, 1758 nt, Artificial Sequence
  derived and/or modified CDS sequence (wt) from hemagglutinin__InfluenzaB__AGX18170
augaaggcaauaauuguacuacucaugguaguaacauccaaugcagaucgaaucugcacugggauaacaucgucaaacucaccacauguugucaaaacugcuacucaaggggaggucaaugugacugguguaauaccacugacaacaacacccaccaaaucucauuuugcaaaucucaaaggaacagaaaccagagggaaacuaugcccaaaaugccucaacugcacagaucuggacguggccuugggcagaccaaaaugcacggggaacauacccucggcaagaguuucaauacuccaugaagucagaccuguuacaucugggugcuuuccuauaaugcacgacagaacaaaaauuagacagcugccuaaccuucucagaggauacgaacauaucagguuaucaacucauaacguuaucaaugcagaaaaugcaccaggaggacccuacaaaauuggaaccucagggucuugcccuaacguuaccaauggaaacggauuuuucgcaacaauggcuugggccgucccaaaaaacgacaacaacaaaacagcaacaaauucauuaacaauagaaguaccauacauuuguacagaaggagaagaccaaauuaccguuuggggguuccacucugauaacgaaacccaaauggcaaagcucuauggggacucaaagccccagaaguucaccucaucugccaacggagugaccacacauuacguuucacagauugguggcuucccaaaucaaacagaagacggaggacuaccacaaagugguagaauuguuguugauuacauggugcaaaaaucugggaaaacagggacaauuaccuaucaaagagguauuuuauugccucaaaaaguguggugcgcaaguggcaggagcaagguaauaaaaggauccuugccuuuaauuggagaagcagauugccuccacgaaaaauacgguggauuaaacaaaagcaagccuuacuacacaggggaacaugcaaaggccauaggaaauugcccaauaugggugaaaacacccuugaagcuggccaauggaaccaaauauagaccuccugcaaaacuacuaaaggaaagggguuucuucggagcuauugcugguuucuuagaaggaggaugggaaggaaugauugcagguuggcacggauacacaucccauggggcacauggaguagcgguggcagcagaccuuaagagcacucaagaggccauaaacaagauaacaaaaaaucucaacucuuugagugagcuggaaguaaagaaucuucaaagacuaagcggugccauggaugaacuccacaacgaaauacuagaacuagacgagaaaguggaugaucucagagcugauacaauaagcucacaaauagaacucgcaguccugcuuuccaaugaaggaauaauaaacagugaagaugagcaucucuuggcgcuugaaagaaagcugaagaaaaugcugggccccucugcuguagagauagggaauggaugcuuugaaaccaaacacaagugcaaccagaccugucucgacagaauagcugcugguaccuuugaugcaggagaauuuucucuccccacuuuugauucacugaauauuacugcugcaucuuuaaaugacgauggauuggauaaccauacuauacugcuuuacuacucaacugcugccuccaguuuggcuguaacauugaugauagcuaucuuuguuguuuauauggucuccagagacaauguuucuugcuccaucugucuauaa

SEQ ID NO: 59215 - RNA, 1758 nt, Artificial Sequence; identical to SEQ ID NO: 59186
  derived and/or modified CDS sequence (wt) from hemagglutinin__InfluenzaB__AGX18181

SEQ ID NO: 59216 - RNA, 1758 nt, Artificial Sequence
  derived and/or modified CDS sequence (wt) from hemagglutinin__InfluenzaB__AGX18192
augaaggcaauaauuguacuacucaugguaguaacauccaaugcagaucgaaucugcacugggauaacaucgucaaacucaccccauguggucaaaacugcuacucaaggggaggucaaugugacuggugugauaccacugacaacaacacccaccaaaucucauuuugcaaaucucaaaggaacaaaaaccagagggaaacuaugcccaaaaugccucaacugcacagaucuggacguggccuugggcagaccaaaaugcacggggaacauacccucggcagaaguuucaauacuccaugaagucagaccuguuaccucugggugcuuuccuauaaugcacgacagaacaaaaauuagacagcugcccaaccuucucagaggauacgaacauaucagauuaucaacucauaacguuaucaaugcagaaaaggcaccaggaggacccuacaaaauuggaaccucagggucuugcccuaauguuaccaauggaaacggauuuuucgcaacaauggcuugggccgucccaaaaaacgacaacaacaaaacagcaacaaauucauuaacaauagaaguaccauacauuuguacagaaggagaagaccaaauuaccauuuggggguuccacucugauaacgaaacccaaauggcaaaacucuauggggacucaaagccccagaaguucaccucaucuaccaacggagugaccacacauuacguuucacagauugguggcuucccaaaucaaacagaagauggaggacuaccacaaagugguagaauuguuguugauuacauggugcaaaaaccugggaaaacaggaacaauuaccuaucaaagagguauuuuauugccucaaaaaguguggugugcaaguggcaggagcaagguaauaaaaggauccuugcccuuaauuggagaagcagauugccuccacgaaaaauacgguggauuaaacaaaagcaagccuuacuacacaggggaacaugcaaaggccauaggaaauugcccaauaugggugaaaacacccuugaagcuggccaauggaaccaaauauagaccuccugcaaaacuauuaaaggaaagggguuucuucggagcuauugcugguuucuuagaaggaggaugggaaggaaugauugcagguuggcacggauacacaucccauggggcacauggaguagcaguggcagcagaccuuaagagcacucaagaagccauaaacaagauaacaaaaaaucucaacucuuugagugagcuggaaguaaagaaucuucaaagacuaagcagugccauggaugaacuccacaacgaaauacuagaacuagacgagaaaguggaugaucucagagcugauacaauaagcucacaaauagaacucgcaguccugcuuuccaaugaaggaauaauaaacagugaagaugagcaucucuuggcgcuugaaagaaagcugaagaaaaugcugggccccucugcuguagagauagggaauggaugcuucgaaaccaaacacaagugcaaccagaccugucuugacagaauagcugcugguaccuuugaugcaggagaauuuucucuccccacuuuugauucacugaauauuacugcugcaucuuuaaaugaugauggauuggauaaucauacuauacugcuuuacuacucaacugcugccuccaguuuggcuguaacauugaugauagcuaucuuuguuguuuauauggucuccagagacaauguuucuugcuccaucugucuauaa

SEQ ID NO: 59217 - RNA, 1758 nt, Artificial Sequence; identical to SEQ ID NO: 59201
  derived and/or modified CDS sequence (wt) from hemagglutinin__InfluenzaB__AGX18203

SEQ ID NO: 59218 - RNA, 1758 nt, Artificial Sequence
  derived and/or modified CDS sequence (wt) from hemagglutinin__InfluenzaB__AGX18214
augaaggcaauaauuguacuacucaugguaguaacauccaaugcagaucgaaucugcacugggauaacaucgucaaacucaccccauguggucaaaacugcuacucaaggggaggucaaugugacuggugugauaccacugacaacaacacccaccaaaucucauuuugcaaaucucaaaggaacaaaaaccagagggaaacuaugcccaaaaugccucaacugcacagaucuggacguggccuugggcagaccaaaaugcacggggaacauacccucggcagaaguuucaauacuccaugaagucagaccuguuaccucugggugcuuuccuauaaugcacgacagaacaaaaauuagacagcugcccaaccuucucagaggauacgaacauaucagauuaucaacucauaacguuaucaaugcagaaaaggcaccaggaggacccuacaaaacuggaaccucagggucuugcccuaauguuaccaauggaaacggauuuuucgcaacaauggcuugggccgucccaaaaaacgacaacaacaaaacagcaacaaauucauuaacaauagaaguaccauacauuuguacagaaggagaagaccaaauuaccauuuggggguuccacucugauaacgaaacccaaauggcaaaacucuauggggacucaaagccccagaaguucaccucaucugccaacggagugaccacacauuacguuucacagauugguggcuucccaaaucaaacagaagacggaggacuaccacaaagugguagaauuguuguugauuacauggugcaaaaaucugggaaaacaggaacaauuaccuaucaaagagguauuuuauugccucaaaaaguguggugcgcaaguggcaggagcaagguaauaaaaggauccuugcccuuaauuggagaagcagauugccuccacgaaaaauacgguggauuaaacaaaagcaagccuuacuacacaggggaacaugcaaaggccauaggaaauugcccaauaugggugaaaacacccuugaagcuggccaauggaaccaaauauagaccuccugcaaaacuauuaaaggaaagggguuucuuuggagcuauugcugguuucuuagaaggaggaugggaaggaaugauugcagguuggcacggauacacaucccauggggcacauggaguagcaguggcagcagaccuuaagagcacucaagaagccauaaacaagauaacaaaaaaucucaacucuuugagugagcuggaaguaaagaaucuucaaagacuaagcggugccauggaugaacuccacaacgaaauacuagaacuagacgagaaaguggaugaucucagagcugauacaauaagcucacaaauagaacucgcaguccugcuuuccaaugaaggaauaauaaacagugaagaugagcaucucuuggcgcuugaaagaaagcugaagaaaaugcugggccccucugcuguagagauagggaauggaugcuucgaaaccaaacacaagugcaaccagaccugucuugacagaauagcugcugguaccuuugaugcaggagaauuuucucuccccacuuuugauucacugaauauuacugcugcaucuuuaaaugacgauggauuggauaaucauauuauacugcuuuacuacucaacugcugccuccaguuuggcuguaacauugaugauagcuaucuuuguuguuuauauggucuccagagacaauguuucuugcuccaucugucuauaa

SEQ ID NO: 59219 - RNA, 1758 nt, Artificial Sequence
  derived and/or modified CDS sequence (wt) from hemagglutinin__InfluenzaB__AGX18225
augaaggcaauaauuguacuacucaugguaguaacauccaaugcagaucgaaucugcacugggauaacaucgucaaacucaccccauguggucaaaacugcuacucaaggggaggucaaugugacuggugugauaccacugacaacaacacccaccaaaucucauuuugcaaaucucaaaggaacaaaaaccagagggaaacuaugcccaaaaugccucaacugcacagaucuggacguggccuugggcagaccaaaaugcacggggaacauacccucggcagaaguuucaauacuccaugaagucagaccuguuaccucugggugcuuuccuauaaugcacgacagaacaaaaauuagacagcugcccaaccuucucagaggauacgaacauaucagauuaucaacucauaacguuaucaaugcagaaaaggcaccaggaggacccuacaaaauuggaaccucagggucuugcccuaauguuaccaauggaaacggauuuuucgcaacaauggcuugggccgucccaaaaaacgacaacaacaaaacagcaacaaauucauuaacaauagaaguaccauacauuuguacagaaggagaagaccaaauuaccauuuggggguuccacucugauaacgaaacccaaauggcaaaacucuauggggacucaaagccccagaaguucaccucaucugccaacggagugaccacacauuacguuucacagauugguggcuucccaaaucaaacagaagacggaggacuaccacaaagugguagaauuguuguugauuacauggugcaaaaaucugggaaaacaggaacaauuaccuaucaaagagguauuuuauugccucaaaaaguguggugcgcaaguggcaggagcaagguaauaaaaggauccuugcccuuaauuggagaagcagauugccuccacgaaaaauacgguggauuaaacaaaagcaagccuuacuacacaggggaacaugcaaaggccauaggaaauugcccaauaugggugaaaacacccuugaagcuggccaauggaaccaaauauagaccuccugcaaaacuauuaaaggaaagagguuucuucggagcuauugcugguuucuuagaaggaggaugggaaggaaugauugcagguuggcacggauacacaucccauggggcacauggaguagcaguggcagcagaccuuaagagcacucaagaagccauaaacaggauaacaaaaaaucucaacucuuugagugagcuggaaguaaagaaucuucaaagacuaagcggugccauggaugaacuccacaacgaaauacuagaacuagacgagaaaguggaugaucucagagcugauacaauaagcucacaaauagaacucgcgguccugcuuuccaaugaaggaauaauaaacagugaagaugagcaucucuuggcgcuugaaagaaagcugaagaaaaugcugggccccucugcuguagagauagggaauggaugcuucgaaaccaaacacaagugcaaccagaccugucuugacagaauagcugcugguaccuuugaugcaggagaauuuucucuccccacuuuugauucacugaauauuacugcugcaucuuuaaaugacgauggauuggauaaucauacuauacugcuuuacuacucaacugcugccuccaguuuggcuguaacauugaugauagcuaucuuuguuguuuauauggucuccagagacaauguuucuugcuccaucugucuauaa

SEQ ID NO: 59220 - RNA, 1758 nt, Artificial Sequence
  derived and/or modified CDS sequence (wt) from hemagglutinin__InfluenzaB__AGX18236
augaaggcaauaauuguacuacucaugguaguaacauccaaugcagaucgaaucugcacugggauaacaucgucaaacucaccccauguggucaaaacugcuacucaaggggaggucaaugugacuggugugauaccacugacaacaacacccaccaaaucucauuuugcaaaucucaaaggaacaaaaaccagagggaaacuaugcccaaaaugccucaacugcacagaucuggacguggccuugggcagaccaaaaugcacggggaacauacccucggcagaaguuucaauacuccaugaagucagaccuguuaccucugggugcuuuccuauaaugcacgacagaacaaaaauuagacagcugcccaaccuucucagaggauacgaacauaucagauuaucaacucauaacguuaucaaugcagaaaaggcaccaggaggacccuacaaaauuggaaccucagggucuugcccuaauguuaccaauggaaacggauuuuucgcaacaauggcuugggccgucccaaaaaacgacaacaacaaaacagcaacaaauucauuaacaauagaaguaccauacauuuguacagaaggagaagaccaaauuaccauuuggggguuccacucugauaacgaaacccaaauggcaaaacucuauggggacucaaagccccagaaguucaccucaucugccaacggagugaccacacauuacguuucacagauugguggcuucccaaaucaaacagaagacggaggacuaccacaaagugguagaauuguuguugauuacaugaugcaaaaaucugggaaaacaggaacaauuaccuaucaaagagguauuuuauugccucaaaaaguguggugcgcaaguggcaggagcaagguaauaaaaggauccuugcccuuaauuggagaagcagauugccuccacgaaaaauacgguggauuaaacaaaagcaagccuuacuauacaggggaacaugcaaaggccauaggaaauugcccaauaugggugaaaacacccuugaagcuggccaauggaaccaaauauagaccuccugcaaaacuauuaaaggaaagggguuucuucggagcuauugcugguuucuuagaaggaggaugggaaggaaugauugcagguuggcacggauacacaucccauggggcacauggaguagcaguggcagcagaccuuaagagcacucaagaagccauaaacaagauaacaaaaaaucucaacucuuugagugagcuggaaguaaagaaucuucaaagacuaagcggugccauggaugaacuccacaacgaaauacuagaacuagacgagaaaguggaugaucucagagcugauacaauaagcucacaaauagaacucgcaguccugcuuuccaaugaaggaauaauaaacagugaagaugagcaucucuuggcgcuugaaagaaagcugaagaaaaugcugggccccucugcuguagagauagggaauggaugcuucgaaaccaaacacaagugcaaccagaccugucuugacagaauagcugcugguaccuuugaugcaggagaauuuucucuccccacuuuugauucacugaauauuacugcugcaucuuuaaaugacgauggauuggauaaucauacuauacugcuuuacuacucaacugcugccuccaguuuggcuguaacauugaugauagcuaucuuuguuguuuauauggucuccagagacaauguuucuugcuccaucugucuauaa

SEQ ID NO: 59221 - RNA, 1758 nt, Artificial Sequence; identical to SEQ ID NO: 59181
  derived and/or modified CDS sequence (wt) from hemagglutinin__InfluenzaB__AGX18247

SEQ ID NO: 59222 - RNA, 1758 nt, Artificial Sequence
  derived and/or modified CDS sequence (wt) from hemagglutinin__InfluenzaB__AGX18258
augaaggcaauaauuguacuacucaugguaguaacauccaaugcagaucgaaucugcacugggauaacaucgucaaacucaccccauguggucaaaacugcuacucaaggggaggucaaugugacuggugugauaccacugacaacaacacccaccaaaucucauuuugcaaaucucaaaggaacaaaaaccagagggaaacuaugcccaaaaugccucaacugcacagaucuggacguggccuugggcagaccaaaaugcacggggaacauacccucggcagaagucucaauacuccaugaagucagaccuguuaccucugggugcuuuccuauaaugcacgacagaacaaaaauuagacagcugcccaaccuucucagaggauacgaacauaucagauuaucaacucauaacguuaucaaugcagaaaaggcaccaggaggacccuacaaaauuggaaccucagggucuugcccuaauguuaccaauggaaacggauuuuucgcaacaauggcuugggccgucccaaaaaacgacaaaaacaaaacagcaacaaauucauuaacaauagaaguaccauacauuuguacagaaggagaagaccaaauuaccauuuggggguuccacucugauaacgaaacccaaauggcaaaacucuauggggacucaaagccccagaaguucaccucaucugccaacggagugaccacacauuacguuucacagauugguggcuucccaaaucaaacagaagacggaggacuaccacaaagugguagaauuguuguugauuacauggugcaaaaaucugggaaaacaggaacaauuaccuaucaaagagguauuuuauugccucaaaaaguguggugcgcaaguggcaggagcaagguaauaaaaggaaccuugcccuuaauuggagaagcagauugccuccacgaaaaauacgguggauuaaacaaaagcaagccuuacuacacaggggaacaugcaaaggccauaggaaauugcccaauaugggugaaaacacccuugaagcuggccaauggaaccaaauauagaccuccugcaaaacuauuaaaggaaagggguuucuucggagcuauugcugguuucuuagaaggaggaugggaaggaaugauugcagguuggcacggauacacaucccauggggcacauggaguagcaguggcagcagaccuuaagagcacucaagaagccauaaacaagauaacaaaaaaucucaacucuuugagugagcuggaaguaaagaaucuucaaagacuaagcggugccauggaugaacuccacaacgaaauacuagaacuagacgagaaaguggaugaucucagagcugauacaauaagcucacaaauagaacucgcaguccugcuuuccaaugaaggaauaauaaacagugaagaugagcaucucuuggcgcuugaaagaaagcugaagaaaaugcugggccccucugcuguagagauagggaauggaugcuucgaaaccaaacacaagugcaaccagaccugucuugacagaauagcugcugguaccuuugaugcaggagaauuuucucuccccacuuuugauucacugaauauuacugcugcaucuuuaaaugacgauggauuggauaaucauacuauacugcuuuacuacucaacugcugccuccaguuuggcuguaacauugaugauagcuaucuuuguuguuuauauggucuccagagacaauguuucuugcuccaucugucuauaa

SEQ ID NO: 59223 - RNA, 1758 nt, Artificial Sequence; identical to SEQ ID NO: 59213
  derived and/or modified CDS sequence (wt) from hemagglutinin__InfluenzaB__AGX18280

SEQ ID NO: 59224 - RNA, 1758 nt, Artificial Sequence
  derived and/or modified CDS sequence (wt) from hemagglutinin__InfluenzaB__AGX18291
augaaggcaauaauuguacuacucaugguaguaacauccaaugcagaucgaaucugcacugggauaacaucgucaaacucaccccauguggucaaaacugcuacucaaggggaggucaaugugacuggugugauaccacugacaacaacacccaccaaaucucauuuugcaaaucucaaaggaacaaaaaccagagggaaacuaugcccaaaaugccucaacugcacagaucuggacguggccuugggcagaccaaaaugcacggggaacauacccucggcagaaguuucaauacuccaugaagucagaccuguuaccucugggugcuuuccuauaaugcacgacagaacaaaaauuagacagcugcccaaccuucucagaggauacgaacauaucagauuaucaacucauaacguuaucaaugcagaaaaggcaccaggaggacccuacaaaauuggaaccucagggucuugcccuaauguuaccaauggaaacggauuuuucgcaacaauggcuugggccgucccaaaaaacgacaacaacaaaacagcaacaaauucauuaacaauagaaguaccauacauuuguacagaaggagaagaccaaauuaccauuuggggguuccacucugauaacgaaacccaaauggcaaaacucuauggggacucaaagccccagaaguucaccucaucugccaacggagugaccacacauuacguuucacagauugguggcuucccaaaucaaacagaagacggaggacuaccacaaagugguagaauuguuguugauuacauggugcaaaaaucugggaaaacaggaacaauuaccuaucaaagagguauuuuauugccucaaaaaguguggugcguaaguggcaggagcaagguaauaaaaggauccuugcccuuaauuggagaagcagauugccuccacgaaaaauacgguggauuaaacaaaagcaagccuuacuacacaggggaacaugcaaaggccauaggaaauugcccaauaugggugaaaacacccuugaagcuggccaauggaaccaaauauagaccuccugcaaaacuauuaaaggaaagggguuucuucggagcuauugcugguuucuuagaaggaggaugggaaggaaugauugcagguuggcacggauacacaucccauggggcacauggaguagcaguggcagcagaccuuaagagcacucaagaagccauaaacaagauaacaaaaaaucucaacucuuugagugagcuggaaguaaagaaucuucaaagacuaagcggugccauggaugaacuccacaacgaaauacuagaacuagacgagaaaguggaugaucucagagcugauacaauaagcucacaaauagaacucgcaguccugcuuuccaaugaaggaauaauaaacagugaagaugagcaucucuuggcgcuugaaagaaagcugaagaaaaugcugggccccucugcuguagagauagggaauggaugcuucgaaaccaaacacaagugcaaccagaccugucuugacagaauagcugcugguaccuuugaugcaggagaauuuucucuccccacuuuugauucacugaauauuacugcugcaucuuuaaaugacgauggauuggauaaucauacuauacugcuuuacuacucaacugcugccuccaguuuggcuguaacauugaugauagcuaucuuuguuguuuauauggucuccagagacaauguuucuugcuccaucugucuauaa

SEQ ID NO: 59225 - RNA, 1758 nt, Artificial Sequence
  derived and/or modified CDS sequence (wt) from hemagglutinin__InfluenzaB__AGX18302
augaaggcaauaauuguacuacucaugguaguaacauccaaugcagaucgaaucugcacugggauaacaucgucaaacucaccccauguggucaaaacugcuacucaaggggaggucaaugugacuggugugauaccacugacaacaacacccaccaaaucucauuuugcaaaucucaaaggaacaaaaaccagagggaaacuaugcccaaaaugccucaacugcacagaucuggacguggccuugggcagaccaaaaugcacggggaacauacccucggcagaagucucaauacuccaugaagucagaccuguuaccucugggugcuuuccuauaaugcacgacagaacaaaaauuagacagcugcccaaccuucucagaggauacaaacauaucagauuaucaacucauaacguuaucaaugcagaaaaggcaccaggaggacccuacaaaauuggaaccucagggucuugcccuaauguuaccaauggaaacggauuuuucgcaacaauggcuugggccgucccaaaaaacgacaacaacaaaacagcaacaaauucauuaacaauagaaguaccauacauuuguacagaaggagaagaccaaauuaccauuuggggguuccacucugauaacgaaacccaaauggcaaaacucuauggggacucaaagccccagaaguucaccucaucugccaacggagugaccacacauuacguuucacagauugguggcuucccaaaucaaacagaagacggaggacuaccacaaagugguagaauuguuguugauuacauggugcaaaaaucugggaaaacaggaacaauuaccuaucaaagagguauuuuauugccucaaaaaguguggugcgcaaguggcaggagcaagguaauaaaaggaaccuugcccuuaauuggagaagcagauugccuccacgaaaaauacgguggauuaaacaaaagcaagccuuacuacacaggggaacaugcaaaggccauaggaaauugcccaauaugggugaaaacacccuugaagcuggccaauggaaccaaauauagaccuccugcaaaacuauuaaaggaaagggguuucuucggagcuauugcugguuucuuagaaggaggaugggaaggaaugauugcagguuggcacggauacacaucccauggggcacauggaguagcaguggcagcagaccuuaagagcacucaagaagccauaaacaagauaacaaaaaaucucaacucuuugagugagcuggaaguaaagaaucuucaaagacuaagcggugccauggaugaacuccacaacgaaauacuagaacuagacgagaaaguggaugaucucagagcugauacaauaagcucacaaauagaacucgcaguccugcuuuccaaugaaggaauaauaaacagugaagaugagcaucucuuggcgcuugaaagaaagcugaagaaaaugcugggccccucugcuguagagauagggaauggaugcuucgaaaccaaacacaagugcaaccagaccugucuugacagaauagcugcugguaccuuugaugcaggagaauuuucucuccccacuuuugauucacugaauauuacugcugcaucuuuaaaugacgauggauuggauaaucauacuauacugcuuuacuacucaacugcugccuccaguuuggcuguaacauugaugauagcuaucuuuguuguuuauauggucuccagagacaauguuucuugcuccaucugucuauaa

SEQ ID NO: 59226 - RNA, 1758 nt, Artificial Sequence; identical to SEQ ID NO: 59163
  derived and/or modified CDS sequence (wt) from hemagglutinin__InfluenzaB__AGX18313

SEQ ID NO: 59227 - RNA, 1758 nt, Artificial Sequence
  derived and/or modified CDS sequence (wt) from hemagglutinin__InfluenzaB__AGX18324
augaaggcaauaauuguacuacucaugguaguaacauccaaugcagaucgaaucugcacugggauaacaucgucaaacucaccccauguggucaaaacugcuacucaaggggaggucaaugugacuggugugauaccacugacaacaacacccaccaaaucucauuuugcaaaucucaaaggaacaaaaaccagagggaaacuaugcccaaaaugccucaacugcacagaucuggacguggccuugggcagaccaaaaugcacggggaacauacccucggcagaaguuucaauacuccaugaagucagaccuguuaccucugggugcuuuccuauaaugcacgacagaacaaaaauuagacagcugcccaaccuucucagaggauacgaacauaucagauuaucaacucauaacguuaucaaugcagaaaaggcaccaggaggacccuacaaaauuggaaccucagggucuugcccuaauguuaccaauggaaacggauuuuucgcaacaauggcuugggccgucccaaaaaacgacaacaacaaaacagcaacaaauucauuaacaauagaaguaccauacauuuguacagaaggagaagaccaaauuaccauuuggggguuccacucugauaacgaagcccaaauggcaaaacucuauggggacucaaagccccagaaguucaccucaucugccaacggagugaccacacauuacguuucacagauugguggcuucccaaaucaaacagaagacggaggacuaccacaaagugguagaauuguuguugauuacauggugcaaaaaucugggaaaacaggaacaauuaccuaucaaagagguauuuuauugccucaaaaaguguggugcgcaaguggcaggagcaagguaauaaaaggauccuugcccuuaauuggagaagcagauugccuccacgaaaaauacgguggauuaaacaaaagcaagccuuacuauacaggggaacaugcaaaggccauaggaaauugcccaauaugggugaaaacacccuugaagcuggccaauggaaccaaauauagaccuccugcaaaacuauuaaaggaaagggguuucuucggagcuauugcugguuucuuagaaggaggaugggaaggaaugauugcagguuggcacggauacacaucccauggggcacauggaguagcaguggcagcagaccuuaagagcacucaagaagccauaaacaagauaacaaaaaaucucaacucuuugagugagcuggaaguaaagaaucuucaaagacuaagcggugccauggaugaacuccacaacgaaauacuagaacuagacgagaaaguggaugaucucagagcugauacaauaagcucacaaauagaacucgcaguccugcuuuccaaugaaggaauaauaaacagugaagaugagcaucucuuggcgcuugaaagaaagcugaagaaaaugcugggccccucugcuguagagauagggaauggaugcuucgaaaccaaacacaagugcaaccagaccugucuugacagaauagcugcugguaccuuugaugcaggagaauuuucucuccccacuuuugauucacugaauauuacugcugcaucuuuaaaugacgauggauuggauaaucauacuauacugcuuuacuacucaacugcugccuccaguuuggcuguaacauugaugauagcuaucuuuguuguuuauauggucuccagagacaauguuucuugcuccaucugucuauaa

SEQ ID NO: 59228 - RNA, 1758 nt, Artificial Sequence
  derived and/or modified CDS sequence (wt) from hemagglutinin__InfluenzaB__AGX18335
augaaggcaauaauuguacuacucaugguaguaacauccaaugcagaucgaaucugcacugggauaacaucgucaaacucaccccauguggucaaaacugcuacucaaggggaggucaaugugacuggugugauaccacugacaacaacacccaccaaaucucauuuugcaaaucucaaaggaacaaaaaccagagggaaacuaugcccaaaaugccucaacugcacagaucuggacguggccuugggcagaccaaaaugcacggggaacauacccucggcagaagucucaauacuccaugaagucagaccuguuaccucugggugcuuuccuauaaugcacgacagaacaaaaauuagacagcugcccaaccuucucagaggauacgaacauaucagauuaucaacucauaacguuaucaaugcagaaaaggcaccaggaggacccuacaaaauuggaaccucagggucuugcccuaauguuaccaauggaaacggauuuuucgcaacaauggcuugggccgucccaaaaaacgacaacaacaaaacagcaacaaauucauuaacaauagaaguaccauacauuuguacagaaggagaagaccaaauuaccauuuggggguuccacucugauaacgaaacccaaauggcaaaacucuauggggacucaaagccccagaaguucaccucaucugccaacggagugaccacacauuacguuucacagauugguggcuucccaaaucaaacagaagacggaggacuaccacaaagugguagaauuguuguugauuacauggugcaaaaaucugggaaaacaggaacaauuaccuaucaaagagguauuuuauugccucaaaaaguguggugcgcaaguggcaggagcaagguaauaaaaggaaccuugcccuuaauuggagaagcagauugccuccacgaaaaauacgguggauuaaacaaaagcaagccuuacuacacaggggaacaugcaaaggccauaggaaauugcccaauaugggugaaaacacccuugaagcuggccaauggaaccaaauauagaccuccugcaaaacuauuaaaggaaagggguuucuucggagcuauugcugguuucuuagaaggaggaugggaaggaaugauugcagguuggcacggauacacaucccauggggcacauggaguagcaguggcagcagaccuuaagagcacucaagaagccauaaacaagauaacaaaaaaucucaacucuuugagugagcuggaaguaaagaaucuucaaagacuaagcggugccauggaugaacuccacaacgaaauacuagaacuagacgagaaaguggaugaucucagagcugauacaauaagcucacaaauagaacucgcaguccugcuuuccaaugaaggaauaauaaacagugaagaugagcaucucuuggcgcuugaaagaaagcugaagaaaaugcugggccccucugcuguagagauagggaauggaugcuucgaaaccaaacacaagugcaaccagaccugucuugacagaauagcugcugguaccuuugaugcaggagaauuuucucuccccacuuuugauucacugaauauuacugcugcaucuuuaaaugacgauggauuggauaaucauacuauacugcuuuacuacucaacugcugccuccaguuuggcuguaacauugaugauagcuaucuuuguuguuuauauggucuccagagacaauguuucuugcuccaucugucuauaa

SEQ ID NO: 59229 - RNA, 1758 nt, Artificial Sequence
  derived and/or modified CDS sequence (wt) from hemagglutinin__InfluenzaB__AGX18346
augaaggcaauaauuguacuacucaugguaguaacauccaaugcagaucgaaucugcacugggauaacaucgucaaacucaccccauguggucaaaacugcuacucaaggggaggucaaugugacuggugugauaccacugacaacaacacccaccaaaucucauuuugcaaaucucaaaggaacaaaaaccagagggaaacuaugcccaaaaugccucaacugcacagaucuggacguggccuugggcagaccaaaaugcacggggaacauacccucggcagaaguuucaauacuccaugaagucagaccuguuaccucugggugcuuuccuauaaugcacgacagaacaaaaauuagacagcugcccaaccuucucagaggauacgaacauaucagauuaucaacucauaacguuaucaaugcagaaaaggcaccaggaggacccuacaaaauuggaaccucagggucuugcccuaauguuaccaauggaaacggauuuuucgcaacaauggcuugggccgucccaaaaaacgacaacaacaaaacagcaacaaauucauuaacaauagaaguaccauacauuuguacagaaggagaagaccaaauuaccauuuggggguuccacucugauaacgaaacccaaauggcaaaacucuauggggacucaaagccccagaaguucaccucaucugccaacggagugaccacacauuacguuucacagauugguggcuucccaaaucaaacagaagacggaggacuaccacaaagugguagaauuguuguugauuacauggugcaaaaaucugggaaaacaggaacaauuaccuaucaaagagguauuuuauugccucaaaaaguguggugcgcaaguggcaggagcaagguaauaaaaggauccuugcccuuaauuggagaagcagauugccuccacgaaaaauacgguggauuaaacaaaagcaagccuuacuacacaggggaacaugcaaaggccauaggaaauugcccaauaugggugaaaacacccuugaagcuggccaauggaaccaaauauagaccuccugcaaaacuauuaaaggaaagggguuucuucggagcuauugcugguuucuuagaaggaggaugggaaggaaugauugcagguuggcacggauacacaucccauggggcacauggaguagcaguggcagcagaccuuaagagcacucaagaagccauaaacaagauaacaaaaaaucucaacucuuugagugagcuggaaguaaagaaucuucaaagacuaagcggugccauggaugaacuccacaacgaaauacuagaacuagacgagaaaguggaugaucucagagcugauacaauaagcucacaaauagaacucgcaguccugcuuuccaaugaaggaauaauaaacagugaagaugagcaucucuuggcgcuugaaagaaagcugaagaaaaugcugggccccucugcuguagagauagggaauggaugcuucgaaaccaaacacaagugcaaccagaccugucuugacagaauagcugcugguaccuuugaugcaggagaauuuucucuccccacuuuugauucacugaauauuacugcugcaucuuuaaaugaagauggauuggauaaucauacuauacugcuuuacuacucaacugcugccuccaguuuggcuguaacauugaugauagcuaucuuuguuguuuauauggucuccagagacaauguuucuugcuccaucugucuauaa

SEQ ID NO: 59230 - RNA, 1758 nt, Artificial Sequence
  derived and/or modified CDS sequence (wt) from hemagglutinin__InfluenzaB__AGX18357
augaaggcaauaauuguacuacucaugguaguaacauccaaugcagaucgaaucugcacugggauaacaucgucaaacucaccccauguggucaaaacugcuacucaaggggaggucaaugugacuggugugauaccacugacaacagcacccaccaaaucucauuuugcaaaucucaaaggaacaaaaaccagagggaaacuaugcccaaaaugccucaacugcacagaucuggacguggccuugggcagaccaaaaugcacggggaacauacccucggcagaaguuucaauacuccaugaagucagaccuguuaccucugggugcuuuccuauaaugcacgacagaacaaaaauuagacagcugcccaaccuucucagaggauacgaacauaucagauuaucaacucauaacguuaucaaugcagaaaaggcaccaggaggacccuacaaaauuggaaccucagggucuugcccuaauguuaccaauggaaacggauuuuucgcaacaauggcuugggccgucccaaaaaacgacaacaacaaaacagcaacaaauucauuaacaauagaaguaccauacauuuguacagaaggagaagaccaaauuaccauuuggggguuccacucugauaaagaaacccaaauggcaaaacucuauggggacucaaagccccagaaguucaccucaucugccaacggagugaccacacauuacguuucacagauugguggcuucccaaaucaaacagaagacggaggacuaccacaaagugguagaauuguuguugauuacauggugcaaaaaccugggaaaacaggaacaauuaccuaucaaagagguauuuuauugccucaaaaaguguggugugcaaguggcaggagcaagguaauaaaaggauccuugcccuuaauuggagaagcagauugccuccacgaaaaauacgguggauuaaacaaaagcaagccuuacuacacaggggaacaugcaaaggccauaggaaauugcccaauaugggugaaaacacccuugaagcuggccaauggaaccaaauauagaccuccugcaaaacuauuaaaggaaagggguuucuucggagcuauugcugguuucuuagaaggaggaugggaaggaaugauugcagguuggcacggauacacaucccauggggcacauggaguagcaguggcagcagaccuuaagagcacucaagaagccauaaacaagauaacaaaaaaucucaacucuuugagugagcuggaaguaaagaaucuucaaagacuaagcagugccauggaugaacuccacaacgaaauacuagaacuagacgagaaaguggaugaucucagagcugauacaauaagcucacaaauagaacucgcaguccugcuuuccaaugaaggaauaauaaacagugaagaugagcaucucuuggcgcuugaaagaaagcugaagaaaaugcugggccccucugcuguagagauagggaauggaugcuucgaaaccaaacacaagugcaaccagaccugucuugacagaauagcugcugguaccuuugaugcaggagaauuuucucuccccacuuuugauucacugaauauuacugcugcaucuuuaaaugaugauggauuggauaaucauacuauacugcuuuacuacucaacugcugccuccaguuuggcuguaacauugaugauagcuaucuuuguuguuuauauggucuccagagacaauguuucuugcuccaucugucuauaa

SEQ ID NO: 59231 - RNA, 1758 nt, Artificial Sequence
  derived and/or modified CDS sequence (wt) from hemagglutinin__InfluenzaB__AGX18368
augaaggcaauaauuguacuacucaugguaguaacauccaaugcagaucgaaucugcacugggauaacaucgucaaacucaccccauguggucaaaacugcuacucaaggggaggucaaugugacuggugugauaccacugacaacagcacccaccaaaucucauuuugcaaaucucaaaggaacaaaaaccagagggaaacuaugcccaaaaugccucaacugcacagaucuggacguggccuugggcagaccaaaaugcacggggaacacacccucggcagaaguuucaauacuccaugaagucagaccuguuaccucugggugcuuuccuauaaugcacgacagaacaaaaauuagacagcugcccaaccuucucagaggauacgaacauaucagauuaucaaaucauaacguuaucaaugcagaaaaggcaccaggaggacccuacaaaauuggaaccucagggucuugcccuaauguuaccaauggaaacggauuuuucgcaacaauggcuugggccgucccaaaaaacgacaacaacaaaacagcaacaaauucauuaacaauagaaguaccauacauuuguacagaaggagaagaccaaauuaccauuuggggguuccacucugauaacgaaacccaaauggcaaaacucuauggggacucaaagccccagaaguucaccucaucugccaacggagugaccacacauuacguuucacagauugguggcuucccaaaucaaacagaagacggaggacuaccacaaagugguagaauuguuguugauuacauggugcaaaaaccugggaaaacaggaacaauuaccuaucaaagagguauuuuauugccucaaaaaguguggugugcaaguggcaggagcaagguaauaaaaggauccuugcccuuaauuggagaagcagauugccuccacgaaaaauacgguggauuaaacaaaagcaagccuuacuacacaggggaacaugcaaaggccauaggaaauugcccaauaugggugaaaacacccuugaagcuggccaauggaaccaaauauagaccuccugcaaaacuauuaaaggaaagggguuucuucggagcuauugcugguuucuuagaaggaggaugggaaggaaugauugcagguuggcacggauacacaucccauggggcacauggaguagcaguggcagcagaccuuaagagcacucaagaagccauaaacaagauaacaaaaaaucucaacucuuugagugagcuggaaguaaagaaucuucaaagacuaagcagugccauggaugaacuccacaacgaaauacuagaacuagacgagaaaguggaugaucucagagcugauacaauaagcucacaaauagaacucgcaguccugcuuuccaaugaaggaauaauaaacagugaagaugagcaucucuuggcgcuugaaagaaagcugaagaaaaugcugggccccucugcuguagagauagggaauggaugcuucgaaaccaaacacaagugcaaccagaccugucuugacagaauagcugcugguaccuuugaugcaggagaauuuucucuccccacuuuugauucacugaauauuacugcugcaucuuuaaaugaugauggauuggauaaucauacuauacugcuuuacuacucaacugcugccuccaguuuggcuguaacauugaugauagcuaucuuuguuguuuauauggucuccagagacaauguuucuugcuccaucugucuauaa

SEQ ID NO: 59232 - RNA, 1758 nt, Artificial Sequence; identical to SEQ ID NO: 59209
  derived and/or modified CDS sequence (wt) from hemagglutinin__InfluenzaB__AGX18379

SEQ ID NO: 59233 - RNA, 1758 nt, Artificial Sequence
  derived and/or modified CDS sequence (wt) from hemagglutinin__InfluenzaB__AGX18390
augaaggcaauaauuguacuacucaugguaguaacauccaaugcagaucgaaucugcacugggauaacaucgucaaacucaccccauguggucaaaacugcuacucaaggggaggucaaugugacuggugugauaccacugacaacaacacccaccaaaucucauuuugcaaaucucaaaggaacaaaaaccagagggaaacuaugcccaaaaugccucaacugcacagaucuggacguggccuugggcagaccaaaaugcacggggaacauacccucggcagaaguuucaauacuccaugaagucagaccuguuaccucugggugcuuuccuauaaugcacgacagaacaaaaauuagacagcugcccaaccuucucagaggauacgaacauaucagauuaucaacucauaacguuaucaaugcagaaaaggcaccaggaggacccuacaaaauuggaaccucagggucuugcccuaauguuaccaauggaaacggauuuuuugcaacaauggcuugggccgucccaaaaaacgacaacaacaaaacagcaacaaauucauuaacaauagaaguaccauacauuuguacagaaggagaagaccaaauuaccauuuggggguuccacucugauaacgaaacccaaauggcaaaacucuauggggacucaaagccccagaaguucaccucaucugccaacggagugaccacacauuacguuucacagauugguggcuucccaaaucaaacagaagacggaggacuaccacaaagugguagaauuguuguugauuacauggugcaaaaaucugggaaaacaggaacaauuaccuaucaaagagguauuuuauugccucaaaaaguguggugcgcaaguggcaggagcaagguaauaaaaggaaccuugcccuuaauuggagaagcagauugccuccacgaaaaauacgguggauuaaacaaaagcaagccuuacuacacaggggaacaugcaaaggccauaggaaauugcccaauaugggugaaaacacccuugaagcuggccaauggaaccaaauauagaccuccugcaaaacuauuaaaggaaagggguuucuucggagcuauugcugguuucuuagaaggaggaugggaaggaaugauugcagguuggcacggauacacaucccauggggcacauggaguagcaguggcagcagaccuuaagagcacucaagaagccauaaacaagauaacaaaaaaucucaacucuuugagugagcuggaaguaaagaaucuucaaagacuaagcggugccauggaugaacuccacaacgaaauacuagaacuagacgagaaaguggaugaucucagagcugauacaauaagcucacaaauagaacucgcaguccugcuuuccaaugaaggaauaauaaacagugaagaugagcaucucuuggcgcuugaaagaaagcugaagaaaaugcugggccccucugcuguagagauagggaauggaugcuucgaaaccaaacacaagugcaaccagaccugucuugacagaauagcugcugguaccuuugaugcaggagaauuuucucuccccacuuuugauucacugaauauuacugcugcaucuuuaaaugacgauggauuggauaaucauacuauacugcuuuacuacucaacugcugccuccaguuuggcuguaacauugaugauagcuaucuuuguuguuuauauggucuccagagacaauguuucuugcuccaucugucuauag

SEQ ID NO: 59234 - RNA, 1758 nt, Artificial Sequence
  derived and/or modified CDS sequence (wt) from hemagglutinin__InfluenzaB__AGX18401
augaaggcaauaauuguacuacucaugguaguaacauccaaugcagaucgaaucugcacugggauaacaucgucaaacucaccccauguggucaaaacugcuacucaaggggaggucaaugugacuggugugauaccacugacaacagcacccaccaaaucucauuuugcaaaucucaaaggaacaaaaaccagagggaaacuaugcccaaaaugccucaacugcacagaucuggacguggccuugggcagaccaaaaugcacggggaacauacccucggcagaaguuucaauacuccaugaagucagaccuguuaccucugggugcuuuccuauaaugcacgacagaacaaaaauuagacagcugcccaaccuucucagaggauacgaacauaucagauuaucaacucauaacguuaucaaugcagaaaaggcaccaggaggacccuacaaaauuggaaccucagggucuugcccuaauguuaccaauggaaacggauuuuucgcaacaauggcuugggccgucccaaaaaacgacaacaacaaaacagcaacaaauucauuaacaauagaaguaccauacauuuguacagaaggagaagaccaaauuaccauuuggggguuccacucugauaacgaaauccaaauggcaaaacucuauggggacucaaagccccagaaguucaccucaucugccaacggagugaccacacauuacguuucacagauugguggcuucccaaaucaaacagaagacggaggacuaccacaaagugguagaauuguuguugauuacauggugcaaaaaccugggaaaacaggaacaauuaccuaucaaagagguauuuuauugccucaaaaaguguggugugcaaguggcaggagcaagguaauaaaaggauccuugcccuuaauuggagaagcagauugccuccacgaaaaauacgguggauuaaacaaaagcaagccuuacuacacaggggaacaugcaaaggccauaggaaauugcccaauaugggugaaaacacccuugaagcuggccaauggaaccaaauauagaccuccugcaaaacuauuaaaggaaagggguuucuucggagcuauugcugguuucuuagaaggaggaugggaaggaaugauugcagguuggcacggauacacaucccauggggcacauggaguagcaguggcagcagaccuuaagagcacucaagaagccauaaacaagauaacaaaaaaucucaacucuuugagugagcuggaaguaaagaaucuucaaagacuaagcagugccauggaugaacuccacaacgaaauacuagaacuagacgagaaaguggaugaucucagagcugauacaauaagcucacaaauagaacucgcaguccugcuuuccaaugaaggaauaauaaacagugaagaugagcaucucuuggcgcuugaaagaaagcugaagaaaaugcugggccccucugcuguagagauagggaauggaugcuucgaaaccaaacacaagugcaaccagaccugucuugacagaauagcugcugguaccuuugaugcaggagaauuuucucuccccacuuuugauucacugaauauuacugcugcaucuuuaaaugaugauggauuggauaaucauacuauacugcuuuacuacucaacugcugccuccaguuuggcuguaacauugaugauagcuaucuuuguuguuuauauggucuccagagacaauguuucuugcuccaucugucuauaa

SEQ ID NO: 59235 - RNA, 1758 nt, Artificial Sequence
  derived and/or modified CDS sequence (wt) from hemagglutinin__InfluenzaB__AGX18412
augaaggcaauaauuguacuacucaugguaguaacauccaaugcagaucgaaucugcacugggauaacaucgucaaacucaccccauguggucaaaacugcuacucaaggggaggucaaugugacuggugugauaccacugacaacaacacccaccaaaucucauuuugcaaaucucaaaggaacaaaaaccagagggaaacuaugcccaaaaugccucaacugcacagaucuggacguggccuugggcagaccaaaaugcacggggaacauacccucggcagaaguuucaauacuccaugaagucagaccuguuaccucugggugcuuuccuauaaugcacgacagaacaaaaauuagacagcugcccaaccuucucagaggauacgaacauaucagauuaucaaaucauaacguuaucaaugcagaaaaggcaccaggaggacccuacaaaauuggaaccucagggucuugcccuaauguuaccaauggaaacggauuuuucgcaacaauggcuugggccgucccaaaaaacgacaacaacaaaacagcaacaaauucauuaacaauagaaguaccauacauuuguacagaaggagaagaccaaauuaccauuuggggguuccacucugauaacgaagcccaaauggcaaaacucuauggggacucaaagccccagaaguucaccucaucugccaacggagugaccacacauuacguuucacagauugguggcuucccaaaucaaacagaagacggaggacuaccacaaagugguagaauuguuguugauuacauggugcaaaaaucugggaaaacaggaacaauuaccuaucaaagagguauuuuauugccucaaaaaguguggugcgcaaguggcaggagcaagguaauaaaaggauccuugcccuuaauuggagaagcagauugccuccacgaaaaauacgguggauuaaacaaaagcaagccuuacuacacaggggaacaugcaaaggccauaggaaauugcccaauaugggugaaaacacccuugaagcuggccaauggaaccaaauauagaccuccugcaaaacuauuaaaggaaagagguuucuucggagcuauugcugguuucuuagaaggaggaugggaaggaaugauugcagguuggcacggauacacaucccauggggcacauggaguagcaguggcagcagaccuuaagagcacucaagaagccauaaacaagauaacaaaaaaucucaacucuuugagugagcuggaaguaaagaaucuucaaagacuaagcggugccauggaugaacuccacaacgaaauacuagaacuagacgagaaaguggaugaucucagagcugauacaauaagcucacaaauagaacucgcaguccugcuuuccaaugaaggaauaauaaacagugaagaugagcaucucuuggcgcuugaaagaaagcugaagaaaaugcugggccccucugcuguagagauagggaauggaugcuucgaaaccaaacacaagugcaaccagaccugucuugacagaauagcugcugguaccuuugaugcaggagaauuuucucuccccacuuuugauucacugaauauuacugcugcaucuuuaaaugacgauggauuggauaaucauacuauacugcuuuacuacucaacugcugccuccaguuuggcuguaacauugaugauagcuaucuuuguuguuuauauggucuccagagacaauguuucuugcuccaucugucuauaa

SEQ ID NO: 59236 - RNA, 1758 nt, Artificial Sequence; identical to SEQ ID NO: 58993
  derived and/or modified CDS sequence (wt) from hemagglutinin__InfluenzaB__AGX18423

SEQ ID NO: 59237 - RNA, 1755 nt, Artificial Sequence
  derived and/or modified CDS sequence (wt) from hemagglutinin__InfluenzaB__AGX18424
augaaggcaauaauuguacuacucaugguaguaacauccaacgcagaucgaaucugcacugggauaacaucuucaaacucaccucauguggucaaaacagcuacucaaggggaggucaaugugacuggugugauaccacugacaacaacuccaauaaaaucucauuuugcaaaucucaaaggaacaaggacuagagggaaacuaugcccagauugucucaacugcacagaucuggauguggccuugggcagaccaauguguguggggaccacaccuucggcaaaagcuucaauacuccacgaagucagaccuguuacauccgggugcuuuccuauaaugcacgacagaacaaaaaucagacaacuacccaaucuucucagaggauaugaaaauaucagguuaucaacccaaaacguuaucgaugcagaaaaggcccuaggaggacccuacagacuuggaaccucaggaucuugcccuaacgccaccaguaaaagcggauuuuucgcaacaauggcuugggcugucccaaaggacaacaacaaaaaugcaacgaacccacuaacaguagaaguaccauacaucuguacagaaggggaagaccaaauuacuguuuggggguuccauucagaugacaaaacccaaaugaaaaaccucuauggagacucaaauccucaaaaguucaccucaucugcuaauggaguaaccacacauuauguuucucagauuggcggcuucccagaucaaacagaagacggaggacuaccacaaagcggcagaauuguuguugauuacauggugcaaaaaccugggaaaacaggaacaauugucuaucaaagagguguuuuguugccucaaaagguguggugcgcgaguggcaggagcaaaguaauaaaaggguccuugccuuuaauuggugaagcagauugccuucaugaaaaauacgguggguuaaacaaaagcaagccuuacuacacaggagaacaugcaaaagccauaggaaauugcccaauaugggugaaaacaccuuugaagcuugccaauggaaccaaauauagaccuccugcaaaacuauuaaaggaaagggguuucuucggagcuauugcugguuuccuagaaggaggaugggaaggaaugauugcagguuggcacggauacacaucucacggagcacauggaguggcaguggcggcagaccuuaagaguacgcaagaagcuauaaacaagauaacaaaaaaucucaauucuuugagugagcuagaaguaaagaaucuucaaagacuaaguggugccauggaugaacuccacaacgaaauacucgagcuggaugagaaaguggaugaucucagagcugacacuauaagcucgcaaauagaacuugcagucuugcuuuccaacgaaggaauaauaaacagugaagaugagcaucuauuggcacuugagagaaaacuaaagaaaaugcugggucccucugcuguagacauaggaaauggaugcuucgaaaccaaacacaagugcaaccagaccugcuuagacaggauagcugcuggcaccuuuaaugcaggagaauuuucucuccccacuuuugauucacugaacauuacugcugcaucuuuaaaugaugauggauuggauaaccauacuauauugcucuauuacucaacugcugcuucuaguuuggcuguaacauugaugcuagcuauuuuuauuguuuauauggucuccagagacaacguuucaugcuccaucugucuauaa

SEQ ID NO: 59238 - RNA, 1758 nt, Artificial Sequence
  derived and/or modified CDS sequence (wt) from hemagglutinin__InfluenzaB__AGX18435
augaaggcaauaauuguacuacucaugguaguaacauccaaugcagaucgaaucugcacugggauaacaucgucaaacucaccccauguggucaaaacugcuacucaaggggaggucaaugugacuggugugauaccacugacaacaacacccaccaaaucucauuuugcaaaucucaaaggaacaaaaaccagagggaaacuaugcccaaaaugccucaacugcacagaucuggacguggccuugggcagaccaaaaugcacggggaacauacccucggcagaaguuucaauacuccaugaagucagaccuguuaccucugggugcuuuccuauaaugcacgacagaacaaaaauuagacagcugcccaaccuucucagaggauacgaacauaucagacuaucaacucauaacguuaucaaugcagaaaaggcaccaggaggacccuacaaaauuggaaccucagggucuugcccuaauguuaccaauggaaacggauuuuucgcaacaauggcuugggccgucccaaaaaacgacaacaacaaaacagcaacaaauucauuaacaauagaaguaccauacauuuguacagaaggagaagaccaaauuaccauuuggggguuccacucugauaacgaaauccaaauggcaaaacucuauggggacucaaagccccagaaguucaccucaucugccaacggagugaccacacauuacguuucacagauugguggcuucccaaaucaaacagaagacggaggacuaccacaaagugguagaauuguuguugauuacauggugcaaaaaucugggaaaacaggaacaauuaccuaucaaagagguauuuuauugccucaaaaaguguggugcgcaaguggcaggagcaagguaauaaaaggauccuugcccuuaauuggagaagcagauugccuccacgaaaaauacgguggauuaaacaaaagcaagccuuacuacacaggggaacaugcaaaggccauaggaaauugcccaauaugggugaaaacacccuugaagcuggccaauggaaccaaauauagaccuccugcaaaacuauuaaaggaaagggguuucuucggagcuauugcugguuucuuagaaggaggaugggaaggaaugauugcagguuggcacggauacacaucccauggggcacauggaguagcaguggcagcagaccuuaagagcacucaagaagccauaaacaagauaacaaaaaaucucaacucuuugagugagcuggaaguaaagaaucuucaaagacuaagcggugccauggaugaacuccacaacgaaauacuagaacuagacgagaaaguggaugaucucagagcugauacaauaagcucacaaauagaacucgcaguccugcuuuccaaugaaggaauaauaaacagugaagaugagcaucucuuggcgcuugaaagaaagcugaagaaaaugcugggccccucugcuguagagauagggaauggaugcuucgaaaccaaacacaagugcaaccagaccugucuugacagaauagcugcugguaccuuugaugcaggagaauuuucucuccccacuuuugauucacugaauauuacugcugcaucuuuaaaugacgauggauuggauaaucauacuauacugcuuuacuacucaacugcugccuccaguuuggcuguaacauugaugauagcuaucuuuguuguuuauauggucuccagagacaauguuucuugcuccaucugucuauaa

SEQ ID NO: 59239 - RNA, 1758 nt, Artificial Sequence
  derived and/or modified CDS sequence (wt) from hemagglutinin__InfluenzaB__AGX18446
augaaggcaauaauuguacuacucaugguaguaacauccaaugcagaucgaaucugcacugggauaacaucgucaaacucaccccauguggucaaaacugcuacucaaggggaggucaaugugacuggugugauaccacugacaacaacacccaccaaaucucauuuugcaaaucucaaaggaacaaaaaccagagggaaacuaugcccaaaaugccucaacugcacagaucuggacguggccuugggcagaccaaaaugcacggggaacauacccucggcagaaguuucaauacuccaugaagucagaccuguuaccucugggugcuuuccuauaaugcacgacagaacaaaaauuagacagcugcccaaccuucucagaggauacgaacauaucagauuaucaacucauaacguuaucaaugcagaaaaggcaccaggaggacccuacaaaauuggaaccucagggucuuguccuaauguuaccaauggaaacggauuuuucgcaacaauggcuugggccgucccaaaaaacgacaacaacaaaacagcaacaaauucauuaacaauagaaguaccauacauuuguacagaaggagaagaccaaauuaccauuuggggguuccacucugauaacgaaacccaaauggcaaaacucuauggggacucaaagccccagaaguucaccucaucugccaacggagugaccacacauuacguuucacagauugguggcuucccaaaucaaacagaagacggaggacuaccacaaagugguagaauuguuguugauuacauggugcaaaaaucugggaaaacaggaacaauuaccuaucaaagagguauuuuauugccucaaaaaguguggugcgcaaguggcaggagcaagguaauaaaaggauccuugcccuuaauuggagaagcagauugccuccacgaaaaauacgguggauuaaacaaaagcaagccuuacuacacaggggaacaugcaaaggccauaggaaauugcccaauaugggugaaaacacccuugaagcuggccaauggaaccaaauauagaccuccugcaaaacuauuaaaggaaagagguuucuucggagcuauugcugguuucuuagaaggaggaugggaaggaaugauugcagguuggcacggauacacaucccauggggcacauggaguagcaguggcagcagaccuuaagagcacucaagaagccauaaacaagauaacaaaaaaucucaacucuuugagugagcuggaaguaaagaaucuucaaagacuaagcggugccauggaugaacuccacaacgaaauacuagaacuagacgagaaaguggaugaucucagagcugauacaauaagcucacaaauagaacucgcaguccugcuuuccaaugaaggaauaauaaacagugaagaugagcaucucuuggcgcuugaaagaaagcugaagaaaaugcugggccccucugcuguggagauagggaauggaugcuucgaaaccaaacacaagugcaaccagaccugucuugacagaauagcugcugguaccuuugaugcaggagaauuuucucuccccacuuuugauucacugaauauuacugcugcaucuuuaaaugacgauggauuggauaaucauacuauacugcuuuacuacucaacugcugccuccaguuuggcuguaacauugaugauagcuaucuuuguuguuuauauggucuccagagacaauguuucuugcuccaucugucuauaa

SEQ ID NO: 59240 - RNA, 1758 nt, Artificial Sequence; identical to SEQ ID NO: 59186
  derived and/or modified CDS sequence (wt) from hemagglutinin__InfluenzaB__AGX18457

SEQ ID NO: 59241 - RNA, 1758 nt, Artificial Sequence; identical to SEQ ID NO: 58993
  derived and/or modified CDS sequence (wt) from hemagglutinin__InfluenzaB__AGX18468

SEQ ID NO: 59242 - RNA, 1758 nt, Artificial Sequence; identical to SEQ ID NO: 59228
  derived and/or modified CDS sequence (wt) from hemagglutinin__InfluenzaB__AGX18479

SEQ ID NO: 59243 - RNA, 1758 nt, Artificial Sequence
  derived and/or modified CDS sequence (wt) from hemagglutinin__InfluenzaB__AGX18490
augaaggcaauaauuguacuacucaugguaguaacauccaaugcagaucgaaucugcacugggauaacaucgucaaacucaccacauguugucaaaacugcuacucaaggggaggucaaugugacugguguaauaccacugacaacaacacccaccaaaucucauuuugcaaaucucaaaggaacagaaaccagagggaaacuaugcccaaaaugccucaacugcacagaucuggacguggccuugggcagaccaaaaugcacggggaacauacccucggcaagaguuucaauacuccaugaagucagaccuguuacaucugggugcuuuccuauaaugcacgacaggacaaaaauuagacagcugccuaaccuucucagaggauacgaacauaucagguuaucaacucauaacguuaucaaugcagaaaaugcaccaggaggacccuacaaaauuggaaccucagggucuugcccuaacguuaccaauggaaacggauuuuucgcaacaauggcuugggccgucccaaaaaacgacaacaacaaaacagcaacaaauucauuaacaauagaaguaccauacauuuguacagaaggagaagaccaaauuaccguuuggggguuccacucugauaacgagacccaaauggcaaagcucuauggggacucaaagccccagaaguucaccucaucugccaacggagugaccacacauuacguuucacagauugguggcuucccaaaucaaacagaagacggaggacuaccacaaagugguagaauuguuguugauuacauggugcaaaaaucugggaaaacaggaacaauuaccuaucaaagagguauuuuauugccucaaaagguguggugcgcaaguggcaggagcaagguaauaaaaggauccuugccuuuaauuggagaagcagauugccuccacgaaaaauacgguggguuaaacaaaagcaagccuuacuacacaggggaacaugcaaaggccauaggaaauugcccaauaugggugaaaacacccuugaagcuggccaauggaaccaaauauagaccuccugcaaaacuauuaaaggaaagggguuucuucggagcuauugcugguuucuuagaaggaggaugggaaggaaugauugcagguuggcacggauacacaucccauggggcacauggaguagcgguggcagcagaccuuaagagcacucaagaggccauaaacaagauaacaaaaaaucucaacucuuugagugagcuggaaguaaagaaucuucaaagacuaagcggugccauggaugaacuccacaacgaaauacuagaacuagacgagaaaguggaugaucucagagcugauacaauaagcucacaaauagaacucgcaguccugcuuuccaaugaaggaauaauaaacagugaagaugagcaucucuuggcgcuugaaagaaagcugaagaaaaugcugggccccucugcuguagagauagggaauggaugcuuugaaaccaaacacaagugcaaccagaccugucucgacagaauagcugcugguaccuuugaugcaggagaauuuucucuccccaccuuugauucacugaauauuacugcugcaucuuuaaaugacgauggauuggauaaucauacuauacugcuuuacuacucaacugcugccuccaguuuggcuguaacauugaugauagcuaucuuuguuguuuauauggucuccagagacaauguuucuugcuccaucugucuauaa

SEQ ID NO: 59244 - RNA, 1758 nt, Artificial Sequence
  derived and/or modified CDS sequence (wt) from hemagglutinin__InfluenzaB__AGX18512
augaaggcaauaauuguacuacucaugguaguaacauccaaugcagaucgaaucugcacugggauaacaucgucaaacucaccacauguugucaaaacugcuacucaaggggaggucaaugugacugguguaauaccacugacaacaacacccaccaaaucucauuuugcaaaucucaaaggaacagaaaccagagggagacuaugcccaaaaugccucaacugcacagaucuggacguggccuugggcagaccaaaaugcacggggaacauacccucggcaagaguuucaauacuccaugaagucagaccuguuacaucugggugcuuuccuauaaugcacgacagaacaaaaauuagacagcugccuaaccuucucagaggauacgaacauaucagguuaucaacucauaacguuaucaaugcagaaaaugcaccaggaggacccuacaaaauuggaaccucagggucuugcccuaacguuaccaauggaaacggauuuuucgcaacaauggcuugggccgucccaaaaaacgacaacaacaaaacagcaacaaauucauuaacaauagaaguaccauacauuuguacagaaggagaagaccaaauuaccguuuggggguuccacucugauaacgagacccaaauggcaaagcucuauggggacucaaagccccagaaguucaccucaucugccaacggagugaccacacauuacguuucacagauugguggcuucccaaaucaaacagaagacggaggacuaccacaaagugguagaauuguuguugauuacauggugcaaaaaucugggaaaacaggaacaauuaccuaucaaagagguauuuuauugccucaaaagguguggugcgcaaguggcaggagcaagguaauaaaaggauccuugccuuuaauuggagaagcagauugccuccacgaaaaauacgguggauuaaacaaaagcaagccuuacuacacaggggaacaugcaaaggccauaggaaauugcccaauaugggugaaaacacccuugaagcuggccaauggaaccaaauauagaccuccugcaaaacuauuaaaggaaagggguuucuucggagcuauugcugguuucuuagaaggaggaugggaaggaaugauugcagguuggcacggauacacaucccauggggcacauggaguagcgguggcagcagaccuuaagagcacucaagaggccauaaacaagauaacaaaaaaucucaacucuuugagugagcuggaaguaaagaaucuucaaagacuaagcggugccauggaugaacuccacaacgaaauacuagaacuagacgagaaaguggaugaucucagagcugauacaauaagcucacaaauagaacucgcaguccugcuuuccaaugaaggaauaauaaacagugaagaugagcaucucuuggcgcuugaaagaaagcugaagaaaaugcugggccccucugcuguagagauagggaauggaugcuuugaaaccaaacacaagugcaaccagaccugucucgacagaauagcugcugguaccuuugaugcaggagaauuuucucuccccaccuuugauucacugaauauuacugcugcaucuuuaaaugacgauggauuggauaaucauacuauacugcuuuauuacucaacugcugccuccaguuuggcuguaacauugaugauagcuaucuuuguuguuuauauggucuccagagacaauguuucuugcuccaucugucuauaa

SEQ ID NO: 59245 - RNA, 1758 nt, Artificial Sequence
  derived and/or modified CDS sequence (wt) from hemagglutinin__InfluenzaB__AGX18523
augaaggcaauaauuguacuacucaugguaguaacauccaaugcagaucgaaucugcacugggauaacaucgucaaacucaccacauguugucaaaacugcuacucaaggggaggucaaugugacugguguaauaccacugacaacaacacccaccaaaucucauuuugcaaaucucaaaggaacagaaaccagagggaaacuaugcccaaaaugccucaacugcacagaucuggacguggccuugggcagaccaaaaugcacggggaacauacccucggcaagaguuucaauacuccaugaagucagaccuguuacaucugggugcuuuccuauaaugcacgacagaacaaaaauuagacagcugccuaaccuucucagaggauacgaacauaucagguuaucaacucauaacguuaucaaugcagaaaaugcaccaggaggacccuacaaaauuggaaccucagggucuugcccuaacguuaccaauggaaacggauuuuucgcaacaauggcuugggccgucccaaaaaacgacaacaacaaaacagcaacaaauucauuaacaauagaaguaccauacauuuguacagaaggagaagaccaaauuaccguuuggggguuccacucugauaacgagacccaaauggcaaagcucuauggggacucaaagccccagaaguucaccucaucugccaacggagugaccacacauuacguuucacagauugguggcuucccaaaucaaacagaagacggaggacuaccacaaagugguagaauuguuguugauuacauggugcaaaaaucugggaaaacaggaacaauuaccuaucaaagagguauuuuauugccucaaaagguguggugcgcaaguggcaggagcaagguaauaaaaggauccuugccuuuaauuggagaagcagauugccuccacgaaaaauacgguggauuaaacaaaagcaagccuuacuacacaggggaacaugcaaaggccauaggaaauugcccaauaugggugaaaacacccuugaagcuggccaauggaaccaaauauagaccuccugcaaaacuauuaaaggaaagggguuucuucggagcuauugcugguuucuuagaaggaggaugggaaggaaugauugcagguuggcacggauacacaucccauggggcacauggaguagcgguggcagcagaccuuaagagcacucaagaggccauaaacaagauaacaaaaaaucucaacucuuugagugagcuggaaguaaagaaucuucaaagacuaagcggugccauggaugaacuccacaacgaaauacuagaacuagacgagaaaguggaugaucucagagcugauacaauaagcucacaaauagaacucgcaguccugcuuuccaaugaaggaauaauaaacagugaagaugagcaucucuuggcgcuugaaagaaagcugaagaaaaugcugggccccucugcuguagagauagggaauggaugcuuugaaaccaaacacaagugcaaccagaccugucucgacagaauagcugcugguaccuuugaugcaggagaauuuucucuccccaccuuugauucacugaauauuacugcugcaucuuuaaaugacgauggauuggauaaucauacuauacugcuuuacuacucaacugcugccuccaguuuggcuguaacauugaugauagcuaucuuuguuguuuauauggucuccagagacaauguuucuugcuccaucugucuauaa

SEQ ID NO: 59246 - RNA, 1758 nt, Artificial Sequence
  derived and/or modified CDS sequence (wt) from hemagglutinin__InfluenzaB__AGX18534
augaaggcaauaauuguacuacucaugguaguaacauccaaugcagaucgaaucugcacugggauaacaucgucaaacucaccacauguugucaaaacugcuacucaaggggaggucaaugugacugguguaauaccacugacaacaacacccaccaaaucucauuuugcaaaucucaaaggaacagaaaccagagggaaacuaugcccaaaaugccucaacugcacagaucuggacguggccuugggcagaccaaaaugcacggggaacauacccucggcaagaguuucaauacuccaugaagucagaccuguuacaucugggugcuuuccuauaaugcacgacagaacaaagauuagacagcugccuaaccuucucagaggauacgaacauaucagguuaucaacucauaacguuaucaaugcagaaaaugcaccaggaggacccuacaaaauuggaaccucagggucuugcccuaacguuaccaauggaaacggauuuuucgcaacaauggcuugggccgucccaaaaaacgacaacaacaaaacagcaacaaauucauuaacaauagaaguaccauacauuuguacagaaggagaagaccaaauuaccguuuggggguuccacucugauaacgagacccaaauggcaaagcucuauggggacucaaagccccagaaguucaccucaucugccaacggagugaccacacauuacguuucacagauugguggcuucccaaaucaaacagaagacggaggacuaccacaaagugguagaauuguuguugauuacauggugcaaaaaucugggaaaacaggaacaauuaccuaucaaagagguauuuuauugccucaaaagguguggugcgcaaguggcaggagcaagguaauaaaaggauccuugccuuuaauuggagaagcagauugccuccacgaaaaauacgguggauuaaacaaaagcaagccuuacuacacaggggaacaugcaaaggccauaggaaauugcccaauaugggugaaaacacccuugaagcuggccaauggaaccaaauauagaccuccugcaaaacuauuaaaggaaagggguuucuucggagcuauugcugguuucuuagaaggaggaugggaaggaaugauugcagguuggcacggauacacaucccauggggcacauggaguagcgguggcagcagaccuuaagagcacucaagaggccauaaacaagauaacaaaaaaucucaacucuuugagugagcuggaaguaaagaaucuucaaagacuaagcggugccauggaugaacuccacaacgaaauacuagaacuagacgagaaaguggaugaucucagagcugauacaauaagcucacaaauagaacucgcaguccugcuuuccaaugaaggaauaauaaacagugaagaugagcaucucuuggcgcuugaaagaaagcugaagaaaaugcugggccccucugcuguagagauagggaauggaugcuuugaaaccaaacacaagugcaaccagaccugucucgacagaauagcugcugguaccuuugaugcaggagaauuuucucuccccaccuuugauucacugaauauuacugcugcaucuuuaaaugacgauggauuggauaaucauacuauacugcuuuauuacucaacugcugccuccaguuuggcuguaacauugaugauagcuaucuuuguuguuuauauggucuccagagacaauguuucuugcuccaucugucuauaa

SEQ ID NO: 59247 - RNA, 1758 nt, Artificial Sequence
  derived and/or modified CDS sequence (wt) from hemagglutinin__InfluenzaB__AGX18545
augaaggcaauaauuguacuacucaugguaguaacauccaaugcagaucgaaucugcacugggauaacaucgucaaacucaccacauguugucaaaacugcuacucaaggggaggucaaugugacugguguaauaccacugacaacaacacccaccaaaucucauuuugcgaaucucaaaggaacagaaaccagagggaaacuaugcccaaaaugccucaacugcacagaucuggacguggccuugggcagaccaaaaugcacggggaacauacccucggcaagaguuucaauacuccaugaagucagaccuguuacaucugggugcuuuccuauaaugcacgacagaacaaagauuagacagcugccuaaccuucucagaggauacgaacauaucagguuaucaacucauaacguuaucaaugcagaaaaugcaccaggaggacccuacaaaauuggaaccucagggucuugcccuaacguuaccaauggaaacggauuuuucgcaacaauggcuugggccgucccaaaaaacgacaacaacaaaacagcaacaaauucauuaacaauagaaguaccauacauuuguacagaaggagaagaccaaauuaccguuuggggguuccacucugauagcgagacccaaauggcaaagcucuauggggacucaaagccccagaaguucaccucaucugccaacggagugaccacacauuacguuucacagauugguggcuucccaaaucaaacagaagacggaggacuaccacaaagugguagaauuguuguugauuacauggugcaaaaaucugggaaaacaggaacaauuaccuaucaaagagguauuuuauugccucaaaagguguggugcgcaaguggcaggagcaagguaauaaaaggauccuugccuuuaauuggagaagcagauugccuccacgaaaaauacgguggauuaaacaaaagcaagccuuacuacacaggggaacaugcaaaggccauaggaaauugcccaauaugggugaaaacacccuugaagcuggccaauggaaccaaauauagaccuccugcaaaacuauuaaaggaaagggguuucuucggagcuauugcugguuucuuagaaggaggaugggaaggaaugauugcagguuggcacggauacacaucccauggggcacauggaguagcgguggcagcagaccuuaagagcacucaagaggccauaaacaagauaacaaaaaaucucaacucuuugagugagcuggaaguaaagaaucuucaaagacuaagcggugccauggaugaacuccacaacgaaauacuagaacuagacgagaaaguggaugaucucagagcugauacaauaagcucacaaauagaacucgcaguccugcuuuccaaugaaggaauaauaaacagugaagaugagcaucucuuggcgcuugaaagaaagcugaagaaaaugcugggccccucugcuguagagauagggaauggaugcuuugaaaccaaacacaagugcaaccagaccugucucgacagaauagcugcugguaccuuugaugcaggagaauuuucucuccccaccuuugauucacugaauauuacugcugcaucuuuaaaugacgauggauuggauaaucauacuauacugcuuuauuacucaacugcugccuccaguuuggcuguaacauugaugauagcuaucuuuguuguuuauauggucuccagagacaauguuucuugcuccaucugucuauaa

SEQ ID NO: 59248 - RNA, 1758 nt, Artificial Sequence
  derived and/or modified CDS sequence (wt) from hemagglutinin__InfluenzaB__AGX18556
augaaggcaauaauuguacuacucaugguaguaacauccaaugcagaucgaaucugcacugggauaacaucgucaaacucaccacauguugucaaaacugcuacucaaggggaggucaaugugacugguguaauaccacugacaacaacacccaccaaaucucauuuugcaaaucucaaaggaacagaaaccagagggaaacuaugcccaaaaugccucaacugcacagaucuggacguggccuugggcagaccaaaaugcacggggaacauacccucggcaagaguuucaauacuccaugaagucagaccuguuacaucugggugcuuuccuauaaugcacgacagaacaaaaauuagacagcugccuaaccuucucagaggauacgaacauaucagguuaucaacucauaacguuaucaaugcagaaaaugcaccaggaggacccuacaaaauuggaaccucagggucuugcccuaacguuaccaauggaaacggauuuuucgcaacaauggcuugggccgucccaaaaaacgacaacaacaaaacagcaacaaauucauuaacaauagaaguaccauacauuuguacagaaggagaagaccaaauuaccguuuggggguuccacucugauaacgagacccaaauggcaaagcucuauggggacucaaagccccagaaguucaccucaucugccaacggagugaccacacauuacguuucacagauugguggcuucccaaaucaaacagaagacggaggacuaccacaaagugguagaauuguuguugauuacauggugcaaaaaucugggaaaacaggaacaauuaccuaucaaagagguauuuuauugccucaaaagguguggugcgcaaguggcaggagcaagguaauaaaaggauccuugccuuuaauuggagaagcagauugccuccacgaaaaauacgguggguuaaacaaaagcaagccuuacuacacaggggaacaugcaaaggccauaggaaauugcccaauaugggugaaaacacccuugaagcuggccaauggaaccaaauauagaccuccugcaaaacuauuaaaggaaagggguuucuucggagcuauugcugguuucuuagaaggaggaugggaaggaaugauugcagguuggcacggauacacaucccauggggcacauggaguagcgguggcagcagaccuuaagagcacucaagaggccauaaacaagauaacaaaaaaucucaacucuuugagugagcuggaaguaaagaaucuucaaagacuaagcggugccauggaugaacuccacaacgaaauacuagaacuagacgagaaaguggaugaucucagagcugauacaauaagcucacaaauagaacucgcaguccugcuuuccaaugaaggaauaauaaacagugaagaugagcaucucuuggcgcuugaaagaaagcugaagaaaaugcugggccccucugcuguagagauagggaauggaugcuuugaaaccaaacacaagugcaaccagaccugucucgacagaauagcugcugguaccuuugaugcaggagaauuuucucuccccaccuuugauucacugaauauuacugcugcaucuuuaaaugacgauggauuggauaaucauacuauacugcuuuacuacucaacugcugccuccaguuuggcuguaacauugaugauagcuaucuuuguuguuuauauggucuccagagacaauguuucuugcuccaucugucuauaa

SEQ ID NO: 59249 - RNA, 1758 nt, Artificial Sequence; identical to SEQ ID NO: 59243
  derived and/or modified CDS sequence (wt) from hemagglutinin__InfluenzaB__AGX18567

SEQ ID NO: 59250 - RNA, 1758 nt, Artificial Sequence
  derived and/or modified CDS sequence (wt) from hemagglutinin__InfluenzaB__AGX18578
augaaggcaauaauuguacuacucaugguaguaacauccaaugcagaucgaaucugcacugggauaacaucgucaaacucaccacauguugucaaaacugcuacucaaggggaggucaaugugacugguguaauaccacugacaacaacacccaccaaaucucauuuugcaaaucucaaaggaacagaaaccagagggaaacuaugcccaaaaugccucaacugcacagaucuggacguggccuugggcagaccaaaaugcacggggaacauacccucggcaagaguuucaauacuccaugaagucagaccuguuacaucugggugcuuuccuauaaugcacgacagaacaaaaauuagacagcuuccuaaccuucucagaggauacgaacauaucagguuaucaacucauaacguuaucaaugcagaaaaugcaccaggaggacccuacaaaauuggaaccucagggucuugcccuaacguuaccaauggaaacggauuuuucgcaacaauggcuugggccgucccaaaaaacgacaaaaacaaaacagcaacaaauucauuaacaauagaaguaccauacauuuguacagaaggagaagaccaaauuaccguuuggggguuccacucugauaacgaaacccaaauggcaaagcucuauggggacucaaagccccagaaguucaccucaucugccaacggagugaccacacauuacguuucacagauugguggcuucccaaaucaaacagaagacggaggacuaccacaaagugguagaauuguuguugauuacauggugcaaaaaucugggaaaacaggaacaauuaccuaucaaagagguauuuuauugccucaaaaaguguggugcgcaaguggccggagcaagguaauaaaaggauccuugccuuuaauuggagaagcagauugccuccacgaaaaauacgguggauuaaacaaaagcaagccuuacuacacaggggaacaugcaaaggccauaggaaauugcccaauaugggugaaaacacccuugaagcuggccaauggaaccaaauauagaccuccugcaaaacuauuaaaggaaagggguuucuucggagcuauugcugguuucuuagaaggaggaugggaaggaaugauugcagguuggcacggauacacaucccauggggcacauggaguagcgguggcagcagaccuuaaaagcacucaagaggccauaaacaagauaacaaaaaaucucaacucuuugagugagcuggaaguaaagaaucuucaaagacuaagcggugccauggaugaacuccacaaagaaauacuagaacuagacgagaaaguggaugaucucagagcugauacaauaagcucacaaauagaacucgcaguccugcuuuccaaugaaggaauaauaaacagugaagaugagcaucucuuggcgcuugaaagaaagcugaagaaaaugcugggccccucugcuguagagauagggaauggaugcuuugaaaccaaacacaagugcaaccagaccugucucgacagaauagcugcugguaccuuugaugcaggagaauuuucucuccccaccuuugauucacugaauauuacugcugcaucuuuaaaugacgauggauuggauaaucauacuauacugcuuuacuacucaacugcugccuccaguuuggcuguaacauugaugauagcuaucuuuguuguuuauauggucuccagagacaauguuucuugcuccaucugucuauaa

SEQ ID NO: 59251 - RNA, 1758 nt, Artificial Sequence
  derived and/or modified CDS sequence (wt) from hemagglutinin__InfluenzaB__AGX18589
augaaggcaauaauuguacuacucaugguaguaacauccaaugcagaucgaaucugcacugggauaacaucgucaaacucaccacauguugucaaaacugcuacucaaggggaggucaaugugacugguguaauaccacugacaacaacacccaccaaaucucauuuugcaaaucucaaaggaacagaaaccagagggaaacuaugcccaaaaugccucaacugcacagaucuggacguggccuugggcagaccaaaaugcacggggaacauacccucggcaagaguuucaauacuccaugaagucagaccuguuacaucugggugcuuuccuauaaugcacgacagaacaaaaauuagacagcugccuaaccuucucagaggauacgaacauaucagguuaucaacucauaacguuaucaaugcagaaaaugcaccaggaggacccuacaaaauuggaaccucagggucuugcccuaacguuaccaauggaaacggauuuuucgcaacaauggcuugggccgucccaaaaaacgacaacaacaaaacagcaacaaauucauuaacaauagaaguaccauacauuuguacagaaggagaagaccaaauuaccguuuggggguuccacucugauaccgagacccaaauggcaaagcucuauggggacucaaagccccagaaguucaccucaucugccaacggagugaccacacauuacguuucacagauuggugacuucccaaaucaaacagaagacggaggacuaccacaaagugguagaauuguuguugauuacauggugcaaaaaucugggaaaacaggaacaauuaccuaucaaagagguauuuuauugccucaaaagguguggugcgcaaguggcaggagcaaaguaauaaaaggauccuugccuuuaauuggagaagcagauugccuccacgaaaaauacgguggguuaaacaaaagcaagccuuacuacacaggggaacaugcaaaggccauaggaaauugcccaauaugggugaaaacacccuugaagcuggccaauggaaccaaauauagaccuccugcaaaacuauuaaaggaaagggguuucuucggagcuauugcugguuucuuagaaggaggaugggaaggaaugauugcagguuggcacggauacacaucccauggggcacauggaguagcgguggcagcagaccuuaagagcacucaagaggccauaaacaagauaacaaaaaaucucaacucuuugagugagcuggaaguaaagaaucuucaaagacuaagcggugccauggaugaacuccacaacgaaauacuagaacuagacgagaaaguggaugaucucagagcugauacaauaagcucacaaauagaacucgcaguccugcuuuccaaugaaggaauaauaaacagugaagaugagcaucucuuggcgcuugaaagaaagcugaagaaaaugcugggccccucugcuguagagauagggaauggaugcuuugaaaccaaacacaagugcaaccagaccugucucgacagaauagcugcugguaccuuugaugcaggagaauuuucucuccccaccuuugauucacugaauauuacugcugcaucuuuaaaugacgauggauuggauaaucauacuauacugcuuuacuacucaacugcugccuccaguuuggcuguaacauugaugauagcuaucuuuguuguuuauauggucuccagagacaauguuucuuguuccaucugucuauaa

SEQ ID NO: 59252 - RNA, 1758 nt, Artificial Sequence
  derived and/or modified CDS sequence (wt) from hemagglutinin__InfluenzaB__AGX18600
augaaggcaauaauuguacuacucaugguaguaacauccaaugcagaucgaaucugcacugggauaacaucgucaaacucaccacauguugucaaaacugcuacucaaggggaggucaaugugacugguguaauaccacugacaacaacacccaccaaaucucauuuugcaaaucucaaaggaacagaaaccagagggaaacuaugcccaaaaugccucaacugcacagaucuggacguggcuuugggcagaccaaaaugcacggggaacauacccucggcaagaguuucaauacuccaugaagucagaccuguuacaucugggugcuuuccuauaaugcacgacagaacaaaaauuagacagcugccuaaccuucucagaggauacgaacauaucagguuaucaacucauaacguuaucaaugcagaaaaugcaccaggaggacccuacaaaauuggaaccucagggucuugcccuaacguuaccaauggaaacggauuuuucgcaacaauggcuugggccgucccaaaaaacgacaacaacaaaacagcaacaaauucauuaacaauagaaguaccauacauuuguacagaaggagaagaccaaauuaccguuuggggguuccacucugauaacgagacccaaauggcaaagcucuauggggacucaaagccccagaaguucaccucaucugccaacggagugaccacacauuacguuucacagauugguggcuucccaaaucaaacagaagacggaggacuaccacaaagugguagaauuguuguugauuacauggugcaaaaaucugggaaaacaggaacaauuaccuaucaaagagguauuuuauugccucaaaagguguggugcgcaaguggcaggagcaagguaauaaaaggauccuugccuuuaauuggagaagcagauugccuccacgaaaaauacgguggguuaaacaaaagcaagccuuacuacacaggggaacaugcaaaggccauaggaaauugcccaauaugggugaaaacacccuugaagcuggccaauggaaccaaauauagaccuccugcaaaacuauuaaaggaaagggguuucuucggagcuauugcugguuucuuagaaggaggaugggaaggaaugauugcagguuggcacggauacacaucccauggggcacauggaguagcgguggcagcagaccuuaagagcacucaagaggccauaaacaagauaacaaaaaaucucaacucuuugagugagcuggaaguaaagaaucuucaaagacuaagcggugccauggaugaacuccacaacgaaauacuagaacuagacgagaaaguggaugaucucagagcugauacaauaagcucacaaauagaacucgcaguccugcuuuccaaugaaggaauaauaaacagugaagaugagcaucucuuggcgcuugaaagaaagcugaagaaaaugcugggccccucugcuguagagauagggaauggaugcuuugaaaccaaacacaagugcaaccagaccugucucgacagaauagcugcugguaccuuugaugcaggagaauuuucucuccccaccuuugauucacugaauauuacugcugcaucuuuaaaugacgauggauuggauaaucauacuauacugcuuuacuacucaacugcugccuccaguuuggcuguaacauugaugauagcuaucuuuguuguuuauauggucuccagagacaauguuucuugcuccaucugucuauaa

SEQ ID NO: 59253 - RNA, 1758 nt, Artificial Sequence; identical to SEQ ID NO: 59246
  derived and/or modified CDS sequence (wt) from hemagglutinin__InfluenzaB__AGX18611

SEQ ID NO: 59254 - RNA, 1758 nt, Artificial Sequence
  derived and/or modified CDS sequence (wt) from hemagglutinin__InfluenzaB__AGX18622
augaaggcaauaauuguacuacucaugguaguaacauccaaugcagaucgaaucugcacugggauaacaucgucaaacucaccacauguugucaaaacugcuacucaaggggaggucaaugugacugguguaauaccacugacaacaacacccaccaaaucucauuuugcaaaucucaaaggaacagaaaccagagggaaacuaugcccaaaaugccucaacugcacagaucuggacguggccuugggcagaccaaaaugcacggggaacauacccucggcaagaguuucaauacuccaugaagucagaccuguuacaucugggugcuuuccuauaaugcacgacagaacaaaaauuagacagcugccuaaccuucuccgaggauacgaacauaucagguuaucaacucauaacguuaucaaugcagaaaaugcaccaggaggacccuacaaaauuggaaccucagggucuugcccuaacguuaccaauggaaacggauuuuucgcaacaauggcuugggccgucccaaaaaacgacaacaacaaaacagcaacaaauucauuaacaauagaaguaccauacauuuguacagaaggagaagaccaaauuaccguuuggggguuccacucugauaacgagacccaaauggcaaagcucuauggggacucaaagccccagaaguucaccucaucugccaacggagugaccacacauuacguuucacagauugguggcuucccaaaucaaacagaagacggaggacuaccacaaagugguagaauuguuguugauuacauggugcaaaaaucugggaaaacaggaacaauuaccuaucaaagagguauuuuauugccucaaaagguguggugcgcaaguggcaggagcaagguaauaaaaggauccuugccuuuaauuggagaagcagauugccuccacgaaaaauacgguggauuaaacaaaagcaagccuuacuacacaggggaacaugcaaaggccauaggaaauugcccaauaugggugaaaacacccuugaagcuggccaauggaaccaaauauagaccuccugcaaaacuauuaaaggaaagggguuucuucggagcuauugcugguuucuuagaaggaggaugggaaggaaugauugcagguuggcacggauacacaucccauggggcacauggaguagcgguggcagcagaccuuaagagcacucaagaggccauaaacaagauaacaaaaaaucucaacucuuugagugagcuggaaguaaagaaucuucaaagacuaagcggugccauggaugaacuccacaacgaaauacuagaacuagacgagaaaguggaugaucucagagcugauacaauaagcucacaaauagaacucgcaguccugcuuuccaaugaaggaauaauaaacagugaagaugagcaucucuuggcgcuugaaagaaagcugaagaaaaugcugggccccucugcuguagagauagggaauggaugcuuugaaaccaaacacaagugcaaccagaccugucucgacagaauagcugcugguaccuuugaugcaggagaauuuucucuccccaccuuugauucacugaauauuacugcugcaucuuuaaaugacgauggauuggauaaucauacuauacugcuuuacuacucaacugcugccuccaguuuggcuguaacauugaugauagcuaucuuuguuguuuauauggucuccagagacaauguuucuugcuccaucugucuauaa

SEQ ID NO: 59255 - RNA, 1758 nt, Artificial Sequence; identical to SEQ ID NO: 59248
  derived and/or modified CDS sequence (wt) from hemagglutinin__InfluenzaB__AGX18633

SEQ ID NO: 59256 - RNA, 1758 nt, Artificial Sequence; identical to SEQ ID NO: 59248
  derived and/or modified CDS sequence (wt) from hemagglutinin__InfluenzaB__AGX18644

SEQ ID NO: 59257 - RNA, 1758 nt, Artificial Sequence; identical to SEQ ID NO: 59248
  derived and/or modified CDS sequence (wt) from hemagglutinin__InfluenzaB__AGX18655

SEQ ID NO: 59258 - RNA, 1758 nt, Artificial Sequence; identical to SEQ ID NO: 59248
  derived and/or modified CDS sequence (wt) from hemagglutinin__InfluenzaB__AGX18666

SEQ ID NO: 59259 - RNA, 1758 nt, Artificial Sequence; identical to SEQ ID NO: 59246
  derived and/or modified CDS sequence (wt) from hemagglutinin__InfluenzaB__AGX18677

SEQ ID NO: 59260 - RNA, 1758 nt, Artificial Sequence; identical to SEQ ID NO: 59248
  derived and/or modified CDS sequence (wt) from hemagglutinin__InfluenzaB__AGX18688

SEQ ID NO: 59261 - RNA, 1758 nt, Artificial Sequence
  derived and/or modified CDS sequence (wt) from hemagglutinin__InfluenzaB__AGX18699
augaaggcaauaauuguacuacucaugguaguaacauccaaugcagaucgaaucugcacugggauaacaucgucaaacucaccacauguugucaaaacugcuacucaaggggaggucaaugugacugguguaauaccacugacaacaacacccaccaaaucucauuuugcaaaucucaaaggaacagaaaccagagggaaacuaugcccaaaaugccucaacugcacagaucuggacguggccuugggcagaccaaaaugcacggggaacauacccucggcaagaguuucaauacuccaugaagucagaccuguuacaucugggugcuuuccuauaaugcacgacagaacaaaaauuagacagcugccuaaccuucucagaggauacgaacauaucagguuaucaacucauaacguuaucaaugcagaaaaugcaccaggaggacccuacaaaauuggaaccucagggucuugcccuaacguuaccaauggaaacggauuuuucgcaacaauggcuugggccgucccaaaaaacgacaacaacaaaacagcaacaaauucauugacaauagaaguaccauacauuuguacagaaggagaagaccaaauuaccguuuggggguuccacucugauaacgaaacccaaauggcaaagcucuauggggacucaaagccccagaaguucaccucaucugccaacggagugaccacacauuacguuucacagauugguggcuucccaaaucaaacagaagacggaggacuaccacaaagugguagaauuguuguugauuacauggugcaaaaaucugggaaaacaggaacaauuaccuaucaaagagguauuuuauugccucaaaaaguguggugcgcaaguggcaggagcaagguaauaaaaggauccuugccuuuaauuggagaagcagauugccuccacgaaaaauacgguggauuaaacaaaagcaagccuuacuacacaggggaacaugcaaaggccauaggaaauugcccaauaugggugaaaacacccuugaagcuggccaauggaaccaaauauagaccuccugcaaaacuauuaaaggaaagggguuucuucggagcuauugcugguuucuuagaaggaggaugggaaggaaugauugcagguuggcacggauacacaucccauggggcacauggaguagcgguggcagcagaccuuaagagcacucaagaggccauaaacaagauaacaaaaaaucucaacucuuugagugagcuggaaguaaagaaucuucaaagacuaagcggugccauggaugaacuccacaacgaaauacuagaacuagacgagaaaguggaugaucucagagcugauacaauaagcucacaaauagaacucgcaguccugcuuuccaaugaaggaauaauaaacagugaagaugagcaucucuuggcgcuugaaagaaagcugaagaaaaugcugggccccucugcuguagagauagggaauggaugcuuugagaccaaacacaaaugcaaccagaccugucucgacagaauagcugcugguaccuuugaugcaggagaauuuucucuccccacuuuugauucacugaauauuacugcugcaucuuuaaaugacgauggauuggauaaucauacuauacugcuuuacuacucaacugcugccuccaguuuggcuguaacauugaugauagcuaucuuuguuguuuauauggucuccagagacaauguuucuugcuccaucugucuauaa

SEQ ID NO: 59262 - RNA, 1758 nt, Artificial Sequence; identical to SEQ ID NO: 59246
  derived and/or modified CDS sequence (wt) from hemagglutinin__InfluenzaB__AGX18710

SEQ ID NO: 59263 - RNA, 1758 nt, Artificial Sequence; identical to SEQ ID NO: 59246
  derived and/or modified CDS sequence (wt) from hemagglutinin__InfluenzaB__AGX18721

SEQ ID NO: 59264 - RNA, 1758 nt, Artificial Sequence; identical to SEQ ID NO: 59248
  derived and/or modified CDS sequence (wt) from hemagglutinin__InfluenzaB__AGX18732

SEQ ID NO: 59265 - RNA, 1758 nt, Artificial Sequence
  derived and/or modified CDS sequence (wt) from hemagglutinin__InfluenzaB__AGX18743
augaaggcaauaauuguacuacucaugguaguaacauccaaugcagaucgaaucugcacugggauaacaucgucaaacucaccacauguugucaaaacugcuacucaaggggaggucaaugugacugguguaauaccacuaacaacaacacccaccaaaucucauuuugcaaaucucaaaggaacagaaaccagagggaaacuaugcccaaaaugccucaacugcacagaucuggacguggccuugggcagaccaaaaugcacggggaacauacccucggcaagaguuucaauacuccaugaagucagaccuguuacaucugggugcuuuccuauaaugcacgacagaacaaaaauuagacagcugccuaaccuucucagaggauacgaacauaucagguuaucaaaucauaacguuaucaaugcagaaaaugcaccaggaggacccuacaaaauuggaaccucagggucuugcccuaacguuaccaauggaaacggauuuuucgcaacaauggcuugggccgucccaaaaaacgacaacaacaaaacagcaacaaauucauuaacaauagaaguaccauacauuuguacagaaggagaagaccaaauuaccguuuggggguuccacucugauaacgagacccaaauggcaaagcucuauggggacucaaagccccagaaguucaccucaucugccaacggagugaccacacauuacguuucacagauugguggcuucccaaaucaaacagaagacggaggacuaccacaaagugguagaauuguuguugauuacauggugcaaaaaucugggaaaacaggaacaauuaccuaucaaagagguauuuuauugccucaaaagguguggugcgcaaguggcaggagcaagguaauaaaaggauccuugccuuuaauuggagaagcagauugccuccacgaaaaauacgguggauuaaacaaaagcaagccuuacuacacaggggaacaugcaaaggccauaggaaauugcccaauaugggugaaaacacccuugaagcuagccaauggaaccaaauauagaccuccugcaaaacuauuaaaggaaagggguuucuucggagcuauugcugguuucuuagaaggaggaugggaaggaaugauugcagguuggcacggauacacaucccauggggcacauggaguagcgguggcagcagaccuuaagagcacucaagaggccauaaacaagauaacaaaaaaucucaacucuuugagugagcuggaaguaaagaaucuucaaagacuaagcggugccauggaugaacuccacaacgaaauacuagaacuagacgagaaaguggaugaucucagagcugauacaauaagcucacaaauagaacucgcaguccugcuuuccaaugaaggaauaauaaacagugaagaugagcaccucuuggcgcuugaaagaaagcugaagaaaaugcugggccccucugcuguagagauagggaauggaugcuuugaaaccaaacacaagugcaaccagaccugucucgacagaauagcugcugguaccuuugaugcaggagaauuuucucuccccaccuuugauucacugaauauuacugcugcaucuuuaaaugacgauggauuggauaaucauacuauacugcuuuacuacucaacugcugccuccaguuuggcuguaacauugaugauagcuaucuuuguuguuuauauggucuccagagacaauguuucuugcuccaucugucuauaa

SEQ ID NO: 59266 - RNA, 1758 nt, Artificial Sequence; identical to SEQ ID NO: 59248
  derived and/or modified CDS sequence (wt) from hemagglutinin__InfluenzaB__AGX18754

SEQ ID NO: 59267 - RNA, 1758 nt, Artificial Sequence; identical to SEQ ID NO: 59246
  derived and/or modified CDS sequence (wt) from hemagglutinin__InfluenzaB__AGX18765

SEQ ID NO: 59268 - RNA, 1758 nt, Artificial Sequence
  derived and/or modified CDS sequence (wt) from hemagglutinin__InfluenzaB__AGX18776
augaaggcaauaauuguacuacucaugguaguaacauccaaugcagaucgaaucugcacugggauaacaucgucaaacucaccacauguugucaaaacugcuacucaaggggaggucaaugugacugguguaauaccacugacaacaacacccaccaaaucucauuuugcaaaucucaaaggaacagaaaccagagggaaacuaugcccaaaaugccucaacugcacagaucuggacguggccuugggcagaccaaaaugcacggggaacauacccucggcaagaguuucaauacuccaugaagucagaccuguuacaucugggugcuuuccuauaaugcacgacagaacaaaaauuagacagcugccuaaccuucucagaggauacgaacauaucagguuaucaacucauaacguuaucaaugcagaaaaugcaccaggaggacccuacaaaauuggaaccucagggucuugcccuaacguuaccaauggaaacggauuuuucgcaacaauggcuugggccgucccaaaaaaugacaacaacaaaacagcaacaaauucauugacaauagaaguaccauacauuuguacagaaggagaagaccaaauuaccguuuggggguuccacucugauaacgaaauccaaauggcaaagcucuauggggacucaaagccccagaaguucaccucaucugccaacggagugaccacacauuacguuucacagauugguggcuucccaaaucaaacagaagacggaggacuaccacaaagugguagaauuguuguugauuacauggugcaaaaaucugggaaaacaggaacaauuaccuaucaaagagguauuuuauugccucaaaaaguguggugcgcaaguggcaggagcaagguaauaaaaggauccuugccuuuaauuggagaagcagauugccuccacgaaaaauacgguggauuaaacaaaagcaagccuuacuacacaggggaacaugcaaaggccauaggaaauugcccaauaugggugaaaacacccuugaagcuggccaauggaaccaaauauagaccuccugcaaaacuauuaaaggaaagggguuucuucggagcuauugcugguuucuuagaaggaggaugggaaggaaugauugcagguuggcacggauacacaucccauggggcacauggaguagcgguggcagcagaccuuaagagcacucaagaggccauaaacaagauaacaaaaaaucucaacucuuugagugagcuggaaguaaagaaucuucaaagacuaagcggugccauggaugaacuccacaacgaaauacuagaacuagacgagaaaguggaugaucucagagcugauacaauaagcucacaaauagaacucgcaguccugcuuuccaaugaaggaauaauaaacagugaagaugagcaucucuuggcgcuugaaagaaagcugaagaaaaugcugggccccucugcuguagagauagggaauggaugcuuugagaccaaacacaaaugcaaccagaccugucucgacagaauagcugcugguaccuuugaugcaggagaauuuucucuccccacuuuugauucacugaauauuacugcugcaucuuuaaaugacgauggauuggauaaucauacuauacugcuuuacuacucaacugcugccuccaguuuggcuguaacauugaugauagcuaucuuuguuguuuauauggucuccagagacaauguuucuugcuccaucugucuauaa

SEQ ID NO: 59269 - RNA, 1758 nt, Artificial Sequence
  derived and/or modified CDS sequence (wt) from hemagglutinin__InfluenzaB__AGX18787
augaaggcaauaauuguacuacucaugguaguaacauccaaugcagaucgaaucugcacugggauaacaucgucaaacucaccacauguugucaaaacugcuacucaaggggaggucaaugugacugguguaauaccacugacaacaacacccaccaaaucucauuuugcaaaucucaaaggaacagaaaccagagggaaacuaugcccaaaaugccucaacugcacagaucuggacguggccuugggcagaccaaaaugcacggggaacauacccucggcaagaguuucaauacuccaugaagucagaccuguuacaucugggugcuuuccuauaaugcacgacagaacaaaaauuagacagcugccuaaccuucucagaggauacgaacauaucagguuaucaacucauaacguuaucaaugcagaaaaugcaccaggaggacccuacaaaauuggaaccucagggucuugcccuaacguuaccaauggaaacggauuuuucgcaacaauggcuugggccgucccaaaaaacgacaacaacaaaacagcaacaaauucauuaacaauagaaguaccauacauuuguacagaaggagaagaccaaauuaccguuuggggguuccacucugauaacgagacccaaauggcaaagcucuauggggacucaaagccccagaaguucaccucaucugccaacggagugaccacacauuacguuucacagauugguggcuucccaaaucaaacagaagacggaggacuaccacaaagugguagaauuguuguugauuacauggugcaaaaaucuggaaaaacaggaacaauuaccuaucaaagaggcauuuuauugccucaaaagguguggugcgcaaguggcaggagcaagguaauaaaaggauccuugccuuuaauuggagaagcagauugccuccacgaaaaauacgguggauuaaacaaaagcaagccuuacuacacaggggaacaugcaaaggccauaggaaauugcccaauaugggugaaaacacccuugaagcuggccaauggaaccaaauauagaccuccugcaaaacuauuaaaggaaagggguuucuucggagcuauugcugguuucuuagaaggaggaugggaaggaaugauugcagguuggcacggauacacaucccauggggcacauggaguagcgguggcagcagaccuuaagagcacucaagaggccauaaacaagauaacaaaaaaucucaacucuuugagugagcuggaaguaaagaaucuucaaagacuaagcggugccauggaugaacuccacaacgaaauacuagaacuagacgagaaaguggaugaucucagagcugauacaauaagcucacaaauagaacucgcaguccugcuuuccaaugaaggaauaauaaacagugaagaugagcaucucuuggcgcuugaaagaaagcugaagaaaaugcugggccccucugcuguagagauagggaauggaugcuuugaaaccaaacauaagugcaaccagaccugucucgacagaauagcugcugguaccuuugaugcaggagaauuuucucuccccaccuuugauucacugaauauuacugcugcaucuuuaaaugacgauggauuggauaaucauacuauacugcuuuacuacucaacugcugccuccaguuuggcuguaacauugaugauagcuaucuuuguuguuuauauggucuccagagacaauguuucuugcuccaucugucuauaa

SEQ ID NO: 59270 - RNA, 1758 nt, Artificial Sequence; identical to SEQ ID NO: 59248
  derived and/or modified CDS sequence (wt) from hemagglutinin__InfluenzaB__AGX18798

SEQ ID NO: 59271 - RNA, 1758 nt, Artificial Sequence
  derived and/or modified CDS sequence (wt) from hemagglutinin__InfluenzaB__AGX18809
augaaggcaauaauuguacuacucaugguaguaacauccaaugcagaucgaaucugcacugggauaacaucgucaaacucaccacauguugucaaaacugcuacucaaggggaggucaaugugacugguguaauaccacugacaacaacacccaccaaaucucauuuugcaaaucucaaaggaacagaaaccagagggaaacuaugcccaaaaugccucaacugcacagaucuggacguggccuugggcagaccaaaaugcacggggaacauacccucggcaagaguuucaauacuccaugaagucagaccuguuacaucugggugcuuuccuauaaugcacgacagaacaaaaauuagacagcugccuaaccuucucagaggauacgaacauaucagguuaucaacucauaacguuaucaaugcagaaaaugcaccaggaggacccuacaaaauuggaaccucagggucuugcccuaacguuaccaauggaaacggauuuuucgcaacaauggcuugggccgucccaaaaaacgacaacaacaaaacagcaacaaauucauugacaauagaaguaccauacauuuguacagaaggagaagaccaaauuaccguuuggggguuccacucugauagcgaaacccaaauggcaaagcucuauggggacucaaagccccagaaguucaccucaucugccaacggagugaccacacauuacguuucacagauugguggcuucccaaaucaaacagaagacggaggacuaccacaaagugguagaauuguuguugauuacaugaugcaaaaaucugggaaaacaggaacaauuaccuaucaaagagguauuuuauugccucaaaaaguguggugcgcaaguggcaggagcaagguaauaaaaggauccuugccuuuaauuggagaagcagauugccuccacgaaaaauacgguggauuaaacaaaagcaagccuuacuacacaggggaacaugcaaaggccauaggaaauugcccaauaugggugaaaacacccuugaagcuggccaauggaaccaaauauagaccuccugcaaaacuauuaaaggaaagggguuucuucggagcuauugcugguuucuuagaaggaggaugggaaggaaugauugcagguuggcacggauacacaucccauggggcacauggaguagcgguggcagcagaccuuaagagcacucaagaggccauaaacaagauaacaaaaaaucucaacucuuugagugagcuggaaguaaagaaucuucaaagacuaagcggugccauggaugaacuccacaacgaaauacuagaacuagacgagaaaguggaugaucucagagcugauacaauaagcucacaaauagaacucgcaguccugcuuuccaaugaaggaauaauaaacagugaagaugagcaucucuuggcgcuugaaagaaagcugaagaaaaugcugggccccucugcuguagagauagggaauggaugcuuugagaccaaacacaaaugcaaccagaccugucucgacagaauagcugcugguaccuuugaugcaggagaauuuucucuccccacuuuugauucacugaauauuacugcugcaucuuuaaaugacgauggauuggauaaucauacuauacugcuuuacuacucaacugcugccuccaguuuggcuguaacauugaugauagcuaucuuuguuguuuauauggucuccagagacaauguuucuugcuccaucugucuauaa

SEQ ID NO: 59272 - RNA, 1758 nt, Artificial Sequence
  derived and/or modified CDS sequence (wt) from hemagglutinin__InfluenzaB__AGX18820
augaaggcaauaauuguacuacucaugguaguaacauccaaugcagaucgaaucugcacugggauaacaucgucaaacucaccacauguugucaaaacugcuacucaaggggaggucaaugugacugguguaauaccacugacaacaacacccaccaaaucucauuuugcaaaucucaaaggaacagaaaccagagggaaacuaugcccaaaaugccucaacugcacagaucuggacguggccuugggcagaccaaaaugcacggggaacauacccucggcaagaguuucaauacuccaugaagucagaccuguuacaucugggugcuuuccuauaaugcacgacagaacaaaaauuagacagcugccuaaccuucucagaggauacgaacauaucagguuaucaacucauaacguuaucaaugcagaaaaugcaccaggaggacccuacaaaauuggaaccucagggucuugcccuaacguuaccaauggaaacggauuuuucgcaacaauggcuugggccgucccaaaaaacgacaacaacaaaacagcaacaaauucauugacaauagaaguaccauacauuuguacagaaggagaagaccaaauuaccguuuggggguuccacucugauaacgaaaaccaaauggcaaagcucuauggggacucaaagccccagaaguucaccucaucugccaacggagugaccacacauuacguuucacagauugguggcuucccaaaucaaacagaagacggaggacuaccacaaagugguagaauuguuguugauuacauggugcaaaaaucugggaaaacaggaacaauuaccuaucaaagagguauuuuauugccucaaaaaguguggugcgcaaguggcaggagcaagguaauaaaaggauccuugccuuuaauuggagaagcagauugccuccacgaaaaauacgguggauuaaacaaaagcaagccuuacuacacaggggaacaugcaaaggccauaggaaauugcccaauaugggugaaaacacccuugaagcuggccaauggaaccaaauauagaccuccugcaaaacuauuaaaggaaagggguuucuucggagcuauugcugguuucuuagaaggaggaugggaaggaaugauugcagguuggcacggauacacaucccauggggcacauggaguagcgguggcagcagaccuuaagagcacucaagaggccauaaacaagauaacaaaaaaucucaacucuuugagugagcuggaaguaaagaaucuucaaagacuaagcggugccauggaugaacuccacaacgaaauacuagaacuagacgagaaaguggaugaucucagagcugauacaauaagcucacaaauagaacucgcaguccugcuuuccaaugaaggaauaauaaacagugaagaugagcaucucuuggcgcuugaaagaaagcugaagaaaaugcugggccccucugcuguagagauagggaauggaugcuuugagaccaaacacaaaugcaaccagaccugucucgacagaauagcugcugguaccuuugaugcaggagaauuuucucuccccacuuuugauucacugaauauuacugcugcaucuuuaaaugacgauggauuggauaaucauacuauacugcuuuacuacucaacugcugccuccaguuuggcuguaacauugaugauagcuaucuuuguuguuuauauggucuccagagacaauguuucuugcuccaucugucuauaa

SEQ ID NO: 59273 - RNA, 1758 nt, Artificial Sequence
  derived and/or modified CDS sequence (wt) from hemagglutinin__InfluenzaB__AGX18831
augaaggcaauaauuguacuacucaugguaguaacauccaaugcagaucgaaucugcacugggauaacaucgucaaacucaccacauguugucaaaacugcuacucaaggggaggucaaugugaccgguguaauaccacugacaacaacacccaccaaaucucauuuugcaaaucucaaaggaacagaaaccagagggaaacuaugcccaaaaugccucaacugcacagaucuggacguggccuugggcagaccaaaaugcacggggaacauacccucggcaagaguuucaauacuccaugaagucagaccuguuacaucugggugcuuuccuauaaugcacgacagaacaaaaauuagacagcugccuaaccuucucagaggauacgaacauaucagguuaucaacucauaacguuaucaaugcagaaaaugcaccaggaggacccuacaaaauuggaaccucagggucuugcccuaacguuaccaauggaaacggauuuuucgcaacaauggcuugggccgucccaaaaaacgacaacaacaaaacagcaacaaauucauuaacaauagaaguaccauacauuuguacagaaggagaagaccaaauuaccguuuggggguuccacucugauaacgagacccaaauggcaaagcucuauggggacucaaagccccagaaguucaccucaucugccaacggagugaccacacauuacguuucacagauugguggcuucccaaaucaaacagaagacggaggacuaccacaaagugguagaauuguuguugauuacauggugcaaaaaucugggaaaacaggaacaauuaccuaucaaagagguauuuuauugccucaaaagguguggugcgcaaguggcaggagcaagguaauaaaaggauccuugccuuuaauuggagaagcagauugccuccacgaaaaauacgguggguuaaacaaaagcaagccuuacuacacaggggaacaugcaaaggccauaggaaauugcccaauaugggugaaaacacccuugaagcuggccaauggaaccaaauauagaccuccugcaaaacuauuaaaggaaagggguuucuucggagcuauugcugguuucuuagaaggaggaugggaaggaaugauugcagguuggcacggauacacaucccauggggcacauggaguagcgguggcagcagaccuuaagagcacucaagaggccauaaacaagauaacaaaaaaucucaacucuuugagugagcuggaaguaaagaaucuucaaagacuaagcggugccauggaugaacuccacaacgaaauacuagaacuagacgagaaaguggaugaucucagagcugauacaauaagcucacaaauagaacucgcaguccugcuuuccaaugaaggaauaauaaacagugaagaugagcaucucuuggcgcuugaaagaaagcugaagaaaaugcugggccccucugcuguagagauagggaauggaugcuuugaaaccaaacacaagugcaaccagaccugucucgacagaauagcugcugguaccuuugaugcaggagaauuuucucuccccaccuuugauucacugaauauuacugcugcaucuuuaaaugacgauggauuggauaaucauacuauacugcuuuacuacucaacugcugccuccaguuuggcuguaacauugaugauagcuaucuuuguuguuuauauggucuccagagacaauguuucuugcuccaucugucuauaa

SEQ ID NO: 59274 - RNA, 1758 nt, Artificial Sequence
  derived and/or modified CDS sequence (wt) from hemagglutinin__InfluenzaB__AGX18842
augaaggcaauaauuguacuacucaugguaguaacauccaaugcagaucgaaucugcacugggauaacaucgucaaacucaccacauguugucaaaacugcuacucaaggggaggucaaugugacugguguaauaccacugacaacaacacccaccaaaucucauuuugcaaaucucaaaggaacagaaaccagagggaaacuaugcccaaaaugccucaacugcacagaucuggacguggccuugggcagaccaaaaugcacggggaacauacccucggcaagaguuucaauacuccaugaagucagaccuguuacaucugggugcuuuccuauaaugcacgacagaacaaaaauuagacagcugccuaaccuucucagaggauacgaacauaucagguuaucaacucauaacguuaucaaugcagaaaaugcaccaggaggacccuacaaaauuggaaccucagggucuugcccuaacguuaccaauggaaacggauuuuucgcaacaauggcuugggccgucccaaaaaacgacaacaacaaaacagcaacaaauucauuaacaauagaaguaccauacauuuguacagaaggagaagaccaaauuaccguuuggggguuccacucugauaacgagacccaaauggcaaagcucuauggggacucaaagccccagaaguucaccucaucugccaacggagugaccacacauuacguuucacagauugguggcuucccaaaucaaacagaagacggaggacuaccacaaagugguagaauuguuguugauuacauggugcaaaaaucugggaaaacaggaacaauuaccuaucaaagagguauuuuauugccucaaaagguguggugcgcaaguggcaggagcaagguaauaaaaggauccuugccuuuaauuggagaagcagauugccuccacgaaaaauacgguggauuaaacaaaagcaagccuuacuacacaggggaacaugcaaaggccauaggaaauugcccaauaugggugaaaacacccuugaagcuagccaauggaaccaaauauagaccuccugcaaaacuauuaaaggaaagggguuucuucggagcuauugcugguuucuuagaaggaggaugggaaggaaugauugcagguuggcacggauacacaucccauggggcacauggaguagcgguggcagcagaccuuaagagcacucaagaggccauaaacaagauaacaaaaaaucucaacucuuugagugagcuggaaguaaagaaucuucaaagacuaagcggugccauggaugaacuccacaacgaaauacuagaacuagacgagaaaguggaugaucucagagcugauacaauaagcucacaaauagaacucgcaguccugcuuuccaaugaaggaauaauaaacagugaagaugagcaccucuuggcgcuugaaagaaagcugaagaaaaugcugggccccucugcuguagagauagggaauggaugcuuugaaaccaaacacaagugcaaccagaccugucucgacagaauagcugcugguaccuuugaugcaggagaauuuucucuccccaccuuugauucacugaauauuacugcugcaucuuuaaaugacgauggauuggauaaucauacuauacugcuuuacuacucaacugcugccuccaguuuggcuguaacauugaugauagcuaucuuuguuguuuauauggucuccagagacaauguuucuugcuccaucugucuauaa

SEQ ID NO: 59275 - RNA, 1758 nt, Artificial Sequence
  derived and/or modified CDS sequence (wt) from hemagglutinin__InfluenzaB__AGX18853
augaaggcaauaauuguacuacucaugguaguaacauccaaugcagaucgaaucugcacugggauaacaucgucaaacucaccacauguugucaaaacugccacucaaggggaggucaaugugacugguguaauaccacugacaacaacacccaccaaaucucauuuugcaaaucucaaaggaacagaaaccagagggaaacuaugcccaaaaugccucaacugcacagaucuggacguggccuugggcagaccaaaaugcacggggaacauacccucggcaagaguuucaauacuccaugaagucagaccuguuacaucugggugcuuuccuauaaugcacgacagaacaaaaauuagacagcugccuaaccuucucagaggauacgaacauaucagguuaucaacucauaacguuaucaaugcagaaaaugcaccaggaggacccuacaaaauuggaaccucagggucuugcccuaacguuaccaauggaaacggauuuuucgcaacaauggcuugggccgucccaaaaaacgacaacaacaaaacagcaacaaauucauuaacaauagaaguaccauacauuuguacagaaggagaagaccaaauuaccguuuggggguuccacucugauaacgaggcccaaauggcaaagcucuauggggauucaaagccccagaaguucaccucaucugccaacggagugaccacacauuacguuucacagauugguggcuucccaaaucaaacagaagacggaggacuaccacaaagugguagaauuguuguugauuacauggugcaaaaaucugggaaaacaggaacaauuaccuaucaaagagguauuuuauugccucaaaagguguggugcgcaaguggcaggagcaagguaauaaaaggauccuugccuuuaauuggagaagcagauugccuccacgaaaaauacgguggguuaaacaaaagcaagccuuacuacacaggggaacaugcaaaggccauaggaaauugcccaauaugggugaaaacacccuugaagcuggccaauggaaccaaauauagaccuccugcaaaacuauuaaaggaaagggguuucuucggagcuauugcugguuucuuagaaggaggaugggaaggaaugauugcagguuggcacggauacacaucccauggggcacauggaguagcgguggcagcagaccuuaagagcacucaagaggccauaaacaagauaacaaaaaaucucaacucuuugagugagcuggaaguaaagaaucuucaaagacuaagcggugccauggaugaacuccacaacgaaauacuagaacuagacgagaaaguggaugaucucagagcugauacaauaagcucacaaauagaacucgcaguccugcuuuccaaugaaggaauaauaaacagugaagaugagcaucucuuggcgcuugaaagaaagcugaagaaaaugcugggccccucugcuguagagauagggaauggaugcuuugaaaccaaacacaagugcaaccagaccugucucgacagaauagcugcugguaccuuugaugcaggagaauuuucucuccccaccuuugauucacugaauauuacugcugcaucuuuaaaugacgauggauuggauaaucauacuauacugcuuuacuacucaacugcugccuccaguuuggcuguaacauugaugauagcuaucuuuguuguuuauauggucuccagagacaauguuucuugcuccaucugucuauaa

SEQ ID NO: 59276 - RNA, 1758 nt, Artificial Sequence
  derived and/or modified CDS sequence (wt) from hemagglutinin__InfluenzaB__AGX18864
augaaggcaauaauuguacuacucaugguaguaacauccaaugcagaucgaaucugcacugggauaacaucgucaaacucaccacauguugucaaaacugcuacucaaggggaggucaaugugacugguguaauaccacugacaacaacacccaccaaaucuuauuuugcaaaucucaaaggaacagaaaccagagggaaacuaugcccaaaaugccucaacugcacagaucuggacguggccuugggcagaccaaaaugcacggggaacauacccucggcaagaguuucaauacuccaugaagucagaccuguuacaucugggugcuuuccuauaaugcacgacagaacaaaaauuagacagcugccuaaccuucucagaggauacgaacauaucagguuaucaaaucauaacguuaucaaugcagaaaaugcaccaggaggacccuacaaaauuggaaccucagggucuugcccuaacguuaccaauggaaacggauuuuucgcaacaauggcuugggccgucccaaaaaacgacaacaacaaaacagcaacaaauucauuaacaauagaaguaccauacauuuguacagaaggagaagaccaaauuaccguuuggggguuccacucugauaacgaggcccaaauggcaaagcucuauggggacucaaagccccagaaguucaccucaucugccaacggagugaccacacauuacguuucacagauugguggcuucccaaaucaaacagaagacggaggacuaccacaaagugguagaauuguuguugauuacauggugcaaaaaucugggaaaacaggaacaauuaccuaucaaagagguauuuuauugccucaaaagguguggugcgcaaguggcaggagcaagguaauaaaaggauccuugccuuuaauuggagaagcagauugccuccacgaaaaauacgguggauuaaacaaaagcaagccuuacuacacaggggaacaugcaaaggccauaggaaauugcccaauaugggugaaaacacccuugaagcuagccaauggaaccaaauauagaccuccugcaaaacuauuaaaggaaagggguuucuucggagcuauugcugguuucuuagaaggaggaugggaaggaaugauugcagguuggcacggauacacaucccauggggcacauggaguagcgguggcagcagaccuuaagagcacucaagaggccauaaacaagauaacaaaaaaucucaacucuuugagugagcuggaaguaaagaaucuucaaagacuaagcggugccauggaugaacuccacaacgaaauacuagaacuagacgagaaaguggaugaucucagagcugauacaauaagcucacaaauagaacucgcaguccugcuuuccaaugaaggaauaauaaacagugaagaugagcaccucuuggcgcuugaaagaaagcugaagaaaaugcugggccccucugcuguagagauagggaauggaugcuuugaaaccaaacacaagugcaaccagaccugucucgacagaauagcugcugguaccuuugaugcaggagaauuuucucuccccaccuuugauucacugaauauuacugcugcaucuuuaaaugacgauggauuggauaaucauacuauacugcuuuacuacucaacugcugccuccaguuuggcuguaacauugaugauagcuaucuuuguuguuuauauggucuccagagacaauguuucuugcuccaucugucuauaa

SEQ ID NO: 59277 - RNA, 1758 nt, Artificial Sequence
  derived and/or modified CDS sequence (wt) from hemagglutinin__InfluenzaB__AGX18875
augaaggcaauaauuguacuacucaugguaguaacauccaaugcagaucgaaucugcacugggauaacaucgucaaacucaccacauguugucaaaacugcuacucaaggggaggucaaugugacugguguaauaccacugacaacaacacccaccaaaucucauuuugcaaaucucaaaggaacagaaaccagagggaaacuaugcccaaaaugccucaacugcacagaucuggacguggccuugggcagaccaaaaugcacggggaacauacccucggcaagaguuucaauacuccaugaagucagaccuguuacaucugggugcuuuccuauaaugcacgacagaacaaaaauuagacagcugccuaaccuucucagaggauacgaacauaucagguuaucaacucauaacguuaucaaugcagaaaaugcaccaggaggacccuacaaaauuggaaccucagggucuugcccuaacguuaccaauagaaacggauuuuucgcaacaauggcuugggccgucccaaaaaacgacaacaacaaaacagcaacaaauucauuaacaauagaaguaccauacauuuguacagaaggagaagaccaaauuaccguuuggggguuccacucugauaacgagauccaaauggcaaagcucuauggggacucaaagccccagaaguucaccucaucugccaacggagugaccacacauuacguuucacagauugguggcuucccaaaucaaacagaagacggaggacuaccacaaagugguagaauuguuguugauuacauggugcaaaaaucugggaaaacaggaacaauuaccuaucaaagagguauuuuauugccucaaaagguguggugcgcaaguggcaggagcaagguaauaaaaggauccuugccuuuaauuggagaagcagauugccuccacgaaaaauacgguggauuaaacaaaagcaagccuuacuacacaggggaacaugcaaaggccauaggaaauugcccaauaugggugaaaacacccuugaagcuagccaauggaaccaaauauagaccuccugcaaaacuauuaaaggaaagggguuucuucggagcuauugcugguuucuuagaaggaggaugggaaggaaugauugcagguuggcacggauacacaucccauggggcacauggaguagcgguggcagcagaccuuaagagcacucaagaggccauaaacaagauaacaaaaaaucucaacucuuugagugagcuggaaguaaagaaucuucaaagacuaagcggugccauagaugaacuccacaacgaaauacuagaacuagacgagaaaguggaugaucucagagcugauacaauaagcucacaaauagaacucgcaguccugcuuuccaaugaaggaauaauaaacagugaagaugagcaccucuuggcgcuugaaagaaagcugaagaaaaugcugggccccucugcuguagagauagggaauggaugcuuugaaaccaaacacaagugcaaccagaccugucucgacagaauagcugcugguaccuuugaugcaggagaauuuucucuccccaccuuugauucacugaauauuacugcugcaucuuuaaaugacgauggauuggauaaucauacuauacugcuuuacuacucaacugcugccuccaguuuggcuguaacauugaugauagcuaucuuuguuguuuauauggucuccagagacaauguuucuugcuccaucugucuauaa

SEQ ID NO: 59278 - RNA, 1758 nt, Artificial Sequence
  derived and/or modified CDS sequence (wt) from hemagglutinin__InfluenzaB__AGX18886
augaaggcaauaauuguacuacucaugguaguaacauccaaugcagaucgaaucugcacugggauaacaucgucaaacucaccacauguugucaaaacugcuacucaaggggaggucaaugugacugguguaauaccacugacaacaacacccaccaaaucucauuuugcaaaucucaaaggaacagaaaccagagggaaacuaugcccaaaaugccucaacugcacagaucuggacguggccuugggcagaccaaaaugcacggggaacauacccucggcaagaguuucaauacuccaugaagucagaccuguuacaucugggugcuuuccuauaaugcacgacagaacaaaaauuagacagcugccuaaccuucucagaggauacgaacauaucagguuaucaacucauaauguuaucaaugcagaaaaugcaccaggaggacccuacaaaauuggaaccucagggucuugcccuaacguuaccaauggaaacggauuuuucgcaacaauggcuugggccgucccaaaaaacgacaacaacaaaacagcaacaaauucauugacaauagaaguaccauacauuuguacagaaggagaagaccaaauuaccguuuggggguuccacucugauaacgaaauccaaauggcaaagcucuauggggacucaaagccccagaaguucaccucaucugccaacggagugaccacacauuacguuucacagauugguggcuucccaaaucaaacagaagacggaggacuaccacaaagugguagaauuguuguugauuacauggugcaaaaaucugggaaaacaggaacaauuaccuaucaaagagguauuuuauugccucaaaaaguguggugcgcaaguggcaggagcaagguaauaaaaggauccuugccuuuaauuggagaagcagauugccuccacgaaaaauacgguggauuaaacaaaagcaagccuuacuacacaggggaacaugcaaaggccauaggaaauugcccaauaugggugaaaacacccuugaagcuggccaauggaaccaaauauagaccuccugcaaaacuauuaaaggaaagggguuucuucggagcuauugcugguuucuuagaaggaggaugggaaggaaugauugcagguuggcacggauacacaucccauggggcacauggaguagcgguggcagcagaccuuaagagcacucaagaggccauaaacaagauaacaaaaaaucucaacucuuugagugagcuggaaguaaagaaucuucaaagacuaagcggugccauggaugaacuccacaacgaaauacuagaacuagacgagaaaguggaugaucucagagcugauacaauaagcucacaaauagaacucgcaguccugcuuuccaaugaaggaauaauaaacagugaagaugagcaucucuuggcgcuugaaagaaagcugaagaaaaugcugggccccucugcuguagagauagggaauggaugcuuugagaccaaacacaaaugcaaccagaccugucucgacagaauagcugcugguaccuuugaugcaggagaauuuucucuccccacuuuugauucacugaauauuacugcugcaucuuuaaaugacaauggauuggauaaucauacuauacugcuuuacuacucaacugcugccuccaguuuggcuguaacauugauaauagcuaucuuuguuguuuauauggucuccagagacaauguuucuugcuccaucugucuauaa

SEQ ID NO: 59279 - RNA, 1758 nt, Artificial Sequence
  derived and/or modified CDS sequence (wt) from hemagglutinin__InfluenzaB__AGX18897
augaaggcaauaauuguacuacucaugguaguaacauccaaugcagaucgaaucugcacugggauaacaucgucaaacucaccacauguugucaaaacugcuacucaaggggaggucaaugugacugguguaauaccacugacaacaacacccaccaaaucucauuuugcaaaucucaaaggaacagaaaccagagggaaacuaugcccaaaaugccucaacugcacagaucuggacguggccuugggcagaccaaaaugcacggggaacacacccucggcaagaguuucaauacuccaugaagucagaccuguuacaucugggugcuuuccuauaaugcacgacagaacaaaaauuagacagcugccuaaccuucucagaggauacgaacauaucagguuaucaacucauaacguuaucaaugcagaaaaugcaccaggaggacccuacaaaauuggaaccucagggucuugcccuaacguuaccaauggaaacggauuuuucgcaacaauggcuugggccgucccaaaaaacgacaacaacaaaacagcaacaaauucauuaacaauagaaguaccauacauuuguacagaaggagaagaccaaauuaccguuuggggguuccacucugauaacgaaacccaaauggcaaagcucuauggggacucaaagccccagaaguucaccucaucugccaacggaguaaccacacauuacguuucacagauugguggcuucccaaaucaaacagaagacggaggacuaccacaaagugguagaauuguuguugauuacauggugcaaaaaucugggaaaacaggaacaauuaccuaucaaagagguauuuuauugccucaaaaaguguggugcgcaaguggcaggagcaagguaauaaaaggauccuugccuuuaauuggagaagcagauugccuccacgaaaaauacgguggauuaaacaaaagcaagccuuacuacacaggggaacaugcaaaggccauaggaaauugcccaauaugggugaaaacacccuugaagcuggccaauggaaccaaauauagaccuccugcaaaacuauuaaaggaaagggguuucuucggagcuauugcugguuucuuagaaggaggaugggaaggaaugauugcagguuggcacggauacacaucccauggggcacauggaguagcgguggcagcagaccuuaaaagcacucaagaggccauaaacaagauaacaaaaaaucucaacucuuugagugagcuggaaguaaagaaucuucaaagacuaagcggugccauggaugaacuccacaacgaaauacuagaacuagacgagaaaguggaugaucucagagcugauacaauaagcucacaaauagaacucgcaguccugcuuuccaaugaaggaauaauaaacagugaagaugagcaucucuuggcgcuugaaagaaagcugaagaaaaugcugggccccucugcuguagagauagggaauggaugcuuugaaaccaaacacaagugcaaccagaccugucucgacagaauagcugcugguaccuuugaugcaggggaauuuucucuccccaccuuugauucacuaaauauuacugcugcaucuuuaaaugacgauggauuggauaaucauacuauacugcuuuacuacucaacugcugccuccaguuuggcuguaacauugaugauagcuaucuuuguuguuuauauggucuccagagacaauguuucuugcuccaucugucuauaa

SEQ ID NO: 59280 - RNA, 1758 nt, Artificial Sequence; identical to SEQ ID NO: 59246
  derived and/or modified CDS sequence (wt) from hemagglutinin__InfluenzaB__AGX18908

SEQ ID NO: 59281 - RNA, 1758 nt, Artificial Sequence
  derived and/or modified CDS sequence (wt) from hemagglutinin__InfluenzaB__AGX18919
augaaggcaauaauuguacuacucaugguaguaacauccaaugcagaucgaaucugcacugggauaacaucgucaaacucaccacauguugucaaaacugcuacucaaggggaggucaaugugacugguguaauaccacugacaacaacacccaccaaaucucauuuugcaaaucucaaaggaacagaaaccagagggaaacuaugcccaaaaugccucaacugcacagaucuggacguggccuugggcagaccaaaaugcacggggaacauacccucggcaagaguuucaauacuccaugaagucagaccuguuacaucugggugcuuuccuauaaugcacgacagaacaaaaauuagacagcugccuaaccuucucagaggauacgaacauaucagguuaucaacucauaacguuaucaaugcagaaaaugcaccaggaggacccuacaaaauuggaaccucagggucuugcccuaacguuaccaauggaaacggauuuuuugcaacaauggcuugggccgucccaaaaaacgacaacaacaaaacagcaacaaauucauuaacaauagaaguaccauacauuuguacagaaggagaagaccaaauuaccguuuggggguuccacucugauaacgagacccaaauggcaaagcucuauggggacucaaagccccagaaguucaccucaucugccaacggagugaccacacauuacguuucacagauugguggcuucccaaaucaaacagaagacggaggacuaccacaaagugguagaauuguuguugauuacauggugcaaaaaucugggaaaacaggaacaauuaccuaucaaagagguauuuuauugccucaaaagguguggugcgcaaguggcaggagcaagguaauaaaaggauccuugccuuuaauuggagaagcagauugccuccacgaaaaauacgguggguuaaacaaaagcaagccuuacuacacaggggaacaugcaaaggccauaggaaauugcccaauaugggugaaaacacccuugaagcuggccaauggaaccaaauauagaccuccugcaaaacuauuaaaggaaagggguuucuucggagcuauugcugguuucuuagaaggaggaugggaaggaaugauugcagguuggcacggauacacaucccauggggcacauggaguagcgguggcagcagaccuuaagagcacucaagaggccauaaacaagauaacaaaaaaucucaacucuuugagugagcuggaaguaaagaaucuucaaagacuaagcggugccauggaugaacuccacaacgaaauacuagaacuagacgagaaaguggaugaucucagagcugauacaauaagcucacaaauagaacucgcaguccugcuuuccaaugaaggaauaauaaacagugaagaugagcaucucuuggcgcuugaaagaaagcugaagaaaaugcugggccccucugcuguagagauagggaauggaugcuuugaaaccaaacacaagugcaaccagaccugucucgacagaauagcugcugguaccuuugaugcaggagaauuuucucuccccaccuuugauucacugaauauuacugcugcaucuuuaaaugacgauggauuggauaaucauacuauacugcuuuacuacucaacugcugccuccaguuuggcuguaacauugaugauagcuaucuuuguuguuuauauggucuccagagacaauguuucuugcuccaucugucuauaa

SEQ ID NO: 59282 - RNA, 1758 nt, Artificial Sequence
  derived and/or modified CDS sequence (wt) from hemagglutinin__InfluenzaB__AGX18930
augaaggcaauaauuguacuacucaugguaguaacauccaaugcagaucgaaucugcacugggauaacaucgucaaacucaccacauguugucaaaacugcuacucaaggggaggucaaugugacugguguaauaccacugacaacaacacccaccaaaucucauuuugcaaaucucaaaggaacagaaaccagagggaaacuaugcccaaaaugccucaacugcacagaucuggacguggccuugggcagaccaaaaugcacggggaacauacccucggcaagaguuucaauacuccaugaagucagaccuguuacaucugggugcuuuccuauaaugcacgacagaacaaaaauuagacagcugccuaaccuucucagaggauacgaacauaucagguuaucaacucauaacguuaucaaugcagaaaaugcaccaggaggacccuacaaaauuggaaccucagggucuugcccuaacguuaccaauggaaacggauuuuucgcaacaauggcuugggccgucccaaaaaacgacaacaacaaaacagcaacaaauucauuaacaauagaaguaccauacauuuguacagaaggagaagaccaaauuaccguuuggggguuccacucugauaaugagacccaaauggcaaagcucuauggggacucaaagccccagaaguucaccucaucugccaacggagugaccacacauuacguuucacagauugguggcuucccaaaucaaacagaagacggaggacuaccacaaagugguagaauuguuguugauuacauggugcaaaaaucugggaaaacaggaacaauuaccuaucaaagagguauuuuauugccucaaaagguguggugcgcaaguggcaggagcaagguaauaaaaggauccuugccuuuaauuggagaagcagauugccuccacgaaaaauacgguggguuaaacaaaagcaagccuuacuauacaggggaacaugcaaaggccauaggaaauugcccaauaugggugaaaacacccuugaagcuggccaauggaaccaaauauagaccuccugcaaaacuauuaaaggaaagggguuucuucggagcuauugcugguuucuuagaaggaggaugggaaggaaugauugcagguuggcacggauacacaucccauggggcacauggaguagcgguggcagcagaccuuaaaagcacucaagaggccauaaacaagauaacaaaaaaucucaacucuuugagugagcuggaaguaaagaaucuucaaagacuaagcggugccauggaugaacuccacaacgaaauacuagaacuagacgagaaaguggaugaucucagagcugauacaauaagcucacaaauagaacucgcaguccugcuuuccaaugaaggaauaauaaacagugaagaugagcaucucuuggcgcuugaaagaaagcugaagaaaaugcugggccccucugcuguagagauagggaauggaugcuuugaaaccaaacacaagugcaaccagaccuguaucgacagaauagcugcugguaccuuugaugcaggagaauuuucucuccccaccuuugauucacugaauauuacugcugcaucuuuaaaugacgauggauuggauaaucauacuauacugcuuuacuacucaacugcugccuccaguuuggcuguaacauugaugauagcuaucuuuguuguuuauauggucuccagagacaauguuucuugcuccaucugucuauaa

SEQ ID NO: 59283 - RNA, 1758 nt, Artificial Sequence
  derived and/or modified CDS sequence (wt) from hemagglutinin__InfluenzaB__AGX18941
augaaggcaauaauuguacuacucaugguaguaacauccaaugcagaucgaaucugcacugggauaacaucgucaaacucaccacauguugucaaaacugcuacucaaggggaagucaaugugacugguguaauaccacugacaacaacacccaccaaaucucauuuugcaaaucucaaaggaacagaaaccagagggaaacuaugcccaaaaugccucaacugcacagaucuggacguggccuugggcagaccaaaaugcacggggaacauacccucggcaagaguuucaauacuccaugaagucagaccuguuacaucugggugcuuuccuauaaugcacgacagaacaaaaaucagacagcugccuaaccuucucagaggauacgaacauaucagguuaucaacucauaacguuaucaaugcagaaaaugcaccaggaggacccuacaaaauuggaaccucagggucuugcccuaacguuaccaauggaaacggauuuuucgcaacaauggcuugggccgucccaaaaaacgacaacaacaaaacagcaacaaauucauuaacaauagaaguaccauacauuuguacagaaggagaagaccaaauuaccguuuggggguuccacucugauaacgagacccaaauggcaaagcucuauggggacucaaagccccagaaguucaccucaucugccaacggagugaccacacauuacguuucacagauugguggcuucccaaaucaaacagaagacggaggacuaccacaaagugguagaauuguuguugauuacauggugcaaaaaucugggaaaacaggaacaauuaccuaucaaagagguauuuuauugccucaaaagguguggugcgcaaguggcaggagcaagguaauaaaaggauccuugccuuuaauuggagaagcagauugccuccacgaaaaauacgguggauuaaacaaaagcaagccuuacuacacaggggaacaugcaaaggccauaggaaauugcccaauaugggugaaaacacccuugaagcuggccaauggaaccaaauauagaccuccugcaaaacuauuaaaggaaagggguuucuucggagcuauugcugguuucuuagaaggaggaugggaaggaaugauugcagguuggcacggauacacaucccauggggcacauggaguagcgguggcagcagaccuuaagagcacucaagaggccauaaacaagauaacaaaaaaucucaacucuuugagugagcuggaaguaaagaaucuucaaagacuaagcggugccauggaugaacuccacaacgaaauacuagaacuagacgagaaaguggaugaucucagagcugauacaauaagcucacaaauagaacucgcaguccugcuuuccaaugaaggaauaauaaacagugaagaugagcaucucuuggcgcuugaaagaaagcugaagaaaaugcuaggccccucugcuguagagauagggaauggaugcuuugaaaccaaacacaagugcaaccagaccugucucgacagaauagcugcugguaccuuugaugcaggagaauuuucucuccccaccuuugauucacugaauauuacugcugcaucuuuaaaugacgauggauuggauaaucauacuauacugcuuuacuacucaacugcugccuccaguuuggcuguaacauugaugauagcuaucuuuguuguuuauauggucuccagagacaauguuucuugcuccaucugucuauaa

SEQ ID NO: 59284 - RNA, 1758 nt, Artificial Sequence; identical to SEQ ID NO: 59248
  derived and/or modified CDS sequence (wt) from hemagglutinin__InfluenzaB__AGX18952

SEQ ID NO: 59285 - RNA, 1758 nt, Artificial Sequence; identical to SEQ ID NO: 59273
  derived and/or modified CDS sequence (wt) from hemagglutinin__InfluenzaB__AGX18963

SEQ ID NO: 59286 - RNA, 1758 nt, Artificial Sequence
  derived and/or modified CDS sequence (wt) from hemagglutinin__InfluenzaB__AGX18974
augaaggcaauaauuguacuacucaugguaguaacauccaaugcagaucgaaucugcacugggauaacaucgucaaacucaccacauguugucaaaacugcuacucaaggggaggucaaugugacugguguaauaccacugacaacaacacccaccaaaucucauuuugcaaaucucaaaggaacagaaaccagagggaaacuaugcccaaaaugccucaacugcacagaucuggacguggccuugggcagaccaaaaugcacggggaacauacccucggcaagaguuucaauacuccaugaagucagaccuguuacaucugggugcuuuccuauaaugcacgacagaacaaaaauuagacagcugccuaaccuucucagaggauacgaacauaucagguuaucaacucauaacguuaucaaugcagaaaaugcaccaggaggacccuacaaaauuggaaccucagggucuugcccuaacguuaccaauggaaacggauuuuucgcaacaauggcuugggccgucccaaaaaacgacaacaacaaaacagcaacaaauucauugacaauagaaguaccauacauuuguacagaaggagaagaccaaauuaccguuuggggguuccacucugauaacgaaacccaaauggcaaagcucuauggggacucaaagccccagaaguucaccucaucugccaacggagugaccacacauuacguuucacagauugguggcuucccaaaucaaacagaagacggaggacuaccccaaagugguagaauuguuguugauuacauggugcaaaaaucugggaaaacaggaacaauuaccuaucaaagagguauuuuauugccucaaaaaguguggugcgcaaguggcaggagcaagguaauaaaaggauccuugccuuuaauuggagaagcagauugccuccacgaaaaauacgguggauuaaacaaaagcaagccuuacuacacaggggaacaugcaaaggccauaggaaauugcccaauaugggugaaaacacccuugaagcuggccaauggaaccaaauauagaccuccugcaaaacuauuaaaggaaagggguuucuucggagcuauugcugguuucuuagaaggaggaugggaaggaaugauugcagguuggcacggauacacaucccauggggcacauggaguagcgguggcagcagaccuuaagagcacucaagaggccauaaacaagauaacaaaaaaucucaacucuuugagugagcuggaaguaaagaaucuucaaagacuaagcggugccauggaugaacuccacaacgaaauacuagaacuagacgagaaaguggaugaucucagagcugauacaauaagcucacaaauagaacucgcaguccugcuuuccaaugaaggaauaauaaacagugaagaugagcaucucuuggcgcuugaaaaaaagcugaagaaaaugcugggccccucugcuguagagauagggaauggaugcuuugagaccaaacacaaaugcaaccagaccugucucgacagaauagcugcugguaccuuugaugcaggagaauuuucucuccccacuuuugauucacugaauauuacugcugcaucuuuaaaugacgauggauuggauaaucauacuauacugcuuuacuacucaacugcugccuccaguuuggcuguaacauugaugauagcuaucuuuguuguuuauauggucuccagagacaauguuucuugcuccaucugucuauaa

SEQ ID NO: 59287 - RNA, 1758 nt, Artificial Sequence
  derived and/or modified CDS sequence (wt) from hemagglutinin__InfluenzaB__AGX18985
augaaggcaauaauuguacuacucaugguaguaacauccaaugcagaucgaaucugcacugggauaacaucgucaaacucaccacauguugucaaaacugcuacucaaggggaagucaaugugacugguguaauaccacugacaacaacacccaccaaaucucauuuugcaaaucucaaaggaacagaaaccagagggaaacuaugcccaaaaugccucaacugcacagaucuggacguggccuugggcagaccaaaaugcacggggaacauacccucggcaagaguuucaauacuccaugaagucagaccuguuacaucugggugcuuuccuauaaugcacgacagaacaaaaaucagacagcugccuaaccuucucagaggauacgaacauaucagguuaucaacucauaacguuaucaaugcagaaaaugcaccaggaggacccuacaaaauuggaaccucagggucuugcccuaacguuaccaauggaaacggauuuuucgcaacaauggcuugggccgucccaaaaaacgacaacaacaaaacagcaacaaauucauuaacaauagaaguaccauacauuuguacagaaggagaagaccaaauuaccguuuggggguuccacucugauaacgagacccaaauggcaaagcucuauggggacucaaagccccagaaguucaccucaucugccaacggagugaccacacauuacguuucacagauugguggcuucccaaaucaaacagaagacggaggacuaccacaaagugguagaauuguuguugauuacauggugcaaaaaucugggaaaacaggaacaauuaccuaucaaagagguauuuuauugccucaaaagguguggugcgcaaguggcaggagcaagguaauaaaaggauccuugccuuuaauuggagaagcagauugccuccacgaaaaauacgguggauuaaacaaaagcaagccuuacuacacaggggaacaugcaaaggccauaggaaauugcccaauaugggugaaaacacccuugaagcuggccaauggaaccaaauauagaccuccugcaaaacuauuaaaggaaagggguuucuucggagcuauugcugguuucuuagaaggaggaugggaaggaaugauugcagguuggcacggauacacaucccauggggcacauggaguagcgguggcagcagaccuuaagagcacucaagaggccauaaacaagauaacaaaaaaucucaacucuuugagugagcuggaaguaaagaaucuucaaagacuaagcggugccauggaugaacuccacaacgaaauacuagaacuagacgagaaaguggaugaucucagagcugauacaauaagcucacaaauagaacucgcaguccugcuuuccaaugaaggaauaauaaacagugaagaugagcaucucuuggcgcuugaaagaaagcugaagaaaaugcugggccccucugcuguagagauagggaauggaugcuuugaaaccaaacacaagugcaaccagaccugucucgacagaauagcugcugguaccuuugaugcaggagaauuuucucuccccaccuuugauucacugaauauuacugcugcaucuuuaaaugacgauggauuggauaaucauacuauacugcuuuacuacucaacugcugccuccaguuuggcuguaacauugaugauagcuaucuuuguuguuuauauggucuccagagacaauguuucuugcuccaucugucuauaa

SEQ ID NO: 59288 - RNA, 1758 nt, Artificial Sequence
  derived and/or modified CDS sequence (wt) from hemagglutinin__InfluenzaB__AGX18996
augaaggcaauaauuguacuacucaugguaguaacauccaaugcagaucgaaucugcacugggauaacaucgucaaacucaccacauguugucaaaacugcuacucaaggggaggucaaugugacugguguaauaccacugacaacaacacccaccaaaucucauuuugcaaaucucaaaggaacagaaaccagagggaaacuaugcccaaaaugccucaacugcacagaucuggacguggccuugggcagaccaaaaugcacggggaacacacccucggcaagaguuucaauacuccaugaagucagaccuguuacaucugggugcuuuccuauaaugcacgacagaacaaaaauuagacagcugccuaaccuucucagaggauacgaacauaucagguuaucaacucauaacguuaucaaugcagaaaaugcaccaggaggacccuacaaaauuggaaccucagggucuugcccuaacguuaccaauggaaacggauuuuucgcaacaauggcuugggccgucccaaaaaacgacaacaacaaaacagcaacaaauucauuaacaauagaaguaccauacauuuguacagaaggagaagaccaaauuaccguuuggggguuccacucugauaacggaacccaaauggcaaagcucuauggggacucaaagccccagaaguucaccucaucugccaacggaguaaccacacauuacguuucacagauugguggcuucccaaaucaaacagaagacggaggacuaccacaaagugguagaauuguuguugauuacauggugcaaaaaucugggaaaacaggaacaauuaccuaucaaagagguauuuuauugccucaaaaaguguggugcgcaaguggcaggagcaagguaauaaaaggauccuugccuuuaauuggagaagcagauugccuccacgaaaaauacgguggauuaaacaaaagcaagccuuacuacacaggggaacaugcaaaggccauaggaaauugcccaauaugggugaaaacacccuugaagcuggccaauggaaccaaauauagaccuccugcaaaacuauuaaaggaaagggguuucuucggagcuauugcugguuucuuagaaggaggaugggaaggaaugauugcagguuggcacggauacacaucccauggggcacauggaguagcgguggcagcagaccuuaaaagcacucaagaggccauaaacaagauaacaaaaaaucucaacucuuugagugagcuggaaguaaagaaucuucaaagacuaagcggugccauggaugaacuccacaacgaaauacuagaacuagacgagaaaguggaugaucucagagcugauacaauaagcucacaaauagaacucgcaguccugcuuuccaaugaaggaauaauaaacagugaagaugagcaucucuuggcgcuugaaagaaagcugaagaaaaugcugggccccucugcuguagagauagggaauggaugcuuugaaaccaaacacaagugcaaccagaccugucucgacagaauagcugcugguaccuuugaugcaggggaauuuucucuccccaccuuugauucacuaaauauuacugcugcaucuuuaaaugacgauggauuggauaaucauacuauacugcuuuacuacucaacugcugccuccaguuuggcuguaacauugaugauagcuaucuuuguuguuuauauggucuccagagacaauguuucuugcuccaucugucuauaa

SEQ ID NO: 59289 - RNA, 1758 nt, Artificial Sequence; identical to SEQ ID NO: 59246
  derived and/or modified CDS sequence (wt) from hemagglutinin__InfluenzaB__AGX19007

SEQ ID NO: 59290 - RNA, 1758 nt, Artificial Sequence
  derived and/or modified CDS sequence (wt) from hemagglutinin__InfluenzaB__AGX19018
augaaggcaauaauuguacuacucaugguaguaacauccaaugcagaucgaaucugcacugggauaacaucgucaaacucaccacauguugucaaaacugcuacucaaggggaggucaaugugacugguguaauaccacugacaacaacacccaccaaaucucauuuugcaaaucucaaaggaacagaaaccagagggaaacuaugcccaaaaugccucaacugcacagaucuggacguggccuugggcagaccaaaaugcacggggaacauacccucggcaagaguuucaauacuccaugaagucagaccuguuacaucugggugcuuuccuauaaugcacgacagaacaaaaauuagacagcugccuaacuuucucagaggauacgaacauaucagguuaucaacucauaacguuaucaaugcagaaaaugcaccaggaggacccuacaaaauuggaaccucagggucuugcccuaacguuaccaauggaaacggauuuuucgcaacaauggcuugggccgucccaaaaaacgacaacaacaaaacagcaacaaauucauuaacaauagaaguaccauacauuuguacagaaggagaagaccaaauuaccguuuggggguuccacucugauagcgagacccaaauggcaaagcucuauggggacucaaagccccagaaguucaccucaucugccaacggagugaccacacauuacguuucacagauugguggcuucccaaaucaaacagaagacggaggacuaccacaaagugguagaauuguuguugauuacauggugcaaaaaucugggaaaacaggaacaauuaccuaucaaagagguauuuuauugccucaaaagguguggugcgcaaguggcaggagcaagguaauaaaaggauccuugccuuuaauuggagaagcagauugccuccacgaaaaauacgguggguuaaacaaaagcaagccuuacuacacaggggaacaugcaaaggccauaggaaauugcccaauaugggugaaaacacccuugaagcuggccaauggaaccaaauauagaccuccugcaaaacuauuaaaggaaagggguuucuucggagcuauugcugguuucuuagaaggaggaugggaaggaaugauugcagguuggcacggauacacaucccauggggcacauggaguagcgguggcagcagaccuuaagagcacucaagaggccauaaacaagauaacaaaaaaucucaacucuuugagugagcuggaaguaaagaaucuucaaagacuaagcggugccauggaugaacuccacaacgaaauacuagaacuagacgagaaaguggaugaucucagagcugauacaauaagcucacaaauagaacucgcaguccugcuuuccaaugaaggaauaauaaacagugaagaugagcaucucuuggcgcuugaaagaaagcugaagaaaaugcugggccccucugcuguagagauagggaauggaugcuuugaaaccaaacacaagugcaaccagaccugucucgacagaauagcugcugguaccuuugaugcaggagaauuuucucuccccaccuuugauucacugaauauuacugcugcaucuuuaaaugacgauggauuggauaaucauacuauacugcuuuacuacucaacugcugccuccaguuuggcuguaacauugaugauagcuaucuuuguuguuuauauggucuccagagacaauguuucuugcuccaucugucuauaa

SEQ ID NO: 59291 - RNA, 1758 nt, Artificial Sequence; identical to SEQ ID NO: 59272
  derived and/or modified CDS sequence (wt) from hemagglutinin__InfluenzaB__AGX19029

SEQ ID NO: 59292 - RNA, 1758 nt, Artificial Sequence
  derived and/or modified CDS sequence (wt) from hemagglutinin__InfluenzaB__AGX19040
augaaggcaauaauuguacuacucaugguaguaacauccaaugcagaucgaaucugcacugggauaacaucgucaaacucaccacauguugucaaaacugcuacucaaggggaggucaaugugacugguguaauaccacugacaacaacacccaccaaaucucauuuugcaaaccucaaaggaacagaaaccagagggaaacuaugcccaaaaugccucaacugcacagaucuggacguggccuugggcagaccaaaaugcacggggaacauacccucggcaagaguuucaauacuccaugaagucagaccuguuacaucugggugcuuuccuauaaugcacgacagaacaaaaaucagacagcugccuaaccuucucagaggauacgaacauaucagguuaucaacucauaacguuaucaaugcagaaaaugcaccaggaggacccuacaaaauuggaaccucagggucuugcccuaacguuaccaauggaaacggauuuuucgcaacaauggcuugggccgucccaaaaaacgacaacaacaaaacagcaacaaauucauuaacaauagaaguaccauacauuuguacagaaggagaagaccaaauuaccguuuggggguuccacucugauaacgagacccaaauggcaaagcucuauggggacucaaagccccagaaguucaccucaucugccaacggagugaccacacauuacguuucacagauugguggcuucccaaaucaaacagaagacggaggacuaccacaaagugguagaauuguuguugauuacauggugcaaaaaucugggaaaacaggaacaauuaccuaucaaagagguauuuuauugccucaaaagguguggugcgcaaguggcaggagcaagguaauaaaaggauccuugccuuuaauuggagaagcagauugccuccacgaaaaauacgguggguuaaacaaaagcaagccuuacuacacaggggaacaugcaaaggccauaggaaauugcccaauaugggugaaaacacccuugaagcuggccaauggaaccaaauauagaccuccugcaaaacuauuaaaggaaagggguuucuucggagcuauugcugguuucuuagaaggaggaugggaaggaaugauugcagguuggcacggauacacaucccauggggcacauggaguagcgguggcagcagaccuuaagagcacucaagaggccauaaacaagauaacaaaaaaucucaacucuuugagugagcuggaaguaaagaaucuucaaagacuaagcggugccauggaugaacuccacaacgaaauacuagaacuagacgagaaaguggaugaucucagagcugauacaauaagcucacaaauagaacucgcaguccugcuuuccaaugaaggaauaauaaacagugaagaugagcaucucuuggcgcuugaaagaaagcugaagaaaaugcugggccccucugcuguagagauagggaauggaugcuuugaaaccaaacacaagugcaaccagaccugucucgacagaauagcugcugguaccuuugaugcaggagaauuuucucuccccaccuuugauucacugaauauuacugcugcaucuuuaaaugacgauggauuggauaaucauacuauacugcuuuacuacucaacugcugccuccaguuuggcuguaacauugaugauagcuaucuuuguuguuuauauggucuccagagacaauguuucuugcuccaucugucuauaa

SEQ ID NO: 59293 - RNA, 1758 nt, Artificial Sequence
  derived and/or modified CDS sequence (wt) from hemagglutinin__InfluenzaB__AGX19051
augaaggcaauaauuguacuacucaugguaguaacauccaaugcagaucgaaucugcacugggauaacaucgucaaacucaccacauguugucaaaacugcuacucaaggggaggucaaugugacugguguaauaccacugacaacaacacccaccaaaucucauuuugcaaaucucaaaggaacagaaaccagagggaaacuaugcccaaaaugccucaacugcacagaucuggacguggccuugggcagaccaaaaugcacggggaacauacccucggcaagaguuucaauacuccaugaagucagaccuguuacaucugggugcuuuccuauaaugcacgacagaacaaaaauuagacagcugccuaaccuucucagaggauacgaacauaucagguuaucaacucauaacguuaucaauacagaaaaugcaccaggaggacccuacaaaauuggaaccucagggucuugcccuaacguuaccaauggaaacggauuuuucgcaacaauggcuugggccgucccaaaaaacgacaacaacaaaacagcaacaaauucauuaacaauagaaguaccauacauuuguacagaaggagaagaccaaauuaccguuuggggguuccacucugauagcgagacccaaauggcaaagcucuauggggacucaaagccccagaaguucaccucaucugccaacggagugaccacacauuacguuucacagauugguggcuucccaaaucaaacagaagacggaggacuaccacaaagugguagaauuguuguugauuacauggugcaaaaaucugggaaaacaggaacaauuaccuaucaaagagguauuuuauugccucaaaagguguggugcgcaaguggcaggagcaagguaauaaaaggauccuugccuuuaauuggagaagcagauugccuccacgaaaaauacgguggguuaaacaaaagcaagccuuacuacacaggggaacaugcaaaggccauaggaaauugcccaauaugggugaaaacacccuugaagcuggccaauggaaccaaauauagaccuccugcaaaacuauuaaaggaaagggguuucuucggagcuauugcugguuucuuagaaggaggaugggaaggaaugauugcagguuggcacggauacacaucccauggggcacauggaguagcgguggcagcagaccuuaagagcacucaagaggccauaaacaagauaacaaaaaaucucaacucuuugagugagcuggaaguaaagaaucuucaaagacuaagcggugccauggaugaacuccacaacgaaauacuagaacuagacgagaaaguggaugaucucagagcugauacaauaagcucacaaauagaacucgcaguccugcuuuccaaugaaggaauaauaaacagugaagaugagcaucucuuggcgcuugaaagaaagcugaagaaaaugcugggccccucugcuguagagauagggaauggaugcuuugaaaccaaacacaagugcaaccagaccugucucgacagaauagcugcugguaccuuugaugcaggagaauuuucucuccccaccuuugauucacugaauauuacugcugcaucuuuaaaugacgauggauuggauaaucauacuauacugcuuuacuacucaacugcugccuccaguuuggcuguaacauugaugauagcuaucuuuguuguuuauauggucuccagagacaauguuucuugcuccaucugucuauaa

SEQ ID NO: 59294 - RNA, 1758 nt, Artificial Sequence
  derived and/or modified CDS sequence (wt) from hemagglutinin__InfluenzaB__AGX19062
augaaggcaauaauuguacuacucaugguaguaacauccaaugcagaucgaaucugcacugggauaacaucgucaaacucaccacauguugucaaaacugcuacucaaggggaggucaaugugacugguguaauaccacugacaacaacacccaccaaaucucauuuugcaaaucucaaaggaacagaaaccagagggaaacuaugcccaaaaugccucaacugcacagaucuggacguggccuugggcagaccaaaaugcacggggaacauacccucggcaagaguuucaauacuccaugaagucagaccuguuacaucugggugcuuuccuauaaugcacgacagaacaaaaauucgacagcugccuaaccuucucagaggauacgaacauaucagguuaucaacucauaacguuaucaaugcagaaaaugcaccaggaggacccuacaaaauuggaaccucagggucuugcccuaacguuaccaauggaaacggauuuuuugcaacaauggcuugggccgucccaaaaaacgacaacaacaaaacagcaacaaauucauuaacaauagaaguaccauacauuuguacagaaggagaagaccaaauuaccguuuggggguuccacucugauaacgagacccaaauggcaaagcucuauggggacucaaagccccagaaguucaccucaucugccaacggagugaccacacauuacguuucacagauugguggcuucccaaaucaaacagaagacggaggacuaccacaaagugguagaauuguuguugauuacauggugcaaaaaucugggaaaacaggaacaauuaccuaucaaagagguauuuuauugccucaaaagguguggugcgcaaguggcaggagcaagguaauaaaaggauccuugccuuuaauuggagaagcagauugccuccacgaaaaauacgguggguuaaacaaaagcaagccuuacuacacaggggaacaugcaaaggccauaggaaauugcccaauaugggugaaaacacccuugaagcuggccaauggaaccaaauauagaccuccugcaaaacuauuaaaggaaagggguuucuucggagcuauugcugguuucuuagaaggaggaugggaaggaaugauugcagguuggcacggauacacaucccauggggcacauggaguagcgguggcagcagaccuuaagagcacucaagaggccauaaacaagauaacaaaaaauuucaacucuuugagugagcuggaaguaaagaaucuucaaagacuaagcggugccauggaugaacuccacaacgaaauacuagaacuagacgagaaaguggaugaucucagagcugauacaauaagcucacaaauagaacucgcaguccugcuuuccaaugaaggaauaauaaacagugaagaugagcaucucuuggcgcuugaaagaaagcugaagaaaaugcugggccccucugcuguagagauagggaauggaugcuuugaaaccaaacacaagugcaaccagaccugucucgacagaauagcugcugguaccuuugaugcaggagaauuuucucuccccaccuuugauucacugaauauuacugcugcaucuuuaaaugacgauggauuggauaaucauacuauacugcuuuacuacucaacugcugccuccaguuuggcuguaacauugaugauagcuaucuuuguuguuuauauggucuccagagacaauguuucuugcuccaucugucuauaa

SEQ ID NO: 59295 - RNA, 1758 nt, Artificial Sequence
  derived and/or modified CDS sequence (wt) from hemagglutinin__InfluenzaB__AGX19073
augaaggcaauaauuguacuacucaugguaguaacauccaaugcagaucgaaucugcacugggauaacaucgucaaacucaccacauguugucaaaacugcuacucaaggggaggucaaugugaccgguguaauaccacugacaacaacacccaccaaaucucauuuugcaaaucucaaaggaacagaaaccagagggaaacuaugcccaaaaugccucaacugcacagaucuggacguggccuugggcagaccaaaaugcacggggaacauacccucggcaagaguuucaauacuccaugaagucagaccuguuacaucugggugcuuuccuauaaugcacgacagaacaaaaauuagacagcugccuaaccuucucagaggauacgaacauaucagguuaucaacucauaacguuaucaaugcagaaaaugcaccaggaggacccuacaaaauuggaaccucagggucuugcccuaacguuaccaauggaaacggauuuuuugcaacaauggcuugggccgucccaaaaaacgacaacaacaaaacagcaacaaauucauuaacaauagaagugccauacauuuguacagaaggagaagaccaaauuaccguuuggggguuccacucugauaacgagacccaaauggcaaagcucuauggggacucaaagccccagaaguucaccucaucugccaacggagugaccacacauuacguuucacagauugguggcuucccaaaucaaacagaagacggaggacuaccacaaagugguagaauuguuguugauuacauggugcaaaaaucugggaaaacaggaacaauuaccuaucaaagagguauuuuauugccucaaaagguguggugcgcaaguggcaggagcaagguaauaaaaggauccuugccuuuaauuggagaagcagauugccuccacgaaaaauacgguggguuaaacaaaagcaagccuuacuacacaggggaacaugcaaaggccauaggaaauugcccaauaugggugaaaacacccuugaagcuggccaauggaaccaaauauagaccuccugcaaaacuauuaaaggaaagggguuucuucggagcuauugcugguuucuuagaaggaggaugggaaggaaugauugcagguuggcacggauacacaucccauggggcacauggaguagcgguggcagcagaccuuaagagcacucaagaggccauaaacaagauaacaaaaaaucucaacucuuugagugagcuggaaguaaagaaucuucaaagacuaagcggugccauggaugaacuccacaacgaaauacuagaacuagacgagaaaguggaugaucucagagcugauacaauaagcucacaaauagaacucgcaguccugcuuuccaaugaaggaauaauaaacagugaagaugagcaucucuuggcgcuugaaagaaagcugaagaaaaugcugggccccucugcuguagagauagggaauggaugcuuugaaaccaaacacaagugcaaccagaccugucucgacagaauagcugcugguaccuuugaugcaggagaauuuucucuccccaccuuugauucacugaauauuacugcugcaucuuuaaaugacgauggauuggauaaucauacuauacugcuuuacuacucaacugcugccuccaguuuggcuguaacauugaugauagcuaucuuuguuguuuauauggucuccagagacaauguuucuugcuccaucugucuauaa

SEQ ID NO: 59296 - RNA, 1758 nt, Artificial Sequence
  derived and/or modified CDS sequence (wt) from hemagglutinin__InfluenzaB__AGX19084
augaaggcaauaauuguacuacucaugguaguaacauccaaugcagaucgaaucugcacugggauaacaucgucaaacucaccacauguugucaaaacugcuacucaaggggaggucaaugugacugguguaauaccacugacaacaacacccaccaaaucucauuuugcaaaucucaaaggaacagaaaccagagggaaacuaugcccaaaaugccucaacugcacagaucuggacguggccuugggcagaccaaaaugcacggggaacauacccucggcaagaguuucaauacuccaugaagucagaccuguuacaucugggugcuuuccuauaaugcacgacagaacaaaaauuagacagcugccuaaccuucucagaggauacgaacauaucaaguuaucaacucauaacguuaucaaugcagaaaaugcaccaggaggacccuacaaaauuggaaccucagggucuugcccuaacguuaccaauggaaacggauuuuucgcaacaauggcuugggccguuccaaaaaacgacaacaacaaaacagcaacaaauucauuaacgauagaaguaccauacauuuguacagaaggagaagaccaaauuaccguuuggggguuccacucugauaacgagaaccaaauggcaaagcucuauggggacucaaagccccagaaguucaccucaucugccaacggagugaccacacauuacguuucacagauugguggcuucccaaaucaaacagaagacggaggauuaccacaaagugguagaauuguuguugauuacauggugcaaaaaucugggaaaacaggaacaauuaccuaucaaagagguauuuuauugccucaaaagguguggugcgcaaguggcaggagcaagguaauaaaaggauccuugccuuuaauuggagaagcagauugccuccacgaaaaauacgguggauuaaacaaaagcaagccuuacuacacaggggaacaugcaaaggccauaggaaauugcccaauaugggugaaaacacccuugaagcuggccaauggaaccaaauauagaccuccugcaaaacuauuaaaggaaagggguuucuucggagcuauugcugguuucuuagaaggaggaugggaaggaaugauugcagguuggcacggauacacaucccauggggcacauggaguagcgguggcagcagaccuuaagagcacucaagaggccauaaacaagauaacaaaaaaucucaacucuuugagugagcuggaaguaaagaaucuucagagacuaagcggugccauggaugaacuccacaacgaaauacuagaacuagacgagaaaguggaugaucucagagcugauacaauaagcucacaaauagaacucgcaguccugcuuuccaaugaaggaauaauaaacagugaagaugagcaucucuuggcgcuugaaagaaagcugaagaaaaugcugggccccucugcuguagagauagggaauggaugcuuugaaaccaaacacaagugcaaccagaccugucucgacagaauagcugcugguaccuuugaugcaggagaauuuucccuccccaccuuugauucacugaauauuacugcugcaucuuuaaaugacgauggauuggauaaucauacuauacugcuuuacuacucaacugcugccuccaguuuggcgguaacauugaugauagcuaucuuuguuguuuauauggucuccagagacaauguuucuugcuccaucugucuauaa

SEQ ID NO: 59297 - RNA, 1758 nt, Artificial Sequence; identical to SEQ ID NO: 59246
  derived and/or modified CDS sequence (wt) from hemagglutinin__InfluenzaB__AGX19095

SEQ ID NO: 59298 - RNA, 1758 nt, Artificial Sequence; identical to SEQ ID NO: 59272
  derived and/or modified CDS sequence (wt) from hemagglutinin__InfluenzaB__AGX19106

SEQ ID NO: 59299 - RNA, 1758 nt, Artificial Sequence
  derived and/or modified CDS sequence (wt) from hemagglutinin__InfluenzaB__AGX19117
augaaggcaauaauuguacuacucaugguaguaacauccaaugcagaucgaaucugcacugggauaacaucgucaaacucaccacauguugucaaaacugcuacucaaggggaggucaaugugacugguguaauaccacugacaacaacacccaccaaaucucauuuugcaaaucucaaaggaacagaaaccagagggaaacuaugcccaaaaugccucaacugcacagaucuggacguggccuugggcagaccaaaaugcacggggaacauacccucggcaagaguuucaauacuccaugaagucagaccuguuacaucugggugcuuuccuauaaugcacgacagaacaaaaauuagacagcugccuaaccuucucagaggauacgaacauaucagguuaucaacucauaacguuaucaaugcagaaaaugcaccgggaggacccuacaaaauuggaaccucagggucuugcccuaacguuaccaauggaaacggauuuuucgcaacaauggcuugggccgucccaaaaaacgacaacaacaaaacagcaacaaauucauuaacaauagaaguaccauacauuuguacagaaggagaagaccaaauuaccguuuggggguuccacucugauaacgagacccaaauggcaaagcucuauggggacucaaagccccagaaguucaccucaucugccaacggagugaccacacauuacguuucacagauugguggcuucccaaaucaaacagaagacggaggacuaccacaaagugguagaauuguuguugauuacauggugcaaaaaucugggaaaacaggaacaauuaccuaucaaagagguauuuuauugccucaaaagguguggugcgcaaguggcaggagcaagguaauaaaaggauccuugccuuuaauuggagaagcagauugccuccacgaaaaauacgguggguuaaacaaaagcaagccuuacuacacaggggaacaugcaaaggccauaggaaauugcccaauaugggugaaaacacccuugaagcuggccaauggaaccaaauauagaccuccugcaaaacuauuaaaagaaagggguuucuucggagcuauugcugguuucuuagaaggaggaugggaaggaaugauugcagguuggcacggauacacaucccauggggcacauggaguagcgguggcagcagaccuuaagagcacucaagaggccauaaacaagauaacaaaaaaucucaacucuuugagugagcuggaaguaaagaaucuucaaagacuaagcggugccauggaugaacuccacaacgaaauacuagaacuagacgagaaaguggaugaucucagagcugauacaauaagcucacaaauagaacucgcaguccugcuuuccaaugaaggaauaauaaacagugaagaugagcaucucuuggcgcuugaaagaaagcugaagaaaaugcugggccccucugcuguagagauagggaauggaugcuuugaaaccaaacacaagugcaaccagaccugucucgacagaauagcugcugguaccuuugaugcaggagaauuuucucuccccaccuuugauucacugaauauuacugcugcaucuuuaaaugacgauggauuggauaaucauacuauacugcuuuacuacucaacugcugccuccaguuuggcuguaacauugaugauagcuaucuuuguuguuuauauggucuccagagacaauguuucuugcuccaucugucuauaa

SEQ ID NO: 59300 - RNA, 1758 nt, Artificial Sequence
  derived and/or modified CDS sequence (wt) from hemagglutinin__InfluenzaB__AGX19128
augaaggcaauaauuguacuacucaugguaguaacauccaaugcagaucgaaucugcacugggauaacaucgucaaacucaccacauguugucaaaacugcuacucaaggggaggucaaugugacugguguaauaccacugacaacaacacccaccaaaucucauuuugcaaaucucaaaggaacagaaaccagagggaaacuaugcccaaaaugccucaacugcacagaucuggacguggccuugggcagaccaaaaugcacagggaacacacccucggcaagaguuucaauacuccaugaagucagaccuguuacaucugggugcuuuccuauaaugcacgacagaacaaaaauuagacagcugccuaaccuucucagaggauacgaacauaucagguuaucaacucauaacguuaucaaugcagaaaaugcaccaggaggacccuacaaaauuggaaccucagggucuugcccuaacguuaccaauggaaacggauuuuucgcaacaauggcuugggccgucccaaaaaacgacaacaacaaaacagcaacaaauucauuaacaauagaaguaccauacauuuguacagaaggagaagaccaaauuaccguuuggggguuccacucugauagcgaaacccaaauggcaaagcucuauggggacucaaagccccagaaguucaccucaucugccaacggaguaaccacacauuacguuucacagauugguggcuucccaaaucaaacagaagacggaggacuaccacaaagugguagaauuguuguugauuacauggugcaaaaaucugggaaaacaggaacaauuaccuaucaaagagguauuuuauugccucaaaaaguguggugugcaaguggcaggagcaagguaauaaaaggauccuugccuuuaauuggagaagcagauugccuccacgaaaaauacgguggauuaaacaaaagcaagccuuacuacacaggggaacaugcaaaggccauaggaaauugcccaauaugggugaaaacacccuugaagcuggccaauggaaccaaauauagaccuccugcaaaacuauuaaaggaaagggguuucuucggagcuauugcugguuucuuagaaggaggaugggaaggaaugauugcagguuggcacggauacacaucccauggggcacauggaguagcgguggcagcagaccuuaaaagcacucaagaggccauaaacaagauaacaaaaaaucucaacucuuugagugagcuggaaguaaagaaucuucaaagacuaagcggugccauggaugaacuccacaacgaaauacuagaacuagacgagaaaguggaugaucucagagcugauacaauaagcucacaaauagaacucgcaguccugcuuuccaaugaaggaauaauaaacagugaagaugagcaucucuuggcgcuugaaagaaagcugaagaaaaugcugggccccucugcuguagagauagggaauggaugcuuugaaaccaaacacaagugcaaccagaccugucucgacagaauagcugcugguaccuuugaugcaggggaauuuucucuccccaccuuugauucacuaaauauuacugcugcaucuuuaaaugacgauggauuggauaaucauacuauacugcuuuacuacucaacugcugccuccaguuuggcuguaacauugaugauagcuaucuuuguuguuuauauggucuccagagacaauguuucuugcuccaucugucuauaa

SEQ ID NO: 59301 - RNA, 1758 nt, Artificial Sequence
  derived and/or modified CDS sequence (wt) from hemagglutinin__InfluenzaB__AGX19139
augaaggcaauaauuguacuacucaugguaguaacauccaaugcagaucgaaucugcacugggauaacaucgucaaacucaccacauguugucaaaacugcuacucaaggggaagucaaugugacugguguaauaccacugacaacaacacccaccaaaucucauuuugcaaaucucaaaggaacagaaaccagagggaaacuaugcccaaaaugccucaacugcacagaucuggacguggccuugggcagaccaaaaugcacggggaacauacccucggcaagaguuucaauacuccaugaagucagaccuguuacaucugggugcuuuccuauaaugcacgacagaacaaaaaucagacagcugccuaaccuucucagaggauacgaacauaucagguuaucaacucauaacguuaucaaugcagaaaaugcaccaggaggacccuacaaaauuggaaccucagggucuugcccuaacguuaccaauggaaacggauuuuucgcaacaauggcuugggccgucccaaaaaacgacaacaacaaaacagcaacaaauucauuaacaauagaaguaccauacauuuguacagaaggagaagaccaaauuaccguuuggggguuccacucugauaacgagacccaaauggcaaagcucuauggggacucaaagccccagaaguucaccucaucugccaacggagugaccacacauuacguuucacagauugguggcuucccaaaucaaacagaagacggaggacuaccacaaagugguagaauuguuguugauuacaugguacaaaaaucugggaaaacaggaacaauuaccuaucaaagagguauuuuauugccucaaaagguguggugcgcaaguggcaggagcaagguaauaaaaggauccuugccuuuaauuggagaagcagauugccuccacgaaaaauacgguggauuaaacaaaagcaagccuuacuacacaggggaacaugcaaaggccauaggaaauugcccaauaugggugaaaacacccuugaagcuggccaauggaaccaaauauagaccuccugcaaaacuauuaaaggaaagggguuucuucggagcuauugcugguuucuuagaaggaggaugggaaggaaugauugcagguuggcacggauacacaucccauggggcacauggaguagcgguggcagcagaccuuaagagcacucaagaggccauaaacaagauaacaaaaaaucucaacucuuugagugagcuggaaguaaagaaucuucaaagacuaagcggugccauggaugaacuccacaacgaaauacuagaacuagacgagaaaguggaugaucucagagcugauacaauaagcucacaaauagaacucgcaguccugcuuuccaaugaaggaauaauaaacagugaagaugagcaucucuuggcgcuugaaagaaagcugaagaaaaugcuaggccccucugcuguagagauagggaauggaugcuuugaaaccaaacacaagugcaaccagaccugucucgacagaauagcugcugguaccuuugaugcaggagaauuuucucuccccaccuuugauucacugaauauuacugcugcaucuuuaaaugacgauggauuggauaaucauacuauacugcuuuacuacucaacugcugccuccaguuuggcuguaacauugaugauagcuaucuuuguuguuuauauggucuccagagacaauguuucuugcuccaucugucuauaa

SEQ ID NO: 59302 - RNA, 1758 nt, Artificial Sequence; identical to SEQ ID NO: 59279
  derived and/or modified CDS sequence (wt) from hemagglutinin__InfluenzaB__AGX19150

SEQ ID NO: 59303 - RNA, 1758 nt, Artificial Sequence; identical to SEQ ID NO: 59248
  derived and/or modified CDS sequence (wt) from hemagglutinin__InfluenzaB__AGX19161

SEQ ID NO: 59304 - RNA, 1758 nt, Artificial Sequence
  derived and/or modified CDS sequence (wt) from hemagglutinin__InfluenzaB__AGX19172
augaaggcaauaauuguacuacucaugguaguaacauccaaugcagaucgaaucugcacugggauaacaucgucaaacucaccacauguugucaaaacugcuacucaaggggaggucaaugugacugguguaauaccacugacaacaacacccaccaaaucucauuuugcaaaucucaaaggaacagaaaccagagggaaacuaugcccaaaaugccucaacugcacagaucuggacguggccuugggcagaccaaaaugcacggggaacacacccucggcaagaguuucaauacuccaugaagucagaccuguuacaucugggugcuuuccuauaaugcacgacagaacaaaaauuagacagcugccuaaccuucucagaggauacgaacauaucagguuaucaacucauaacguuaucaaugcagaaaaugcaccaggaggacccuacaaaauuggaaccucagggucuugcccuaacguuaccaauggaaacggauuuuuugcaacaauggcuugggcugucccaaaaaacgacaacaacaaaacagcaacaaauucauuaacaauagaaguaccauacauuuguacagaaggagaagaccaaauuaccguuuggggguuccacucugauaacgaaacccaaauggcaaagcucuauggggacucaaagccccagaaguucaccucaucugccaacggaguaaccacacauuacguuucacagauugguggcuucccaaaucaaacagaagacggaggacuaccacaaagugguagaauuguuguugauuacauggugcaaaaaucugggaaaacaggaacaauuaccuaucaaagagguauuuuauugccucaaaaaguguggugcgcaaguggcaggagcaagguaauaaaaggauccuugccuuuaauuggagaagcagauugccuccacgaaaaauacgguggauuaaacaaaagcaagccuuacuacacaggggaacaugcaaaggccauaggaaauugcccaauaugggugaaaacacccuugaagcuggccaauggaaccaaauauagaccuccugcuaaacuauuaaaggaaagggguuucuucggagcuauugcugguuucuuagaaggaggaugggaaggaaugauugcagguuggcacggauacacaucccauggggcacauggaguagcgguggcagcagaccuuaaaagcacucaagaggccauaaacaagauaacaaaaaaucucaacucuuugagugagcuggaaguaaagaaucuucaaagacuaagcggugccauggaugaacuccacaacgaaauacuagaacuagacgagaaaguggaugaucucagagcugauacaauaagcucacaaauagaacucgcaguccugcuuuccaaugaaggaauaauaaacagugaagaugagcaucucuuggcgcuugaaagaaagcugaagaaaaugcugggccccucugcuguagagauagggaauggaugcuuugaaaccaaacacaagugcaaccagaccugucucgacagaauagcugcugguaccuuugaugcaggggaauuuucucuccccaccuuugauucacuaaauauuacugcugcaucuuuaaaugacgauggauuggauaaucauacuauacugcuuuacuacucaacugcugccuccaguuuggcuguaacauugaugauagcuaucuuuguuguuuauauggucuccagagacaauguuucuugcuccaucugucuauaa

SEQ ID NO: 59305 - RNA, 1758 nt, Artificial Sequence
  derived and/or modified CDS sequence (wt) from hemagglutinin__InfluenzaB__AGX19183
augaaggcaauaauuguacuacucaugguaguaacauccaaugcagaucgaaucugcacugggauaacaucgucaaacucaccacauguugucaaaacugcuacucaaggggaggucaaugugacugguguaauaccacugacaacgacacccaccaaaucucauuuugcaaaucucaaaggaacagaaaccagagggaaacuaugcccaaaaugccucaacugcacagaucuggacguggccuugggcagaccaaaaugcacggggaacauacccucggcaagaguuucaauacuccaugaagucagaccuguuacaucugggugcuuuccuauaaugcacgacagaacaaaaauuagacagcugccuaaccuucucagaggauacgaacauaucagguuaucaacucauaacguuaucaaugcagaaaaugcaccaggaggacccuacaaaauuggaaccucagggucuugcccuaacguuaccaauggaaacggauuuuucgcaacaauggcuugggccgucccaaaaaacgacaacaacaaaacagcaacaaauucauuaacaauagaaguaccauacauuuguacagaaggagaagaccaaauuaccguuuggggguuccacucugauaccgagacccaaauggcaaagcucuauggggacucaaagccccagaaguucaccucaucugccaacggagugaccacacauuacguuucacagauugguggcuucccaaaucaaacagaagacggaggacuaccacaaagugguagaauuguuguugauuacauggugcaaaaaucuggaaaaacaggaacaauuaccuaucaaagaggcauuuuauugccucaaaagguguggugcgcaaguggcaggagcaagguaauaaaaggauccuugccuuuaauuggagaagcagauugccuccacgaaaaauacgguggauuaaacaaaagcaagccuuacuacacaggggaacaugcaaaggccauaggaaauugcccaauaugggugaaaacacccuugaagcuggccaauggaaccaaauauagaccuccugcaaaacuauuaaaggaaagggguuucuucggagcuauugcugguuucuuagaaggaggaugggaaggaaugauugcagguuggcacggauacacaucccauggggcacauggaguagcgguggcagcagaccuuaagagcacucaagaggccauaaacaagauaacaaaaaaucucaacucuuugagugagcuggaaguaaagaaucuucaaagacuaagcggugccauggaugaacuccacaacgaaauacuagaacuagacgagaaaguggaugaucucagagcugauacaauaagcucacaaauagaacucgcaguccugcuuuccaaugaaggaauaauaaacagugaagaugagcaucucuuggcgcuugaaagaaagcugaagaaaaugcugggccccucugcuguagagauagggaauggaugcuuugaaaccaaacacaagugcaaccagaccugucucgacagaauagcugcugguaccuuugaugcaggagaauuuucucuccccaccuuugauucacugaauauuacugcugcaucuuuaaaugacgauggauuggauaaucauacuauacugcuuuacuacucaacugcugccuccaguuuggcuguaacauugaugauagcuaucuuuguuguuuauauggucuccagagacaauguuucuugcuccaucugucuauaa

SEQ ID NO: 59306 - RNA, 1758 nt, Artificial Sequence; identical to SEQ ID NO: 59246
  derived and/or modified CDS sequence (wt) from hemagglutinin__InfluenzaB__AGX19194

SEQ ID NO: 59307 - RNA, 1758 nt, Artificial Sequence
  derived and/or modified CDS sequence (wt) from hemagglutinin__InfluenzaB__AGX19205
augaaggcaauaauuguacuacucaugguaguaacauccaaugcagaucgagucugcacugggauaacaucgucaaacucaccacauguugucaaaacugcuacucaaggggaagucaaugugacugguguaauaccacugacaacaacacccaccaaaucucauuuugcaaaucucaaaggaacagaaaccagagggaaacuaugcccaaaaugccucaacugcacagaucuggacguggccuugggcagaccaaaaugcacggggaacauacccucggcaagaguuucaauacuccaugaagucagaccuguuacaucugggugcuuuccuauaaugcacgacagaacaaaaaucagacagcugccuaaccuucucagaggauacgaacauaucagguuaucaacucauaacguuaucaaugcagaaaaugcaccaggaggacccuacaaaauuggaaccucagggucuugcccuaacguuaccaauggaaacggauuuuucgcaacaauggcuugggccgucccaaaaaacgacaacaacaaaacagcaacaaauucauuaacaauagaaguaccauacauuuguacagaaggagaagaccaaauuaccguuuggggguuccacucugauaacgagacccaaauggcaaagcucuauggggacucaaagccccagaaguucaccucaucugccaacggagugaccacacauuacguuucacagauugguggcuucccaaaucaaacagaagacggaggacuaccacaaagugguagaauuguuguugauuacauggugcaaaaaucugggaaaacaggaacaauuaccuaucaaagagguauuuuauugccucaaaagguguggugcgcaaguggcaggagcaagguaauaaaaggauccuugccuuuaauuggagaagcagauugccuccacgaaaaauacgguggauuaaacaaaagcaagccuuacuacacaggggaacaugcaaaggccauaggaaauugcccaauaugggugaaaacacccuugaagcuggccaauggaaccaaauauagaccuccugcaaaacuauuaaaggaaagggguuucuucggagcuauugcugguuucuuagaaggaggaugggaaggaaugauugcagguuggcacggauacacaucccauggggcacauggaguagcgguggcagcagaccuuaagagcacucaagaggccauaaacaagauaacaaaaaaucucaacucuuugagugagcuggaaguaaagaaucuucaaagacuaagcggugccauggaugaacuccacaacgaaauacuagaacuagacgagaaaguggaugaucucagagcugauacaauaagcucacaaauagaacucgcaguccugcuuuccaaugaaggaauaauaaacagugaagaugagcaucucuuggcgcuugaaagaaagcugaagaaaaugcugggccccucugcuguagagauagggaaugggugcuuugaaaccaaacacaagugcaaccagaccugucucgacagaauagcugcugguaccuuugaugcaggagaauuuucucuccccaccuuugauucacugaauauuacugcugcaucuuuaaaugacgauggauuggauaaucauacuauacugcuuuacuacucaacugcugccuccaguuuggcuguaacauugaugauagcuaucuuuguuguuuauauggucuccagagacaauguuucuugcuccaucugucuauaa

SEQ ID NO: 59308 - RNA, 1758 nt, Artificial Sequence
  derived and/or modified CDS sequence (wt) from hemagglutinin__InfluenzaB__AGX19216
augaaggcaauaauuguacuacucaugguaguaacauccaaugcagaucgaaucugcacugggauaacaucgucaaacucaccacauguugucaaaacugcuacucaaggggagguuaaugugacugguguaauaccacugacaacaacacccaccaaaucucauuuugcaaaucucaaaggaacagaaaccagagggaaacuaugcccaaaaugccucaacugcacagaucuggacguggccuugggcagaccaaaaugcacggggaacauacccucggcaagaguuucaauacuccaugaagucagaccuguuacaucugggugcuuuccuauaaugcacgacagaacaaaaauuagacagcugccuaaccuucucagaggauacgaacauaucagguuaucaacucauaacguuaucaaugcagaaaaugcaccaggaggacccuacaaaauuggaaccucagggucuugcccuaacguuaccaauggaaacggauuuuucgcaacaauggcuugggccgucccaaaaaacgacaacaacaaaacagcaacaaauucauuaacaauagaaguaccauacauuuguacagaaggagaagaccaaauuaccguuuggggguuccacucugauaacgagacccaaauggcaaagcucuauggggacucaaagccccagaaguucaccucaucugccaacggagugaccacacauuacguuucacagauugguggcuucccaaaucaaacagaagacggaggacuaccacaaagugguagaauuguuguugauuacauggugcaaaaaucugggaaaccaggaacaauuaccuaucaaagagguauuuuauugccucaaaagguguggugcgcaaguggcaggagcaagguaauaaaaggauccuugccuuuaauuggagaagcagauugccuccacgaaaaauacgguggauuaaacaaaagcaagccuuacuacacaggggaacaugcaaaggccauaggaaauugcccaauaugggugaaaacacccuugaagcuggccaauggaaccaaauauagaccuccugcaaaacuauuaaaggaaagggguuucuucggagcuauugcugguuucuuagaaggaggaugggaaggaaugauugcagguuggcacggauauacaucccauggggcacauggaguagcgguggcagcagaccuuaagagcacucaagaggccauaaacaagauaacaaaaaaucucaacucuuugagugagcuggaaguaaagaaucuucaaagacuaagcggugccauggaugaacuccacaacgaaauacuagaacuagacgagaaaguggaugaucucagagcugauacaauaagcucacaaauagaacucgcaguccugcuuuccaaugagggaauaauaaacagugaagaugagcaucucuuggcgcuugaaagaaagcugaagaaaaugcugggccccucugcuguagagauagggaauggaugcuuugaaaccaaacacaagugcaaccagaccugucucgacagaauagcugcugguaccuuugaugcaggagaauuuucucuccccaccuuugauucacugaauauuacugcugcaucuuuaaaugacgauggauuggauaaucauacuauacugcuuuacuacucaacugcugccuccaguuuggcuguaacauugaugauagcuaucuuuguuguuuauauggucuccagagacaauguuucuugcuccaucugucuauaa

SEQ ID NO: 59309 - RNA, 1758 nt, Artificial Sequence
  derived and/or modified CDS sequence (wt) from hemagglutinin__InfluenzaB__AGX19227
augaaggcaauaauuguacuacucaugguaguaacauccaaugcagaucgaaucugcacugggauaacaucgucaaacucaccacauguugucaaaacugcuacucaaggggaggucaaugugacugguguaauaccacugacaacaacacccaccaaaucucauuuugcaaaucucaaaggaacagaaaccagagggaaacuaugcccacaaugccucaacugcacagaucuggacguggccuugggcagaccaaaaugcacggggaacauacccucggcaagaguuucaauacuccaugaagucagaccuguuacaucugggugcuuuccuauaaugcacgacagaacaaaaauuagacagcugccuaaccuucucagaggauacgaacauaucagguuaucaacucauaacguuaucaaugcagaaaaugcaccaggaggacccuacaaaauuggaaccucagggucuugcccuaacguuaccaauggaaacggauuuuuugcaacaauggcuugggcugucccaaaaagcgacaacaacaaaacagcaacaaauucauuaacaauagaaguaccauacauuuguacagagggagaagaccaaauuaccguuuggggguuccacucugauaacgaaacccaaauggcaaagcucuauggggacucaaagccccagaaguucaccucaucugccaacggagugaccacacauuacguuucacagauugguggcuucccaaaucaaacagaagacggaggacuaccacaaagugguagaauuguuguugauuacauggugcaaaaaucugggaaaacaggaacaauuaccuaucaaagagguauuuuauugccucaaaaaguguggugcgcaaguggcaggagcaagguaauaaaaggauccuugccuuuaauuggagaagcagauugccuccacgaaaaauacgguggauuaaacaaaagcaagccuuacuacacaggggaacaugcaaaggccauaggaaauugcccaauaugggugaaaacacccuugaagcuggccaauggaaccaaauauagaccuccugcaaaacuauuaaaggaaagggguuucuucggagcuauugcugguuucuuagaaggaggaugggaaggaaugauugcagguuggcacggauacacaucccauggggcacauggaguagcgguggcagcagaccuuaaaagcacucaagaggccauaaacaagauaacaaaaaaucucaacucuuugagugagcuggaaguaaagaaucuucaaagacuaagcggugccauggaugaacuccacaacgaaauacuagaacuagacgagaagguggaugaucucagagcugauacaauaagcucacaaauagaacucgcaguccugcucuccaaugaaggaauaauaaacagugaagaugagcaucucuuggcgcuugaaagaaagcugaagaaaaugcugggccccucugcuguagagauagggaauggaugcuuugaaaccaaacacaagugcaaccagaccugucucgacagaauagcugcugguaccuuugaugcaggagaauuuucucuccccaccuuugauucacugaauauuacugcugcaucuuuaaaugacgauggauuggauaaucauacuauacugcuuuacuacucaacugcugccuccaguuuggcuguaacauugaugauagcuaucuuuguuguuuauauggucuccagagacaauguuucuugcuccaucugucuauaa

SEQ ID NO: 59310 - RNA, 1758 nt, Artificial Sequence
  derived and/or modified CDS sequence (wt) from hemagglutinin__InfluenzaB__AGX19238
augaaggcaauaauuguacuacucaugguaguaacauccaaugcagaucgaaucugcacugggauaacaucgucaaacucaccacauguugucaaaacugcuacucaaggggaggucaaugugacugguguaauaccacugacaacaacacccaccaaaucucauuuugcaaaucucaaaggaacagaaaccagagggaaacuaugcccaaaaugccucaacugcacagaucuggacguggccuugggcagaccaaaaugcacggggaacauacccucagcaagaguuucaauacuccaugaagucagaccuguuacaucugggugcuuuccuauaaugcacgacagaacaaaaauuagacagcugccuaaccuucucagaggauacgaacauaucagguuaucaacucauaacgucaucaaugcagaaaaugcaccaggaggacccuacaaaauuggaaccucagggucuugcccuaacguuaccaauggaaacggauuuuuugcaacaauggcuugggccgucccaaagaacgacaaaaacaaaacagcaacaaauucauuaacaauagaaguaccauacauuuguacagaaggagaagaccaaauuaccguuuggggguuccacucugauaacgagacccaaauggcaaagcucuauggggacucaaagccccagaaguucaccucaucugccaacggagugaccacacauuacguuucacagauugguggcuucccaaaucaaacagaagacggaggacuaccacaaagugguagaauuguuguugauuacauggugcaaaaaucugggaaaacaggaacaauuaccuaucaaagagguauuuuauugccucaaaagguguggugcgcaaguggcaggagcaagguaauaaaaggauccuugccuuuaauuggagaagcagauugccuccacgaaaaauacgguggauuaaacaaaagcaagccuuacuacacaggggaacaugcaaaggccauaggaaauugcccaauaugggugaaaacacccuugaagcuggccaauggaaccaaauauagaccuccugcaaaacuauuaaaggaaagggguuucuucggagcuauugcugguuucuuagaaggaggaugggaaggaaugauugcagguuggcacggauacacaucccauggggcacauggaguagcgguggcagcagaccuuaagagcacucaagaggccauaaacaagauaacaaaaaaucucaacucuuugagugagcuagaaguaaagaaucuucaaagacuaaguggugccauggaugaacuccacaacgaaauacuagaacuagacgagaaaguggaugaucucagagcugauacaauaagcucacaaauagaacucgcaguccugcuuuccaaugaaggaauaauaaacagugaagaugagcaucucuuggcgcuugaaagaaagcugaagaaaaugcugggccccucugcuguagagauagggaauggaugcuuugaaaccaaacacaagugcaaccagaccugucucgacagaauagcugcugguaccuuugaugcaggagaauuuucucuccccaccuuugauucacugaauauuacugcugcaucuuuaaaugacgauggauuggauaaucauacuauacugcuuuacuacucaacugcugccuccaguuuggcuguaacauugaugauagcuaucuuuguuguuuauauggucuccagagacaauguuucuugcuccaucugucuauaa

SEQ ID NO: 59311 - RNA, 1758 nt, Artificial Sequence; identical to SEQ ID NO: 59310
  derived and/or modified CDS sequence (wt) from hemagglutinin__InfluenzaB__AGX19249

SEQ ID NO: 59312 - RNA, 1758 nt, Artificial Sequence; identical to SEQ ID NO: 59273
  derived and/or modified CDS sequence (wt) from hemagglutinin__InfluenzaB__AGX19260

SEQ ID NO: 59313 - RNA, 1758 nt, Artificial Sequence
  derived and/or modified CDS sequence (wt) from hemagglutinin__InfluenzaB__AGX19271
augaaggcaauaauuguacuacucaugguaguaacaucaaaugcagaucgaaucugcacugggauaacaucgucaaacucaccacauguugucaaaacugcuacucaaggggaggucaaugugacugguguaauaccacugacaacaacacccaccaaaucucauuuugcaaaucucaaaggaacagaaaccagagggaaacuaugcccaaaaugccucaacugcacagaucuggacguggccuugggcagaccaaaaugcacggggaacauacccucggcaagaguuucaauacuccaugaagucagaccuguuacaucugggugcuuuccuauaaugcacgacagaacaaaaauuagacagcugccuaaccuucuccgaggauacgaacauaucagguuaucaacucauaacguuaucaaugcagaaaaugcaccaggaggacccuacaaaauuggaaccucagggucuugcccuaacguuaccaauggaaacggauuuuucgcaacaauggcuugggccgucccaaaaaacgacaacaacaaaacagcaacaaauucauuaacaauagaaguaccauacauuuguacagaaggagaagaccaaauuaccguuuggggguuccacucugauaacgagacccaaauggcaaagcucuauggggacucaaagccccagaaguucaccucaucugccaacggagugaccacacauuacguuucacagauugguggcuucccaaaucaaacagaagacggaggacuaccacaaagugguagaauuguuguugauuacauggugcaaaaaucugggaaaacaggaacaauuaccuaucaaagagguauuuuauugccucaaaagguguggugcgcaaguggcaggagcaagguaauaaaaggauccuugccuuuaauuggagaagcagauugccuccacgaaaaauacgguggauuaaacaaaagcaagccuuacuacacaggggaacaugcaaaggccauaggaaauugcccaauaugggugaaaacacccuugaagcuggccaauggaaccaaauauagaccuccugcaaaacuauuaaaggaaagggguuucuucggagcuauugcugguuucuuagaaggaggaugggaaggaaugauugcagguuggcacggauacacaucccauggggcacauggaguagcgguggcagcagaccuuaagagcacucaagaggccauaaacaagauaacaaaaaaucucaacucuuugagugagcuggaaguaaagaaucuucaaagacuaagcggugccauggaugaacuccacaacgaaauacuagaacuagacgagaaaguggaugaucucagagcugauacaauaagcucacaaauagaacucgcaguccugcuuuccaaugaaggaauaauaaacagugaagaugagcaucucuuggcgcuugaaagaaagcugaagaaaaugcugggccccucugcuguagagauagggaauggaugcuuugaaaccaaacacaagugcaaccagaccugucucgacagaauagcugcugguacuuuugaugcaggagaauuuucucuccccaccuuugauucacugaauauuacugcugcaucuuuaaaugacgauggauuggauaaucauacuauacugcuuuacuacucaacugcugccuccaguuuggcuguaacauuaaugauagcuaucuuuguuguuuauauggucuccagagacaauguuucuugcuccaucugucuauaa

SEQ ID NO: 59314 - RNA, 1758 nt, Artificial Sequence
  derived and/or modified CDS sequence (wt) from hemagglutinin__InfluenzaB__AGX19282
augaaggcaauaauuguacuacucaugguaguaacauccaaugcagaucgaaucugcacugggauaacaucgucaaacucaccacauguugucaaaacugcuacucaaggggaggucaaugugacugguguaauaccacugacaacaacacccaccaaaucucauuuugcaaaucucaaaggaacagaaaccagagggaaacuaugcccaaaaugccucaacugcacagaucuggacguggccuugggcagaccaaaaugcacggggaacauacccucggcaagaguuucaauacuccaugaagucagaccuguuacaucugggugcuuuccuauaaugcacgacagaacaaaaauuagacagcugccuaaccuucucagaggauacgaacauaucagguuaucaacucauaacguuaucaaugcagaaaaugcaccaggaggacccuacaaaauuggaaccucagggucuugcccuaacguuaccaauggaaacggauuuuuugcaacaauggcuugggcugucccaaaaaacgacaacaacaaaacagcaacaaauucauuaacaauagaaguaccauacauuuguacagagggagaagaccaaauuaccguuuggggguuccacucugauaacgaaacccaaauggcaaagcucuauggggacucaaagccccagaaguucaccucaucugccaacggagugaccacacauuacguuucacagauugguggcuucccaaaucaaacagaagacggaggacuaccacaaagugguagaauuguuguugauuacauggugcaaaaaucugggaaaacaggaacaauuaccuaucaaagagguauuuuauugccucaaaaaguguggugcacaaguggcaggagcaagguaauaaaaggauccuugccuuuaauuggagaagcagauugccuccacgaaaaauacgguggauuaaacaaaagcaagccuuacuacacaggggaacaugcaaaggccauaggaaauugcccaauaugggugaaaacacccuugaagcuggccaauggaaccaaauauagaccuccugcaaaacuauuaaaggaaagggguuucuucggagcuauugcugguuucuuagaaggaggaugggaaggaaugauugcagguuggcacggauacacaucccauggggcacauggaguagcgguggcagcagaccuuaaaagcacucaagaggccauaaacaagauaacaaaaaaucucaacucuuugagugagcuggaaguaaagaaucuucaaagacuaagcggugccauggaugaacuccacaacgaaauacuagaacuagacgagaaaguggaugaucucagagcugauacaauaagcucacaaauagaacucgcaguccugcuuuccaaugaaggaauaauaaacagugaagaugagcaucucuuggcgcuugaaagaaagcugaagaaaaugcugggccccucugcuguagagauagggaauggaugcuuugaaaccaaacacaagugcaaccagaccugucucgacagaauagcugcugguaccuuugaugcaggagaauuuucucuccccaccuuugauucacugaauauuacugcugcaucuuuaaaugacgauggauuggauaaucauacuauacugcuuuacuacucaacugcugccuccaguuuggcuguaacauugaugauagcuaucuuuguuguuuauauggucuccagagacaauguuucuugcuccaucugucuauaa

SEQ ID NO: 59315 - RNA, 1758 nt, Artificial Sequence
  derived and/or modified CDS sequence (wt) from hemagglutinin__InfluenzaB__AGX19304
augaaggcaauaauuguacuacucaugguaguaacauccaaugcagaucgaaucugcacugggauaacaucgucaaacucaccacauguugucaaaacugcuacucaaggggaggucaaugugacugguguaauaccacugacaacaacacccaccaaaucucauuuugcaaaucucaaaggaacagaaaccagagggaaacuaugcccaaaaugccucaacugcacagaucuggacguggccuugggcagaccaaaaugcacggggaacauacccucggcaagaguuucaauacuccaugaagucagaccuguuacaucugggugcuuuccuauaaugcacgacagaacaaaaauuagacagcugccuaaccuucucagaggauacgaacauaucagguuaucaacucauaacguuaucaaugcagaaaaugcaccaggaggacccuacaaaauuggaaccucagggucuugcccuaacguuaccaauggaaacggauuuuuugcaacaauggcuugggcugucccaaaaaacgacaacaacaaaacagcaauaaauucauuaacaauagaaguaccauacauuuguacagagggagaagaccaaauuaccguuuggggauuccacucugauaacgaaacccaaauggcaaagcucuauggggacucaaagccccagaaguucaccucaucugccaacggagugaccacacauuacguuucacagauugguggcuucccaaaucaaacagaagacggaggacuaccacaaagugguagaauuguuguugauuacauggugcaaaaaucugggaaaacaggaacaauuaccuaucaaagagguauuuuauugccucaaaaaguguggugcgcaaguggcaggagcaagguaauaaaaggauccuugccuuuaauuggagaagcagauugccuccacgaaaaauacgguggauuaaacaaaagcaagccuuacuacacaggggaacaugcaaaggccauaggaaauugcccaauaugggugaaaacacccuugaagcuggccaauggaaccaaauauagaccuccugcaaaacuauuaaaggaaagggguuucuucggagcuauugcugguuucuuagaaggaggaugggaaggaaugauugcagguuggcacggauacacaucccauggggcacauggaguagcgguggcagcagaccuuaaaagcacucaagaggccauaaacaagauaacaaaaaaucucaacucuuugagugagcuggaaguaaagaaucuucaaagacuaagcggugccauggaugaacuccacaacgaaauacuagaacuagacgagaaaguggaugaucucagagcugauacaauaagcucacaaauagaacucgcaguccugcuuuccaaugaaggaauaauaaacagugaagaugagcaucucuuggcgcuugaaagaaagcugaagaaaaugcugggccccucugcuguagagauagggaauggaugcuuugaaaccaaacacaagugcaaccagaccugucucgacagaauagcugcugguaccuuugaugcaggagaauuuucucuccccaccuuugauucacugaauauuacugcugcaucuuuaaaugacgauggauuggauaaucauacuauacugcuuuacuacucaacugcugccuccaguuuggcuguaacauugaugauagcuaucuuuguuguuuauauggucuccagagacaauguuucuugcuccaucugucuauaa

SEQ ID NO: 59316 - RNA, 1758 nt, Artificial Sequence; identical to SEQ ID NO: 59315
  derived and/or modified CDS sequence (wt) from hemagglutinin__InfluenzaB__AGX19315

SEQ ID NO: 59317 - RNA, 1758 nt, Artificial Sequence
  derived and/or modified CDS sequence (wt) from hemagglutinin__InfluenzaB__AGX19326
augaaggcaauaauuguacuacucaugguaguaacauccaaugcagaucgaaucugcacugggauaacaucgucaaacucaccacauguugucaaaacugcuacccaaggggaggucaaugugacugguguaauaccacugacaacaacacccaccaaaucucauuuugcaaaucucaaaggaacagaaaccagagggaaacuaugcccaaaaugccucaacugcacagaucuggacguggccuugggcagaccaaaaugcacggggaacauacccucggcaagaguuucaauacuccaugaagucagaccuguuacaucugggugcuuuccuauaaugcacgacagaacaaaaauuagacagcugccuaaccuucucagaggauacgaacauaucagguuaucaacucauaacguuaucaaugcagaaaaugcaccaggaggacccuacaaaauuggaaccucagggucuugcccuaacguuaccaauggaaacggauuuuuugcaacaauggcuugggcugucccaaaaaacgacaacaacaaaacagcaacaaauucauuaacaauagaaguaccauacauuuguacagagggagaagaccaaauuaccguuuggggguuccacucugauaacgaaacccaaauggcaaagcucuauggggacucaaagccccagaaguucaccucaucugccaacggagugaccacacauuacguuucacagauugguggcuucccaaaucaaacagaagacggaggacuaccacaaagugguagaauuguuguugauuacauggugcaaaaaucugggaaaacaggaacaauuaccuaucaaagagguauuuuauugccucaaaaaguguggugcacaaguggcaggagcaagguaauaaaaggauccuugccuuuaauuggagaagcagauugccuccacgaaaaauacgguggauuaaacaaaagcaagccuuacuacacaggggaacaugcaaaggccauaggaaauugcccaauaugggugaaaacacccuugaagcuggccaauggaaccaaauauagaccuccugcaaaacuauuaaaggaaagggguuucuucggagcuauugcugguuucuuagaaggaggaugggaaggaaugauugcagguuggcacggauacacaucccauggggcacauggaguagcgguggcagcagaccuuaaaagcacucaagaggccauaaacaagauaacaaaaaaucucaacucuuugagugagcuggaaguaaagaaucuucaaagacuaaguggugccauggaugaacuccacaacgaaauacuagaacuagacgagaaaguggaugaucucagagcugauacaauaagcucacaaauagaacucgcaguccugcuuuccaaugaaggaauaauaaacagugaagaugagcaucucuuggcgcuugaaagaaagcugaagaaaaugcugggccccucugcuguagagauagggaauggaugcuuugaaaccaaacacaagugcaaccagaccugucucgacagaauagcugcugguaccuuugaugcaggagaauuuucucuccccaccuuugauucacugaauauuacugcugcaucuuuaaaugacgauggauuggauaaucauacuauacugcuuuacuacucaacugcugccuccaguuuggcuguaacauugaugauagcuaucuuuguuguuuauauggucuccagagacaauguuucuugcuccaucugucuauaa

SEQ ID NO: 59318 - RNA, 1758 nt, Artificial Sequence; identical to SEQ ID NO: 59314
  derived and/or modified CDS sequence (wt) from hemagglutinin__InfluenzaB__AGX19337

SEQ ID NO: 59319 - RNA, 1758 nt, Artificial Sequence
  derived and/or modified CDS sequence (wt) from hemagglutinin__InfluenzaB__AGX19348
augaaggcaauaauuguacuacucaugguaguaacauccaaugcagaucgaaucugcacugggauaacaucgucaaacucaccacauguugucaaaacugcuacucaaggggaggucaaugugacugguguaauaccacugacaacaacacccaccaaaucucauuuugcaaaucucaaaggaacagaaaccagagggaaacuaugcccaaaaugccucaacugcacagaucuggacguggccuugggcagaccaaaaugcacggggaacauacccucggcaagaguuucaauacuccaugaagucagaccuguuacaucugggugcuuuccuauaaugcacgacagaacaaaaauuagacagcugccuaaccuucucagaggauacgaacauaucagguuaucaacucauaacguuaucaaugcagaaaaugcaccaggaggacccuacaaaauuggaaccucagggucuugcccuaacguuaccaauggaaacggauuuuuugcaacaauggcuugggcugucccaaaaaacgacaacaacaaaacagcaacaaauucauuaacaauagaaguaccauacauuuguacagagggagaagaccaaauuaccguuuggggguuccacucugauaacgaagcccaaauggcaaagcucuauggggacucaaagccccagaaguucaccucaucugccaacggagugaccacacauuacguuucacagauugguggcuucccaaaucaaacagaagacggaggacuaccacaaagugguagaauuguuguugauuacauggugcaaaaaucugggaaaacaggaacaauuaccuaucaaagagguauuuuauugccucaaaaaguguggugcacaaguggcaggagcaagguaauaaaaggauccuugccuuuaauuggagaagcagauugccuccacgaaaaauacgguggauuaaacaaaagcaagccuuacuacacaggggaacaugcaaaggccauaggaaauugcccaauaugggugaaaacacccuugaagcuggccaauggaaccaaauauagaccuccugcaaaacuauuaaaggaaagggguuucuucggagcuauugcugguuucuuagaaggaggaugggaaggaaugauugcagguuggcacggauacacaucccauggggcacauggaguagcgguggcagcagaccuuaaaagcacucaagaggccauaaacaagauaacaaaaaaucucaacucuuugagugagcuggaaguaaagaaucuucaaagacuaagcggugccauggaugaacuccacaacgaaauacuagaacuagacgagaaaguggaugaucucagagcugauacaauaagcucacaaauagaacucgcaguccugcuuuccaaugaaggaauaauaaacagugaagaugagcaucucuuggcgcuugaaagaaagcugaagaaaaugcugggccccucugcuguagagauagggaauggaugcuuugaaaccaaacacaagugcaaccagaccugucucgacagaauagcugcugguaccuuugaugcaggagaauuuucucuccccaccuuugauucacugaauauuacugcugcaucuuuaaaugacgauggauuggauaaucauacuauacugcuuuacuacucaacugcugccuccaguuuggcuguaacauugaugauagcuaucuuuguuguuuauauggucuccagagacaauguuucuugcuccaucugucuauaa

SEQ ID NO: 59320 - RNA, 1758 nt, Artificial Sequence
  derived and/or modified CDS sequence (wt) from hemagglutinin__InfluenzaB__AGX19359
augaaggcaauaauuguacuacucaugguaguaacauccaaugcagaucgaaucugcacugggauaacaucgucaaacucaccacauguugucaaaacugcuacucaaggggaggucaaugugacugguguaauaccacugacaacaacacccaccaaaucucauuuugcaaaucucaaaggaacagaaaccagagggaaacuaugcccaaaaugccucaacugcacagaucuggacguggccuugggcagaccaaaaugcacggggaacauacccucggcaagaguuucaauacuccaugaagucagaccuguuacaucugggugcuuuccuauaaugcacgacagaacaaaaauuagacagcugccuaaccuucucagaggauacgaacauaucagguuaucaacucauaacguuaucaaugcagaaaaugcaccaggaggacccuacaaaauuggaaccucagggucuugcccuaacguuaccaauggaaacggauuuuuugcaacaauggcuugggcugucccaaaaaacgacaacaacaaaacagcaacaaauucauuaacaauagaaguaccauacauuuguacagagggagaagaccaaauuaccguuuggggguuccacucugauaacgaaacccaaauggcaaagcucuauggggacucaaagccccagaaguucaccucaucugccaacggagugaccacacauuacguuucacagauugguggcuucccaaaucaaacagaagacggaggacuaccacaaagugguagaauuguuguugauuacauggugcaaaaaucugggaaaacaggaacaauuaccuaucaaagagguauuuuauugccucaaaaaguguggugcacaaguggcaggagcaagguaauaaaaggauccuugccuuuaauuggagaagcagauugccuccacgaaaaauacgguggauuaaacaaaagcaagccuuacuauacaggggaacaugcaaaggccauaggaaauugcccaauaugggugaaaacacccuugaagcuggccaauggaaccaaauauagaccuccugcaaaacuauuaaaggaaagggguuucuucggagcuauugcugguuucuuagaaggaggaugggaaggaaugauugcagguuggcacggauacacaucccauggggcacauggaguagcgguggcagcagaccuuaaaagcacucaagaggccauaaacaagauaacaaaaaaucucaacucuuugagugagcuggaaguaaagaaucuucaaagacuaagcggugccauggaugaacuccacaacgaaauacuagaacuagacgagaaaguggaugaucucagagcugauacaauaagcucacaaauagaacucgcaguccugcuuuccaaugaaggaauaauaaacagugaagaugagcaucucuuggcgcuugaaagaaagcugaagaaaaugcugggccccucugcuguagagauagggaauggaugcuuugaaaccaaacacaagugcaaccagaccugucucgacagaauagcugcugguaccuuugaugcaggagaauuuucucuccccaccuuugauucacugaauauuacugcugcaucuuuaaaugacgauggauuggauaaucauacuauacugcuuuacuacucaacugcugccuccaguuuggcuguaacauugaugauagcuaucuuuguuguuuauauggucuccagagacaauguuucuugcuccaucugucuauaa

SEQ ID NO: 59321 - RNA, 1755 nt, Artificial Sequence; identical to SEQ ID NO: 59056
  derived and/or modified CDS sequence (wt) from hemagglutinin__InfluenzaB__AGX19370

SEQ ID NO: 59322 - RNA, 1758 nt, Artificial Sequence
  derived and/or modified CDS sequence (wt) from hemagglutinin__InfluenzaB__AGX19381
augaaggcaauaauuguacuacucaugguaguaacauccaaugcagaucgaaucugcacugggauaacaucgucaaacucaccacauguugucaaaacugcuacucaaggggaggucaaugugacugguguaauaccacugacaacaacacccaccaaaucucauuuugcaaaucucaaaggaacagaaaccagagggaaacuaugcccaaaaugccucaacugcacagaucuggacguggccuugggcagaccaaaaugcacggggaacauacccucggcaagaguuucaauacuccaugaagucagaccuguuacaucugggugcuuuccuauaaugcacgacagaacaaaaauuagacagcugccuaaccuucucagaggauacgaacauaucagguuaucaacucauaacguuaucaaugcagaaaaugcaccaggaggacccuacaaaauuggaaccucagggucuugcccuaacguuaccaauggaaacggauuuuuugcaacaauggcuugggcugucccaaaaaacgacaacaacaaaacagcaacaaauucauuaacaauagaaguaccauacauuuguacagagggagaagaccaaauuaccguuuggggguuccacucugauaacgaaauccaaauggcaaagcucuauggggacucaaagccccagaaguucaccucaucugccaacggagugaccacacauuacguuucacagauugguggcuucccaaaucaaacagaagacggaggacuaccacaaagugguagaauuguuguugauuacauggugcaaaaaucugggaaaacaggaacaauuaccuaucaaagagguauuuuauugccucaaaaaguguggugcgcaaguggcaggagcaagguaauaaaaggauccuugccuuuaauuggagaagcagauugccuccacgaaaaauacgguggauuaaacaaaagcaagccuuacuacacaggggaacaugcaaaggccauaggaaauugcccaauaugggugaaaacacccuugaagcuggccaauggaaccaaauauagaccuccugcaaaacuauuaaaggaaagggguuucuucggagcuauugcugguuucuuagaaggaggaugggaaggaaugauugcagguuggcacggauacacaucccauggggcacauggaguagcgguggcagcagaccuuaaaagcacucaagaggccauaaacaagauaacaaaaaaucucaacucuuugagugagcuggaaguaaagaaucuucaaagacuaagcggugccauggaugaacuccacaacgaaauacuagaacuagacgagaaaguggaugaucucagagcugauacaauaagcucacaaauagaacucgcaguccugcuuuccaaugaaggaauaauaaacagugaagaugagcaucucuuggcgcuugaaagaaagcugaagaaaaugcuaggccccucugcuguagagauagggaauggaugcuuugaaaccaaacacaagugcaaccagaccugucucgacagaauagcugcugguaccuuugaugcaggagaauuuucucuccccaccuuugauucacugaauauuacugcugcaucuuuaaaugacgauggauuggauaaucauacuauacugcuuuacuacucaacugcugccuccaguuuggcuguaacauugaugauagcuaucuuuguuguuuauauggucuccagagacaauguuucuugcuccaucugucuauaa

SEQ ID NO: 59323 - RNA, 1758 nt, Artificial Sequence
  derived and/or modified CDS sequence (wt) from hemagglutinin__InfluenzaB__AGX19392
augaaggcaauaauuguacuacucaugguaguaacauccaaugcagaucgaaucugcacugggauaacaucgucaaacucaccacauguugucaaaacugcuacucaaggggaggucaaugugacugguguaauaccacugacaacaacacccaccaaaucucauuuugcaaaucucaaaggaacagaaaccagagggaaacuaugcccaaaaugccucaacugcacagaucuggacguggccuugggcagaccaaaaugcacggggaacauacccucggcaagaguuucaauacuccaugaagucagaccuguuacaucugggugcuuuccuauaaugcacgacagaacaaaaauuagacagcugccuaaccuucucagaggauacgaacauaucagguuaucaacucauaacguuaucaaugcagaaaaugcaccaggaggacccuacaaaauuggaaccucagggucuugcccuaacguuaccaauggaaacggauuuuuugcaacaauggcuugggcugucccaaaaaacgacaacaacaaaacagcaacaaauucauuaacaauagaaguaccauacauuuguacagagggagaagaccaaauuaccguuuggggguuccacucugauaacgaaacccaaauggcaaagcucuauggggacucaaagccccagaaguucaccucaucugccaacggagugaccacacauuacguuucacagauugguggcuucccaaaucaaacagaagacggaggacuaccacaaagugguagaauuguuguugauuacauggugcaaaaaucugggaaaacaggaacaauuaccuaucaaagagguauuuuauugccucaaaaaguguggugcacaaguggcaggagcaagguaauaaaaggauccuugccuuuaauuggagaagcagauugccuccacgaaaaauacgguggauuaaacaaaagcaagccuuacuacacaggggaacaugcaaaggccauaggaaauugcccaauaugggugaaaacacccuugaagcuggccaauggaaccaaauauagaccuccugcaaaacuauuaaaggaaagggguuucuucggagcuauugcugguuucuuagaaggaggaugggaaggaaugauugcagguuggcacggauacacaucccauggggcacauggaguagcgguggcagcagaccuuaaaagcacucaagaggccauaaacaagauaacaaaaaaucucaacucuuugagugagcuggaaguaaagaaucuucaaagacuaaguggugccauggaugaacuccacaacgaaauacuagaacuagacgagaaaguggaugaucucagagcugauacaauaagcucacaaauagaacucgcaguccugcuuuccaaugaaggaauaauaaacagugaagaugagcaucucuuggcgcuugaaagaaagcugaagaaaaugcugggccccucugcuguagagauagggaauggaugcuuugaaaccaaacacaagugcaaccagaccugucucgacagaauagcugcugguaccuuugaugcaggagaauuuucucuccccaccuuugauucacugaauauuacugcugcaucuuuaaaugacgauggauuggauaaucauacuauacugcuuuacuacucaacugcugccuccaguuuggcuguaacauugaugauagcuaucuuuguuguuuauauggucuccagagacaauguuucuugcuccaucugucuauaa

SEQ ID NO: 59324 - RNA, 1758 nt, Artificial Sequence; identical to SEQ ID NO: 59314
  derived and/or modified CDS sequence (wt) from hemagglutinin__InfluenzaB__AGX19403

SEQ ID NO: 59325 - RNA, 1758 nt, Artificial Sequence
  derived and/or modified CDS sequence (wt) from hemagglutinin__InfluenzaB__AGX19414
augaaggcaauaauuguacuacucaugguaguaacauccaaugcagaucgaaucugcacugggauaacaucgucaaacucaccacaugucgucaaaacugcuacucaaggggaggucaaugugacugguguaauaccacugacaacaacacccaccaaaucucauuuugcaaaucucaaaggaacagaaaccagggggaaacuaugcccaaaaugccucaacugcacagaucuggacguagccuugggcagaccaaaaugcacggggaaaauacccucggcaagaguuucaauacuccaugaagucagaccuguuacaucugggugcuuuccuauaaugcacgacagaacaaaaauuagacagcugccuaaccuucuccgaggauacgaacauaucagguuaucaacucauaacguuaucaaugcagaaaaugcaccaggaggacccuacaaaauuggaaccucagggucuugcccuaacauuaccaauggaaacggauuuuucgcaacaauggcuugggccgucccaaaaaacgacaaaaacaaaacagcaacaaauccauuaacaauagaaguaccauacauuuguacagaaggagaagaccaaauuaccguuuggggguuccacucugacaacgagacccaaauggcaaagcucuauggggacucaaagccccagaaguucaccucaucugccaacggagugaccacacauuacguuucacagauugguggcuucccaaaucaaacagaagacggaggacuaccacaaagugguagaauuguuguugauuacauggugcaaaaaucugggaaaacaggaacaauuaccuaucaaagagguauuuuauugccucaaaagguguggugcgcaaguggcaggagcaagguaauaaaaggauccuugccuuuaauuggagaagcagauugccuccacgaaaaauacgguggauuaaacaaaagcaagccuuacuacacaggggaacaugcaaaggccauaggaaauugcccaauaugggugaaaacacccuugaagcuggccaauggaaccaaauauagaccuccugcaaaacuauuaaaggaaagggguuucuucggagcuauugcugguuucuuagaaggaggaugggaaggaaugauugcagguuggcacggauacacaucccauggggcacauggaguagcgguggcagcagaccuuaagagcacucaagaggccauaaacaagauaacaaaaaaucucaacucuuugagugagcuggaaguaaagaaucuucaaagacuaagcggugccauggaugaacuccacaacgaaauacuagaacuagaugagaaaguggaugaucucagagcugauacaauaagcucacaaauagaacucgcaguccugcuuuccaaugaaggaauaauaaacagugaagaugaacaucucuuggcgcuugaaagaaagcugaagaaaaugcugggccccucugcuguagagauagggaauggaugcuuugaaaccaaacacaagugcaaccagaccugucucgacagaauagcugcugguaccuuugaugcaggagaauuuucucuccccaccuuugauucacugaauauuacugcugcaucuuuaaaugacgauggauuggauaaucauacuauacugcuuuacuacucaacugcugccuccaguuuggcuguaacacugaugauagcuaucuuuguuguuuauauggucuccagagacaauguuucuugcuccaucugucuauaa

SEQ ID NO: 59326 - RNA, 1755 nt, Artificial Sequence
  derived and/or modified CDS sequence (wt) from hemagglutinin__InfluenzaB__AGX19425
augaagacaauaauuguacuacucaugguaguaacauccaaugcagaucgaaucugcacuggaauaacauccucaaacucaccucauguggucaaaacagccacucaaggggaggucaaugugacuggugugauaccacuaacaacaacaccaacaaaaucuuauuuugcaaaucucaaaggaacaaggaccagagggaaacuaugcccagacugucucaacugcacagaucuggauguggcuuugggcagaccaauguguguggggaccacaccuucggcgaaagcuucaauacuccacgaagucagaccuguuacauccgggugcuuuccuauaaugcacgacagaacaaaaaucaggcaacuacccaaucuucucagaggauaugaaaauaucaggcuaucaacccaaaacgucaucgaugcggaaaaggcaccaggaggacccuacagacuuggaaccucaggaucuugcccuaacgcuaccaguaagagcggauuuuucgcaacaauggcuugggcugucccaaaggacaacaacaaaaaugcaacgaacccacuaacaguagaaguaccauacauuuguacagaaggggaagaccaaaucacuguuuggggguuccauucagauaacaaaacccaaaugaggaaccucuauggagacucaaauccucaaaaguucaccucaucugcuaauggaguaaccacacacuauguuucucagauuggcagcuucccagaucaaacagaagacggaggacuaccacaaagcggcaggauuguuguugauuacaugaugcaaaaaccugggaaaacaggaacaauugucuaccaaagagguguuuuguugccucaaaggguguggugcgcgaguggcaggagcaaaguaauaaaaggggccuugccuuuaauuggugaagcagauugccuucaugaaaaauacgguggauuaaacaaaagcaagccuuacuacacaggagaacaugcaaaagccauaggaaauugcccaauaugggugaaaacaccuuugaagcuugccaauggaaccaaauauagaccuccugcaaaacuauuaaaggaaagggguuucuucggagcuauugcugguuuccuagaaggaggaugggaaggaaugauugcaggcuggcacggauacacaucucacggagcacauggaguggcaguggcggcggaccuuaagaguacgcaagaagcuauaaauaagauaacaaaaaaucucaauucuuugagugagcuagaaguaaagaaucuucaaagacuaaguggugccauggaugaacuccacaacgaaauacucgagcuggaugagaaaguggaugaucucagagcugacacuauaagcucgcaaauagaacuugcagucuugcuuuccaacgaaggaauaauaaacagugaagaugagcaucuauuggcacuugagagaaaacuaaagaaaaugcugggucccucugcuguagagauaggaaauggaugcuucgaaaccaaacacaagugcaaccagaccugcuuagacaggauagcugcuggcaccuuuaaugcaggagaauuuucucuccccacuuuugauucacugaacauuacugcugcaucuuuaaaugaugauggauuggauaaccauacuauacugcucuauuacucaacugcugcuucuaguuuggcuguaacauugaugcuagcuauuuuuauuguuuauauggucuccagagacaacguuucaugcuccaucugucuauaa

SEQ ID NO: 59327 - RNA, 1758 nt, Artificial Sequence; identical to SEQ ID NO: 59007
  derived and/or modified CDS sequence (wt) from hemagglutinin__InfluenzaB__AGX19436

SEQ ID NO: 59328 - RNA, 1758 nt, Artificial Sequence
  derived and/or modified CDS sequence (wt) from hemagglutinin__InfluenzaB__AGX19447
augaaggcaauaauuguacuacucaugguaguaacauccaaugcagaucgaaucugcacugggauaacaucgucaaacucaccacauguugucaaaacugcuacucaaggggaggucaaugugacugguguaauaccacugacaacaacacccaccaaaucucauuuugcaaaucucaaaggaacagaaaccagagggaaacuaugcccaaaaugccucaacugcacagaucuggacguggccuugggcagaccaaaaugcacggggaacauacccucggcaagaguuucaauacuccaugaagucagaccuguuacaucugggugcuuuccuauaaugcacgacagaacaaaaauuagacagcugccuaaccuucucagaggauacgaacauaucagguuaucaacucauaacguuaucaaugcagaaaaugcaccaggaggacccuacaaaauuggaaccucagggucuugcccuaacguuaccaauggaaacggauuuuuugcaacaauggcuugggcugucccaaaaaacgacaacaacaaaacagcaacaaauucauuaacaauagaaguaccauacauuuguacagagggagaagaccaaauuaccguuuggggguuccacucugauaacgaaaaccaaauggcaaagcucuauggggacucaaagccccagaaguucaccucaucugccaacggagugaccacacauuacguuucacagauugguggcuucccaaaucaaacagaagacggaggacuaccacaaagugguagaauuguuguugauuacauggugcaaaaaucugggaaaacaggaacaauuaccuaucaaagagguauuuuauugccucaaaaaguguggugcgcaaguggcaggagcaagguaauaaaaggauccuugccuuuaauuggagaagcagauugccuccacgaaaaauacgguggauuaaacaaaagcaagccuuacuacacaggggaacaugcaaaggccauaggaaauugcccaauaugggugaaaacacccuugaagcuggccaauggaaccaaauauagaccuccugcaaaacuauuaaaggaaagggguuucuucggagcuauugcugguuucuuagaaggaggaugggaaggaaugauugcagguuggcacggauacacaucccauggggcacauggaguagcgguggcagcagaccuuaaaagcacucaagaggccauaaacaagauaacaaaaaaucucaacucuuugagugagcuggaaguaaagaaucuucaaagacuaagcggugccauggaugaacuccacaacgaaauacuagaacuagacgagaaaguggaugaucucagagcugauacaauaagcucacaaauagaacucgcaguccugcuuuccaaugaaggaauaauaaacagugaagaugagcaucucuuggcgcuugaaagaaagcugaagaaaaugcugggccccucugcuguagagauagggaauggaugcuuugaaaccaaacacaagugcaaccagaccugucucgacagaauagcugcugguaccuuugaugcaggagaauuuucucuccccaccuuugauucacugaauauuacugcugcaucuuuaaaugacgauggauuggauaaucauacuauacugcuuuacuacucaacugcugccuccaguuuggcuguaacauugaugauagcuaucuuuguuguuuauauggucuccagagacaauguuucuugcuccaucugucuauaa

SEQ ID NO: 59329 - RNA, 1755 nt, Artificial Sequence
  derived and/or modified CDS sequence (wt) from hemagglutinin__InfluenzaB__AGX19458
augaaggcaauaauuguacuacucaugguaguaacauccaaugcagaucgaaucugcacuggaauaacauccucaaacucaccucauguggucaaaacagccacucaaggggaggucaaugugacuggugugauaccacuaacaacaacaccaacaaaaucuuauuuugcaaaucucaaaggaacaaggaccagagggaaacuaugcccagacugucucaacugcacagaucuggauguggcuuugggcagaccaauguguguggggaccacaccuucggcgaaagcuucaauacuccacgaagucagaccuguuacauccgggugcuuuccuauaaugcacgacagaacaaaaaucaggcaacuacccaaucuucucagaggauaugaaaauaucaggcuaucaacccaaaacgucaucgaugcggaaaaggcaccaggaggacccuacagacuuggaaccucaggaucuugcccuaacgcuaccaguaagagcggauuuuucgcaacaauggcuugggcugucccaaaggacaacaacaaaaaugcaacgaacccacuaacaguagaaguaccauacauuuguacagaaggggaagaccaaaucacuguuuggggguuccauucagauaacaaaacccaaaugaagaaccucuauggagacucaaauccucaaaaguucaccucaucugcuaauggaguaaccacacacuauguuucucagauuggcagcuucccagaucaaacagaagacggaggacuaccacaaagcggcaggauuguuguugauuacaugaugcaaaaaccugggaaaacaggaacaauugucuaccaaagagguguuuuguugccucaaaggguguggugcgcgaguggcaggagcaaaguaauaaaaggguccuugccuuuaauuggugaagcagauugccuucaugaaaaauacgguggauuaaacaaaagcaagccuuacuacacaggagaacaugcaaaagccauaggaaauugcccaauaugggugaaaacaccuuugaagcuugccaauggaaccaaauauagaccuccugcaaaacuauuaaaggaaagggguuucuucggagcuauugcugguuuccuagaaggaggaugggaaggaaugauugcaggcuggcacggauacacaucucacggagcacauggaguggcaguggcggcggaccuuaagaguacgcaagaagcuauaaauaagauaacaaaaaaucucaauucuuugagugagcuagaaguaaagaaucuucaaagacuaaguggugccauggaugaacuccacaacgaaauacucgagcuggaugagaaaguggaugaucucagagcugacacuauaagcucgcaaauagaacuugcagucuugcuuuccaacgaaggaauaauaaacagugaagaugagcaucuauuggcacuugagagaaaacuaaagaaaaugcugggucccucugcuguagagauaggaaauggaugcuucgaaaccaaacacaagugcaaccagaccugcuuagacaggauagcugcuggcaccuuuaaugcaggagaauuuucucuccccacuuuugauucacugaacauuacugcugcaucuuuaaaugaugauggauuggauaaccauacuauacugcucuauuacucaacugcugcuucuaguuuggcuguaacauugaugcuagcuauuuuuauuguuuauauggucuccagagacaacguuucaugcuccaucugucuauaa

SEQ ID NO: 59330 - RNA, 1755 nt, Artificial Sequence
  derived and/or modified CDS sequence (wt) from hemagglutinin__InfluenzaB__AGX19469
augaaggcaauaauuguacuacucaugguaguaacauccaaugcagaucgaaucugcacuggaauaacauccucaaacucaccucauguggucaaaacagccacucaaggggaggucaaugugacuggugugauaccacuaacaacaacaccaacaaaaucuuauuuugcaaaucucaaaggaacaaggaccagagggaaacuaugcccagacugucucaacugcacagaucuggauguggcuuugggcagaccaauguguguggggaccacaccuucggcgaaagcuucaauacuccacgaagucagaccuguuacauccgggugcuuuccuauaaugcacgacagaacaaaaaucaggcaacuacccaaucuucucagaggauaugaaaauaucaggcuaucaacccaaaacgucaucgaugcggaaaaggcaccaggaggacccuacagacuuggaaccucaggaucuugcccuaacgcuaccaguaagagcggauuuuucgcaacaauggcuugggcugucccaaaggacaacaacaaaaaugcaacgaacccacuaacaguagaaguaccauacauuuguacagaaggggaagaccaaaucacuguuuggggguuccauucagauaacaaaacccaaaugaagaaccucuauggagacucaaauccucaaaaguucaccucaucugcuaauggaguaaccacacacuauguuucucagauuggcagcuucccagaucaaacagaagacggaggacuaccacaaagcggcaggauuguuguugauuacaugaugcaaaaaccugggaaaacaggaacaauugucuaccaaagagguguuuuguugccucaaaggguguggugcgcgaguggcaggagcaaaguaauaaaaggguccuugccuuuaauuggugaagcagauugccuucaugaaaaauacgguggauuaaacaaaagcaagccuuacuacacaggagaacaugcaaaagccauaggaaauugcccaauaugggugaaaacaccuuugaagcuugccaauggaaccaaauauagaccuccugcaaaacuauuaaaggaaagggguuuuuucggagcuauugcugguuuccuagaaggaggaugggaaggaaugauugcaggcuggcacggauacacaucucacggagcacauggaguggcaguggcggcggaccuuaagaguacgcaagaagcuauaaauaagauaacaaaaaaucucaauucuuugagugagcuagaaguaaagaaucuucaaagacuaaguggugccauggaugaacuccacaacgaaauacucgagcuggaugagaaaguggaugaucucagagcugacacuauaagcucgcaaauagaacuugcagucuugcuuuccaacgaaggaauaauaaacagugaagaugagcaucuauuggcacuugagagaaaacuaaagaaaaugcugggucccucugcuguagagauaggaaauggaugcuucgaaaccaaacacaagugcaaccagaccugcuuagacaggauagcugcuggcaccuuuaaugcaggagaauuuucucuccccacuuuugauucacugaacauuacugcugcaucuuuaaaugaugauggauuggauaaccauacuauacugcucuauuacucaacugcugcuucuaguuuggcuguaacauugaugcuagcuauuuuuauuguuuauauggucuccagagacaacguuucaugcuccaucugucuauaa

SEQ ID NO: 59331 - RNA, 1758 nt, Artificial Sequence; identical to SEQ ID NO: 59003
  derived and/or modified CDS sequence (wt) from hemagglutinin__InfluenzaB__AGX19480

SEQ ID NO: 59332 - RNA, 1758 nt, Artificial Sequence
  derived and/or modified CDS sequence (wt) from hemagglutinin__InfluenzaB__AGX19491
augaaggcaauaauuguacuacucaugguaguaacauccaaugcagaucgaaucugcacugggauaacaucgucaaacucaccacauguugucaaaacugcuacucaaggggaggucaaugugacugguguaauaccacugacaacaacacccaccaaaucucauuuugcaaaucucaaaggaacagaaaccagagggaaacuaugcccaaaaugccucaacugcacagaucuggacguggccuugggcagaccaaaaugcacggggaacauacccucggcaagaguuucaauacuccaugaagucagaccuguuacaucugggugcuuuccuauaaugcacgacagaacaaaaauuagacagcugccuaaccuucucagaggauacgaacauaucagguuaucaacucauaacguuaucaaugcagaaaaugcaccaggaggacccuacaaaauuggaaccucagggucuugcccuaacguuaccaauggaaacggauuuuuugcaacaauggcuugggcugucccaaaaaacgacaacaacaaaacagcaacaaauucauuaacaauagaaguaccauacauuuguacagagggagaagaccaaauuaccguuuggggguuccacucugauaacgaagcccaaauggcaaagcucuauggggacucaaagccccagaaguucaccucaucugccaacggagugaccacacauuacguuucacagauugguggcuucccaaaucaaacagaagacggaggacuaccacaaagugguagaauuguuguugauuacauggugcaaaaaucugggaaaacaggaacaauuaccuaucaaagagguauuuuauugccucaaaaaguguggugcgcaaguggcaggagcaagguaauaaaaggauccuugccuuuaauuggagaagcagauugccuccacgaaaaauacgguggauuaaacaaaagcaagccuuacuacacaggggaacaugcaaaggccauaggaaauugcccaauaugggugaaaacacccuugaagcuggccaauggaaccaaauauagaccuccugcaaaacuauuaaaggaaagggguuucuucggagcuauugcugguuucuuagaaggaggaugggaaggaaugauugcagguuggcacggauacacaucccauggggcacauggaguagcgguggcagcagaccuuaaaagcacucaagaggccauaaacaagauaacaaaaaaucucaacucuuugagugagcuggaaguaaagaaucuucaaagacuaagcggugccauggaugaacuccacaacgaaauacuagaacuagacgagaaaguggaugaucucagagcugauacaauaagcucacaaauagaacucgcaguccugcuuuccaaugaaggaauaauaaacagugaagaugagcaucucuuggcgcuugaaagaaagcugaagaaaaugcugggccccucugcuguagagauagggaauggaugcuuugaaaccaaacacaagugcaaccagaccugucucgacagaauagcugcugguaccuuugaugcaggagaauuuucucuccccaccuuugauucacugaauauuacugcugcaucuuuaaaugacgauggauuggauaaucauacuauacugcuuuacuacucaacugcugccuccaguuuggcuguaacauugaugauagcuaucuuuguuguuuauauggucuccagagacaauguuucuugcuccaucugucuauaa

SEQ ID NO: 59333 - RNA, 1758 nt, Artificial Sequence
  derived and/or modified CDS sequence (wt) from hemagglutinin__InfluenzaB__AGX19502
augaaggcaauaauuguacuacucaugguaguaacauccaaugcagaucgaaucugcacugggauaacaucgucaaacucaccacaugucgucaaaacugcuacucaaggggaggucaaugugacugguguaauaccacugacaacaacacccaccaaaucucauuuugcaaaucucaaaggaacagaaaccagggggaaacuaugcccaaaaugccucaacugcacagaucuggacguagccuugggcagaccaaaaugcacggggaaaauacccucggcaagaguuucaauacuccaugaagucagaccuguuacaucugggugcuuuccuauaaugcacgacagaacaaaaauuagacagcugccuaaccuucuccgaggauacgaacauaucagguuaucaacucauaacguuaucaaugcagaaaaugcaccaggaggacccuacaaaauuggaaccucagggucuugcccuaacauuaccaauggaaacggauuuuucgcaacaauggcuugggccgucccaaaaaacgacaaaaacaaaacagcaacaaauccauuaacaauagaaguaccauacauuuguacagaaggagaagaccaaauuaccguuuggggguuccacucugacagcgagacccaaauggcaaagcucuauggggacucaaagccccagaaguucaccucaucugccaacggagugaccacacauuacguuucacagauugguggcuucccaaaucaaacagaagacgggggacuaccacaaagugguagaauuguuguugauuacauggugcaaaaaucugggaaaacaggaacaauuaccuaucaaagggguauuuuauugccucaaaagguguggugcgcaaguggcaggagcaagguaauaaaaggauccuugccuuuaauuggagaagcagauugccuccacgaaaaauacgguggauuaaacaaaagcaagccuuacuacacaggggaacaugcaaaggccauaggaaauugcccaauaugggugaaaacacccuugaagcuggccaauggaaccaaauauagaccuccugcaaaacuauuaaaggaaagggguuucuucggagcuauugcugguuucuuagaaggaggaugggaaggaaugauugcagguuggcacggauacacaucccauggggcacauggaguagcgguggcagcagaccuuaagagcacucaagaggccauaaacaagauaacaaaaaaucucaacucuuugagugagcuggaaguaaagaaucuucaaagacuaagcggugccauggaugaacuccacaacgaaauacuagaacuagaugagaaaguggaugaucucagagcugauacaauaagcucacaaauagaacucgcaguccugcuuuccaaugaaggaauaauaaacagugaagaugaacaucucuuggcgcuugaaagaaagcugaagaaaaugcugggccccucugcuguagagauagggaauggaugcuuugaaaccaaacacaagugcaaccagaccugucucgacagaauagcugcugguaccuuugaugcaggagaauuuucucuccccaccuuugauucacugaauauuacugcugcaucuuuaaaugacgauggauuggauaaucauacuauacugcuuuacuacucaacugcugccuccaguuuggcuguaacacugaugauagcuaucuuuguuguuuauauggucuccagagacaauguuucuugcuccaucugucuauaa

SEQ ID NO: 59334 - RNA, 1758 nt, Artificial Sequence
  derived and/or modified CDS sequence (wt) from hemagglutinin__InfluenzaB__AGX19513
augaaggcaauaauuguacuacucaugguaguaacauccaaugcagaucgaaucugcacugggauaacaucgucaaacucaccacaugucgucaaaacugcuacucaaggggaggucaaugugacugguguaauaccacugacaacaacacccaccaaaucucauuuugcaaaucucaaaggaacagaaaccagggggaaacuaugcccaaaaugccucaacugcacagaucuggacguagccuugggcagaccaaaaugcacggggaaaauacccucggcaagaguuucaauacuccaugaagucagaccuguuacaucugggugcuuuccuauaaugcacgacagaacaaaaauuagacagcugccuaaccuucuccgaggauacgaacauaucagguuaucaacucauaacguuaucaaugcagaaaaugcaccaggaggacccuacaaaauuggaaccucagggucuugcccuaacauuaccaauggaaacggauuuuucgcaacaauggcuugggccgucccaaaaaacgacaaaaacaaaacagcaacaaauccauuaacaauagaaguaccauacauuuguacagaaggagaagaccaaauuaccguuuggggguuccacucugacaacgagacccaaauggcaaagcucuauggggacucaaagccccagaaguucaccucaucugccaacggagugaccacacauuacauuucacagauugguggcuucccaaaucaaacagaagacggaggacuaccacaaagugguagaauuguuguugauuacauggugcaaaaaucugggaaaacaggaacaauuaccuaucaaagggguauuuuauugccucaaaagguguggugcgcaaguggcaggagcaagguaauaaaaggauccuugccuuuaauuggagaagcagauugccuccacgaaaaauacgguggauuaaacaaaagcaagccuuacuacacaggggaacaugcaaaggccauaggaaauugcccaauaugggugaaaacacccuugaagcuggccaauggaaccaaauauagaccuccugcaaaacuauuaaaggaaagggguuucuucggagcuauugcugguuucuuagaaggaggaugggaaggaaugauugcagguuggcacggauacacaucccauggggcacauggaguagcgguggcagcagaccuuaagagcacucaagaggccauaaacaagauaacaaaaaaucucaacucuuugagugagcuggaaguaaagaaucuucaaagacuaagcggugccauggaugaacuccacaacgaaauacuagaacuagaugagaaaguggaugaucucagagcugauacaauaagcucacaaauagaacucgcaguccugcuuuccaaugaaggaauaauaaacagugaagaugaacaucucuuggcgcuugaaagaaagcugaagaaaaugcugggccccucugcuguagagauagggaauggaugcuuugaaaccaaacacaagugcaaccagaccugucucgacagaauagcugcugguaccuuugaugcaggagaauuuucucuccccaccuuugauucacugaauauuacugcugcaucuuuaaaugacgauggauuggauaaucauacuauacugcuuuacuacucaacugcugccuccaguuuggcuguaacacugaugauagcuaucuuuguuguuuauauggucuccagagacaauguuucuugcuccaucugucuauaa

SEQ ID NO: 59335 - RNA, 1758 nt, Artificial Sequence; identical to SEQ ID NO: 59334
  derived and/or modified CDS sequence (wt) from hemagglutinin__InfluenzaB__AGX19524

SEQ ID NO: 59336 - RNA, 1758 nt, Artificial Sequence
  derived and/or modified CDS sequence (wt) from hemagglutinin__InfluenzaB__AGX19535
augaaggcaauaauuguacuacucaugguaguaacauccaaugcagauagaaucugcacugggauaacaucgucaaacucaccacauguugucaaaacugcuacucaaggggaggucaaugugacugguguaauaccacugacaacaacacccaccaaaucucauuuugcaaaucucaaaggaacagaaaccagagggaaacuaugcccaaaaugccucaacugcacagaucuggacguggccuugggcagaccaaaaugcacggggaacauacccucggcaagaguuucaauacuccaugaagucagaccuguuacaucugggugcuuuccuauaaugcacgacagaacaaaaauuagacagcugccuaaccuucucagaggauacgaacauaucagguuaucaacucauaacguuaucaaugcagaaaaugcaccaggaggacccuacaaaauuggaaccucagggucuugcccuaacguuaccaauggaaacggauuuuuugcaacaauggcuugggcugucccaaaaaacgacaacaacaaaacagcaacaaauucauuaacaauagaaguaccauacauuuguacagagggagaagaccaaauuaccguuuggggguuccacucugaugacgaaacccaaauggcaaagcucuauggggacucaaagccccagaaguucaccucaucugccaacggagugaccacacauuacguuucacagauugguggcuucccaaaucaaacagaagacggaggacuaccacaaagugguagaauuguuguugauuacauggugcaaaaaucugggaaaacaggaacaauuaccuaucaaagagguauuuuauugccucaaaaaguguggugcgcaaguggcaggagcaagguaauaaaaggauccuugccuuuaauuggagaagcagauugccuccacgaaaaauacgguggauuaaacaaaagcaagccuuacuacacaggggaacaugcaaaggccauaggaaauugcccaauaugggugaaaacacccuugaagcuggccaauggaaccaaauauagaccuccugcaaaacuauuaaaggaaagggguuucuucggagcuauugcugguuucuuagaaggaggaugggaaggaaugauugcagguuggcacggauacacaucccauggggcacauggaguagcgguggcagcagaccuuaaaagcacucaagaggccauaaacaagauaacaaaaaaucucaacucuuugagugagcuggaaguaaagaaucuucaaagacuaagcggugccauggaugaacuccacaacgaaauacuagaacuagacgagaaaguggaugaucucagagcugauacaauaagcucacaaauagaacucgcaguccugcuuuccaaugaaggaauaauaaacagugaagaugagcaucucuuggcgcuugaaagaaagcugaagaaaaugcugggccccucugcuguagagauagggaauggaugcuuugaaaccaaacacaagugcaaccagaccugucucgacagaauagcugcugguaccuuugaugcaggagaauuuucucuccccaccuuugauucacugaauauuacugcugcaucuuuaaaugacgauggauuggauaaucauacuauacugcuuuacuacucaacugcugccuccaguuuggcuguaacauugaugauagcuaucuuuguuguuuauauggucuccagagacaauguuucuugcuccaucugucuauaa

SEQ ID NO: 59337 - RNA, 1758 nt, Artificial Sequence
  derived and/or modified CDS sequence (wt) from hemagglutinin__InfluenzaB__AGX19546
augaaggcaauaauuguacuacucaugguaguaacauccaaugcagaucgaaucugcacugggauaacaucgucaaacucaccacauguugucaaaacugcuacucaaggggaggucaaugugacugguguaauaccacugacaacaacacccaccaaaucucauuuugcaaaucucaaaggaacagaaaccagagggaaacuaugcccaaaaugccucaacugcacagaucuggacguggccuugggcagaccaaaaugcacggggaacauacccucggcaagaguuucaauacuccaugaagucagaccuguuacaucugggugcuuuccuauaaugcacgacagaacaaaaauuagacagcugccuaaccuucucagaggauacgaacauaucagguuaucaacucauaacguuaucaaugcagaaaaugcaccaggaggacccuacaaaauuggaaccucagggucuugcccuaacguuaccaauggaaacggauuuuuugcaacaauggcuugggcugucccaaaaaacgacaacaacaaaacagcaacaaauucauuaacaauagaaguaccauacauuuguacagagggagaagaccaaauuaccguuuggggguuccacucugauaaagaaacccaaauggcaaagcucuauggggacucaaagccccagaaguucaccucaucugccaacggagugaccacacauuacguuucacagauugguggcuucccaaaucaaacagaagacggaggacuaccacaaagugguagaauuguuguugauuacauggugcaaaaaucugggaaaacaggaacaauuaccuaucaaagagguauuuuauugccucaaaaaguguggugcgcaaguggcaggagcaagguaauaaaaggauccuugccuuuaauuggagaagcagauugccuccacgaaaaauacgguggauuaaacaaaagcaagccuuacuacacaggggaacaugcaaaggccauaggaaauugcccaauaugggugaaaacacccuugaagcuggccaauggaaccaaauauagaccuccugcaaaacuauuaaaggaaagggguuucuucggagcuauugcugguuucuuagaaggaggaugggaaggaaugauugcagguuggcacggauacacaucccauggggcacauggaguagcgguggcagcagaccuuaaaagcacucaagaggccauaaacaagauaacaaaaaaucucaacucuuugagugagcuggaaguaaagaaucuucaaagacuaagcggugccauggaugaacuccacaacgaaauacuagaacuagacgagaaaguggaugaucucagagcugauacaauaagcucacaaauagaacucgcaguccugcuuuccaaugaaggaauaauaaacagugaagaugagcaucucuuggcgcuugaaagaaagcugaagaaaaugcugggccccucugcuguagagauagggaauggaugcuuugaaaccaaacacaagugcaaccagaccugucucgacagaauagcugcugguaccuuugaugcaggagaauuuucucuccccaccuuugauucacugaauauuacugcugcaucuuuaaaugacgauggauuggauaaucauacuauacugcuuuacuacucaacugcugccuccaguuuggcuguaacauugaugauagcuaucuuuguuguuuauauggucuccagagacaauguuucuugcuccaucugucuauaa

SEQ ID NO: 59338 - RNA, 1758 nt, Artificial Sequence
  derived and/or modified CDS sequence (wt) from hemagglutinin__InfluenzaB__AGX19557
augaaggcaauaauuguacuacucaugguaguaacauccaaugcagaucgaaucugcacugggauaacaucgucaaacucaccacauguugucaaaacugcuacucaaggggaggucaaugugacugguguaauaccacugacaacaacacccaccaaaucucauuuugcaaaucucaaaggaacagaaaccagaggaaaacuaugcccaaaaugccucaacugcacagaucuggacguggccuugggcagaccaaaaugcacggggaacauacccucggcaagaguuucaauacuccaugaagucagaccuguuacaucugggugcuuuccuauaaugcacgacagaacaaaaauuagacagcugccuaaccuucucagaggauacgaacauaucagguuaucaacucauaacguuaucaaugcagaaaaugcaccaggaggacccuacaaaauuggaaccucagggucuugcccuaacguuaccaauggaaacggauuuuuugcaacaauggcuugggcugucccaaaaaacgacaacaacaaaacagcaacaaauucauuaacaauagaaguaccauacauuuguacagggggagaagaccaaauuaccguuuggggguuccacucugauaacgaaacccaaauggcaaagcucuauggggacucaaagccccagaaguucaccucaucugccaacggagugaccacacauuacguuucacagauugguggcuucccaaaucaaacagaagacggaggacuaccacaaagugguagaauuguuguugauuacauggugcaaaaaucugggaaaacaggaacaauuaccuaucaaagagguauuuuauugccucaaaaaguguggugcgcaaguggcaggagcaagguaauaaaaggauccuugccuuuaauuggagaagcagauugccuccacgaaaaauacgguggauuaaacaaaagcaagccuuacuacacaggggaacaugcaaaggccauaggaaauugcccaauaugggugaaaacacccuugaagcuggccaauggaaccaaauauagaccuccugcaaaacuauuaaaggaaagggguuucuucggagcuauugcugguuucuuagaaggaggaugggaaggaaugauugcagguuggcacggauacacaucccauggggcacauggaguagcgguggcagcagaccuuaaaagcacucaagaggccauaaacaagauaacaaaaaaucucaacucuuugagugagcuggaaguaaagaaucuucaaagacuaagcggugccauggaugaacuccacaacgaaauacuagaacuagacgagaaaguggaugaucucagagcugauacaauaagcucacaaauagaacucgcaguccugcuuuccaaugaaggaauaauaaacagugaagaugagcaucucuuggcgcuugaaagaaagcugaagaaaaugcugggccccucugcuguagagauagggaauggaugcuuugaaaccaaacacaagugcaaccagaccugucucgacagaauagcugcugguaccuuugaugcaggagaauuuucucuccccaccuuugauucacugaauauuacugcugcaucuuuaaaugacgauggauuggauaaucauacuauacugcuuuacuacucaacugcugccuccaguuuggcuguaacauugaugauagcuaucuuuguuguuuauauggucuccagagacaauguuucuugcuccaucugucuauaa

SEQ ID NO: 59339 - RNA, 1758 nt, Artificial Sequence
  derived and/or modified CDS sequence (wt) from hemagglutinin__InfluenzaB__AGX19568
augaaggcaauaauuguacuacucaugguaguaacauccaaugcagaucgaaucugcacugggauaacaucgucaaacucaccacaugucgucaaaacugcuacucaaggggaggucaaugugacugguguaauaccacugacaacaacacccaccaaaucucauuuugcaaaucucaaaggaacagaaaccagggggaaacuaugcccaaaaugccucaacugcacagaucuggacguagccuugggcagaccaaaaugcacggggaaaauacccucggcaagaguuucaauacuccaugaagucagaccuguuacaucuggguguuuuccuauaaugcacgacagaacaaaaauuagacagcugccuaaccuucuccgaggauacgaacauaucagguuaucaacucauaacguuaucaaugcagaaaaugcaccaggaggacccuacaaaauuggaaccucagggucuugcccuaacauuaccaauggaaacggauuuuucgcaacaauggcuugggccgucccaaaaaacgacaaaaacaaaacagcaacaaauccauuaacaauagaaguaccauacauuuguacagaaggagaagaccaaauuaccguuuggggguuccacucugacaacgagacccaaauggcaaagcucuauggggacucaaagccccagaaguucaccucaucugccaacggagugaccacacauuacguuucacagauugguggcuucccaaaucaaacagaagacggaggacuaccacaaagugguagaauuguuguugauuacauggugcaaaaaucugggaaaacaggaacaauuaccuaucaaagggguauuuuauugccucaaaagguguggugcgcaaguggcaggagcaagguaauaaaaggauccuugccuuuaauuggagaagcagauugccuccacgaaaaauacgguggauuaaacaaaagcaagccuuacuacacaggggaacaugcaaaggccauaggaaauugcccaauaugggugaaaacacccuugaagcuggccaauggaaccaaauauagaccuccugcaaaacuauuaaaggaaagggguuucuucggagcuauugcugguuucuuagaaggaggaugggaaggaaugauugcagguuggcacggauacacaucccauggggcacauggaguagcgguggcagcagaccuuaagagcacucaagaggccauaaacaagauaacaaaaaaucucaacucuuugagugagcuggaaguaaagaaucuucaaagacuaagcggugccauggaugaacuccacaacgaaauacuagaacuagaugagaaaguggaugaucucagagcugauacaauaagcucacaaauagaacucgcaguccugcuuuccaaugaaggaauaauaaacagugaagaugaacaucucuuggcgcuugaaagaaagcugaagaaaaugcugggccccucugcuguagagauagggaauggaugcuuugaaaccaaacacaagugcaaccagaccugucucgacagaauagcugcugguaccuuugaugcaggagaauuuucucuccccaccuuugauucacugaauauuacugcugcaucuuuaaaugacgauggauuggauaaucauacuauacugcuuuacuacucaacugcugccuccaguuuggcuguaacacugaugauagcuaucuuuguuguuuauauggucuccagagacaauguuucuugcuccaucugucuauaa

SEQ ID NO: 59340 - RNA, 1758 nt, Artificial Sequence; identical to SEQ ID NO: 59334
  derived and/or modified CDS sequence (wt) from hemagglutinin__InfluenzaB__AGX19579

SEQ ID NO: 59341 - RNA, 1758 nt, Artificial Sequence; identical to SEQ ID NO: 59001
  derived and/or modified CDS sequence (wt) from hemagglutinin__InfluenzaB__AGX19590

SEQ ID NO: 59342 - RNA, 1758 nt, Artificial Sequence
  derived and/or modified CDS sequence (wt) from hemagglutinin__InfluenzaB__AGX19601
augaaggcaauaauuguacuacucaugguaguaacauccaaugcagaucgaaucugcacugggauaacaucgucaaacucaccacaugucgucaaaacugcuacucaaggggaggucaaugugacugguguaauaccacugacaacaacacccaccaaaucucauuuugcaaaucucaaaggaacagaaaccagggggaaacuaugcccaaaaugccucaacugcacagaucuggacguagccuugggcagaccaaaaugcacggggaaaauacccucggcaagaguuucaauacuccaugaagucagaccuguuacaucugggugcuuuccuauaaugcacgacagaacaaaaauuagacagcugccuaaccuucuccgaggauacgaacauaucagguuaucaacccauaacguuaucaaugcagaaaaugcaccaggaggacccuacaaaauuggaaccucagggucuugcccuaacauuaccaauggaaacggauuuuucgcaacaauggcuugggccgucccaaaaaacgacaaaaacaaaacagcaacaaauccauuaacaauagaaguaccauacauuuguacagaaggagaagaccaaauuaccguuuggggguuccacucugacaacgagacccaaauggcaaagcucuauggggacucaaagccccagaaguucaccucaucugccaacggagugaccacacauuacguuucacagauugguggcuucccaaaucaaacagaagacggaggacuaccacaaagugguagaauuguuguugauuacauggugcaaaaaucugggaaaacaggaacaauuaccuaucaaagggguauuuuauugccucaaaagguguggugcgcaaguggcaggagcaagguaauaaaaggauccuugccuuuaauuggagaagcagauugccuccacgaaaaauacgguggauuaaacaaaagcaagccuuacuacacaggggaacaugcaaaggccauaggaaauugcccaauaugggugaaaacacccuugaagcuggccaauggaaccaaauauagaccuccugcaaaacuauuaaaggaaagggguuucuucggagcuauugcugguuucuuagaaggaggaugggaaggaaugauugcagguuggcacggauacacaucccauggggcacauggaguagcgguggcagcagaccuuaagagcacucaagaggccauaaacaagauaacaaaaaaucucaacucuuugagugagcuggaaguaaagaaucuucaaagacuaagcggugccauggaugaacuccacaacgaaauacuagaacuagaugagaaaguggaugaucucagagcugauacaauaagcucacaaauagaacucgcaguccugcuuuccaaugaaggaauaauaaacagugaagaugaacaucucuuggcgcuugaaagaaagcugaagaaaaugcugggccccucugcuguagagauagggaauggaugcuuugaaaccaaacacaagugcaaccagaccugucucgacagaauagcugcugguaccuuugaugcaggagaauuuucucuccccaccuuugauucacugaauauuacugcugcaucuuuaaaugacgauggauuggauaaucauacuauacugcuuuacuacucaacugcugccuccaguuuggcuguaacacugaugauagcuaucuuuguuguuuauauggucuccagagacaauguuucuugcuccaucugucuauaa

SEQ ID NO: 59343 - RNA, 1758 nt, Artificial Sequence; identical to SEQ ID NO: 59003
  derived and/or modified CDS sequence (wt) from hemagglutinin__InfluenzaB__AGX19612

SEQ ID NO: 59344 - RNA, 1758 nt, Artificial Sequence
  derived and/or modified CDS sequence (wt) from hemagglutinin__InfluenzaB__AGX19623
augaaggcaauaauuguacuacucaugguaguaacauccaaugcagaucgaaucugcacugggauaacaucgucaaacucaccacauguugucaaaacugcuacucaaggggaggucaaugugacugguguaauaccacugacaacaacacccaccaaaucucauuuugcaaaucucaaaggaacagaaaccagagggaaacuaugcccaaaaugccucaacugcacagaucuggacguagccuugggcagaccaaaaugcacggggaacauacccucggcaagaguuucaauacuccaugaagucagaccuguuacaucugggugcuuuccuauaaugcacgacagaacaaaaauuagacagcugccuaaccuucucagaggauacgaacauaucagguuaucaacucauaacguuaucaaugcagaaaaugcaccaggaggacccuacaaaauuggaaccucagggucuugcccuaacguuaccaauggaaacggauuuuuugcaacaauggcuugggcugucccaaaaaacgacaacaacaaaacagcaacaaauucauuaacaauagaaguaccauacauuuguacagagggagaagaccaaauuaccguuuggggguuccacucugauaacgaaacccaaauggcaaagcucuauggggacucaaagccccagaaguucaccucaucugccaacggagugaccacacauuacguuucacagauugguggcuucccaaaucaaacagaagacggaggacuaccacaaagugguagaauuguuguugauuacauggugcaaaaaucugggaaaacaggaacaauuaccuaucaaagagguauuuuauugccucaaaaaguguggugcgcaaguggcaggagcaagguaauaaaaggauccuugccuuuaauuggagaagcagauugccuccacgaaaaauacgguggauuaaacaaaagcaagccuuacuacacaggggaacaugcaaaggccauaggaaauugcccaauaugggugaaaacacccuugaagcuggccaauggaaccaaauauagaccuccugcaaaacuauuaaaggaaagggguuucuucggagcuauugcugguuucuuagaaggaggaugggaaggaaugauugcagguuggcacggauacacaucccauggggcacauggaguagcgguggcagcagaccuuaaaagcacucaagaggccauaaacaagauaacaaaaaaucucaacucuuugagugagcuggaaguaaagaaucuucaaagacuaagcggugccauggaugaacuccacaacgaaauacuagaacuagacgagaaaguggaugaucucagagcugauacaauaagcucacaaauagaacucgcaguccugcuuuccaaugaaggaauaauaaacagugaagaugagcaucucuuggcgcuugaaagaaagcugaagaaaaugcugggccccucugcuguagagauagggaauggaugcuuugaaaccaaacacaagugcaaccagaccugucucgacagaauagcugcugguaccuuugaugcaggagaauuuucucuccccaccuuugauucacugaauauuacugcugcaucuuuaaaugacgauggauuggauaaucauacuauacugcuuuacuacucaacugcugccuccaguuuggcuguagcauugaugauagcuaucuuuguuguuuauauggucuccagagacaauguuucuugcuccaucugucuauaa

SEQ ID NO: 59345 - RNA, 1758 nt, Artificial Sequence; identical to SEQ ID NO: 59002
  derived and/or modified CDS sequence (wt) from hemagglutinin__InfluenzaB__AGX19634

SEQ ID NO: 59346 - RNA, 1758 nt, Artificial Sequence; identical to SEQ ID NO: 59007
  derived and/or modified CDS sequence (wt) from hemagglutinin__InfluenzaB__AGX19645

SEQ ID NO: 59347 - RNA, 1758 nt, Artificial Sequence
  derived and/or modified CDS sequence (wt) from hemagglutinin__InfluenzaB__AGX19656
augaaggcaauaauuguacuacucaugguaguaacauccaaugcagaucgaaucugcacugggauaacaucgucaaacucaccacauguugucaaaacugcuacucaaggggaggucaaugugacugguguaauaccacugacaacaacacccaccaaaucucauuuugcaaaucucaaaggaacagaaaccagagggaaacuaugcccaaaaugccucaacugcacagaucuggacguggccuugggcagaccaaaaugcacggggaacauacccucggcaagaguuucaauacuccaugaagucagaccuguuacaucugggugcuuuccuauaaugcacgacagaacaaaaauuagacagcugccuaaccuucucagaggauacgaacauaucagguuaucaacucauaacguuaucaaugcagaaaaugcaccaggaggacccuacaaaauuggaaccucagggucuugcccuaacguuaccaauggaaacggauuuuuugcaacaauggcuugggcugucccaaaaaacgacaacaacaaaacagcaacaaauucauuaacaauagaaguaccauacauuuguacagagggagaagaccaaauuaccguuuggggguuccacucugauaacgaaauccaaauggcaaagcucuauggggacucaaagccccagaaguucaccucaucugccaacggagugaccacacauuacguuucacagauugguggcuucccaaaucaaacagaagacggaggacuaccacaaagugguagaauuguuguugauuacauggugcaaaaaucugggaaaacaggaacaauuaccuaucaaagagguauuuuauugccucaaaaaguguggugcgcaaguggcaggagcaagguaauaaaaggauccuugccuuuaauuggagaagcagauugccuccacgaaaaauacgguggauuaaacaaaagcaagccuuacuacacaggggaacaugcaaaggccauaggaaauugcccaauaugggugaaaacacccuugaagcuggccaauggaaccaaauauagaccuccugcaaaacuauuaaaggaaagggguuucuucggagcuauugcugguuucuuagaaggaggaugggaaggaaugauugcagguuggcacggauacacaucccauggggcacauggaguagcgguggcagcagaccuuaaaagcacucaagaggccauaaacaagauaacaaaaaaucucaacucuuugagugagcuggaaguaaagaaucuucaaagacuaagcggugccauggaugaacuccacaacgaaauacuagaacuagacgagaaaguggaugaucucagagcugauacaauaagcucacaaauagaacucgcaguccugcuuuccaaugaaggaauaauaaacagugaagaugagcaucucuuggcgcuugaaagaaagcugaagaaaaugcugggccccucugcuguagagauagggaauggaugcuuugaaaccaaacacaagugcaaccagaccugucucgacagaauagcugcugguaccuuugaugcaggagaauuuucucuccccaccuuugauucacugaauauuacugcugcaucuuuaaaugacgauggauuggauaaucauacuauacugcuuuacuacucaacugcugccuccaguuuggcuguaacauugaugauagcuaucuuuguuguuuauauggucuccagagacaauguuucuugcuccaucugucuauaa

SEQ ID NO: 59348 - RNA, 1758 nt, Artificial Sequence
  derived and/or modified CDS sequence (wt) from hemagglutinin__InfluenzaB__AGX19667
augaaggcaauaauuguacuacucaugguaguaacauccaaugcagaucgaaucugcacugggauaacaucgucaaacucaccacaugucgucaaaacugcuacucaaggggaggucaaugugacugguguaauaccacugacaacaacacccaccaaaucucauuuugcaaaucucaaaggaacagaaaccagggggaaacuaugcccaaaaugccucaacugcacagaucuggacguagccuugggcagaccaaaaugcacggggaaaauacccucggcaagaguuucaauacuccaugaagucagaccuguuacaucugggugcuuuccuauaaugcacgacagaacaaaaauuagacagcugccuaaccuucuccgaggauacgaacauaucagguuaucaacucauaacguuaucaaugcagaaaaugcaccaggaggacccuacaaaauuggaaccucagggucuugcccuaacauuaccaauggaaacggauuuuucgcaacaauggcuugggccgucccaaaaaacgacaaaaacaaaacagcaacaaauccauuaacaauagaaguaccauacauuuguacagaaggagaagaccaaauuaccguuuggggguuccacucugacaacgagacccaaauggcaaagcucuauggggacucaaagccccagaaguucaccucaucugccaacggagugaccacacauuacguuucacagauugguggcuucccaaaucaaacagaagacggaggacuaccacaaagugguagaauuguuguugauuacauggugcaaaaaucugggaaaacaggaacaauuaccuaucaaagggguauuuuauugccucaaaagguguggugcgcaaguggcaggagcaagguaauaaaaggauccuugccuuuaauuggagaagcagauugccuccacgaaaaauacgguggauuaaacaaaagcaagccuuacuacacaggggaacaugcaaaggccauaggaaauugcccaauaugggugaaaacacccuugaagcuggccaauggaaccaaauauagaccuccugcaaaacuauuaaaggaaagggguuucuucggagcuauugcugguuucuuagaaggaggaugggaaggaaugauugcagguuggcacggauacacaucccauggggcacauggaguagcgguggcagcagaccuuaagagcacucaagaggccauaaacaagauaacaaaaaaucucaacucuuugagugagcuggaaguaaaggaucuucaaagacuaagcggugccauggaugaacuccacaacgaaauacuagaacuagaugagaaaguggaugaucucagagcugauacaauaagcucacaaauagaacucgcaguccugcuuuccaaugaaggaauaauaaacagugaagaugaacaucucuuggcgcuugaaagaaagcugaagaaaaugcugggccccucugcuguagagauagggaauggaugcuuugaaaccaaacacaagugcaaccagaccugucucgacagaauagcugcugguaccuuugaugcaggagaauuuucucuccccaccuuugauucacugaauauuacugcugcaucuuuaaaugacgauggauuggauaaucauacuauacugcuuuacuacucaacugcugccuccaguuuggcuguaacacugaugauagcuaucuuuguuguuuauauggucuccagagacaauguuucuugcuccaucugucuauaa

SEQ ID NO: 59349 - RNA, 1758 nt, Artificial Sequence; identical to SEQ ID NO: 59009
  derived and/or modified CDS sequence (wt) from hemagglutinin__InfluenzaB__AGX19678

SEQ ID NO: 59350 - RNA, 1758 nt, Artificial Sequence
  derived and/or modified CDS sequence (wt) from hemagglutinin__InfluenzaB__AGX19700
augaaggcaauaauuguacuacucaugguaguaacauccaaugcagaucgaaucugcacugggauaacaucgucaaacucaccacauguugucaaaacugcuacucaaggggaggucaaugugacugguguaauaccacugacaacaacacccaccaaaucucauuuugcaaaucucaaaggaacagaaaccagagggaaacuaugcccaaaaugccucaacugcacagaucuggacguggccuugggcagaccaaaaugcacggggaacauacccucggcaagaguuucaauacuccaugaagucagaccuguuacaucugggugcuuuccuauaaugcacgacagaacaaaaauuagacagcugccuaaccuucucagaggauacgaacauaucagguuaucaacucauaacguuaucaaugcagaaaaugcaccaggaggacccuacaaaauuggaaccucagggucuugcccuaacguuaccaauggaaacggauuuuuugcaacaauggcuugggcugucccaaaaaacgacaacaacaaaacagcaacaaauucauuaacaauagaaguaccauacauuuguacagagggagaagaccaaauuaccguuuggggguuccacucugauaacgaaacccaaauggcaaagcucuauggggacucaaagccccagaaguucaccucaucugccaacggagugaccacacauuacguuucacagauugguggcuucccaaaucaaacagaagacggaggacuaccacaaagugguagaauuguuguugauuacauggugcaaaaaucugggaaaacaggaacaauuaccuaucaaagagguauuuuauugccucaaaaaguguggugcgcaaguggcaggagcaagguaauaaaaggauccuugccuuuaauuggagaagcagauugccuccacgaaaaauacgguggauuaaacaaaagcaagccuuacuacacaggggaacaugcaaaggccauaggaaauugcccaauaugggugaaaacacccuugaagcuggccaauggaaccaaauauagaccuccugcaaaacuauuaaaggaaagggguuucuucggagcuauugcugguuucuuagaaggaggaugggaaggaaugauugcagguuggcacggauacacaucccauggggcacauggaguagcgguggcagcagaccuuaaaagcacucaagaggccauaaacaagauaacaaaaaaucucaacucuuugagugagcuggaaguaaagaaucuucaaagacuaagcggugccauggaugaacuccacaacgaaauacuagaacuagacgagaaaguggaugaucucagagcugauacaauaagcucacaaauagaacucgcaguccugcuuuccaaugaaggaauaauaaacagugaagaugagcaucucuuggcgcuugaaagaaagcugaagaaaaugcugggccccucugcuguagagauagggaauggaugcuuugaaaccaaacacaagugcaaccagaccugucucgacagaauagcugcugguaccuuugaugcaggagaauuuucucuccccaccuuugauucacugaauauuacugcugcaucuuuaaaugacgauggauuggauaaucauacuauacugcuuuacuacucaacugcugcuuccaguuuggcuguaacauugaugauagcuaucuuuguuguuuauauggucuccagagacaauguuucuugcuccaucugucuauaa

SEQ ID NO: 59351 - RNA, 1758 nt, Artificial Sequence
  derived and/or modified CDS sequence (wt) from hemagglutinin__InfluenzaB__AGX19711
augaaggcaauaauuguacuacucaugguaguaacauccaaugcagaucgaaucugcacugggauaacaucgucaaacucaccacauguugucaaaacugcuacucaaggggaggucaaugugacuggcguaauaccacugacaacaacacccaccaaaucucauuuugcaaaucucaaaggaacagaaaccagagggaaacuaugcccaaaaugccucaacugcacagaucuggacguggccuugggcagaccaaaaugcacggggaacauacccucggcaagaguuucaauacuccaugaagucagaccuguuacaucugggugcuuuccuauaaugcacgacagaacaaaaauuagacagcugccuaaccuucucagaggauacgaacauaucagguuaucaacucauaauguuaucaaugcagaaaaugcaccaggaggacccuacaaaauuggaaccucagggucuugcccuaacguuaccaauggaaacggauuuuucgcaacaauggcuugggccgucccaaaaaacgacaaaaacaaaacagcaacaaauucauuaacaauagaaguaccauacauuuguaaagaaggagaagaccaaauuaccguuuggggguuccacucugauaacgaaacccaaauggcaaagcucuauggggacucaaagccccagaaguucaccucaucugccaacggagugaccacacauuacguuucacagauugguggcuucccaaaucaaacagaagacggaggacuaccacaaagugguagaauuguuguugauuacauggugcaaaaaucugggaaaacaggaacaauuaccuaucaaagagguauuuuauugccucaaaaaguguggugcgcaaguggcaggagcaagguaauaaaaggauccuugccuuuaauuggagaagcagauugccuccacgaaaaauacgguggauuaaacaaaagcaagccuuacuacacaggggaacaugcaaaggccauaggaaauugcccaauaugggugaaaacacccuugaagcuggccaauggaaccaaauauagaccuccugcaaaacuauuaaaggaaagggguuucuucggagcuauugcugguuucuuagaaggaggaugggaaggaaugauugcagguuggcacggauacacaucccauggggcacauggaguagcgguggcugcagaccuuaaaagcacucaagaggccauaaacaagauaacaaaaaaucucaacucuuugagugagcuggaaguaaagaaucuucaaagacuaagcggugccauggaugaacuccacaacgaaauacuagaacuagacgagaaaguggaugaucucagagcugauacaauaagcucacaaauagaacucgcaguccugcuuuccaaugaaggaauaauaaacagugaagaugagcaucucuuggcgcuugaaagaaagcugaagaaaaugcugggccccucugcuguagagauagggaauggaugcuuugaaaccaaacacaagugcaaccagaccugucucgacagaauagcugcugguaccuuugaugcaggagaauuuucucuccccaccuuugauucacugaauauuacugcugcaucuuuaaaugacgauggauuggauaaucauacuauacugcuuuacuacucaacugcugccuccaguuuggcuguaacauugaugauagcuaucuuuguuguuuauauggucuccagagacaauguuucuugcuccaucugucuauaa

SEQ ID NO: 59352 - RNA, 1758 nt, Artificial Sequence
  derived and/or modified CDS sequence (wt) from hemagglutinin__InfluenzaB__AGX19722
augaaggcaauaauuguacuacucaugguaguaacauccaaugcagaucgaaucugcacugggauaacaucgucaaacucaccacaugucgucaaaacugcuacucaaggggaggucaaugugacugguguaauaccacugacaacaacacccaccaaaucucauuuugcaaaucucaaaggaacagaaaccagggggaaacuaugcccaaaaugccucaacugcacagaucuggacguagccuugggcagaccaaaaugcacggggaaaauacccucggcaagaguuucaauacuccaugaagucagaccuguuacaucugggugcuuuccuauaaugcacgacagaacaaaaauuagacagcugccuaaccuucuccgaggauacgaacauaucagguuaucaacucauaacguuaucaaugcagaaaaugcaccaggaggacccuacaaaauuggaaccucagggucuugcccuaacauuaccaauggaaacggauuuuucgcaacaauggcuugggccgucccaaaaaacgacaaaaacaaaacagcaacaaauccauuaacaauagaaguaccauacauuuguacagaaggagaagaccaaauuaccguuuggggguuccacucugacaacgagacccaaauggcaaagcucuauggggacucaaagccccagaaguucaccucaucugccaacggagugaccacacauuacguuucacagauugguggcuucccaaaucaaacagaagacgggggacuaccacaaagugguagaauuguuguugauuacauggugcaaaaaucugggaaaacaggaacaauuaccuaucaaagggguauuuuauugccucaaaagguguggugcgcaaguggcaggagcaagguaauaaaaggauccuugccuuuaauuggagaagcagauugccuccacgaaaaauacgguggauuaaacaaaagcaagccuuacuacacaggggaacaugcaaaggccauaggaaauugcccaauaugggugaaaacacccuugaagcuggccaauggaaccaaauauagaccuccugcaaaacuacuaaaggaaagggguuucuucggagcuauugcugguuucuuagaaggaggaugggaaggaaugauugcagguuggcacggauacacaucccauggggcacauggaguagcgguggcagcagaccuuaagagcacucaagaggccauaaacaagauaacaaaaaaucucaacucuuugagugagcuggaaguaaagaaucuucaaagacuaagcggugccauggaugaacuccacaacgaaauacuagaacuagaugagaaaguggaugaucucagagcugauacaauaagcucacaaauagaacucgcaguccugcuuuccaaugaaggaauaauaaacagugaagaugaacaucucuuggcgcuugaaagaaagcugaagaaaaugcugggccccucugcuguagagauagggaauggaugcuuugaaaccaaacacaagugcaaccagaccugucucgacagaauagcugcugguaccuuugaugcaggagaauuuucucuccccaccuuugauucacugaauauuacugcugcaucuuuaaaugacgauggauuggauaaucauacuauacugcuuuacuacucaacugcugccuccaguuuggcuguaacacugaugauagcuaucuuuguuguuuauauggucuccagagacaauguuucuugcuccaucugucuauaa

SEQ ID NO: 59353 - RNA, 1758 nt, Artificial Sequence; identical to SEQ ID NO: 59001
  derived and/or modified CDS sequence (wt) from hemagglutinin__InfluenzaB__AGX19733

SEQ ID NO: 59354 - RNA, 1758 nt, Artificial Sequence
  derived and/or modified CDS sequence (wt) from hemagglutinin__InfluenzaB__AGX19744
augaaggcaauaauuguacuacucaugguaguaacauccaaugcagaucgaaucugcacugggauaacaucgucaaacucaccacaugucgucaaaacugcuacucaaggggaggucaaugugacugguguaauaccacugacaacaacacccaccaaaucucauuuugcaaaucucaaaggaacagaaaccagggggaaacuaugcccaaaaugccucaacugcacagaucuggacguagccuugggcagaccaaaaugcacggggaaaauacccucggcaagaguuucaauacuccaugaagucagaccuguuacaucugggugcuuuccuauaaugcacgacagaacaaaaauuagacagcugccuaaccuucuccgaggauacgaacauaucagguuaucaacucauaacguuaucaaugcagaaaaugcaccaggaggacccuacaaaauuggaaccucagggucuugcccuaacauuaccaauggaaacggauuuuucgcaacaauggcuugggccgucccaaaaaacgacaaaaacaaaacagcaacaaauccauuaacaauagaaguaccauacauuuguacagaaggagaagaccaaauuaccguuuggggguuccacucugacaacgagacccaaauggcaaagcucuauggggacucaaagccccagaaguucaccucaucugccaacggagugaccacacauuacguuucacagauugguggcuucccaaaucaaacagaagacggaggacuaccacaaagugguagaauuguuguugauuacauggugcaaaaaucugggaaaacaggaacaauuaccuaucaaagggguauuuuauugccucaaaagguguggugcgcaaguggcaggagcaagguaauaaaaggauccuugccuuuaauuggagaagcagauugccuccacgaaaaauacgguggauuaaacaaaagcaagccuuacuacacaggggaacaugcaaaggcaauaggaaauugcccaauaugggugaaaacacccuugaagcuggccaauggaaccaaauauagaccuccugcaaaacuauuaaaggaaagggguuucuucggagcuauugcugguuucuuagaaggaggaugggaaggaaugauugcagguuggcacggauacacaucccauggggcacauggaguagcgguggcagcagaccuuaagagcacucaagaggccauaaacaagauaacaaaaaaucucaacucuuugagugagcuggaaguaaagaaucuucaaagacuaagcggugccauggaugaacuccacaacgaaauacuagaacuagaugagaaaguggaugaucucagagcugauacaauaagcucacaaauagaacucgcaguccugcuuuccaaugaaggaauaauaaacagugaagaugaacaucucuuggcgcuugaaagaaagcuaaagaaaaugcugggccccucugcuguagagauagggaauggaugcuuugaaaccaaacacaagugcaaccagaccugucucgacagaauagcugcugguaccuuugaugcaggagaauuuucucuccccaccuuugauucacugaauauuacugcugcaucuuuaaaugacgauggauuggauaaucauacuauacugcuuuacuacucaacugcugccuccaguuuggcuguaacacugaugauagcuaucuuuguuguuuauauggucuccagagacaauguuucuugcuccaucugucuauaa

SEQ ID NO: 59355 - RNA, 1758 nt, Artificial Sequence; identical to SEQ ID NO: 59007
  derived and/or modified CDS sequence (wt) from hemagglutinin__InfluenzaB__AGX19755

SEQ ID NO: 59356 - RNA, 1758 nt, Artificial Sequence; identical to SEQ ID NO: 59003
  derived and/or modified CDS sequence (wt) from hemagglutinin__InfluenzaB__AGX19766

SEQ ID NO: 59357 - RNA, 1758 nt, Artificial Sequence; identical to SEQ ID NO: 59334
  derived and/or modified CDS sequence (wt) from hemagglutinin__InfluenzaB__AGX19788

SEQ ID NO: 59358 - RNA, 1758 nt, Artificial Sequence; identical to SEQ ID NO: 59003
  derived and/or modified CDS sequence (wt) from hemagglutinin__InfluenzaB__AGX19799

SEQ ID NO: 59359 - RNA, 1758 nt, Artificial Sequence; identical to SEQ ID NO: 59001
  derived and/or modified CDS sequence (wt) from hemagglutinin__InfluenzaB__AGX19810

SEQ ID NO: 59360 - RNA, 1758 nt, Artificial Sequence
  derived and/or modified CDS sequence (wt) from hemagglutinin__InfluenzaB__AGX19821
augaaggcaauaauuguacuacucaugguaguaacauccaaugcagaucgaaucugcacugggauaacaucgucaaacucaccacauguugucaaaacugcuacucaaggggaggucaaugugacugguguaauaccacugacaacaacacccaccaaaucucauuuugcaaaucucaaaggaacagaaaccagagggaaacuaugcccaaaaugccucaacugcacagaucuggacguggccuugggcagaccaaaaugcacggggaacauacccucggcaagaguuucaauacuccaugaagucagaccuguuacaucugggugcuuuccuauaaugcacgacagaacaaaaauuagacagcugccuaaccuucucagaggauacgaacauaucagguuaucaacucauaacguuaucaaugcagaaaaugcaccaggaggacccuacaaaauuggaaccucagggucuugcccuaacguuaccaauggaaacggauuuuuugcaacaauggcuugggcugucccaaaaaacgacaacaacaaaacagcaacaaauucauuaacaauagaaguaccauacauuuguacagagggagaagaccaaauuaccguuuggggguuccacucugauaacgaaacccaaauggcaaagcucuauggggacucaaagccccagaaguucaccucaucugccaacggagugaccacacauuacguuucacagauugguggcuucccaaaucaaacagaagacggaggacuaccacaaagugguagaauuguuguugauuacauggugcaaaaaucugggaaaacaggaacaauuaccuaucaaagagguauuuuauugccucaaaaaguguggugcgcaaguggcaggagcaagguaauaaaaggauccuugccuuuaauuggagaagcagauugccuccacgaaaaauacgguggauuaaacaaaagcaagccuuacuacacaggggaacaugcaaaggccauaggaaauugcccaauaugggugaaaacacccuugaagcuggccaauggaaccaaauauagaccuccugcaaaacuauuaaaggaaagggguuucuucggagcuauugcugguuucuuagaaggaggaugggaaggaaugauugcagguuggcacggauacacaucccauggggcacauggaguagcgguggcagcagaccuuaaaagcacucaagaggccauaaacaagauaacaaaaaaucucaacucuuugagugagcuggaaguaaaaaaucuucaaagacuaagcgguuccauggaugaacuccacaacgaaauacuagaacuagacgagaaaguggaugaucucagagcugauacaauaagcucacaaauagaacucgcaguccugcuuuccaaugaaggaauaauaaacagugaagaugagcaucucuuggcgcuugaaagaaagcugaagaaaaugcugggccccucugcuguagagauagggaauggaugcuuugaaaccaaacacaagugcaaccagaccugucucgacagaauagcugcugguaccuuugaugcaggagaauuuucucuccccaccuuugauucacugaauauuacugcugcaucuuuaaaugacgauggauuggauaaucauacuauacugcuuuacuacucaacugcugccuccaguuuggcuguaacauugaugauagcuaucuuuguuguuuauauggucuccagagacaauguuucuugcuccaucugucuauaa

SEQ ID NO: 59361 - RNA, 1758 nt, Artificial Sequence
  derived and/or modified CDS sequence (wt) from hemagglutinin__InfluenzaB__AGX19832
augaaggcaauaauuguacuacucaugguaguaacauccaaugcagaucgaaucugcacugggauaacaucgucaaacucaccacaugucgucaaaacugcuacucaaggggaggucaaugugacugguguaauaccacugacaacaacacccaccaaaucucauuuugcaaaucucaaaggaacagaaaccagggggaaacuaugcccaaaaugccucaacugcacagaucuggacguagccuugggcagaccaaaaugcacggggaaaauacccucggcaagaguuucaauacuccaugaagucagaccuguuacaucugggugcuuuccuauaaugcacgacagaacaaaaauuagacagcugccuaaccuucuccgaggauacgaacauaucagguuaucaacucauaacguuaucaaugcagaaaaugcaccaggaggacccuacaaaauuggaaccucagggucuugcccuaacauuaccaauggaaacggauuuuucgcaacaauggcuugggccgucccaaaaaacgacaaaaacaaaacagcaacaaauccauuaacaauagaaguaccauacauuuguacagaaggagaagaccaaauuaccguuuggggguuccacucugacaacgagacccaaauggcaaagcucuauggggacucaaagccccagaaguucaccucaucugccaacggagugaccacacauuacauuucacagauugguggcuucccaaaucaaacagaagacggaggacuaccacaaagugguagaauuguuguugauuacauggugcaaaaaucugggaaaacaggaacaauuaccuaucaaagggguauuuuauugccucaaaagguguggugcgcaaguggcaggagcaagguaauaaaaggauccuugccuuuaauuggagaagcagauugccuccacgaaaaauacgguggauuaaacaaaagcaagccuuacuacacaggggaacaugcaaaggccauaggaaauugcccaauaugggugaaaacacccuugaagcuggccaauggaaccaaauauagaccuccugcaaaacuauuaaaggaaagggguuucuucggagcuauugcugguuucuuagaaggaggaugggaagggaugauugcagguuggcacggauacacaucccauggggcacauggaguagcgguggcagcagaccuuaagagcacucaagaggccauaaacaagauaacaaaaaaucucaacucuuugagugagcuggaaguaaagaaucuucaaagacuaagcggugccauggaugaacuccacaacgaaauacuagaacuagaugagaaaguggaugaucucagagcugauacaauaagcucacaaauagaacucgcaguccugcuuuccaaugaaggaauaauaaacagugaagaugaacaucucuuggcgcuugaaagaaagcugaagaaaaugcugggccccucugcuguagagauagggaauggaugcuuugaaaccaaacacaagugcaaccagaccugucucgacagaauagcugcugguaccuuugaugcaggagaauuuucucuccccaccuuugauucacugaauauuacugcugcaucuuuaaaugacgauggauuggauaaucauacuauacugcuuuacuacucaacugcugccuccaguuuggcuguaacacugaugauagcuaucuuuguuguuuauauggucuccagagacaauguuucuugcuccaucugucuauaa

SEQ ID NO: 59362 - RNA, 1758 nt, Artificial Sequence; identical to SEQ ID NO: 59009
  derived and/or modified CDS sequence (wt) from hemagglutinin__InfluenzaB__AGX19843

SEQ ID NO: 59363 - RNA, 1758 nt, Artificial Sequence; identical to SEQ ID NO: 59008
  derived and/or modified CDS sequence (wt) from hemagglutinin__InfluenzaB__AGX19854

SEQ ID NO: 59364 - RNA, 1758 nt, Artificial Sequence; identical to SEQ ID NO: 59003
  derived and/or modified CDS sequence (wt) from hemagglutinin__InfluenzaB__AGX19865

SEQ ID NO: 59365 - RNA, 1758 nt, Artificial Sequence; identical to SEQ ID NO: 59334
  derived and/or modified CDS sequence (wt) from hemagglutinin__InfluenzaB__AGX19876

SEQ ID NO: 59366 - RNA, 1758 nt, Artificial Sequence; identical to SEQ ID NO: 59002
  derived and/or modified CDS sequence (wt) from hemagglutinin__InfluenzaB__AGX19887

SEQ ID NO: 59367 - RNA, 1758 nt, Artificial Sequence
  derived and/or modified CDS sequence (wt) from hemagglutinin__InfluenzaB__AGX19898
augaaggcaauaauuguacuacucaugguaguaacauccaaugcagaucgaaucugcacugggauaacaucgucaaacucaccacaugucgucaaaacugcuacucaaggggaggucaaugugacugguguaauaccacugacaacaacacccaccaaaucucauuuugcaaaucucaaaggaacagaaaccagggggaaacuaugcccaaaaugccucaacugcacagaucuggacguagccuugggcagaccaaaaugcacggggaaaauacccucggcaagaguuucaauacuccaugaagucagaccuguuacaucugggugcuuuccuauaaugcacgacagaacaaaaauuagacagcugccuaaccuucuccgaggauacgaacauaucagguuaucaacucauaacguuaucaaugcagaaaaugcaccaggaggacccuacaaaauuggaaccucagggucuugcccuaacauuaccaaugaaaacggauuuuucgcaacaauggcuugggccgucccaaaaaacgacaaaaacaaaacagcaacaaauccauuaacaauagaaguaccauacauuuguacagaaggagaagaccaaauuaccguuuggggguuccacucugacaacgagacccaaauggcaaagcucuauggggacucaaagccccagaaguucaccucaucugccaacggagugaccacacauuacguuucacagauugguggcuucccaaaucaaacagaagacggaggacuaccacaaagugguagaauuguuguugauuacauggugcaaaaaucugggaaaacaggaacaauuaccuaucaaagggguauuuuauugccucaaaagguguggugcgcaaguggcaggagcaagguaauaaaaggauccuugccuuuaauuggagaagcagauugccuccacgaaaaauacgguggauuaaacaaaagcaagccuuacuacacaggggaacaugcaaaggccauaggaaauugcccaauaugggugaaaacacccuugaagcuggccaauggaaccaaauauagaccuccugcaaaacuauuaaaggaaagggguuucuucggagcuauugcugguuucuuagaaggaggaugggaaggaaugauugcagguuggcacggauacacaucccauggggcacauggaguagcgguggcagcagaccuuaagagcacucaagaggccauaaacaagauaacaaaaaaucucaacucuuugagugagcuggaaguaaagaaucuucaaagacuaagcggugccauggaugaacuccacaacgaaauacuagaacuagaugagaaaguggaugaucucagagcugauacaauaagcucacaaauagaacucgcaguccugcuuuccaaugaaggaauaauaaacagugaagaugaacaucucuuggcgcuugaaagaaagcugaagaaaaugcugggccccucugcuguagagauagggaauggaugcuuugaaaccaaacacaagugcaaccagaccugucucgacagaauagcugcugguaccuuugaugcaggagaauuuucucuccccaccuuugauucacugaauauuacugcugcaucuuuaaaugacgauggauuggauaaucauacuauacugcuuuacuacucaacugcugccuccaguuuggcuguaacacugaugauagcuaucuuuguuguuuauauggucuccagagacaauguuucuugcuccaucugucuauaa

SEQ ID NO: 59368 - RNA, 1758 nt, Artificial Sequence
  derived and/or modified CDS sequence (wt) from hemagglutinin__InfluenzaB__AGX19909
augaaggcaauaauuguacuacucaugguaguaacauccaaugcagaucgaaucugcacugggauaacaucgucaaacucaccacauguugucaaaacugcuacucaaggggaggucaaugugacugguguaauaccacugacaacaacacccaccaaaucucauuuugcaaaucucaaaggaacagaaaccagagggaaacuaugcccaaaaugccucaacugcacagaucuggacguggccuugggcagaccaaaaugcacggggaacauacccucggcaagaguuucaauacuccaugaagucagaccuguuacaucugggugcuuuccuauaaugcacgacagaacaaaaauuagacagcugccuaaccuucucagaggauacgaacauaucagguuaucaacucauaacguuaucaaugcagaaaaugcaccaggaggacccuacaaaauuggaaccucagggucuugcccuaacguuaccaauggaaacggauuuuuugcaacaauggcuugggcugucccaaaaaacgacaacaacaaaacagcaacaaauucauuaacaauagaaguaccauacauuuguacagagggagaagaccaaauuaccguuuggggguuccacucugauaacgaaacccaaauggcaaagcucuauggggacucaaagccccagaaguucaccucaucugccaacggagugaccacacauuacguuucacagauugguggcuucccaaaucaaacagaagacggaggacuaccacaaagugguagaauuguaguugauuacauggugcaaaaaucugggaaaacaggaacaauuaccuaucaaagagguauuuuauugccucaaaaaguguggugcgcaaguggcaggagcaagguaauaaaaggauccuugccuuuaauuggagaagcagauugccuccacgaaaaauacgguggauuaaacaaaagcaagccuuacuacacaggggaacaugcaaaggccauaggaaauugcccaauaugggugaaaacacccuugaagcuggccaauggaaccaaauauagaccuccugcaaaacuauuaaaggaaagggguuucuucggagcuauugcugguuucuuagaaggaggaugggaaggaaugauugcagguuggcacggauacacaucccauggggcacauggaguagcgguggcagcagaccuuaaaagcacucaagaggccauaaacaagauaacaaaaaaucucaacucuuugagugagcuggaaguaaagaaucuucaaagacuaagcggugccauggaugaacuccacaacgaaauacuagaacuagacgagaaaguggaugaucucagagcugauacaauaagcucacaaauagaacucgcaguccugcuuuccaaugaaggaauaauaaacagugaagaugagcaucucuuggcgcuugaaagaaagcugaagaaaaugcugggccccucugcuguagagauagggaauggaugcuuugaaaccaaacacaagugcaaccagaccugucucgacagaauagcugcugguaccuuugaugcaggagaauuuucucuccccaccuuugauucacugaauauuacugcugcaucuuuaaaugacgauggauuggauaaucauacuauacugcuuuacuacucaacugcugccuccaguuuggcuguaacauugaugauagcuaucuuuguuguuuauauggucuccagagacaauguuucuugcuccaucugucuauaa

SEQ ID NO: 59369 - RNA, 1758 nt, Artificial Sequence; identical to SEQ ID NO: 59002
  derived and/or modified CDS sequence (wt) from hemagglutinin__InfluenzaB__AGX19920

SEQ ID NO: 59370 - RNA, 1758 nt, Artificial Sequence; identical to SEQ ID NO: 59367
  derived and/or modified CDS sequence (wt) from hemagglutinin__InfluenzaB__AGX19931

SEQ ID NO: 59371 - RNA, 1758 nt, Artificial Sequence; identical to SEQ ID NO: 59334
  derived and/or modified CDS sequence (wt) from hemagglutinin__InfluenzaB__AGX19942

SEQ ID NO: 59372 - RNA, 1758 nt, Artificial Sequence; identical to SEQ ID NO: 59001
  derived and/or modified CDS sequence (wt) from hemagglutinin__InfluenzaB__AGX19953

SEQ ID NO: 59373 - RNA, 1758 nt, Artificial Sequence
  derived and/or modified CDS sequence (wt) from hemagglutinin__InfluenzaB__AGX19964
augaaggcaauaauuguacuacucaugguaguaacauccaaugcagaucgaaucugcacugggauaacaucgucaaacucaccacaugucgucaaaacugcuacucaaggggaggucaaugugacugguguaauaccacugacaacaacacccaccaaaucucauuuugcaaaucucaaaggaacagaaaccagggggaaacuaugcccaaaaugccucaacugcacagaucuggacguagccuugggcagaccaaaaugcacggggaaaauacccucggcaagaguuucaauacuccaugaagucagaccuguuacaucuggguguuuuccuauaaugcacgacagaacaaaaauuagacagcugccuaaccuucuccgaggauacgaacauaucagguuaucaacucauaacguuaucaaugcagaaaaugcaccaggaggacccuacaaaauuggaaccucagggucuugcccuaacauuaccaauggaaacggauuuuucgcaacaauggcuugggccgucccaaaaaacgacaaaaacaaaacagcaacaaauccauuaacaauagaaguaccauacauuuguacagaaggagaagaccaaauuaccguuuggggguuccacucugacaacgagauccaaauggcaaagcucuauggggacucaaagccccagaaguucaccucaucugccaacggagugaccacacauuacguuucacagauugguggcuucccaaaucaaacagaagacggaggacuaccacaaagugguagaauuguuguugauuacauggugcaaaaaucugggaaaacaggaacaauuaccuaucaaagggguauuuuauugccucaaaagguguggugcgcaaguggcaggagcaagguaauaaaaggauccuugccuuuaauuggagaagcagauugccuccacgaaaaauacgguggauuaaacaaaagcaagccuuacuacacaggggaacaugcaaaggccauaggaaauugcccaauaugggugaaaacacccuugaagcuggccaauggaaccaaauauagaccuccugcaaaacuauuaaaggaaagggguuucuucggagcuauugcugguuucuuagaaggaggaugggaaggaaugauugcagguuggcacggauacacaucccauggggcacauggaguagcgguggcagcagaccuuaagagcacucaagaggccauaaacaagauaacaaaaaaucucaacucuuugagugagcuggaaguaaagaaucuucaaagacuaagcggugccauggaugaacuccacaacgaaauacuagaacuagaugagaaaguggaugaucucagagcugauacaauaagcucacaaauagaacucgcaguccugcuuuccaaugaaggaauaauaaacagugaagaugaacaucucuuggcgcuugaaagaaagcugaagaaaaugcugggccccucugcuguagagauagggaauggaugcuuugaaaccaaacacaagugcaaccagaccugucucgacagaauagcugcugguaccuuugaugcaggagaauuuucucuccccaccuuugauucacugaauauuacugcugcaucuuuaaaugacgauggauuggauaaucauacuauacugcuuuacuacucaacugcugccuccaguuuggcuguaacacugaugauagcuaucuuuguuguuuauauggucuccagagacaauguuucuugcuccaucugucuauaa

SEQ ID NO: 59374 - RNA, 1758 nt, Artificial Sequence
  derived and/or modified CDS sequence (wt) from hemagglutinin__InfluenzaB__AGX19975
augaaggcaauaauuguacuacucaugguaguaacauccaaugcagaucgaaucugcacugggauaacaucgucaaacucaccacauguugucaaaacugcuacucaaggggaggucaaugugacugguguaauaccacugacaacaacacccaccaaaucucauuuugcaaaucucaaaggaacagaaaccagagggaaacuaugcccaaaaugccucaacugcacagaucuggacguggccuugggcagaccaaaaugcacggggaacauacccucggcaagaguuucaauacuccaugaagucagaccuguuacaucugggugcuuuccuauaaugcacgacagaacaaaaauuagacagcugccuaaccuucucagaggauacgaacauaucagguuaucaacucauaacguuaucaaugcagaaaaugcaccaggaggacccuacaaaauuggaaccucagggucuugcccuaacguuaccaauggaaacggauuuuuugcaacaauggcuugggcugucccaaaaaacgacaacaacaaaacagcaacaaauucauuaacaauagaaguaccauacauuuguacagagggagaagaccaaauuaccguuuggggguuccacucugauaacgaaacccaaauggcaaagcucuauggggacucaaagccccagaaguucaccucaucugccaacggagugaccacacauuacguuucacagauugguggcuucccaaaucaaacagaagacggaggacuaccacaaagugguagaauuguuguugauuacauggugcaaaaaucugggaaaacaggaacaauuaccuaucaaagagguauuuuauugccucaaaaaguguggugcgcaaguggcaggagcaagguaauaaaaggauccuugccuuuaauuggagaagcagauugccuccacgaaaaauacgguggauuaaacaaaagcaagccuuacuacacaggggaacaugcaaaggccauaggaaauugcccaauaugggugaaaacacccuugaagcuggccaauggaaccaaauauagaccuccugcaaaacuauuaaaggaaagggguuucuucggagcuauugcugguuucuuagaaggaggaugggaaggaaugauugcagguuggcacggauacacaucccauggggcacauggaguagcgguggcagcagaccuuaaaagcacucaagaggccauaaacaagauaacaaaaaaucucaacucuuugagugagcuggaaguaaagaaucuucaaagacuaagcggugccauggaugaacuccacaacgaaauacuggaacuagacgagaaaguggaugaucucagagcugauacaauaagcucacaaauagaacucgcaguccugcuuuccaaugaaggaauaauaaacagugaagaugagcaucucuuggcgcuugaaagaaagcugaagaaaaugcugggccccucugcuguagagauagggaauggaugcuuugaaaccaaacacaagugcaaccagaccugucucgacagaauagcugcugguaccuuugaugcaggagaauuuucucuccccaccuuugauucacugaauauuacugcugcaucuuuaaaugacgauggauuggauaaucauacuauacugcuuuacuacucaacugcugccuccaguuuggcuguaacauugaugauagcuaucuuuguuguuuauauggucuccagagacaauguuucuugcuccaucugucuauaa

SEQ ID NO: 59375 - RNA, 1758 nt, Artificial Sequence
  derived and/or modified CDS sequence (wt) from hemagglutinin__InfluenzaB__AGX19986
augaaggcaauaauuguacuacucaugguaguaacauccaaugcagaucgaaucugcacugggauaacaucgucaaacucaccacaugucgucaaaacugcuacucaaggggaggucaaugugacugguguaauaccacugacaacaacacccaccaaaucucauuuugcaaaucucaaaggaacagaaaccagggggaaacuaugcccaaaaugccucaacugcacagaucuggacguagccuugggcagaccaaaaugcacggggaaaauacccucggcaagaguuucaauacuccaugaagucagaccuguuacaucugggugcuuuccuauaaugcacgacagaacaaaaauuagacagcugccuaaccuucuccgaggauacgaacauaucagguuaucaacucauaacguuaucaaugcagaaaaugcaccaggaggacccuacaaaauuggaaccucagggucuugcccuaacauuaccaauggaaacggauuuuucgcaacaauggcuugggccgucccaaaaaacgacaaaaacaaaacagcaacaaauccauuaacaauagaaguaccauacauuuguacagaaggagaagaccaaauuaccguuuggggguuccacucugacaacgagacccaaauggcaaagcucuauggggacucaaagccccagaaguucaccucaucugccaacggagugaccacacauuacguuucacagauugguggcuucccaaaucaaacagaagacgggggacuaccacaaagugguagaauuguuguugauuacauggugcaaaaaucugggaaaacaggaacaauuaccuaucaaagggguauuuuauugccucaaaagguguggugcguaaguggcaggagcaagguaauaaaaggauccuugccuuuaauuggagaagcagauugccuccacgaaaaauacgguggauuaaacaaaagcaagccuuacuacacaggggaacaugcaaaggccauaggaaauugcccaauaugggugaaaacacccuugaagcuggccaauggaaccaaauauagaccuccugcaaaacuauuaaaggaaagggguuucuucggagcuauugcugguuucuuagaaggaggaugggaaggaaugauugcagguuggcacggauacacaucccauggggcacauggaguagcgguggcagcagaccuuaagagcacucaagaggccauaaacaagauaacaaaaaaucucaacucuuugagugagcuggaaguaaagaaucuucaaagacuaagcggugccauggaugaacuccacaacgaaauacuggaacuagaugagaaaguggaugaucucagagcugauacaauaagcucacaaauagaacucgcaguccugcuuuccaaugaaggaauaauaaacagugaagaugaacaucucuuggcgcuugaaagaaagcugaagaaaaugcugggccccucugcuguagagauagggaauggaugcuuugaaaccaaacacaagugcaaccagaccugucucgacagaauagcugcugguaccuuugaugcaggagaauuuucucuccccaccuuugauucacugaauauuacugcugcaucuuuaaaugacgauggauuggauaaucauacuauacugcuuuacuacucaacugcugccuccaguuuggcuguaacacugaugauagcuaucuuuguuguuuauauggucuccagagacaauguuucuugcuccaucugucuauaa

SEQ ID NO: 59376 - RNA, 1758 nt, Artificial Sequence
  derived and/or modified CDS sequence (wt) from hemagglutinin__InfluenzaB__AGX19997
augaaggcaauaauuguacuacucaugguaguaacauccaaugcagaucgaaucugcacugggauaacaucgucaaacucaccacaugucgucaaaacugcuacucaaggggaggucaaugugacugguguaauaccacugacaacaacacccaccaaaucucauuuugcaaaucucaaaggaacagaaaccagggggaaacuaugcccaaaaugccucaacugcacagaucuggacguagccuugggcagaccaaaaugcacggggaaaauacccucggcaagaguuucaauacuccaugaagucagaccuguuacaucugggugcuuuccuauaaugcacgacagaacaaaaauuagacagcugccuaaccuucuccgaggauacgaacauaucagguuaucaacucauaacguuaucaaugcagaaaaugcaccaggaggacccuacaaaauuggaaccucagggucuugcccuaacauuaccaauggaaacggauuuuucgcaacaauggcuugggccgucccaaaaaacgacaaaaacaaaacagcaacaaauccauuaacaauagaaguaccauacauuuguacagaaggagaagaccaaauuaccguuuggggguuccacucugacaacgagacccaaauggcaaagcucuauggggacucaaagccccagaaguucaccucaucugccaacggagugaccacacauuacguuucacagauugguggcuucccaaaucaaauagaagacggaggacuaccacaaagugguagaauuguuguugauuacauggugcaaaaaucugggaaaacaggaacaauuaccuaucaaagggguauuuuauugccucaaaagguguggugcgcaaguggcaggagcaagguaauaaaaggauccuugccuuuaauuggagaagcagauugccuccacgaaaaauacgguggauuaaacaaaagcaagccuuacuacacaggggaacaugcaaaggcaauaggaaauugcccaauaugggugaaaacacccuugaagcuggccaauggaaccaaauauagaccuccugcaaaacuauuaaaggaaagggguuucuucggagcuauugcugguuucuuagaaggaggaugggaaggaaugauugcagguuggcacggauacacaucccauggggcacauggaguagcgguggcagcagaccuuaagagcacucaagaggccauaaacaagauaacaaaaaaucucaacucuuugagugagcuggaaguaaagaaucuucaaagacuaagcggugccauggaugaacuccacaacgaaauacuagaacuagaugagaaaguggaugaucucagagcugauacaauaagcucacaaauagaacucgcaguccugcuuuccaaugaaggaauaauaaacagugaagaugaacaucucuuggcgcuugaaagaaagcugaagaaaaugcugggccccucugcuguagagauagggaauggaugcuuugaaaccaaacacaagugcaaccagaccugucucgacagaauagcugcugguaccuuugaugcaggagaauuuucucuccccaccuuugauucacugaauauuacugcugcaucuuuaaaugacgauggauuggauaaucauacuauacugcuuuacuacucaacugcugccuccaguuuggcuguaacacugaugauagcuaucuuuguuguuuauauggucuccagagacaauguuucuugcuccaucugucuauaa

SEQ ID NO: 59377 - RNA, 1758 nt, Artificial Sequence; identical to SEQ ID NO: 59003
  derived and/or modified CDS sequence (wt) from hemagglutinin__InfluenzaB__AGX20008

SEQ ID NO: 59378 - RNA, 1758 nt, Artificial Sequence; identical to SEQ ID NO: 59001
  derived and/or modified CDS sequence (wt) from hemagglutinin__InfluenzaB__AGX20019

SEQ ID NO: 59379 - RNA, 1758 nt, Artificial Sequence; identical to SEQ ID NO: 59325
  derived and/or modified CDS sequence (wt) from hemagglutinin__InfluenzaB__AGX20030

SEQ ID NO: 59380 - RNA, 1758 nt, Artificial Sequence
  derived and/or modified CDS sequence (wt) from hemagglutinin__InfluenzaB__AGX20041
augaaggcaauaauuguacuacucaugguaguaacauccgaugcagaucgaaucugcacugggauaacaucgucaaacucaccacaugucgucaaaacugcuacucaaggggaggucaaugugacugguguaauaccacugacaacaacacccaccaaaucucauuuugcaaaucucaaaggaaaagaaaccagggggaaacuaugcccaaaaugccucaacugcacagaucuggacguagccuugggcagaccaaaaugcacggggaaaauacccucggcaagaguuucaauacuccaugaagucagaccuguuacaucugggugcuuuccuauaaugcacgacagaacaaaaauuagacagcugccuaaccuucuccgaggauacgaacauaucagguuaucaacucauaacguuaucaaugcagaaaaugcaccaggaggacccuacaaaauuggaaccucagggucuugcccuaacauuaccaauggaaacggauuuuucgcaacaauggcuugggccgucccaaaaaacgacaaaaacaaaacagcaacaaauccauuaacaauagaaguaccauacauuuguacagaaggagaagaccaaauuaccguuuggggguuccacucugacaacgagacccaaauggcaaagcucuauggggacucaaagccccagaaguucaccucaucugccaacggagugaccacacauuacguuucacagauugguggcuucccaaaucaaacagaagacggaggacuaccacaaagugguagaauuguuguugauuacauggugcaaaaaucugggaaaacaggaacaauuaccuaucaaagggguauuuuauugccucaaaagguguggugcgcaaguggcaggagcaagguaauaaaaggauccuugccuuuaauuggagaagcagauugccuccacgaaaaauacgguggauuaaacaaaagcaagccuuacuacacaggggaacaugcaaaggcaauaggaaauugcccaauaugggugaaaacacccuugaagcuggccaauggaaccaaauauagaccuccugcaaaacuauuaaaggaaagggguuucuucggagcuauugcugguuucuuagaaggaggaugggaaggaaugauugcagguuggcacggauacacaucccauggggcacauggaguagcgguggcagcagaccuuaagagcacucaagaggccauaaacaagauaacaaaaaaucucaacucuuugagugagcuggaaguaaagaaucuucaaagacuaagcggugccauggaugaacuccacaacgaaauacuagaacuagaugagaaaguggaugaucucagagcugauacaauaagcucacaaauagaacucgcaguccugcuuuccaaugaaggaauaauaaacagugaagaugaacaucucuuggcgcuugaaagaaagcugaagaaaaugcugggccccucugcuguagagauagggaauggaugcuuugaaaccaaacacaagugcaaccagaccugucucgacagaauagcugcugguaccuuugaugcaggagaauuuucucuccccaccuuugauucacugaacauuacugcugcaucuuuaaaugacgauggauuggauaaucauacuauacugcuuuacuacucaacugcugccuccaguuuggcuguaacacugaugauagcuaucuuuguuguuuauauggucuccagagacaauguuucuugcuccaucugucuauaa

SEQ ID NO: 59381 - RNA, 1758 nt, Artificial Sequence
  derived and/or modified CDS sequence (wt) from hemagglutinin__InfluenzaB__AGX20052
augaaggcaauaauuguacuacucaugguaguaacauccaaugcagaucgaaucugcacugggauaacaucgucaaacucaccacaugucgucaaaacugcuacucaaggggaggucaaugugacugguguaauaccacugacaacaacacccaccaaaucucauuuugcaaaucucaaaggaacagaaaccagggggaaacuaugcccaaaaugccucaacugcacagaucuggacguagccuugggcagaccaaaaugcacggggaaaauacccucggcaagaguuucaauacuccaugaagucagaccuguuacaucugggugcuuuccuauaaugcacgacagaacaaaaauuagacagcugccuaaccuucuccgaggauacgaacauaucagguuaucaacucauaacguuaucaaugcagaaaaugcaccaggaggacccuacaaaauuggaaccucagggucuugcccuaacauuaccaauggaaacggauuuuucgcaacaauggcuugggccgucccaaaaaacgacaaaaacaaaacagcaacaaauccauuaacaauagaaguaccauacauuuguacagaaggagaagaccaaauuaccguuuggggguuccacucugacaacgagacccaaauggcaaagcucuauggggacucaaagccccagaaguucaccucaucugccaacggagugaccacacauuacguuucacagauugguggcuucccaaaucaaacagaagacgggggacuaccacaaagugguagaauuguuguugauuacauggugcaaaaaucugggaaaacaggaacaauuaccuaucaaagggguauuuuauugccucaaaagguguggugcgcaaguggcaggagcaagguaauaaaaggauccuugccuuuaauuggagaagcagauugccuccacgaaaaauacgguggauuaaacaaaagcaagccuuacuacacaggggaacaugcaaaggccauaggaaauugcccaauaugggugaaaacacccuugaagcuggccaauggaaccaaauauagaccuccugcaaaacuauuaaaggaaagggguuucuucggagcuauugcugguuucuuagaaggaggaugggaaggaaugauugcagguuggcacggauacacaucccauggggcacauggaguagcgguggcagcagaccuuaagagcacucaagaggccauaaacaagauaacaaaaaaucucaacucuuugagugagcuggaaguaaagaaucuucaaagacuaagcggugccauggaugaacuccacaacgaaauacuagaacuagaugagaaaguggaugaucucagagcugauacaauaagcucacaaauagaacucgcaguccugcuuuccaaugaaggaauaauaaacagugaagaugaacaucuauuggcgcuugaaagaaagcugaagaaaaugcugggccccucugcuguagagauagggaauggaugcuuugaaaccaaacacaagugcaaccagaccugucucgacagaauagcugcugguaccuuugaugcaggagaauuuucucuccccaccuuugauucacugaauauuacugcugcaucuuuaaaugacgauggauuggauaaucauacuauacugcuuuacuacucaacugcugccuccaguuuggcuguaacacugaugauagcuaucuuuguuguuuauauggucuccagagacaauguuucuugcuccaucugucuauaa

SEQ ID NO: 59382 - RNA, 1758 nt, Artificial Sequence; identical to SEQ ID NO: 59381
  derived and/or modified CDS sequence (wt) from hemagglutinin__InfluenzaB__AGX20063

SEQ ID NO: 59383 - RNA, 1758 nt, Artificial Sequence
  derived and/or modified CDS sequence (wt) from hemagglutinin__InfluenzaB__AGX20074
augaaggcaauaauugcacuacucaugguaguaacauccaaugcagaucgaaucugcacugggauaacaucgucaaacucaccacaugucgucaaaacugcuacucaaggggaggucaaugugacugguguaauaccacugacaacaacacccaccaaaucucauuuugcaaaucucaaaggaacagaaaccagggggaaacuaugcccaaaaugccucaacugcacagaucuggacguagccuugggcagaccaaaaugcacggggaaaauacccucggcaagaguuucaauacuccaugaagucagaccuguuacaucugggugcuuuccuauaaugcacgacagaacaaaaauuagacagcugccuaaccuucuccgaggauacgaacauaucagguuaucaacucauaacguuaucaaugcagaaaaugcaccaggaggacccuacaaaauuggaaccucagggucuugcccuaacauuaccaauggaaacggauuuuucgcaacaauggcuugggccgucccaaaaaacgacaaaaacaaaacagcaacaaauccauuaacaauagaaguaccauacauuuguacagaaggagaagaccaaauuaccguuuggggguuccacucugacaacgagacccaaauggcaaagcucuauggggacucaaagccccagaaguucaccucaucugccaacggagugaccacacauuacguuucacagauugguggcuucccaaaucaaacagaagacgggggacuaccacaaagugguagaauuguuguugauuacauggugcaaaaaucugggaaaacaggaacaauuaccuaucaaagggguauuuuauugccucaaaagguguggugcgcaaguggcaggaguaagguaauaaaaggauccuugccuuuaauuggagaagcagauugccuccacgaaaaauacgguggauuaaacaaaagcaagccuuacuacacaggggaacaugcaaaggccauaggaaauugcccaauaugggugaaaacacccuugaagcuggccaauggaaccaaauauagaccuccugcaaaacuauuaaaggaaagggguuucuucggagcuauugcugguuucuuagaaggaggaugggaaggaaugauugcagguuggcacggauacacaucccauggggcacauggaguagcgguggcagcagaccuuaagagcacucaagaggccauaaacaagauaacaaaaaaucucaacucuuugagugagcuggaaguaaagaaucuucaaagacuaagcggugccauggaugaacuccacaacgaaauacuagaacuagaugagaaaguggaugaucucagagcugauacaauaagcucacaaauagaacucgcaguccugcuuuccaaugaaggaauaauaaacagugaagaugaacaucucuuggcgcuugaaagaaagcugaagaaaaugcugggccccucugcuguagagauagggaauggaugcuuugaaaccaaacacaagugcaaccagaccugucucgacagaauagcugcugguaccuuugaugcaggagaauuuucucuccccaccuuugauucacugaauauuacugcugcaucuuuaaaugacgauggauuggauaaucauacuauacugcuuuacuacucaacugcugccuccaguuuggcuguaacacugaugauagcuaucuuuguuguuuauauggucuccagagacaauguuucuugcuccaucugucuauaa

SEQ ID NO: 59384 - RNA, 1758 nt, Artificial Sequence
  derived and/or modified CDS sequence (wt) from hemagglutinin__InfluenzaB__AGX20085
augaaggcaauaauuguacuacucaugguaguaacauccaaugcagaucgaaucugcacugggauaacaucgucaaacucaccacaugucgucaaaacugcuacucaaggggaggucaaugugacugguguaauaccacuaacaacaacacccaccaaaucucauuuugcaaaucucaaaggaacagaaaccagggggaaacuaugcccaaaaugccucaacugcacagaucuggacguagccuugggcagaccaaaaugcacggggaaaauacccucggcaagaguuucaauacuccaugaagucagaccuguuacaucugggugcuuuccuauaaugcacgacagaacaaaaauuagacagcugccuaaccuucuccgaggauacgaacauaucagguuaucaacucauaacguuaucaaugcagaaaaugcaccaggaggacccuacaaaauuggaaccucagggucuugcccuaacauuaccaauggaaacggauuuuucgcaacaauggcuugggccgucccaaaaaacgacaaaaacaaaacagcaacaaauccauuaacaauagaaguaccauacauuuguacagaaggagaagaccaaauuaccauuuggggguuccacucugacaacgagacccaaauggcaaagcucuauggggacucaaagccccagaaguucaccucaucugccaacggagugaccacacauuacguuucacagauugguggcuucccaaaucaaacagaagacggaggacuaccacaaagugguagaauuguuguugauuacauggugcaaaaaucugggaaaacaggaacaauuaccuaucaaagggguauuuuauugccucaaaagguguggugcgcaaguggcaggagcaagguaauaaaaggauccuugccuuuaauuggagaagcagauugccuccacgaaaaauacgguggauuaaacaaaagcaagccuuacuacacaggggaacaugcaaaggcaauaggaaauugcccaauaugggugaaaacacccuugaagcuggccaauggaaccaaauauagaccuccugcaaaacuauuaaaggaaagggguuucuucggagcuauugcugguuucuuagaaggaggaugggaaggaaugauugcagguuggcacggauacacaucccauggggcacauggaguagcgguggcagcagaccuuaagagcacucaagaggccauaaacaagauaacaaaaaaucucaacucuuugagugagcuggaaguaaagaaucuucaaagacuaagcggugccauggaugaacuccacaacgaaauacuagaacuagaugagaaaguggaugaucucagagcugauacaauaagcucacaaauagaacucgcaguccugcuuuccaaugaaggaauaauaaacagugaagaugaacaucucuuggcgcuugaaagaaagcugaagaaaaugcugggccccucugcuguagagauagggaauggaugcuuugaaaccaaacacaagugcaaccagaccugucucgacagaauagcugcugguaccuuugaugcaggagaauuuucucuccccaccuuugauucacugaauauuacugcugcaucuuuaaaugacgauggauuggauaaucauacuauacugcuuuacuacucaacugcugccuccaguuuggcuguaacacugaugauagcuaucuuuguuguuuauauggucuccagagacaauguuucuugcuccaucugucuauaa

SEQ ID NO: 59385 - RNA, 1758 nt, Artificial Sequence
  derived and/or modified CDS sequence (wt) from hemagglutinin__InfluenzaB__AGX20096
augaaggcaauaauuguacuacucaugguaguaacauccaaugcagaccgaaucugcacugggguaacaucgucaaacucaccacauguugucaaaacugcuacucaaggggaggucaaugugacugguguaauaccacugacaacaacacccaccaaaucucauuuugcaaaucucaaaggaacagaaaccagaggaaaacuaugcccaaaaugccuaaacugcacagaucuggacguggccuugggcagaccaaaaugcacgggaaacauacccucagcaagaguuucaauacuccaugaagucagaccuguuacaucugggugcuuuccuauaaugcacgacagaacaaaaauuagacaacugccuaaccuucucagaggauacgaacauaucagguuaucaacucauaacguuaucaaugcagaaaaugcaccaggaggacccuacaaaauuggaaccucagggucuugcccuaacguuaccaauggaaacggauuuuucgcaacaauggcuugggccgucccaaaaaacgacaacaacaaaacagcaacaaauucauuaacaauagaaguaccauacauuuguacagaaggagaagaccaaauuaccguuuggggguuccacucugauaacgaaacccaaauggcaaagcucuauggggacucaaagccccagaaguucaccucaucugccaacggagugaccacacauuacguuucacagauugguggcuucccaaaccaaacagaagacggagggcuaccacaaagugguagaauuguuguugauuacauggugcaaaaaucugggaaaacaggaacaaucaccuaucaaagagguauuuuauugccucaaaaaguguggugcgcaaguggcaggagcaagguaauaaaaggauccuugccuuuaauuggagaagcagauugccuccacgaaaaauacgguggauuaaacaaaagcaagccuuacuacacaggggaacaugcaaaggccauaggaaauugcccaauaugggugaaaacacccuugaagcuggccaauggaaccaaauauagaccuccugcaaaacuauuaaaggaaagggguuucuucggagcuauugcugguuucuuagaaggaggaugggaaggaaugauugcagguuggcacggauacacaucucauggggcacauggaguagcgguggcagcagaccuuaagagcacucaagaggccauaaacaagauaacaaaaaaucucaacucuuugagugagcuggaaguaaagaaucuucaaagacuaagcggugccauggaugaacuccacaacgaaauacuagaacuagacgagaaaguggaugaucucagagcugauacaauaagcucacaaauagaacucgcaguucugcuuuccaaugaaggaauaauaaacagugaagaugagcaucucuuggcgcuugaaagaaagcugaagaaaaugcugggccccucugcuguagagauagggaauggaugcuuugaaaccaaacacaagugcaaccagaccugucucgacagaauagcugcugguaccuuugaugcaggagaauuuucucuccccacuuuugauucacugaauauuacugcugcaucuuuaaaugacgauggauuggauaaucauacuauacugcuuuacuacucaacugcugccuccaguuuggcuguaacauugaugauagcuaucuuuguuguuuauauggucuccagagacaauguuucuugcuccaucugucuauaa

SEQ ID NO: 59386 - RNA, 1758 nt, Artificial Sequence; identical to SEQ ID NO: 59015
  derived and/or modified CDS sequence (wt) from hemagglutinin__InfluenzaB__AGX20107

SEQ ID NO: 59387 - RNA, 1758 nt, Artificial Sequence
  derived and/or modified CDS sequence (wt) from hemagglutinin__InfluenzaB__AGX20118
augaaggcaauaauuguacuacucaugguaguaacauccaaugcagaucgaaucugcacugggauaacaucgucaaacucaccacaugucgucaaaacugcuacucaaggggaggucaaugugacugguguaauaccacugacaacaacacccaccaaaucucauuuugcaaaucucaaaggaacagaaaccagagggaaacuaugcccaaaaugccccaacugcacagaucuggacguagccuugggcagaccaaaaugcacggggaaaauacccucggcaagaguuucaauacuccaugaagucagaccuguuacaucugggugcuuuccuauaaugcacgacagaacaaaaauuagacagcugccuaaccuucucagaggauacgaacauaucagauuaucaacucauaacguuaucaaugcagaaaaugcaccaggaggacccuacaaaauuggaaccucagggucuugcccuaacguuaccaauggaaacggauuuuuugcaacaauggcuugggccgucccaaaaaacgacaaaaacaaaacagcaacaaauccauuaacaauagaaguaccauacauuuguacagaaggagaagaccaaauuaccguuuggggguuccacucugauaacgagacccaaauggcaaagcucuauggggacucaaagccccagaaguucaccucaucugccaacggagugaccacacauuacguuucacagauugguggcuucccaaaucaaacagaagacggaggacuaccacaaagugguagaauuguuguugauuacauggugcaaaaaucugggaaaacaggaacaauuaccuaucaaagagguauuuuauugccucaaaagguguggugcgcaaguggcaggagcaagguaauaaaaggauccuugccuuuaauuggagaagcagauugccuccacgaaaaauacgguggauuaaacaaaagcaagccuuacuacacaggggaacaugcaaaggccauaggaaauugcccaauaugggugaagacacccuugaagcuggccaauggaaccaaauauagaccuccugcaaaacuauuaaaggaaagagguuucuucggagcuauugcugguuucuuagaaggaggaugggaaggaaugauugcagguuggcacggauacacgucccauggggcacauggaguagcgguggcagcagaccuuaagagcacucaagaggccauaaacaagauaacaaaaaaucucaacucuuugagugagcuggaaguaaaaaaucuucaaagacuaagcggugccauggaugaacuccacaacgaaauacuagaacuagacgaaaaaguggaugaucucagagcugauacaauaagcucacaaauagaacucgcaguccugcuuuccaaugaaggaauaauaaacagugaagaugaacaucucuuggcgcuugaaagaaagcugaagaaaaugcugggcccuucugcuguagagauagggaaugggugcuuugaaaccaaacacaagugcaaccagaccugucucgacagaauagcugcugguaccuuugaugcaggagaauuuucucuccccaccuuugauucacugaauauuacugcugcaucuuuaaaugacgauggauuggauaaucauaccauacugcuuuacuacucaacugcugccuccaguuuggcuguaacacugaugauagcuaucuuuguuguuuauauggucuccagagacaauguuucuugcuccaucugucuauaa

SEQ ID NO: 59388 - RNA, 1758 nt, Artificial Sequence
  derived and/or modified CDS sequence (wt) from hemagglutinin__InfluenzaB__AGX20129
augaaggcaauaauuguacuacucaugguaguaacauccaaugcagaucgaaucugcacugggauaacaucgucaaacucaccacaugucgucaaaacugcuacucaaggggaggucaaugugacugguguaauaccacugacaacaacacccaccaaaucucauuuugcaaaucucaaaggaacagaaaccagaggaaaacuaugcccaaaaugccccaacugcacagaucuggacguagccuugggcagaccaaaaugcacggggaaaauacccucggcaagaguuucaauacuccaugaagucagaccuguuacaucugggugcuuuccuauaaugcacgacagaacaaaaauuagacagcugccuaaccuucuccgaggauacgaacauaucagauuaucaacucauaacguuaucaaugcagaaaaugcaccaggaggacccuacaaaauuggaaccucagggucuugcccuaacguuaccaauggaaacggauuuuucgcaacaauggcuugggccgucccaaaaaacgacaaaaacaaaacagcaacaaauccauuaacaauagaaguaccauacauuuguacagaaggagaagaccaaauuaccguuuggggguuccacucugauaacgagacccaaauggcaaagcucuauggggacucaaagccccagaaguucaccucaucugccaacggagugaccacacauuacguuucacagauugguggcuucccaaaucaaacagaagacggaggacuaccacaaagugguagaauuguuguugauuacauggugcaaaaaucugggaaaacaggaacaauuaccuaucaaagagguauuuuauugccucaaaagguguggugcgcaaguggcaggagcaagguaauaaaaggauccuugccuuuaauuggagaagcagauugccuccacgaaaaauacgguggauuaaacaaaagcaagccuuacuacacaggggaacaugcaaaggccauaggaaauugcccaauaugggugaagacacccuugaagcuggccaauggaaccaaauauagaccuccugcaaaacuauuaaaggaaagggguuucuucggagcuauugcugguuucuuagaaggaggaugggaaggaaugauugcagguuggcacggauacacgucccauggggcacauggaguagcgguggcagcagaccuuaagagcacucaagaggccauaaacaagauaacaaaaaaucucaacucuuugagugagcuggaaguaaagaaucuucaaagacuaaguggugccauggaugaacuccacaacgaaauacuagaacuagacgagaaaguggaugaucucagagcugauacaauaagcucacaaauagaacucgcaguccugcuuuccaaugaaggaauaauaaacagugaagaugaacaucucuuggcacuugaaagaaagcugaagaaaaugcugggcccuucugcuguagagauagggaauggaugcuuugaaaccaaacacaagugcaaccagaccugucucgacagaauagcugcugguaccuuugaugcaggagaauuuucucuccccaccuuugauucacugaauauuacugcugcaucuuuaaaugacgauggauuggauaaucauaccauacugcuuuacuacucaacugcugccuccaguuuggcuguaacacugaugauagcuaucuuuguuguuuauauggucuccagagacaauguuucuugcuccaucugucuauaa

SEQ ID NO: 59389 - RNA, 1758 nt, Artificial Sequence; identical to SEQ ID NO: 58654
  derived and/or modified CDS sequence (wt) from hemagglutinin__InfluenzaB__AGX20140

SEQ ID NO: 59390 - RNA, 1758 nt, Artificial Sequence
  derived and/or modified CDS sequence (wt) from hemagglutinin__InfluenzaB__AGX20151
augaaggcaauaauuguacuacucaugguaguaacauccaaugcagaucgaaucugcacugggauaacaucgucaaacucaccacaugucgucaaaacugcuacucaaggggaggucaaugugacugguguaauaccacugacaacaacacccaccaaaucucauuuugcaaaucucaaaggaacagaaaccagagggaaacuaugcccaaaaugccccaacugcacagaucuggacguagccuugggcagaccaaaaugcacggggaaaauacccucggcaagaguuucaauacuccaugaagucagaccuguuacaucuggaugcuuuccuauaaugcacgacagaacaaaaauuagacagcugccuaaccuucuccgaggauacgaacauaucagauuaucaacucauaacguuaucaaugcagaaaaugcaccaggaggacccuacaaaauuggaaccucagggucuugcccuaacguuaccaauggaaacggauuuuucgcaacaauggcuugggccgucccaaaaaacgacaaaaacaaaacagcaacaaauccauuaacaauagaaguaccauacauuuguacagaaggagaagaccaaauuaccguuuggggguuccacucugauaacgagacccaaauggcaaagcucuauggggacucaaagccccagaaguucaccucaucugccaacggagugaccacacauuacguuucacagauugguggcuucccaaaucaaacagaagacggaggacuaccacaaagugguagaauuguuguugauuacauggugcaaaaaucugggaaaacaggaacaauuaccuaucaaagagguauuuuauugccucaaaagguguggugcgcaaguggcaggagcaagguaauaaaaggauccuugccuuuaauuggagaagcagauugccuccacgaaaaauacgguggauuaaacaaaagcaagccuuacuacacaggggaacaugcaaaggccauaggaaauugcccaauaugggugaagacacccuugaagcuggccaauggaaccaaauauagaccuccugcaaaacuauuaaaggaaagggguuucuucggagcuauugcugguuucuuagaaggaggaugggaaggaaugauugcagguuggcacggauacacgucccauggggcacauggaguagcgguggcagcagaccuuaagagcacucaagaggccauaaacaagauaacaaaaaaucucaacucuuugagugagcuggaaguaaagaaucuucaaagacuaagcggugccauggaugaacuccacaacgaaauacuagaacuagacgagaaaguggaugaucucagagcugauacaauaagcucacaaauagaacucgcaguccugcuuuccaaugaaggaauaauaaacagugaagaugaacaucucuuggcgcuugaaagaaagcugaagaaaaugcugggcccuucugcuguagagauagggaauggaugcuuugaaaccaaacacaagugcaaccagaccugucucgacagaauagcugcugguaccuuugaugcaggagaauuuucucuccccaccuuugauucacugaauauuacugcugcaucuuuaaaugacgauggauuggauaaucauaccauacugcuuuacuacucaacugcugccuccaguuuggcuguaacacugaugauagcuaucuuuguuguuuauauggucuccagagacaauguuucuugcuccaucugucuauaa

SEQ ID NO: 59391 - RNA, 1758 nt, Artificial Sequence; identical to SEQ ID NO: 58654
  derived and/or modified CDS sequence (wt) from hemagglutinin__InfluenzaB__AGX20162

SEQ ID NO: 59392 - RNA, 1758 nt, Artificial Sequence
  derived and/or modified CDS sequence (wt) from hemagglutinin__InfluenzaB__AGX20173
augaaggcaauaauuguacuacucaugguaguaacauccaaugcagaucgaaucugcacugggauaacaucgucaaacucaccacaugucgucaaaacugcuacucaaggggaggucaaugugacugguguaauaccacugacaacaacacccaccaaaucucauuuugcaaaucucaaaggaacagaaaccagagggaaacuaugcccaaaaugccccaacugcacagaucuggacguagccuugggcagaccaaaaugcacggggaaaauacccucggcaagaguuucaauacuccaugaagucagaccuguuacaucugggugcuuuccuauaaugcacgacagaacaaaaauuagacagcugccuaaccuucuccgaggauacgaacauaucagauuaucaacucauaacguuaucaaugcagaaaaugcaccaggaggacccuacaaaauuggaaccucagggucuugcccuaacguuaccaauggaaacggauuuuucgcaacaauggcuugggccgucccaaaaaacgacaaaaacaaaacagcaacaaauccauuaacaauagaaguaccauacauuuguacagaaggagaagaccaaauuaccguuuggggguuccacucugauaacgagacccaaauggcaaagcucuauggggacucaaagccccagaaguucaccucaucugccaacggagugaccacacauuacguuucacagauugguggcuucccaaaucaaacagaagacggaggacuaccacaaagugguagaauuguuguugauuacauggugcaaaaaucugggaaaacaggaacaauuaccuaucaaagagguauuuuauugccucaaaagguguggugcgcaaguggcaggagcaagguaauaaaaggauccuugccuuuaauuggagaagcagauugccuccacgaaaaauacgguggauuaaacaaaagcaagccuuacuacacaggggaacaugcaaaggccauaggaaauugcccaauaugggugaagacacccuugaagcuggccaauggaaccaaauauagaccuccugcaaaacuauuaaaggaaagggguuucuucggagcuauugcugguuucuuagaaggaggaugggaaggaaugauugcagguuggcacggauacacgucccauggggcacauggaguagcgguggcagcagaccuuaagagcacucaagaggccauaaacaagauaacaaaaaaucucaacucuuugagugagcuggaaguaaagaaucuucaaagacuaaguggugccauggaugaacuucacaacgaaauacuagaacuagacgagaaaguggaugaucucagagcugauacaauaagcucacaaauagaacucgcaguccugcuuuccaaugaaggaauaauaaacagugaagaugaacaucucuuggcacuugaaagaaagcugaagaaaaugcugggcccuucugcuguagagauagggaauggaugcuuugaaaccaaacacaagugcaaccagaccugucucgacagaauagcugcugguaccuuugaugcaggagaauuuucucuccccaccuuugauucacugaauauuacugcugcaucuuuaaaugacgauggauuggauaaucauaccauacugcuuuacuacucaacugcugccuccaguuuggcuguaacacugaugauagcuaucuuuguuguuuauauggucuccagagacaauguuucuugcuccaucugucuauaa

SEQ ID NO: 59393 - RNA, 1758 nt, Artificial Sequence; identical to SEQ ID NO: 58652
  derived and/or modified CDS sequence (wt) from hemagglutinin__InfluenzaB__AGX20184

SEQ ID NO: 59394 - RNA, 1758 nt, Artificial Sequence
  derived and/or modified CDS sequence (wt) from hemagglutinin__InfluenzaB__AGX20195
augaaggcaauaauuguacuacucaugguaguaacauccaaugcagaucgaaucugcacugggauaacaucgucaaacucaccacaugucgucaaaacugcuacucaaggggaggucaaugugacugguguaauaccacugacaacaacacccaccaaaucucauuuugcaaaucucaaaggaacagaaaccagagggaaacuaugcccaaaaugccccaacugcacagaucuggacguagccuugggcagaccaaaaugcacggggaaaauacccucggcaagaguuucaauacuccaugaagucagaccuguuacaucugggugcuuuccuauaaugcacgacagaacaaaaauuagacagcugccuaaccuucuccgaggauacgaacauaucagauuaucaacucauaacguuaucaaugcagaaaaugcaccaggaggacccuacaaaauuggaaccucagggucuugcccuaacguuaccaauggaaacggauuuuucgcaacaauggcuugggccgucccaaaaaacgacaaaaacaaaacagcaacaaauccauuaacaauagaaguaccauacauuuguacagaaggagaagaccaaauuaccguuuggggguuccacucugauaacgagacccaaauggcaaagcucuauggggacucaaagccccagaaguucaccucaucugccaacggagugaccacgcauuacguuucacagauugguggcuucccaaaucaaacagaagacggaggacuaccacaaagugguagaauuguuguugauuacauggugcaaaaaucugggaaaacaggaacaauuaccuaucaaagagguauuuuauugccucaaaagguguggugcgcaaguggcaggagcaagguaauaaaaggauccuugccuuuaauuggagaagcagauugccuccacgaaaaauacgguggauuaaacaaaagcaagccuuacuacacaggggaacaugcaaaggccauaggaaauugcccaauaugggugaagacacccuugaagcuggccaauggaaccaaauauagaccuccugcaaaacuauuaaaggaaagggguuucuucggagcuauugcugguuucuuagaaggaggaugggaaggaaugauugcagguuggcacggauacacgucccauggggcacauggaguagcgguggcagcagaccuuaagagcacucaagaggccauaaacaagauaacaaaaaaucucaacucuuugagugagcuggaaguaaagaaucuucaaagacuaagcggugccauggaugaacuccacaacgaaauacuagaacuagacgagaaaguggaugaucucagagcugauacaauaagcucacaaauagaacucgcaguccugcuuuccaaugaaggaauaauaaacagugaagaugaacaucucuuggcacuugaaagaaagcugaagaaaaugcugggcccuucugcuguagagauagggaauggaugcuuugaaaccaaacacaagugcaaucagaccugucucgacagaauagcugcugguaccuuugaugcaggagaauuuucucuccccaccuuugauucacugaauauuacugcugcaucuuuaaaugacgauggauuggauaaucauaccauacugcuuuacuacucaacugcugccuccaguuuggcuguaacacugaugauagcuaucuuuguuguuuauauggucuccagagacaauguuucuugcuccaucugucuauaa

SEQ ID NO: 59395 - RNA, 1758 nt, Artificial Sequence
  derived and/or modified CDS sequence (wt) from hemagglutinin__InfluenzaB__AGX20206
augaaggcaauaauuguacuacucaugguaguaacauccaaugcagaucgaaucugcacugggauaacaucgucaaacucaccacaugucgucaaaacugcuacucaaggggaggucaaugugacugguguaauaccacugacaacaacacccaccaaaucucauuuugcaaaucucaaaggaacagaaaccagagggaaacuaugcccaaaaugccccaacugcacagaucuggacguagccuugggcagaccaaaaugcacggggaaaauacccucggcaagaguuucaauacuccaugaagucagaccuguuacaucugggugcuuuccuauaaugcacgacagaacaaaaauuagacagcugccuaaccuucuccgaggauacgaacauaucagauuaucaacucauaacguuaucaaugcagaaaaugcaccaggaggacccuacaaaauuggaaccucagggucuugcccuaacguuaccaauggaaacggauuuuucgcaacaauggcuugggccgucccaaaaaacgacaaaaacaaaacagcaacaaauccauuaacaauagaaguaccauacauuuguacagaaggagaagaccaaauuaccguuuggggguuccacucugauaacgagacccaaauggcaaagcucuauggggacucaaagccccagaaguucaccucaucugccaacggagugaccacacauuacguuucacagauugguggcuucccaaaucaaacagaagacggaggacuaccacaaagugguagaauuguuguugauuacauggugcaaaaaucugggaaaacaggaacaauuaccuaucaaagagguauuuuauugccucaaaagguguggugcgcaaguggcaggagcaagguaauaaaaggauccuugccuuuaauuggagaagcagauugccuccacgaaaaauacgguggauuaaacaaaagcaagccuuacuacacaggggaacaugcaaaggccauaggaaauugcccaauaugggugaagacacccuugaagcuggccaauggaaccaaauauagaccuccugcaaaacuauuaaaggaaagggguuucuucggagcuauugcugguuucuuagaaggaggaugggaaggaaugauugcagguuggcacggauacacgucccauggggcacauggaguagcgguggcagcagaccuuaagagcacucaagaggccauaaacaagauaacaaaaaaucucaacucuuugagugagcuggaaguaaagaaucuucaaagacuaaguggugccauggaugaacuccacaacgaaauacuggaacuagacgagaaaguggaugaucucagagcugauacaauaagcucacaaauagaacucgcaguccugcuuuccaaugaaggaauaauaaacagugaagaugaacaucucuuggcacuugaaagaaagcugaagaaaaugcugggcccuucugcuguagagauagggaauggaugcuuugaaaccaaacacaagugcaaccagaccugucucgacagaauagcugcugguaccuuugaugcaggagaauuuucucuccccaccuuugauucacugaauauuacugcugcaucuuuaaaugacgauggauuggauaaucauaccauacugcuuuacuacucaacugcugccuccaguuuggcuguaacacugaugauagcuaucuuuguuguuuauauggucuccagagacaauguuucuugcuccaucugucuauaa

SEQ ID NO: 59396 - RNA, 1758 nt, Artificial Sequence; identical to SEQ ID NO: 58654
  derived and/or modified CDS sequence (wt) from hemagglutinin__InfluenzaB__AGX20217

SEQ ID NO: 59397 - RNA, 1758 nt, Artificial Sequence
  derived and/or modified CDS sequence (wt) from hemagglutinin__InfluenzaB__AGX20228
augaaggcaauaauuguacuacuaaugguaguaacauccaaugcagaucgaaucugcacugggauaacaucgucaaacucaccacaugucgucaaaacugcuacucaaggggaggucaaugugacugguguaauaccacugacaacaacacccaccaaaucucauuuugcaaaucucaaaggaacagaaaccagggggaaacuaugcccaaaaugccucaacugcacagaucuggauguagccuugggcagaccaaaaugcacggggaaaauacccucggcaagaguuucaauacuccaugaagucagaccuguuacaucugggugcuuuccuauaaugcacgacagaacaaaaauuagacagcugccuaaccuucuccgaggauacgaacauaucagguuaucaacucauaacguuaucaaugcagaaaaugcaccaggaggacccuacaaaauuggaaccucagggucuugcccuaacguuaccaauggaaacggauuuuucgcaacaauggcuugggccgucccaaaaaacgacaaaaacaaaacagcaacaaauccauuaacaauagaaguaccauacauuuguacagaaggagaagaccaaauuaccguuuggggguuccacucugacaacgagacccaaauggcaaagcucuauggggacucaaaaccccagaaguucaccucaucugccaacggagugaccacacauuacguuucacagauuggugguuucccaaaucaaacagaagacggaggacuaccacaaagugguagaauuguuguugauuacauggugcaaaaaucugggaaaacaggaacaauuaccuaucaaagagguauuuuauugccucaaaagguguggugcgcaaguggcaggagcaagguaauaaaaggauccuugccuuuaauuggagaagcagauugccuccacgaaaaauacgguggauuaaacaaaagcaagccuuauuacacaggggaacaugcaaaggccauaggaaauugcccaauaugggugaaaacacccuugaagcuggccaauggaaccaaauauagaccuccugcaaaacuauuaaaggaaagggguuucuucggagcuauugcugguuucuuagaaggaggaugggaaggaaugauugcagguuggcacggauacacaucccauggggcacauggaguagcaguggcagcagaccuuaagagcacucaagaggccauaaacaagauaacaaaaaaucucaacucuuugagugagcuggaaguaaagaaucuucaaagacuaagcggugccauggaugaacuccacaacgaaauacuagaacuagaugagaaaguggaugaucucagagcugauacaauaagcucacaaauagaacuugcaguccugcuuuccaaugaaggaauaauaaacagugaagaugaacaucucuuggcgcucgaaagaaagcugaagaaaaugcugggccccucugcuguagagauagggaauggaugcuuugaaaccaaacacaagugcaaccagaccugucucgacagaauagcugcugguaccuuugaugcaggagaauuuucucuccccaccuuugauucacugaauauuacugcugcaucuuuaaaugacgauggauuggauaaucauacuauacugcuuuacuacucaacugcugccuccaguuuggcuguaacacugaugauagcuaucuuuguuguuuauauggucuccagagacaauguuucuugcuccaucugucuauaa

SEQ ID NO: 59398 - RNA, 1758 nt, Artificial Sequence
  derived and/or modified CDS sequence (wt) from hemagglutinin__InfluenzaB__AGX20239
augaaggcaauaauuguacuacucaugguaguaacauccaaugcagaucgaaucugcacugggauaacaucgucaaacucaccacaugucgucaaaacugcuacucaaggggaggucaaugugacugguguaauaccacugacaacaacacccaccaaaucucauuuugcaaaucucaaaggaacagaaaccagagggaaacuaugcccaaaaugccccaacugcacagaucuggacguagccuugggcagaccaaaaugcacggggaaaauacccucggcaagaguuucaauacuccaugaagucagaccuguuacaucugggugcuuuccuauaaugcacgacagaacaaaaauuagacagcugccuaaccuucuccgaggauacgaacauaucagauuaucaacucauaacguuaucaaugcagaaaaugcaccaggaggacccuacaaaauuggaaccucagggucuugcccuaacguuaccaauggaaacggauuuuucgcaacaauggcuugggccgucccaaaaaacgacaaaaacaaaacagcaacaaauccauuaacaauagaaguaccauacauuuguacagaaggagaagaccaaauuaucguuuggggguuccacucugauaacgagacccaaauggcaaagcucuauggggacucaaagccccagaaguucaccucaucugccaacggagugaccacacauuacguuucacagauugguggcuucccaaaucaaacagaagacggaggacuaccacaaagugguagaauuguuguugauuacauggugcaaaaaucugggaaaacaggaacaauuaccuaucaaagagguauuuuauugccucaaaagguguggugcgcaaguggcaggagcaagguaauaaaaggauccuugccuuuaauuggagaagcagauugccuccacgaaaaauacgguggauuaaacaaaagcaagccuuacuacacaggggaacaugcaaaggccauaggaaauugcccaauaugggugaagacacccuugaagcuggccaauggaaccaaauauagaccuccugcaaaacuauuaaaggaaagggguuucuucggagcuauugcugguuucuuagaaggaggaugggaaggaaugauugcagguuggcacggauacacgucccauggggcacauggaguagcgguggcagcagaccuuaagagcacucaagaggccauaaacaagauaacaaaaaaucucaacucuuugagugagcuggaaguaaagaaucuucaaagacuaaguggugccauggaugaacuccacaacgaaauacuagaacuagacgagaaaguggaugaucucagagcugauacaauaagcucacaaauagaacucgcaguccugcuuuccaaugaaggaauaauaaacagugaagaugaacaucucuuggcacuugaaagaaagcugaagaaaaugcugggcccuucugcuguagagauagggaauggaugcuuugaaaccaaacacaagugcaaccagaccugucucgacagaauagcugcugguaccuuugaugcaggagaauuuucucuccccaccuuugauucacugaauauuacugcugcaucuuuaaaugacgauggauuggauaaucauaccauacugcuuuacuacucaacugcugccuccaguuuggcuguaacacugaugauagcuaucuuuguuguuuauauggucuccagagacaauguuucuugcuccaucugucuauaa

SEQ ID NO: 59399 - RNA, 1758 nt, Artificial Sequence; identical to SEQ ID NO: 59390
  derived and/or modified CDS sequence (wt) from hemagglutinin__InfluenzaB__AGX20250

SEQ ID NO: 59400 - RNA, 1758 nt, Artificial Sequence; identical to SEQ ID NO: 58651
  derived and/or modified CDS sequence (wt) from hemagglutinin__InfluenzaB__AGX20261

SEQ ID NO: 59401 - RNA, 1758 nt, Artificial Sequence; identical to SEQ ID NO: 58654
  derived and/or modified CDS sequence (wt) from hemagglutinin__InfluenzaB__AGX20272

SEQ ID NO: 59402 - RNA, 1758 nt, Artificial Sequence
  derived and/or modified CDS sequence (wt) from hemagglutinin__InfluenzaB__AGX20283
augaaggcaauaauuguacuacucaugguaguaacauccaaugcagaucgaaucugcacugggauaacaucgucaaacucaccacaugucgucaaaacugcuacucaaggggaggucaaugugacugguguaauaccacugacaacaacacccaccaaaucucauuuugcaaaucucaaaggaacagaaaccagagggaaacuaugcccaaaaugccccaacugcacagaucuggacguagccuugggcagaccaaaaugcacggggaaaauacccucggcaagaguuucaauacuccaugaagucagaccuguuacaucugggugcuuuccuauaaugcacgacagaacaaaaauuagacagcugccuaaccuucuccgaggauacgaacauaucagauuaucaacucauaacguuaucaaugcagaaaaugcaccaggaggacccuacaaaauuggaaccucagggucuugcccuaacguuaccaauggaaacggauuuuucgcaacaauggcuugggccgucccaaaaaacgacaaaaacaaaacagcaacaaauccauuaacaauagaaguaccauacauuuguacagaaggagaagaccaaauuaccguuuggggguuccacucugauaacgagacccaaauggcaaagcucuauggggacucaaagccccagaaguucaccucaucugccaacggagugaccacacauuacguuucacagauuggcggcuucccaaaucaaacagaagauggaggacuaccacaaagugguagaauuguuguugauuacauggugcaaaaaucugggaaaacaggaacaauuaccuaucaaagagguauuuuauugccucaaaagguguggugcgcaaguggcaggagcaagguaauaaaaggauccuugccuuuaauuggagaagcagauugccuccacgaaaaauacgguggauuaaacaaaagcaagccuuacuacacaggggaacaugcaaaggccauaggaaauugcccaauaugggugaagacacccuugaagcuggccaauggaaccaaauauagaccuccugcaaaacuauuaaaggaaagggguuucuucggagcuauugcugguuucuuagaaggaggaugggaaggaaugauugcagguuggcacggauacacgucccauggggcacauggaguagcgguggcagcagaccuuaagagcacucaagaggccauaaacaagauaacaaaaaaucucaacucuuugagugagcuggaaguaaagaaucuucaaagacuaaguggugccauggaugaacuccacaacgaaauacuagaacuagacgagaaaguggaugaucucagagcugauacaauaagcucacaaauagaacucgcaguccugcuuuccaaugaaggaauaauaaacagugaagaugaacaucucuuggcacuugaaagaaagcugaagaaaaugcugggcccuucugcuguagagauagggaauggaugcuuugaaaccaaacacaagugcaaccagaccugucucgacagaauagcugcugguaccuuugaugcaggagaauuuucucuccccaccuuugauucacugaauauuacugcugcaucuuuaaaugacgauggauuggauaaucauaccauacugcuuuacuacucaacugcugccuccaguuuggcuguaacacugaugauagcuaucuuuguuguuuauauggucuccagagacaauguuucuugcuccaucugucuauaa

SEQ ID NO: 59403 - RNA, 1758 nt, Artificial Sequence
  derived and/or modified CDS sequence (wt) from hemagglutinin__InfluenzaB__AGX20294
augaaggcaauaauuguacuacucaugguaguaacauccaaugcagaucgaaucugcacugggauaacaucgucaaacucaccacaugucgucaaaacugcuacucaaggggaggucaaugugacugguguaauaccacugacaacaacacccaccaaaucucauuuugcaaaucucaaaggaacagaaaccagagggaaacuaugcccaaaaugccccaacugcacagaucuggacguagccuugggcagaccaaaaugcacggggaaaauacccucggcaagaguuucaauacuccaugaagucagaccuguuacaucugggugcuuuccuauaaugcacgacagaacaaaaauuagacagcugccuaaccuucuccgaggauacgaacauaucagauuaucaacucauaacguuaucaaugcagaaaaugcaccaggaggacccuacaaaauuggaaccucagggucuugcccuaacguuaccaauggaaacggauuuuucgcaacaauggcuugggccgucccaaaaaacgacaaaaacaaaacagcaacaaauccauuaacaauagaaguaccauacauuuguacagaaggagaagaccaaauuaccguuuggggguuccacucugauaacgagacccaaauggcaaagcucuauggggacucaaagccccagaaguucaccucaucugccaacggagugaccacacauuacguuucacagauugguggcuucccaaaucaaacagaagacggaggacuaccacaaagugguagaauuguuguugauuacauggugcaaaaaucugggaaaacaggaacaauuaccuaucaaagagguauuuuauugccucaaaagguguggugcgcaaguggcaggagcaagguaauaaaaggauccuugccuuuaauuggagaagcagauugccuccacgaaaaauacgguggauuaaacaaaagcaagccuuacuacacaggggaacaugcaaaggccauaggaaauugcccaauaugggugaagacacccuugaagcuggccaauggaaccaaauauagaccuccugcaaaacuauuaaaggaaagggguuucuucggagcuauugcugguuucuuagaaggaggaugggaaggaaugauugcagguuggcacggguacacgucccauggggcacauggaguagcgguggcagcagaccuuaagagcacucaagaggccauaaacaagauaacaaaaaaucucaacucuuugagugagcuggaaguaaagaaucuucaaagacuaaguggugccauggaugaacuccacaacgaaauacuagaacuagacgagaaaguggaugaucucagagcugauacaauaagcucacaaauagaacucgcaguccugcuuuccaaugaaggaauaauaaacagugaagaugaacaucucuuggcacuugaaagaaagcugaagaaaaugcugggcccuucugcuguagagauagggaauggaugcuuugaaaccaaacacaagugcaaccagaccugucucgacagaauagcugcugguaccuuugaugcaggagaauuuucucuccccaccuuugauucacugaauauuacugcugcaucuuuaaaugacgauggauuggauaaucauaccauacugcuuuacuacucaacugcugccuccaguuuggcuguaacacugaugauagcuaucuuuguuguuuauauggucuccagagacaauguuucuugcuccaucugucuauaa

SEQ ID NO: 59404 - RNA, 1758 nt, Artificial Sequence
  derived and/or modified CDS sequence (wt) from hemagglutinin__InfluenzaB__AGX20305
augaaggcaauaauuguacuacucaugguaguaacauccaaugcagaucgaaucugcacugggauaacaucgucaaacucaccacaugucgucaaaacugcuacucaaggggaggucaauguaacuggugugauaccacugacaacaacacccaccaaaucucauuuugcaaaucucaaaggaacagaaaccagagggaaacuaugcccaaaaugccccaacugcacagaucuggacguagccuugggcagaccaaaaugcacggggaaaauacccucggcaagaguuucaauacuccaugaagucagaccuguuacaucugggugcuuuccuauaaugcacgacagaacaaaaauuagacagcugccuaaucuucuccgaggauacgaacauaucagguuaucaacucauaacguuaucaaugcagaaaaugcaccaggaggacccuacaaaauuggaaccucagggucuugcccuaauguuaccaauggaaacggauuuuucgcaacaauggcuugggccgucccaaagaacgacaaaaacaaaacagcaacaaaucaauuaacaauagaaguaccauacauuuguacagaaggagaagaccaaauuaccguuuggggguuccacucugauaacgagacccaaauggcaaagcucuauggggacucaaagccccagaaguucaccucaucugccaacggagugaccacacauuacguuucacagauugguggcuucccaaaucaaacagaagacggaggacuaccacaaagugguagaauuguuguugauuacauggugcaaaaaucugggaaaacaggaacaauuaccuaucaaagagguauuuuauugccucaaaagguguggugcgcaaguggcaggagcaagguaauaaaaggauccuugccuuuaauuggagaagcagauugccuccacgaaaaauacgguggauugaacaaaagcaagccuuacuacacaggggaacaugcaaaggccauaggaaauugcccaauaugggugaagacacccuugaagcuggccaauggaaccaaauauagaccuccugcaaaacuauuaaaggaaagggguuucuucggagcuauugcugguuucuuagaaggaggaugggaaggaaugauugcagguuggcacggauacacgucccauggggcacauggaguagcgguggcagcagaccuuaagagcacucaagaggccauaaacaagauaacaaaaaaucucaacucuuugagugagcuggaaguaaagaaucuucaaagacuaagcggugccauggaugaacuccacaacgaaauacuagaacuagacgagaaaguggaugaucucagagcugauacaauaagcucacaaauagaacucgcaguccugcuuuccaaugaaggaauaauaaacagugaagaugaacaucucuuggcgcuugaaagaaagcugaagaaaaugcugggccccucugcuguagagauagggaauggaugcuuugaaaccaaacacaagugcaaccagaccugucucgacagaauagcugcugguaccuuugaugcaggagaauuuucucuccccaccuuugauucacugaauauuacugcugcaucuuuaaaugaugauggauuggauaaucauacuauacugcuuuacuacucaacugcugccuccaguuuggcuguaacacugaugauagcuaucuuuguuguuuauauggucuccagagacaauguuucuugcuccaucugucuauaa

SEQ ID NO: 59405 - RNA, 1758 nt, Artificial Sequence; identical to SEQ ID NO: 58651
  derived and/or modified CDS sequence (wt) from hemagglutinin__InfluenzaB__AGX20316

SEQ ID NO: 59406 - RNA, 1758 nt, Artificial Sequence; identical to SEQ ID NO: 58652
  derived and/or modified CDS sequence (wt) from hemagglutinin__InfluenzaB__AGX20327

SEQ ID NO: 59407 - RNA, 1758 nt, Artificial Sequence
  derived and/or modified CDS sequence (wt) from hemagglutinin__InfluenzaB__AGX20338
augaaggcaauaauuguacuacucaugguaguaacauccaaugcagaucgaaucugcacugggauaacaucgucaaacucaccacaugucgucaaaacugcuacucaaggggaggucaaugugacugguguaauaccacugacaacaacacccaccaaaucucauuuugcaaaucucaaaggaacagaaaccagagggaaacuaugcccaaaaugcccuaacugcacagaucuggacguagccuugggcagaccaaaaugcacggggaaaauacccucggcaagaguuucaauacuccaugaagucagaccuguuacaucugggugcuuuccuauaaugcacgacagaacaaaaauuagacagcugccuaaccuucuccgaggauacgaacauaucagguuaucaacucauaacguuaucaaugcagaaaaugcaccaggaggacccuacaaaauuggaaccucagggucuugcccuaauguuaccaauggaaacggauuuuucgcaacaauggcuugggccgucccaaaaaacgacaaaaacaaaacagcaacaaauccauuaacaauagaaguaccauacauuuguacagaaggagaagaccaaauuaccguuuggggguuccacucugauaacgagacccaaauggcaaaccucuauggggacucaaagccccagaaguucaccucaucugccaacggagugaccacacauuacguuucacagauugguggcuucccaaaucaaacagaagacggaggacuaccacaaagugguagaauuguuguugauuacauggugcaaaaaucugggaaaacaggaacaauuaccuaucaaagagguauuuuauugccucaaaagguguggugcgcaaguggcaggagcaaaguaauaaaaggauccuugccuuuaauuggagaagcagauugccuccacgaaaaauacgguggauuaaacaaaagcaagccuuacuacacaggggaacaugcaaaggccauaggaaauugcccaauaugggugaagacacccuugaagcuggccaauggaaccaaauauagaccuccugcaaaacuauuaaaggaaagggguuucuucggagcuauugcugguuucuuagaaggaggaugggaaggaaugauugcagguuggcacggauacacgucccauggggcacauggaguagcgguggcagcagaccuuaagagcacucaagaggccauaaacaagauaacaaaaaaucucaacucuuugagugagcuggaaguaaagaaucuucaaagacuaagcggugccauggaugaacuccacaacgaaauacuagaacuagacgagaaaguggaugaucucagagcugauacaauaagcucacaaauagaacucgcaguccugcuuuccaaugaaggaauaauaaacagugaagaugaacaucucuuggcgcuugaaagaaagcugaagaaaaugcugggccccucugcuguagagauagggaauggaugcuuugaaaccaaacacaagugcaaccagaccugucucgacagaauagcugcugguaccuuugaugcaggagaauuuucucuccccaccuuugauucacugaauauuacugcugcaucuuuaaaugacgauggauuggauaaucauacuauacugcuuuacuacucaacugcugccuccaguuuggcuguaacacugaugauagcuaucuuuguuguuuauauggucuccagagacaauguuucuugcuccaucugucuauaa

SEQ ID NO: 59408 - RNA, 1758 nt, Artificial Sequence
  derived and/or modified CDS sequence (wt) from hemagglutinin__InfluenzaB__AGX20349
augaaggcaauaauuguacuacucaugguaguaacauccaaugcagaucgaaucugcacugggauaacaucgucaaacucaccacaugucgucaaaacugcuacucaaggggaggucaaugugacugguguaauaccacugacaacaacacccaccaaaucucauuuugcaaaucucaagggaacagaaaccagagggaaacuaugcccaaaaugccccaacugcacagaucuggacguagccuugggcagaccaaaaugcacggggaaaauacccucggcaagaguuucaauacuccaugaagucagaccuguuacaucugggugcuuuccuauaaugcacgacagaacaaaaauuagacagcugccuaaccuucuccgaggauacgaacauaucagauuaucaacucauaacguuaucaaugcagaaaaugcaccaggaggacccuacaaaauuggaaccucagggucuugcccuaacguuaccaauggaaacggauuuuucgcaacaauggcuugggccgucccaaaaaacgacaaaaacaaaacagcaacaaauccauuaacaauagaaguaccauacauuuguacagaaggagaagaccaaauuaccguuuggggguuccacucugauaacgagacccaaauggcaaagcucuauggggacucaaagccccagaaguucaccucaucugccaacggagugaccacacauuacguuucacagauugguggcuucccaaaucaaacagaagacggaggacuaccacaaagugguagaauuguuguugauuacauggugcaaaaaucugggaaaacaggaacaauuaccuaucaaagagguauuuuauugccucaaaagguguggugcgcaaguggcaggagcaagguaauaaaaggauccuugccuuuaauuggagaagcagauugccuccacgaaaaauacgguggauuaaacaaaagcaagccuuacuacacaggggaacaugcaaaggccauaggaaauugcccaauaugggugaagacacccuugaagcuggccaauggaaccaaauauagaccuccugcaaaacuauuaaaggaaagggguuucuucggagcuauugcugguuucuuagaaggaggaugggaaggaaugauugcagguuggcacggauacacgucccauggggcacauggaguagcgguggcagcagaccuuaagagcacucaagaggccauaaacaagauaacaaaaaaucucaacucuuugagugagcuggaaguaaagaaucuucaaagacuaagcggugccauggaugaacuccacaacgaaauacuagaacuagacgagaaaguggaugaucucagagcugauacaauaagcucacaaauagaacucgcaguccugcuuuccaaugaaggaauaauaaacagugaagaugaacaucucuuggcgcuugaaagaaagcugaagaaaaugcugggcccuucugcuguagagauagggaauggaugcuuugaaaccaaacacaagugcaaccagaccugucucgacagaauagcugcugguaccuuugaugcaggagaauuuucucuccccaccuuugauucacugaauauuacugcugcaucuuuaaaugacgauggauuggauaaucauaccauacugcuuuacuacucaacugcugccuccaguuuggcuguaacacugaugauagcuaucuuuguuguuuauauggucuccagagacaauguuucuugcuccaucugucuauaa

SEQ ID NO: 59409 - RNA, 1758 nt, Artificial Sequence; identical to SEQ ID NO: 59395
  derived and/or modified CDS sequence (wt) from hemagglutinin__InfluenzaB__AGX20360

SEQ ID NO: 59410 - RNA, 1758 nt, Artificial Sequence; identical to SEQ ID NO: 58671
  derived and/or modified CDS sequence (wt) from hemagglutinin__InfluenzaB__AGX20371

SEQ ID NO: 59411 - RNA, 1758 nt, Artificial Sequence
  derived and/or modified CDS sequence (wt) from hemagglutinin__InfluenzaB__AGX20382
augaaggcaauaauuguacuacucaugguaguaacauccaaugcagaucgaaucugcacugggauaacaucgucaaacucaccacaugucgucaaaacugcuacucaaggggaggucaaugugacugguguaauaccacugacaacaacacccaccaaaucucauuuugcaaaucucaaaggaacagaaaccagagggaaacuaugcccaaaaugccccaacugcacagaucuggacguagccuugggcagaccaaaaugcacggggaaaauacccucggcaagaguuucaauacuccaugaagucagaccuguuacaucugggugcuuuccuauaaugcacgacagaacaaaaauuagacagcugccuaaccuucuccgaggauacgaacauaucagauuaucaacucauaacguuaucaaugcagaaaaugcaccaggaggacccuacaaaauuggaaccucagggucuugcccuaacguuaccaauggaaacggauuuuucgcaacaauggcuugggccgucccaaaaaacgacaaaaacaaaacagcaacaaauccauuaacaauagaaguaccauacauuuguacagaaggagaagaccaaauuaccguuuggggguuccacucugauaacgagacccaaauggcaaagcucuauggggacucaaagccccagaaguucaccucaucugccaacggagugaccacacauuacguuucacagauugguggcuucccaaaucaaacagaagacggaggacuaccacaaagugguagaauuguuguugauuacauggugcaaaaaucugggaaaacaggaacaauuaccuaucaaagagguauuuuauugccucaaaagguguggugcgcaaguggcaggagcaagguaauaaaaggauccuugccuuuaauuggagaagcagauugccuccacgaaaaauacgguggauuaaacaaaagcaagccuuacuacacaggggaacaugcaaaggccauaggaaauugcccaauaugggugaagacacccuugaagcuggccaauggaaccaaauauagaccuccugcaaaacuauuaaaggaaagggguuucuucggagcuauugcugguuucuuagaaggaggaugggaaggaaugauugcagguuggcacggauacacgucccauggggcacauggaguagcgguggcagcagaccuuaagagcacucaagaggccauaaacaagauaacaaaaaaucucaacucuuugagugagcuggaaguaaagaaucuucaaagacuaagcggugccaugaaugaacuccacaacgaaauacuagaacuagacgagaaaguggaugaucucagagcugauacaauaagcucacaaauagaacucgcaguccugcuuuccaaugaaggaauaauaaacagugaagaugaacaucucuuggcgcuugaaagaaagcugaagaaaaugcugggcccuucugcuguagagauagggaauggaugcuuugaaaccaaacacaagugcaaccagaccugucucgacagaauagcugcugguaccuuugaugcaggagaauuuucucuccccaccuuugauucacugaauauuacugcugcaucuuuaaaugacgauggauuggauaaucauaccauacugcuuuacuacucaacugcugccuccaguuuggcuguaacacugaugauagcuaucuuuguuguuuauauggucuccagagacaauguuucuugcuccaucugucuauaa

SEQ ID NO: 59412 - RNA, 1758 nt, Artificial Sequence; identical to SEQ ID NO: 59402
  derived and/or modified CDS sequence (wt) from hemagglutinin__InfluenzaB__AGX20393

SEQ ID NO: 59413 - RNA, 1758 nt, Artificial Sequence; identical to SEQ ID NO: 58671
  derived and/or modified CDS sequence (wt) from hemagglutinin__InfluenzaB__AGX20404

SEQ ID NO: 59414 - RNA, 1758 nt, Artificial Sequence; identical to SEQ ID NO: 58651
  derived and/or modified CDS sequence (wt) from hemagglutinin__InfluenzaB__AGX20415

SEQ ID NO: 59415 - RNA, 1758 nt, Artificial Sequence; identical to SEQ ID NO: 58655
  derived and/or modified CDS sequence (wt) from hemagglutinin__InfluenzaB__AGX20426

SEQ ID NO: 59416 - RNA, 1758 nt, Artificial Sequence; identical to SEQ ID NO: 58651
  derived and/or modified CDS sequence (wt) from hemagglutinin__InfluenzaB__AGX20437

SEQ ID NO: 59417 - RNA, 1758 nt, Artificial Sequence
  derived and/or modified CDS sequence (wt) from hemagglutinin__InfluenzaB__AGX20448
augaaagcaauaauuguacuacucaugguaguaacauccaaugcagaucgaaucugcacugggauaacaucgucaaacucaccacaugucgucaaaacugccacucaaggggaggucaaugugacugguguaauaccacugacaacaacacccaccaaaucucauuuugcaaaucucaaaggaacagaaaccagagggaaacuaugcccaaaaugccccaacugcacagaucuggacguagcccugggcagaccaaaaugcacggggaaaauacccucggcaagaguuucaauacuccaugaagucagaccuguuacaucugggugcuuuccuauaaugcacgacagaacaaaaauuagacagcugccuaaccuucuccgaggauacgaacauaucagauuaucaacucauaacguuaucaaugcagaaaaugcaccaggaggacccuacaaaauuggaacuucagggucuugcccuaauguuaccaauggaaacggauuuuucgcaacaauggcuugggcugucccaaaaaacgacaaaaacaaaacagcaacaaacccauuaacaauagaaguaccauacauuuguacagaaggagaagaccaaauuaccguuuggggguuccacucugauaacgagacccaaauggcaaagcucuauggggacucaaagccccagaaguucaccucaucugccaacggagugaccacacauuacguuucacagauugguggcuucccaaaucaaacagaagacggaggacuaccacaaagugguagaauuguuguugauuacauggugcaaaaaucugggaaaacaggaacaauuaccuaucaaagagguauuuuauugccucaaaagguguggugcgcaaguggcaggagcaagguaauaaaaggauccuugccuuuaauuggagaagcagauugccuccacgaaaaauacgguggauuaaacaaaagcaagccuuacuacacaggggaacaugcaaaggccauaggaaauugcccaauaugggugaagacacccuugaagcuggccaauggaaccaaauauagaccuccugcaaaacuauuaaaggaaagggguuucuucggagcuauugcugguuucuuagaaggaggaugggaaggaaugauugcagguuggcacggauacacgucccauggggcacauggaguagcgguggcagcagaccuuaagagcacucaagaggccauaaacaagauaacaaaaaaucucaacucuuugagugagcuggaaguaaagaaucuucaaagacuaagcggugccauggaugaacuccacaacgaaauacuagaacuagacgagaaaguggaugaucucagagcugauacaauaagcucacaaauagaacucgcaguccugcuuuccaaugaaggaauaauaaacagugaagaugaacaucucuuggcgcuugaaagaaagcugaagaaaaugcugggccccucugcuguagagauagggaauggaugcuuugaaaccaaacacaagugcaaccagaccugucucgacagaauagcugcugguaccuuugaugcaggagaauuuucucuccccaccuuugauucacugaauauuacugcugcaucuuuaaaugacgauggauuggauaaucauaccauacugcuuuacuacucaacugcugccuccaguuuggcuguaacacugaugauagcuaucuuuguuguuuauauggucuccagagacaauguuucuugcuccaucugucuauaa

SEQ ID NO: 59418 - RNA, 1758 nt, Artificial Sequence; identical to SEQ ID NO: 58652
  derived and/or modified CDS sequence (wt) from hemagglutinin__InfluenzaB__AGX20459

SEQ ID NO: 59419 - RNA, 1758 nt, Artificial Sequence; identical to SEQ ID NO: 59395
  derived and/or modified CDS sequence (wt) from hemagglutinin__InfluenzaB__AGX20470

SEQ ID NO: 59420 - RNA, 1758 nt, Artificial Sequence
  derived and/or modified CDS sequence (wt) from hemagglutinin__InfluenzaB__AGX20481
augaaggcaauaauuguacuacucaugguaguaacauccaaugcagaucgaaucugcacugggauaacaucgucaaacucaccacaugucgucaaaacugcuacucaaggggaggucaaugugacugguguaauaccacugacaacaacacccaccaaaucucauuuugcaaaucucaaaggaacagaaaccagagggaaacuaugcccaaaaugccccaacugcacagaucuggacguagccuugggcagaccaaaaugcacggggaaaauacccucggcaagaguuucaauacuccaugaagucagaccuguuacaucugggugcuuuccuauaaugcacgacagaacaaaaauuagacagcugccuaaccuucuccgaggauacgaacauaucagauuaucaacucauaacguuaucaaugcagaaaaugcaccaggaggacccuacaaaauuggaaccucagggucuugcccuaacguuaccaauggaaacggauuuuucgcaacaauggcuugggccgucccaaaaaacgacaaaaacaaaacagcaacaaauccauuaacaauagaaguaccauacauuuguacagaaggagaagaccaaauuaccguuuggggguuccacucugauaacgagacccaaauggcaaagcucuauggggacucaaagccccagaaguucaccucaucugccaacggagugaccacacauuacguuucacagauugguggcuucccaaaucaaacagaagauggaggacuaccacaaagugguagaauuguuguugauuacauggugcaaaaaucugggaaaacaggaacaauuaccuaucaaagagguauuuuauugccucaaaagguguggugcgcaaguggcaggagcaagguaauaaaaggauccuugccuuuaauuggagaagcagauugccuccacgaaaaauacgguggauuaaacaaaagcaagccuuacuacacaggggaacaugcaaaggccauaggaaauugcccaauaugggugaagacacccuugaagcuggccaauggaaccaaauauagaccuccugcaaaacuauuaaaggaaagggguuucuucggagcuauugcugguuucuuagaaggaggaugggaaggaaugauugcagguuggcacggauacacgucccauggggcacauggaguagcgguggcagcagaccuuaagagcacucaagaggccauaaacaagauaacaaaaaaucucaacucuuugagugagcuggaaguaaagaaucuucaaagacuaaguggugccauggaugaacuccacaacgaaauacuagaacuagacgagaaaguggaugaucucagagcugauacaauaagcucacaaauagaacucgcaguccugcuuuccaaugaaggaauaauaaacagugaagaugaacaucucuuggcacuugaaagaaagcugaagaaaaugcugggcccuucugcuguagagauagggaauggaugcuuugaaaccaaacacaagugcaaccagaccugucucgacagaauagcugcugguaccuuugaugcaggagaauuuucucuccccaccuuugauucacugaauauuacugcugcaucuuuaaaugacgauggauuggauaaucauaccauacugcuuuacuacucaacugcugccuccaguuuggcuguaacacugaugauagcuaucuuuguuguuuauauggucuccagggacaauguuucuugcuccaucugucuauaa

SEQ ID NO: 59421 - RNA, 1758 nt, Artificial Sequence
  derived and/or modified CDS sequence (wt) from hemagglutinin__InfluenzaB__AGX20492
augaaggcaauaauuguacuacucaugguaguaacauccaaugcagaucgaaucugcacugggauaacaucgucaaacucaccacaugucgucaaaacugcuacucaaggggaggucaaugugacugguguaauaccacugacaacaacacccaccaaaucucauuuugcaaaucucaaaggaacagaaaccagagggaaacuaugcccaaaaugccccaacugcacagaucuggacguagccuugggcagaccaaaaugcacggggaaaauacccucggcaagaguuucaauacuccaugaagucagaccuguuacaucugggugcuuuccuauaaugcacgacagaacaaaaauuagacagcugccuaaccuucuccgaggauacgaacauaucagauuaucaacucauaacguuaucaaugcagaaaaugcaccaggaggacccuacaaaauuggaaccucagggucuugcccuaacguuaccaauggaaacggauuuuucgcaacaauggcuugggccgucccaaaaaacgacaaaaacaaaacagcaacaaauccauuaacaauagaaguaccauacauuuguacagaaggagaagaccaaauuaccguuuggggguuccacucugauaacgagacccaaauggcaaagcucuauggggacucaaagccccagaaguucaccucaucugccaacggagugaccacacauuacguuucacagauugguggcuucccaaaucaaacagaagacggaggacuaccacaaagugguagaauuguuguugauuacauggugcaaaaaucugggaaaacaggaacaauuaccuaucaaagagguauuuuauugccucaaaagguguggugcgcaaguggcaggagcaagguaauaaaaggauccuugccuuuaauuggagaagcagauugccuccacgaaaaauacgguggauuaaacaaaagcaagccuuacuacacaggggaacaugcaaaggccauaggaaacugcccaauaugggugaagacacccuugaagcuggccaauggaaccaaauauagaccuccugcaaaacuauuaaaggaaagggguuucuucggagcuauugcugguuucuuagaaggaggaugggaaggaaugauugcagguuggcacggauacacgucccauggggcacauggaguagcgguggcagcagaccuuaagagcacucaagaggccauaaacaagauaacaaaaaaucucaacucuuugagugagcuggaaguaaagaaucuucaaagacuaagcggugccauggaugaacuccacaacgaaauacuagaacuagacgagaaaguggaugaucucagagcugauacaauaagcucacaaauagaacucgcaguccugcuuuccaaugaaggaauaauaaacagugaagaugaacaucucuuggcgcuugaaagaaagcugaagaaaaugcugggcccuucugcuguagagauagggaauggaugcuuugaaaccaaacacaagugcaaccagaccugucucgacagaauagcugcugguaccuuugaugcaggagaauuuucucuccccaccuuugauucacugaauauuacugcugcaucuuuaaaugacgauggauuggauaaucauaccauacugcuuuacuacucaacugcugccuccaguuuggcuguaacacugaugauagcuaucuuuguuguuuauauggucuccagagacaauguuucuugcuccaucugucuauaa

SEQ ID NO: 59422 - RNA, 1758 nt, Artificial Sequence
  derived and/or modified CDS sequence (wt) from hemagglutinin__InfluenzaB__AGX20503
augaaggcaauaauuguacuacucaugguaguaacauccaaugcagaucgaaucugcacugggauaacaucgucaaacucaccacaugucgucaaaacugcuacucaaggggaggucaaugugacugguguaauaccacugacaacaacacccaccaaaucucauuuugcaaaucucaaaggaacagaaaccagagggaaacuaugcccaaaaugccccaacugcacagaucuggacguagccuugggcagaccaaaaugcacggggaaaauacccucggcaagaguuucaauacuccaugaagucagaccuguuacaucugggugcuuuccuauaaugcacgacagaacaaaaauuagacagcugccuaaccuucuccgaggauacgaacauaucagauuaucaacucauaacguuaucaaugcagaaaaugcaccaggaggacccuacaaaauuggaaccucagggucuugcccuaacguuaccaauggaaacggauuuuucgcaacaauggcuugggccgucccaaaaaacgacaaaaacaaaacagcaacaaauccauuaacaauagaaguaccauacauuuguacagaaggagaagaccaaauuaccguuuggggguuccacucugauaacgagacccaaauggcaaagcucuauggagacucaaagccccagaaguucaccucaucugccaacggagugaccacacauuacguuucacagauugguggcuucccaaaucaaacagaagauggaggacuaccacaaagugguagaauuguuguugauuacauggugcaaaaaucugggaaaacaggaacaauuaccuaucaaagagguauuuuauugccucaaaagguguggugcgcaaguggcaggagcaagguaauaaaaggauccuugccuuuaauuggagaagcagauugccuccacgaaaaauacgguggauuaaacaaaagcaagccuuacuacacaggggaacaugcaaaggccauaggaaauugcccaauaugggugaagacacccuugaagcuggccaauggaaccaaauauagaccuccugcaaaacuauuaaaggaaagggguuucuucggagcuauugcugguuucuuagaaggaggaugggaaggaaugauugcagguuggcacggauacacgucccauggggcacauggaguagcgguggcagcagaccuuaagagcacucaagaggccauaaacaagauaacaaaaaaucucaacucuuugagugagcuggaaguaaagaaucuucaaagacuaaguggugccauggaugaacuccacaacgaaauacuagaacuagacgagaaaguggaugaucucagagcugauacaauaagcucacaaauagaacucgcaguccugcuuuccaaugaaggaauaauaaacagugaagaugaacaucucuuggcacuugaaagaaagcugaagaaaaugcugggcccuucugcuguagagauagggaauggaugcuuugaaaccaaacacaagugcaaccagaccugucucgacagaauagcugcugguaccuuugaugcaggagaauuuucucuccccaccuuugauucacugaauauuacugcugcaucuuuaaaugacgauggauuggauaaucauaccauacugcuuuacuacucaacugcugccuccaguuuggcuguaacacugaugauagcuaucuuuguuguuuauauggucuccagagacaauguuucuugcuccaucugucuauaa

SEQ ID NO: 59423 - RNA, 1758 nt, Artificial Sequence; identical to SEQ ID NO: 58652
  derived and/or modified CDS sequence (wt) from hemagglutinin__InfluenzaB__AGX20514

SEQ ID NO: 59424 - RNA, 1758 nt, Artificial Sequence
  derived and/or modified CDS sequence (wt) from hemagglutinin__InfluenzaB__AGX20525
augaaggcaauaauuguacuacucaugguaguaacauccaaugcagaucgaaucugcacugggauaacaucgucaaacucaccacauguagucaaaacugcuacucaaggggaggucaaugugacugguguaauaccacugacaacaacacccaccaaaucucauuuuucaaaucucaaaggaacagaaaccagagggaaacuaugcccaaaaugccccaacugcacagaucuggacguagccuugggcagaccaaaaugcacggggaaaauacccucggcaagaguuucaauacuccaugaagucagaccuguuacaucugggugcuuuccuauaaugcacgacagaacaaaaauuagacagcugccuaaccuucuccgaggauacgaacauaucagauuaucaacucauaacguuaucaaugcagaaaaugcaccaggaggacccuacaaaauuggaaccucagggucuugcccuaacguuaccaauggaaacggauuuuucgcaacaauggcuugggccgucccaaaaaacgacaaaaacaaaacagcaacaaauccauuaacaauagaaguaccauacauuuguacagaaggagaagaccaaauuaccguuuggggguuccacucugauaacgagacccaaauggcaaagcucuauggggacucaaagccccagaaguucaccucaucugccaacggagugaccacacauuacguuucacagauugguggcuucccaaaucaaacagaagacggaggacuaccacaaagugguagaauuguuguugauuacauggugcaaaaaucugggaaaacaggaacaauuaccuaucaaagagguauuuuauugccucaaaagguguggugcgcaaguggcaggagcaagguaauaaaaggauccuugccuuuaauuggagaagcagauugccuccacgaaaaauacgguggauuaaacaaaagcaagccuuacuacacaggggaacaugcaaaggccauaggaaauugcccaauaugggugaagacacccuugaagcuggccaauggaaccaaauauagaccuccugcaaaacuauuaaaggaaagggguuucuucggagcuauugcugguuucuuagaaggaggaugggaaggaaugauugcagguuggcacggauacacgucccauggggcacauggaguagcgguggcagcagaccuuaagagcacucaagaggccauaaacaagauaacaaaaaaucucaacucuuugagugagcuggaaguaaagaaucuucaaagacuaaguggugccauggaugaacuccacaacgaaauacuagaacuagacgagaaaguggaugaucucagagcugauacaauaagcucacaaauagaacucgcaguccugcuuuccaaugaaggaauaauaaacagugaagaugaacaucucuuggcacuugaaagaaagcugaagaaaaugcugggcccuucugcuguagagauagggaauggaugcuuugaaaccaaacacaagugcaaccagaccugucucgacagaauugcugcugguaccuuugaugcaggagaauuuucucuccccaccuuugauucacugaauauuacugcugcaucuuuaaaugacgauggauuggauaaucauaccauacugcuuuacuacucaacugcugccuccaguuuggcuguaacacugaugauagcuaucuuuguuguuuauauggucuccagagacaauguuucuugcuccaucugucuauaa

SEQ ID NO: 59425 - RNA, 1758 nt, Artificial Sequence; identical to SEQ ID NO: 59023
  derived and/or modified CDS sequence (wt) from hemagglutinin__InfluenzaB__AGX20536

SEQ ID NO: 59426 - RNA, 1758 nt, Artificial Sequence
  derived and/or modified CDS sequence (wt) from hemagglutinin__InfluenzaB__AGX20547
augaaggcaauaauuguacuacucaugguaguaacauccaaugcagaucggaucugcacugggauaacaucgucaaacucaccacaugucgucaaaacugcuacucaaggggaggucaaugugaccgguguaauaccacugacaacaacacccaccaaaucucauuuugcaaaucucaaaggaacagaaaccagggggaaacuaugcccaaaaugccucaacugcacagaucuggacguagccuugggcagaccaaaaugcacugggaaaauacccucggcaagaguuucaauacuccaugaagucagaccuguuacaucugggugcuuuccuauaaugcacgauagaacaaaaauuagacagcugccuaaccuucuccgaggauacgaacauaucagguuaucaacucauaacguuaucaaugcagaaaaugcaccaggaggacccuacaaaauuggaaccucagggucuugcccuaacguuaccaauggaaacggauucuucgcaacaauggcuugggccgucccaaaaaacgacaaaaacaaaacagcaacaaauccauuaacaauagaaguaccauacauuuguacagaaggagaagaccaaauuaccguuuggggguuccacucugacaacgagacccaaauggcaaagcucuauggggacucaaagccccagaaguucaccucaucugccaacggagugaccacacaucacguuucacagauugguggcuucccaaaucaaacagaagacggaggacuaccacaaagugguagaauuguuguugauuacauggugcaaaaaucugggaaaacaggaacaauuaccuaucaaagagguauuuuauugccucaaaagguguggugcgcaaguggcaggagcaagguaauaaaaggauccuugccuuuaauuggagaagcagauugccuccacgaaaaauacgguggauuaaacaaaagcaagccuuacuacacaggggaacaugcaaaggccauaggaaauugcccaauaugggugaaaacacccuugaagcuggccaauggaaccaaauauagaccuccugcaaaacuauuaaaggaaagggguuucuucggagcuauugcugguuucuuagaaggaggaugggaaggaaugauugcagguuggcacggauacacaucccauggggcacauggaguagcgguggcagcagaccuuaagagcacucaagaggccauaaacaagauaacaaaaaaucucaacucuuugagugagcuggaaauaaagaaucuucaaagacuaagcggugccauggaugaacuccacaacgaaauacuagaacuagaugagaaaguggaugaucucagagcugauacaauaagcucacaaauagagcucgcaguccugcuuuccaaugaaggaauaauaaacagugaagaugaacaucucuuggcgcuugaaagaaagcugaagaaaaugcugggccccucugcuguagagauagggaauggaugcuuugaaaccaaacacaagugcaaccagaccugucucgacagaauagcugcugguacuuuugaugcaggagaauuuucucuccccaccuuugauucacugaauauuacugcugcaucuuuaaaugacgauggauuggauaaucauacuauacugcuuuacuacucaacugcugccuccaguuuggcuguaacacugaugauagcuaucuuuguuguuuauauggucuccagagacaauguuucuugcuccaucugucuauaa

SEQ ID NO: 59427 - RNA, 1758 nt, Artificial Sequence; identical to SEQ ID NO: 58674
  derived and/or modified CDS sequence (wt) from hemagglutinin__InfluenzaB__AGX20558

SEQ ID NO: 59428 - RNA, 1758 nt, Artificial Sequence; identical to SEQ ID NO: 59395
  derived and/or modified CDS sequence (wt) from hemagglutinin__InfluenzaB__AGX20569

SEQ ID NO: 59429 - RNA, 1758 nt, Artificial Sequence
  derived and/or modified CDS sequence (wt) from hemagglutinin__InfluenzaB__AGX20580
augaaggcaauaauuguacuacucaugguaguaacauccaaugcagaucgaaucugcacugggauaacaucgucaaacucaccacaugucgucaaaacugcuacucaaggggaggucaaugucacugguguaauaccacugacaacaacacccaccaaaucucacuuugcaaaucucaaaggaacagaaaccagggggaaacuaugcccaaaaugccucaacugcacagaucuggacguagccuugggcagaccaaaaugcacggggaaaauacccucggcaagaguuucaauacuccaugaagucagaccuguuacaucugggugcuuuccuauaaugcacgacagaacaaaaauuagacagcugccuaaccuucuccgaggauacgaacauaucagguuaucaacucauaacguuaucaaugcagaaaaugcaccaggaggacccuacaaaauuggaaccucagggucuugcccuaacguuaccaauggaaacggauuuuucgcaacaauggcuugggccgucccaaaaaacgacaaaaacaaaacagcaacaaauccauuaacaauagaaguaccauacauuuguacagaaggagaagaccaaauuaccguuuggggguuccacucugacaacgagacccaaauggcaaagcucuauggggacucaaagccccagaaguucaccucaucugccaacggagugaccacacauuacguuucacagauugguggcuucccaaaucaaacagaagacggaggacuaccacaaagugguagaauuguuguugauuacauggugcaaaaaucugggaaaacaggaacaauuaccuaucaaagagguauuuuauugccucaaaagguguggugcgcaaguggcaggagcaagguaauaaaaggauccuugccuuuaauuggagaagcagauugccuccacgaaaaauacgguggauuaaacaaaagcaagccuuacuacacaggggaacaugcaaaggccauaggaaauugcccaauaugggugaaaacacccuugaagcuggccaauggaaccaaauauagaccuccugcaaaacuauuaaaggaaagggguuucuucggagcuauugcugguuucuuagaaggaggaugggaaggaaugauugcagguuggcacggauacacaucccauggggcacauggaguggcgguggcagcagaccuuaagagcacucaagaggccauaaacaagauaacaaaaaaucucaacucuuugagugagcuggaaguaaagaaucuucaaagacuaaguggugccauggaugaacuccacaacgaaauacuagaacuagaugagaaaguggaugaucucagagcugauacaauaagcucacaaauagaacucgcaguccugcuuuccaaugaaggaauaauaaacagugaagaugaacaucucuuggcgcuugaaagaaagcugaagaaaaugcugggccccucugcuguagagauagggaauggaugcuuugaaaccaaacacaagugcaaccagaccugucucgacagaauagcugcugguaccuuugaugcaggagaauuuucucuccccaccuuugauucacugaauauuacugcugcaucuuuaaaugacgauggauuggauaaucauacuauacugcuuuacuacucaacugcugccuccaguuuggcuguaacacugaugauagcuaucuuuguuguuuauauggucuccagagacaauguuucuugcuccaucugucuauaa

SEQ ID NO: 59430 - RNA, 1758 nt, Artificial Sequence; identical to SEQ ID NO: 58652
  derived and/or modified CDS sequence (wt) from hemagglutinin__InfluenzaB__AGX20591

SEQ ID NO: 59431 - RNA, 1758 nt, Artificial Sequence; identical to SEQ ID NO: 59023
  derived and/or modified CDS sequence (wt) from hemagglutinin__InfluenzaB__AGX20602

SEQ ID NO: 59432 - RNA, 1758 nt, Artificial Sequence
  derived and/or modified CDS sequence (wt) from hemagglutinin__InfluenzaB__AGX20613
augaaggcaauaauuguacuacucaugguaguaacauccaaugcagaucgaaucugcacugggauaacaucgucaaacucaccacaugucgucaaaacugcuacucaaggggaggucaaugugacugguguaauaccacugacaacaacacccaccaaaucucauuuugcaaaucucaaaggaacagaaaccagagggaaacuaugcccaaaaugccccaacugcacagaucuggacguagccuugggcagaccaaaaugcacggggaaaauacccucggcaagaguuucaauacuccaugaagucagaccuguuacaucugggugcuuuccuauaaugcacgacagaacaaaaauuagacagcugccuaaccuucucagaggauacgaacacaucagauuaucaacucauaacguuaucaaugcagaaaaugcaccaggaggacccuacaaaauuggaaccucagggucuugcccuaacguuaccaauggaaacggauuuuuugcaacaauggcuugggccgucccaaaaaacgacaaaaacaaaacagcaacaaauccauuaacaauagaaguaccauacauuuguacagaaggagaagaccaaauuaccguuuggggguuccacucugauaacgagacccaaauggcaaagcucuauggggacucaaagccccagaaguucaccucaucugccaacggagugaccacacauuacguuucacagauugguggcuucccaaaucaaacagaagacggaggacuaccacaaagugguagaauuguuguugauuacauggugcaaaaaucugggaaaacaggaacaauuaccuaucaaagagguauuuuauugccucaaaagguguggugcgcaaguggcaggagcaagguaauaaaaggauccuugccuuuaauuggagaagcagauugccuccacgaaaaauacgguggauuaaacaaaagcaagccuuacuacacaggggaacaugcaaaggccauaggaaauugcccaauaugggugaagacacccuugaagcuggccaauggaaccaaauauagaccuccugcaaaacuauuaaaggaaagggguuucuucggagcuauugcugguuucuuagaaggaggaugggaaggaaugauugcagguuggcacggauacacgucccauggggcacauggaguagcgguggcagcagaccuuaagagcacucaagaggccauaaacaagauaacaaaaaaucucaacucuuugagugagcuggaaguaaagaaucuucaaagacuaagcggugccauggaugaacuccacaacgaaauacuagaacuagacgaaaaaguggaugaucucagagcugauacaauaagcucacaaauagaacucgcaguccugcuuuccaaugaaggaauaauaaacagugaagaugaacaucucuuggcgcuugaaagaaagcugaagaaaaugcugggcccuucugcuguagagauagggaauggaugcuuugaaaccaaacacaagugcaaccagaccugucucgacagaauagcugcugguaccuuugaugcaggagaauuuucucuccccaccuuugauucacugaauauuacugcugcaucuuuaaaugacgauggauuggauaaucauaccauacugcuuuacuacucaacugcugccuccaguuuggcuguaacacugaugauagcuaucuuuguuguuuauauggucuccagagacaauguuucuugcuccaucugucuauaa

SEQ ID NO: 59433 - RNA, 1758 nt, Artificial Sequence
  derived and/or modified CDS sequence (wt) from hemagglutinin__InfluenzaB__AGX20624
augaaggcaauaauuguacuacucaugguaguaacauccaaugcagaucgaaucugcacugggauaacaucgucaaacucaccacaugucgucaaaacugcuacucaaggggaggucaaugugacugguguaauaccacugacaacaacacccaccaaaucucauuuugcaaaucucaaaggaacagaaaccagagggaaacuaugcccaaaaugccccaacugcacagaucuggauguagccuugggcagaccaaaaugcacggggaaaauacccucggcaagaguuucaauacuccaugaagucagaccuguuacaucugggugcuuuccuauaaugcacgacagaacaaaaauuagacagcugccuaaccuucucagaggauacgaacauaucagauuaucaacucauaacguuaucaaugcagaaaaugcaccaggaggacccuacaaaauuggaaccucagggucuugcccuaacguuaccaauggaaacggauuuuuugcaacaauggcuugggccgucccaaaaaacgacaaaaacaaaacagcaacaaauccauuaacaauagaaguaccauacauuuguacagaaggagaagaccaaauuaccguuuggggguuccacucugauaaugagacccaaauggcaaagcucuauggggacucaaagccccagaaguucaccucaucugccaacggagugaccacacauuacguuucacagauugguggcuucccaaaucaaacagaagacggaggacuaccacaaagugguagaauuguuguugauuacauggugcaaaaaucugggaaaacaggaacaauuaccuaucaaagagguauuuuauugccucaaaagguguggugcgcaaguggcaggagcaagguaauaaaaggauccuugccuuuaauuggagaagcagauugccuccacgaaaaauacgguggauuaaacaaaagcaagccuuacuacacaggggaacaugcaaaggccauaggaaauugcccaauaugggugaagacacccuugaagcuggccaauggaaccaaauauagaccuccugcaaaacuauuaaaggaaagagguuucuucggagcuauugcugguuucuuagaaggaggaugggaaggaaugauugcagguuggcacggauacacgucccauggggcacauggaguagcgguggcagcagaccuuaagagcacucaagaggccauaaacaagauaacaaaaaaucucaacucuuugagugagcuggaaguaaaaaaucuucaaagacuaagcggugccauggaugaacuccacaacgaaauacuagaacuagacgaaaaaguggaugaucucagagcugauacaauaagcucacaaauagaacucgcaguccugcuuuccaaugaaggaauaauaaacagugaagaugaacaucucuuggcgcuugaaagaaagcugaagaaaaugcugggcccuucugcuguagagauagggaauggaugcuuugaaaccaaacacaagugcaaccagaccugucucgacagaauagcugcugguaccuuugaugcaggagaauuuucucuccccaccuuugauucacugaauauuacugcugcaucuuuaaaugacgauggauuggauaaucauaccauacugcuuuacuacucaacugcugccuccaguuuggcuguaacacugaugauagcuaucuuuguuguuuauauggucuccagagacaauguuucuugcuccaucugucuauaa

SEQ ID NO: 59434 - RNA, 1758 nt, Artificial Sequence
  derived and/or modified CDS sequence (wt) from hemagglutinin__InfluenzaB__AGX20635
augaaggcaauaauuguacuacucaugguaguaacauccaaugcagaucgaaucugcacugggauaacaucgucaaacucaccacaugucgucaaaacugcuacucaaggggaggucaaugugaccgguguaauaccacugacaacaacacccaccaaaucucauuuugcaaaucucaaaggaacagaaaccagggggaaacuaugcccaaaaugccucaacugcacagaucuggacguagccuugggcagaccaaaaugcacggggaaaauacccucggcaagaguuucaauacuccaugaagucagaccuguuacaucugggugcuuuccuauaaugcacgauagaacaaaaauuagacagcugccuaaccuucuccgaggauacgaacauaucagguuaucaacucauaacguuaucaaugcagaaaaugcaccaggaggacccuacaaaauuggaaccucagggucuugcccuaacguuaccaauggaaacggauucuucgcaacaauggcuugggccgucccaaaaaacgacaaaaacaaaacagcaacaaauccauuaacaauagaaguaccauacauuuguacagaaggagaagaccaaauuaccguuuggggguuccacucugacaacgagacccuaauggcaaagcucuauggggacucaaagccccagaaguucaccucaucugccaacggagugaccacacauuacguuucacagauugguggcuucccaaaucaaacagaagacggaggacuaccacaaagugguagaauuguuguugauuacauggugcaaaaaucugggaaaacaggaacaauuaccuaucaaagagguauuuuauugccucaaaagguguggugcgcaaguggcaggagcaagguaauaaaaggauccuugccuuuaauuggagaagcagauugccuccacgaaaaauacgguggauuaaacaaaagcaagccuuacuacacaggagaacaugcaaaggccauaggaaauugcccaauaugggugaaaacacccuugaagcuggccaauggaaccaaauauagaccuccugcaaaacuauuaaaggaaagggguuucuucggagcuauugcugguuucuuagaaggaggaugggaaggaaugauugcagguuggcacggauacacaucccauggggcacauggaguagcgguggcagcagaccuuaagagcacucaagaggccauaaacaagauaacaaaaaaucucaacucuuugagugagcuggaaguaaagaaucuucaaagacuaagcggugccauggaugaacuccacaacgaaauacuagaacuagaugagaaaguggaugaucucagagcugauacaauaagcucacaaauagagcucgcaguccugcuuuccaaugaaggaauaauaaacagugaagaugaacaucucuuggcgcuugaaagaaagcugaagaaaaugcugggccccucugcuguagagauagggaauggaugcuuugaaaccaaacacaagugcaaccagaccugucucgacagaauagcugcugguaccuuugaugcaggagaauuuucucuccccaccuuugauucacugaauauuacugcugcaucuuuaaaugacgauggauuggauaaucauacuauacugcuuuacuacucaacugcugccuccaguuuggcuguaacacugaugauagcuaucuuuguuguuuauauggucuccagagacaauguuucuugcuccaucugucuauaa

SEQ ID NO: 59435 - RNA, 1758 nt, Artificial Sequence
  derived and/or modified CDS sequence (wt) from hemagglutinin__InfluenzaB__AGX20646
augaaggcaauaauuguacuacucaugguaguaacauccaaugcagaucgaaucugcacugggauaacaucgucaaacucaccacaugucgucaaaacugcuacucaaggggaggucaaugugacugguguaauaccacugacaacaacacccaccaaaucucauuuugcaaaucucaaaggaacagaaaccagagggaaacuaugcccaaaaugccccaacugcacagaucuggacguagccuugggcagaccaaaaugcacggggaaaauacccucggcaagaguuucaauacuccaugaagucagaccuguuacaucugggugcuuuccuauaaugcacgacagaacaaaaauuagacagcugccuaaccuucuccgaggauacgaacauaucagauuaucaacucauaacguuaucaaugcagaaaaugcaccaggaggacccuacaaaauuggaaccucagggucuugcccuaacguuaccaauggaaacggauuuuucgcaacaauggcuugggccgucccaaaaaacgacaaaaacaaaacagcaacaaauccauuaacaauagaaguaccauacauuuguacagaaggagaagaccaaauuaccguuuggggguuccacucugauaacgagacccaaauggcaaagcucuauggggacucaaagccccagaaguucaccucaucugccaacggagugaccacacauuacguuucacagauugguggcuucccaaaucaaacagaagacggaggacuaccacaaagugguagaauuguuguugauuacauggugcaaaaaucugggaaaacaggaacaauuaccuaucaaagagguauuuuauugccucaaaagguguggugcgcaaguggcaggagcaagguaauaaaaggauccuugccuuuaauuggagaagcagauugccuccacgaaaaauacgguggauuaaacaaaagcaagccuuacuacacaggggaacaugcaaaggccauaggaaauugcccaauaugggugaagacacccuugaagcuggccaauggaaccaaauauagaccuccugcaaaacuauuaaaggaaagggguuucuucggagcuauugcugguuucuuagaaggaggaugggaaggaaugauugcagguuggcacggauacacgucccauggggcacauggaguagcgguggcagcagaccuuaagagcacucaagaggccauaaacaagauaacaaaaaaucucaacucuuugagugagcuggaaguaaagaaucuucaaagacuaaguggugcuauggaugaacuccacaacgaaauacuagaacuagacgagaaaguggaugaucucagagcugauacaauaagcucacaaauagaacucgcaguccugcuuuccaaugaaggaauaauaaacagugaagaugaacaucucuuggcacuugaaagaaagcugaagaaaaugcugggcccuucugcuguagagauagggaauggaugcuuugaaaccaaacacaagugcaaccagaccugucucgacagaauagcugcugguaccuuugaugcaggagaauuuucucuccccaccuuugauucacugaauauuacugcugcaucuuuaaaugacgauggauuggauaaucauaccauacugcuuuacuacucaacugcugccuccaguuuggcuguaacacugaugauagcuaucuuuguuguuuauauggucuccagagacaauguuucuugcuccaucugucuauaa

SEQ ID NO: 59436 - RNA, 1758 nt, Artificial Sequence
  derived and/or modified CDS sequence (wt) from hemagglutinin__InfluenzaB__AGX20668
augaaggcaauaauuguacuacucaugguaguaacauccaaugcagaucgaaucugcacugggauaacaucgucaaacucaccacaugucgucaaaacugcuacucaaggggaggucaaugugacugguguaauaccacugacaacaacacccaccaaaucucauuuugcaaaucucaaaggaacagaaaccagagggaaacuaugcccaaaaugccccaacugcacagaucuggacguagccuugggcagaccaaaaugcacggggaaaauacccucggcaagaguuucaauacuccaugaagucagaccuguuacaucugggugcuuuccuauaaugcacgacagaacaaaaauuagacagcugccuaaccuucuccgaggauacgaacauaucagauuaucaacucauaacguuaucaaugcagaaaaugcaccaggaggacccuacaaaauuggaaccucagggucuugcccuaacguuaccaauggaaacggauuuuucgcaacaauggcuugggccgucccaaaaaacgacaaaaccaaaacagcaacaaauccauuaacaauagaaguaccauacaucuguacagaaggagaagaccaaauuaccguuuggggguuccacucugauaacgagacccaaauggcaaagcucuauggggacucaaagccccagaaguucaccucaucugccaacggagugaccacacauuacguuucacagauugguggcuucccaaaucaaacagaagacggaggacuaccacaaagugguagaauuguuguugauuacauggugcaaaaaucugggaaaacaggaacaauuaccuaucaaagagguauuuuauugccucaaaagguguggugcgcaaguggcagaagcaagguaauaaaaggauccuugccuuuaauuggagaagcagauugccuccacgaaaaauacgguggauuaaacaaaagcaagccuuacuacacaggggaacaugcaaaggccauaggaaauugcccaauaugggugaagacacccuugaagcuggccaauggaaccaaauauagaccuccugcaaaacuauuaaaggaaagggguuucuucggagcuauugcugguuucuuagaaggaggaugggaaggaaugauugcagguuggcacggauacacgucccauggggcacauggaguagcgguggcagcagaccuuaagagcacucaagaggccauaaacaagauaacaaaaaaucucaacucuuugagugagcuggaaguaaagaaucuucaaagacuaagcggugccauggaugaacuccacaacgaaauacuagaacuagacgagaaaguggaugaucucagagcugauacaauaagcucacaaauagaacucgcaguccugcuuuccaaugaaggaauaauaaacagugaagaugaacaucucuuggcacuugaaagaaagcugaagaaaaugcugggcccuucugcuguagagauagggaauggaugcuuugaaaccaaacacaagugcaaccagaccugucuugacagaauagcugcugguaccuuugaugcaggagaauuuucucuccccaccuuugauucacugaauauuacugcugcgucuuuaaaugacgauggauuggauaaucauaccauacugcuuuacuacucaacugcugccuccaguuuggcuguaacacugaugauagcuaucuuuguuguuuauauggucuccagagacaauguuucuugcuccaucugucuauaa

SEQ ID NO: 59437 - RNA, 1758 nt, Artificial Sequence
  derived and/or modified CDS sequence (wt) from hemagglutinin__InfluenzaB__AGX20679
augaaggcaauaauuguacuacucaugguaguaacauccaaugcagaucgaaucugcacugggauaacaucgucaaacucaccacauaucgucaaaacugcuacucaaggggaggucaaugugacugguguaauaccacugacaacaacacccaccaaaucucauuuugcaaaucucaaaggaacagaaaccagggggaaacuaugcccaaaaugccucaacugcacagaucuggacguagccuugggcagaccaaaaugcacggggaaaauacccucggcaagaguuucaauacuccaugaagucagaccuguuacaucugggugcuuuccuauaaugcacgacagaacaaaaauuagacagcugccuaaccuucucagaggauacgaacauaucagguuaucaacucauaacguuaucaaugcagaaaaugcaccaggaggacccuacaaaauuggaaccucagggucuugccccaacauuaccaauggaaacggauuuuucgcaacaauggcuugggccgucccaaaaaacgacaaaaacaaaacagcaacaaauccauuaacaauagaaguaccauacauuuguacagaaggagaagaccaaauuaccguuuggggguuccacucugacaaugaaacccaaauggcaaagcucuauggggacucaaagccccagaaguucaccucaucugccaacggagugaccacacauuacguuucacagauugguggcuucccaaaucaaacagaagacggaggacuaccacaaagugguagaauuguuguugauuacauggugcaaaaaucugggaaaacaggaacaauuaccuaucaaagggguauuuuauugccucaaaagguguggugcgcaaguggcaggagcaagguaauaaaaggauccuugccuuuaauuggagaagcagauugccuccacgaaaaauacgguggauuaaacaaaagcaagccuuacuacacaggggaacaugcaaaggccauaggaaauugcccaauaugggugaaaacacccuugaagcuggccaauggaaccaaauauagaccuccugcaaaacuauuaaaggaaagggguuucuucggugcuauugcuggcuucuuagaaggaggaugggaaggaaugauugcagguuggcacggauacacaucccauggggcacauggaguagcgguggcagcagaccuuaagagcacucaagaggccauaaacaagauaacaaaaaaucucaacucuuugagugagcuggaaguaaagaaucuucaaagacuaagcggugccauggaugaacuccacaaugaaauacuagaauuagaugagaaaguggaugaucucagagcugauacaauaagcucacaaauagaacucgcaguccugcuuuccaaugaaggaauaauaaacagugaagaugaacaucucuuggcgcuugaaagaaagcugaagaaaaugcugggccccucugcuguagagauagggaauggaugcuuugaaaccaaacacaagugcaaccagaccugucucgacagaauagcugcugguaccuuugaugcaggagaauuuucucuccccacuuuugauucacugaauauuacugcugcaucuuuaaaugacgauggauuggauaaucauacuauacugcuuuacuacucaacugcugccuccaguuuggcuguaacacugaugauagcuaucuuuguuguuuauauggucuccagagacaauguuucuugcuccaucugucuauaa

SEQ ID NO: 59438 - RNA, 1758 nt, Artificial Sequence
  derived and/or modified CDS sequence (wt) from hemagglutinin__InfluenzaB__AGX20690
augaaggcaauaauuguacuacucaugguaguaacauccaaugcagaucggaucugcacugggauaacaucgucaaacucaccacaugucgucaaaacugcuacucaaggggaggucaaugugaccgguguaauaccacugacaacaacacccaccaaaucucauuuugcaaaucucaaaggaaccgaaaccagggggaaacuaugcccaaaaugccucaacugcacagaucuggacguagccuugggcagaccaaaaugcacugggaaaauacccucggcaagaguuucaauacuccaugaagucagaccuguuacaucugggugcuuuccuauaaugcacgauagaacaaaaauuagacagcugccuaaccuucuccgaggauacgaacauaucagguuaucaacucauaacguuaucaaugcagaaaaugcaccaggaggacccuacaaaauuggaaccucagggucuugcccuaacguuaccaauggaaacggauucuucgcaacaauggcuugggcugucccaaaaaacgacaaaaacaaaacagcaacaaauccauuaacaauagaaguaccauacauuuguacagaaggagaagaccaaauuaccguuuggggguuccacucugacaacgagacccaaauggcaaagcucuauggggacucaaagccccagaaguucaccucaucugccaacggagugaccacacauuacguuucacagauugguggcuucccaaaucaaacagaagacggaggacuaccacaaagugguagaauuguuguugauuacauggugcaaaaaucugggaaaacaggaacaauuaccuaucaaagagguauuuuauugccucaaaagguguggugcgcaaguggcaggagcaagguaauaaaaggauccuugccuuuaauuggagaagcagauugccuccacgaaaaauacgguggauuaaacaaaagcaagccuuacuacacaggggaacaugcaaaggccauaggaaauugcccaauaugggugaaaacacccuugaagcuggccaauggaaccaaauauagaccuccugcaaaacuauuaaaggaaagggguuucuucggagcuauugcugguuucuuagaaggaggaugggaaggaaugauugcagguuggcacggauacacaucccauggggcacauggaguagcgguggcagcagaccuuaagagcacucaagaggccauaaacaagauaacaaaaaaucucaacucuuugagugagcuggaaguaaagaaucuccaaagacuaagcggugccauggaugaacuccacaacgaaauacuagaacuagaugagaaaguggaugaucucagagcugauacaauaagcucacaaauagagcucgcaguccugcuuuccaaugaaggaauaauaaacagugaagaugaacaucucuuggcgcuugaaagaaagcugaagaaaaugcugggccccucugcuguagagauagggaauggaugcuuugaaaccaaacacaagugcaaccagaccugucucgacagaauagcugcugguaccuuugaugcaggagaauuuucucuccccaccuuugauucacugaauauuacugcugcaucuuuaaaugacgauggauuggauaaucauacuauacugcuuuacuacucaacugcugccuccaguuuggcuguaacacugaugauagcuaucuuuguuguuuauauggucuccagagacaauguuucuugcuccaucugucuauag

SEQ ID NO: 59439 - RNA, 1758 nt, Artificial Sequence
  derived and/or modified CDS sequence (wt) from hemagglutinin__InfluenzaB__AGX20701
augaaggcaauaauuguacuacucaugguaguaacauccaaugcagaucgaaucugcacugggauaacaucgucaaacucaccacaugucgucaaaacugcuacucaaggggaggucaaugugacugguguaauaccacugacaacaacacccaccaaaucucauuuugcaaaucucaaaggaacagaaaccagggggaaacuaugcccaaaaugccucaacugcacagaucuggacguagccuugggcagaccaaaaugcacggggaaaauacccucggcaagaguuucaauacuccaugaagucagaccuguuacaucugggugcuuuccuauaaugcacgacagaacaaaaauuagacagcugcccaaccuucuccgaggauacgaacauaucagguuaucaacucauaacguuaucaaugcagaaaaugcaccaggaggacccuacaaaauuggaaccucagggucuugcccuaacguuaccaauggaaacggauuuuuugcaacaauggcuugggccgucccaaaaaacgacaaaaacaaaacagcaacaaauccauuaacaauagaaguaccauacauuuguacagaaggagaagaccaaauuaccguuuggggguuccacucugacaacgagacccaaauggcaaagcucuauggggacucaaagccccagaaguucaccucaucugccaacggagugaccacacauuacguuucacagauugguggcuucccaaaucaaacagaagacggaggacuaccacaaagugguagaauuguuguugauuacauggugcaaaaaucugggaaaacaggaacaauuaccuaucaaagagguauuuuauugccucaaaagguguggugcgcaaguggcaggagcaagguaauaaaaggauccuugccuuuaauuggagaagcagauugccuccacgaaaaauacgguggauuaaacaaaagcaagccuuacuacacaggggaacaugcaaaggccauaggaaauugcccaauaugggugaaaacacccuugaagcuggccaauggaaccaaauauagaccuccugcaaaacuauuaaaggaaagggguuucuucggagcuauugcugguuucuuagaaggaggaugggaaggaaugauugcagguuggcacggauacacaucccauggggcacauggaguagcgguggcagcagaccuuaagagcacucaagaggccauaaacaagauaacaaaaaaucucaacucuuugagugagcuggaaguaaagaaucuucaaagacuaagcggugccauggaugaacuccacaacgaaauacuagaacuagaugaaaaaguggaugaucucagagcugauacaauaagcucacaaauagaacucgcaguccugcuuuccaaugaaggaauaauaaacagugaagaugaacaucucuuggcgcuugaaagaaagcugaagaaaaugcugggccccucugcuguagagauagggaauggaugcuuugaaaccaaacacaagugcaaccagaccugucucgacagaauagcugcugguacuuuugaugcaggagaauuuucucuccccaccuuugauucacugaauauuacugcugcgucuuuaaaugacgauggauuagauaaucauacuauacugcuuuacuacucaacugcugccuccaguuuggcuguaacacugaugauagcuaucuuuguuguuuauauggucuccagagacaauguuucuugcuccaucugucuauaa

SEQ ID NO: 59440 - RNA, 1758 nt, Artificial Sequence
  derived and/or modified CDS sequence (wt) from hemagglutinin__InfluenzaB__AGX20712
augaaggcaauaauuguacuacucaugguaguaacauccaaugcagaucgaaucugcacugggauaacgucgucaaacucaccacaugucgucaaaacugcuacucaaggggaggucaaugugaccgguguaauaccacugacaacaacacccaccaaaucucauuuugcaaaucucaaaggaacagaaaccagggggaaacuaugcccaaaaugccucaacugcacagaucuggacguagccuugggcagaccaaaaugcacggggaaaauacccucggcaagaguuucaauacuccaugaagucagaccuguuacaucugggugcuuuccuauaaugcacgauagaacaaaaauuagacagcugccuaaccuucuccgaggauacgaacauaucagguuaucaacucauaacguuaucaaugcagaaaaugcaccaggaggacccuacaaaauuggaaccucagggucuugcccuaacauuaccaauggaaacggauucuucgcaacaauggcuugggccgucccaaaaaacgacaaaaacaaaacagcaacaaauccauuaacaauagaaguaccauacauuuguacagaaggagaagaccaaauuaccguuuggggguuccacucugacaacgagacccaaauggcaaagcucuauggggacucaaagccccagaaguucaccucaucugccaacggagugaccacacauuacguuucacagauugguggcuucccaaaucaaacagaagacggaggacuaccacaaagugguagaauuguuguugauuacauggugcaaaaaucugggaaaacaggaacaauuaccuaucaaagagguauuuuauugccucaaaagguguggugcgcaaguggcaggagcaagguaauaaaaggauccuugccuuuaauuggagaagcagauugccuccacgaaaaauacgguggauuaaacaaaagcaagccuuacuacacaggggaacaugcaaaggccauaggaaauugcccaauaugggugaaaacacccuugaagcuggccaauggaaccaaauauagaccuccugcaaaacuauuaaaggaaagggguuucuucggagcuauugcugguuucuuagaaggaggaugggaaggaaugauugcagguuggcacggauacacaucccauggggcacauggaguagcgguggcagcagaccuuaagagcacucaagaggccauaaacaagauaacaaaaaaucucaacucuuugagugagcuggaaguaaagaaucuucaaagacuaagcggugccauggaugaacuccacaacgaaauacuagaacuagaugagaaaguggaugaucucagagcugauacaauaagcucacaaauagaacucgcaguccugcuuuccaaugaaggaauaauaaacagugaagaugaacaucuauuggcgcuugaaagaaagcugaagaaaaugcugggccccucugcuguagagauagggaauggaugcuuugaaaccaaacacaagugcaaccagaccugucucgacagaauagcugcugguaccuuugaugcaggagaauuuucucuccccaccuuugauucacugaauauuacugcugcaucuuuaaaugacgauggauuggauaaucauacuauacugcuuuacuacucaacugcugccuccaguuuggcuguaacacugaugauagcuaucuuuguuguuuauauggucuccagagacaauguuucuugcuccaucugucuauaa

SEQ ID NO: 59441 - RNA, 1758 nt, Artificial Sequence
  derived and/or modified CDS sequence (wt) from hemagglutinin__InfluenzaB__AGX20723
augaaggcaauaauuguacuacucaugguaguaacauccaaugcagaucgaaucugcacugggauaacaucgucaaacucaccacaugucgucaaaacugcuacucaaggggaggucaaugugacugguguaauaccacugacaacaacacccaccaaaucucauuuugcaaaucucaaaggaacagaaaccagagggaaacuaugcccaaaaugccccaacugcacagaucuggacguagccuugggcagaccaaaaugcacggggaaaauacccucggcaagaguuucaauacuccaugaagucagaccuguuacaucugggugcuuuccuauaaugcacgacagaacaaaaauuagacagcugccuaaccuucuccgaggauacgaacauaucagauuaucaacucauaacguuaucaaugcagaaaaugcaccaggaggacccuacaaaauuggaaccucagggucuugcccuaacguuaccaauggaaacggauuuuucgcaacaauggcuugggccgucccaaaaaacgacaaaaacaaaacagcaacaaauccauuaacaauagaaguaccauacaucuguacagaaggagaagaccaaauuaccguuuggggguuccacucugauaacgagacccaaauggcaaagcucuauggggacucaaagccccagaaguucaccucaucugccaacggagugaccacacauuacguuucacagauugguggcuucccaaaucaaacagaagacggaggacuaccacaaagugguagaauuguuguugauuacauggugcaaaaaucugggaaaacaggaacaauuaccuaucaaagagguauuuuauugccucaaaagguguggugcgcaaguggcagaagcaagguaauaaaaggauccuugccuuuaauuggagaagcagauugccuccacgaaaaauacgguggauuaaacaaaagcaagccuuacuacacaggggaacaugcaaaggccauaggaaauugcccaauaugggugaagacacccuugaagcuggccaauggaaccaaauauagaccuccugcaaaacuauuaaaggaaagggguuucuucggagcuauugcugguuucuuagaaggaggaugggaaggaaugauugcagguuggcacggauacacgucccauggggcacauggaguagcgguggcagcagaccuuaagagcacucaagaggccauaaacaagauaacaaaaaaucucaacucuuugagugagcuggaaguaaagaaucuucaaagacuaagcggugccauggaugaacuccacaacgaaauacuagaacuagacgagaaaguggaugaucucagagcugauacaauaagcucacaaauagaacucgcaguccugcuuuccaaugaaggaauaauaaacagugaagaugaacaucucuuggcacuugaaagaaagcugaagaaaaugcugggcccuucugcuguagagauagggaauggaugcuuugaaaccaaacacaagugcaaccagaccugucucgacagaauagcugcugguaccuuugaugcaggagaauuuucucuccccaccuuugauucacugaauauuacugcugcgucuuuaaaugacgauggauuggauaaucauaccauacugcuuuacuacucaacugcugccuccaguuuggcuguaacacugaugauagcuaucuuuguuguuuauauggucuccagagacaauguuucuugcuccaucugucuauaa

SEQ ID NO: 59442 - RNA, 1758 nt, Artificial Sequence
  derived and/or modified CDS sequence (wt) from hemagglutinin__InfluenzaB__AGX20734
augaaggcaauaauuguacuacucaugguaguaacauccaaugcagaucggaucugcacugggauaacaucgucaaacucaccacaugucgucaaaacugcuacucaaggggaggucaaugugaccgguguaauaccacugacaacaacacccaccaaaucucauuuugcaaaucucaaaggaacagaaaccagggggaaacuaugcccaaaaugccucaacugcacagaucuggacguagccuugggcagaccaaaaugcacugggaaaauacccucggcaagaguuucaauacuccaugaagucagaccuguuacaucugggugcuuuccuauaaugcacgauagaacaaaaauuagacagcugccuaaccuucuccgaggauacgaacauaucagguuaucaacuaauaacguuaucaaugcagaaaaugcaccaggaggacccuacaaaauuggaaccucagggucuugcccuaacguuaccaauggaaacggauucuucgcaacaauggcuugggccgucccaaaaaacgacaaaaacaaaacagcaacaaauccauuaacaauagaaguaccauacauuuguacagaaggagaagaccaaauuaccguuuggggguuccacucugacaacgagacccaaauggcaaagcucuauggggacucaaagccccagaaguucaccucaucugccaacggagugaccacacauuacguuucacagauugguggcuucccaaaucaaacagaagacggaggacuaccacaaagugguagaauuguuguugauuacauggugcaaaaaucugggaaaacaggaacaauuaccuaucaaagagguauuuuauugccucaaaagguguggugcgcaaguggcaggagcaagguaauaaaaggauccuugccuuuaauuggagaagcagauugccuccacgaaaaauacgguggauuaaacaaaagcaagccuuacuacacaggggaacaugcaaaggccauaggaaauugcccaauaugggugaaaacacccuugaagcuggccaauggaaccaaauauagaccuccugcaaaacuauuaaaggaaagggguuucuucggagcuauugcugguuucuuagaaggaggaugggaaggaaugauugcagguuggcacggauacacaucccauggggcacauggaguagcgguggcagcagaccuuaagagcacucaagaggccauaaacaagauaacaaaaaaucucaacucuuugagugagcuggaaguaaagaaucuccaaagacuaagcggugccauggaugaacuccacaacgaaauacuagaacuagaugagaaaguggaugaucucagagcugauacaauaagcucacaaauagagcucgcaguccugcuuuccaaugaaggaauaauaaacagugaagaugaacaucucuuggcgcuugaaagaaagcugaagaaaaugcugggccccucugcuguagagauagggaauggaugcuuugaaaccaaacacaagugcaaccagaccugucucgacagaauagcugcugguaccuuugaugcaggagaauuuucucuccccaccuuugauucacugaauauuacugcugcaucuuuaaaugacgauggauuggauaaucauacuauacugcuuuacuacucaacugcugccuccaguuuggcuguaacacugaugauagcuaucuuuguuguuuauauggucuccagagacaauguuucuugcuccaucugucuauag

SEQ ID NO: 59443 - RNA, 1758 nt, Artificial Sequence
  derived and/or modified CDS sequence (wt) from hemagglutinin__InfluenzaB__AGX20745
augaaggcaauaauuguacuacucaugguaguaacauccaaugcagaucgaaucugcacugggauaacaucgucaaacucaccacaugucgucaaaacugcuacucaaggggaggucaaugugacugguguaauaccacugacaacaacacccaccaaaucucauuuugcaaaucucaaaggaacagaaaccagagggaaacuaugcccaaaaugccccaacugcacagaucuggacguagccuugggcagaccaaaaugcacggggaaaauacccucggcaagaguuucaauacuccaugaagucagaccuguuacaucugggugcuuuccuauaaugcacgacagaacaaaaauuagacagcugccuaaccuucuccgaggauacgaacauaucagauuaucaacucauaacguuaucaaugcagaaaaugcaccaggaggacccuacaaaauuggaaccucagggucuugcccuaacguuaccaauggaaacggauuuuucgcaacaauggcuugggccgucccaaaaaacgacaaaaacaaaacagcaacaaauccauuaacaauagaaguaccauacauuuguacagaaggagaagaccaaauuaccauuuggggguuccacucugauaacgagacccaaauggcaaagcucuauggggacucaaagccccagaaguucaccucaucugccaacggagugaccacacauuacguuucacagauuggcggcuucccaaaucaaacagaagauggaggacuaccacaaagugguagaauuguuguugauuacauggugcaaaaaucugggaaaacaggaacaauuaccuaucaaagagguauuuuauugccucaaaagguguggugcgcaaguggcaggagcaagguaauaaaaggauccuugccuuuaauuggagaagcagauugccuccacgaaaaauacgguggauuaaacaaaagcaagccuuacuacacaggggaacaugcaaaggccauaggaaauugcccaauaugggugaagacacccuugaagcuggccaauggaaccaaauauagaccuccugcaaaacuauuaaaggaaagggguuucuucggagcuauugcugguuucuuagaaggaggaugggaaggaaugauugcagguuggcacggauacacgucccauggggcacauggaguagcgguggcagcagaccuuaagagcacucaagaggccauaaacaagauaacaaaaaaucucaacucuuugagugagcuggaaguaaagaaucuucaaagacuaaguggugccauggaugaacuccacaacgaaauacuagaacuagacgagaaaguggaugaucucagagcugauacaauaagcucacaaauagaacucgcaguccugcuuuccaaugaaggaauaauaaacagugaagaugaacaucucuuggcacuugaaagaaagcugaagaaaaugcugggcccuucugcuguagagauagggaauggaugcuuugaaaccaaacacaagugcaaccagaccugucucgacagaauagcugcugguaccuuugaugcaggagaauuuucucuccccaccuuugauucacugaauauuacugcugcaucuuuaaaugacgauggauuggauaaucauaccauacugcuuuacuacucaacugcugccuccaguuuggcuguaacacugaugauagcuaucuuuguuguuuauauggucuccagagacaauguuucuugcuccaucugucuauaa

SEQ ID NO: 59444 - RNA, 1758 nt, Artificial Sequence
  derived and/or modified CDS sequence (wt) from hemagglutinin__InfluenzaB__AGX20756
augaaggcaauaauuguacuacucaugguaguaacauccaaugcagaucgaaucugcacugggauaacgucgucaaacucaccacaugucgucaaaacugcuacucaaggggaggucaaugugaccgguguaauaccacugacaacaacacccaccaaaucucauuuugcaaaucucaaaggaacagaaaccagggggaaacuaugcccaaaaugccucaacugcacagaucuggacguagccuugggcagaccaaaaugcacggggaaaauacccucggcaagaguuucaauacuccaugaagucagaccuguuacaucugggugcuuuccuauaaugcacgauagaacaaaaauuagacagcugccuaaccuucuccgaggauacgaacauaucagguuaucaacucauaacguuaucaaugcagaaaaugcaccaggaggacccuacaaaauuggaaccucagggucuugcccuaacauuaccaauggaaacggauucuucgcaacaauggcuugggccgucccaaaaaacgacaaaaacaaaacagcaacaaauccauuaacaauagaaguaccauacauuuguacagaaggagaagaccaaauuaccguuuggggguuccacucugacaacgagacccaaauggcaaagcucuauggggacucaaagccccagaaguucaccucaucugccaacggagugaccacacauuacguuucacagauugguggcuucccaaaucaaacagaagacggaggacuaccacaaagugguagaauuguuguugauuacauggugcaaaaaucugggaaaacaggaacaauuaccuaucaaagagguauuuuauugccucaaaagguguggugcgcaaguggcaggagcaagguaauaaaaggauccuugccuuuaauuggagaagcagauugccuccacgaaaaauacggcggauuaaacaaaagcaagccuuacuacacaggggaacaugcaaaggccauaggaaauugcccaauaugggugaaaacacccuugaagcuggccaauggaaccaaauauagaccuccugcaaaacuauuaaaggaaagggguuucuucggagcuauugcugguuucuuagaaggaggaugggaaggaaugauugcagguuggcacggauacacaucccauggggcacauggaguagcgguggcagcagaccuuaagagcacucaagaggccauaaacaagauaacaaaaaaucucaacucuuugagugagcuggaaguaaagaaucuucaaagacuaagcggugccauggaugaacuccacaacgaaauacuagaacuagaugagaaaguggaugaucucagagcugauacaauaagcucacaaauagaacucgcaguccugcuuuccaaugaaggaauaauaaacagugaagaugaacaucuauuggcgcuugaaagaaagcugaagaaaaugcugggccccucugcuguagagauagggaauggaugcuuugaaaccaaacacaagugcaaccagaccugucucgacagaauagcugcugguaccuuugaugcaggagaauuuucucuccccaccuuugauucacugaauauuacugcugcaucuuuaaaugacgauggauuggauaaucauacuauacugcuuuacuacucaacugcugccuccaguuuggcuguaacacugaugauagcuaucuuuguuguuuauauggucuccagagacaauguuucuugcuccaucugucuauaa

SEQ ID NO: 59445 - RNA, 1758 nt, Artificial Sequence
  derived and/or modified CDS sequence (wt) from hemagglutinin__InfluenzaB__AGX20767
augaaggcaauaauuguacuacucaugguaguaacauccaaugcagaucgaaucugcacugggauaacaucgucaaacucaccacauguagucaaaacugcuacucaaggggaggucaaugugacugguguaauaccacugacaacaacacccaccaaaucucauuuugcaaaucucaaaggaacagaaaccagagggaaacuaugcccaaaaugccccaacugcacagaucuggacguagccuugggcagaccaaaaugcacggggaaaauacccucugcaagaguuucaauacuccaugaagucagaccuguuacaucugggugcuuuccuauaaugcacgacagaacaaaaauuagacagcugccuaaccuucuccgaggauacgaacauaucagauuaucaacucauaacguuaucaaugcagaaaaugcaccaggaggacccuacaaaauuggaaccucagggucuugcccuaacguuaccaauggaaacggauuuuucgcaacaauggcuugggccgucccaaaaaacgacaaaaacaaaacagcaacaaauccauuaacaauagaaguaccauacauuuguacagaaggagaagaccaaauuaccguuuggggguuccacucugauaacgagacccaaauggcaaagcucuauggggacucaaagccccagaaguucaccucaucugccaacggagugaccacacauuacguuucacagauuggcggcuucccaaaucaaacagaagauggaggacuaccacaaagugguagaauuguuguugauuacauggugcaaaaaucugggaaaacaggaacaauuaccuaucaaagagguauuuuguugccucaaaagguguggugcgcaaguggcaggagcaagguaauaaaaggauccuugccuuuaauuggagaagcagauugccuccacgaaaaauacgguggauuaaacaaaagcaagccuuacuacacaggggaacaugcaaaggccauaggaaauugcccaauaugggugaagacacccuugaagcuggccaauggaaccaaauauagaccuccugcaaaacuauuaaaggaaagggguuucuucggagcuauugcugguuucuuagaaggaggaugggaaggaaugauugcagguuggcacggauacacgucccauggggcacauggaguagcgguggcagcagaccuuaagagcacucaagaggccauaaacaagauaacaaaaaaucucaacucuuugagugagcuggaaguaaagaaucuucaaagacuaaguggugccauggaugaacuccacaacgaaauacuagaacuagacgagaaaguggaugaucucagagcugauacaauaagcucacaaauagaacucgcaguccugcuuuccaaugaaggaauaauaaacagugaagaugaacaucucuuggcacuugaaagaaagcugaagaaaaugcugggcccuucugcuguagagauagggaauggaugcuuugaaaccaaacacaagugcaaccagaccugucucgacagaauagcugcugguaccuuugaugcaggagaauuuucucuccccaccuuugauucacugaauauuacugcugcaucuuuaaaugacgauggauuggauaaucauaccauacugcuuuacuacucaacugcugccuccaguuuggcuguaacacugaugauagcuaucuuuguuguuuauauggucuccagagacaauguuucuugcuccaucugucuauaa

SEQ ID NO: 59446 - RNA, 1758 nt, Artificial Sequence
  derived and/or modified CDS sequence (wt) from hemagglutinin__InfluenzaB__AGX20778
augaaggcaauaauuguacuacucaugguaguaacauccaaugcagaucgaaucugcacugggauaacaucgucaaacucaccacaugucgucaaaacugcuacucaaggggaggucaaugugaccgguguaauaccacugacaacaacacccaccaaaucucauuuugcaaaucucaaaggaacagaaaccagggggaaacuaugcccaaaaugccucaacugcacagaucuggacguagccuugggcagaccaaaaugcacggggaaaauacccucggcaagaguuucaauacuccaugaagucagaccuguuacaucugggugcuuuccuauaaugcacgauagaacaaaaauuagacagcugccuaaccuucuccgaggauacgaacauaucagguuaucaacucauaacguuaucaaugcagaaaaugcaccaggaggacccuacaaaauuggaaccucagggucuugcccuaacguuaccaauggaaacggauucuucgcaacaauggcuugggccgucccaaaaaacgacaaaaacaaaacagcaacaaauccauuaacaauagaaguaccauacauuuguacagaaggagaagaccaaauuaccguuuggggguuccacucugacaacgagacccaaauggcaaagcucuauggggacucaaagccccagaaguucaccucaucugccaacggagugaccacacauuacguuucacagauugguggcuucccaaaucaaacagaagacggaggacuaccacaaagugguagaauuguuguugauuacauggugcaaaaaucugggaaaacaggaacaauuaccuaucaaagagguauuuuauugccucaaaagguguggugcgcaaguggcaggagcaagguaauaaaaggauccuugccuuuaauuggagaagcagauugccuccacgaaaaauacgguggauuaaacaaaagcaagccuuacuacacaggggaacaugcaaaggccauaggaaauugcccaauaugggugaaaacacccuugaagcuggccaauggaaccaaauauagaccuccugcaaaacuauuaaaggaaagggguuucuucggagcuauugcugguuucuuagaaggaggaugggaaggaaugauugcagguuggcacggauacacaucccauggggcacauggaguagcgguggcagcagaccuuaagagcacucaagaggccauaaacaagauaacaaaaaaucucaacucuuugagugagcuggaaguaaagaaucuucaaagacuaagcggugccauggaugaacuccacaacgaaauacuagaacuagaugagaagguggaugaucucagagcugauacaauaagcucacaaauagaacucgcaguccugcuuuccaaugaaggaauaauaaacagugaagaugaacaucucuuggcgcuugaaagaaagcugaagaaaaugcugggccccucugcuguagagauagggaauggaugcuuugaaaccaaacacaagugcaaccagaccugucucgacagaauagcugcugguaccuuugaugcaggagaauuuucucuccccaccuuugauucacugaauauuacugcugcaucuuuaaaugacgauggauuggauaaucauacuauacugcuuuacuacucaacugcugccuccaguuuggcuguaacacugaugauagcuaucuuuguuguuuauauggucuccagagacaauguuucuugcuccaucugucuauaa

SEQ ID NO: 59447 - RNA, 1758 nt, Artificial Sequence
  derived and/or modified CDS sequence (wt) from hemagglutinin__InfluenzaB__AGX20789
augaaggcaauaauuguacuacucaugguaguaacauccaaugcagaucgaaucugcacugggauaacaucgucaaacucaccacaugucgucaaaacugcuacucaaggggaggucaaugugacugguguaauaccacugacaacaacacccaccaaaucucauuuugcaaaucucaaaggaacagaaaccagagggaaacuaugcccaaaaugccccaacugcacagaucuggacguagccuugggcagaccaaaaugcacggggaaaauacccucggcaagaguuucaauacuccaugaagucagaccuguuacaucugggugcuuuccuauaaugcacgacagaacaaaaauuagacagcugccuaaccuucuccgaggauacgaacauaucagauuaucaacucauaacguuaucaaugcagaaaaugcaccaggaggacccuacaaaauuggaaccucagggucuugcccuaacguuaccaauggaaacggauuuuucgcaacaauggcuugggccgucccaaaaaacgacaaaaacaaaacagcaacaaauccauuaacaauagaaguaccauacauuuguacagaaggagaagaccaaauuaccguuuggggguuccacucugauaacgagacccaaauggcaaagcucuauggggacucaaagccccagaaguucaccucaucugccaacggagugaccacacauuacguuucacagauugguggcuucccaaaucaaacagaagacggaggacuaccacaaagugguagaauuguuguugauuacauggugcaaaaaucugggaaaacaggaacaauuaccuaucaaagagguauuuuauugccucaaaagguguggugcgcaaguggcaggagcaagguaauaaaaggauccuugccuuuaauuggagaagcagauugccuccacgaaaaauacgguggauuaaacaaaagcaagccuuacuacacaggggaacaugcaaaggccauaggaaauugcccaauaugggugaagacacccuugaagcuggccaauggaaccaaauauagaccuccugcaaaacuauuaaaggaaagggguuucuucggagcuauugcugguuucuuagaaggaggaugggaaggaaugauugcagguuggcacggauacacgucccauggggcacauggaguagcgguggcagcagaccuuaagagcacucaagaggccauaaacaagauaacaaaaaaucucaacucuuugagugagcuggaaguaaagaaucuucaaagacuaagcggugccauggaugaacuccacggcgaaauacuagaacuagacgagaaaguggaugaucucagagcugauacaauaagcucgcaaauagaacucgcaguccugcuuuccaaugaaggaauaauaaacagugaagaugaacaucucuuggcacuugaaagaaagcugaagaaaaugcugggcccuucugcuguagagauagggaauggaugcuuugaaaccaaacacaagugcaaccagaccugucucgacagaauagcugcugguaccuuugaugcaggagaauuuucucuccccaccuuugauucacugaauauuacugcugcaucuuuaaaugacgauggauuggauaaucauaccauacugcuuuacuacucaacugcugccuccaguuuggcuguaacacugaugauagcuaucuuuguuguuuauauggucuccagagacaauguuucuugcuccaucugucuauaa

SEQ ID NO: 59448 - RNA, 1758 nt, Artificial Sequence
  derived and/or modified CDS sequence (wt) from hemagglutinin__InfluenzaB__AGX20800
augaaggcaauaauuguacuacucaugguaguaacauccaaugcagaucgaaucugcacugggauaacaucgucaaacucaccacauguagucaaaacugcuacucaaggggaggucaaugugacugguguaauaccacugacaacaacacccaccaaaucucauuuugcaaaucucaaaggaacagaaaccagagggaaacuaugcccaaaaugccccaacugcacagauuuggacguagccuugggcagaccaaaaugcacggggaaaauacccucugcaagaguuucaauacuccaugaagucagaccuguuacaucugggugcuuuccuauaaugcacgacagaacaaaaauuagacagcugccuaaccuucuccgaggauacgaacauaucagauuaucaacucauaacguuaucaaugcagaaaaugcaccaggaggacccuacaaaauuggaaccucagggucuugcccuaacguuaccaauggaaacggauuuuucgcaacaauggcuugggccgucccaaaaaacgacaaaaacaaaacagcaacaaauccauuaacaauagaaguaccauacauuuguacagaaggagaagaccaaauuaccguuuggggguuccacucugauaacgagacccaaauggcaaagcucuauggggacucaaagccccagaaguucaccucaucugccaacggagugaccacacauuacguuucacagauuggcggcuucccaaaucaaacagaagauggaggacuaccacaaagugguagaauuguuguugauuacauggugcaaaaaucugggaaaacaggaacaauuaccuaucaaagagguauuuuauugccucaaaagguguggugcgcaaguggcaggagcaagguaauaaaaggauccuugccuuuaauuggagaagcagauugccuccacgaaaaauacgguggauuaaacaaaagcaagccuuacuacacaggggaacaugcaaaggccauaggaaauugcccaauaugggugaagacacccuugaagcuggccaauggaaccaaauauagaccuccugcaaaacuauuaaaggaaagggguuucuucggagcuauugcugguuucuuagaaggaggaugggaaggaaugauugcagguuggcacggauacacgucccauggggcacauggaguagcgguggcagcagaccuuaagagcacucaagaggccauaaacaagauaacaaaaaaucucaacucuuugagugagcuggaaguaaagaaucuucaaagacuaaguggugccauggaugaacuccacaacgaaauacuagaacuagacgagaaaguggaugaucucagagcugauacaauaagcucacaaauagaacucgcaguccugcuuucuaaugaaggaauaauaaacagugaagaugaacaucucuuggcacuugaaagaaagcugaagaaaaugcugggcccuucugcuguagagauagggaauggaugcuuugaaaccaaacacaagugcaaccagaccugucucgacagaauagcugcugguaccuuugaugcaggagaauuuucucuccccaccuuugauucacugaauauuacugcugcaucuuuaaaugacgaugaauuggauaaucauaccauacugcuuuacuacucaacugcugccuccaguuuggcuguaacacugaugauagcuaucuuuguuguuuauauggucuccagagacaauguuucuugcuccaucugucuauaa

SEQ ID NO: 59449 - RNA, 1758 nt, Artificial Sequence
  derived and/or modified CDS sequence (wt) from hemagglutinin__InfluenzaB__AGX20811
augaaggcaauaauuguacuacucaugguaguaacauccaaugcagaucgaaucugcacugggauaacaucgucaaacucaccacauaucgucaaaacugccacucaaggggaggucaaugugacugguguaauaccacugacaacaacacccaccaaaucucauuuugcaaaucucaaaggaacagaaaccagggggaaacuaugcccaaaaugccucaacugcacagaucuggacguagccuugggcagaccaaaaugcacggggaaaauacccucggcaagaguuucaauacuccaugaagucagaccuguuacaucugggugcuuuccuauaaugcacgacagaacaaaaauuagacagcugccuaaccuucucagaggauacgaacauaucagguuaucaacucauaacguuaucaaugcagaaaaugcaccaggaggacccuacaaaauuggaaccucagggucuugcccuaacauuaccaauggaaacggauuuuucgcaacaauggcuugggccgucccaaaaaacgacaaaaacaaaacagcaacaaauccauuaacaauagaaguaccauacauuuguacagaaggagaagaccaaauuaccguuuggggguuccacucugacaaugaaacccaaauggcaaagcucuauggggacucaaagccccagaaguucaccucaucugccaacggagugaccacacauuacguuucacagauugguggcuucccaaaucaaacagaagacggaggacuaccacaaagugguagaauuguuguugauuacauggugcaaaaaucugggaaaacaggaacaauuaccuaucaaagggguauuuuauugccucaaaagguguggugcgcaaguggcaggagcaagguaauaaaaggauccuugccuuuaauuggagaagcagauugccuccacgaaaaauacgguggauuaaacaaaagcaagccuuacuacacaggggaacaugcaaaggccauaggaaauugcccaauaugggugaaaacacccuugaagcuggccaauggaaccaaauauagaccuccugcaaaacuauuaaaggaaagggguuucuucggugcuauugcuggcuucuuagaaggaggaugggaaggaaugauugcagguuggcacggauacacaucccauggggcacauggaguagcgguggcagcagaccuuaagagcacucaagaggccauaaacaagauaacaaaaaaucucaacucuuugagugagcuggaaguaaagaaucuucaaagacuaagcggugccauggaugaacuccacaaugaaauacuagaauuagaugagaaaguggaugaucucagagcugauacaauaagcucacaaauagaacucgcaguccugcuuuccaaugaaggaauaauaaacagugaagaugaacaucucuuggcgcuugaaagaaagcugaagaaaaugcugggccccucugcuguagagauagggaauggaugcuuugaaaccaaacacaagugcaaccagaccugucucgacagaauagcugcugguaccuuugaugcaggagaauuuucucuccccacuuuugauucacugaauauuacugcugcaucuuuaaaugacgauggauuggauaaucauacuauacugcuuuacuacucaacugcugccuccaguuuggcuguaacacugaugauagcuaucuuuguuguuuauauggucuccagagacaauguuucuugcuccaucugucuauaa

SEQ ID NO: 59450 - RNA, 1758 nt, Artificial Sequence; identical to SEQ ID NO: 59449
  derived and/or modified CDS sequence (wt) from hemagglutinin__InfluenzaB__AGX20822

SEQ ID NO: 59451 - RNA, 1758 nt, Artificial Sequence
  derived and/or modified CDS sequence (wt) from hemagglutinin__InfluenzaB__AGX20833
augaaggcaauaauuguacuacucaugguaguaacauccaaugcagaucgaaucugcacugggauaacaucgucaaacucaccacauaucgucaaaacugccacucaaggggaggucaaugugacugguguaauaccacugacaacaacacccaccaaaucucauuuugcaaaucucaaaggaacagaaaccagggggaaacuaugcccaaaaugccucaacugcacagaucuggacguagccuugggcagaccaaaaugcacggggaaaauacccucggcaagaguuucaauacuccaugaagucagaccuguuacaucugggugcuuuccuauaaugcacgacagaacaaaaauuagacagcugccuaaccuucucagaggauacgaacauaucagguuaucaacucauaacguuaucaaugcagaaaaugcaccaggaggacccuacaaaauuggaaccucagggucuugcccuaacauuaccaauggaaacggauuuuucgcaacaauggcuugggccgucccaaaaaacgacaaaaacaaaacagcaacaaauccauuaacaauagaaguaccauacauuuguacagaaggagaagaccaaauuaccguuuggggguuccacucugacaaugaaacccaaauggcaaagcucuauggggacucaaagccccagaaguucaccucaucugccaacggagugaccacacauuacguuucacagauugguggcuucccaaaucaaacagaagacggaggacuaccacaaagugguagaauuguuguugauuacauggugcaaaaaucugggaaaacaggaacaauuaccuaucaaagggguauuuuauugccucaaaagguguggugcgcaaguggcaggagcaagguaauaaaaggauccuugccuuuaauuggagaagcagauugccuccacgaaaaauacgguggauuaaacaaaagcaagccuuacuacacaggggaacaugcaaaggccauaggaaauugcccaauaugggugaaaacacccuugaagcuggccaauggaaccaaauauagaccuccugcaaaacuauuaaaggaaagggguuucuucggugcuauugcuggcuucuuagaaggaggaugggaaggaaugauugcagguuggcacggauacacaucccauggggcacauggaguagcgguggcagcagaccuuaagagcacucaagaggccauaaacaagauaacaaaaaaucucaacucuuuaagugagcuggaaguaaagaaucuucaaagacuaagcggugccauggaugaacuccacaaugaaauacuagaauuagaugagaaaguggaugaucucagagcugauacaauaagcucacaaauagaacucgcaguccugcuuuccaaugaaggaauaauaaacagugaagaugaacaucucuuggcgcuugaaagaaagcugaagaaaaugcugggccccucugcuguagagauagggaauggaugcuuugaaaccaaacacaagugcaaccagaccugucucgacagaauagcugcugguaccuuugaugcaggagaauuuucucuccccacuuuugauucacugaauauuacugcugcaucuuuaaaugacgauggauuggauaaucauacuauacugcuuuacuacucaacugcugccuccaguuuggcuguaacacugaugauagcuaucuuuguuguuuauauggucuccagagacaauguuucuugcuccaucugucuauaa

SEQ ID NO: 59452 - RNA, 1758 nt, Artificial Sequence
  derived and/or modified CDS sequence (wt) from hemagglutinin__InfluenzaB__AGX20844
augaaggcaauaauuguacuacucaugguaguaacauccaaugcagaucgaaucugcacugggauaacaucgucaaacucaccacauaucgucaaaacugccacucaaggggaggucaaugugacugguguaauaccacugacaacaacacccaccaaaucucauuuugcaaaucucaaaggaacagaaaccagggggaaacuaugcccaaaaugccucaacugcacagaucuggacguagccuugggcagaccaaaaugcauggggaaaauacccucggcaagaguuucaauacuccaugaagucagaccuguuacaucugggugcuuuccuauaaugcacgacagaacaaaaauuagacagcugccuaaccuucucagaggauacgaacauaucagguuaucaacucauaacguuaucaaugcagaaaaugcaccaggaggacccuacaaaauuggaaccucagggucuugcccuaacauuaccaauggaaacggauuuuucgcaacaauggcuugggccgucccaaaaaacgacaaaaacaaaacagcaacaaauccauuaacaauagaaguaccauacauuuguacagaaggagaagaccaaauuaccguuuggggguuccacucugacaaugaaacccaaauggcaaagcucuauggggacucaaagccccagaaguucaccucaucugccaacggagugaccacacauuacguuucacagauugguggcuucccaaaucaaacagaagacggaggacuaccacaaagugguagaauuguuguugauuacauggugcaaaaaucugggaaaacaggaacaauuaccuaucaaagggguauuuuauugccucaaaagguguggugcgcaaguggcaggagcaagguaauaaaaggauccuugccuuuaauuggagaagcagauugccuccacgaaaaauacgguggauuaaacaaaagcaagccuuacuacacaggggaacaugcaaaggccauaggaaauugcccaauaugggugaaaacacccuugaagcuggccaauggaaccaaauauagaccuccugcaaaacuauuaaaggaaagggguuucuucggugcuauugcuggcuucuuagaaggaggaugggaaggaaugauugcagguuggcacggauacacaucccauggggcacauggaguagcgguggcagcagaccuuaagagcacucaagaggccauaaacaagauaacaaaaaaucucaacucuuugagugagcuggaaguaaagaaucuucaaagacuaagcggugccauggaugaacuccacaaugaaauacuagaauuagaugagaaaguggaugaucucagagcugauacaauaagcucacaaauagaacucgcaguccugcuuuccaaugaaggaauaauaaacagugaagaugaacaucucuuggcgcuugaaagaaagcugaagaaaaugcugggccccucugcuguagagauagggaauggaugcuuugaaaccaaacacaagugcaaccagaccugucucgacagaauagcugcugguaccuuugaugcaggagaauuuucucuccccacuuuugauucacugaauauuacugcugcaucuuuaaaugacgauggauuggauaaucauacuauacugcuuuacuacucaacugcugccuccaguuuggcuguaacacugaugauagcuaucuuuguuguuuauauggucuccagagacaauguuucuugcuccaucugucuauaa

SEQ ID NO: 59453 - RNA, 1758 nt, Artificial Sequence
  derived and/or modified CDS sequence (wt) from hemagglutinin__InfluenzaB__AGX20855
augaaggcaauaauuguacuacucaugguaguaacauccaaugcagaucgaaucugcacugggauaacaucgucaaacucaccacaugucgucaaaacugcuacucaaggggaggucaaugugacugguguaauaccacugacaacaacacccaccaaaucucauuuugcaaaucucaaaggaacagaaaccagagggaaacuaugcccaaaaugccccaacugcacagaucuggacguagccuugggcagaccaaaaugcacggggaaaauacccucggcaagaguuucaauacuccaugaagucagaccuguuacaucugggugcuuuccuauaaugcacgacagaacaaaaauuagacagcugccuaaccuucucagaggauacgaacauaucagauuaucaacucauaacguuaucaaugcagaaaaugcaccaggaggacccuacaaaauuggaaccucagggucuugcccuaacguuaccaauggaaacggauuuuuugcaacaauggcuugggccgucccaaaaaacgacaaaaacaaaacagcaacaaauccauuaacaauagaaguaccauacauuuguacagaaggagaagaccaaauuaccguuuggggguuccacucugauaacgagacccaaauggcaaagcucuauggggacucaaagccccagaaguucaccucaucugccaacggagugaccacacauuacguuucacagauugguggcuucccaaaucaaacagaagacggaggacuaccacaaagugguagaauuguuguugauuacauggugcaaaaaucugggaaaacaggaacaauuaccuaucaaagagguauuuuauugccucaaaagguguggugcgcaaguggcaggagcaagguaauaaaaggauccuugccuuuaauuggagaagcagauugccuccacgaaaaauacgguggauuaaacaaaagcaagccuuacuacacaggggaacaugcaaaggccauaggaaauugcccaauaugggugaagacacccuugaagcuggccaauggaaccaaauauagaccuccugcaaaacuauuaaaggaaagagguuucuucggagcuauugcugguuucuuagaaggaggaugggaaggaaugauugcagguuggcacggauacacgucccauggggcacauggaguagcgguggcagcagaccuuaagagcacucaagaggccauaaacaagauaacaaaaaaucucaacucuuugagugagcuggaaguaaaaaaucuucaaagacuaagcggugccauggaugaacuccacaacgaaauacuagaacuagacgaaaaaguggaugaucucagagcugauacaauaagcucacaaauagaacucgcaguccugcuuuccaaugaaggaauaauaaacagugaagaugaacaucucuuggcgcuugaaagaaagcugaagaaaaugcugggcccuucugcuguagagauagggaauggaugcuuugaaaccaaacacaagugcaaccagaccugucucgacagaauagcugcugguaccuuugaugcaggagaauuuucucuccccaccuuugauucacugaauauuacugcugcaucuuuaaaugacgauggauuggauaaucauaccauacugcuuuacuacucaacugcugccuccaguuuggcuguaacacugaugauagcuaucuuuguuguuuauauggucuccagagacaauguuucuugcuccaucugucuauaa

SEQ ID NO: 59454 - RNA, 1758 nt, Artificial Sequence; identical to SEQ ID NO: 59449
  derived and/or modified CDS sequence (wt) from hemagglutinin__InfluenzaB__AGX20866

SEQ ID NO: 59455 - RNA, 1758 nt, Artificial Sequence; identical to SEQ ID NO: 58738
  derived and/or modified CDS sequence (wt) from hemagglutinin__InfluenzaB__AGX20877

SEQ ID NO: 59456 - RNA, 1758 nt, Artificial Sequence
  derived and/or modified CDS sequence (wt) from hemagglutinin__InfluenzaB__AGX20888
augaaggcaauaauuguacuacucaugguaguaacauccaaugcagaucgaaucugcacugggauaacaucgucaaacucaccacaugucgucaaaacugcuacucaaggggaggucaaugugacugguguaauaccacugacaacaacacccaccaaaucucauuuugcaaaucucaaaggaacagaaaccagagggaaacuaugcccaaaaugccccaacugcacagaucuggacguagccuugggcagaccaaaaugcacggggaaaauacccucggcaagaguuucaauacuccaugaagucagaccuguuacaucugggugcuuuccuauaaugcacgacagaacaaaaauuagacagcugccuaaccuucucagaggauacgaacauaucagauuaucaacucauaacguuaucaaugcagaaaaugcaccaggaggacccuacaaaauuggaaccucagggucuugcccuaacguuaccaauggaaacggauuuuuugcaacaauggcuugggccgucccaaaaaacgacaaaaacaaaacagcaacaaauccauuaacaauagaaguaccauacauuuguacagaaggagaagaccaaauuaccguuuggggguuccacucugauagcgagacccaaauggcaaagcucuauggggacucaaagccccagaaguucaccucaucugccaacggagugaccacacauuacguuucacagauugguggcuucccaaaucaaacagaagacggaggacuaccacaaagugguagaauuguuguugauuacauggugcaaaaaucugggaaaacaggaacaauuaccuaucaaagagguauuuuauugccucaaaagguguggugcgcaaguggcaggagcaagguaauaaaaggauccuugccuuuaauuggagaagcagauugccuccacgaaaaauacgguggauuaaacaaaaguaagccuuacuacacaggggaacaugcaaaggccauaggaaauugcccaauaugggugaagacacccuugaagcuggccaauggaaccaaauauagaccuccugcaaaacuauuaaaggaaagagguuucuucggagcuauugcugguuucuuagaaggaggaugggaaggaaugauugcagguuggcacggauacacgucccauggggcacauggaguagcgguggcagcagaccuuaagagcacucaagaggccauaaacaagauaacaaaaaaucucaacucuuugagugagcuggaaguaaaaaaucuucaaagacuaagcggugccauggaugaacuccacaacgaaauacuagaacuagacgaaaaaguggaugaucucagagcugauacaauaagcucacaaauagaacucgcaguccugcuuuccaaugaaggaauaauaaacagugaagaugaacaucucuuggcgcuugaaagaaagcugaagaaaaugcugggcccuucugcuguagagauagggaauggaugcuuugaaaccaaacacaagugcaaccagaccugucucgacagaauagcugcugguaccuuugaugcaggagaauuuucucuccccaccuuugauucacugaauauuacugcugcaucuuuaaaugacgauggauuggauaaucauaccauacugcuuuacuacucaacugcugccuccaguuuggcuguaacacugaugauagcuaucuuuguuguuuauauggucuccagagacaauguuucuugcuccaucugucuauaa

SEQ ID NO: 59457 - RNA, 1758 nt, Artificial Sequence; identical to SEQ ID NO: 58738
  derived and/or modified CDS sequence (wt) from hemagglutinin__InfluenzaB__AGX20899

SEQ ID NO: 59458 - RNA, 1758 nt, Artificial Sequence; identical to SEQ ID NO: 58738
  derived and/or modified CDS sequence (wt) from hemagglutinin__InfluenzaB__AGX20910

SEQ ID NO: 59459 - RNA, 1758 nt, Artificial Sequence
  derived and/or modified CDS sequence (wt) from hemagglutinin__InfluenzaB__AGX20921
augaaggcaauaauuguacuacucaugguaguaacauccaaugcagaucgaaucugcacugggauaacaucgucaaacucaccacauguagucaaaacugcuacucaaggggaggucaaugugacugguguaauaccacugacaacaacacccaccaaaucucauuuugcaaaucucaaaggaacagaaaccagagggaaacuaugcccaaaaugccccaacugcacagauuuggacguagccuugggcagaccaaaaugcacggggaaaauacccucugcaagaguuucaauacuccaugaagucagaccuguuacaucugggugcuuuccuauaaugcacgacagaacaaaaauuagacagcugccuaaccuucuccgaggauacgaacauaucagauuaucaacucauaacguuaucaaugcagaaaaugcaccaggaggacccuacaaaauuggaaccucagggucuugcccuaacguuaccaauggaaacggauuuuucgcaacaauggcuugggccgucccaaaaaacgacaaaaacaaaacagcaacaaauccauuaacaauagaaguaccauacauuuguacagaaggagaagaccaaauuaccguuuggggguuccacucugauaacgagacccaaauggcaaagcucuauggggacucaaagccccagaaguucaccucaucugccaacggagugaccacacauuacguuucacagauuggcggcuucccaaaucaaacagaagauggaggacuaccacaaagugguagaauuguuguugauuacauggugcaaaaaucugggaaaacaggaacaauuaccuaucaaagagguauuuuauugccucaaaagguguggugcgcaaguggcaggagcaagguaauaaaaggauccuuaccuuuaauuggagaagcagauugccuccacgaaaaauacgguggauuaaacaaaagcaagccuuacuacacaggggaacaugcaaaggccauaggaaauugcccaauaugggugaagacacccuugaagcuggccaauggaaccaaauauagaccuccugcaaaacuauuaaaggaaagggguuucuucggagcuauugcugguuucuuagaaggaggaugggaaggaaugauugcagguuggcacggauacacgucccauggggcacauggaguagcgguggcagcagaccuuaagagcacucaagaggccauaaacaagauaacaaaaaaucucaacucuuugagugagcuggaaguaaagaaucuucaaagacuaaguggugccauggaugaacuccacaacgaaauacuagaacuagacgagaaaguggaugaucucagagcugauacaauaagcucacaaauagaacucgcaguccugcuuucuaaugaaggaauaauaaacagugaagaugaacaucucuuggcacuugaaagaaagcugaagaaaaugcugggcccuucugcuguagagauagggaauggaugcuuugaaaccaaacacaagugcaaccagaccugucucgacagaauagcugcugguaccuuugaugcaggagaauuuucucuccccaccuuugauucacugaauauuacugcugcaucuuuaaaugacgauggauuggauaaucauaccauacugcuuuacuacucaacugcugccuccaguuuggcuguaacacugaugauagcuaucuuuguuguuuauauggucuccagagacaauguuucuugcuccaucugucuauaa

SEQ ID NO: 59460 - RNA, 1758 nt, Artificial Sequence
  derived and/or modified CDS sequence (wt) from hemagglutinin__InfluenzaB__AGX20932
augaaggcaauaauuguacuacucaugguaguaacauccaaugcagaucgaaucugcacugggauaacaucgucaaacucaccacaugucgucaaaacugcuacucaaggggaggucaaugugacugguguaauaccacugacaacaacacccaccaaaucucauuuugcaaaucucaaaggaacagaaaccagagggaaacuaugcccaaaaugccccaacugcacagaucuggacguagccuugggcagaccaaaaugcacggggaaaauacccucggcaagaguuucaauacuccaugaagucagaccuguuacaucugggugcuuuccuauaaugcacgacagaacaaaaauuagacagcugccuaaccuucuccgaggauacgaacauaucagauuaucaacucauaacguuaucaaugcagaaaaugcaccaggaggaccauacaaaauuggaaccucagggucuugcccuaacguuaccaauggaaacggauuuuuugcaacaauggcuugggccgucccaaaaaacgacaaaaacaaaacagcaacaaauccauuaacaauagaaguaccauacauuuguacagaaggagaagaccaaauuaccguuuggggguuccacucugauaacgagacccaaauggcaaagcucuauggggacccaaagccccagaaguucaccucaucugccaacggagugaccacacauuacguuucacagauugguggcuucccaaaucaaacagaagacggaggacuaccacaaagugguagaauuguuguugauuacauggugcaaaaaucugggaaaacaggaacaauuaccuaucaaagagguauuuuauugccucaaaagguguggugcgcaaguggcaggagcaaaguaauaaaaggauccuugccuuuaauuggagaagcagauugccuccacgaaaaauaugguggauuaaacaaaagcaagccuuacuacacaggggaacaugcaaaggccauaggaaauugcccaauaugggugaagacacccuugaagcuggccaauggaaccaaauauagaccuccugcaaaacuauuaaaggaaagggguuucuucggagcuauugcugguuucuuagaaggaggaugggaaggaaugauugcagguuggcacggauacacgucccauggggcacauggaguagcgguggcagcagaccuuaagagcacucaagaggccauaaacaagauaacaaaaaaucucaauucuuugagugagcuggaaguaaagaaucuucaaagacuaagcggugccauggaugaacuccacaaugaaauacuagaacuagacgaaaaaguggaugaucucagagcugauacaauaagcucacaaauagaacucgcaguccugcuuuccaaugaaggaauaauaaacagugaagaugaacaucucuuggcgcuugaaagaaagcugaagaaaaugcugggcccuucugcuguagagauagggaauggaugcuuugaaaccaaacacaagugcaaccagaccugucucgaccgaauagcugcugguaccuuugaugcaggagaauuuucucuccccaccuuugauucacugaauauuacugcugcaucuuuaaaugacgauggauuggauaaucauaccauacugcuuuacuacucaacugcugccuccaguuuggcuguaacacugaugauagcuaucuuuguuguuuauauggucuccagagacaauguuucuugcuccaucugucuauaa

SEQ ID NO: 59461 - RNA, 1758 nt, Artificial Sequence
  derived and/or modified CDS sequence (wt) from hemagglutinin__InfluenzaB__AGX20943
augaaggcaauaauuguacuacucaugguaguaacauccaaugcagaucgaaucugcacugggauaacaucgucaaacucaccacauguagucaaaacugcuacucaaggggaggucaaugugacugguguaauaccacugacaacaacacccaccaaaucucauuuugcaaaucucaaaggaacagaaaccagagggaaacuaugcccaaaaugccccaacugcacagauuuggacguagccuugggcagaccaaaaugcacggggaaaauacccucugcaagaguuucaauacuccaugaagucagaccuguuacaucugggugcuuuccuauaaugcacgacagaacaaaaauuagacagcugccuaaccuucuccgaggauacgaacauaucagauuaucaacucauaacguuaucaaugcagaaaaugcaccaggaggacccuacaaaauuggaaccucagggucuugcccuaacguuaccaauggaaacggauuuuucgcaacaauggcuugggccgucccaaaaaacgacaaaaacaaaacagcaacaaauccauuaacaauagaaguaccauacauuuguacagaaggagaagaccaaauuaccguuuggggguuccacucugauaacgagacccaaauggcaaagcucuauggggacucaaagccccagaaguucaccucaucugccaacggagugaccacacauuacguuucacagauuggcggcuucccaaaucaaacagaagauggaggacuaccacaaagugguagaauuguuguugauuacauggugcaaaaaucugggaaaacaggaacaauuaccuaucaaagagguauuuuauugccucaaaagguguggugcgcaaguggcaggagcaagguaauaaaaggauccuugccuuuaauuggagaagcagauugccuccacgaaaaauacgguggauuaaacaaaagcaagccuuacuacacaggggaacaugcaaaggccauaggaaauugcccaauaugggugaagacacccuugaagcuggccaauggaaccaaauauagaccuccugcaaaacuauuaaaggaaagggguuucuucggagcuauugcugguuucuuagaaggaggaugggaaggaaugauugcagguuggcacggauacacgucccauggggcacauggaguagcgguggcagcagaccuuaagagcacucaagaggccauaaacaagauaacaaaaaaucucaacucuuugagugagcuggaaguaaagaaucuucaaagacuaaguggugccauggaugaacuccacaacgaaauacuagaacuagacgagaaaguggaugaucucagagcugauacaauaagcucacaaauagaacucgcaguccugcuuucuaaugaaggaauaauaaacagugaagaugaacaucucuuggcacuugaaagaaagcugaagaaaaugcugggcccuucugcuguagagauagggaauggaugcuuugaaaccaaacacaagugcaaccagaccugucucgacagaauagcugcugguaccuuugaugcaggagaauuuucucuccccaccuuugauucacugaauauuacugcugcaucuuuaaaugacgauggauuggauaaucauaccauacugcuuuacuacucaacugcugccuccaguuuggcuguaacacugaugauagcuaucuuuguuguuuauauggucuccagagacaauguuucuugcuccaucugucuauaa

SEQ ID NO: 59462 - RNA, 1758 nt, Artificial Sequence; identical to SEQ ID NO: 59461
  derived and/or modified CDS sequence (wt) from hemagglutinin__InfluenzaB__AGX20954

SEQ ID NO: 59463 - RNA, 1758 nt, Artificial Sequence
  derived and/or modified CDS sequence (wt) from hemagglutinin__InfluenzaB__AGX20965
augaaggcaauaauuguacuacucaugguaguaacauccaaugcagaucgaaucugcacugggauaacaucgucaaacucaccacaugucgucaaaacugcuacucaaggggaggucaaugugacugguguaauaccacugacaacaacacccaccaaaucucauuuugcaaaucucaaaggaacagaaaccagagggaaacuaugcccaaaaugccccaacugcacagaucuggacguagccuuggguagaccaaaaugcacggggaaaauacccucggcaagaguuucaauacuccaugaagucagaccuguuacaucugggugcuuuccuauaaugcacgacagaacaaaaauuagacagcugccuaaucuucuccgaggauacgaacauaucagauuaucaacucauaacguuaucaaugcagaaaaugcaccgggaggacccuacaaaauuggaaccucagggucuugcccuaacguuaccaauggaaacggauuuuucgcaacaauggcuugggccgucccaaaaaacgacaaaaacaaaacagcaacaaauccauuaacaauagaaguaccauacauuuguacagaaggagaagaccaaauuaccguuuggggguuccacucugauaacgagacccaaauggcaaagcuuuauggggacucaaagccccagaaguucaccucaucugccaacggagugaccacacauuacguuucacagauugguggcuucccaaaucaaacagaagauggaggacuaccacaaagugguagaauuguuguugauuacauggugcaaaaaucugggaaaacaggaacaauuaccuaucaaagagguauuuuauugccucaaaagguguggugcgcaaguggcaggagcaagguaauaaaaggauccuugccuuuaauuggagaagcagauugccuccacgaaaaauacgguggauuaaacaaaagcaagccuuacuacacaggggaacaugcaaaggccauaggaaauugcccaauaugggugaagacacccuugaagcuggccaauggaaccaaauauagacccccugcaaaacuauuaaaggaaagggguuucuucggagcuauugcugguuucuuagaaggaggaugggaaggaaugauugcagguuggcacggauacacgucccauggggcacauggaguagcgguggcagcagaccuuaagagcacucaagaggccauaaacaagauaacaaaaaaucucaacucuuugagugagcuggaaguaaagaaucuucaaagacuaagcggugccauggaugaacuccacaacgaaauacuagaacuagacgaaaaaguggaugaucucagagcugauacaauaagcucacaaauagaacucgcaguccugcuuuccaaugaaggaauaauaaacagugaagaugaacaucucuuggcgcuugaaagaaagcugaagaaaaugcugggccccucugcuguagagauagggaauggaugcuuugaaaccaaacacaagugcaaccagaccugucucgacagaauagcugcugguaccuuugaugcaggagaauuuucucuccccaccuuugauucacugaauauuacugcugcaucuuuaaaugaugauggguuggauaaccauacuauacugcuuuacuacucaacugcugccuccaguuuggcuguaacacugaugauagcuaucuuuguuguuuauauggucuccagagacaauguuucuugcuccaucugucuauaa

SEQ ID NO: 59464 - RNA, 1758 nt, Artificial Sequence
  derived and/or modified CDS sequence (wt) from hemagglutinin__InfluenzaB__AGX20976
augaaggcaauaauuguacuacucaugguaguaacauccaaugcagaucgaaucugcacugggauaacaucgucaaacucaccacaugucgucaaaacugcuacucaaggggaggucaaugugacugguguaauaccacugacaacaacacccaccaaaucucauuuugcaaaucucaaaggaacagaaaccagagggaaacuaugcccaaaaugccucaacugcacagaucuggacguagccuugggcagaccaaaaugcacggggaaaauacccucggcaagaguuucaauacuccaugaagucagaccuguuacaucugggugcuuuccuauaaugcacgacagaacaaaaauuagacagcugccuaaccuucuccgaggauacgaacauaucagauuaucaacucauaacguuaucaaugcagaaaaugcaccaggaggacccuacaaaauuggaaccucagggucuugcccuaacguuaccaauggaaacggauuuuucgcaacaauggcuugggccgucccaaaaaacgacaaaaacaaaacagcaacaaauccauuaacaauagaaguaccauacauuuguacagaaggagaagaccaaauuaccguuuggggguuccacucugauaacgagacccaaauggcaaagcucuauggggacucaaagccccagaaguucaccucaucugccaacggagugaccacacauuacguuucacagauugguggcuucccaaaucaaacagaagacggaggacuaccacaaagugguagaauuguuguugauuacauggugcaaaaaucugggaaaacaggaacaauuaccuaucaaagagguauuuuauugccucaaaagguguggugcgcaaguggcaggagcaagguaauaaaaggauccuugccuuuaauuggagaagcagauugccuccacgaaaaauacgguggauuaaacaaaagcaagccuuacuacacaggggaacaugcaaaggccauaggaaauugcccaauaugggugaagacacccuugaagcuggccaauggaaccaaauauagaccuccugcaaaacuauuaaaggaaagggguuucuucggagcuauugcugguuucuuagaaggaggaugggaaggaaugauugcagguuggcacggauacacgucccauggggcacauggaguagcgguggcagcagaccuuaagagcacucaagaggccauaaacaagauaacaaaaaaucucaacucuuugagugagcuggaaguaaagaaucuucaaagacuaagcggugccauggaugaacuccacggcgaaauacuagaacuagacgagaaaguggaugaucucagagcugauacaauaagcucgcaaauagaacucgcaguccugcuuuccaaugaaggaauaauaaacagugaagaugaacaucucuuggcacuugaaagaaagcugaagaaaaugcugggcccuucugcuguagagauagggaauggaugcuuugaaaccaaacacaagugcaaccagaccugucucgacagaauagcugcugguaccuuugaugcaggagaauuuucucuccccaccuuugauucacugaauauuacugcugcaucuuuaaaugacgauggauuggauaaucauacuauacugcuuuacuacucaacugcugccuccaguuuggcuguaacacugaugauagcuaucuuuguuguuuauauggucuccagagacaauguuucuugcuccaucugucuauaa

SEQ ID NO: 59465 - RNA, 1758 nt, Artificial Sequence
  derived and/or modified CDS sequence (wt) from hemagglutinin__InfluenzaB__AGX20987
augaaggcaauaauuguacuacucaugguaguaacauccaaugcagaucgaaucugcacugggauaacaucgucaaacucaccacaugucgucaaaacugcuacucaaggggaggucaaugugacugguguaauaccacugacaacaacacccaccaaaucucauuuugcaaaucucaaaggaacagaaaccagagggaaacuaugcccaaaaugccccaacugcacagaucuggacguagccuugggcagaccaaaaugcacggggaaaauacccucggcaagaguuucaauacuccaugaagucagaccuguuacaucugggugcuuuccuauaaugcacgacagaacaaaaauuagacagcugccuaaccuucuccgaggauacgaacauaucagauuaucaacucauaacguuaucaaugcagaaaaugcaccaggaggaccauacaaaauuggaaccucagggucuugcccuaacguuaccaauggaaacggauuuuuugcaacaauggcuugggccgucccaaaaaacgacaaaaacaaaacagcaacaaauccauuaacaauagaaguaccauacauuuguacagaaggagaagaccaaauuaccguuuggggguuccacucugauaacgagacccaaauggcaaagcucuauggggacucaaagccccagaaguucaccucaucugccaacggagugaccacacauuacguuucacagauugguggcuucccaaaucaaacagaagacggaggacuaccacaaagugguagaauuguuguugauuacauggugcaaaaaucugggaaaacaggaacaauuaccuaucaaagagguauuuuauugccucaaaagguguggugcgcaaguggcaggagcaaaguaauaaaaggauccuugccuuuaauuggagaagcagauugccuccacgaaaaauaugguggauuaaacaaaagcaagccuuacuacacaggggaacaugcaaaggccauaggaaauugcccaauaugggugaagacacccuugaagcuggccaauggaaccaaauauagaccuccugcaaaacuauuaaaggaaagggguuucuucggagcuauugcugguuucuuagaaggaggaugggaaggaaugauugcagguuggcacggauacacgucccauggggcacauggaguagcgguggcagcagaccuuaagagcacucaagaggccauaaacaagauaacaaaaaaucucaauucuuugagugagcuggaaguaaagaaucuucaaagacuaagcggugccauggaugaacuccacaaugaaauacuagaacuagacgaaaaaguggaugaucucagagcugauacaauaagcucacaaauagaacucgcaguccugcuuuccaaugaaggaauaauaaacagugaagaugaacaucucuuggcgcuugaaagaaagcugaagaaaaugcugggcccuucugcuguagagauagggaauggaugcuuugaaaccaaacacaagugcaaccagaccugucucgacagaauagcugcugguaccuuugaugcaggagaauuuucucuccccaccuuugauucacugaauauuacugcugcaucuuuaaaugacgauggauuggauaaucauaccauacugcuuuacuacucaacugcugccuccaguuuggcuguaacacugaugauagcuaucuuuguuguuuauauggucuccagagacaauguuucuugcuccaucugucuauaa

SEQ ID NO: 59466 - RNA, 1758 nt, Artificial Sequence
  derived and/or modified CDS sequence (wt) from hemagglutinin__InfluenzaB__AGX20998
augaaggcaauaauuguacuacucaugguaguaacauccaaugcagaucgaaucugcacugggauaacaucgucaaacucaccacauaucgucaaaacugcuacucaaggggaggucaaugugacugguguaauaccacugacaacaacacccaccaaaucucauuuugcaaaucucaaaggaacagaaaccagggggaaacuaugcccaaaaugccucaacugcacagaucuggacguagccuugggcagaccaaaaugcacggggaaaauacccucggcaagaguuucaauacuccaugaagucagaccuguuacaucugggugcuuuccuauaaugcacgacagaacaaaaauuagacagcugccuaaccuucucagaggauacgaacauaucagguuaucaacucauaacguuaucaaugcagaaaaugcaccaggaggacccuacaaaauuggaaccucagggucuugcccuaacauuaccaauggaaacggauuuuucgcaacaauggcuugggccgucccaaaaaacgacaaaaacaaaacagcaacaaauccauuaacaauagaaguaccauacauuuguacagaaggagaagaucaaauuaccguuuggggguuccacucugacaaugaaacccaaauggcaaagcucuauggggacucaaagccccagaaguucaccucaucugccaacggagugaccacacauuacguuucacagauugguggcuucccaaaucaaacagaagacggaggacuaccacaaagugguagaauuguuguugauuacauggugcaaaaaucugggaaaacaggaacaauuaccuaucaaagggguauuuuauugccucaaaagguguggugcgcaaguggcaggagcaagguaauaaaaggauccuugccuuuaauuggagaagcagauugccuccacgaaaaauacgguggauuaaacaaaagcaagccuuacuacacaggggaacaugcaaaggccauaggaaauugcccaauaugggugaaaacacccuugaagcuggccaauggaaccaaauauagaccuccugcaaaacuauuaaaggaaagggguuucuucggugcuauugcuggcuucuuagaaggaggaugggaaggaaugauugcagguuggcacggauacacaucccauggggcacauggaguagcgguggcagcagaccuuaagagcacucaagaggccauaaacaagauaacaaaaaaucucaacucuuugagugagcuggaaguaaagaaucuucaaagacuaagcggugccauggaugaacuccacaaugaaauacuagaauuagaugagaaaguggaugaucucagagcugauacaauaagcucacaaauagaacucgcaguccugcuuuccaaugaaggaauaauaaacagugaagaugaacaucucuuggcgcuugaaagaaagcugaagaaaaugcugggccccucugcuguagagauagggaauggaugcuuugaaaccaaacacaagugcaaccagaccugucucgacagaauagcugcugguaccuuugaugcaggagaauuuucucuccccacuuuugauucacugaauauuacugcugcaucuuuaaaugacgauggauuggauaaucauacuauacugcuuuacuacucaacugcugccuccaguuuggcuguaacacugaugauagcuaucuuuguuguuuauauggucuccagagacaauguuucuugcuccaucugucuauaa

SEQ ID NO: 59467 - RNA, 1758 nt, Artificial Sequence
  derived and/or modified CDS sequence (wt) from hemagglutinin__InfluenzaB__AGX21009
augaaggcaauaauuguacuacucaugguaguaacauccaaugcagaucgaaucugcacugggauaacaucgucaaacucaccacauguagucaaaacugcuacucaaggggaggucaaugugacugguguaauaccacugacaacaacacccaccaaaucucauuuugcaaaucucaaaggaacagaaaccagagggaaacuaugcccaaaaugccccaacugcacagauuuggacguagccuugggcagaccaaaaugcacggggaaaauacccucugcaagaguuucaauacuccaugaagucagaccuguuacaucugggugcuuuccuauaaugcacgacagaacaaaaauuagacagcugccuaaccuucuccgaggauacgaacauaucagauuaucaacucauaacguuaucaaugcagaaaaugcaccaggaggacccuacaaaauuggaaccucagggucuugcccuaacguuaccaauggaaacggauuuuucgcaacaauggcuugggccgucccaaaaaacgacaaaaacaaaacagcaacaaauccauuaacaauagaaguaccauacauuuguacagaaggagaagaccaaauuaccguuuggggguuccacucugauaacgagacccaaauggcaaagcucuauggggacucaaagccccagaaguucaccucaucugccaacggagugaccacacauuacguuucacagauuggcggcuucccaaaucaaacagaagauggaggacuaccacaaagugguagaauuguuguugauuacauggugcaaaaaucugggaaaacaggaacaauuaccuaucaaagagguauuuuauugccucaaaagguguggugcgcaaguggcaggagcaagguaauaaaaggauccuugccuuuaauuggagaagcagauugccuccacgaaaaauacgguggauuaaacaaaagcaagccuuacuacacaggggaacaugcaaaggccauaggaaauugcccaauaugggugaagacacccuugaagcuggccaauggaaccaaauauagaccuccugcaaaacuauuaaaggaaagggguuucuucggagcuauugcugguuucuuagaaggaggaugggaaggaaugauugcagguuggcacggauacacgucccauggggcacauggaguagcgguggcagcagaccuuaagagcacucaagaggccauaaacaagauaacaaaaaaucucaacucuuugagugagcuggaaguaaagaaucuucaaagacuaaguggugccauggaugaacuccacaacgaaauacuagaacuagacgagaaaguggaugaucucagagcugauacaauaagcucacaaauagaacucgcaguccugcuuucuaaugaaggaauaauaaacagugaagaugaacaucucuuggcacuugaaagaaagcugaagaaaaugcugggcccuucugcuguagagauagggaauggaugcuuugaaaccaaacacaagugcaaccagaccugucucgacagaauagcugcugguaccuuugaugcaggagaauuuucucuccccaccuuugauucauugaauauuacugcugcaucuuuaaaugacgauggauuggauaaucauaccauacugcuuuacuacucaacugcugccuccaguuuggcuguaacacugaugauagcuaucuuuguuguuuauaugaucuccagagacaauguuucuugcuccaucugucuauaa

SEQ ID NO: 59468 - RNA, 1758 nt, Artificial Sequence
  derived and/or modified CDS sequence (wt) from hemagglutinin__InfluenzaB__AGX21020
augaaggcaauaauuguacuacucaugguaguaacauccaaugcagaucgaaucugcacugggauaacaucgucaaacucaccacaugucgucaaaacugcuacucaaggggaggucaaugugaccgguguaauaccacugacaacaacacccaccaaaucucauuuugcaaaucucaaaggaacagaaaccagggggaaacuaugcccaaaaugccuaaacugcacagaucuggacguagccuugggcagaccaaaaugcacggggaaaauacccucggcaagaguuucaauacuccaugaagucagaccuguuacaucugggugcuuuccuauaaugcacgauagaacaaaaauuagacagcugccuaaccuucuccgaggauacgaacauaucagguuaucaacucauaacguuaucaaugcagaaaaugcaccaggaggacccuacaaaauuggaaccucagggucuugcccuaacguuaccaauggaaacggauucuucgcaacaauggcuugggccgucccaaaaaacgacaaaaacaaaacagcaacaaauccauuaacaauagaaguaccauacauuuguacagaaggagaagaccaaauuaccguuuggggguuccacucugacaacgagacccaaauggcaaagcucuauggggacucagagccccagaaguucaccucaucugccaacggagugaccacacauuacguuucacagauugguggcuucccaaaucaaacagaagacggaggacuaccacaaagugguagaauuguuguugauuacauggugcaaaaaucugggaaaacaggaacaauuaccuaucaaagagguauuuuauugccucaaaagguguggugcgcaaguggcaggagcaagguaauaaaaggauccuugccuuuaauuggagaagcagauugccuccacgaaaaauacgguggauuaaacaaaagcaagccuuacuacacaggggaacaugcaaaggcuauaggaaauugcccaauaugggugaaaacacccuugaagcuggccaauggaaccaaauauagaccuccugcaaaacuauuaaaggaaagggguuucuucggagcuauugcugguuucuuagaaggaggaugggaaggaaugauugcagguuggcacggauacacaucccauggggcacauggaguagcgguggcagcagaccuuaagagcacucaagaggccauaaacaagauaacaaaaaaucucaacucuuugagugagcuggaaguaaagaaucuucaaagacuaagcggugccauggaugaacuccacaacgaaauacuagaacuagaugagaaaguggaugaucucagagcugauacaauaagcucacaaauagagcucgcaguccugcuuuccaaugaaggaauaauaaacagugaagaugaacaucucuuggcgcuugaaagaaagcugaagaaaaugcugggccccucugcuguagagauagggaaugggugcuuugaaaccaaacacaagugcaaccagaccugucucgacagaauagcugcugguaccuuugaugcaggagaauuuucucuccccaccuuugauucacugaauauuacugcugcaucuuuaaaugacgauggauuggauaaucauacuauacugcuuuacuacucaacugcugccuccaguuuggcuguaacacugaugauagcuaucuuuguuguuuauauggucuccagagacaauguuucuugcuccaucugucuauaa

SEQ ID NO: 59469 - RNA, 1758 nt, Artificial Sequence; identical to SEQ ID NO: 58738
  derived and/or modified CDS sequence (wt) from hemagglutinin__InfluenzaB__AGX21031

SEQ ID NO: 59470 - RNA, 1758 nt, Artificial Sequence
  derived and/or modified CDS sequence (wt) from hemagglutinin__InfluenzaB__AGX21042
augaaggcaauaauuguacuacucaugguaguaacauccaaugcagaucggaucugcacugggauaacaucgucaaacucaccacaugucgucaaaacugcuacucaaggggaggucaaugugaccgguguaauaccacugacaacaacacccaccaaaucucauuuugcaaaucucaaaggaacagaaaccagggggaaacuaugcccaaaaugccucaacugcacagaucuggacguagccuugggcagaccaaaaugcacugggaaaauacccucggcaagaguuucaauacuccaugaagucagaccuguuacaucugggugcuuuccuauaaugcacgauagaacaaaaauuagacagcugccuaaccuucuccgaggauacgaacauaucagguuaucaacucauaacguuaucaauacagaaaaugcaccaggaggacccuacaaaauuggaaccucagggucuugcccuaacguuaccaauggaaacggauucuucgcaacaauggcuugggcugucccaaaaaacgacaaaaacaaaacagcaacaaauccauuaacaauagaaguaccauacauuuguacagaaggagaagaccaaauuaccguuuggggguuccacucugacaacgagacccaaauggcaaagcucuauggggacucaaagccccagaaguucaccucaucugccaacggagugaccacacauuacguuucacagauugguggcuucccaaaucaaacagaagacggaggacuaccacaaagugguagaauuguuguugauuacauggugcaaaaaucugggaaaacgggaacaauuaccuaucaaagagguauuuuauugccucaaaagguguggugcgcaaguggcaggagcaagguaauaaaaggauccuugccuuuaauuggagaagcagauugccuccacgaaaaauacgguggauuaaacaaaagcaagccuuacuacacaggggaacaugcaaaggccauaggaaauugcccaauaugggugaaaacacccuugaagcuggccaauggaaccaaauauagaccuccugcaaaacuauuaaaggaaagggguuucuucggagcuauugcugguuucuuagaaggaggaugggaaggaaugauugcagguuggcacggauacacaucccauggggcacauggaguagcgguggcagcagaccuuaagagcacucaagaggccauaaacaagauaacaaaaaaucucaacucuuugagugagcuggaaguaaagaaucuccaaagacuaagcggugccauggaugaacuccacaacgaaauacuagaacuagaugagaaaguggaugaucucagagcugauacaauaagcucacaaauagagcucgcaguccugcuuuccaaugaaggaauaauaaacagugaagaugaacaucucuuggcgcuugaaagaaagcugaagaaaaugcugggccccucugcuguagagauagggaauggaugcuuugaaaccaaacacaagugcaaccagaccugucucgacagaauagcugcugguaccuuugaugcaggagaauuuucccuccccaccuuugauucacugaauauuacugcugcaucuuuaaaugacgauggauuggauaaucauacuauacugcuuuacuacucaacugcugccuccaguuuggcuguaacacugaugauagcuaucuuuguuguuuauauggucuccagagacaauguuucuugcuccaucugucuauag

SEQ ID NO: 59471 - RNA, 1758 nt, Artificial Sequence; identical to SEQ ID NO: 59028
  derived and/or modified CDS sequence (wt) from hemagglutinin__InfluenzaB__AGX21053

SEQ ID NO: 59472 - RNA, 1758 nt, Artificial Sequence
  derived and/or modified CDS sequence (wt) from hemagglutinin__InfluenzaB__AGX21064
augaaggcaauaauuguacuacucaugguaguaacauccaaugcagaucgaaucugcacugggauaacaucgucaaacucaccacaugucgucaaaacugcuacucaaggggaggucaaugugacugguguaauaccacugacaacaacacccaccaaaucucauuuugcaaaucucaaaggaacagaaaccagagggaaacuaugcccaaaaugccccaacugcacagaucuggacguagccuugggcagaccaaaaugcacggggaaaauacccucggcaagaguuucaauacuccaugaagucagaccuguuacaucugggugcuuuccuauaaugcacgacagaacaaaaauuagacagcugccuaaccuucucagaggauacgaacauaucagauuaucaacucauaacguuaucaaugcagaaaaugcaccaggaggacccuacaaaauuggaaccucagggucuugcccuaacguuaccaauggaaacggauuuuuugcaacaauggcuugggccgucccaaaaaacgacaaaaacaaaacagcaacaaauccauuaacaauagaaguaccauacauuuguacagaaggagaagaccaaauuaccguuuggggguuccacucugauaacgagacccaaauggcaaagcucuauggggacucaaagccccagaaguucaccucaucugccaacggagugaccacacauuacguuucacagauugguggcuucccaaaucaaacagaagacggaggacuaccacaaagugguagaauuguuguugauuacauggugcaaaaaucugggaaaacaggaacaauuaccuaucaaagagguauuuuauugccucaaaagguguggugcgcaaguggcaggagcaagguaauaaaaggauccuugccuuuaauuggagaagcagauugccuccacgaaaaauacgguggauuaaacaaaaguaagccuuacuacacaggggaacaugcaaaggccauaggaaauugcccaauaugggugaagacacccuugaagcuggccaauggaaccaaauauagaccuccugcaaaacuauuaaaggaaagagguuucuucggagcuauugcugguuucuuagaaggaggaugggaaggaaugauugcagguuggcacggauacacgucccauggggcacauggaguagcgguggcagcagaccuuaagagcacucaagaggccauaaacaagauaacaaaaaaucucaacucuuugagugagcuggaaguaaaaaaucuucaaagacuaagcggugccauggaugaacuccacaacgaaauacuagaacuagacgaaaaaguggaugaucucagagcugauacaauaagcucacaaauagaacucgcaguccugcuuuccaaugaaggaauaauaaacagugaagaugaacaucucuuggcgcuugaaagaaagcugaagaaaaugcugggcccuucugcuguagagauagggaauggaugcuuugaaaccaaacacaagugcaaccagaccugucucgacagaauagcugcugguaccuuugaugcaggagaauuuucucuccccaccuuugauucacugaauauuacugcugcaucuuuaaaugacgauggauuggauaaucauaccauacugcuuuacuacucaacugcugccuccaguuuggcuguaacacugaugauagcuaucuuuguuguuuauauggucuccagagacaauguuucuugcuccaucugucuauaa

SEQ ID NO: 59473 - RNA, 1758 nt, Artificial Sequence; identical to SEQ ID NO: 58697
  derived and/or modified CDS sequence (wt) from hemagglutinin__InfluenzaB__AGX21075

SEQ ID NO: 59474 - RNA, 1758 nt, Artificial Sequence; identical to SEQ ID NO: 59027
  derived and/or modified CDS sequence (wt) from hemagglutinin__InfluenzaB__AGX21084

SEQ ID NO: 59475 - RNA, 1758 nt, Artificial Sequence
  derived and/or modified CDS sequence (wt) from hemagglutinin__InfluenzaB__AGX21095
augaaggcaauaauuguacuacucaugguaguaacauccaaugcagaucgaaucugcacugggauaacaucgucaaacucaccacaugucgucaaaacugcuacucaaggggaggucaaugugaccgguguaauaccacugacaacaacacccaccaaaucucauuuugcaaaucucaaaggaacagaaaccagggggaaacuaugcccaaaaugccuaaacugcacagaucuggacguagccuugggcagaccaaaaugcacggggaaaauacccucggcaagaguuucaauacuccaugaagucagaccuguuacaucugggugcuuuccuauaaugcacgauagaacaaaaauuagacagcugccuaaccuucuccgaggauacgaacauaucagguuaucaacucauaacguuaucaaugcagaaaaugcaccaggaggacccuacaaaauuggaaccucagggucuugcccuaacguuaccaauggaaacggauucuucgcaacaauggcuugggccgucccaaaaaacgacaaaaacaaaacagcaacaaauccauuaacaauagaaguaccauacauuuguacagaaggagaagaccaaauuaccgucuggggguuccacuccgacaacgagacccaaauggcaaagcucuauggggacucaaagccccagaaguucaccucaucugccaacggagugaccacacauuacguuucacagauugguggcuucccaaaucaaacagaagacggaggacuaccacaaagugguagaauuguuguugauuacauggugcaaaaaucugggaaaacaggaacaauuaccuaucaaagagguauuuuauugccucaaaagguguggugcgcaaguggcaggagcaagguaauaaaaggauccuugccuuuaauuggagaagcagauugccuccacgaaaaauacgguggauuaaacaaaagcaagccuuacuacacaggggaacaugcaaaggcuauaggaaauugcccaauaugggugaaaacacccuugaagcuggccaauggaaccaaauauagaccuccugcaaaacuauuaaaggaaagggguuucuucggagcuauugcugguuucuuagaaggaggaugggaaggaaugauugcagguuggcacggauacacaucccauggggcacauggaguagcgguggcagcagaccuuaagagcacucaagaggccauaaacaagauaacaaaaaaucucaacucuuugagugagcuggaaguaaagaaucuucaaagacuaagcggugccauggaugaacuccacaacgaaauacuagaacuagaugagaaaguggaugaucucagagcugauacaauaagcucacaaauagagcucgcaguccugcuuuccaaugaaggaauaauaaacagugaagaugaacaucucuuggcgcuugaaagaaagcugaagaaaaugcugggccccucugcuguagagauagggaaugggugcuuugaaaccaaacacaagugcaaccagaccugucucgacagaauagcugcugguaccuuugaugcaggagaauuuucucuccccaccuuugauucacugaauauuacugcugcaucuuuaaaugacgauggauuggauaaucauacuauacugcuuuacuacucaacugcugccuccaguuuggcuguaacacugaugauagcuaucuuuguuguuuauauggucuccagagacaauguuucuugcuccaucugucuauaa

SEQ ID NO: 59476 - RNA, 1758 nt, Artificial Sequence
  derived and/or modified CDS sequence (wt) from hemagglutinin__InfluenzaB__AGX21106
augaaggcaauaauuguacuacucaugguaguaacauccaaugcagaucgaaucugcacugggauaacaucgucaaacucaccacauguagucaaaacugcuacucaaggggaggucaaugugacugguguaauaccacugacaacaacacccaccaaaucucauuuugcaaaucucaaaggaacagaaaccagagggaaacuaugcccaaaaugccccaacugcacagauuuggacguagccuugggcagaccaaaaugcacggggaaaauacccucugcaagaguuucaauacuccaugaagucagaccuguuacaucugggugcuuuccuauaaugcacgacagaacaaaaauuagacagcugccuaaccuucuccgaggauacgaacauaucagauuaucaacucauaacguuaucaaugcagaaaaugcaccaggaggacccuacaaaauuggaaccucagggucuugcccuaacguuaccaauggaaacggauuuuucgcaacaauggcuugggccgucccaaaaaacgacaaaaacaaaacagcaacaaauccauuaacaauagaaguaccauacauuuguacagaaggagaagaccaaauuaccguuuggggguuccacucugauaacgaggcccaaauggcaaagcucuauggggacucaaagccccagaaguucaccucaucugccaacggagugaccacacauuauguuucacagauuggcggcuucccaaaucaaacagaagauggaggacuaccacaaagugguagaauuguuguugauuacauggugcaaaaaucugggaaaacaggaacaauuaccuaucaaagagguauuuuauugccucaaaagguguggugcgcaaguggcaggagcaagguaauaaaaggauccuugccuuuaauuggagaagcagauugccuccacgaaaaauacgguggauuaaacaaaagcaagccuuacuacacaggggaacaugcaaaggccauaggaaauugcccaauaugggugaagacacccuugaagcuggccaauggaaccaaauauagaccuccugcaaaacuauuaaaggaaagggguuucuucggagcuauugcugguuucuuagaaggaggaugggaaggaaugauugcagguuggcacggauacacgucccauggggcacauggaguagcgguggcagcagaccuuaagagcacucaagaggccauaaacaagauaacaaaaaaucucaacucuuugagugagcuggaaguaaagaaucuucaaagacuaaguggugccauggaugaacuccacaacgaaauacuagaacuagacgagaaaguggaugaucucagagcugauacaauaagcucacaaauagaacucgcaguccugcuuucuaaugaaggaauaauaaacagugaagaugaacaucucuuggcacuugaaagaaagcugaagaaaaugcugggcccuucugcuguagagauagggaauggaugcuuugaaaccaaacacaagugcaaccagaccugucucgacagaauagcugcugguaccuuugaugcaggagaauuuucucuccccaccuuugauucacugaauauuacugcugcaucuuuaaaugacgauggauuggauaaucauaccauacugcuuuacuacucaacugcugccuccaguuuggcuguaacacugaugauagcuaucuuuguuguuuauauggucuccagagacaauguuucuugcuccaucugucuauaa

SEQ ID NO: 59477 - RNA, 1758 nt, Artificial Sequence
  derived and/or modified CDS sequence (wt) from hemagglutinin__InfluenzaB__AGX21117
augaaggcaauaauuguacuacucaugguaguaacauccaaugcagaucgaaucugcacugggauaacaucgucaaacucaccacauguagucaaaacugcuacucaaggggaggucaaugugacugguguaauaccacugacaacaacaccuaccaaaucucauuuugcaaaucucaaaggaacagaaaccagagggaaacuaugcccaaaaugccccaacugcacagauuuggacguagccuugggcagaccaaaaugcacggggaaaauacccucugcaagaguuucaauacuccaugaagucagaccuguuacaucugggugcuuuccuauaaugcacgacagaacaaaaauuagacagcugccuaaccuucuccgaggauacgaacauaucagauuaucaacucauaacguuaucaaugcagaaaaugcaccaggaggacccuacaaaauuggaaccucagggucuugcccuaacguuaccaauggaaacggauuuuucgcaacaauggcuugggccgucccaaaaaacgacaaaaacaaaacagcaacaaauccauuaacaauagaaguaccauacauuuguacagaaggagaagaccaaauuaccguuuggggguuccacucugauaacgagacccaaauggcaaagcucuauggggacucaaagccccagaaguucaccucaucugccaacggagugaccacacauuacguuucacagauuggcggcuucccaaaucaaacagaagauggaggacuaccacaaagugguagaauuguuguugauuacauggugcaaaaaucugggaaaacaggaacaauuaccuaucaaagagguauuuuauugccucaaaagguguggugcgcaaguggcaggagcaagguaauaaaaggauccuugccuuuaauuggagaagcagauugccuccacgaaaaauacgguggauuaaacaaaagcaagccuuacuacacaggggaacaugcaaaggccauaggaaauugcccaauaugggugaagacacccuugaagcuggccaauggaaccaaauauagaccuccugcaaaacuauuaaaggaaagggguuucuucggggcuauugcugguuucuuagaaggaggaugggaaggaaugauugcagguuggcacggauacacgucccauggggcacauggaguagcgguggcagcagaccuuaagagcacucaagaggccauaaacaagauaacaaaaaaucucaacucuuugagugagcuggaaguaaagaaucuucaaagacuaaguggugccauggaugaacuccacaacgaaauacuagaacuagacgagaaaguggaugaucucagagcugauacaauaagcucacaaauagaacucgcaguccugcuuucuaaugaaggaauaauaaacagugaagaugaacaucucuuggcacuugaaagaaagcugaagaaaaugcugggcccuucugcuguagagauagggaauggaugcuuugaaaccaaacacaagugcaaccagaccugucucgacagaauagcugcugguaccuuugaugcaggagaauuuucucuccccaccuuugauucacugaauauuacugcugcaucuuuaaaugacgauggauuggauaaucauaccauacugcuuuacuacucaacugcugccuccaguuuggcuguaacacugaugauagcuaucuuuguuguuuauauggucuccagagacaauguuucuugcuccaucugucuauaa

SEQ ID NO: 59478 - RNA, 1758 nt, Artificial Sequence
  derived and/or modified CDS sequence (wt) from hemagglutinin__InfluenzaB__AGX21128
augaaggcaauaauuguacuacucaugguaguaacauccaaugcagaucggaucugcacugggauaacaucgucaaacucaccacaugucgucaaaacugcuacucaaggggaggucaaugugaccgguguaauaccacugacaacaacacccaccaaaucucauuuugcaaaucucaaaggaacagaaaccagggggaaacuaugcccaaaaugccucaacugcacagaucuggacguagccuugggcagaccaaaaugcacugggaaaauacccucggcaagaguuucaauacuccaugaagucagaccuguuacaucugggugcuuuccuauaaugcacgauagaacaaaaauuagacagcugccuaaccuucuccgaggauacgaacauaucagguuaucaacucauaacguuaucaauacagaaaaugcaccaggaggacccuacaaaauuggaaccucagggucuugcccuaacguuaccaauggaaacggauucuucgcaacaauggcuugggcugucccaaaaaacgacaaaaacaaaacagcaacaaauccauuaacaauagaaguaccauacauuuguacagaaggagaagaccaaauuaccguuuggggguuccacucugacaacgagacccaaauggcaaagcucuauggggacucaaagccccagaaguucaccucaucugccaacggagugaccacacauuacguuucacagauugguggcuucccaaaucaaacagaagacggaggacuaccacaaagugguagaauuguuguugauuacauggugcaaaaaucugggaaaacgggaacaauuaccuaucaaagagguauuuuauugccucaaaagguguggugcgcaaguggcaggagcaagguaauaaaaggauccuugccuuuaauuggagaagcagauugccuccacgaaaaauacgguggauuaaacaaaagcaagccuuacuacacaggggaacaugcaaaggccauaggaaauugcccaauaugggugaaaacacccuugaaacuggccaauggaaccaaauauagaccuccugcaaaacuauuaaaggaaagggguuucuucggagcuauugcugguuucuuagaaggaggaugggaaggaaugauugcagguuggcacggauacacaucccauggggcacauggaguagcgguggcagcagaccuuaagagcacucaagaggccauaaacaagauaacaaaaaaucucaacucuuugagugagcuggaaguaaagaaucuccaaagacuaagcggugccauggaugaacuccacaacgaaauacuagaacuagaugagaaaguggaugaucucagagcugauacaauaagcucacaaauagagcucgcaguccugcuuuccaaugaaggaauaauaaacagugaagaugaacaucucuuggcgcuugaaagaaagcugaagaaaaugcugggccccucugcuguagagauagggaauggaugcuuugaaaccaaacacaagugcaaccagaccugucucgacagaauagcugcugguaccuuugaugcaggagaauuuucccuccccaccuuugauucacugaauauuacugcugcaucuuuaaaugacgauggauuggauaaucauacuauacugcuuuacuacucaacugcugccuccaguuuggcuguaacacugaugauagcuaucuuuguuguuuauauggucuccagagacaauguuucuugcuccaucugucuauag

SEQ ID NO: 59479 - RNA, 1758 nt, Artificial Sequence
  derived and/or modified CDS sequence (wt) from hemagglutinin__InfluenzaB__AGX21139
augaaggcaauaauuguacuacucaugguaguaacauccaaugcagaucgaaucugcacugggauaacaucgucaaacucaccacauguagucaaaacugcuacucaaggggaggucaaugugacugguguaauaccacugacaacaacacccaccaaaucucauuuugcaaaucucaaaggaacagaaaccagagggaaacuaugcccaaaaugccccaacugcacagauuuggacguagccuugggcagaccaaaaugcacggggaaaauacccucugcaagaguuucaauacuccaugaagucagaccuguuacaucugggugcuuuccuauaaugcacgacagaacaaaaauuagacagcugccuaaccuucuccgaggauacgaacauaucagauuaucaacucauaacguuaucaaugcagaaaaugcaccaggaggacccuacaaaauuggaaccucagggucuugcccuaacguuaccaauggaaacggauuuuucgcaacaauggcuugggccgucccaaaaaacgacaaaaacaaaacagcaacaaauccauuaacaauagaaguaccauacauuuguacagaaggagaagaccaaauuaccguuuggggguuccacucugauaacgagacccaaauggcaaagcucuauggggacucaaagccccagaaguucaccucaucugccaacggagugaccacacauuacguuucacagauuggcgacuucccaaaucaaacagaagauggaggacuaccacaaagugguagaauuguuguugauuacauggugcaaaaaucugggaaaacaggaacaauuaccuaucaaagagguauuuuauugccucaaaagguguggugcgcaaguggcaggagcaagguaauaaaaggauccuugccuuuaauuggagaagcagauugccuccacgaaaaauacgguggauuaaacaaaagcaagccuuacuacacaggggaacaugcaaaggccauaggaaauugcccaauaugggugaagacacccuugaagcuggccaauggaaccaaauauagaccuccugcaaaacuauuaaaggaaagggguuucuucggagcuauugcugguuucuuagaaggaggaugggaaggaaugauugcagguuggcacggauacacgucccauggggcacauggaguagcgguggcagcagaccuuaagagcacucaagaggccauaaacaagauaacaaaaaaucucaacucuuugagugagcuggaaguaaagaaucuucaaagacuaaguggugccauggaugaacuccacaacgaaauacuagaacuagacgagaaaguggaugaucucagagcugauacaauaagcucacaaauagaacucgcaguccugcuuucuaaugaaggaauaauaaacagugaagaugaacaucucuuggcacuugaaagaaagcugaagaaaaugcugggcccuucugcuguagagauagggaauggaugcuuugaaaccaaacacaagugcaaccagaccugucucgacagaauagcugcugguaccuuugaugcaggagaauuuucucuccccaccuuugauucacugaauauuacugcugcaucuuuaaaugacgauggauuggauaaucauaccauacugcuuuacuacucaacugcugccuccaguuuggcuguaacacugaugauagcuaucuuuguuguuuauauggucuccagagacaauguuucuugcuccaucugucuauaa

SEQ ID NO: 59480 - RNA, 1758 nt, Artificial Sequence
  derived and/or modified CDS sequence (wt) from hemagglutinin__InfluenzaB__AGX21150
augaaggcaauaauuguacuacucaugguaguaacauccaaugcagaucgaaucugcacugggauaacaucgucaaacucaccacauaucgucaaaacugcuacucaaggggaggucaaugugacugguguaauaccacugacaacaacacccaccaaaucucauuuugcaaaucucaaaggaacagaaaccagggggaaacuaugcccaaaaugccucaacugcacagaucuggacguagccuugggcagaccaaaaugcacggggaaaauacccucggcaagaguuucaauacuccaugaagucagaccuguuacaucugggugcuuuccuauaaugcacgacagaacaaaaauuagacagcugccuaaccuucucagaggauacgaacauaucagguuaucaacucauaacguuaucaaugcagaaaaugcaccaggaggacccuacaaaauuggaaccucagggucuugcccuaacauuaccaauggaaacggauuuuucgcaacaauggcuugggccgucccaaaaaacgacaaaaacaaaacagcaacaaauccauuaacaauagaaguaccauacauuuguacagaaggagaagaccaaauuaccguuuggggguuccacucugacaaugaaacccaaauggcaaagcucuauggggacucaaagccccagaaguucaccucaucugccaacggagugaccacacauuacguuucacagauugguggcuucccaaaucaaacagaagacggaggacuaccacaaagugguagaauuguuguugauuacauggugcaaaaaucugggaaaacaggaacaauuaccuaucaaagggguauuuuauugccucaaaagguguggugcgcaaguggcaggagcaagguaauaaaaggauccuugccuuuaauuggagaagcagauugccuccacgaaaaauacgguggauuaaacaaaagcaagccuuacuacacaggggaacaugcaaaggccauaggaaauugcccaauaugggugaaaacacccuugaagcuggccaauggaaccaaauauagaccuccugcaaaacuauuaaaggaaagggguuucuucggugcuauugcuggcuucuuggaaggaggaugggaaggaaugauugcagguuggcacggauacacaucccauggggcacauggaguagcgguggcagcagaccuuaagagcacucaagaggccauaaacaagauaacaaaaaaucucaacucuuugagugagcuggaaguaaagaaucuucaaagacuaagcggugccauggaugaacuccacaaugaaauacuagaauuagaugagaaaguggaugaucucagagcugauacaauaagcucacaaauagaacucgcaguccugcuuuccaaugaaggaauaauaaacagugaagaugaacaucucuuggcgcuugaaagaaagcugaagaaaaugcugggccccucugcuguagagauagggaauggaugcuuugaaaccaaacacaagugcaaccagaccugucucgacagaauagcugcugguaccuuugaugcaggagaauuuucucuccccacuuuugauucacugaauauuacugcugcaucuuuaaaugacgauggauuggauaaucauacuauacugcuuuacuacucaacugcugccuccaguuuggcuguaacacugaugauagcuaucuuuguuguuuauauggucuccagagacaauguuucuugcuccaucugucuauaa

SEQ ID NO: 59481 - RNA, 1758 nt, Artificial Sequence
  derived and/or modified CDS sequence (wt) from hemagglutinin__InfluenzaB__AGX21161
augaaggcaauaauuguacuacucaugguaguaacauccaaugcagaucgaaucugcacugggauaacaucgucaaacucaccacauguagucaaaacugcuacucaaggggaggucaaugugacugguguaauaccacugacaacaacacccaccaaaucucauuucgcaaaucucaaaggaacagaaaccagagggaaacuaugcccaaaaugccccaacugcacagauuuggacguagccuugggcagaccaaaaugcacggggaaaauacccucugcaagaguuucaauacuccaugaagucagaccuguuacaucugggugcuuuccuauaaugcacgacagaacaaaaauuagacagcugccuaaccuucuccgaggauacgaacauaucagauuaucaacucauaacguuaucaaugcagaaaaugcaccaggaggacccuacaaaauuggaaccucagggucuugcccuaacguuaccaauggaaacggauuuuucgcaacaauggcuugggccgucccaaaaaacgacaaaaacaaaacagcaacaaauccauuaacaauagaaguaccauacauuuguacagaaggagaagaccaaauuaccguuuggggguuccacucugauaacgagacccaaauggcaaagcucuauggggacucaaagccccagaaguucaccucaucugccaacggagugaccacacauuacguuucacagauugguggcuucccaaaucaaacagaagauggaggacuaccacaaagugguagaauuguuguugauuacauggugcaaaaaucugggaaaacaggaacuauuaccuaucaaagagguauuuuauugccucaaaagguguggugcgcaaguggcaggagcaagguaauaaaaggauccuugccuuuaauuggagaagcagauugccuccacgaaaaauacgguggauuaaacaaaagcaagccuuacuacacaggggaacaugcaaaggccauaggaaauugcccaauaugggugaagacacccuugaagcuggccaauggaaccaaauauagaccuccugcaaaacuauuaaaggaaagggguuucuucggagcuauugcugguuucuuagaaggaggaugggaaggaaugauugcagguuggcacggauacacgucccauggggcacauggaguagcgguggcagcagaccuuaagagcacucaagaggccauaaacaagauaacaaaaaaucucaacucuuugagugagcuggaaguaaagaaucuucaaagacuaaguggugccauggaugaacuccacaacgaaauacuagaacuagacgagaaaguggaugaucucagagcugauacaauaagcucacaaauagaacucgcaguccugcuuucuaaugaaggaauaauaaacagugaagaugaacaucucuuggcacuugaaagaaagcugaagaaaaugcugggcccuucugcuguagagauagggaauggaugcuuugaaaccaaacacaagugcaaccagaccugucucgacagaauagcugcugguaccuuugaugcaggagaauuuucucuccccaccuuugauucacugaauauuacugcugcaucuuuaaaugacgauggauuggauaaucauaccauacugcuuuacuacucaacugcugccuccaguuuggcuguaacacugaugauagcuaucuuuguuguuuauauggucuccagagacaauguuucuugcuccaucugucuauaa

SEQ ID NO: 59482 - RNA, 1758 nt, Artificial Sequence; identical to SEQ ID NO: 58738
  derived and/or modified CDS sequence (wt) from hemagglutinin__InfluenzaB__AGX21172

SEQ ID NO: 59483 - RNA, 1758 nt, Artificial Sequence
  derived and/or modified CDS sequence (wt) from hemagglutinin__InfluenzaB__AGX21183
augaaggcaauaauuguacuacucaugguaguaacauccaaugcagaucgaaucugcacugggauaacaucgucaaacucaccacaugucgucaaaacugcuacucaaggggaggucaaugugaccgguguaauaccacugacaacaacacccaccaaaucucauuuugcaaaucucaaaggaacagaaaccagggggaaacuaugcccaaaaugccuaaacugcacagaucuggacguagccuugggcagaccaaaaugcacggggaaaauacccucggcaagaguuucaauacuccaugaagucagaccuguuacaucugggugcuuuccuauaaugcacgauagaacaaaaauuagacagcugccuaaccuucuccgaggauacgaacauaucagguuaucaacucauaacguuaucaaugcagaaaaugcaccaggaggacccuacaaaauuggaaccucagggucuugcccuaacguuaccaauggaaacggauucuucgcaacaauggcuugggccgucccaaaaaacgacaaaaacaaaacagcaacaaauccauuaacaauagaaguaccauacauuuguacagaaggagaagaccaaauuaccgucuggggguuccacuccgacaacgagacccaaauggcaaagcucuauggggacucaaagccccagaaguucaccucaucugccaacggagugaccacacauuacguuucacagauugguggcuucccaaaucaaacagaagacggaggacuaccacaaagugguagaauuguuguugauuacauggugcaaaaaucugggaaaacaggaacaauuaccuaucaaagagguauuuuauugccucaaaagguguggugcgcaaguggcaggagcaagguaauaaaaggauccuugccuuuaauuggagaagcagauugccuccacgaaaaauacgguggauuaaacaaaagcaaaccuuacuacacaggggaacaugcaaaggcuauaggaaauugcccaauaugggugaaaacacccuugaagcuggccaauggaaccaaauauagaccuccugcaaaacuauuaaaggaaagggguuucuucggagcuauugcugguuucuuagaaggaggaugggaaggaaugauugcagguuggcacggauacacaucccauggggcacauggaguagcgguggcagcagaccuuaagagcacucaagaggccauaaacaagauaacaaaaaaucucaacucuuugagugagcuggaaguaaagaaucuucaaagacuaagcggugccauggaugaacuccacaacgaaauacuagaacuagaugagaaaguggaugaucucagagcugauacaauaagcucacaaauagagcucgcaguccugcuuuccaaugaaggaauaauaaacagugaagaugaacaucucuuggcgcuugaaagaaagcugaagaaaaugcugggccccucugcuguagagauagggaaugggugcuuugaaaccaaacacaagugcaaccaaaccugucucgacagaauagcugcugguaccuuugaugcaggagaauuuucucuccccaccuuugauucacugaauauuacugcugcaucuuuaaaugacgauggauuggauaaucauacuauacugcuuuacuacucaacugcugccuccaguuuggcuguaacacugaugauagcuaucuuuguuguuuauauggucuccagagacaauguuucuugcuccaucugucuauaa

SEQ ID NO: 59484 - RNA, 1758 nt, Artificial Sequence; identical to SEQ ID NO: 58738
  derived and/or modified CDS sequence (wt) from hemagglutinin__InfluenzaB__AGX21194

SEQ ID NO: 59485 - RNA, 1758 nt, Artificial Sequence
  derived and/or modified CDS sequence (wt) from hemagglutinin__InfluenzaB__AGX21205
augaaggcaauaauuguacuacucaugguaguaacauccaaugcagaucgaaucugcacugggauaacaucgucaaacucaccacauaucgucaaaacugcuacucaaggggaggucaaugugacugguguaauaccacugacaacaacacccaccaaaucucauuuugcaaaucucaaaggaacagaaaccagggggaaacuaugcccaaaaugccucaacugcacagaucuggacguagccuugggcagaccaaaaugcacggggaaaauacccucggcaagaguuucaauacuccaugaagucagaccuguuacaucugggugcuuuccuauaaugcacgacagaacaaaaauuagacagcugccuaaccuucucagaggauacgaacauaucagguuaucaacucauaacguuaucaaugcaaaaaaugcaccaggaggacccuacaaaauuggaaccucagggucuugcccuaacauuaccaauggaaacggauuuuucgcaacaauggcuugggccgucccaaaaaacgacaaaaacaaaacagcaacaaauccauuaacaauagaaguaccauacauuuguacagaaggagaagaccaaauuaccguuuggggguuccacucugacaaugaaacccaaauggcaaagcucuauggggacucaaagccccagaaguucaccucaucugccaacggagugaccacacauuacguuucacagauugguggcuucccaaaucaaacagaagacggaggacuaccacaaagugguagaauuguuguugauuacauggugcaaaaaucugggaaaacaggaacaauuaccuaucaaagggguauuuuauugccucaaaagguguggugcgcaaguggcaggagcaagguaauaaaaggauccuugccuuuaauuggagaagcagauugccuccacgaaaaauacgguggauuaaacaaaagcaagccuuacuacacaggggaacaugcaaaggccauaggaaauugcccaauaugggugaaaacacccuugaagcuggccaauggaaccaaauauagaccuccugcaaaacuauuaaaggaaagggguuucuucggugcuauugcuggcuucuuagaaggaggaugggaaggaaugauugcagguuggcacggauacacaucccauggggcacauggaguagcgguggcagcagaccuuaagagcacucaagaggccauaaacaagauaacaaaaaaucucaacucuuugagugagcuggaaguaaagaaucuucaaagacuaagcggugccauggaugaacuccacaaugaaauacuagaauuagaugagaaaguggaugaucucagagcugauacaauaagcucacaaauagaacucgcaguccugcuuuccaaugaaggaauaauaaacagugaagaugaacaucucuuggcgcuugaaagaaagcugaagaaaaugcugggccccucugcuguagagauagggaauggaugcuuugaaaccaaacacaagugcaaccagaccugucucgacagaauagcugcugguaccuuugaugcaggagaauuuucucuccccacuuuugauucacugaauauuacugcugcaucuuuaaaugacgauggauuggauaaucauacuauacugcuuuacuacucaacugcugccuccaguuuggcuguaacacugaugauagcuaucuuuguuguuuauauggucuccagagacaauguuucuugcuccaucugucuauaa

SEQ ID NO: 59486 - RNA, 1758 nt, Artificial Sequence
  derived and/or modified CDS sequence (wt) from hemagglutinin__InfluenzaB__AGX21216
augaaggcaauaauuguacuacucaugguaguaacauccaaugcagaucggaucugcacugggauaacaucgucaaacucaccacaugucgucaaaacugcuacucaaggggaggucaaugugaccgguguaauaccacugacaacaacacccaccaaaucucauuuugcaaaucucaaaggaacagaaaccagggggaaacuaugcccaaaaugccucaacugcacagaucuggacguagccuugggcagaccaaaaugcacugggaaaauacccucggcaagaguuucaauacuccaugaagucagaccuguuacaucugggugcuuuccuauaaugcacgauagaacaaaaauuagacagcugccuaaccuucuccgaggauacgaacauaucagguuaucaacucauaacguuaucaaugcagaaaaugcaccaggaggacccuacaaaauuggaaccucagggucuugcccuaacguuaccaauggaaacggauucuucgcaacaauggcuugggcugucccaaaaaacgacaaaaacaaaacagcaacaaauccauuaacaauagaaguaccauacauuuguacagaaggagaagaccaaauuaccguuuggggguuccacucugacaacgagacccaaauggcaaagcucuauggggacucaaagccccagaaguucaccucaucugccaacggagugaccacacauuacguuucacagauugguggcuucccaaaucaaacagaagacggaggacuaccacaaagugguagaauuguuguugauuacauggugcaaaaaucugggaaaacaggaacaauuaccuaucaaagagguauuuuauugccucaaaaaguguggugcgcaaguggcaggagcaagguaauaaaaggauccuugccuuuaauuggagaagcagauugccuccacgaaaaauacgguggauuaaacaaaagcaagccuuacuacacaggggaacaugcaaaggccauaggaaauugcccaauaugggugaaaacacccuugaagcuggccaauggaaccaaauauagaccuccugcaaaacuauuaaaggaaagggguuucuucggagcuauugcugguuucuuagaaggaggaugggaaggaaugauugcagguuggcacggauacacaucccauggggcacauggaguagcgguggcagcagaccuuaagagcacucaagaggccauaaacaagauaacaaaaaaucucaacucuuugagugagcuggaaguaaagaaucuccaaagacuaagcggugccauggaugaacuccacaacgaaauacuagaacuagaugagaaaguggaugaucucagagcugauacaauaagcucacaaauagagcucgcaguccugcuuuccaaugaaggaauaauaaacagugaagaugaacaucucuuggcgcuugaaagaaagcugaagaaaaugcugggccccucugcuguagagauagggaauggaugcuuugaaaccaaacacaagugcaaccagaccugucucgacagaauagcugcugguaccuuugaugcaggagaauuuucucuccccaccuuugauucacugaauauuacugcugcaucuuuaaaugacgauggauuggauaaucauacuauacugcuuuacuacucaacugcugccuccaguuuggcuguaacacugaugauagcuaucuuuguuguuuauauggucuccagagacaauguuucuugcuccaucugucuauag

SEQ ID NO: 59487 - RNA, 1758 nt, Artificial Sequence; identical to SEQ ID NO: 58652
  derived and/or modified CDS sequence (wt) from hemagglutinin__InfluenzaB__AGX21227

SEQ ID NO: 59488 - RNA, 1758 nt, Artificial Sequence
  derived and/or modified CDS sequence (wt) from hemagglutinin__InfluenzaB__AGX21238
augaaggcaauaauuguacuacucaugguaguaacauccaaugcagaucgaaucugcacugggauaacaucgucaaacucaccacaugucgucaaaacugcuacucaaggggaggucaaugugaccgguguaauaccacugacaacaacacccaccaaaucucauuuugcaaaucucaaaggaacagaaaccagggggaaacuaugcccaaaaugccuaaacugcacagaucuggacguagccuugggcagaccaaaaugcacggggaaaauacccucggcaagaguuucaauacuccaugaagucagaccuguuacaucugggugcuuuccuauaaugcacgauagaacaaaaauuagacagcugccuaaccuucuccgaggauacgaacauaucagguuaucaacucauaacguuaucaaugcagaaaaugcaccaggaggacccuacaaaauuggaaccucagggucuugcccuaacguuaccaauggaaacggauucuucgcaacaauggcuugggccgucccaaaaaacgacaaaaacaaaacagcaacaaauccauuaacaauagaaguaccauacauuuguacagaaggagaagaccaaauuaccgucuggggguuccacuccgacaacgagacccaaauggcaaagcucuauggggacucaaagccccagaaguucaccucaucugccaacggagugaccacacauuacguuucacagauugguggcuucccaaaucaaacagaagacggaggacuaccacaaagugguagaauuguuguugauuacauggugcaaaaaucugggaaaacaggaacaauuaccuaucaaagagguauuuuauugccucaaaagguguggugcgcaaauggcaggagcaagguaauaaaaggauccuugccuuuaauuggagaagcagauugccuccacgaaaaauacgguggauuaaacaaaagcaagccuuacuacacaggggaacaugcaaaggcuauaggaaauugcccaauaugggugaaaacacccuugaagcuggccaauggaaccaaauauagaccuccugcaaaacuauuaaaggaaagggguuucuucggagcuauugcugguuucuuagaaggaggaugggaaggaaugauugcagguuggcacggauacacaucccauggggcacauggaguagcgguggcagcagaccuuaagagcacucaagaggccauaaacaagauaacaaaaaaucucaacucuuugagugagcuggaaguaaagaaucuucaaagacuaagcggugccauggaugaacuccacaacgaaauacuagaacuagaugagaaaguggaugaucucagagcugauacaauaagcucacaaauagagcucgcaguccugcuuuccaaugaaggaauaauaaacagugaagaugaacaucucuuggcgcuugaaagaaagcugaagaaaaugcugggccccucugcuguagagauagggaaugggugcuuugaaaccaaacacaagugcaaccagaccugucucgacagaauagcugcugguaccuuugaugcaggagaauuuucucuccccaccuuugauucacugaauauuacugcugcaucuuuaaaugacgauggauuggauaaucauacuauacugcuuuacuacucaacugcugccuccaguuuggcuguaacacugaugauagcuaucuuuguuguuuauaugaucuccagagacaauguuucuugcuccaucugucuauaa

SEQ ID NO: 59489 - RNA, 1758 nt, Artificial Sequence
  derived and/or modified CDS sequence (wt) from hemagglutinin__InfluenzaB__AGX21249
augaaggcaauaauuguacuacucaugguaguaacauccaaugcagaucgaaucugcacugggauaacaucgucaaacucaccacauaucgucaaaacugcuacucaaggggaggucaaugugacugguguaauaccacuaacaacaacacccaccaaaucucauuuugcaaaucucaaaggaacagaaaccagggggaaacuaugcccaaaaugccucaacugcacagaucuggacguagccuugggcagaccaaaaugcacggggaaaauacccucggcaagaguuucaauacuccaugaagucagaccuguuacaucugggugcuuuccuauaaugcacgacagaacaaaaauuagacagcugccuaaccuucucagaggauacgaacauaucagguuaucaacucauaacguuaucaaugcagaaaaugcaccaggaggacccuacaaaauuggaaccucagggucuugcccuaacauuaccaauggaaacggauuuuucgcaacaauggcuugggccgucccaaaaaacgacaaaaacaaaacagcaacaaauccauuaacaauagaaguaccauacauuuguacagaaggagaagaccaaauuaccguuuggggguuccacucugacaaugaaacccaaauggcaaagcucuauggggacucaaagccccagaaguucaccucaucugccaacggagugaccacacauuacguuucacagauugguggcuucccaaaucaaacagaagacggaggacuaccacaaagugguagaauuguuguugauuacauggugcaaaaaucugggaaaacaggaacaauuaccuaucaaagggguauuuuauugccucaaaagguguggugcgcaaguggcaggagcaaaguaauaaaaggauccuugccuuuaauuggagaagcagauugccuccacgaaaaauacgguggauuaaacaaaagcaagccuuacuacacaggggaacaugcaaaggccauaggaaauugcccaauaugggugaaaacacccuugaagcuggccaauggaaccaaauauagaccuccugcaaaacuauuaaaggaaagggguuucuucggugcuauugcuggcuucuuagaaggaggaugggaaggaaugauugcagguuggcacggauacacaucccauggggcacauggaguagcgguggcagcagaccuuaagagcacucaagaggccauaaacaagauaacaaaaaaucucaacucuuugagugagcuggaaguaaagaaucuucaaagacuaagcggugccauggaugaacuccacaaugaaauacuagaauuagaugagaaaguggaugaucucagagcugauacaauaagcucacaaauagaacucgcaguccugcuuuccaaugaaggaauaauaaacagugaagaugaacaucucuuggcgcuugaaagaaagcugaagaaaaugcugggccccucugcuguagagauagggaauggaugcuuugaaaccaaacacaagugcaaccagaccugucucgacagaauagcugcugguaccuuugaugcaggagaauuuucucuccccacuuuugauucacugaauauuacugcugcaucuuuaaaugacgauggauuggauaaucauacuauacugcuuuacuacucaacugcugccuccaguuuggcuguaacacugaugauagcuaucuuuguuguuuauauggucuccagagacaauguuucuugcuccaucugucuauaa

SEQ ID NO: 59490 - RNA, 1758 nt, Artificial Sequence
  derived and/or modified CDS sequence (wt) from hemagglutinin__InfluenzaB__AGX21260
augaaggcaauaauuguacuacucaugguaguaacauccaaugcagaucgaaucugcacugggauaacaucgucaaacucaccacaugucgucaaaacugcuacucaaggggaggucaaugugaccgguguaauaccacugacaacaacacccaccaaaucucauuuugcaaaucucaaaggaacagaaaccagagggaaacuaugcccaaaaugccucaacugcacagaucuggacguagccuuaggcagaccaaaaugcacggggaaaauacccucggcaagaguuucaauacuccaugaagucagaccuguuacaucugggugcuuuccuauaaugcacgauagaacaaaaauuagacagcugccuaaccuucuccgaggauacgaacauaucagguuaucaacucauaacguuaucaaugcagaaaaugcaccaggaggacccuacaaaauuggaaccucagggucuugcccuaacguuaccaauggaaacggauucuucgcaacaauggcuugggccgucccaaaaaacgacaaaaacaaaacagcaacaaauccauuaacaauagaaguaccauacauuuguacagaaggagaagaccaaauuaccguuuggggguuccacucugacaacgagacccaaauggcaaagcucuauggggacucaaagccccagaaguucaccucaucugccaacggagugaccacacauuacguuucacagauugguggcuucccaaaucaaacagaagacggaggacuaccacaaagugguagaauuguuguugauuacauggugcaaaaaucugggaaaacaggaacaauuaccuaucagagagguauuuuauugccucaaaggguguggugcgcaaguggcaggagcaagguaauaaaaggauccuugccuuuaauuggagaagcagauugccuccacgaaaaauacgguggauuaaacaaaagcaagccuuacuacacaggggaacaugcaaaagccauaggaaauugcccaauaugggugaaaacacccuugaagcuggccaauggaaccaaauauagaccuccugcaaaacuauuaaaggaaagggguuucuucggagcuauugcugguuucuuagaaggaggaugggaaggaaugauugcagguuggcacggauacacaucccauggggcacauggaguagcgguggcagcagaccuuaagagcacucaagaggccauaaacaagauaacaaaaaaucucaacucuuugagugagcuggaaguaaagaaucuucaaagacuaagcggugccauggaugaacuccacaacgaaauacuagaacuagaugagaaaguggaugaucucagagcugauacaauaagcucacaaauagaacucgcaguccugcuuuccaaugaaggaauaauaaacagugaagaugaacaucucuuggcgcuugaaagaaagcugaagaaaaugcugggccccucugcuguagagauagggaauggaugcuuugaaaccaaacacaagugcaaccagaccugucucgacagaauagcugcugguaccuuugaugcaggagaauuuucucucccuaccuuugauucacugaauauuacugcugcaucuuuaaaugacgauggauuggauaaucauacuauacugcuuuacuacucaacugcugccuccaguuuggcuguaacacugaugauagcuaucuuuguuguuuauauggucuccagagacaauguuucuugcuccaucugucuauaa

SEQ ID NO: 59491 - RNA, 1758 nt, Artificial Sequence; identical to SEQ ID NO: 59481
  derived and/or modified CDS sequence (wt) from hemagglutinin__InfluenzaB__AGX21271

SEQ ID NO: 59492 - RNA, 1758 nt, Artificial Sequence
  derived and/or modified CDS sequence (wt) from hemagglutinin__InfluenzaB__AGX21282
augaaggcaauaauuguacuacucaugguaguaacauccaaugcagaucgaaucugcacugggauaacaucgucaaacucaccacauaucgucaaaacugcuacucaaggggaggucaaugugacugguguaauaccacugacaacaucacccaccaaaucucauuuugcaaaucucaaaggaacagaaaccagggggaaacuaugcccaaaaugccucaacugcacagaucuggacguagccuugggcagaccaaaaugcacggggaaaauacccucggcaagaguuucaauacuccaugaagucagaccuguuacaucugggugcuuuccuauaaugcacgacagaacaaaaauuagacagcugccuaaccuucucagaggauacgaacauaucagguuaucaacucauaacguuaucaaugcaaaaaaugcaccaggaggacccuacaaaauuggaaccucagggucuugcccuaacauuaccaauggaaacggauuuuucgcaacaauggcuugggccgucccaaaaaacgacaaaaacaaaacagcaacaaauccauuaacaauagaaguaccauacauuuguacagaaggagaagaccaaauuaccguuuggggguuccacucugacaaugaaacccaaauggcaaagcucuauggggacucaaagccccagaaguucaccucaucugccaacggagugaccacacauuacguuucacagauugguggcuucccaaaucaaacagaagacggaggacuaccacaaagugguagaauuguuguugauuacauggugcaaaaaucugggaaaacaggaacaauuaccuaucaaagggguauuuuauugccucaaaagguguggugcgcaaguggcaggagcaagguaauaaaaggauccuugccuuuaauuggagaagcagauugccuccacgaaaaauacgguggauuaaacaaaagcaagccuuacuacacaggggaacaugcaaaggccauaggaaauugcccaauaugggugaaaacacccuugaagcuggccaauggaaccaaauauagaccuccugcaaaacuauuaaaggaaagggguuucuucggugcuauugcuggcuucuuagaaggaggaugggaaggaaugauugcagguuggcacggauacacaucccauggggcacauggaguagcgguggcagcagaccuuaagagcacucaagaggccauaaacaagauaacaaaaaaucucaacucuuugagugagcuggaaguaaagaaucuucaaagacuaagcggugccauggaugaacuccacaaugaaauacuagaauuagaugagaaaguggaugaucucagagcugauacaauaagcucacaaauagaacucgcaguccugcuuuccaaugaaggaauaauaaacagugaagaugaacaucucuuggcgcuugaaagaaagcugaagaaaaugcugggccccucugcuguagagauagggaauggaugcuuugaaaccaaacacaagugcaaccagaccugucucgacagaauagcugcugguaccuuugaugcaggagaauuuucucuccccacuuuugauucacugaauauuacugcugcaucuuuaaaugacgauggauuggauaaucauacuauacugcuuuacuacucaacugcugccuccaguuuggcuguaacacugaugauagcuaucuuuguuguuuauauggucuccagagacaauguuucuugcuccaucugucuauaa

SEQ ID NO: 59493 - RNA, 1758 nt, Artificial Sequence
  derived and/or modified CDS sequence (wt) from hemagglutinin__InfluenzaB__AGX21293
augaaggcaauaauuguacuacucaugguaguaacauccaaugcggaucgaaucugcacugggauaacaucgucaaacucaccacaugucgucaaaacugcuacucaaggggaggucaaugugaccgguguaauaccacugacaacaacacccaccaaaucucauuuugcaaaucucaaaggaacagaaaccagggggaaacuaugcccaaaaugccuaaacugcacagaucuggacguagccuugggcagaccaaaaugcacggggaaaauacccucggcaagaguuucaauacuccaugaagucagaccuguuacaucugggugcuuuccuauaaugcacgauagaacaaaaauuagacagcugccuaaccuucuccgaggauacgaacauaucagguuaucaacucauaacguuaucaaugcagaaaaugcaccaggaggacccuacaaaauuggaaccucagggucuugcccuaacguuaccaauggaaacggauucuucgcaacaauggcuugggccgucccaaaaaacgacaaaaacaaaacagcaacaaauccauuaacaauagaaguaccauacauuuguacagaaggagaagaccaaauuaccgucuggggguuccacuccgacaacgagacccaaauggcaaagcucuauggggacucaaagccccagaaguucaccucaucugccaacggagugaccacacauuacguuucacagauugguggcuucccaaaucaaacagaagacggaggacuaccacaaagugguagaauuguuguugauuacauggugcaaaaaucugggaaaacaggaacaauuaccuaucaaagagguauuuuauugccucaaaagguguggugcgcaaguggcaggagcaagguaauaaaaggauccuugccuuuaauuggagaagcagauugccuccacgaaaaauacgguggauuaaacaaaagcaagccuuacuacacaggggaacaugcaaaggcuauaggaaauugcccaauaugggugaaaacacccuugaagcuggccaauggaaccaaauauagaccuccugcaaaacuauuaaaggaaagggguuucuucggagcuauugcugguuucuuagaaggaggaugggaaggaaugauugcagguuggcacggauacacaucccauggggcacauggaguagcgguggcagcagaccuuaagagcacucaagaggccauaaacaagauaacaaaaaaucucaacucuuugagugagcuggaaguaaagaaucuucaaagacuaagcggugccauggaugaacuccacaacgaaauacuagaacuagaugagaaaguggaugaucucagagcugauacaauaagcucacaaauagagcucgcaguccugcuuuccaaugaaggaauaauaaacagugaagaugaacaucucuuggcgcuugaaagaaagcugaagaaaaugcugggccccucugcuguagagauagggaaugggugcuuugaaaccaaacacaagugcaaccagaccugucucgacagaauagcugcugguaccuuugaugcaggagaauuuucucuccccaccuuugauucacugaauauuacugcugcaucuuuaaaugacgauggauuggauaaucauacuauacugcuuuacuacucaacugcugccuccaguuuggcuguaacacugaugauagcuaucuuuguuguuuauauggucuccagagacaauguuucuugcuccaucugucuauaa

SEQ ID NO: 59494 - RNA, 1758 nt, Artificial Sequence; identical to SEQ ID NO: 58738
  derived and/or modified CDS sequence (wt) from hemagglutinin__InfluenzaB__AGX21304

SEQ ID NO: 59495 - RNA, 1758 nt, Artificial Sequence
  derived and/or modified CDS sequence (wt) from hemagglutinin__InfluenzaB__AGX21315
augaaggcaauaauuguacuacucaugguaguaacauccaaugcagaucgaaucugcacugggauaacaucgucaaacucaccacaugucgucaaaacugcuacucaaggggaggucaaugugaccgguguaauaccacugacaacaacacccaccaaaucucauuuugcaaaucucaaaggaacagaaaccagggggaaacuaugcccaaaaugccucaacugcacagaucuggacguagccuugggcagaccaaaaugcacggggaaaauacccucggcaagaguuucaauacuccaugaagucagaccuguuacaucugggugcuuuccuauaaugcacgauagaacaaaaauuagacagcugccuaaccuucuccgaggauacgaacauaucagguuaucaacucauaacguuaucaaugcagaaaaugcaccaggaggacccuacaaaauuggaaccucagggucuugcccuaacguuaccaauggaaacggauucuucgcaacaauggcuugggccgucccaaaaaacgacaaaaacaaaacagcaacaaauccauuaacaauagaaguaccauacauuuguacagaaggagaagaccaaauuaccguuuggggguuccacucugacaacgagacccaaauggcaaagcucuauggggacucaaagccccagaaguucaccucaucugccaacggagugaccacacauuacguuucacagauugguggcuucccaaaucaaacagaagacggaggacuaccacaaagugguagaauuguuguugauuacauggugcaaaaaucugggaaaacaggaacaauuaccuaucaaagagguauuuuauugccucaaaagguguggugcgcaaguggcaggagcaagguaauaaaaggauccuugccuuuaauuggagaagcagauugccuccacgaaaaauacgguggauuaaacaaaagcaagccuuacuacacaggggaacaugcaaaggccauaggaaauugcccaauaugggugaaaacacccuugaagcuggccaauggaaccaaauauagaccuccugcaaaacuauuaaaggaaagggguuucuucggagcuauugcugguuucuuagaaggaggaugggaaggaaugauugcagguuggcacggauacacaucccauggggcacauggaguagcgguggcagcagaccuuaagagcacucaagaggccauaaacaagauaacaaaaaaucucaacucuuugagugagcuggaaguaaagaaucuucaaagacuaagcggugccauggaugaacuccacaaugaaauacuagaacuagaugagaaaguggaugaucucagagcugauacaauaagcucacaaauagaacucgcaguccugcuuuccaaugaaggaauaauaaacagugaagaugaacaucucuuggcgcuugaaagaaagcugaagaaaaugcugggccccucugcuguagagauagggaauggaugcuuugaaaccaaacacaagugcaaccagaccugucucgacagaauagcugcugguaccuuugaugcaggagaauuuucucuccccaccuuugauucacugaauauuacugcugcaucuuuaaaugacgauggauuggauaaucauacuauacugcuuuacuacucaacugcugccuccaguuuggcuguaacacugaugauagcuaucuuuguuguuuauauggucuccagagacaauguuucuugcuccaucugucuauaa

SEQ ID NO: 59496 - RNA, 1758 nt, Artificial Sequence; identical to SEQ ID NO: 59461
  derived and/or modified CDS sequence (wt) from hemagglutinin__InfluenzaB__AGX21326

SEQ ID NO: 59497 - RNA, 1758 nt, Artificial Sequence
  derived and/or modified CDS sequence (wt) from hemagglutinin__InfluenzaB__AGX21337
augaaggcaauaauuguacuacucaugguaguaacauccaaugcagaucgaaucugcacugggauaacaucgucaaacucaccacauguagucaaaacugcuacucaaggggaggucaaugugacugguguaauaccacugacaacaacacccaccaaaucucauuuugcaaaucucaaaggaacagaaaccagagggaaacuaugcccaaaaugccccaacugcacagauuuggacguagccuugggcagaccaaaaugcacggggaaaauacccucugcaagaguuucaauacuccaugaagucagaccuguuacaucugggugcuuuccuauaaugcacgacagaacaaaaauuagacagcugccuaaccuucuccgaggauacgaacauaucagauuaucaacucauaacguuaucaaugcagaaaaugcaccaggaggacccuacaaaauuggaaccucagggucuugcccuaacguuaccaauggaaacggauuuuucgcaacaauggcuugggccgucccaaaaaacgacaaaaacaaaacagcaacaaauccauuaacaauagaaguaccauacauuuguacagaaggagaagaccaaauuaccguuuggggguuccacucugauaaggagacccaaauggcaaagcucuauggggacucaaagccccagaaguucaccucaucugccaacggagugaccacacauuacguuucacagauuggcggcuucccaaaucaaacagaagauggaggacuaccacaaagugguagaauuguuguugauuacauggugcaaaaaucugggaaaacaggaacaauuaccuaucaaagagguauuuuauugccucaaaagguguggugcgcaaguggcaggagcaagguaauaaaaggauccuugccuuuaauuggagaagcagauugccuccacgaaaaauacgguggauuaaacaaaagcaagccuuacuacacaggggaacaugcaaaggccauaggaaauugcccaauaugggugaagacacccuugaagcuggccaauggaaccaaauauagaccuccugcaaaacuauuaaaggaaagggguuucuucggagcuauugcugguuucuuagaaggaggaugggaaggaaugauugcagguuggcacggauacacgucccauggggcacauggaguagcgguggcagcagaccuuaagagcacucaagaggccauaaacaagauaacaaaaaaucucaacucuuugagugagcuggaaguaaagaaucuucaaagacuaaguggugccauggaugaacuccacaacgaaauacuagaacuagacgagaaaguggaugaucucagagcugauacaauaagcucacaaauagaacucgcaguccugcuuucuaaugaaggaauaauaaacagugaagaugaacaucucuuggcacuugaaagaaagcugaagaaaaugcugggcccuucugcuguagagauagggaauggaugcuuugaaaccaaacacaagugcaaccagaccugucucgacagaauagcugcugguaccuuugaugcaggagaauuuucucuccccaccuuugauucacugaauauuacugcugcauccuuaaaugacgauggauuggauaaccauaccauacugcuuuacuacucaacugcugccuccaguuuggcuguaacacugaugauagcuaucuuuguuguuuauauggucuccagagacaauguuucuugcuccaucugucuauaa

SEQ ID NO: 59498 - RNA, 1758 nt, Artificial Sequence; identical to SEQ ID NO: 59475
  derived and/or modified CDS sequence (wt) from hemagglutinin__InfluenzaB__AGX21348

SEQ ID NO: 59499 - RNA, 1758 nt, Artificial Sequence
  derived and/or modified CDS sequence (wt) from hemagglutinin__InfluenzaB__AGX21359
augaaggcaauaauuguacuacucaugguaguaacauccaaugcagaucgaaucugcacugggauaacaucgucaaacucaccacaugucgucaaaacugcuacucaaggggaggucaauguaaccgguguaauaccacugacaacaacacccaccaaaucucauuuugcaaaucucaaaggaacagaaaccagggggaaacuaugcccaaaaugccucaacugcacagaucuggacguagccuugggcagaccaaaaugcacggggaaaauacccucggcaagaguuucaauacuccaugaagucagaccuguuacaucugggugcuuuccuauaaugcacgauagaacaaaaauuagacagcugccuaaccuucuccgaggauacgaacauaucagguuaucaacucauaauguuaucaaugcagaaaaugcaccaggaggacccuacaaaauuggaaccucagggucuugcccuaacguuaccaauggaaacggauucuucgcaacaauggcuugggccgucccaaaaaacgacaaaaacaaaacagcaacaaauccauuaacaauagaaguaccauacauuuguacagaaggagaagaccaaauuaccguuuggggguuccacucugacaacgagacccaaauggcaaagcucuauggggacucaaagccccagaaguucaccucaucugccaacggagugaccacacauuacguuucacagauugguggcuucccaaaucaaacagaagacggaggacuaccacaaagugguagaauuguuguugauuacauggugcaaaaaucugggaaaacaggaacaauuaccuaucaaagagguauuuuauugccucaaaagguguggugcgcaaguggcaggagcaagguaauaaaaggauccuugccuuuaauuggagaagcagauugccuccacgaaaaauacgguggauuaaacaaaagcaagccuuacuacacaggggaacaugcaaaggccauaggaaauugcccaauaugggugaaaacacccuugaagcuggccaauggaaccaaauauagaccuccugcaaaacuauuaaaggaaagggguuucuucggagcuauugcugguuucuuagaaggaggaugggaaggaaugauugcagguuggcacggauacacaucccauggggcacauggaguagcgguggcagcagaccuuaagagcacucaagaggccauaaacaagauaacaaaaaaucucaacucuuugagugagcuggaaguaaagaaucuucaaagacuaagcggugccauggaugaacuccacaacgaaauacuagaacuagaugagaaaguggaugaucucagagcugauacaauaagcucacaaauagaacucgcaguccugcuuuccaaugaaggaauaauaaacagugaagaugaacaucucuuggcgcuugaaagaaagcugaagaaaaugcugggccccucugcuguagagauagggaauggaugcuuugaaaccaaacacaagugcaaccagaccugucucgacagaauagcugcugguaccuuugaugcaggagaauuuucucuccccaccuuugauucacugaauauuacugcugcaucuuuaaaugacgauggauuggauaaucauacuauacugcuuuacuacucaacugcugccuccaguuuggcuguaacacugaugauagcuaucuuuguuguuuauauggucuccagagacaauguuucuugcuccaucugucuauaa

SEQ ID NO: 59500 - RNA, 1758 nt, Artificial Sequence
  derived and/or modified CDS sequence (wt) from hemagglutinin__InfluenzaB__AGX21370
augaaggcaauaauuguacuacucaugguaguaacauccaaugcagaucgaaucugcacugggauaacaucgucaaacucaccacauguagucaaaacugcuacucaaggggaggucaaugugacugguguaauaccacugacaacaacacccaccaaaucucauuuugcaaaucucaaaggaacagaaaccagagggaaacuaugcccaaaaugccccaacugcacagaucuggacguagccuugggcagaccaaaaugcauggggaaaauacccucugcaagaguuucaauacuccaugaagucagaccuguuacaucugggugcuuuccuauaaugcacgacagaacaaaaauuagacagcugccuaaccuucuccgaggauacgaacauaucagauuaucaacucauaacguuaucaaugcagaaaaugcaccaggaggaccauacaaaauuggaaccucagggucuugcccuaacguuaccaauggaaacggauuuuucgcaacaauggcuugggccgucccaaaaaacgacaaaaacaaaacagcaacaaauccauuaacaauagaaguaccauacauuuguacagaaggagaagaccaaauuaccguuuggggguuccacucugauaacgagacccaaauggcaaagcucuauggggacucaaagccccagaaguucaccucaucugccaacggagugaccacacauuacguuucacagauuggcggcuucccaaaucaaacagaagauggaggacuaccacaaagugguagaauuguuguugauuacauggugcaaaaaucugggaaaacaggaacaauuaccuaucaaagagguauuuuauugccucaaaagguguggugcgcaaguggcaggagcaagguaauaaaaggauccuugccuuuaauuggagaagcagauugccuccacgaaaaauacgguggauuaaacaaaagcaagccuuacuacacaggggaacaugcaaaggccauaggaaauugcccaauaugggugaagacacccuugaagcuggccaauggaaccaaauauagaccuccugcaaaacuauuaaaggaaagggguuucuucggagcuauugcugguuucuuagaaggaggaugggaaggaaugauugcagguuggcacggauacacgucccauggggcacauggaguagcgguggcagcagaccuuaagagcacucaagaggccauaaacaagauaacaaaaaaucucaacucuuugagugagcuggaaguaaagaaucuucaaagacuaaguggugccauggaugaacuccacaacgaaauacuagaacuagacgagaaaguggaugaucucagagcugauacaauaagcucacaaauagaacucgcaguccugcuuuccaaugaaggaauaauaaacagugaagaugaacaucucuuggcacuugaaagaaagcugaagaaaaugcugggcccuucugcuguagagauagggaauggaugcuuugaaaccaaacacaagugcaaccagaccugucucgacagaauagcugcugguaccuuugaugcaggagaauuuucucuccccaccuuugauucacugaauauuacugcugcaucuuuaaaugacgauggauuggauaaucauaccauacugcuuuacuacucaacugcugccuccaguuuggcuguaacacugaugauagcuaucuuuguuguuuauauggucuccagagacaauguuucuugcuccaucugucuauaa

SEQ ID NO: 59501 - RNA, 1758 nt, Artificial Sequence
  derived and/or modified CDS sequence (wt) from hemagglutinin__InfluenzaB__AGX21381
augaaggcaauaauuguacuacucaugguaguaacauccaaugcagaucgaaucugcacugggauaacaucgucaaacucaccacauaucgucaaaacugcuacucaaggggaggucaaugugacugguguaauaccacugacaacaacacccaccaaaucucauuuugcaaaucucaaaggaacagaaaccagggggaaacuaugcccaaaaugccucaacugcacagaucuggacguagccuugggcagaccaaaaugcacggggaaaauacccucggcaagaguuucaauacuccaugaagucagaccuguuacaucugggugcuuuccuauaaugcacgacagaacaaaaauuagacagcugccuaaccuucucagaggauacgaacauaucagguuaucaacucauaacguuaucaaugcagaaaaugcaccaggaggacccuacaaaauuggaaccucagggucuugcccuaacauuaccaauggaaacggauuuuucgcaacaauggcuugggccgucccaaaaaacgacaaaaacaaaacagcaacaaauccauuaacaauagaaguaccauacauuuguacagaaggagaagaccaaauuaccguuuggggguuccacucugacaaugaaacccaaauggcaaagcucuauggggacucaaagccccagaaguucaccucaucugccaacggagugaccacacauuacauuucacagauugguggcuucccaaaucaaacagaagacggaggacuaccacaaagugguagaauuguuguugauuacauggugcaaaaaucugggaaaacaggaacaauuaccuaucaaagggguauuuuauugccucaaaagguguggugcgcaaguggcaggagcaagguaauaaaaggauccuugccuuuaauuggagaagcagauugccuccacgaaaaauacgguggauuaaacaaaagcaagccuuacuacacaggggaacaugcaaaggccauaggaaauugcccaauaugggugaaaacacccuugaagcuggccaauggaaccaaauauagaccuccugcaaaacuauuaaaggaaagggguuucuucggugcuauugcuggcuucuuagaaggaggaugggaaggaaugauugcagguuggcacggauacacaucccauggggcacauggaguagcgguggcagcagaccuuaagagcacucaagaggccauaaacaagauaacaaaaaaucucaacucuuugagugagcuggaaguaaagaaucuucaaagacuaagcggugccauggaugaacuccacaaugaaauacuagaauuagaugagaaaguggaugaucucagagcugauacaauaagcucacaaauagaacucgcaguccugcuuuccaaugaaggaauaauaaacagugaagaugaacaucucuuggcgcuugaaagaaagcugaagaaaaugcugggccccucugcuguagagauagggaauggaugcuuugaaaccaaacacaagugcaaccagaccugucucgacagaauagcugcugguaccuuugaugcaggagaauuuucucuccccacuuuugauucacugaauauuacugcugcaucuuuaaaugacgauggauuggauaaucauacuauacugcuuuacuacucaacugcugccuccaguuuggcuguaacacugaugauagcuaucuuuguuguuuauauggucuccagagacaauguuucuugcuccaucugucuauaa

SEQ ID NO: 59502 - RNA, 1758 nt, Artificial Sequence
  derived and/or modified CDS sequence (wt) from hemagglutinin__InfluenzaB__AGX21392
augaaggcaauaauuguacuacucaugguaguaacauccaaugcagaucgaaucugcacugggauaacaucgucaaacucaccacauaucgucaaaacugcuacucaaggggaggucaaugugacugguguaauaccacugacaacaacacccaccaaaucucauuuugcaaaucucaaaggaacagaaaccagggggaaacuaugcccaaaaugccucaacugcacagaucuggacguagccuugggcagaccaaaaugcacggggaaaauacccucggcaagaguuucaauacuccaugaagucagaccuguuacaucugggugcuuuccuauaaugcacgacagaacaaaaauuagacagcugccuaaccuucucagaggauacgaacauaucagguuaucaacucauaacguuaucaaugcagaaaaugcaccaggaggacccuacaaaauuggaaccucagggucuugcccuaacauuaccaauggaaacggauuuuucgcaacaauggcuugggccgucccaaaaaacgacaaaaacaaaacagcaacaaauccauuaacaauagaaguaccauacauuuguacagaaggagaagaccaaauuaccguuuggggguuccacucugacaaugaagcccaaauggcaaagcucuauggggacucaaagccccagaaguucaccucaucugccaacggagugaccacacauuacguuucacagauugguggcuucccaaaucaaacagaagacggaggacuaccacaaagugguagaauuguuguugauuacauggugcaaaaaucugggaaaacaggaacaauuaccuaucaaagggguauuuuauugccucaaaagguguggugcgcaaguggcaggagcaagguaauaaaaggauccuugccuuuaauuggagaagcagauugccuccacgaaaaauacgguggauuaaacaaaagcaagccuuacuacacaggggaacaugcaaaggccauaggaaauugcccaauaugggugaaaacacccuugaagcuggccaauggaaccaaauauagaccuccugcaaaacuauuaaaggaaagggguuucuucggugcuauugcuggcuucuuagaaggaggaugggaaggaaugauugcagguuggcacggauacacaucccauggggcacauggaguagcgguggcagcagaccuuaagagcacucaagaggccauaaacaagauaacaaaaaaucucaacucuuugagugagcuggaaguaaagaaucuucaaagacuaagcggugccauggaugaacuccacaaugaaauacuagaauuagaugagaaaguggaugaucucagagcugauacaauaagcucacaaauagaacucgcaguccugcuuuccaaugaaggaauaauaaacagugaagaugaacaucucuuggcgcuugaaagaaagcugaagaaaaugcugggccccucugcuguagagauagggaauggaugcuuugaaaccaaacacaagugcaaccagaccugucucgacagaauagcugcugguaccuuugaugcaggagaauuuucucuccccacuuuugauucacugaauauuacugcugcaucuuuaaaugacgauggauuggauaaucauacuauacugcuuuacuacucaacugcugccuccaguuuggcuguaacacugaugauagcuaucuuuguuguuuauauggucuccagagacaauguuucuugcuccaucugucuauaa

SEQ ID NO: 59503 - RNA, 1758 nt, Artificial Sequence
  derived and/or modified CDS sequence (wt) from hemagglutinin__InfluenzaB__AGX21403
augaaggcaauaauuguacuacucaugguaguaacauccaaugcagaucgaaucugcacugggauaacaucgucaaacucaccacauguagucaaaacugcuacucaaggggaggucaaugugacugguguaauaccacugacaacaacacccaccaaaucucauuucgcaaaucucaaaggaacagaaaccagagggaaacuaugcccaaaaugccccaacugcacagauuuggacguagccuugggcagaccaaaaugcacggggaaaauacccucugcaagaguuucaauacuccaugaagucagaccuguuacaucugggugcuuuccuauaaugcacgacagaacaaaaauuagacagcugccuaaccuucuccgaggauacgaacauaucagauuaucaacucauaacguuaucaaugcagaaaaugcaccaggaggacccuacaaaauuggaaccucagggucuugcccuaacguuaccaauggaaacggauuuuucgcaacaauggcuugggccgucccaaaaaacgacaaaaacaaaacagcaacaaauccauuaacaauagaaguaccauacauuuguacagaaggagaagaccaaauuaccguuuggggguuccacucugauaacgagacccaaauggcaaagcucuauggggacucaaagccccagaaguucaccucaucugccaacggagugaccacacauuacguuucacagauugguggcuucccaaaucaaacagaagauggaggacuaccacaaagugguagaauuguuguugauuacauggugcaaaaaucugggaaaacaggaacuauuaccuaucaaagagguauuuuauugccucaaaagguguggugcgcaaguggcaggagcaagguaauaaaaggauccuugccuuuaauuggagaagcagauugccuccacgaaaaauacgguggauuaaacaaaagcaagccuuacuacacaggggaacaugcaaaggccauaggaaauugcccaauaugggugaagacacccuugaagcuggccaauggaaccaaauauagaccuccugcaaaacuauuaaaggaaagggguuucuucggagcuauugcugguuucuuagaaggaggaugggaaggaaugauugcagguuggcacggauacacgucccauggggcacauggaguagcaguggcagcagaccuuaagagcacucaagaggccauaaacaagauaacaaaaaaucucaacucuuugagugagcuggaaguaaagaaucuucaaagacuaaguggugccauggaugaacuccacaacgaaauacuagaacuagacgagaaaguggaugaucucagagcugauacaauaagcucacaaauagaacucgcaguccugcuuucuaaugaaggaauaauaaacagugaagaugaacaucucuuggcacuugaaagaaagcugaagaaaaugcugggcccuucugcuguagagauagggaauggaugcuuugaaaccaaacacaagugcaaccagaccugucucaacagaauagcugcugguaccuuugaugcaggagaauuuucucuccccaccuuugauucacugaauauuacugcugcaucuuuaaaugacgauggauuggauaaucauaccauacugcuuuacuacucaacugcugccuccaguuuggcuguaacacugaugauagcuaucuuuguuguuuauauggucuccagagacaauguuucuugcuccaucugucuauaa

SEQ ID NO: 59504 - RNA, 1758 nt, Artificial Sequence
  derived and/or modified CDS sequence (wt) from hemagglutinin__InfluenzaB__AGX21414
augaaggcaauaauuguacuacucaugguaguaacauccaaugcagaucgaaucugcacugggauaacaucgucaaacucaccacauguagucaaaacugcuacucaaggggaggucaaugugacugguguaauaccacugacaacaacacccaccaaaucucauuuugcaaaucucaaaggaacagaaaccagagggaaacuaugcccaaaaugccccaacugcacagauuuggacguagccuugggcagaccaaaaugcacggggaaaauacccucugcaagaguuucaauacuccaugaagucagaccuguuacaucugggugcuuuccuauaaugcacgacagaacaaaaauuagacagcugccuaaccuucuccgaggauacgaacauaucagauuaucaacucauaacguuaucaaugcagaaaaugcaccaggaggacccuacaaaauuggaaccucagggucuugcccuaacguuaccaauggaaacggauuuuucgcaacaauggcuugggccgucccaaaaaacgacaaaaacaaaacagcaacagauccauuaacaauagaaguaccauacauuuguacagaaggagaagaccaaauuaccguuuggggguuccacucugauaacgagacccaaauggcaaagcucuauggggacucaaagccccagaaguucaccucaucuuccaacggagugaccacacauuacguuucacagauuggcggcuucccaaaucaaacagaagauggaggacuaccacaaagugguagaauuguuguugauuacauggugcaaaaaucugggaaaacaggaacaauuaccuaucaaagagguauuuuauugccucaaaagguguggugcgcaaguggcaggagcaagguaauaaaaggauccuugccuuuaauuggagaagcagauugccuccacgaaaaauacgguggauuaaacaaaagcaagccuuacuacacaggggaacaugcaaaggccauaggaaauugcccaauaugggugaagacacccuugaagcuggccaauggaaccaaauauagaccuccugcaaaacuauuaaaggaaagggguuucuucggagcuauugcugguuucuuagaaggaggaugggaaggaaugauugcagguuggcacggauacacgucccauggggcacauggaguagcgguggcagcagaccuuaagagcacccaagaggccauaaacaagauaacaaaaaaucucaacucuuugagugagcuggaaguaaagaaucuucaaagacuaaguggugccauggaugaacuccacaacgaaauacuagaacuagacgagaaaguggaugaucucagagcugauacaauaagcucacaaauagaacucgcaguccugcuuucuaaugaaggaauaauaaacagugaagaugaacaucucuuggcacuugaaagaaagcugaagaaaaugcugggcccuucugcuguagagauagggaauggaugcuuugaaaccaaacacaagugcaaccagaccugucucgacagaauagcugcugguaccuuugaugcaggagaauuuucucuccccaccuuugauucacugaauauuacugcugcaucuuuaaaugacgauggauuggauaaucauaccauacugcuuuacuacucaacugcugccuccaguuuggcuguaacacugaugauagcuaucuuuguuguuuauauggucuccagagacaauguuucuugcuccaucugucuauaa

SEQ ID NO: 59505 - RNA, 1758 nt, Artificial Sequence
  derived and/or modified CDS sequence (wt) from hemagglutinin__InfluenzaB__AGX21425
augaaggcaauaauuguacuacucaugguaguaacauccaaugcagaucgaaucugcacugggauaacaucgucaaacucaccacauguagucaaaacugcuacucaaggggaggucaaugugacugguguaauaccacugacaacaacacccaccaaaucucauuuugcaaaucucaaaggaacagaaaccagagggaaacuaugcccaaaaugccccaacugcacagauuuggacguagccuugggcagaccaaaaugcacggggaaaauacccucugcaagaguuucaauacuccaugaagucagaccuguuacaucugggugcuuuccuauaaugcacgacagaacaaaaauuagacagcugccuaaccuucuccgaggauacgaacauaucagauuaucaacucauaacguuaucaaugcagaaaaugcaccaggaggacccuacaaaauuggaaccucagggucuugcccuaacguuaccaauggaaacggauuuuucgcaacaauggcuugggccgucccaaaaaacgacaaaaacaaaacagcaacaaauccauuaacaauagaaguaccauacauuuguacagaaggagaagaccaaauuaccguuuggggguuccacucugauaacgagacccaaauggcaaagcucuauggggacucaaagccccagaaguucaccucaucugccaacggagugaccacacauuacguuucacagauuggcggcuucccaaaucaaacagaagauggcggacuaccacaaagugguagaauuguuguugauuacauggugcaaaaaucugggaaaacaggaacaauuaccuaucaaagagguauuuuauugccucaaaagguguggugcgcaaguggcaggagcaagguaauaaaaggauccuugccuuuaauuggagaagcagauugccuccacgaaaaauacgguggauuaaacaaaagcaagccuuacuacacaggggaacaugcaaaggccauaggaaauugcccaauaugggugaagacacccuugaagcuggccaauggaaccaaauauagaccuccugcaaaacuauuaaaggaaagggguuucuucggagcuauugcugguuucuuagaaggaggaugggaaggaaugauugcagguuggcacggauacacgucccauggggcacauggaguagcgguggcagcagaccuuaagagcacucaagaggccauaaacaagauaacaaaaaaucucaacucuuugagugagcuggaaguaaagaaucuucaaagacuaaguggugccauggaugaacuccacaacgaaauacuagaacuagacgagaaaguggaugaucucagagcugauacaauaagcucacaaauagaacucgcaguccugcuuucuaaugaaggaauaauaaacagugaagaugaacaucucuuggcacuugaaagaaagcugaagaaaaugcugggcccuucugcuguagagauagggaauggaugcuuugaaaccaaacacaagugcaaccagaccugucucgacagaauagcugcugguaccuuugaugcaggagaauuuucucuccccaccuuugauucacugaauauuacugcugcaucuuuaaaugacgauggauuggauaaucauaccauacugcuuuacuacucaacugcugccuccaguuuggcuguaacacugaugauagcuaucuuuguuguuuauauggucuccagagacaauguuucuugcuccaucugucuauaa

SEQ ID NO: 59506 - RNA, 1758 nt, Artificial Sequence
  derived and/or modified CDS sequence (wt) from hemagglutinin__InfluenzaB__AGX21436
augaaggcaauaauuguacuacucaugguaguaacauccaaugcagaucgaaucugcacugggauaacaucgucaaacucaccacauaucgucaaaacugcuacucaaggggaggucaaugugacugguguaauaccacugacaacaacacccaccaaaucucauuuugcaaaucucaaaggaacagaaaccagggggaaacuaugcccaaaaugccucaacugcacagaucuggacguagccuugggcagaccaaaaugcacggggaaaauacccucggcaagaguuucaauacuccaugaagucagaccuguuacaucugggugcuuuccuauaaugcacgacagaacaaaaauuagacagcugccuaaccuucucagaggauacgaacauaucagguuaucaacucauaacguuaucaaugcagaaaaugcaccaggaggacccuacaaaauuggaaccucagggucuugcccuaacauuaccaauggaaacggauuuuucgcaacaauggcuugggccgucccaaaaaacgacaaaaacaaaacagcaacaaauccauuaacaauagaaguaccauacauuuguacagaaggagaagaccaaauuaccguuuggggguuccacucugacaaugaaacccaaauggcaaagcucuauggggacucaaagccccagaaguucaccucaucugccaacggagugaccacacauuacguuucacagauugguggcuucccaaaucaaacagaagacggaggacuaccacaaagugguagaauuguuguugauuacauggugcaaaaaucugggaaaacaggaacaauuaccuaucaaagggguauuuuauugccucaaaagguguggugcgcaaguggcaggagcaagguaauaaaaggauccuugccuuuaauuggagaagcagauugccuccacgaaaaauacgguggauuaaacaaaagcaagccuuacuacacaggggaacaugcaaaggccauaggaaauugcccaauaugggugaaaacacccuugaagcuggccaauggaaccaaauauagaccuccugcaaaacuauuaaaggaaagggguuucuucggugcuauugcuggcuucuuagaaggaggaugggaaggaaugauugcagguuggcacggauacacaucccauggggcacauggaguagcgguggcagcagaccuuaagagcacucaagaggccauaaacaagauaacaaaaaaucucaacucuuugagugagcuggaaguaaagaaucuucaaagacuaagcggugccauggaugaacuccacaaugaaauacuagaauuagaugagaaaguggaugaucucagagcugauacaauaagcucacaaauagaacucgcaguccugcuuuccaaugaaggaauaauaaacagugaagaugaacaucucuuggcgcuugaaagaaagcugaagaaaaugcugggccccucugcuguagagauagggaauggaugcuuugaaaccaaacacaagugcaaccagaccugucucgacagaauagcugcugguaccuuugaugcaggagaauuuucucuccccacuuuugauucacugaauauuacugcugcaucuuuaaaugacgauggauuggauaaucauacuauacugcuuuacuacucaacuguugccuccaguuuggcuguaacacugaugauagcuaucuuuguuguuuauauggucuccagagacaauguuucuugcuccaucugucuauaa

SEQ ID NO: 59507 - RNA, 1758 nt, Artificial Sequence; identical to SEQ ID NO: 58738
  derived and/or modified CDS sequence (wt) from hemagglutinin__InfluenzaB__AGX21447

SEQ ID NO: 59508 - RNA, 1758 nt, Artificial Sequence; identical to SEQ ID NO: 59472
  derived and/or modified CDS sequence (wt) from hemagglutinin__InfluenzaB__AGX21458

SEQ ID NO: 59509 - RNA, 1758 nt, Artificial Sequence
  derived and/or modified CDS sequence (wt) from hemagglutinin__InfluenzaB__AGX21469
augaaggcaauaauuguacuacucaugguaguaacauccaaugcagaucgaaucugcacugggauaacaucgucaaacucaccacaugucgucaaaacugcuacucaaggggaggucaaugugacugguguaauaccacugacaacaacacccaccaaaucucauuuugcaaaucucaaaggaacagaaaccagagggaaacuaugcccaaaaugccccaacugcacagaucuggacguagccuugggcagaccaaaaugcacggggaaaauacccucggcaagaguuucaauacuccaugaagucagaccuguuacaucugggugcuuuccuauaaugcacgacagaacaaaaauuagacagcugccuaaccuucucagaggauacgaacauaucagauuaucaacucauaacguuaucaaugcagaaaaugcaccaggaggacccuacaaaauuggaaccucagggucuugcccuaacguuaccaauggaaacggauuuuuugcaacaauggcuugggccgucccaaaaaacgacaaaaacaaaacagcaacaaauccauuaacaauagaaguaccauacauuuguacagaaggagaagaccaaauuaccguuuggggguuccacucugauaacgagacccaaauggcaaagcucuauggggacucaaagccccagaaguucaccucaucugccaacggagugaccacacauuacguuucacagauugguggcuucccaaaucaaacagaagacggaggacuaccacaaagugguagaauuguuguugauuacauggugcaaaaaucugggaaaacaggaacaauuaccuaucaaagagguauuuuauugccucaaaagguguggugcgcaaguggcaggagcaagguaauaaaaggauccuuaccuuuaauuggagaagcagauugccuccacgaaaaauacgguggauuaaacaaaagcaagccuuacuacacaggggaacaugcaaaggccauaggaaauugcccaauaugggugaagacacccuugaagcuggccaauggaaccaaauauagaccuccugcaaaacuauuaaaggaaagagguuucuucggagcuauugcugguuucuuagaaggaggaugggaaggaaugauugcagguuggcacggauacacgucccauggggcacauggaguagcgguggcagcagaccuuaagagcacucaagaggccauaaacaagauaacaaaaaaucucaacucuuugagugagcuggaaguaaaaaaucuucaaagacuaagcggugccauggaugaacuccacaacgaaauacuagaacuagacgaaaaaguggaugaucucagagcugauacaauaagcucacaaauagaacucgcaguccugcuuuccaaugaaggaauaauaaacagugaagaugaacaucucuuggcgcuugaaagaaagcugaagaaaaugcugggcccuucugcuguagagauagggaauggaugcuuugaaaccaaacacaagugcaaccagaccugucucgacagaauagcugcugguaccuuugaugcaggagaauuuucucuccccacuuuugauucacugaauauuacugcugcaucuuuaaaugacgauggauuggauaaucauaccauacugcuuuacuacucaacugcugccuccaguuuggcuguaacacugaugauagcuaucuuuguuguuuauauggucuccagagacaauguuucuugcuccaucugucuauaa

SEQ ID NO: 59510 - RNA, 1758 nt, Artificial Sequence
  derived and/or modified CDS sequence (wt) from hemagglutinin__InfluenzaB__AGX21480
augaaggcaauaauuguacuacucaugguaguaacauccaaugcagaucgaaucugcacugggauaacaucgucaaacucaccacaugucgucaaaacugcuacucaaggggaggucaaugugaccgguguaauaccacugacaacaacacccaccaaaucucauuuugcaaaucucaaaggaacagaaaccagggggaaacuaugcccaaaaugccucaacugcacagaucuggacguagccuugggcagaccaaaaugcacggggaaaauacccucggcaagaguuucaauacuccaugaagucagaccuguuacaucugggugcuuuccuauaaugcacgauagaacaaaaauuagacagcugccuaaccuucuccgaggauacgaacauaucagguuaucaacucauaacguuaucaaugcagaaaaugcaccaggaggacccuacaaaauuggaaccucagggucuugcccuaacguuaccaauggaaacggauucuucgcaacaauggcuugggccgucccaaaaaacgacaaaaacaaaacagcaacaaauccauuaacaauagaaguaccauacauuuguacagaaggagaagaccaaauuaccguuuggggguuccacucugacaacgagacccaaauggcaaagcucuauggggacucaaagccccagaaguucaccucaucugccaacggagugaccacacauuacguuucacagauugguggcuucccaaaucaaacagaagacggaggacuaccacaaagugguagaauuguuguugauuacauggugcaaaaaucugggaaaacaggaacaauuaccuaucaaagagguauuuuauugccucaaaagguguggugcgcaaguggcaggagcaagguaauaaaaggauccuugccuuuaauuggagaagcagauugccuccacgaaaaauacgguggauuaaacaaaagcaagccuuacuacacaggggaacaugcaaaggccauaggaaauugcccaauaugggugaaaacacccuugaagcuggccaauggaaccaaauauagaccuccugcaaaacuauuaaaggaaagggguuucuucggagcuauugcugguuucuuagaaggaggaugggaaggaaugauugcagguuggcacggauacacaucccauggggcacauggaguagcgguggcagcagaccuuaagagcacucaagaggccauaaacaagauaacaaaaaaucucaacucuuugagugagcuggaaguaaagaaucuucaaagacuaagcggugccauggaugaacuccacaaugaaauacuagaacuagaugagaaaguggaugaucucagagcugauacaauaagcucacaaauagaacucgcaguccugcuuuccaaugaaggaauaauaaacagugaagaugaacaucucuuggcgcuugaaagaaagcugaagaaaaugcugggccccucugcuguagagauagggaauggaugcuuugaaaccaaacacaagugcaaccagaccugucucgacagaauagcugcugguaccuuugaugcaggagaauuuucucuccccaccuuugauucacugaauauuacugcugcaucuuuaaaugaagauggauuggauaaucauacuauacugcuuuacuacucaacugcugccuccaguuuggcuguaacacugaugauagcuaucuuuguuguuuauauggucuccagagacaauguuucuugcuccaucugucuauaa

SEQ ID NO: 59511 - RNA, 1758 nt, Artificial Sequence; identical to SEQ ID NO: 58738
  derived and/or modified CDS sequence (wt) from hemagglutinin__InfluenzaB__AGX21491

SEQ ID NO: 59512 - RNA, 1758 nt, Artificial Sequence
  derived and/or modified CDS sequence (wt) from hemagglutinin__InfluenzaB__AGX21502
augaaggcaauaauuguacuacucaugguaguaacauccaaugcagaucgaaucugcacugggauaacaucgucaaacucaccacauaucgucaaaacugcuacucaaggggaggucaauguaacugguguaauaccacugacaacaacacccaccaaaucucauuuugcaaaucucaaaggaacagaaaccagggggaaacuaugcccaaaaugccucaacugcacagaucuggacguagccuugggcagaccaaaaugcacggggaaaauacccucggcaagaguuucaauacuccaugaagucagaccuguuacaucugggugcuuuccuauaaugcacgacagaacaaaaauuagacagcugccuaaccuucucagaggauacgaacauaucagguuaucaacucauaacguuaucaaugcagaaaaugcaccaggaggacccuacaaaauuggaaccucagggucuugcccuaacauuaccaauggaaacggauuuuucgcaacaauggcuugggccgucccaaaaaacgacaaaaacaaaacagcaacaaauccauuaacaauagaaguaccauacauuuguacagaaggagaagaccaaauuaccguuuggggguuccacucugacaaugaaacccaaauggcaaagcucuauggggacucaaagccccagaaguucaccucaucugccaacggagugaccacacauuacguuucacagauugguggcuucccaaaucaaacagaagacggaggacuaccacaaagugguagaauuguuguugauuacauggugcaaaaaucugggaaaacaggaacaauuaccuaucaaagggguauuuuauugccucaaaagguguggugcgcaaguggcaggagcaagguaauaaaaggauccuugccuuuaauuggagaagcagauugccuccacgaaaaauacgguggauuaaacaaaagcaagccuuacuacacaggggaacaugcaaaggccauaggaaauugcccaauaugggugaaaacacccuugaagcuggccaauggaaccaaauauagaccuccugcaaaacuauuaaaggaaagggguuucuucggugcuauugcuggcuucuuagaaggaggaugggaaggaaugauugcagguuggcacggauacacaucccauggggcacauggaguagcgguggcagcagaccuuaagagcacucaagaggccauaaacaagauaacaaaaaaucucaacucuuugagugagcuggaaguaaagaaucuucaaagacuaagcggugccauggaugaacuccacaaugaaauacuagaauuagaugagaaaguggaugaucucagagcugauacaauaagcucacaaauagaacucgcaguccugcuuuccaaugaaggaauaauaaacagugaagaugaacaucucuuggcgcuugaaagaaagcugaagaaaaugcugggccccucugcuguagagauagggaauggaugcuuugaaaccaaacacaagugcaaccagaccugucucgacagaauagcugcugguaccuuugaugcaggagaauuuucucuccccacuuuugauucacugaauauuacugcugcaucuuuaaaugacgauggauuggauaaucauacuauacugcuuuacuacucaacugcugccuccaguuuggcuguaacacugaugauagcuaucuuuguuguuuauauggucuccagagacaauguuucuugcuccaucugucuauaa

SEQ ID NO: 59513 - RNA, 1758 nt, Artificial Sequence
  derived and/or modified CDS sequence (wt) from hemagglutinin__InfluenzaB__AGX21513
augaaggcaauaauuguacuacucaugguaguaacauccaaugcagaucgaaucugcacugggauaacaucgucaaacucaccacauguagucaaaacugcuacucaaggggaggucaaugugacugguguaauaccacugacaacaacacccaccaaaucucauuuugcaaaucucaaaggaacagaaaccagagggaaacuaugcccaaaaugccccaacugcacagauuuggacguagccuugggcagaccaaaaugcacggggaaaauacccucugcaagaguuucaauacuccaugaagucagaccuguuacaucugggugcuuuccuauaaugcacgacagaacaaaaauuagacagcugccuaaccuucuccgaggauacgaacauaucagauuaucaacucauaacguuaucaaugcagaaaaugcaccaggaggacccuacaaaauuggaaccucagggucuugcccuaacguuaccaauggaaacggauuuuucgcaacaauggcuugggccgucccaaaaaacgacaaaaacaaaacagcaacaaauccauuaacaauagaaguaccauacauuuguacagaaggagaagaccaaauuaccguuuggggguuccacucugauaacgagacccaaauggcaaagcucuauggggacucaaagccccagaaguucaccucaucugccaacggagugaccacacauuacguuucacagauuggcggcuucccaaaucaaacagaagauggaggacuaccacaaagugguagaauuguuguugauuacauggugcaaaaaucugggaaaacaggaacaauuaccuaucaaagagguauuuuauugccucaaaagguguggugcgcaaguggcaggagcaagguaauaaaaggauccuugccuuuaauuggagaagcagauugccuccacgaaaaauacgguggauuaaacaaaagcaagccuuacuacacaggggaacaugcaaaggccauaggaaauugcccaauaugggugaagacacccuugaagcuggccaauggaaccaaauauagaccuccugcaaaacuauuaaaggaaagggguuucuucggagcuauugcugguuucuuagaaggaggaugggaaggaaugauugcagguuggcacggauacacgucucauggggcacauggaguagcgguggcagcagaccuuaagagcacucaagaggccauaaacaagauaacaaaaaaucucaacucuuugagugagcuggaaguaaagaaucuucaaagacuaaguggugccauggaugaacuccacaacgaaauacuagaacuagacgagaaaguggaugaucucagagcugauacaauaagcucacaaauagaacucgcaguccugcuuucuaaugaaggaauaauaaacagugaagaugaacaucucuuggcacuugaaagaaaacugaagaaaaugcugggcccuucugcuguagaaauagggaauggaugcuuugaaaccaaacacaagugcaaccagaccugucucgacagaauagcugcugguaccuuugaugcaggagaauuuucucuccccaccuuugauucacugaauauuacugcugcaucuuuaaaugacgauggauuggauaaucauaccauacugcuuuacuacucaacugcugccuccaguuuggcuguaacacugaugauagcuaucuuuguuguuuauauggucuccagagacaauguuucuugcuccaucugucuauaa

SEQ ID NO: 59514 - RNA, 1758 nt, Artificial Sequence; identical to SEQ ID NO: 59027
  derived and/or modified CDS sequence (wt) from hemagglutinin__InfluenzaB__AGX21524

SEQ ID NO: 59515 - RNA, 1758 nt, Artificial Sequence
  derived and/or modified CDS sequence (wt) from hemagglutinin__InfluenzaB__AGX21535
augaaggcaauaauuguacuacucaugguaguaacauccaaugcagaucgaaucugcacugggauaacaucgucaaacucaccacauaucgucaaaacugcuacucaaggggaggucaaugugacugguguaauaccacugacaacaacacccaccaaaucucauuuugcaaaucucaaaggaacagaaaccagggggaaacuaugcccaaaaugccucaacugcacagaucuggacguagccuugggcagaccaaaaugcacggggaaaauacccucggcaagaguuucaauacuccaugaagucagaccuguuacaucugggugcuuuccuauaaugcacgacagaacaaaaauuagacagcugccuaaccuucucagaggauacgaacauaucagguuaucaacucauaacguuaucaaugcagaaaaugcaccaggaggacccuacaaaauuggaaccucagggucuugcccuaacauuaccaauggaaacggauuuuucgcaacaauggcuugggccgucccaaaaaacgacaaaaacaaaacagcaacaaauccauuaacaauagaaguaccauacauuuguacagaaggagaagaccaaauuaccguuuggggguuccacucugacagugaaacccaaauggcaaagcucuauggggacucaaagccccagaaguucaccucaucugccaacggagugaccacacauuacguuucacagauugguggcuucccaaaucaaacagaagacggaggacuaccacaaagugguagaauuguuguugauuacauggugcaaaaaucugggaaaacaggaacaauuaccuaucaaagggguauuuuauugccucaaaagguguggugcgcaaguggcaggagcaagguaauaaaaggauccuugccuuuaauuggagaagcagauugccuccacgaaaaauacgguggauuaaacaaaagcaagccuuacuacacaggggaacaugcaaaggccauaggaaauugcccaauaugggugaaaacacccuugaagcuggccaauggaaccaaauauagaccuccugcaaaacuauuaaaggaaagggguuucuucggugcuauugcuggcuucuuagaaggaggaugggaaggaaugauugcagguuggcacggauacacaucccauggggcacauggaguagcgguggcagcagaccuuaagagcacucaagaggccauaaacaagauaacaaaaaaucucaacucuuugagugagcuggaaguaaagaaucuucaaagacuaagcggugccauggaugaacuccacaaugaaauacuagaauuagaugagaaaguggaugaucucagagcugauacaaucagcucacaaauagaacucgcaguccugcuuuccaaugaaggaauaauaaacagugaagaugaacaucucuuggcgcuugaaagaaagcugaagaaaaugcugggccccucugcuguagagauagggaauggaugcuuugaaaccaaacacaagugcaaccagaccugucucgacagaauagcugcugguaccuuugaugcaggagaauuuucucuccccacuuuugauucacugaauauuacugcugcaucuuuaaaugacgauggauuggauaaucauacuauacugcuuuacuacucaacugcugccuccaguuuggcuguaacacugaugauagcuaucuuuguuguuuauauggucuccagagacaauguuucuugcuccaucugucuauaa

SEQ ID NO: 59516 - RNA, 1758 nt, Artificial Sequence
  derived and/or modified CDS sequence (wt) from hemagglutinin__InfluenzaB__AGX21546
augaaggcaauaauuguacuacucaugguaguaacauccaaugcagaucgaaucugcacugggauaacaucgucaaacucaccacaugucgucaaaacugcuacucaaggggaggucaaugugaccgguguaauaccacugacaacaacacccaccaaaucucauuuugcaaaucucaaaggaacagaaaccagggggaaacuaugcccaaaaugccuaaacugcacagaucuggacguagccuugggcagaccaaaaugcacggggaaaauacccucggcaagaguuucaauacuccaugaagucagaccuguuacaucugggugcuuuccuauaaugcacgauagaacaaaaauuagacagcugccuaaccuucuccgaggauacgaacauaucagguuaucaacucauaacguuaucaaugcagaaaaugcaccaggaggacccuacaaaauuggaaccucagggucuugcccuaacguuaccaauggaaacggauucuucgcaacaauggcuugggccgucccaaaaaacgacaaaaacaaaacagcaacaaauccauuaacaauagaaguaccauacauuuguacagaaggagaagaccaaauuaccgucuggggguuccacuccgacaacgagacccaaauggcaaagcucuauggggacucaaagccccagaaguucaccucaucugccaacggagugaccacacauuacguuucacagauugguggcuucccaaaccaaacagaagacggaggacuaccacaaagugguagaauuguuguugauuacauggugcaaaaaucugggaaaacaggaacaauuaccuaucaaagagguauuuuauugccucaaaagguguggugcgcaaguggcaggagcaagguaauaaaaggauccuugccuuuaauuggagaagcagauugccuccacgaaaaauacgguggauuaaacaaaagcaagccuuacuacacaggggaacaugcaaaggcuauaggaaauugcccaauaugggugaaaacacccuugaagcuggccaauggaaccaaauauagaccuccugcaaaacuauuaaaggaaagggguuucuucggagcuauugcugguuucuuagaaggaggaugggaaggaaugauugcagguuggcacggauacacaucccauggggcacauggaguagcgguggcagcagaccuuaagagcacucaagaggccauaaacaagauaacaaaaaaucucaacucuuugagugagcuggaaguaaagaaucuucaaagacuaagcggugccauggaugaacuccacaacgaaauacuagaacuagaugagaaaguggaugaucucagagcugauacaauaagcucacaaauagagcucgcaguccugcuuuccaaugaaggaauaauaaacagugaagaugaacaucucuuggcgcuugaaagaaagcugaagaaaaugcugggccccucugcuguagagauagggaaugggugcuuugaaaccaaacacaagugcaaccagaccugucucgacagaauagcugcugguaccuuugaugcaggagaauuuucucuccccaccuuugauucacugaauauuacugcugcaucuuuaaaugacgauggauuggauaaucauacuauacugcuuuacuacucaacugcugccuccaguuuggcuguaacacugaugauagcuaucuuuguuguuuauauggucuccagagacaauguuucuugcuccaucugucuauaa

SEQ ID NO: 59517 - RNA, 1758 nt, Artificial Sequence
  derived and/or modified CDS sequence (wt) from hemagglutinin__InfluenzaB__AGX21557
augaaggcaauaauuguacuacucaugguaguaacauccaaugcagaucgaaucugcacugggauaacaucgucaaacucaccacaugucgucaaaacugcuacucaaggggaggucaaugugaccgguguaauaacacugacaacaacacccaccaaaucucauuuugcaaaucucaaaggaacagaaaccagggggaaacuaugcccaaaaugccuaaacugcacagaucuggacguagccuugggcagaccaaaaugcacggggaaaauacccucggcaagaguuucaauacuccaugaagucagaccuguuacaucugggugcuuuccuauaaugcaugauagaacaaaaauuagacagcugcccaaccuucuccgaggauacgaacauaucagguuaucaacucauaacguuaucaaugcagaaaaugcaccaggaggacccuacaaaauuggaaccucagggucuugcccuaacguuaccaauggaaacggauucuucgcaacaauggcuugggccgucccaaaaaacgacaaaaacaaaacagcaacaaauccauuaacaauagaaguaccauacauuuguacagaaggagaagaccaaauuaccguuuggggguuccacucugacaacgagacccaaauggcaaagcucuauggggacucaaagccccagaaguucaccucaucugccaacggagugaccacacauuacguuucacagauugguggcuucccaaaucaaacagaagacggaggacuaccacaaagugguagaauuguuguugauuacauggugcaaaaaucugggaaaacaggaacaauuaccuaucaaagagguauuuuauugccucaaaagguguggugcgcaaguggcaggagcaagguaauaaaaggauccuugccuuuaauuggagaagcagauugccuccacgaaaaauacgguggauuaaacaaaagcaagccuuacuacacaggggaacaugcaaaggcuauaggaaauugcccaauaugggugaaaacacccuugaagcuggccaauggaaccaaauauagaccuccugcaaaacuauuaaaggaaagggguuucuucggagcuauugcugguuucuuagaaggaggaugggaaggaaugauugcagguuggcacggauacacaucccauggggcacauggaguagcgguggcagcagaccuuaagagcacucaagaggccauaaacaagauaacaaaaaaucucaacucuuugagugagcuggaaguaaagaaucuucaaagacuaagcggugccauggaugaacuccacaacgaaauacuagaacuagaugagaaaguggaugaucucagagcugauacaauaagcucacaaauagagcucgcaguccugcuuuccaaugaaggaauaauaaacagugaagaugaacaucucuuggcgcuugaaagaaagcugaagaaaaugcugggccccucugcuguagagauagggaaugggugcuuugaaaccaaacacaagugcaaccagaccugucucgacagaauagcugcugguaccuuugaugcaggagaauuuucucuccccaccuuugauucacugaauauuacugcugcaucuuuaaaugacgauggauuggauaaucauacuauacugcuuuacuacucaacugcugccuccaguuuggcuguaacacugaugauagcuaucuuuguuguuuauauggucuccagagacaauguuucuugcuccaucugucuauaa

SEQ ID NO: 59518 - RNA, 1758 nt, Artificial Sequence
  derived and/or modified CDS sequence (wt) from hemagglutinin__InfluenzaB__AGX21568
augaaggcaauaauuguacuacucaugguaguaacauccaaugcagaucgaaucugcacugggauaacaucgucaaacucaccacaugucgucaaaacugcuacucaaggggaggucaaugugaccgguguaauaccacugacaacaacacccaccaaaucucauuuugcaaaucucaaaggaacagaaaccagggggaaacuaugcccaaaaugccucaacugcacagaucuggacguagccuugggcagaccaaaaugcacggggaaaauacccucggcaagaguuucaauacuccaugaagucagaccuguuacaucugggugcuuuccuaugaugcacgauagaacaaaaauuagacagcugccuaaccuucuccgaggauacgaacauaucagguuaucaacucauaacguuaucaaugcagaaaaugcaccaggaggacccuacaaaauuggaaccucagggucuugcccuaacguuaccaauggaaacggauucuucgcaacaauggcuugggccgucccaaaaaacgacaaaaacaaaacagcaacaaauccauuaacaauagaaguaccauacauuuguacagaaggagaagaccaaauuaccguuuggggguuccacucugacaacgagacccaaauggcaaagcucuauggggacucaaagccccagaaguucaccucaucugccaacggagugaccacacauuacguuucacagauugguggcuucccaaaucaaacagaagacggaggacuaccacaaagugguagaauuguuguugauuacauggugcaaaaaucugggaaaacaggaacaauuaccuaucaaagagguauuuuauugccucaaaagguguggugcgcaaguggcaggagcaagguaauaaaaggauccuugccuuuaauuggagaagcagauugccuccacgaaaaauacgguggauuaaacaaaagcaagccuuacuacacaggggaacaugcaaaggccauaggaaauugcccaauaugggugaaaacacccuugaagcuggccaauggaaccaaauauagaccuccugcaaaacuauuaaaggaaagggguuucuucggagcuauugcugguuucuuagaaggaggaugggaaggaaugauugcagguuggcacggauacacaucccauggggcacauggaguagcgguggcagcagaccuuaagagcacucaagaggccauaaacaagauaacaaaaaaucucaacucuuugagugagcuggaaguaaagaaucuucaaagacuaagcggugccauggaugaacuccacaaugaaauacuagaacuagaugagaaaguggaugaucucagagcugauacaauaagcucacaaauagaacucgcaguccugcuuuccaaugaaggaauaauaaacagugaagaugaacaucucuuggcgcuugaaagaaagcugaagaaaaugcugggccccucugcuguagagauagggaauggaugcuuugaaaccaaacacaagugcaaccagaccugucucgacagaauagcugcugguaccuuugaugcaggagaauuuucucuccccaccuuugauucacugaauauuacugcugcaucuuuaaaugacgauggauuggauaaucauacuauacugcuuuacuacucaacugcugccuccaguuuggcuguaacacugaugauagcuaucuuuguuguuuauauggucuccagagacaauguuucuugcuccaucugucuauaa

SEQ ID NO: 59519 - RNA, 1758 nt, Artificial Sequence
  derived and/or modified CDS sequence (wt) from hemagglutinin__InfluenzaB__AGX21579
augaaggcaauaauuguacuacucaugguaguaacauccaaugcagaucgaaucugcacugggauaacaucgucaaacucaccacaugucgucaaaacugcuacucaaggggaggucaaugugacugguguaauaccacugacaacaacacccaccaaaucucauuuugcaaaucucaaaggaacagaaaccagagggaaacuaugcccaaaaugccccaacugcacagaucuggacguagccuugggcagaccaaaaugcacagggaaaauacccucggcaagaguuucaauacuccaugaagucagaccuguuacaucugggugcuuuccuauaaugcacgacagaacaaaaauuagacagcugccuaaccuucucagaggauacgaacauaucagauuaucaacucauaacguuaucaaugcagaaaaugcaccaggaggacccuacaaaauuggaaccucagggucuugcccuaacguuaccaauggaaacggauuuuuugcaacaauggcuugggccgucccaaaaaacgacaaaaacaaaacagcaacaaauccauuaacaauagaaguaccauacauuuguacagaaggagaagaccaaauuaccguuuggggguuccacucugauaacgagacccaaauggcaaagcucuauggggacucaaagccccagaaguucaccucaucugccaacggagugaccacacauuacguuucacagauugguggcuucccaaaucaaacagaagacggaggacuaccacaaagugguagaauuguuguugauuacauggugcaaaaaucugggaaaacaggaacaauuaccuaucaaagagguauuuuauugccucaaaagguguggugcgcaaguggcaggagcaagguaauaaaaggauccuugccuuuaauuggagaagcagauugccuccacgaaaaauacgguggauuaaacaaaaguaagccuuacuacacaggggaacaugcaaaggccauaggaaauugcccaauaugggugaagacacccuugaagcuggccaauggaaccaaauauagaccuccugcaaaacuauuaaaggaaagagguuucuucggagcuauugcugguuucuuagaaggaggaugggaaggaaugauugcagguuggcacggauacacgucccauggggcacauggaguagcgguggcagcagaccuuaagagcacucaagaggccauaaacaagauaacaaaaaaucucaacucuuugagugagcuggaaguaaaaaaucuucaaagacuaagcggugccauggaugaacuccacaacgaaauacuagaacuagacgaaaaaguggaugaucucagagcugauacaauaagcucacaaauagaacucgcaguccugcuuuccaaugaaggaauaauaaacagugaagaugaacaucucuuggcgcuugaaagaaagcugaagaaaaugcugggcccuucugcuguagagauagggaauggaugcuuugaaaccaaacacaagugcaaccagaccugucucgacagaauagcugcugguaccuuugaugcaggagaauuuucucuccccaccuuugauucacugaauauuacugcugcaucuuuaaaugacgauggauuggauaaucauaccauacugcuuuacuacucaacugcugccuccaguuuggcuguaacacugaugauagcuaucuuuguuguuuauauggucuccagagacaauguuucuugcuccaucugucuauaa

SEQ ID NO: 59520 - RNA, 1758 nt, Artificial Sequence; identical to SEQ ID NO: 59495
  derived and/or modified CDS sequence (wt) from hemagglutinin__InfluenzaB__AGX21590

SEQ ID NO: 59521 - RNA, 1758 nt, Artificial Sequence
  derived and/or modified CDS sequence (wt) from hemagglutinin__InfluenzaB__AGX21601
augaaggcaauaauuguacuacucaugguaguaacauccaaugcagaucgaaucugcacugggauaacaucgucaaacucaccacaugucgucaaaacugcuacucaaggggaggucaaugugaccgguguaauaccacugacaacaacacccaccaaaucucauuuugcaaaucucaaaggaacagaaaccagggggaaacuaugcccaaaaugccuaaacugcacagaucuggacguagccuugggcagaccaaaaugcacggggaaaauacccucggcaagaguuucaauacuccaugaagucagaccuguuacaucugggugcuuuccuauaaugcacgauagaacaaaaauuagacagcugccuaaccuucuccgaggauacgaacauaucagguuaucaacucauaacguuaucaauacagaaaaugcaccaggaggacccuacaaaauuggaaccucagggucuugcccuaacguuaccaauggaaacggauucuucgcaacaauggcuugggccgucccaaaaaacgacaaaaacaaaacagcaacaaauccauuaacaauagaaguaccauacauuuguacagaaggagaagaccaaauuaccguuuggggguuccacucugacaacgagacccaaauggcaaagcucuauggggacucaaagccccagaaguucaccucaucugccaacggagugaccacacauuacguuucacagauugguggcuucccaaaucaaacagaagacggaggacuaccacaaagugguagaauuguuguugauuacauggugcaaaaaucugggaaaacaggaacaauuaccuaucaaagagguauuuuauugccucaaaagguguggugcgcaaguggcaggagcaagguaauaaaaggauccuugccuuuaauuggagaagcagauugccuccacgaaaaauacgguggauuaaacaaaagcaagccuuacuacacaggggaacaugcaaaggcuauaggaaauugcccaauaugggugaaaacacccuugaagcuggccaauggaaccaaauauagaccuccugcaaaacuauuaaaggaaagggguuucuucggagcuauugcugguuucuuagaaggaggaugggaaggaaugauugcagguuggcacggauacacaucccauggggcacauggaguagcgguggcagcagaccuuaagagcacucaagaggccauaaacaagauaacaaaaaaucucaacucuuugagugagcuggaaguaaagaaucuucaaagacuaagcggugccauggaugaacuccacaacgaaauacuagaacuagaugagaaaguggaugaucucagagcugauacaauaagcucacaaauagagcucgcaguccugcuuuccaaugaaggaauaauaaacagugaagaugaacaucucuuggcgcuugaaagaaagcugaagaaaaugcugggccccucugcuguagagauagggaaugggugcuuugaaaccaaacacaagugcaaccagaccugucucgacagaauagcugcugguaccuuugaugcaggagaauuuucucuccccaccuuugauucacugaauauuacugcugcaucuuuaaaugacgauggauuggauaaucauacuauacugcuuuacuacucaacugcugccuccaguuuggcuguaacacugaugauagcuaucuuuguuguuuauauggucuccagagacaauguuucuugcuccaucugucuauaa

SEQ ID NO: 59522 - RNA, 1758 nt, Artificial Sequence
  derived and/or modified CDS sequence (wt) from hemagglutinin__InfluenzaB__AGX21611
augaaggcaauaauuguacuacucaugguaguaacauccaaugcagaucgaaucugcacugggauaacaucgucaaacucaccacaugucgucaaaacugcuacucaaggggaggucaaugugaccgguguaauaccacugacaacaacacccaccaaaucucauuuugcaaaucucaaaggaacagaaaccagagggaaacuaugcccaaaaugccucaacugcacagaucuggacguagccuuaggcagaccaaaaugcacggggaaaauacccucggcaagaguuucaauacuccaugaagucagaccuguuacaucugggugcuuuccuauaaugcacgauagaacaaaaauuagacagcugccuaaccuucuccgaggauacgaacauaucagguuaucaacucauaacguuaucaaugcagaaaaugcaccaggaggacccuacaaaauuggaaccucagggucuugcccuaacguuaccaauggaaacggauucuucgcaacaauggcuugggccgucccaaaaaacgacaaaaacaaaacagcaacaaauccauuaacaauagaaguaccauacauuuguacagaaggagaagaccaaauuaccguuuggggguuccacucugacaacgagacccaaauggcaaagcucuauggggacucaaagccccagaaguucaccucaucugccaacggagugaccacacauuacguuucacagauugguggcuucccaaaucaaacagaagacggaggacuaccacaaagugguagaauuguuguugauuacauggugcaaaaaucugggaaaacaggaacaauuaccuaucagagagguauuuuauugccucaaaagguguggugcgcaaguggcaggagcaagguaauaaaaggauccuugccuuuaauuggagaagcagauugccuccacgaaaaauacgguggauuaaacaaaagcaagccuuacuacacaggggaacaugcaaaagccauaggaaauugcccaauaugggugaaaacacccuugaagcuggccaauggaaccaaauauagaccuccugcaaaacuauuaaaggaaagggguuucuucggagcuauugcugguuucuuagaaggaggaugggaaggaaugauugcagguuggcacggauacacaucccauggggcacauggaguagcgguggcagcagaccuuaagagcacucaagaggccauaaacaagauaacaaaaaaucucaacucuuugagugagcuggaaguaaagaaucuucaaagacuaagcggugccauggaugaacuccacaacgaaauacuagaacuagaugagaaaguggaugaucucagagcugauacgauaagcucacaaauagaacucgcaguccugcuuuccaaugaaggaauaauaaacagugaagaugaacaucucuuggcgcuugaaagaaagcugaagaaaaugcugggccccucugcuguagagauagggaauggaugcuuugaaaccaaacacaagugcaaccagaccugucucgacagaauagcugcugguaccuuugaugcaggagaauuuucucucccuaccuuugauucacugaauauuacugcugcaucuuuaaaugacgauggauuggauaaucauacuauacugcuuuacuacucaacugcugccuccaguuuggcuguaacacugaugauagcuaucuuuguuguuuauauggucuccagagacaauguuucuugcuccaucugucuauaa

SEQ ID NO: 59523 - RNA, 1758 nt, Artificial Sequence
  derived and/or modified CDS sequence (wt) from hemagglutinin__InfluenzaB__AGX21622
augaaggcaauaauuguacuacucaugguaguaacauccaaugcagaucgaaucugcacugggauaacaucgucaaacucaccacaugucgucaaaacugcuacucaaggggaggucaaugugacugguguaauaccacugacaacaacacccaccaaaucucauuuugcaaaucucaaaggaacagaaaccagggggaaacuaugcccaaaaugccucaacugcacagaucuggacguagccuugggcagaccaaaaugcacggggaaaauacccucggcaagaguuucaauacuccaugaagucagaccuguuacaucugggugcuuuccuauaaugcacgacagaacaaaaauuagacagcugccuaaccuucucagaggauacgaacauaucagguuaucaacucauaacguuaucaaugcagaaaaugcaccaggaggacccuacaaaauuggaaccucagggucuugcccuaacauuaccaauggaaacggauuuuucgcaacaauggcuugggccgucccaaaaaacgacaaaaacaaaacagcaacaaauccauuaacaauagaaguaccauacauuuguacagaaggagaagaccaaauuaccguuuggggguuccacucugacaaugaaacccaaauggcaaagcucuauggggacucaaagccccagaaguucaccucaucugccaacggagugaccacacauuacguuucacagauugguggcuucccaaaucaaacagaagacggaggacuaccacaaagugguagaauuguuguugauuacauggugcaaaaaucugggaaaacaggaacaauuaccuaucaaagggguauuuuauugccucaaaagguguggugcgcaaguggcaggagcaagguaauaaaaggauccuugccuuuaauuggagaagcagauugccuccacgaaaaauacgguggauuaaacaaaagcaagccuuacuacacaggggaacaugcaaaggccauaggaaauugcccaauaugggugaaaacacccuugaagcuggccaauggaaccaaauauagaccuccugcaaaacuauuaaaggaaagggguuucuucggugcuauugcuggcuucuuagaaggaggaugggaaggaaugauugcagguuggcacggauacacaucccauggggcacauggaguagcgguggcagcagaccuuaagagcacucaagaggccauaaacaagauaacaaaaaaucucaacucuuugagugagcuggaaguaaagaaucuucaaagacuaagcggugccauggaugaacuccacaaugaaauacuagaauuagaugagaaaguggaugaucucagagcugauacaauaagcucacaaauagaacucgcaguccugcuuuccaaugaaggaauaauaaacagugaagaugaacaucucuuggcgcuugaaagaaagcugaagaaaaugcugggccccucugcuguagagauagggaauggaugcuuugaaaccaaacacaagugcaaccagaccugucucgacagaauagcugcugguaccuuugaugcaggagaauuuucucuccccacuuuugauucacugaauauuacugcugcaucuuuaaaugacgauggauuggauaaucauacuauacugcuuuacuacucaacugcugccuccaguuuggcuguaacacugaugauagcuaucuuuguuguuuauauggucuccagagacaauguuucuugcuccaucugucuauaa

SEQ ID NO: 59524 - RNA, 1758 nt, Artificial Sequence
  derived and/or modified CDS sequence (wt) from hemagglutinin__InfluenzaB__AGX21633
augaaggcaauaauuguacuacucaugguaguaacauccaaugcagaucgaaucugcacugggauaacaucgucaaacucaccacauaucgucaaaacugcuacucaaggggaggucaaugugacugguguaauaccacugacaacaacacccaccaaaucucauuuugcaaaucucaaaggaacagaaaccagggggaaacuaugcccaaaaugccucaacugcacagaucuggacguagccuugggcagaccaaaaugcacggggaaaauacccucggcaagaguuucaauacuccaugaagucagaccuguuacaucugggugcuuuccuauaaugcacgacagaacaaaaauuagacagcugccuaaccuucucagaggauacgaacauaucagguuaucaacucauaacguuaucaaugcagaaaaugcaccaggaggacccuacaaaauuggaaccucagggucuugcccuaacauuaccaauggaaacggauuuuucgcaacaauggcuugggccgucccaaaaaacgacaaaaacaaaacagcaacaaauccauuaacaauagaaguaccauacauuuguacagaaggagaagaccaaauuaccguuuggggguuccacucugacaaugaaacccaaauggcaaagcucuauggggacucaaagccccagaaguucaccucaucugccaacggagugaccacacauuacguuucacagauugguggcuucccaaaucaaacagaagacggaggacuaccacaaagugguagaauuguuguugauuacauggugcaaaaaucugggaaaacaggaacaauuaccuaucaaagggguauuuuauugccucaaaagguguggugcgcaaguggcaggagcaagguaauaaaaggauccuugccuuuaauuggagaagcagauugccuccacgaaaaauacgguggauuaaacaaaagcaagccuuacuacacaggggaacaugcaaaggccauaggaaauugcccaauaugggugaaaacacccuugaagcuggccaauggaaccaaauauagaccuccugcaagacuauuaaaggaaagggguuucuucggugcuauugcuggcuucuuagaaggaggaugggaaggaaugauugcagguuggcacggauacacaucccauggggcacauggaguagcgguggcagcagaccuuaagagcacucaagaggccauaaacaagauaacaaaaaaucucaacucuuugagugagcuggaaguaaagaaucuucaaagacuaagcggugccauggaugaacuccacaaugaaauacuagaauuagaugagaaaguggaugaucucagagcugauacaauaagcucacaaauagaacucgcaguccugcuuuccaaugaaggaauaauaaacagugaagaugaacaucucuuggcgcuugaaagaaagcugaagaaaaugcugggccccucugcuguagagauagggaauggaugcuuugaaaccaaacacaagugcaaccagaccugucucgacagaauagcugcugguaccuuugaugcaggagaauuuucucuccccacuuuugauucacugaauauuacugcugcaucuuuaaaugacgauggauuggauaaucauacuauacugcuuuacuacucaacugcugccuccaguuuggcuguaacacugaugauagcuaucuuuguuguuuauauggucuccagagacaauguuucuugcuccaucugucuauaa

SEQ ID NO: 59525 - RNA, 1758 nt, Artificial Sequence
  derived and/or modified CDS sequence (wt) from hemagglutinin__InfluenzaB__AGX21644
augaaggcaauaauuguacuacucaugguaguaacauccaaugcagaucgaaucugcacugggauaacaucgucaaacucaccacauaucgucaaaacugcuacucaaggggaggucaaugugacugguguaauaccacugacaacaacacccaccaaaucucauuuugcaaaucucaaaggaacagaaaccagggggaaacuaugcccaaaaugccucaacugcacagaucuggacguagccuugggcagaccaaaaugcacggggaaaauacccucggcaagaguuucaauacuccaugaagucagaccuguuacaucugggugcuuuccuauaaugcacgacagaacaaaaauuagacagcugccuaaccuucucagaggauacgaacauaucagguuaucaacucauaacguuaucaaugcagaaaaugcaccaggaggacccuacaaaauugggaccucagggucuugcccuaacauuaccaauggaaacggauuuuucgcaacaauggcuugggccgucccaaaaaacgacaaaaacaaaacagcaacaaauccauuaacaauagaaguaccauacauuuguacagaaggagaagaccaaauuaccguuuggggguuccacucugacaaugaaacccaaauggcaaagcucuauggggacucaaagccccagaaguucaccucaucugccaacggagugaccacacauuacguuucacagauugguggcuucccaaaucaaacagaagacggaggacuaccacaaagugguagaauuguuguugauuacauggugcaaaaaucugggaaaacaggaacaauuaccuaucaaagggguauuuuauugccucaaaagguguggugcgcaaguggcaggagcaagguaauaaaaggauccuugccuuuaauuggagaagcagauugccuccacgaaaaauacgguggauuaaacaaaagcaagccuuacuacacaggggaacaugcaaaggccauaggaaauugcccaauaugggugaaaacacccuugaagcuggccaauggaaccaaauauagaccuccugcaaaacuauuaaaggaaagggguuucuucggugcuauugcuggcuucuuagaaggaggaugggaaggaaugauugcagguuggcacggauacacaucccauggggcacauggaguagcgguggcagcagaccuuaagagcacucaagaggccauaaacaagauaacaaaaaaucucaacucuuugagugagcuggaaguaaagaaucuucaaagacuaagcggugccauggaugaacuccacaaugaaauacuagaauuagaugagaaaguggaugaucucagagcugauacaauaagcucacaaauagaacucgcaguccugcuuuccaaugaaggaauaauaaacagugaagaugaacaucucuuggcgcuugaaagaaagcugaagaaaaugcugggccccucugcuguagagauagggaauggaugcuuugaaaccaaacacaagugcaaccagaccugucucgacagaauagcugcugguaccuuugaugcaggagaauuuucucuccccacuuuugauucacugaauauuacugcugcaucuuuaaaugacgauggauuggauaaucauacuauacugcuuuacuacucaacugcugccuccaguuuggcuguaacacugaugauagcuaucuuuguuguuuauauggucuccagagacaauguuucuugcuccaucugucuauaa

SEQ ID NO: 59526 - RNA, 1758 nt, Artificial Sequence
  derived and/or modified CDS sequence (wt) from hemagglutinin__InfluenzaB__AGX21655
augaaggcaauaauuguacuacucaugguaguaacauccaaugcagaucgaaucugcacugggauaacaucgucaaacucaccacauguagucaaaacugcuacucaaggggaggucaaugugacugguguaauaccacugacaacaacacccaccaaaucucauuuugcaaaucucaaaggaacagaaaccagagggaaacuaugcccaaaaugccccaacugcacagauuuggacguagccuugggcagaccaaaaugcacggggaaaauacccucugcaagaguuucaauacuccaugaagucagaccuguuacaucugggugcuuuccuauaaugcacgacagaacaaaaauuagacagcugccuaaccuucuccgaggauacgaacauaucagauuaucaacucauaacguuaucaaugcagaaaaugcaccaggaggacccuacaaaauuggaaccucagggucuugcccuaacguuaccaauggaaacggauuuuucgcaacaauggcuugggccgucccaaaaaacgacaaaaacaaaacagcaacaaauccauuaacaauagaaguaccauacauuuguacagaaggagaagaccaaauuaccguuuggggguuccacucugauaacgagacccaaauggcaaagcucuauggggacucaaagccccagaaguucaccucaucugccaacggagugaccacacacuacguuucacagauuggcggcuucccaaaucaaacagaagauggaggacuaccacaaagugguagaauuguuguugauuacauggugcaaaaaucugggaaaacaggaacaauuaccuaucaaagagguauuuuauugccucaaaagguguggugcgcaaguggcaggagcaagguaauaaaaggauccuugccuuuaauuggagaagcagauugccuccacgaaaaauacgguggauuaaacaaaagcaagccuuacuacacaggggaacaugcaaaggccauaggaaauugcccaauaugggugaagacacccuugaagcuggccaauggaaccaaauauagaccuccugcaaaacuauuaaaggaaagggguuucuucggagcuauugcugguuucuuagaaggaggaugggaaggaaugauugcagguuggcacggauacacgucccauggggcacauggaguagcgguggcagcagaccuuaagagcacucaagaggccauaaacaagauaacaaaaaaucucaacucuuugagugagcuggaaguaaagaaucuucaaagacuaaguggugccauggaugaacuccacaacgaaauacuagaacuagacgagaaaguggaugaucucagagcugauacaauaagcucacaaauagaacucgcaguccugcuuucuaaugaaggaauaauaaacagugaagaugaacaucucuuggcacuugaaagaaagcugaagaaaaugcugggcccuucugcuguagagauaggaaauggaugcuuugaaaccaaacacaagugcaaccagaccugucucgacagaauagcugcugguaccuuugaugcaggagaauuuucucuccccaccuuugauucacugaauauuacugcugcaucuuuaaaugacgauggauuggauaaucauaccauacugcuuuacuacucaacugcugccuccaguuuggcuguaacacugaugauagcuauuuuuguuguuuauauggucuccagagacaauguuucuugcuccaucugucuauaa

SEQ ID NO: 59527 - RNA, 1758 nt, Artificial Sequence
  derived and/or modified CDS sequence (wt) from hemagglutinin__InfluenzaB__AGX21666
augaaggcaauaauuguacuacucaugguaguaacauccaaugcagaucgaaucugcacugggauaacaucgucaaacucaccacauguagucaaaacugcuacucaaggggaggucaaugugacugguguaauaccacugacaacaacacccaccaaaucucauuuugcaaaucucaaaggaacagaaaccagagggaaacuaugcccaaaaugccccaacugcacagauuuggacguagccuugggcagaccaaaaugcacggggaaaauacccucugcaagaguuucaauacuccaugaagucagaccuguuacaucugggugcuuuccuauaaugcacgacagaacaaaaauuagacagcugccuaaccuucuccgaggauacgaacauaucagauuaucaacucauaacguuaucaaugcagaaaaugcaccaggaggacccuacaaaauuggaaccucagggucuugcccuaacguuaccaauggaaacggauuuuucgcaacaauggcuugggccgucccaaaaaacgacaaaaacaaaacagcaacaaauccauuaacaauagaaguaccauacauuuguacagaaggagaagaccaaauuaccguuuggggguuccacucugauaacgagacccaaauggcaaagcucuauggggacucaaagccccagaaguucaccucaucugccaacggagugaccacacauuacguuucacagauuggcggcuucccaaaucaaacagaagauggaggacuaccacaaagugguagaauuguuguugauuacauggugcaaaaaucugggaaaacaggaacaauuaccuaucaaagagguauuuuauugccucaaaagguguggugcgcaaguggcaggagcaagguaauaaaaggauccuugccuuuaauuggagaagcagauugccuccacgaaaaauacgguggauuaaacaaaagcaagccuuacuacacaggggaacaugcaaaggccauaggaaauugcccaauaugggugaagacacccuugaagcuggccaauggaaccaaauauagaccuccugcaaaacuauuaaaggaaagggguuucuucggagcuauugcugguuucuuagaaggaggaugggaaggaaugauugcagguuggcacggauacacgucucauggggcacauggaguagcgguggcagcagaccuuaagagcacucaagaggccauaaacaagauaacaaaaaaucucaacucuuugagugaguuggaaguaaagaaucuucaaagacuaaguggugccauggaugaacuccacaacgaaauacuagaacuagacgagaaaguggaugaucucagagcugauacaauaagcucacaaauagaacucgcaguccugcuuucuaaugaaggaauaauaaacagugaagaugaacaucucuuggcacuugaaagaaaacugaagaaaaugcugggcccuucugcuguagaaauagggaauggaugcuuugaaaccaaacacaagugcaaccagaccugucucgacaaaauagcugcugguaccuuugaugcaggagaauuuucucuccccaccuuugauucacugaauauuacugcugcaucuuuaaaugacgauggauuggauaaucauaccauacugcuuuacuacucaacugcugccuccaguuuggcuguaacacugaugauagcuaucuuuguuguuuauauggucuccagagacaauguuucuugcuccaucugucuauaa

SEQ ID NO: 59528 - RNA, 1758 nt, Artificial Sequence
  derived and/or modified CDS sequence (wt) from hemagglutinin__InfluenzaB__AGX21677
augaaggcaauaauuguacuacucaugguaguaacauccaaugcagaucgaaucugcacugggauaacaucgucaaacucaccacauaucgucaaaacugcuacucaaggggaggucaaugugacugguguaauaccacugacaacaacacccaccaaaucucauuuugcaaaucucaaaggaacagaaaccagggggaaacuaugcccaaaaugccucaacugcacagaucuggacguagccuugggcagaccaaaaugcacggggaaaauacccucggcaagaguuucaauacuccaugaagucagaccuguuacaucugggugcuuuccuauaaugcacgacagaacaaaaauuagacagcugccuaaccuucucagaggauacgaacauaucagguuaucaacucauaacguuaucaaugcagaaaaugcaccaggaggacccuacaaaauuggaaccucagggucuugcccuaacauuaccaauggaaacggauuuuucgcaacaauggcuugggccgucccaaaaaacgacaaaaacaaaacagcaacaaauccauuaacaauagaaguaccauacauuuguacagaaggagaagaccaaauuaccguuuggggguuccacucugacaaugaaacccaaauggcaaagcucuauggggacucaaagccccagaaguucaccucaucugccaacggagugaccacacauuacguuucacagauugguggcuucccaaaucaaacagaagacggaggacuaccacaaagugguagaauuguuguugauuacauggugcaaaaaucugggaaaacaggaacaauuaccuaucaaagggguauuuuauugccucaaaagguguggugcgcaaguggcaggagcaagguaauaaaaggauccuugccuuuaauuggagaagcagauugccuccacgaaaaauacgguggauuaaacaaaagcaagccuuacuacacaggggaacaugcaaaggccauaggaaauugcccaauaugggugaaaacacccuuaaagcuggccaauggaaccaaauauagaccuccugcaaaacuauuaaaggaaagggguuucuucggugcuauugcuggcuucuuagaaggaggaugggaaggaaugauugcagguuggcacggauacacaucccauggggcacauggaguagcgguggcagcagaccuuaagagcacucaagaggccauaaacaagauaacaaaaaaucucaacucuuugagugagcuggaaguaaagaaucuucaaagacuaagcggugccauggaugaacuccacaaugaaauacuagaauuagaugagaaaguggaugaucucagagcugauacaauaagcucacaaauagaacucgcaguccugcuuuccaaugaaggaauaauaaacagugaagaugaacaucucuuggcgcuugaaagaaagcugaagaaaaugcugggccccucugcuguagagauagggaauggaugcuuugaaaccaaacacaagugcaaccagaccugucucgacagaauagcugcugguaccuuugaugcaggagaauuuucucuccccacuuuugauucacugaauauuacugcugcaucuuuaaaugacgauggauuggauaaucauacuauacugcuuuacuacucaacugcugccuccaguuuggcuguaacacugaugauagcuaucuuuguuguuuauauggucuccagagacaauguuucuugcuccaucugucuauaa

SEQ ID NO: 59529 - RNA, 1758 nt, Artificial Sequence
  derived and/or modified CDS sequence (wt) from hemagglutinin__InfluenzaB__AGX21688
augaaggcaauaauuguacuacucaugguaguaacauccaaugcagaucgaaucugcacugggauaacaucgucaaacucaccacauguagucaaaacugcuacucaaggggaggucaaugugacugguguaauaccacugacaacaacacccaccaaaucucauuuugcaaaucucaaaggaacagaaaccagagggaaacuaugcccaaaaugccccaacugcacagauuuggacguagccuugggcagaccaaaaugcacggggaaaauacccucugcaagaguuucaauacuccaugaagucagaccuguuacaucugggugcuuuccuauaaugcacgacagaacaaaaauuagacagcugccuaaccuucuccgaggauacgaacauaucagauuaucaacucauaacguuaucaaugcagaaaaugcaccaggaggacccuacaaaauuggaaccucagggucuugcccuaacguuaccaauggaaacggauuuuucgcaacaauggcuugggccgucccaaaaaacgacaaaaacaaaacagcaacaaauccauuaacaauagaaguaccauacauuuguacagaaggagaagaccaaauuaccguuuggggguuccacucugauaacgagacccaaauggcaaagcucuauggggacucaaagccccagaaguucaccucaucugccaacggagugaccacacauuacguuucacagauuggcggcuucccaaaucaaacagaagauggaggacuaccacaaagugguagaauuguuguugauuacauggugcaaaaaucugggaaaacaggaacaauuaccuaucaaagagguauuuuauugccucaaaagguguggugcgcaaguggcaggagcaagguaauaaaaggauccuugccuuuaauuggagaagcagauugccuccacgaaaaauacgguggauuaaacaaaagcaagccuuacuacacaggggaacaugcaaaggccauaggaaauugcccaauaugggugaagacacccuugaagcuggccaauggaaccaaauauagaccuccugcaaaacuauuaaaggaaagggguuucuucggagcuauugcugguuucuuagaaggaggaugggaaggaaugauugcagguuggcacggauacacgucccauggggcacauggaguagcgguggcagcagaccuuaagagcacucaagaggccauaaacaagauaacaaaaaaucucaacucuuugagugagcuggaaguaaagaaucuucaaagacuaaguggugccauggaugaacuccacaacgaaauacuagaacuagacgagaaaguggaugaucucagagcugauacaauaagcucacaaauagaacucgcaguccugcuuucuaaugaaggaauaauaaacagugaagaugaacaucucuuggcacuugaaagaaagcugaagaaaaugcugggcccuucugcuguagagauagggaauggaugcuuugaaaccaaacacaagugcaaccagaccugucucgacagaauagcugcugguaccuuugaugcaggagaauuuucucuccccaccuuugauucacugaauauuacugcugcauccuuaaaugacgauggauuggauaaccauaccauacugcuuuacuacucaacugcugccuccaguuuggcuguaacacugaugauagcuaucuuuguuguuuauauggucuccagagacaauguuucuugcuccaucugucuauaa

SEQ ID NO: 59530 - RNA, 1758 nt, Artificial Sequence
  derived and/or modified CDS sequence (wt) from hemagglutinin__InfluenzaB__AGX21699
augaaggcaauaauuguacuacucaugguaguaacauccaaugcagaucgaaucugcacugggauaacaucgucaaacucaccacaugucgucaaaacugcuacucaaggggaggucaaugugaccgguguaauaccacugacaacaacacccaccaaaucucauuuugcaaaucucaaaggaacagaaaccagggggaaacuaugcccaaaaugccuaaacugcacagaucuggacguagccuugggcagaccaaaaugcacggggaaaauacccucggcaagaguuucaauacuccaugaagucagaccuguuacaucugggugcuuuccuauaaugcacgauagaacaaaaauuagacagcugccuaaccuucuccgaggauacgaacauaucagauuaucaacucauaacguuaucaaugcagaaaaugcaccaggaggacccuacaaaauuggaaccucagggucuugcccuaacguuaccaauggaaacggauucuucgcaacaauggcuugggccgucccaaaaaacgacaaaaacaaaacagcaacaaauccauuaacaauagaaguaccauacauuuguacagaaggagaagaccaaauuaccgucuggggguuccacuccgacaacgagacccaaauggcaaagcucuauggggacucaaagccccagaaguucaccucaucugccaacggagugaccacacauuacguuucacagauugguggcuucccaaaucaaacagaagacggaggacuaccacaaagugguagaauuguuguugauuacauggugcaaaaaucugggaaaacaggaacaauuaccuaucaaagagguauuuuauugccucaaaagguguggugcgcaaguggcaggagcaagguaauaaaaggauccuugccuuuaauuggagaagcagauugccuccacgaaaaauacgguggauuaaacaaaagcaagccuuacuacacaggggaacaugcaaaggcuauaggaaauugcccaauaugggugaaaacacccuugaaucuggccaauggaaccaaauauagaccuccugcaaaacuauuaaaggaaagggguuucuucggagcuauugcugguuucuuagaaggaggaugggaaggaaugauugcagguuggcacggauacacaucccauggggcacauggaguagcgguggcagcagaccuuaagagcacucaagaggccauaaacaagauaacaaaaaaucucaacucuuugagugagcuggaaguaaagaaucuucaaagacuaagcggugccauggaugaacuccacaacgaaauacuagaacuagaugagaaaguggaugaucucagagcugauacaauaagcucacaaauagagcucgcaguccugcuuuccaaugaaggaauaauaaacagugaagaugaacaucucuuggcgcuugaaagaaagcugaagaaaaugcugggccccucugcuguagagauagggaaugggugcuuugaaaccaaacacaagugcaaccagaccugucucgacagaauagcugcugguaccuuugaugcaggagaauuuucucuccccaccuuugauucacugaauauuacugcugcaucuuuaagugacgauggauuggauaaucauacuauacugcuuuacuacucaacugcugccuccaguuuggcuguaacacugaugauagcuaucuuuguuguuuauauggucuccagagacaauguuucuugcuccaucugucuauaa

SEQ ID NO: 59531 - RNA, 1758 nt, Artificial Sequence
  derived and/or modified CDS sequence (wt) from hemagglutinin__InfluenzaB__AGX21710
augaaggcaauaauuguacuacucaugguaguaacauccaaugcagaucggaucugcacugggauaacaucgucaaacucaccacaugucgucaaaacugcuacucaaggggaggucaaugugaccgguguaauaccacugacaacaacacccaccaaaucucauuuugcaaaucucaaaggaacagaaaccagggggaaacuaugcccaaaaugccucaacugcacagaucuggacguagccuugggcagaccaaaaugcacugggaaaauacccucggcaagaguuucaauacuccaugaagucagaccuguuacaucugggugcuuuccuauaaugcacgauagaacaaaaauuagacagcugccuaaccuucuccgaggauacgaacauaucagguuaucaacucauaacguuaucaauacagaaaaugcaccaggaggacccuacaaaauuggaaccucagggucuugcccuaacguuaccaauggaaacggauucuucgcaacaauggcuugggcugucccaaaaaacgacaaaaacaaaacagcaacaaauccacuaacaauagaaguaccauacauuuguacagaaggagaagaccaaauuaccguuuggggguuccacucugacaacgagacccaaauggcaaagcucuauggggacucaaagccccagaaguucaccucaucugccaacggagugaccacacauuacguuucacagauugguggcuucccaaaucaaacagaagacggaggacuaccacaaagugguagaauuguuguugauuacauggugcaaaaaucugggaaaacgggaacaauuaccuaucaaagagguauuuuauugccucaaaagguguggugcgcaaguggcaggagcaagguaauaaaaggauccuugccuuuaauuggagaagcagauugccuccacgaaaaauacgguggauuaaacaaaagcaagccuuacuacacaggggaacaugcaaaggccauaggaaauugcccaauaugggugaaaacacccuugaagcuggccaauggaaccaaauauagaccuccugcaaaacuauuaaaggaaagggguuucuucggagcuauugcugguuucuuagaaggaggaugggaaggaaugauugcagguuggcacggauacacaucccauggggcacauggaguagcgguggcagcagaccuuaagagcacucaagaggccauaaacaagauaacaaaaaaucucaacucuuugagugagcuggagguaaagaaucuccaaagacuaagcggugccauggaugaacuccacaacgaaauacuagaacuagaugagaaaguggaugaucucagagcugauacaauaagcucacaaauagagcucgcaguccugcuuuccaaugaaggaauaauaaacagugaagaugaacaucucuuggcgcuugaaagaaagcugaagaaaaugcugggccccucugcuguagagauagggaauggaugcuuugaaaccaaacacaagugcaaccagaccugucucgacagaauagcugcugguaccuuugaugcaggagaauuuucccuccccaccuuugauucacugaauauuacugcugcaucuuuaaaugacgauggauuggauaaucauacuauacugcuuuacuacucaacugcugccuccaguuuggcuguaacacugaugauagcuaucuuuguuguuuauauggucuccagagacaauguuucuugcuccaucugucuauag

SEQ ID NO: 59532 - RNA, 1758 nt, Artificial Sequence; identical to SEQ ID NO: 58738
  derived and/or modified CDS sequence (wt) from hemagglutinin__InfluenzaB__AGX21721

SEQ ID NO: 59533 - RNA, 1755 nt, Artificial Sequence
  derived and/or modified CDS sequence (wt) from hemagglutinin__InfluenzaB__AGX21732
augaaggcaauaauuguacuacucaugguaguaacauccaaugcagaucgaaucugcacugggauaacaucgucaaacucaccucauguggucaaaacagcuacucaaggggaggucaaugugacuggugcgauaccauugacaacaacaccaacaaaaucucauuuugcaaaucucaaaggaacaaagaccagagggaaacuaugcccaaccugucucaacugcacagauuuggauguggccuugggcggaccaauguguguggggaucacaccuucggcaaaagcuucaauacuccacgaagucagaccugucacaucuggaugcuuuccuauaaugcaugacagaacaaaaaucagacagcuacccaaucuucucagaggauaugaaaaaaucagauuaucagcccaaaacguuaucaacgcagaaaaggcaccaggaggacccuacaaacuuggaacuucaggaucuugcccuaacgcuaccaguaaaagcggauuuuucgcaacaauggcuugggcugucccaagggacgauaacaaaacagcaacgaauccacuaacaguagaaguaccacacaucugugcaaacgaagaagaccaaauuacuguuuggggguuccauucugauaacaaaacccaaaugaaaaaccucuauggagacucaaauccucagaaguucaccucaucugcuaauggaauaaccacacauuauguuucucagauuggcggcuucccggaucaaacagaagacggagggcuaccacaaaguggcagaauuguuguugauuacauggugcaaaaaccugggaaaacaggaacaauugucuaucaaagagggauuuuguugccucaaaagguguggugcgcgaguggcaggagcaaaguaauaaaaggguccuugccuuuaauuggugaagcagauugccuucacgaaaaauacgguggauuaaacaaaagcaagccuuacuacacaggagaacaugcaaaagccauaggaaauugcccaauaugggugaaaacaccuuugaagcuugccaauggaaccaaauauagaccuccugcaaaacuauuaaaggaaagggguuucuucggagcuauugcugguuucuuagaaggaggaugggagggaaugauugcagguuggcacggauacacaucucacggagcacauggaguggcaguggcagcagaucuuaagaguacgcaagaagccauaaacaagauaacaaaaaaucucaauucucugagugagcuagaaguaaagaaucuucaaagacuaaguggugccauggaugaacuccauaacgaaauacucgagcuggaugagaaaguggaugaucucagagcagauacaauaagcucacaaauagaacuugcagucuugcuuuccaacgaaggaauaauaaacagugaagaugagcaucuauuggcacuugagagaaaacuaaagaaaaugcugggucccucugcuguagacauagggaauggaugcuucgaaaccaaacacaagugcaaccagaccugccuagacaggauagcugcuggcaccuuuaaugcaggagaauuuucucuucccacuuuugauucacugaacauuacugcugcaucuuuaaacgaugauggauuggauaaccauacuauacugcucuacuacucaacugcugcuucuaguuuggcuguaacauugaugauagcuauuuuuauuguuuauaugaucuccagagacaauguuucuugcuccaucugucuauag

SEQ ID NO: 59534 - RNA, 1755 nt, Artificial Sequence
  derived and/or modified CDS sequence (wt) from hemagglutinin__InfluenzaB__AGX21743
augaaggcaauaauuguacuacucaugguaguaacauccaacgcagaucgaaucugcacugggauaacaucuucaaacucaccucauguggucaaaacagcuacucaaggggaggucaaugugacuggugugauaccacugacaacaaccccaacaaaaucucauuuugcaaaucucaaaggaacaaggaccagagggaaacuaugcccagacugucucaacugcacagaucuggauguggccuugggcagaccaauguguguggggaccacacccucggcaaaagcuucaauacuccacgaagucagaccuguuacauccgggugcuuuccuauaaugcacgacagaacaaaaaucagacaacuacccaaucuucucagaggauaugaaaauaucagguuaucaacccaaaacguuaucgaugcagaaaaggcacuaggaggacccuacagacuuggaaccucaggaucuugcccuaacgcuaccaguaaaagcggauuuuucgcaacaauggcuugggcugucccaaaggacaacaacaaaaaugcaacgaacccacuaacaguagaaguaccauacauuuguacagaaggggaagaccaaauuacuguuuggggguuccauucagauaacaaaacccaaaugaaaaaccucuauggagacucaaauccucaaaaguucaccucaucugcuaauggaguaaccacacauuauguuucucagauuggcggcuucccagaccaaacagaagacggaggacugccacaaagcggcagaauuguuguugauuacauggugcaaaaaccugggaaaacaggaacaauugucuaucaaagagguguuuuguugccucaaaagguguggugcgcgaguggcaagagcaaaguaauaaaaggguccuugccuuuaauuggugaagcagauugccuucaugaaaaauacgguggguuaaacaaaagcaagccuuacuacacaggagaacaugcaaaagccauaggaaauugcccaauaugggugaaaacaccuuugaagcuugccaauggaaccaaauauagaccuccugcaaaacuauuaaaggaaagggguuucuucggagcuauugcugguuuccuagaaggaggaugggaaggaaugauugcagguuggcacggauacacaucucacggagcacauggaguggcaguggcggcagaccuuaagaguacgcaagaagcuauaaacaagauaacaaaaaaucucaauucuuugagugagcuagaaguaaagaaucuucaaagacuaaguggugccauggaugaacuccacaacgaaauacucgagcuggaugaaaaaguggaugaucucagagcugacacuauaagcucgcaaauagaacuugcagucuugcuuuccaacgaaggaauaauaaacagugaagaugagcaucuauuggcacuugagagaaaacuaaagaaaaugcugggucccucugcuguagacauaggaaauggaugcuucgaaaccaaacacaagugcaaccagaccugcuuagacaggauagcugcuggcaccuuuaaugcaggagaauuuucucuccccacuuuugauucacugaacauuacugcugcaucuuuaaaugaugauggauuggauaaccauacuauacugcucuauuacucaacugcugcuucuaguuuggcuguaacauugaugcuagcuauuuuuauuguuuauauggucuccagagacaacguuucaugcuccaucugucuauaa

SEQ ID NO: 59535 - RNA, 1755 nt, Artificial Sequence
  derived and/or modified CDS sequence (wt) from hemagglutinin__InfluenzaB__AGX21754
augaaggcaauaauuguacuacucaugguaguaacauccaaugcagaucgaaucugcacugggauaacaucgucaaacucaccucauguggucaaaacagcuacucaaggggaggucaaugugacuggugcgauaccauugacaacaacaccagcaaaaucucauuuugcaaaucucaaaggaacaaagaccagagggaaacuaugcccaaccugucucaacugcacagauuuggauguggccuugggcggaccaauguguguggggaucacaccuucggcaaaagcuucaauacuccacgaagucagaccugucacaucuggaugcuuuccuauaaugcaugacagaacaaaaaucagacagcuacccaaucuucucagaggauaugaaaaaaucagauuaucagcccaaaacguuaucaacgcagaaaaggcaccaggaggacccuacaaacuuggaacuucaggaucuugcccuaacgcuaccaguaaaagcggauuuuucgcaacaauggcuugggcugucccaagggacgauaacaaaacagcaacgaauccacuaacaguagaaguaccacacaucugugcaaacgaagaagaccaaauuacuguuuggggguuccauucugauaacaaaacccaaaugaaaaaccucuauggagacucaaauccucagaaguucaccucaucugcuaauggaauaaccacacauuauguuucucagauuggcggcuucccggaucaaacagaagacggagggcuaccacaaaguggcagaauuguuguugauuacauggugcaaaaaccugggaaaacaggaacaauugucuaucaaagagggauuuuguugccucaaaagguguggugcgcgaguggcaggagcaaaguaauaaaaggguccuugccuuuaauuggugaagcagauugccuucacgaaaaauacgguggauuaaacaaaagcaagccuuacuacacaggagaacaugcaaaagccauaggaaauugcccaauaugggugaaaacaccuuugaagcuugccaauggaaccaaauauagaccuccugcaaaacuauuaaaggaaagggguuucuucggagcuauugcugguuucuuagaaggaggaugggagggaaugauugcagguuggcacggauacacaucucacggagcacauggaguggcaguggcagcagaucuuaagaguacgcaagaagccauaaacaagauaacaaaaaaucucaauucucugagugagcuagaaguaaagaaucuucaaagacuaaguggugccauggaugaacuccauaacgaaauacucgagcuggaugagaaaguggaugaucucagagcagauacaauaagcucacaaauagaacuugcagucuugcuuuccaacgaaggaauaauaaacagugaagaugagcaucuauuggcacuugagagaaaacuaaagaaaaugcugggucccucugcuguagacauagggaauggaugcuucgaaaccaaacacaagugcaaccagaccugccuagacaggauagcugcuggcaccuuuaaugcaggagaauuuucucuucccacuuuugauucacugaacauuacugcugcaucuuuaaacgaugauggauuggauaaccauacuauacugcucuacuacucaacugcugcuucuaguuuggcuguaacauugaugauagcuauuuuuauuguuuauaugaucuccagagacaauguuucuugcuccaucugucuauag

SEQ ID NO: 59536 - RNA, 1755 nt, Artificial Sequence
  derived and/or modified CDS sequence (wt) from hemagglutinin__InfluenzaB__AGX21776
augaaggcaauaauuguacuacucaugguaguaacauccaaugcagaucgaaucugcacugggauaacaucuucaaacucaccucauguggucaaaacagcuacucaaggggaggucaaugugacuggugugauaccacugacaacaacaccaacaaaaucuuauuuugcaaaucucaaaggaacaaggaccagagggaaacuaugcccagacugucucaacuguacagaucuggauguggccuugggcagaccaauguguguggggaucacaccuucggcaaaagcuucaauacuccacgaagucagaccuguuacauccgggugcuuuccuauaaugcacgacagaacaaaaaucagacaacuacccaaucuucucagaggauaugaaaauaucagguuaucaacccaaaacguuaucgaugcagaaaaggcaccaggaggacccuacagacuuggaaccucaggaucuugcccuaacgcuaccaguaaaagcggauuuuucgcaacaauggcuugggcugucccaaaggacaacaacaaaaaugcaacgaacccacuaacaguagaaguaccauacguuuguacagaaggggaagaccaaauuacuguuuggggguuccauucagauaacaaaacccaaaugaagaaccucuauggagacucaaauccucaaaaguucaccucaucugcuaauggaguaaccacacauuauguuucucagauuggcggcuucccagaucaaacagaagacggaggacuaccacaaagcggcagaauuguuguugauuacauggugcaaaaaccugggaaaacaggaacaauugucuaucaaagagguguuuuguugccucaaaagguguggugcgcgaguggcaggagcaaaguaauaaaaggguccuugccuuuaauuggugaagcagauugccuucaugaaaaauacgguggauuaaacaaaagcaagccuuacuacacaggagaacaugcaaaagccauaggaaauugcccaauaugggugaaaacaccuuugaagcuugccaauggaaccaaauauaggccuccugcaaaacuauuaaaggaaagggguuucuucggagcuauugcugguuuccuagaaggaggaugggaaggaaugauugcagguuggcacggauacacaucucacggagcacauggaguggcaguggcggcagaccuuaagaguacgcaagaagcuauaaacaagauaacaaaaaaucucaauucuuugagugagcuagaaguaaagaaucuucaaagacuaaguggugccauggaugaacuccacaacgaaauacucgagcuggaugaaaagguggaugaucucagagcugacacuauaagcucgcaaauagaacuugcagucuugcuuuccaacgaaggaauaauaaacagugaagaugagcaucuauuggcacuugagagaaaacuaaagaaaaugcugggucccucugcuguagacauaggaaauggaugcuucgaaaccaaacacaagugcaaccagaccugcuuagacaggauagcugcuggcaccuuuaaugcaggagaauuuucucuccccacuuuugauucacugaacaucacugcugcaucuuuaaaugaugauggauuggauaaccauacuauacugcucuauuacucaacugcugcuucuaguuuggcuguaacauugaugcuagcuauuuuuauuguuuauauggucuccagagacaacguuucaugcuccaucugucuauaa

SEQ ID NO: 59537 - RNA, 1758 nt, Artificial Sequence; identical to SEQ ID NO: 59071
  derived and/or modified CDS sequence (wt) from hemagglutinin__InfluenzaB__AGX21787

SEQ ID NO: 59538 - RNA, 1755 nt, Artificial Sequence
  derived and/or modified CDS sequence (wt) from hemagglutinin__InfluenzaB__AGX21798
augaaggcaauaauuguacuacucaugguaguaacauccaaugcagaucgaaucugcacugggauaacaucuucaaacucaccucauguggucaaaacagccacucaaggggaggucaaugugacuggugugauaccacugacaacaacaccaacaaaaucuuauuuugcaaaucucaaaggaacaaggaccagagggaaacuaugcccagacugucucaacuguacagaucuggauguggccuugggcagaccaauguguguggggaccacaccuucugcaaaagcuucaauacuccacgaagucagaccuguuacauccgggugcuuuccuauaaugcacgacagaacaaaaaucagacaacuacccaaucuucucagaggauaugaaaauaucagguuaucaacccaaaacguuaucgaugcagaaaaggcaccaggaggacccuacagacuuggaaccucagggucuugcccuaacgcuaccaguaaaagcggauuuuucgcaacaauggcuugggcugucccaaaggacaacaacaaaaaugcaacgaacccacuaacaguagaaguaccauacguuuguacagaaggggaagaccaaauuacuguuuggggguuccauucagauaacaaaacccaaaugaagaaccucuauggagacucaaauccucaaaaguucaccucaucugcuaauggaguaacuacacauuauguuucucagauuggcggcuucccagaucaaacagaagacggaggacuaccacaaagcggcagaauuguuguugauuacauggugcaaaaaccugggaaaacaggaacaauugucuaucaaagagguguuuuguugccucaaaagguguggugcgcgagugguaggagcaaaguaauaaaaggguccuugccuuuaauuggugaagcagauugccuucaugaaaaauacgguggauuaaacaaaagcaagccuuacuacacaggagaacaugcaaaagccauaggaaauugcccaauaugggugaaaacaccuuugaagcuugccaauggaaccaaauauagaccuccugcaaaacuauuaaaggaaagggguuucuucggagcuauugcugguuuccuagaaggaggaugggaaggaaugauugcagguuggcacggauacacaucucacggagcacauggaguggcaguggcggcagaccuuaagaguacgcaagaagcuauaaacaagauaacaaaaaaucucaauucuuugagugagcuagaaguaaagaaucuucaaagacuaaguggugccauggaugaacuccacaacgaaauacucgagcuggaugagaaaguggaugaucucagagcugacacuauaagcucgcaaauagaacuugcagucuugcuuuccaacgaaggaauaauaaacagugaagaugagcaucuauuggcacuugagagaaaacuaaagaaaaugcugggucccucugcuguagacauaggaaauggaugcuucgaaaccaaacacaagugcaaccagaccugcuuagacaggauagcugcuggcaccuuuaaugcaggagaauuuucucuccccacuuuugauucacugaacauuacugcugcaucuuuaaaugaugauggauuggauaaccauacuauacugcucuauuacucaacugcugcuucuaguuuggcuguaacauugaugcuagcuauuuuuauuguuuauauggucuccagagacaacguuucaugcuccaucugucuauaa

SEQ ID NO: 59539 - RNA, 1755 nt, Artificial Sequence
  derived and/or modified CDS sequence (wt) from hemagglutinin__InfluenzaB__AGX21809
augaaggcaauaauuguacuacucaugguaguaacauccaaugcagaucgaaucugcacugggauaacaucuucaaacucaccucauguggucaaaacagccacucaaggggaggucaaugugacuggugugauaccacugacaacaacaccaacaaaaucuuauuuugcaaaucucaaaggaacaaggaccagagggaaacuaugcccagacugucucaacuguacagaucuggauguggccuugggcagaccaauguguguggggaccacaccuucugcaaaagcuucaauacuccacgaagucagaccuguuacauccgggugcuuuccuauaaugcaugacagaacaaaaaucagacaacuacccaaucuucucagaggauaugaaaauaucagguuaucaacccaaaacguuaucgaugcagaaaaggcaccaggaggacccuacagacuuggaaccucagggucuugcccuaacgcuaccaguaaaagcggauuuuucgcaacaauggcuugggcugucccaaaggacaacaacaaaaaugcaacgaacccacuaacaguagaaguaccauacguuuguacagaaggggaagaccaaauuacuguuuggggguuccauucagauaacaaaacccaaaugaagaaccucuauggagacucaaauccucaaaaguucaccucaucugcuaauggaguaacuacacauuauguuucucagauuggcggcuucccagaucaaacagaagacggaggacuaccacaaagcggcagaauuguuguugauuacauggugcaaaaaccugggaaaacaggaacaauugucuaucaaagagguguuuuguugccucaaaagguguggugcgcgagugguaggagcaaaguaauaaaaggguccuugccuuuaauuggugaagcagauugccuucaugaaaaauacgguggauuaaacaaaagcaggccuuacuacacaggagaacaugcaaaagccauaggaaauugcccaauaugggugaaaacaccuuugaagcuugccaauggaaccaaauauagaccuccugcaaaacuauuaaaggaaagggguuucuucggagcuauugcugguuuccuagaaggaggaugggaaggaaugauugcagguuggcacggauacacaucucacggagcacauggaguggcaguggcggcagaccuuaagaguacgcaagaagcuauaaacaagauaacaaaaaaucucaauucuuugagugagcuagaaguaaagaaucuucaaagacuaaguggugccauggaugaacuccacaacgaaauacucgagcuggaugagaaaguggaugaucucagagcugacacuauaagcucgcaaauagaacuugcagucuugcuuuccaacgaaggaauaauaaacagugaagaugagcaucuauuggcacuugagagaaaacuaaagaaaaugcugggucccucugcuguagacauaggaaauggaugcuucgaaaccaaacacaagugcaaccagaccugcuuagacaggauagcugcuggcaccuuuaaugcaggagaauuuucucuccccacuuuugauucacugaacauuacugcugcaucuuuaaaugaugauggauuggauaaccauacuauacugcucuauuacucaacugcugcuucuaguuuggcuguaacauugaugcuagcuauuuuuauuguuuauauggucuccagagacaacguuucaugcuccaucugucuauaa

SEQ ID NO: 59540 - RNA, 1755 nt, Artificial Sequence
  derived and/or modified CDS sequence (wt) from hemagglutinin__InfluenzaB__AGX21820
augaaggcaauaauuguacuacucaugguaguaacauccaaugcagaucgaaucugcacugggauaacaucuucaaacucaccucauguggucaaaacagcuacucaaggggaggucaaugugacuggugugauaccacugacaacaacaccaacaaaaucuuauuuugcaaaucucaaaggaacaaggaccagagggaaacuaugcccagacugucucaacuguacagaucuggauguggccuugggcagaccaauguguguggggaccacaccuucugcgaaagcuucaauacuccacgaagucagaccuguuacauccgggugcuuuccuauaaugcacgacagaacaaaaaucaggcaacuacccaaucuucucagaggauaugaaaauaucagguuaucaacccaaaacguuaucgaugcagaaaaggcaccaggaggacccuacagacuuggaaccucaggaucuugcccuaacgcuaccaauaaaagcggauuuuucgcaacaauggcuugggcugucccaaaggacaacaacaaaaaugcaacgaacccacuaacaguagaaguaccauacauuuguacagaaggggaagaccaaauuacuguuuggggguuccauucagauaacaaaacccaaaugaagaaccucuauggagacucaaauccucaaaaguucaccucaucugcuaauggaguaaccacacauuauguuucucagauuggcggcuucccagaucaaacagaagacggaggacuaccacaaagcggcagaauuguuguugauuacaugaugcaaaaaccugggaaaacaggaacaauugucuaucaaagagguguuuuguugccucaaaagguguggugcgcaaguggcaggagcaaaguaauaaaaggguccuugccuuuaauuggugaagcagauugccuucaugaaaaauacgguggauugaacaaaagcaagccuuacuacacaggagaacaugcaaaagccauaggaaauugcccaauaugggugaaaacaccuuugaagcuugccaauggaaccaaauauagaccuccugcaaaacuauuaaaggaaagggguuucuucggagcuauugcugguuuccuagaaggaggaugggaaggaaugauugcagguuggcacggauacacaucucacggagcacauggaguggcaguggcggcagaccuuaagaguacacaagaagcuauaaacaagauaacaaaaaaucucaauucuuugagugagcuagaaguaaagaaucuucaaagacuaaguggugccauggaugaacuccacaacgaaauacucgagcuggaugagaaaguggaugaucucagagcugacacuauaagcucacaaauagaacuugcagucuugcuuuccaacgaaggaauaauaaacagugaagaugagcaucuauuggcacuugagagaaaacuaaagaaaaugcugggucccucugcuguagacauaggaaauggaugcuucgaaaccaaacacaagugcaaccagaccugcuuagacaggauagcugcuggcaccuuuaaugcaggagaauuuucucuccccacuuuugauucacugaacauuacugcugcaucuuuaaaugaugauggauuggauaaccauacuauacugcucuauuacucaacugcugcuucuaguuuggcuguaacauugaugcuagcuauuuuuauuguuuauauggucuccagagacaacguuucaugcuccaucugucuauaa
